United States Patent Application Publication US 2007/0054278 A1 - sequence listing, part 114

SEQ ID NO: 126908 - DNA, 201 bp, Homo sapiens
aaaaatcaatgaatccaggagctggttttttgaaaagatcaacaaaattgatagactgctagcaagactaataaagaagaaaagagagaagaatcaaacaratgcaataaaaaatgataaaggggatatcgccactgatcccacagaaatacaaacaaccatcagagaatactataaacacctctatgcaaataaactaga

SEQ ID NO: 126909 - DNA, 201 bp, Homo sapiens
tgtgcagtgtgagctggaaaggccctgcctccttgcatgttaacatctgaggtgagttacctcacctctgccccaccacctccaaagacaggcgtgggacyggctagccacaaccttatcaaaacacggtgcagcctggctgtgctctgctggctggaggcgttctgtttcctctattcatgttcagaaaaaaactgggct

SEQ ID NO: 126910 - DNA, 201 bp, Homo sapiens
ttgaaaagatcaacaaaattgatagactgctagcaagactaataaagaagaaaagagagaagaatcaaacaaatgcaataaaaaatgataaaggggatatygccactgatcccacagaaatacaaacaaccatcagagaatactataaacacctctatgcaaataaactagaaaatctagaagaaatggataaattcctgg

SEQ ID NO: 126911 - DNA, 201 bp, Homo sapiens
gaactgcttgccagctacactgtgcgccccagtcttctgtagaaaatgagaaaagccccccagtgcatgaagtgtccagattccttccggaacagtcaaaccttctctctgtcctagaggccatcccaggcctggtaagccttaacgccttggagccttggcaggtgcccttggtgaccatgtgttttcctggccccagag

SEQ ID NO: 126912 - DNA, 201 bp, Homo sapiens
ttaatagcctaccaaccaaaaaaaggccaggaccagacagattcgcagccgaattctaccagaggtacaaggaggagctggtaccattccttctgaaactwttccaatcaatagaaaaagagggaatcctccctaactcattttatgaggccagcatcatcctgataccaaagcctggcagagacacaacaaaaaaagaga

SEQ ID NO: 126913 - DNA, 201 bp, Homo sapiens
ccgcagccagagcctctgagacttgccttggctttaggacctagagcaggaacactgctctggctcaggcaagagatgagggagggtagggaaggactggmgggaagtggatgcattggagagaggagagataaaacccacaggtgaagaccgacaggatgtgagataagagagtgggagatgtcaagaattgctcctctg

SEQ ID NO: 126914 - DNA, 201 bp, Homo sapiens
caggcaggagaaaaaaataaagggtattcaattaggaaaaaaggaagtcaaattatccctgtttgcaggtgacatgattttatatttagaaaaccccatcrtctcagcccaaaatctccttaagctgataagcaacttcagcaaagtctcaggatacaaaatcagtgtgcaaatatcacaagcattcttacacaccaataa

SEQ ID NO: 126915 - DNA, 201 bp, Homo sapiens
ggctggtctcaaaaccctgggcttaagtgatcctcccaccttggccccgcaaagtgctgggattacaggcatgagctaccatacccagcctcttttttaarataaagttgtatcggaacatggccacacccggtcatttagggtaaagagaaaagacaacaagttcagatttgtgatctctgagataccaagtggggttgt

SEQ ID NO: 126916 - DNA, 201 bp, Homo sapiens
atctcagcccaaaatctccttaagctgataagcaacttcagcaaagtctcaggatacaaaatcagtgtgcaaatatcacaagcattcttacacaccaataacagacagagagccaaatcatgagtgaactcccattcacaattgcttcaaagagaataaaatacctagtaatccatcttacaagggatgtaaaggacctct

SEQ ID NO: 126917 - DNA, 201 bp, Homo sapiens
tctcagcccaaaatctccttaagctgataagcaacttcagcaaagtctcaggatacaaaatcagtgtgcaaatatcacaagcattcttacacaccaataacagacagagagccaaatcatgagtgaactcccattcacaattgcttcaaagagaataaaatacctagtaatccatcttacaagggatgtaaaggacctctt

SEQ ID NO: 126918 - DNA, 201 bp, Homo sapiens
ctcagcccaaaatctccttaagctgataagcaacttcagcaaagtctcaggatacaaaatcagtgtgcaaatatcacaagcattcttacacaccaataacagacagagagccaaatcatgagtgaactcccattcacaattgcttcaaagagaataaaatacctagtaatccatcttacaagggatgtaaaggacctcttc

SEQ ID NO: 126919 - DNA, 201 bp, Homo sapiens
aggtgtcactggaccccatgaagaatgtcacctgcgagaatgggctaccggccgtggtgagttgtgtgcctgggcaggtcttcagccctgacggaccctcragattccggaaagcgtacaagccagaggtgaggacggggcacgaggtgtggccacttggcacctggaggggatgggagggtgttgagggagtaggcagga

SEQ ID NO: 126920 - DNA, 201 bp, Homo sapiens; identical to SEQ ID NO: 21565

SEQ ID NO: 126921 - DNA, 201 bp, Homo sapiens
tgtaactgaggctgcagaaagtatagccacagagctctggggtgaaccctggaagtgaccaggtgctgctgctagtactgctgcagacattgccacttggyatttgcaatgtttagttccccctcgaacctcgggcctggccctggcccggcagcaggcccaagcccctgtgtgcagtgtgagctggaaaggccctgcctc

SEQ ID NO: 126922 - DNA, 201 bp, Homo sapiens
aggctgcagaaagtatagccacagagctctggggtgaaccctggaagtgaccaggtgctgctgctagtactgctgcagacattgccacttggtatttgcartgtttagttccccctcgaacctcgggcctggccctggcccggcagcaggcccaagcccctgtgtgcagtgtgagctggaaaggccctgcctccttgcatg

SEQ ID NO: 126923 - DNA, 201 bp, Homo sapiens
ctcactgacggctggaagcagaggggttttcctgagccaaggcaggcggtgaggtctgaccaatcctcgagcagctggtgttcccccgagtatcttctccygcccctgtgtgggcgtcatggaacatgctgtaagcttccaagtgcaggggccttgcaggaagtgtgtctggagggcagtggttcctggaattattaatag

SEQ ID NO: 126924 - DNA, 201 bp, Homo sapiens
gcaagctgggcccccaggtgtcactggaccccatgaagaatgtcacctgcgagaatgggctaccggccgtggtgagttgtgtgcctgggcaggtcttcagscctgacggaccctcaagattccggaaagcgtacaagccagaggtgaggacggggcacgaggtgtggccacttggcacctggaggggatgggagggtgttg

SEQ ID NO: 126925 - DNA, 201 bp, Homo sapiens
tttggaattcctctactgtgcggtttaaagcaaaggaatcaagttcataccaaaccaattaaaacagagcgagcgtgccttacatcatattttcccttggyttctttctttcctctggggccagctgactgcttggccatagctgggctggggcgaggttatttgacctctgcctccattaagcttaggtcatggatggtc

SEQ ID NO: 126926 - DNA, 201 bp, Homo sapiens
ttgccccagcctcatccttagtgttatttcctcgaatccccactcctccttcagagaaaaactaaaacacaacttctcccaaagcagcctcctgaccaccyacccgacaggttcctcccgttacaattcccatcatatctcctgccagctcttgttgcagtagtaattattatgtgctgaatatgtctgtctcttgttagt

SEQ ID NO: 126927 - DNA, 201 bp, Homo sapiens
gggattacaggcatgagctaccatacccagcctcttttttaaaataaagttgtatcggaacatggccacacccggtcatttagggtaaagagaaaagacarcaagttcagatttgtgatctctgagataccaagtggggttgtcaaacaggcagctggttaggtgggcctcagaccagcaggagagccatgggacaagatg

SEQ ID NO: 126928 - DNA, 201 bp, Homo sapiens
caaagagaaaagtgcccaggcaggagtcttgtgggattccaacatgtcaaggtcccgagggcaccatcctcccaaagagcagccccccactgataggctcrtggggagcagggtcagcttctgctgtggggctcagtggagtcacagggcctccccagctgcttagggtgcctggggtggggacctcactataagaccatg

SEQ ID NO: 126929 - DNA, 201 bp, Homo sapiens
aggcttcgctgggcagacatcacaagctatcacatccttgtgagaggagagatggcgagatcaccatcttaccagctccccgggggaaagcatcccagcaragaggaacagccacttccctgtcgggggccttttctttatttatcaatttatttatatttgcaatatcccatcttttccagaaggaaatgaagataatac

SEQ ID NO: 126930 - DNA, 201 bp, Homo sapiens
tcagcccaaaatctccttaagctgataagcaacttcagcaaagtctcaggatacaaaatcagtgtgcaaatatcacaagcattcttacacaccaataacagacagagagccaaatcatgagtgaactcccattcacaattgcttcaaagagaataaaatacctagtaatccatcttacaagggatgtaaaggacctcttca

SEQ ID NO: 126931 - DNA, 201 bp, Homo sapiens
aagcattcttacacaccaataacagacagagagccaaatcatgagtgaactcccattcacaattgcttcaaagagaataaaatacctagtaatccatcttrcaagggatgtaaaggacctcttcaaggagaactacaaaccactgctcaaggaaataaaagaggatacaaacaaatggaagaacattccatgctcatggat

SEQ ID NO: 126932 - DNA, 201 bp, Homo sapiens
tgatttgcatttctctgatggccagtgatggtgagcattttttcatgtgttttttggctgcataaatgtcttcttttgagaagtgtctgttcatatccttygcccactttttgatggggttgtttgtttttttcttgtaaatttgtttgagttcattgtagattctggatattagccctttgtcagatgagtaggttgcca

SEQ ID NO: 126933 - DNA, 201 bp, Homo sapiens
tgtgtccctggagcatagctgccttctgcagttgctgagtacagtttatagaaacttgtgaattaggttaagtttgttaattatgtcattcacatcttcarccccaggatttttctgtgtcttctatccgttactgacagaggtgtgtaaaaatctcccactctgattatgaatttgtctattttttccttttagttctat

SEQ ID NO: 126934 - DNA, 201 bp, Homo sapiens
ggccagtgatggtgagcattttttcatgtgttttttggctgcataaatgtcttcttttgagaagtgtctgttcatatccttcgcccactttttgatggggttgtttgtttttttcttgtaaatttgtttgagttcattgtagattctggatattagccctttgtcagatgagtaggttgccaaaattttctcccattttgt

SEQ ID NO: 126935 - DNA, 201 bp, Homo sapiens
acagaggtgtgtaaaaatctcccactctgattatgaatttgtctattttttccttttagttctatcaatatttcttttatatatattgaagctatgcacgwacgtttagaagagttacattatcctggtggattgactttcattatcgtaaactgtccctttttgtctctggtaatgtttcttgtgttaaggtcagcttga

SEQ ID NO: 126936 - DNA, 201 bp, Homo sapiens
gccagtgatggtgagcattttttcatgtgttttttggctgcataaatgtcttcttttgagaagtgtctgttcatatccttcgcccactttttgatggggttgtttgtttttttcttgtaaatttgtttgagttcattgtagattctggatattagccctttgtcagatgagtaggttgccaaaattttctcccattttgta

SEQ ID NO: 126937 - DNA, 201 bp, Homo sapiens
atttctcggctgcagaacgaggggctgggctctgcttttcatggtccactcctgctctgcacactggggttcactctgggctcaagactgatcctgggggktcctgatgtgccttgtgcagaaggaaccaactcagtctttcggggaggtggtgacccccagcccaaggctcaacccccgctaaacgccttagcttgctcc

SEQ ID NO: 126938 - DNA, 201 bp, Homo sapiens
aggctgaggcggatggatcacttgaggtcaggggtttgagaccagcctggccaacatggtgaaaccccatctctactcaaaatacaaaaattggccaggcrtggtggtacatgcctggaatcccagctactcgaggggctaaggcaggagaatcgcttgaacccaggaggcagtggttgcagtgagctgagatcgcgccac

SEQ ID NO: 126939 - DNA, 201 bp, Homo sapiens
ccagtgatggtgagcattttttcatgtgttttttggctgcataaatgtcttcttttgagaagtgtctgttcatatccttcgcccactttttgatggggttgtttgtttttttcttgtaaatttgtttgagttcattgtagattctggatattagccctttgtcagatgagtaggttgccaaaattttctcccattttgtag

SEQ ID NO: 126940 - DNA, 201 bp, Homo sapiens
cagtgatggtgagcattttttcatgtgttttttggctgcataaatgtcttcttttgagaagtgtctgttcatatccttcgcccactttttgatggggttgtttgtttttttcttgtaaatttgtttgagttcattgtagattctggatattagccctttgtcagatgagtaggttgccaaaattttctcccattttgtagg

SEQ ID NO: 126941 - DNA, 201 bp, Homo sapiens
agctactcgaggggctaaggcaggagaatcgcttgaacccaggaggcagtggttgcagtgagctgagatcgcgccactgcacactccagcctgggcaacasagcaagactccatctcaaaaaaaaaaaagaaaaagaaatgtaaagctgaattgttttgttatattcgttctgatgatctttgtcttttaattggagtatt

SEQ ID NO: 126942 - DNA, 201 bp, Homo sapiens
atggcgtgaacccaggaggcggaggttgctgtgagctgagatcacgccaccacactccagcataggcgacagagccaggctctgtctcaaaaaaaaaaaawatatatatatatatatattccacgtactggtatgtattttaaatacctctaggaagacaatgggtgtggagactgaagtctaggcccaagagtcctgaga

SEQ ID NO: 126943 - DNA, 201 bp, Homo sapiens
tctggtgacagactcgctcctcttttgtttatctgggatgtccttattttaccttcgttctcttcactgggcacagattctaggcagacttatttttttcygccctttgaaaatgttgcgctgttgaagtcttgtctccttatttgtgttgaggggaccagctgttagtctttctgctgctctttctaaggtaactcagct

SEQ ID NO: 126944 - DNA, 201 bp, Homo sapiens
actggaaaggtcatctttgtggacatggaaatcatcaaggtttataaaaggaataacatcaaagagaggagaaagaaacagatgcttgaaaaaaaaaaaactctgtcttgtgttcacggctttacgagttaagctgcttacgtgaagtggtgcttcgtttatgacatgagagacctttttacatctaaatttatttgaatt

SEQ ID NO: 126945 - DNA, 201 bp, Homo sapiens
ctggaaaggtcatctttgtggacatggaaatcatcaaggtttataaaaggaataacatcaaagagaggagaaagaaacagatgcttgaaaaaaaaaaaactctgtcttgtgttcacggctttacgagttaagctgcttacgtgaagtggtgcttcgtttatgacatgagagacctttttacatctaaatttatttgaattt

SEQ ID NO: 126946 - DNA, 201 bp, Homo sapiens
gccaccgcatctggatgtacaactgccacataggtaaggccaggccgcccccactccaggaagcaggcgggagctgccctactttctcaaggacccagagrcagcttcctaatttgggtaaagagctcggggaatgcagccagcatcacatttccacattcaggacagaagccacagacacacaggcctggatggagactg

SEQ ID NO: 126947 - DNA, 201 bp, Homo sapiens
tatctctcacacacacagcatgaagaaagatatttcttttaaggaattggctcatccaattatggggctggcaggtctgaagtctgcagagtagaccagcyggctggaagcattgatgttgcagctagagtctgaagtcagtctgtggtcagaatggcttcttccttgggaggcctcaggttttttgggtttttttttttt

SEQ ID NO: 126948 - DNA, 201 bp, Homo sapiens
ttatatatgtgtatgtatatctctcacacacacagcatgaagaaagatatttcttttaaggaattggctcatccaattatggggctggcaggtctgaagtytgcagagtagaccagccggctggaagcattgatgttgcagctagagtctgaagtcagtctgtggtcagaatggcttcttccttgggaggcctcaggtttt

SEQ ID NO: 126949 - DNA, 201 bp, Homo sapiens; identical to SEQ ID NO: 21567

SEQ ID NO: 126950 - DNA, 201 bp, Homo sapiens; identical to SEQ ID NO: 21570

SEQ ID NO: 126951 - DNA, 201 bp, Homo sapiens
gtactcagcaggaccgtgtgtctcttcagcaacccctggtgcgactgagaggcggtgcctacatcggggagggccgcgtggaggtgctcaaaaatggagartgggggaccgtctgcgacgacaagtgggacctggtgtcggccagtgtggtctgcagagagctgggctttgggagtgccaaagaggcagtcactggctccc

SEQ ID NO: 126952 - DNA, 201 bp, Homo sapiens
ctctagactcctaaaaggagcggtgagaaaaatgagaggtttagatttgttttctttcattttgcagtggcacttataaaaatcactatttgaaaatcctstagcactttataattaaaaaaaaattatggccaaatgtacatcacataaaatttaccaccttaactttttggattttttttctggagacagggtctccct

SEQ ID NO: 126953 - DNA, 201 bp, Homo sapiens
ggtagagaacagaagagcagaacgtgttgcccctagccaccccttcggctctcctgctcaggagcagagcacagcggaaggctttaggaagcagagttaamaagggccacgtggaaaggggtttctttttgtttttatttttattttttttgagagggagtctcgcactgtcacccaggctgaagtgcagtggcacaatct

SEQ ID NO: 126954 - DNA, 201 bp, Homo sapiens
cgggagacagaggttgcagtgagccgagatcataccactgcactccagcctgggtgatggagtaagactccatctcaaaaaaaaaacaaaaacaaaaaagyattgagctctggagtctcacggtagaaggctgtgtcttcttttgtccagatcacagtgacctccgccaagtgtcaggctctctctccccttagcgttctg

SEQ ID NO: 126955 - DNA, 201 bp, Homo sapiens
ggccagaggcgaagctgcaggcccttcctgaccaggtctgaagcacaggcacgaccttggggtacctgtgtgtgtcctgtgcagggcacatgttctattcsttactattcctgttctttctgctgctcccccttaatcatgcttcttaccctttggtttttctccctaccatattccatttcaaaagacgtcaaaatgcgg

SEQ ID NO: 126956 - DNA, 201 bp, Homo sapiens
taggctcactgcaaccttcgcctcccgaattcaagtgatcctcccatctcagccccccgagtagctgggattacaggtgtgcgccactaggcccagctgatttttttaattctatttttagtagagacggggttttgccacgttggccaggctgatctcaaactcctggcctcaagtgatctgcccaccttggcctcccac

SEQ ID NO: 126957 - DNA, 201 bp, Homo sapiens; identical to SEQ ID NO: 21556

SEQ ID NO: 126958 - DNA, 201 bp, Homo sapiens
acacggctttcctggcagctctgaggaggcatctactggattgtacctagaaccgccctgcttttcagcaggcagacccagaagctggttgcattggaatyggagtagtctagttaataagcactaagcctgtagagggaaaaaaaagggccctttgcagtggctcatgcctgtaatcccagccctttgggaggctgaggc

SEQ ID NO: 126959 - DNA, 201 bp, Homo sapiens
cagtctcaggggcagtcgcacggtcccaagaaaacaagatttataagataaaacttcaggctaaagagtaatttccatgactggcatccgtaacacaagaygatgtacttgcacacagagtccatctccatgacctagtgaaggctgtattatcaactggttttagtttcagatgaggaaactgagactcagccaaacaaa

SEQ ID NO: 126960 - DNA, 201 bp, Homo sapiens
ctgttttctatagtagctgcaccattttgtgttcccatcaacagtgcacaagggttccagtttccatacccttgccagcactgtcattttctgtttttttkgtttgttttgttttgttttgttttgtttttgagacggagtcttgctctgtcaccaggctggagtgcagtggtgtgatctcagctcactgcaacctctgtc

SEQ ID NO: 126961 - DNA, 201 bp, Homo sapiens
gcgtaagccagcacgcctggcctaagatgtcttttaaaacgttgcgagggggcaattccaagatggccaaataggaacagcttcagtctacgtctgccagygtgagcaacgcagaagatgggtgatttctgcatttccaactgaggtacttggttcatctcactggggctcgtaggacagtggggtcaggacagtgggtgc

SEQ ID NO: 126962 - DNA, 201 bp, Homo sapiens
tcttcctctggtgtttgtctactctgggtgtttacaccctgccagagcagaggctggcttaagacctgtgggtgggcagatcccagggtccctcactctcwcacaggcaggttttagcccatgttggtgaggcgtgagtcacaggctggagaggaattcacttcaagtcagtggtttgggatggcagggatattcatttcc

SEQ ID NO: 126963 - DNA, 201 bp, Homo sapiens
gttttctatagtagctgcaccattttgtgttcccatcaacagtgcacaagggttccagtttccatacccttgccagcactgtcattttctgttttttttgtttgttttgttttgttttgttttgtttttgagacggagtcttgctctgtcaccaggctggagtgcagtggtgtgatctcagctcactgcaacctctgtctc

SEQ ID NO: 126964 - DNA, 201 bp, Homo sapiens
atgggtagagcagtttacagatatacaaatccacagattaagatgtctttttcttttttttttttttttttttgagacggagtctcgctctgtcacgaggytggagtgcagtggcatgatctcacctcactgcaacctccgcctcctgggttcaagcaattctcctgcctcagcctcctgagtagctgggactataggcac

SEQ ID NO: 126965 - DNA, 201 bp, Homo sapiens
ggcaggtcgctcccatctctgcctctatttctcggctgcagaacgaggggctgggctctgcttttcatggtccactcctgctctgcacactggggttcacyctgggctcaagactgatcctggggggtcctgatgtgccttgtgcagaaggaaccaactcagtctttcggggaggtggtgacccccagcccaaggctcaac

SEQ ID NO: 126966 - DNA, 201 bp, Homo sapiens
gcactcaggctgtcaatgggggctggaaggtcccctcccacgcaggctcttatggttgttggcaggctgtggttccttgctagctgtagactgcagccctstgttcttctctatgtggcctcttcgtaggctgcctgagtggcctcaggacatggtggttgtcttccctcagagtgagtgaggcaaaggagagtgagagaa

SEQ ID NO: 126967 - DNA, 201 bp, Homo sapiens
ccctgtcgggggccttttctttatttatcaatttatttatatttgcaatatcccatcttttccagaaggaaatgaagataatacaaacctaaatacaattyaagatagcataaaataaaaacagatgaaagacagacaggtgctggcaaaatggtagtggcttaaaatggagccagggaggggttaattttacaaatgtgt

SEQ ID NO: 126968 - DNA, 201 bp, Homo sapiens
ttatgtgcaacatatgtggggcttaggacaggaggaattggcagctaacactcctgtcctcaaggaacatgtcagatgccacccccaagggattatgggayctgccccaaatccagaccaaggaaccttcgctgtgcttcagcctccagctgaacccagcactaatgcagaagaaaggtgacttgaaattgccctacttgg

SEQ ID NO: 126969 - DNA, 201 bp, Homo sapiens
tgcaagacaagatgtacgccttggagaaagctggagatccttccaaggcaaggagcatgggccctcacaaatctccagaaacccagagagggcaacctatggagatgtctggcttaaagggccaggtgacatccacagccttacacactctgcattttcctagaaggcctccctctggctgtcagacagatcaggctggtg

SEQ ID NO: 126970 - DNA, 201 bp, Homo sapiens
ctactaaaaatacaaattagctgggcatggtggcagacgcctgtaatcccagctacttgggaggttgaggttgaacccgggagagggaggttgcagtgagycgagatggtgccattgcactccagcctgggcaacaagagcaaaactgtctcaaaaaaaaaaaaaaaaaaaaaaaaaatatatatatatatatattccaac

SEQ ID NO: 126971 - DNA, 201 bp, Homo sapiens
ccgattctcgctcttcaggtggttccttcagcgaagagacggaaaaaaagtttgagcacttcagcgggctcttaaacaaccagctgtccccgcagtaaagmagcctgcgtggtcaactcctgtcttcaggccacaccacatcttccatgggacttccccccaacaactgagtctgaacgaatgccacgtgccctcacccag

SEQ ID NO: 126972 - DNA, 201 bp, Homo sapiens
agacactggtgccccgcaaagactcagacctgcattgacgcagcacttggtttctctcctctctgcctccttcagggcccatctggttagacaatctccaytgtactggcaacgaggcgacccttgcagcatgcacctccaatggctggggcgtcactgactgcaagcacacggaggatgtcggtgtggtgtgcagcgaca

SEQ ID NO: 126973 - DNA, 201 bp, Homo sapiens
tactgtggtccaggaatccccatggtttagagttatgtgcaatatcttaatataataaaaatggatggccacacacagctgccaaaattagagaaaaattmtctttccatgtgagacactggtgccccgcaaagactcagacctgcattgacgcagcacttggtttctctcctctctgcctccttcagggcccatctggtt

SEQ ID NO: 126974 - DNA, 201 bp, Homo sapiens
ctctgtagtcccagctactcgggaggctgaggcaggagaattgcttgaacccgggagacagaggttgcagtgagccgagatcataccactgcactccagcstgggtgatggagtaagactccatctcaaaaaaaaaacaaaaacaaaaaagcattgagctctggagtctcacggtagaaggctgtgtcttcttttgtccag

SEQ ID NO: 126975 - DNA, 201 bp, Homo sapiens
cataaacaaagatgcactgtcatcctgccatcacggagaacgcgggattgaacagcagctgcgtctcccaccaaccccttttagactcactagcatctccyagcccttgcaaagcaggacctcagggcaggcttcgctgggcagacatcacaagctatcacatccttgtgagaggagagatggcgagatcaccatcttacc

SEQ ID NO: 126976 - DNA, 201 bp, Homo sapiens
gcagtctgtagcccggattcactcacaggaccactgctactgcagtgacccagggcagactacatgactgagagtgcctccgtcatgccagttaaatgagrtcgatgacatcttccatgggtgttggcttcctccctccacctcctctgtagagcatttcctgttttcagaccctggaggtcacttagctgcccggtggtt

SEQ ID NO: 126977 - DNA, 201 bp, Homo sapiens
tagaaggctgtgtcttcttttgtccagatcacagtgacctccgccaagtgtcaggctctctctccccttagcgttctggattttccttccaagtccatgcytccctaactctaccccagggatccagccccctcctagatgcccaagggtcacgacagctcagcctgcaagaggaggaataccttcctcgccaggactcac

SEQ ID NO: 126978 - DNA, 201 bp, Homo sapiens
atgatgtagtggggagaaaagcgggagggaggggctgcagtctgtagcccggattcactcacaggaccactgctactgcagtgacccagggcagactacaygactgagagtgcctccgtcatgccagttaaatgaggtcgatgacatcttccatgggtgttggcttcctccctccacctcctctgtagagcatttcctgtt

SEQ ID NO: 126979 - DNA, 201 bp, Homo sapiens
agatggtgccattgcactccagcctgggcaacaagagcaaaactgtctcaaaaaaaaaaaaaaaaaaaaaaaaaatatatatatatatatattccaactcycagagccaaggcggagaggagcgtgatggaagatagatctcaggctcagtggaagccccacagtagatagctctaccctaagttagtggtgagctccttg

SEQ ID NO: 126980 - DNA, 201 bp, Homo sapiens
gggcaagagagatgaccgccaccccaaccacagatcgctgtctatgatgtagtggggagaaaagcgggagggaggggctgcagtctgtagcccggattcastcacaggaccactgctactgcagtgacccagggcagactacatgactgagagtgcctccgtcatgccagttaaatgaggtcgatgacatcttccatgggt

SEQ ID NO: 126981 - DNA, 201 bp, Homo sapiens
attcagtgtctgggaaaatgcactcatcccacatagtgtgtgcccagctggatattgacatcgcgcaccatgtgtaaactggcatcacatgtgtgtgagaacacacacacacacacacagagaagggatgccaaccagcatgtgtattgtgtgcttgggttctctctttgccttttctccagcccctgatggccttgactt

SEQ ID NO: 126982 - DNA, 201 bp, Homo sapiens
ttcagtgtctgggaaaatgcactcatcccacatagtgtgtgcccagctggatattgacatcgcgcaccatgtgtaaactggcatcacatgtgtgtgagaacacacacacacacacacagagaagggatgccaaccagcatgtgtattgtgtgcttgggttctctctttgccttttctccagcccctgatggccttgacttt

SEQ ID NO: 126983 - DNA, 201 bp, Homo sapiens
ttatgtccagtcactgacccttcttgggcctctggacactgtcctataaaacagaagtttgtctggatataaagaaaatcagttttaggtcaatcctcaaractttcttaaaaggaggtaagtaggagcaaataagcaaatgtgaaacactcttggctccaaacgaacagatctcttttaaacctggcaaacagagcccca

SEQ ID NO: 126984 - DNA, 201 bp, Homo sapiens
ctctaacatctccaccccagcatcctcttcggggcactgagcactgctggtcacccaacagacatggaactgcctcactccaaggcagatcatccctccawgggcagctctggacagctctgactacaggaaagttagccagtccttcctcaaaggtagtgtgccatgaccagaagaatatgattagcctactcctctgca

SEQ ID NO: 126985 - DNA, 201 bp, Homo sapiens
gagcctcttaaattgagaggctttgtttcctgcctgtggcgggtagaccagttggaaaaagcattagataaggaaagatgacaaatccagatgccctactsagtaaacctctgctccccggctgctccgcacgttgcccagtcatgtgctcacaggaagccttgtggctgggctgtgtgtcgttagatcagggaaggtttt

SEQ ID NO: 126986 - DNA, 201 bp, Homo sapiens
cagattggacaatccaggaaaatgggtagagcagtttacagatatacaaatccacagattaagatgtctttttcttttttttttttttttttttgagacgkagtctcgctctgtcacgaggctggagtgcagtggcatgatctcacctcactgcaacctccgcctcctgggttcaagcaattctcctgcctcagcctcctg

SEQ ID NO: 126987 - DNA, 201 bp, Homo sapiens
tttctggccttgtttgttagtcacaggatgagcatggctggctctctggtgacatcagaaagctttccaaaatcctcagttctgactgtcccccaggctcyaacatctccaccccagcatcctcttcggggcactgagcactgctggtcacccaacagacatggaactgcctcactccaaggcagatcatccctccaaggg

SEQ ID NO: 126988 - DNA, 201 bp, Homo sapiens
aggaacagaaattgttgaaatgcctttcctctgtcactttcttccatcaagaagtcacaggctaaagaatgttaccagcagcttattttttgttgagatgsagtttcgctcttgttgcccaggctggagtgcaatggcgtgacctcagctcactgcaacctccgcctcctgggttcaagtgattctcctgcctcagcctcc

SEQ ID NO: 126989 - DNA, 201 bp, Homo sapiens
tcagtggttctataaaggcccagaatagggctcccacctcctgggaaaaagtgaggataaagtcagaaagtttctcctctgctttgccactgtgttcattygctgattgcacttttttttttttttttttttgagatggagtctcgctctgtcacccaggctggagtacagtggcacgatcttggctgactgcaagctctg

SEQ ID NO: 126990 - DNA, 201 bp, Homo sapiens
ataggtaagcttgaggatgcagatgtgctttgatgggaatgatgagtggccaggaccctgattcccttcagagccacactactagggggtcaggctgtgcrttggtccgttggtcaggagctatcacaggaaccctccatcactttctggccttgtttgttagtcacaggatgagcatggctggctctctggtgacatcag

SEQ ID NO: 126991 - DNA, 201 bp, Homo sapiens
ttctcctgcctcagcctcctgagtagctgggattacaggtgcgtgccaccacgcccagctaatttttgtatttttagtagagccccatgttggccaggctkgtctcaaactcctgacctcaggtgaactgcccgcctcggcctcccaaagtgttgagattacaggtgcgtgccactgtgcccagtcccccagcagcctctt

SEQ ID NO: 126992 - DNA, 201 bp, Homo sapiens
accacgcccagctaatttttgtatttttagtagagccccatgttggccaggctggtctcaaactcctgacctcaggtgaactgcccgcctcggcctcccaragtgttgagattacaggtgcgtgccactgtgcccagtcccccagcagcctcttaaactaagagtttctgattggatcatcaaaaggggataattacaaca

SEQ ID NO: 126993 - DNA, 201 bp, Homo sapiens
atttttagtagagccccatgttggccaggctggtctcaaactcctgacctcaggtgaactgcccgcctcggcctcccaaagtgttgagattacaggtgcgygccactgtgcccagtcccccagcagcctcttaaactaagagtttctgattggatcatcaaaaggggataattacaacatagccagactcctggagtacag

SEQ ID NO: 126994 - DNA, 201 bp, Homo sapiens
ctaggactacaagcccataccaccacgcctggctaatttttatattttttgtagagacagggttttgccatgttgcccaggctggtctcaaactcctggamtcaagcaacccacccgccttggcctcccacagtgctgagattacaagcttaagccactccactcaacctcttaggagcattttgaggcgcttcttacaga

SEQ ID NO: 126995 - DNA, 201 bp, Homo sapiens
ttggccaggctggtctcaaactcctgacctcaggtgaactgcccgcctcggcctcccaaagtgttgagattacaggtgcgtgccactgtgcccagtccccmagcagcctcttaaactaagagtttctgattggatcatcaaaaggggataattacaacatagccagactcctggagtacagcatgcctcatactgtgtgca

SEQ ID NO: 126996 - DNA, 201 bp, Homo sapiens
aggactacaagcccataccaccacgcctggctaatttttatattttttgtagagacagggttttgccatgttgcccaggctggtctcaaactcctggactyaagcaacccacccgccttggcctcccacagtgctgagattacaagcttaagccactccactcaacctcttaggagcattttgaggcgcttcttacagatg

SEQ ID NO: 126997 - DNA, 201 bp, Homo sapiens
ggcaagtcatgtgctcttgatgtttccttcatgcaaacatttttcctcttccatgcaactcgctttttgcgtattgatttcaagaagtgtgtgtgagcagsaaggagggtacctcacccaatgggattagatacaagggcagtttagggaaggatttctggagaagggaatcccatccatggggaaagggcattccaggca

SEQ ID NO: 126998 - DNA, 201 bp, Homo sapiens
aggccagcttctgcttggaggacacagaatgtgaaggaggtatctgagcggagtggggggatgggaggcctcagagggactcgaatgcctctgcctccacratcacctggctggagcccaggcctggcactgaccctgtgtcactctgaccactgccacctttccccacctggaccttcctcagctatagtgaggcgctgg

SEQ ID NO: 126999 - DNA, 201 bp, Homo sapiens
tctggtcccctggaagtattcccagaggcaaatcgccagccaggcctctgcttgcaagcagcagttgctccagaaactgacctccaggccatctctctctygctccaggcactaccacagcatggaggtgttcacccactatgacctgctgaacctcaatggcaccaaggtggcagagggccacaaggccagcttctgctt

SEQ ID NO: 127000 - DNA, 201 bp, Homo sapiens
tcagaaaacgttgccagcaggtcctccgtcttgagcgctggttcaaagtcatagatctctaccacgtgggcaaggtccttctctccaggcagctcctccaygaaggaggatgtgtccaaatggatcttctctatctgaatctccttcttcgtcaggttgtctgtgatctaggagagatcggacccttagcaaggggagctt

SEQ ID NO: 127001 - DNA, 201 bp, Homo sapiens
tgagtggagtgaagtgctcgggaacggagctgtccctggcgcactgccgccacgacggggaggacgtggcctgcccccagggcggagtgcagtacggggcyggagttgcctgctcagaaagtgagagctcctcccctccctccccaccgggctcccgaggggaccagagtcccaccagttattcctcaagagactctgaag

SEQ ID NO: 127002 - DNA, 201 bp, Homo sapiens
caaagacttcttgcggggagcgatgcgaggacgtgcaggctaacgggtcctcctgccgccccgggcggccccgcccaaccccacctcgtacgggccgggcrcggcgcggctgctggcgcgcccggggagcgaggcgctgggtccctggatcgtcccgagcgcccgtaatcaggcgggacagagcccgtcaagtctcggtgt

SEQ ID NO: 127003 - DNA, 201 bp, Homo sapiens
ttgccagcaggtcctccgtcttgagcgctggttcaaagtcatagatctctaccacgtgggcaaggtccttctctccaggcagctcctccacgaaggaggaygtgtccaaatggatcttctctatctgaatctccttcttcgtcaggttgtctgtgatctaggagagatcggacccttagcaaggggagcttggacacgcag

SEQ ID NO: 127004 - DNA, 201 bp, Homo sapiens
ctgagttccctaaggaatccctgtcacccaacacccagccctacctccccttgcacatcccctgctctccacaccataacccttggtccccatccacccasggccacacccacctcacctccgccctcccttttcgggctcaagagcctcatcacctcctgcagcagctcactgtaatcgtcctccgagcagctgctgggg

SEQ ID NO: 127005 - DNA, 199 bp, Homo sapiens
ccagccctacctccccttgcacatcccctgctctccacaccataacccttggtccccatccacccacggccacacccacctcacctccgccctcccttttygggctcaagagcctcatcacctcctgcagcagctcactgtaatcgtcctccgagcagctgctggggccatcctcttccacctcctcttcgtcctcttc

SEQ ID NO: 127006 - DNA, 201 bp, Homo sapiens
ccctaactctaccccagggatccagccccctcctagatgcccaagggtcacgacagctcagcctgcaagaggaggaataccttcctcgccaggactcaccrtcccatcttcccagagtcctgctctgtatttcctggggggaatgggtgggtagtgctggtgggcggggggtgtgggggggctctaggctctaatccaggc

SEQ ID NO: 127007 - DNA, 201 bp, Homo sapiens
atacatatgcaatttacaattgtactttctgagcagatttggaactctcctggggcttagctgacttggtctgggtctggtctcagcacccctgctaaagyctcctagggaaggtgctcgggttgacagctctctgggcctctggttccatgtctgtaaacaagatgcttggagcacaatttctcaagttacctggcggct

SEQ ID NO: 127008 - DNA, 201 bp, Homo sapiens
cctgattgcatacatatgcaatttacaattgtactttctgagcagatttggaactctcctggggcttagctgacttggtctgggtctggtctcagcacccstgctaaagcctcctagggaaggtgctcgggttgacagctctctgggcctctggttccatgtctgtaaacaagatgcttggagcacaatttctcaagttac

SEQ ID NO: 127009 - DNA, 201 bp, Homo sapiens
agggatgaagttagcacactgtggttgacagaataattttacatcctagaaaatagattaaatgaaattacacttttcaatgtaaaaacgttgtgtttccygggaaaaaggcagatgcgtcctaaccactcctgattgcatacatatgcaatttacaattgtactttctgagcagatttggaactctcctggggcttagct

SEQ ID NO: 127010 - DNA, 201 bp, Homo sapiens
agaatgagattccacccagagccagcggtgggctgcggggaacccccattggtcacaacaaattatgccaacaaagacctctttttggaggctgggggaaraaatgcagttttgtatgcttaccttctcaccatctcactgtgccctgaacattcccactttgtggccagaaatagacgagactgaagtagactctttggc

SEQ ID NO: 127011 - DNA, 201 bp, Homo sapiens
aaggattgcaccaggtgccatttggaggggaggggaggggatggaggcgcgttgttctaggtgtcaaaagctgaagctggtataggctgatatgatgggaygtgtgccatgggcagggctggggtgagagaagggagacaccgtcgtgggaaccgaagcagggaaggtaggcacgtgccacacataaaggcttttgtatcc

SEQ ID NO: 127012 - DNA, 201 bp, Homo sapiens
ggttttccttgtaaactatactgtgtgggcttgatgtcttttgtcattctggaaaattctaggccattatttcttccattatttcctctgcacatcctttstctcctcttctttgggattccatttatgggaatgtcagaccttcctatgccctggcttctagagtgcagctcttcaggaatgcatctgagagcctggagc

SEQ ID NO: 127013 - DNA, 201 bp, Homo sapiens
agcttgcatgccattttggatttggcttctgttcaccttccccttgcctgccttttgtggacttcaatatcgccttgaaagtggcacagaaactcagaccratttggccatagattattagctctgagaaacagtgtgtctgagagagtgtgtgtgtagtgggggaggatgattaaagcctgttacccaagagtgcttgat

SEQ ID NO: 127014 - DNA, 201 bp, Homo sapiens
ggggggaatgggtgggtagtgctggtgggcggggggtgtgggggggctctaggctctaatccaggcagctgggaaggagatgtggccctagggagggatgwccgcatacgcctaagaggcaaagcgagatgcccaggacagaagccagggaaaactgggaggccatgaaaccagctgctcccctgagtgtttgcaggggaa

SEQ ID NO: 127015 - DNA, 201 bp, Homo sapiens
taggtgaccctccgtgctgtctcgatctgaaaaatgggatcatgaaacattgggatttttgtgaggctgcaagttgataggatatgagaaagtgacagttwgagatgatgtacccaccatttgttttgttggttcttccaggagacctggtattggcacggagatgtcaacagcaacaaagtggtcatgagtggagtgaag

SEQ ID NO: 127016 - DNA, 201 bp, Homo sapiens
agagtgacagagtccaagtgctatggtcaggagacctggattcccactcactctgccaccaactaactgcacagcttggataggtgaccctccgtgctgtytcgatctgaaaaatgggatcatgaaacattgggatttttgtgaggctgcaagttgataggatatgagaaagtgacagtttgagatgatgtacccaccatt

SEQ ID NO: 127017 - DNA, 201 bp, Homo sapiens
tgtgtgcacctgccattcctgacacacagccttgcagtgtttgaccacaaccttagctctacttccctgagggagagagtgacagagtccaagtgctatgstcaggagacctggattcccactcactctgccaccaactaactgcacagcttggataggtgaccctccgtgctgtctcgatctgaaaaatgggatcatgaa

SEQ ID NO: 127018 - DNA, 201 bp, Homo sapiens
cctcccacctcccgagtagcggggactacaggtatgcaccaccatacctggctcattttttaaacttatttttttgtagagatggggtctcactatgttgygcaggctggtctcaaaaccctgggcttaagtgatcctcccaccttggccccgcaaagtgctgggattacaggcatgagctaccatacccagcctcttttt

SEQ ID NO: 127019 - DNA, 201 bp, Homo sapiens
tggctcattttttaaacttatttttttgtagagatggggtctcactatgttgtgcaggctggtctcaaaaccctgggcttaagtgatcctcccaccttggscccgcaaagtgctgggattacaggcatgagctaccatacccagcctcttttttaaaataaagttgtatcggaacatggccacacccggtcatttagggta

SEQ ID NO: 127020 - DNA, 201 bp, Homo sapiens
accaccaacatatacctggaccatcattgactgaaatggcattatgcggcacgtgacaatatttccaaatcaccttcccagatggctggatcaatgtttgkttggttggttgattggttccccatttaattcaacaaatagaccatatggagcctcttctgcagttctataaatttaactactcgtttctgcatttttatt

SEQ ID NO: 127021 - DNA, 201 bp, Homo sapiens
aaaagttcagacaagtgggaggtctttgaagctgcaccatggaggaggctggaggtttttcttcaaggcaggcttctccttaggtggaggcagaaagaggrcagtgcaggaggcaggagacagcgagggcttccctagagggaggagagcgtgggcgtttggaccagatcagcccagctgtttcccagacagaaccttctg

SEQ ID NO: 127022 - DNA, 201 bp, Homo sapiens
ccatcaccgatgcatttttatgcattttataaaattccaaagaattggaagcatcatcatttatgagtttccaaggaaataggaacttggctcctgcctgmtaatattggttgatctagaagttggtttttggcctcagtaagcctcgataccagctgtctccagaactctccggcagagtcgagggccctcctttaagcc

SEQ ID NO: 127023 - DNA, 201 bp, Homo sapiens
ggaagcatcatcatttatgagtttccaaggaaataggaacttggctcctgcctgctaatattggttgatctagaagttggtttttggcctcagtaagcctsgataccagctgtctccagaactctccggcagagtcgagggccctcctttaagccccagagcacctgttgtgaccttcatctttgttactgaccatgtcat

SEQ ID NO: 127024 - DNA, 201 bp, Homo sapiens
ctttttgtggctggcttttttgtgcatgtcagagttgggggcaggcatcctgatatgtttgagattcaaccatactgtttgctatggtttgaatgtgtccrccagagttcatgtgttggaaacttaacccccagtgcatcagagctgggtgttggggtctgataagaggtgactaggtcatgacagctctgtcctcatgaa

SEQ ID NO: 127025 - DNA, 201 bp, Homo sapiens
tgggatcccctgccctgtggctcctcattccggcatccagaagggacaggcctttaaaatagctgcttacgccctctgggagcttggcctccccaggcaaygcagtgtttctgctaatattgtttatgacaagccagggcactctctaaatctccaaggagagtggaaaaacggtgccacatttcaagggagtcttcaacc

SEQ ID NO: 127026 - DNA, 201 bp, Homo sapiens
attttaagtgttcagtttcatgagtttgggacaaacacatatgctaatataaacaccaccacaatcaaggaataggccatttccatcactacagaaagctycctcatgctccttcccaggccacctcacccacctccagcctcaggccaccagtgatctgctttcagtccctgctgtttagtttagacttttctagagttt

SEQ ID NO: 127027 - DNA, 201 bp, Homo sapiens
gccaggtgtctgggaatgagatttgaatcagctttttttcccctctgcatgactgtgctaggtgaaagtctcccttttctctcagcaggagactttccatrtggagggggcaaaagggaagttaggagaagcagcaaaatgagaatattggcccagcttgtcttcagaatctgtcaccccatgttccgagcatagttcaaa

SEQ ID NO: 127028 - DNA, 201 bp, Homo sapiens
cccaaaagacggagtaaacatccaaggtgagataacatattagcagccaatgaatactcccccgtaggtctcccagctcctaacccagtgctctctgctgycttaccaaaaaacgccagggttctcaggcccctcctgcaggagagggcctccgagttcaccagactgaaccactctgtacaacaaaaggaccaaatgcca

SEQ ID NO: 127029 - DNA, 201 bp, Homo sapiens
gtgcctaggccaaatctcagcactccccctccaggaattttcatgccacgggccccatccctataatccctggacttgcttgcagtgatttcatttcctaycaagcttgcatgccattttggatttggcttctgttcaccttccccttgcctgccttttgtggacttcaatatcgccttgaaagtggcacagaaactcaga

SEQ ID NO: 127030 - DNA, 201 bp, Homo sapiens
taagtgtgttgacactgctgtgctaccatcaccatcagccatctctggtacttttgcatcttccaaaacagaaactctgtacccattgaacactaactccrctctccccctccgaccaatccctggcagcccccattctactttctgtctctgtgactatgactgaactaggtacttcatataagtggaatatattatatt

SEQ ID NO: 127031 - DNA, 201 bp, Homo sapiens
ttgtgtgcacctgccattcctgacacacagccttgcagtgtttgaccacaaccttagctctacttccctgagggagagagtgacagagtccaagtgctatrgtcaggagacctggattcccactcactctgccaccaactaactgcacagcttggataggtgaccctccgtgctgtctcgatctgaaaaatgggatcatga

SEQ ID NO: 127032 - DNA, 201 bp, Homo sapiens
gttgtgtgcacctgccattcctgacacacagccttgcagtgtttgaccacaaccttagctctacttccctgagggagagagtgacagagtccaagtgctayggtcaggagacctggattcccactcactctgccaccaactaactgcacagcttggataggtgaccctccgtgctgtctcgatctgaaaaatgggatcatg

SEQ ID NO: 127033 - DNA, 201 bp, Homo sapiens
tgctgtgattgattagcaatgtctgccctggatcaggactggggagtgggcaacctgagttgtgtgcacctgccattcctgacacacagccttgcagtgtytgaccacaaccttagctctacttccctgagggagagagtgacagagtccaagtgctatggtcaggagacctggattcccactcactctgccaccaactaa

SEQ ID NO: 127034 - DNA, 201 bp, Homo sapiens
acacacacacacacacacacacacacatcgtagacagggaggtatgatggcattctagatgcttggtggaaaacaatttggagaatgaaaagacaagccasgaacttggagaaaattttgcaaaacacattatctgataaaagacttctgtccaaaagatacaaagaacttttaaaagtcaacacccaatttttagaaatg

SEQ ID NO: 127035 - DNA, 201 bp, Homo sapiens
ggctaccggccgtggtgagttgtgtgcctgggcaggtcttcagccctgacggaccctcaagattccggaaagcgtacaagccagaggtgaggacggggcaygaggtgtggccacttggcacctggaggggatgggagggtgttgagggagtaggcaggatcccccaggagagtgaggaagggtggcctcagcggagatcac

SEQ ID NO: 127036 - DNA, 201 bp, Homo sapiens
tgtcacctgcgagaatgggctaccggccgtggtgagttgtgtgcctgggcaggtcttcagccctgacggaccctcaagattccggaaagcgtacaagccaraggtgaggacggggcacgaggtgtggccacttggcacctggaggggatgggagggtgttgagggagtaggcaggatcccccaggagagtgaggaagggtg

SEQ ID NO: 127037 - DNA, 201 bp, Homo sapiens
cccttcaagcctagggtggtcacagccccctctgagtcgccagccctagggtgtgacaccggcctttgttagttctgcagaactctgccggcatgtccgtrgtcttaaaaaactctccttaaattaagttggagtgtgttctgttccctgccaggaactctactggaaaaagcattctagagagatgacaaggcagtaggt

SEQ ID NO: 127038 - DNA, 201 bp, Homo sapiens
cagactgggtggcataaacaacagacatttctcatggttctggaggctgggaagttcaaggtcaagatgctggccaatttggttcctggttcatagacccrtcttttcactggacctttcctggcaaacagaaagagtgatttctctctctgcctcttcatagaaagccactaataaaataaaatcctgagggcccttcct

SEQ ID NO: 127039 - DNA, 201 bp, Homo sapiens
agcccaggtcagcagaaggaaccagaagtccacagacacccagacgctgaagccagacacccagtccagtgtccttcggagcctcttccaccctgcccaamcccccacggaactcagtggggcaggaagagagtgagccacactgggcctctttctctgtgcccttccttggacgcaccatgggtatgtgtgcttcaggag

SEQ ID NO: 127040 - DNA, 201 bp, Homo sapiens
ataaggtcttagttttattttaaaaatagtttgatccagtggaccccctgaaagggtcttggtaactcccagtggtccccaaccatacttctagaacaacygctggcccagagcaggaaggtaaactgtggagggggtgaacagagaagcaaagtctccagtgtcccagtgttggtcacagccagctgtggctggaaggct

SEQ ID NO: 127041 - DNA, 201 bp, Homo sapiens
gtgacagctgcaggtcaaggatgcagaatgccaagcccaggtcagcagaaggaaccagaagtccacagacacccagacgctgaagccagacacccagtccrgtgtccttcggagcctcttccaccctgcccaaccccccacggaactcagtggggcaggaagagagtgagccacactgggcctctttctctgtgcccttcc

SEQ ID NO: 127042 - DNA, 201 bp, Homo sapiens
agtcttactctgtcacccaggctggagtgcagtggtgcaatctcagctcacggcaacctccaccttccaggttcaagagattctcctgcctcagcctcccragtagctgggattacaggcatgcaccactatgcccacggaaaagcatatttctttcttttttttttttttttttgagacagagtcttgctctgttgccca

SEQ ID NO: 127043 - DNA, 201 bp, Homo sapiens
tcccttcccatgataaccgattcatctattaattggtgaatggattcatcagtttatgagggcagagcactcatgattcaaccacttcttaaaggccccayctctcaaaactgccacattggggattaaatttcaacatgaattttttggagggacacctattcaaaccacagcaggagatatgatttcccattcccaggg

SEQ ID NO: 127044 - DNA, 201 bp, Homo sapiens
caaaaaaaaaaaaaaaaaattcaccacgcactaacattcccatttacatgatctctctttctctctctctccctctctacaatcatgcacacacacacacmtactcacacacactcgttttaaataaacaatttgaaaggaaattacagatacaaaggtactttgtttatatatctcttaaatataaacacatgttttcta

SEQ ID NO: 127045 - DNA, 201 bp, Homo sapiens
ccaaagtggaactatccaaatgtttatcagctgataagtggataaataaaacatggcatatccacataatggaatactactcggcaatcaaaaaggaactrttaacacattacaacgtggatgaacctcacaaacatgattctaagtggaagaagttagacacaaaagaccacgtattgtgtgattcactttacattagat

SEQ ID NO: 127046 - DNA, 201 bp, Homo sapiens
gctggggtgcaatggcacgatctcagctcactacaacctctgcctcctgggttcaagcaattttcctgcctcagcctccggagtagctgggattacaggcrcccaccaccacacctggctaatttttgtatttttagtagaaaaggggttttgccatgttggtcaagctggtctcgaactgctgaccttgtgatccgccca

SEQ ID NO: 127047 - DNA, 201 bp, Homo sapiens
gaactatccaaatgtttatcagctgataagtggataaataaaacatggcatatccacataatggaatactactcggcaatcaaaaaggaactattaacacwttacaacgtggatgaacctcacaaacatgattctaagtggaagaagttagacacaaaagaccacgtattgtgtgattcactttacattagattttcgaaa

SEQ ID NO: 127048 - DNA, 201 bp, Homo sapiens
cagtattgaaaattaaactgttttattttcatgtgaagtgtgtcgagtcattcgattagtgcttgccttctcattgtataccttatgatatagagcaagcrtttttttctgtaccttgttaaattattgtactcctttctatgtttcgatcagcttccaacattttatcctttatactttcaatgtcatgaaatatttcca

SEQ ID NO: 127049 - DNA, 201 bp, Homo sapiens
ctctccataattcaacagtttgaatccattacaaatagctgtatcctgtgagatacaattttttttttaaatgtttgagacaaggtcttgctgtgttgccyaggctgaagtgcggtagtgcgatcacggctcactgcagcctcgaactcctgggcgcaagcgatcctcccaactcagcctcctgagtagctgggaccacag

SEQ ID NO: 127050 - DNA, 201 bp, Homo sapiens
gctgcacattttgcaattacctgtctcaattaattcaaaaacaaaaagggagagatgttgcaggctgaaagagtgagggtcgtgatcaactcagtataccrctggagggtatatgagcaaacagcaaactgttctcataaatgcagaatgttggcaaatgacaaactgcgtctgccacccttgaaggaatgctgagggcag

SEQ ID NO: 127051 - DNA, 201 bp, Homo sapiens
ttatgcagttacagttaatataccatggttgttgaaatttgaaccatgttgttgagagactggtgtctttaagctaagctaactgaaatcagagcatattrgagcagagcaaaagaaggaccgtctctacttccatttccccttcttagccattgtgctattattctcaaggagaaggagggaatcattttatttctacat

SEQ ID NO: 127052 - DNA, 201 bp, Homo sapiens
atttgaaagtacaactaggagagagatttatctatcacaacccataacatttaatggactcacctgtacagtacaaattgaaggcttaatgattttttttytttgctatactgttgcacgagaaggatgagcttcaatttgctttccatgtgccttctgttaatcagagagagcctgcctctccttatcaatgagaagttt

SEQ ID NO: 127053 - DNA, 201 bp, Homo sapiens
tttaaatggaagcatgtatatttcattgttattgatttaactatttccctcatattgaatttttaggtaatttccattttttcacttctcaagactacatycttgcatgaaaatctttgcttgactctgtttccaaacattgtggcacatgtggtggcatggcacatgcttgtagtcccagctacttgggaggctgacaca

SEQ ID NO: 127054 - DNA, 201 bp, Homo sapiens; identical to SEQ ID NO: 21634

SEQ ID NO: 127055 - DNA, 201 bp, Homo sapiens; identical to SEQ ID NO: 21636

SEQ ID NO: 127056 - DNA, 201 bp, Homo sapiens
ttgcaagtgacaggaggctttccacttctttaacagatcatgacaactggcccaagggagcaggggacctttctgttgtcaaaaagatgaaggagaccttwaaggagaaagctaagctctgagctgaggaaacaaggtgtcctccatcccccagtgccttcacatcttgaggatatgcttctgtactttttaaaagcttat

SEQ ID NO: 127057 - DNA, 201 bp, Homo sapiens
aagctaactaggggctgccagccatcagtcaatcattaacatataagaacacatcactttggcgagtctaggatattaggagttgtatgcgggagatgggrttgaagaccaaatatatgtttcacaatatcacagtatagaactttaattttacttattattttcccctcccacatgtatttcattactaataacatcaat

SEQ ID NO: 127058 - DNA, 201 bp, Homo sapiens
ggttggaaagaagaaatacctacatggttttgccatattgttttctgaaaaaaattccaagtagtgagggtggagagaatctttccacttctctcacagtrgacttcagtcactatttcttatcgcaggttgcactgttttacctttagaagggaaagaaatttcaaatagcttcttccttaggccttcagtgacatgatt

SEQ ID NO: 127059 - DNA, 201 bp, Homo sapiens
ccatcccccttgacctcccaaagtgctgtgagccaccgggcctggccataaaaatcatttttataattactttttcctctttatttttttatgccagaatyaatggctatttccacgacattgtcatatttttactagagatggggttttggcatgttggccaggctggtcttgaactcggacctccagtgatctgcccgc

SEQ ID NO: 127060 - DNA, 201 bp, Homo sapiens
agcaataatgtgaacctgtgatcagttaagcagctgaccaaatgttacctgctcctccctgctctttctacccaataaatacaaaaggccgtaggagctcraggttgctgcctttactcagtagaagcagggaaccctcttcttcttcccctggccccttcctttaaaacagtttcttttgttttaagttttcatttctgc

SEQ ID NO: 127061 - DNA, 201 bp, Homo sapiens
atggcttcttgacgtcatgtagcttgcttgacatcgtctaaggctccctcataccttgccacctttaccctagtcacctacctgatttcggtgatgctcasgtagaaagggaagttgtaggaaaaggaagttgtctatgtactgtgaggttgtggtgcacatgcacacactgttggattcatgttacaatcatgggctttg

SEQ ID NO: 127062 - DNA, 201 bp, Homo sapiens
ctcctgggttcaagcaattttcctgcctcagcctccggagtagctgggattacaggcacccaccaccacacctggctaatttttgtatttttagtagaaamggggttttgccatgttggtcaagctggtctcgaactgctgaccttgtgatccgcccacctcgacctcccaaagtgctgggattacagaagtgagccacca

SEQ ID NO: 127063 - DNA, 201 bp, Homo sapiens
tccccttttataattcccctgacatgcattctaatttcgcttccagtgttacaaattttcatttcttggtctcacttttcatgtttgttggccagtccccscttagatcatgtgtttttataaaatgtcacttgggtttcttgttgaaagaccaggaggtgacacagctatattatttgctgtctgagctcttctgaactg

SEQ ID NO: 127064 - DNA, 201 bp, Homo sapiens
aggcagtgtgctgaaacaaggtatcaggagggccaggatactttaaaaatttaatgattgagtttgcctctatcctgcagtttacagctcctggatgaaaragcatggaggatctatcgtcaatatcattgtccctactaaagctggatttccattagctgtgtaagcgtttttatatagttttctttctaagtctttgag

SEQ ID NO: 127065 - DNA, 201 bp, Homo sapiens
gtcatgtagcttgcttgacatcgtctaaggctccctcataccttgccacctttaccctagtcacctacctgatttcggtgatgctcaggtagaaagggaarttgtaggaaaaggaagttgtctatgtactgtgaggttgtggtgcacatgcacacactgttggattcatgttacaatcatgggctttgagatgcctttact

SEQ ID NO: 127066 - DNA, 201 bp, Homo sapiens
acatttgtaattttaaacttaccaggagccacataaagtaaaaagaggtgaaattaattttaataatatatttgacttagcctaatacatccaaaacatcrtcatttcaacatgtaatcaacatggaaaattgagatgattttcttcatccctcggagcatccaggattaatgagatattttacattatttttcccatact

SEQ ID NO: 127067 - DNA, 201 bp, Homo sapiens; identical to SEQ ID NO: 21635

SEQ ID NO: 127068 - DNA, 201 bp, Homo sapiens; identical to SEQ ID NO: 21637

SEQ ID NO: 127069 - DNA, 201 bp, Homo sapiens
tgaacctgggagatggaggttgcagtgagctgggatggcgcctccaggctgggtgacagagtgagactctgtctcaaaaaaaaaaaaaaaaaattcaccaygcactaacattcccatttacatgatctctctttctctctctctccctctctacaatcatgcacacacacacacatactcacacacactcgttttaaataa

SEQ ID NO: 127070 - DNA, 201 bp, Homo sapiens
aaaataatgttaattatgagtaattaaaattgtcttcgtcttttaaatattttttaatgaacatctaaattatctttggttacgactgtgtttccaacatmtggcacagtatgaactaaaaaaaaaaaatctatgtttttagttaaaaaaaaaaaaaaaagcaaaaacatttcctagtaaggccatgatgtaacctcatca

SEQ ID NO: 127071 - DNA, 201 bp, Homo sapiens
aaaaatggaaattacctaaaaatccaatataaggaaaatagttaaatcaataacaatgaaatataatgcttccgtttaaatatcttgctattggtcctggygcagtggctcacgcctgtaattccagcactttgagaggccgaggcgggcagataacctgaggtcaggagtttgagaccagcctggccaacatggtgaaac

SEQ ID NO: 127072 - DNA, 201 bp, Homo sapiens
catatatacgtatgtgtatatatatatacatacatatatacgtatgtgtatatatatatacacatatacgtatgtatatatatatatacacatatatgtawgtgtatatatatatacacatatacgtatgtatatatataacagttagtcgggtgtggtggtgggcacctgtagtctcagctacttgggaggctgaggtag

SEQ ID NO: 127073 - DNA, 201 bp, Homo sapiens
gtagtgaaaaaatggaaattacctaaaaatccaatataaggaaaatagttaaatcaataacaatgaaatataatgcttccgtttaaatatcttgctattgktcctggcgcagtggctcacgcctgtaattccagcactttgagaggccgaggcgggcagataacctgaggtcaggagtttgagaccagcctggccaacatg

SEQ ID NO: 127074 - DNA, 201 bp, Homo sapiens
catacatatatacgtatgtgtatatatatatacatacatatatacgtatgtgtatatatatatacacatatacgtatgtatatatatatatacacatataygtatgtgtatatatatatacacatatacgtatgtatatatataacagttagtcgggtgtggtggtgggcacctgtagtctcagctacttgggaggctgag

SEQ ID NO: 127075 - DNA, 201 bp, Homo sapiens
atgtatgtgtatatatatatacatacatatatacgtatgtgtatatatatatacatacatatatacgtatgtgtatatatatatacacatatacgtatgtrtatatatatatacacatatatgtatgtgtatatatatatacacatatacgtatgtatatatataacagttagtcgggtgtggtggtgggcacctgtagtc

SEQ ID NO: 127076 - DNA, 201 bp, Homo sapiens
gcatacgtatatatgtatgtgtatatatatatacatacatatatacgtatgtgtatatatatatacatacatatatacgtatgtgtatatatatatacacrtatacgtatgtatatatatatatacacatatatgtatgtgtatatatatatacacatatacgtatgtatatatataacagttagtcgggtgtggtggtgg

SEQ ID NO: 127077 - DNA, 201 bp, Homo sapiens
tgagactcttatctcaaaaaaaaatatatatatatacgcatacgtatatatgtatgtgtatatatatatacatacatatatacgtatgtgtatatatatayacatacatatatacgtatgtgtatatatatatacacatatacgtatgtatatatatatatacacatatatgtatgtgtatatatatatacacatatacgt

SEQ ID NO: 127078 - DNA, 201 bp, Homo sapiens
tagtaagtagtaacagtagtaactgtcgtagtgacggtctcaagtagtaaccatggcagtctgccacagagggacatgaaaaaaataataaaagtagaccwgtttcactggggagatgttggtcaaagagtacaaagtttcatttagacaggaggaataagttctgatgatctattgcacagcatgatggctatagttagt

SEQ ID NO: 127079 - DNA, 201 bp, Homo sapiens
gcacgcctgtagtcgcagctacttggggggctgaggcaggagaatcacttgaacccgggaggtggaggttgcagtgagctgagatcatgccactgcacccyagtctggcgacagagtgagactccgtctcaaaaaaaaaaaagaaaaagaaaaaatatgtatatattcttgagctttgttctgggatacagttaggtcact

SEQ ID NO: 127080 - DNA, 201 bp, Homo sapiens
gctggagagtagtggttcaaggctgcatagcccactgcaaccttgaactcctggggtcaagcaatcctccccgcttcagcctaccgagcagctgctactayaggcacatgacaccatgccaggctaattttttaatttttcatagagacagagtttttctctgttgcccaggctggtcttgaactcctggccttaagtgat

SEQ ID NO: 127081 - DNA, 201 bp, Homo sapiens
gcaatcctccccgcttcagcctaccgagcagctgctactataggcacatgacaccatgccaggctaattttttaatttttcatagagacagagtttttctstgttgcccaggctggtcttgaactcctggccttaagtgatcctctcaccttgacctgccaaagtgctgggattacgggtgtgagccaccactcctagccg

SEQ ID NO: 127082 - DNA, 201 bp, Homo sapiens
cagaagctgattgtcatgtttatgttttgtctttcaaaggcattctggagctgcaagagcaggtgtttacaacctcaccaaatctttagctttggaatggscctgcagtggaatacggatcaattgtgttgcccctgtaggtaaacgatctatattgaaatttattgacaaattatgctttctgattccatttgtgatgtt

SEQ ID NO: 127083 - DNA, 201 bp, Homo sapiens
actacatgtgttcactactactgggttatcattacttgtagacattttcagaactaggaaataaataaatatatgtatatggtggtatttatccagaagcrgaaggtgtgtgtagaataatttaaatggttattctcctttcttgtgctaaaatcaaatggttttatatgttttcatatatttttcatatatgttttcaag

SEQ ID NO: 127084 - DNA, 201 bp, Homo sapiens
agtttgcctctatcctgcagtttacagctcctggatgaaagagcatggaggatctatcgtcaatatcattgtccctactaaagctggatttccattagctstgtaagcgtttttatatagttttctttctaagtctttgagttttgtcttctgattgggggaagcatgttagggaacatttcttaaatcaagatcattaat

SEQ ID NO: 127085 - DNA, 201 bp, Homo sapiens
catgtgttcactactactgggttatcattacttgtagacattttcagaactaggaaataaataaatatatgtatatggtggtatttatccagaagcggaargtgtgtgtagaataatttaaatggttattctcctttcttgtgctaaaatcaaatggttttatatgttttcatatatttttcatatatgttttcaagcata

SEQ ID NO: 127086 - DNA, 201 bp, Homo sapiens
tgactgttcactgtgagagattgcaaactctgtctagagcaatcaatcaggcgaggtagcaagttaggctattaaacttttccttttagtaacttctactkttcttctttaggtgaataatttggtcaaatctaccttagatacttttggtaagatcaatttcttggtgaacaatggaggaggccagtttctttcccctgc

SEQ ID NO: 127087 - DNA, 201 bp, Homo sapiens
catgaaggcatatttatttgttctctggctgtttctcctcagggagtaatgtggtcattgcatcccgtaagttggagagattgaagtctgcggcagatgarctgcaggccaacctacctcccacaaagcaggcacgagtcattcccatacaatgcaacatccggaatgaggaggaggtaatggagatatatctgtatcatt

SEQ ID NO: 127088 - DNA, 201 bp, Homo sapiens
cacctaagaaaattcacagtaattcaataaaatcactcattatatagtccttattgaaatttccctaattgttttcccagcttttaaaatccaagatgttwtcaaattcatgtattgcatttttttatgtctctttagtttcttgtactctaaaaaaaatccatactttttatatttcataacagtgacttatagaatgtt

SEQ ID NO: 127089 - DNA, 201 bp, Homo sapiens
ttgaaggcagaaatatcaaagaaagaagtgggtggaggaagtggtggcttgtcctggggtgcttatttctctcctttccatctcactgataagctcagctrtttctcctaagtgacagaaacctaactgagtgttggattagtctagaagtatatacagtcatgtgtcacttaacacagggaaatcttctgagaaatacat

SEQ ID NO: 127090 - DNA, 201 bp, Homo sapiens
atgcaaggatgtagtcttgagtagtgaaaaaatggaaattacctaaaaatccaatataaggaaaatagttaaatcaataacaatgaaatataatgcttccrtttaaatatcttgctattggtcctggcgcagtggctcacgcctgtaattccagcactttgagaggccgaggcgggcagataacctgaggtcaggagtttg

SEQ ID NO: 127091 - DNA, 201 bp, Homo sapiens
tcaaatagcttcttccttaggccttcagtgacatgattttcttttgtaattctaacactttttatcattaaaaatatttttttcagtttttgaggaaagcrggtacatctatcttttaagaatatactgccccccgaataatgagattattcagcctttcactatggtgttttcttttaagattggcagctccaaggtgag

SEQ ID NO: 127092 - DNA, 201 bp, Homo sapiens
aaatatatatacacaattattttgttgtattggaaatggatttccttcagtgaaagaatattaaaaatctttttctttttttttttttttgagatggagtytcgctctgtcgcccaggctggagtacagtggcgcaatctcggctcactgcaacctccacctcccaggttcaagcaattctctgcctcagcctcctgagca

SEQ ID NO: 127093 - DNA, 201 bp, Homo sapiens
ttatcattaaaaatatttttttcagtttttgaggaaagcgggtacatctatcttttaagaatatactgccccccgaataatgagattattcagcctttcaytatggtgttttcttttaagattggcagctccaaggtgagaatgcctaagatggaaacttggctctacccttattagccgtatgattgtgagaaagttaat

SEQ ID NO: 127094 - DNA, 201 bp, Homo sapiens
gtaattcctttttcaggaatttaaggaaacggagtcaagcaaagattttcatgcaaggatgtagtcttgagtagtgaaaaaatggaaattacctaaaaatycaatataaggaaaatagttaaatcaataacaatgaaatataatgcttccgtttaaatatcttgctattggtcctggcgcagtggctcacgcctgtaattc

SEQ ID NO: 127095 - DNA, 201 bp, Homo sapiens
atgtaaaaagagtttgttgataaagatgacccttgtgaacattatacctcccccacactaatcttatgctttgtggcttatgttcaggtcctctgaaaagyaggtgcccagacataatgagatttgcatgacacttattgggtaccaggcccgtgaaggataagggcagggagccagagaaggcagcgatggccttcagac

SEQ ID NO: 127096 - DNA, 201 bp, Homo sapiens; identical to SEQ ID NO: 21633

SEQ ID NO: 127097 - DNA, 201 bp, Homo sapiens
aaccttcacaatgtttatgctctatgacagtaattcctttttcaggaatttaaggaaacggagtcaagcaaagattttcatgcaaggatgtagtcttgagwagtgaaaaaatggaaattacctaaaaatccaatataaggaaaatagttaaatcaataacaatgaaatataatgcttccgtttaaatatcttgctattggt

SEQ ID NO: 127098 - DNA, 201 bp, Homo sapiens
tatttgcttttacctatgcacatgtgtgtttctgtttccaggtctcctctgtggtctgcttcctactgtctcctgcagcttccttcatcactggacagtcrgtggatgtggatgggggccggagtctctatactcactcgtatgaggtaccaggtgagcagctgaggaatgagcagtcaccagctttatgctgtgtcatgt

SEQ ID NO: 127099 - DNA, 201 bp, Homo sapiens
cttgaacccgggacacggaggttgcagtgagcagagattgcgccactgcactccagcctgggtgacagtgagacgccttctcaaaaaaaaaaaaaaaaaatatatatatatatatatatatgtatgtatatatatactttatgtggtttacattatctatatttgctgtattagaaattaaaaccaaaatttaagaaatat

SEQ ID NO: 127100 - DNA, 201 bp, Homo sapiens
gtaacagattttaacttcatcaccacacagagaaaaagatactttcattgaaattctatgttgtctaaaattgatcattgaaacttcttacacatttctcwtgttcttctgtctcatgtaactttcttcattgtttttgacccctttctgaaaccacagtcctctgtctttttaaattgcagccttggtgtaggtttgtat

SEQ ID NO: 127101 - DNA, 201 bp, Homo sapiens
gagcacctgctgactaaattacctctgctcgaccccagcaggacaccctgactttttaacacactcgttagaattctaaaatgtcaggctcacagtttatrtattagttctctatggcttttgtttacgttaatagtactgacttgtttttttcctagatagctgtaaaccacatgagtggactttttaatgacagccaga

SEQ ID NO: 127102 - DNA, 201 bp, Homo sapiens
ttggtatctttaatgtaaaaacagtcagtggtttccaggaatattttagttgatagcgtcctaaaataaaggaagaaaaaggctcaagagaaatttacatrtaaagttaatgttatgaagttgctgccagatttcataatacgttagaactggtttaaaatccagcttgtcttactacttgatgaattcagattgttttcc

SEQ ID NO: 127103 - DNA, 201 bp, Homo sapiens
cattgtgcctgggagacagagtgagactctgactcaaaaaaaccacaaaaaataatatttaaaaaaagaagcttaaagttaaatgagtttaaaaggccccrtgcaatttaccattgtgtatgtgtttcagttgccagagtctgccctccgagacctcatcgtagccaccattgctgtcaagtacactcagtctaactctgt

SEQ ID NO: 127104 - DNA, 201 bp, Homo sapiens
gggccggcgggccacgtgataagcccggaaacagctccgccccctcgcttcctgagccgccacatcccggcagccctcctaccggcgcacgtggtgccgcygctgctgcctcccgctcgccctgaacccagtgcctgcagccatggctcccggccagctcggtgaggccctagcggagcggcgcggtctgcgtcctcgcct

SEQ ID NO: 127105 - DNA, 201 bp, Homo sapiens
cacgcccggcctgcccggctctgttaaacaaccagctctacatgaactcagagtgaggactcattatggggagggcaccaagccattcataagggatctcscccgtgacccaatcatctcccaccaggccccacctccaacattggggatcacattgcaaaatgagatttggagaggacacacatccaaaccatattaatt

SEQ ID NO: 127106 - DNA, 201 bp, Homo sapiens
atttattttttcttttgttgcttgtgttaatggtgtcatgtctaagaaaccattgcctaatcctcagtgatgaagatttttgtgtatattttctttctttytttttttttttttgagatggagtttcgctcttgttgcccaggctggagtgcagtggcgtgatctcggctcactgcaaccttcgcctcctgggttcaagcg

SEQ ID NO: 127107 - DNA, 201 bp, Homo sapiens
ctgtgattacaggtgcccgccaccacgcccagctaatttttttgtgtttttagtagagacggggtttctccatgttggccaggctggtcttgaactcctgwcctcaggtgatccacctgcctcggtctcccaaagtgctgggattacaagtgtgagccaccgcacccggcgtgtgtacatttcttttaagagttattttag

SEQ ID NO: 127108 - DNA, 201 bp, Homo sapiens
ttttcctgatttttaagtcaggaattaaaatggaagtacatgcacaatgactttatttaaaagcggttcataagctgatagggacatacaaaaatcaatamgtcttttgttcttcaaaggtggagtaaccttactgagagctgcagccaaaaaccacgctcgagtgacagtggtgtgtgaaccagaggactatgtggtggt

SEQ ID NO: 127109 - DNA, 201 bp, Homo sapiens
cgattctcctgcctcagcctcctgagtagctgggattacaggtgcgcaccacaatgcctggctagtttttctgtttttagtagagatggggtttcaccatrttggccaggctggtctcaaactcctgacctcaagttatctgcctatctcagcctcccagagtgctgggattacaggcgtgagccaccacacctggcctca

SEQ ID NO: 127110 - DNA, 201 bp, Homo sapiens
accatatgaaggtgcaaatcattcattcccacgttcacaagcccttcattagctgactaggccatggaaagaagggacttagaaatgattaaccaggatgycattgctgatgtcaaggagtggcattctgggaggagagggaggaagtctactgaaaggtagaaaaatgaaaaaaactataggatagctatttaataaacg

SEQ ID NO: 127111 - DNA, 201 bp, Homo sapiens
catcgtgttgtgcagccaccacatagcactgaatagtgaggagatgttgtttgctgtggacgtagaaaaccatcttgtccccactttggaaagtgctgctygtgtctcacaaaacttacgctttttgtaggcattcactcatacggcacaatatgatgaagcaatttcagattatttcaggaaacagtacagcaaaggcgt

SEQ ID NO: 127112 - DNA, 201 bp, Homo sapiens
ccacatagcactgaatagtgaggagatgttgtttgctgtggacgtagaaaaccatcttgtccccactttggaaagtgctgctcgtgtctcacaaaacttaygctttttgtaggcattcactcatacggcacaatatgatgaagcaatttcagattatttcaggaaacagtacagcaaaggcgtatctcagatgcccttgag

SEQ ID NO: 127113 - DNA, 201 bp, Homo sapiens
tcagacccctgcccagctgtacacactgcagcccaagcttcccatcacaggtaaagcccgagcgttctgtggcatggtttgctgtgcctggagagtgtgtrtttctctgtattgcatctgatgtggttcacattcagaagatgatacattccgtaatgcctcctgtagccatctgataaccatctggtttgagacgccatt

SEQ ID NO: 127114 - DNA, 201 bp, Homo sapiens
ctgctgaattgttttccagagtggcttgtaccattttgtattcccaccagcaatggatgagtgatccaatgtctctgcatccttactagcttttggtattrctactttttttttttttttaaagacatgggatagttgtgtagcaatctgtcactgattttaatttgcataatagctcatgatgttgaacatttttttgtg

SEQ ID NO: 127115 - DNA, 201 bp, Homo sapiens
cagagcagggcgccgggcagggccggcgggccacgtgataagcccggaaacagctccgccccctcgcttcctgagccgccacatcccggcagccctcctaycggcgcacgtggtgccgccgctgctgcctcccgctcgccctgaacccagtgcctgcagccatggctcccggccagctcggtgaggccctagcggagcggc

SEQ ID NO: 127116 - DNA, 201 bp, Homo sapiens
ttcccccagagtggtgtggcgtacattgcggctccctccggttctgctgctgacaaagttgtgattgaggcctgcgacgaactgggaatcatcctcgctcrtacgaaccttcggctcttccaccactgattttaccacacactgttttttggcttgcttatgtgtaggtgaacagtcacgcctgaaactttgaggataact

SEQ ID NO: 127117 - DNA, 201 bp, Homo sapiens
aattaggaatcctagctcgtaatattccagaagataatgctgacatggccagacttgatttcaatcttataaggtaaaaacctgaaattaaacttttaacrcattacgaaccaacgacaaagactatgccaaacctggtgtccctgtgttttcttactcactataaacctttactgcgtaccttctgtgtgactttgtatg

SEQ ID NO: 127118 - DNA, 201 bp, Homo sapiens
tttaagagggttgcagggacggtttttttcactgatgtatcctgaatacctagaacagtgcttaacatcgtagtaggcaactcagtaaatatttggcaagktctttaaaaactatcttaacccatgaaggacatgaaattacacatttttgttttttgggttttttttttttttttttgagacggagtctcgctcttgttg

SEQ ID NO: 127119 - DNA, 201 bp, Homo sapiens
cagcacatgatttgttctcaggtgtttattgggtgttaaagtgatgtgagtggggaagaaataaatgatgtgtgatatcaaagtgatatcaagcagaacakagagaaagagtgagtcagtaatgaagtaaacgagcttcacctacacgctgggtactgtcaggcttcagtggctctgtggttttggagggcagagaggaga

SEQ ID NO: 127120 - DNA, 201 bp, Homo sapiens
tttttaatcaatgggatttaatttgattgaagacactatgttgaaagacattccttaatctgacttgttttttgaagctaatgactttgtttaactttttwaaattaggaatcctagctcgtaatattccagaagataatgctgacatggccagacttgatttcaatcttataaggtaaaaacctgaaattaaacttttaa

SEQ ID NO: 127121 - DNA, 201 bp, Homo sapiens
caggtgtttattgggtgttaaagtgatgtgagtggggaagaaataaatgatgtgtgatatcaaagtgatatcaagcagaacagagagaaagagtgagtcartaatgaagtaaacgagcttcacctacacgctgggtactgtcaggcttcagtggctctgtggttttggagggcagagaggagatttccctcacactgctcc

SEQ ID NO: 127122 - DNA, 201 bp, Homo sapiens
actgtgtattcagatccggggagcacctgctgactaaattacctctgctcgaccccagcaggacaccctgactttttaacacactcgttagaattctaaartgtcaggctcacagtttatatattagttctctatggcttttgtttacgttaatagtactgacttgtttttttcctagatagctgtaaaccacatgagtgg

SEQ ID NO: 127123 - DNA, 201 bp, Homo sapiens
gagactctaatagctgttacaaaactggattatttcctttccttttcccccattggtattatttccagggaagaggaggtaagttacggtactgccacccrccagcctatatttttgcagcctgcagggtattttcacattatttcttatgttgtcttatcaagaatctgctgagtagaaagactgctagactaggagtta

SEQ ID NO: 127124 - DNA, 201 bp, Homo sapiens
gagaggagatttccctcacactgctcccacaaccatatttttagtgtataattatctggctaaatagatttctgtttaatttagcacaggcactagaaaaygtgctgcgtagactgggtgttaagaaaactgtcttgatttaggagttgacaggtagtaactttagctttctttgtttatgattttactattttctaacca

SEQ ID NO: 127125 - DNA, 201 bp, Homo sapiens
gtccaactctgttgtccaggctggagtgcaatggctcggtcttggctcactgcaatctccgcctcccgggttcaagcgattctcctgcctcagcctcccarggagctgggattacaggcatgcggcaccacacctggctaatctttgtattttcagtagagacggggtttcaccatgttggtcaggctggtcttgaactcc

SEQ ID NO: 127126 - DNA, 201 bp, Homo sapiens
tcaggctcacagtttatatattagttctctatggcttttgtttacgttaatagtactgacttgtttttttcctagatagctgtaaaccacatgagtggackttttaatgacagccagattcgtctttgttttatagagttgttgcctgcaatctctatccctttgtaaagacagtggcttctccaggtgtaagtgttgagg

SEQ ID NO: 127127 - DNA, 201 bp, Homo sapiens
taagagttcccatgtaaccgttaccctatttctcctaatgctagcatttgtcacactacagtacagttccacaaccatgccattgacattgataacagttraagacacagggcatttccaacactgcagtgatccctcatgttcttttgtatccgggctcacttgatatggcttccaccctctccttacccttgggcaacc

SEQ ID NO: 127128 - DNA, 201 bp, Homo sapiens
ttacaggcgtgatttatggctcttctaactttactacatttggttagagtcatgttttatcagagacatttacttgttgaatttaataacccatgaatatycctttagtatttctgaaagttcttgagaaactattaccatagtttatcatctacagcagtggtcagcaacttcagctgaatccagcctgccaccctgttt

SEQ ID NO: 127129 - DNA, 201 bp, Homo sapiens
cattaataataccttagagtaataaattcttaagaaatcctaatagcttttttaaattaaactttttaattttgagataaaagttgtagattcatatacasttgtaagagttcccatgtaaccgttaccctatttctcctaatgctagcatttgtcacactacagtacagttccacaaccatgccattgacattgataaca

SEQ ID NO: 127130 - DNA, 201 bp, Homo sapiens
cgtgatttatggctcttctaactttactacatttggttagagtcatgttttatcagagacatttacttgttgaatttaataacccatgaatatccctttartatttctgaaagttcttgagaaactattaccatagtttatcatctacagcagtggtcagcaacttcagctgaatccagcctgccaccctgtttttgtgaa

SEQ ID NO: 127131 - DNA, 201 bp, Homo sapiens
gtgcgatcttggctcgctgcaaactccacctcccgggttgaagtgattctcctgcctcggcctctcaagtagctgggactacaggcgcctgccaccacacytggctaattttgtatttttagtagagatagggtttcaccacgttggccaggctggttttgaactcctgacctcaggtgatctgcctgcctcggcctccca

SEQ ID NO: 127132 - DNA, 201 bp, Homo sapiens
tagctgggattacaggcatgcaccaccatgcccagctgtttttactgactctgtacccatttccagaatgtcagatagttgggatcatacagtatggagcmcttttaggcactttcagttaacaacatgcattaagtttcttccacatctttttgtgggttggtagcttatttcttaatgctgaataatatttcactgtgt

SEQ ID NO: 127133 - DNA, 201 bp, Homo sapiens
tggctaattttgtatttttagtagagatagggtttcaccacgttggccaggctggttttgaactcctgacctcaggtgatctgcctgcctcggcctcccaragtgctgggattacaggcatgagccacagcgcccagccaggatgtcagcttttgagagcagaagctgcatctgtttttgtttgtcgctgaatccccaggg

SEQ ID NO: 127134 - DNA, 201 bp, Homo sapiens
ctacatttggttagagtcatgttttatcagagacatttacttgttgaatttaataacccatgaatatccctttagtatttctgaaagttcttgagaaactrttaccatagtttatcatctacagcagtggtcagcaacttcagctgaatccagcctgccaccctgtttttgtgaatatagtatatataaattggtccttca

SEQ ID NO: 127135 - DNA, 201 bp, Homo sapiens
atacctaatattttcttttattgtatactatttattgcctattttttatttgcctccccagtaagctccataaggacagtgacttttttttaagagggttscagggacggtttttttcactgatgtatcctgaatacctagaacagtgcttaacatcgtagtaggcaactcagtaaatatttggcaaggtctttaaaaact

SEQ ID NO: 127136 - DNA, 201 bp, Homo sapiens
aatattttcttttattgtatactatttattgcctattttttatttgcctccccagtaagctccataaggacagtgacttttttttaagagggttgcagggmcggtttttttcactgatgtatcctgaatacctagaacagtgcttaacatcgtagtaggcaactcagtaaatatttggcaaggtctttaaaaactatctta

SEQ ID NO: 127137 - DNA, 201 bp, Homo sapiens
cttaacatcgtagtaggcaactcagtaaatatttggcaaggtctttaaaaactatcttaacccatgaaggacatgaaattacacatttttgttttttgggttttttttttttttttttgagacggagtctcgctcttgttggccaggctggagtgcagtggcgcggtttcggctcactacaacctccaccttccaggttca

SEQ ID NO: 127138 - DNA, 201 bp, Homo sapiens
ttacacatttttgttttttgggttttttttttttttttttgagacggagtctcgctcttgttggccaggctggagtgcagtggcgcggtttcggctcactrcaacctccaccttccaggttcaagcgattctcctgcctcagcctccctagtagctgggattacatgcgcccgccaccacacccagctaatttttgtgttt

SEQ ID NO: 127139 - DNA, 201 bp, Homo sapiens
ggcagatcacgaggtcaggagatcgagaccatcctggctaacacggtgaaaccccgtctctactaaaaatacaaaaaattagctgggcgtggtggggggtmcctgtagtcccaggtactcaggaggctgaggcaggagaatggtgtgaacccggcaggtggaacttgcagtgagccaagatagcgccagtgcactccagcc

SEQ ID NO: 127140 - DNA, 201 bp, Homo sapiens
gcaatggatgagtgatccaatgtctctgcatccttactagcttttggtattgctactttttttttttttttaaagacatgggatagttgtgtagcaatctstcactgattttaatttgcataatagctcatgatgttgaacatttttttgtgtacttatttgctacatgtgtatcctttttggtgaaaatgtctgtctttt

SEQ ID NO: 127141 - DNA, 201 bp, Homo sapiens
attgttactgagtttttttgttttgttttgagatgaagtctcgctctgtcacctagactggagtgcagtggcatgatcttgtctcactgcagcctccaccwcccgggttcaagtggttctcctgtctcagcttcccaagtagctgggattacaggaatgcgccaccacacctggcaaatttttatagttttagtagagatg

SEQ ID NO: 127142 - DNA, 201 bp, Homo sapiens
ctgcagcctccacctcccgggttcaagtggttctcctgtctcagcttcccaagtagctgggattacaggaatgcgccaccacacctggcaaatttttatakttttagtagagatggggttcaccatgttggtcaggctggcctggaacttctgacctcaggtggtccacccgccttggcctcccaaagtgctaggattaca

SEQ ID NO: 127143 - DNA, 201 bp, Homo sapiens
tttaaaaagttaggttcattgaggcataatttgtatacagtagaattcacctttttaaagtacagtttgaccagttttcacaaatttcacagtatgtgacygctgccacaattaaataccaaacatttctcactgtgtgacgttaagcaagatattacacttctttcctagtgtcccgagcctcagaatacaagatggagc

SEQ ID NO: 127144 - DNA, 201 bp, Homo sapiens
acgttaagcaagatattacacttctttcctagtgtcccgagcctcagaatacaagatggagctggttcatctctgaggtctctgctagccttttcttcacmtggtgtcctgagcttatctcttggcatttgttaaattatttggcccacaagtgacagggaggtgggtggatatgaattagcctatggcctggaagacccc

SEQ ID NO: 127145 - DNA, 201 bp, Homo sapiens
atttagcacaggcactagaaaatgtgctgcgtagactgggtgttaagaaaactgtcttgatttaggagttgacaggtagtaactttagctttctttgtttrtgattttactattttctaaccaggtgctgctgttggaattccactcagtgaagatgaggccaaagtctgcatggtttatgatctctataaaaccctcaca

SEQ ID NO: 127146 - DNA, 201 bp, Homo sapiens
atttccctcacactgctcccacaaccatatttttagtgtataattatctggctaaatagatttctgtttaatttagcacaggcactagaaaatgtgctgcrtagactgggtgttaagaaaactgtcttgatttaggagttgacaggtagtaactttagctttctttgtttatgattttactattttctaaccaggtgctgc

SEQ ID NO: 127147 - DNA, 201 bp, Homo sapiens
tggagggcagagaggagatttccctcacactgctcccacaaccatatttttagtgtataattatctggctaaatagatttctgtttaatttagcacaggcrctagaaaatgtgctgcgtagactgggtgttaagaaaactgtcttgatttaggagttgacaggtagtaactttagctttctttgtttatgattttactatt

SEQ ID NO: 127148 - DNA, 201 bp, Homo sapiens
gaaatatctttcagccctttggaatccactctggttggttcatgtactttgaaaaatactgaatggatattgacctagattccatggtaccatgttgagarttgtgcctagctactgagagtcttttttctaaggtttgtagatattggattcattaataatttagtgatcttgataggttttgtgcctctggatattttt

SEQ ID NO: 127149 - DNA, 201 bp, Homo sapiens; identical to SEQ ID NO: 21662

SEQ ID NO: 127150 - DNA, 201 bp, Homo sapiens
gaaacagctccgccccctcgcttcctgagccgccacatcccggcagccctcctaccggcgcacgtggtgccgccgctgctgcctcccgctcgccctgaacycagtgcctgcagccatggctcccggccagctcggtgaggccctagcggagcggcgcggtctgcgtcctcgcctgcggccccccacgctcccgccttggcg

SEQ ID NO: 127151 - DNA, 201 bp, Homo sapiens
gtactttgcaggaatcattccattgctttctggtctgtctggctgatagcctggaattttttattgagtgctaggcattgggtatgaaaaaactgtagcgrtattttgagggctggatggtgttatttttctctccagagttgacttgtccttcttttgggcagataaggtgtaggaggtatcttcattctgtcaggaatt

SEQ ID NO: 127152 - DNA, 201 bp, Homo sapiens
cagaaaaagttttctgagtgtcactctagagggtaaaattaaagaatactttcttactggttacttcagttaaatgacttattgatctgttaaaatcttaygtaaacagtaagattagctttagagtaatgaattttatatgacagtggagaattttattactttttctgtatcaggatactttgtgataaatacctcatt

SEQ ID NO: 127153 - DNA, 201 bp, Homo sapiens
tagagggtaaaattaaagaatactttcttactggttacttcagttaaatgacttattgatctgttaaaatcttatgtaaacagtaagattagctttagagwaatgaattttatatgacagtggagaattttattactttttctgtatcaggatactttgtgataaatacctcattttaattttatttacaggggctgatag

SEQ ID NO: 127154 - DNA, 201 bp, Homo sapiens
tccccaatcctgcatttaaaaaaatactattaacttggggttttgagatgagagtagctttcttaccctcaattttaactttttgctggttgtgatggctyatgcctataatttcagccacttgagaggctgatgtgggaggatggcttgaggccaagaattggaggctgtattgtggtactatgatgcctgtgaataacg

SEQ ID NO: 127155 - DNA, 201 bp, Homo sapiens
aaatgtagtgaattattgtttcagatggatatttggctgttatgatgttttttacttatatatttattttaaattctttgttgtcttcatgccaaagttaytgtttctgaagagcagaagttgtaattttaggtggtgatgcgatataatccatcttactgcatagtgggtaaaaaacagaaactacattaataaacttac

SEQ ID NO: 127156 - DNA, 201 bp, Homo sapiens
ttaaaagtactctggtcaagaaaatattgtttgtcagttttggaatggatatggtagttcttacctcatgtgatataaaaaggcttaatccacaattgctrcaaaataacatgagtttgtgtctatggatgcattgtgctaagttccaccccaaatgtgttaaatatttaagtaaatcatggtagtgtgtaggagaacagt

SEQ ID NO: 127157 - DNA, 201 bp, Homo sapiens
actttatacttctattaaaatgttctataaatttttcatggcttggtggttctgggtagctaaggttatgcaagcagcagcgttgcagtgtgacgtggagrgagtactgtgtattcagatccggggagcacctgctgactaaattacctctgctcgaccccagcaggacaccctgactttttaacacactcgttagaattc

SEQ ID NO: 127158 - DNA, 201 bp, Homo sapiens
tgcctgccaccacgtcatgcatggtgcttgctgtccgatgggtctgtattcaacattaaatacaaattgcctgacggcaggtaaccctggggtcttctccyaccacattttctacatgtgccattaataacttgatacattttgttacatttcatgttcttctgtttgaagaaggtatgtgggaacattacaatcgcaaac

SEQ ID NO: 127159 - DNA, 201 bp, Homo sapiens
cagtttcaacttaagttattctaaacaaaagagaaaatgatcgtaatttgatttttccaaagtcttggctgtctgtgtgcatcataacgatttgtgatgtytatgaaacaattctccgcattggttctgaacgtaaattttaccatgtctccagatatttaaaagtactctggtcaagaaaatattgtttgtcagttttgg

SEQ ID NO: 127160 - DNA, 201 bp, Homo sapiens
tatacttctattaaaatgttctataaatttttcatggcttggtggttctgggtagctaaggttatgcaagcagcagcgttgcagtgtgacgtggagggagkactgtgtattcagatccggggagcacctgctgactaaattacctctgctcgaccccagcaggacaccctgactttttaacacactcgttagaattctaaa

SEQ ID NO: 127161 - DNA, 201 bp, Homo sapiens
atattgcgtgcctaacaaaatgctggatggaaaacagaagcctgctaatcaaatactagatggtcttctgaagagccaattgactaccctcagttttttaytcaggagcaggaatcaacataagtgtcattgaagagtgaggctgcagaatgtaactgaagtccttaagatatcttttttttttcaactttgatacttgga

SEQ ID NO: 127162 - DNA, 201 bp, Homo sapiens
acaaaaattagccaggcatggtggtgcatgcgcctgtaattgaagcgtgagaatctcttgcacccgggaggtggaggttacagtgagccgagattgtgccrttggagattgtcccattgtgcctgggagacagagtgagactctgactcaaaaaaaccacaaaaaataatatttaaaaaaagaagcttaaagttaaatgag

SEQ ID NO: 127163 - DNA, 201 bp, Homo sapiens
gtatgtcaaagctaaaacatgacccaagatagaagcaccttgtaaaatatgattaactgtctgtgccactatgacacaatactgcaggctgggtaacttayaaaccatagacatttatttttcatagttctggaggctgtgaagtcccagatcaaggtactggtgggctgagagtctggggaggcctaccctctgcttccc

SEQ ID NO: 127164 - DNA, 201 bp, Homo sapiens
tgtttcagaaatcctgcttttgatttttaaaaggtgtggcaaagtgatacagatcagtaatattcagagaaccatttgacttctccattgggtggatggaraacccaaatcctgttgttattttgcctttttgactgagtgtatctttgttagcatatgctttttagagggggattttgagttttgcaggtttttacataa

SEQ ID NO: 127165 - DNA, 201 bp, Homo sapiens
gcgatactccgtctcaaaaaaaaaaaagtatttgttagtattttagtgtaataaatggaaacacaattggaatttggtcaatgtaattttgctaatttagsctattgaatgcatttgttattgtttaatatgtgaccaaaattgaaattacaaaaagctattcttttttttttttttttttttttgagacagcttcttgct

SEQ ID NO: 127166 - DNA, 201 bp, Homo sapiens
tgcattagtgtggtgtatttgttacaactgatgaaccgattttgattcattattaaccaaggttcatagtttaacattcattctttgtgttgtacattctrtgtatttggaaaaatgcacagtggcatgtctcccccattacagtatcatgcagaatagtttcaatgccctaaaactcccttgtgctcctccgcctcatcc

SEQ ID NO: 127167 - DNA, 201 bp, Homo sapiens
cttatctcaatttctgagagttgatattttaactgtaatttatacactggggcaaacaaaagactttcaagtaaccatagttatttttgtggtcattagttttatttatttatttatttatttattttttatagagacagggtcttgctctgttgcccaggccagagtacagtgacatgatcatagctcattgtagccttc

SEQ ID NO: 127168 - DNA, 201 bp, Homo sapiens
aaacgggctttatttttttagagtagttacaggtttacagaaaaaatacacggtgattatagggaatttccatataccccgcttccccgcagtttctcctrttaacatcatgcattagtgtggtgtatttgttacaactgatgaaccgattttgattcattattaaccaaggttcatagtttaacattcattctttgtgtt

SEQ ID NO: 127169 - DNA, 201 bp, Homo sapiens
ttatctcaatttctgagagttgatattttaactgtaatttatacactggggcaaacaaaagactttcaagtaaccatagttatttttgtggtcattagttttatttatttatttatttatttattttttatagagacagggtcttgctctgttgcccaggccagagtacagtgacatgatcatagctcattgtagccttcg

SEQ ID NO: 127170 - DNA, 201 bp, Homo sapiens
tatctcaatttctgagagttgatattttaactgtaatttatacactggggcaaacaaaagactttcaagtaaccatagttatttttgtggtcattagttttatttatttatttatttatttattttttatagagacagggtcttgctctgttgcccaggccagagtacagtgacatgatcatagctcattgtagccttcga

SEQ ID NO: 127171 - DNA, 201 bp, Homo sapiens
atctcaatttctgagagttgatattttaactgtaatttatacactggggcaaacaaaagactttcaagtaaccatagttatttttgtggtcattagttttatttatttatttatttatttattttttatagagacagggtcttgctctgttgcccaggccagagtacagtgacatgatcatagctcattgtagccttcgac

SEQ ID NO: 127172 - DNA, 201 bp, Homo sapiens
ctggtctcctgagctcaagcaatccttctgtcctaacctcacaaagtgctgggattacaggcatgagccagtgcacccagcattggtcatttattttaacttttttttttttttgacctcaaaccatcaattttattgaattgtagattattaatagtcatatgtcacatatcactgaagaggtataaatagtagttataa

SEQ ID NO: 127173 - DNA, 201 bp, Homo sapiens
gagcagggcgccgggcagggccggcgggccacgtgataagcccggaaacagctccgccccctcgcttcctgagccgccacatcccggcagccctcctacckgcgcacgtggtgccgccgctgctgcctcccgctcgccctgaacccagtgcctgcagccatggctcccggccagctcggtgaggccctagcggagcggcgc

SEQ ID NO: 127174 - DNA, 201 bp, Homo sapiens; identical to SEQ ID NO: 21666

SEQ ID NO: 127175 - DNA, 201 bp, Homo sapiens
agcttcctaaaggctaaataggaatttagccttcagtctttgtgaggactggtctgttcatggttcattcctgctcctgaatccctaggtatctactgctstacgctgaactcggcttttgtcccttagtcctctaagactgccaaaagttgtgctcagccaatttacctttagtttattgcatgcaacttggaaaatgcc

SEQ ID NO: 127176 - DNA, 201 bp, Homo sapiens
gcgcctgtaggtccagctactcgagaggctgaggtgagaggattgcatgagtctgggagatcaaggctgcagtgagccgtgtttgtgccactgcactcctmtctgggtgacagaacaagatcctatctcgaaaataaatgcatattcatatctttatctgaaagtccatgtggcagtcagtccatgtgtagatgtactacg

SEQ ID NO: 127177 - DNA, 201 bp, Homo sapiens
cagaatgatttaacacatcatttgttgtgtgagaaaaattagaaaattagaaaactgtaaaaaattagaaacatgcatataactttacttacaatgaaatmttttgtatataaattaaatgaaaaatttgagggaagtggagagattaactttaacttttaaaatttgtattttagatggaccaatcttacaaaccagatg

SEQ ID NO: 127178 - DNA, 201 bp, Homo sapiens
agaaaactgtaaaaaattagaaacatgcatataactttacttacaatgaaatcttttgtatataaattaaatgaaaaatttgagggaagtggagagattamctttaacttttaaaatttgtattttagatggaccaatcttacaaaccagatgaaaatgaagttcgaactctctttggtcttcatttaagccagaagagaa

SEQ ID NO: 127179 - DNA, 201 bp, Homo sapiens
tgccttagatattggacagcttgaaagggaatatttgccaaatgtttgtcttttgtgtttgtcagtgtttcctcagtaccctggtgggctgttaaaactawtgatgatcagaaaatatctttggaaccaggtactcaaagtagttgtgctgcttcttgccttgaataggttggcacattttggattagtgagactctaata

SEQ ID NO: 127180 - DNA, 201 bp, Homo sapiens
tctcagctacttggaggattacttaataagcccaggagttctaggctgccatggactgtaatcttgcctgtgaataatcactgtactccaggctgggcaayatagtgagatcccatctcaaaaactatatatgttgattgtagaaaattcgaaaatatggacaactataaagaaggtagtaaaaatggattgtaattctta

SEQ ID NO: 127181 - DNA, 201 bp, Homo sapiens; identical to SEQ ID NO: 21663

SEQ ID NO: 127182 - DNA, 201 bp, Homo sapiens
gagtggactttttaatgacagccagattcgtctttgttttatagagttgttgcctgcaatctctatccctttgtaaagacagtggcttctccaggtgtaastgttgaggaggctgtggagcaaattgacattggtaagtcagaaaaaccattttagaagactgagaggagaggattatttaaattttagtgagatttcatt

SEQ ID NO: 127183 - DNA, 201 bp, Homo sapiens
cctttctgggcttcacagcacagtaatcttttaaaaatggaaatcggatgatgtcagaccctacttaaagccattccttggcttttcttaagcactttgcsctgccccacaaaccctgtgctgcctgcctgcctcctatctgccccctcagcagctctccctgcgcctgctgctagcccctccgccctgtgcctccaagtg

SEQ ID NO: 127184 - DNA, 201 bp, Homo sapiens
ctcgtgtctcacaaaacttacgctttttgtaggcattcactcatacggcacaatatgatgaagcaatttcagattatttcaggaaacagtacagcaaaggygtatctcagatgcccttgagatatggaatgaacccacatcagacccctgcccagctgtacacactgcagcccaagcttcccatcacaggtaaagcccgag

SEQ ID NO: 127185 - DNA, 201 bp, Homo sapiens
caggagttcgagaccagcctggccaacatggtgaaaccccatctctactaaaaatacaaaaattagccaggcatggtggtgcatgcgcctgtaattgaagygtgagaatctcttgcacccgggaggtggaggttacagtgagccgagattgtgccgttggagattgtcccattgtgcctgggagacagagtgagactctga

SEQ ID NO: 127186 - DNA, 201 bp, Homo sapiens
gctgggattccaggcatgagccactgcgcccagcttattttcctgatttttaagtcaggaattaaaatggaagtacatgcacaatgactttatttaaaagyggttcataagctgatagggacatacaaaaatcaatacgtcttttgttcttcaaaggtggagtaaccttactgagagctgcagccaaaaaccacgctcgag

SEQ ID NO: 127187 - DNA, 201 bp, Homo sapiens
cggcacaatatgatgaagcaatttcagattatttcaggaaacagtacagcaaaggcgtatctcagatgcccttgagatatggaatgaacccacatcagacscctgcccagctgtacacactgcagcccaagcttcccatcacaggtaaagcccgagcgttctgtggcatggtttgctgtgcctggagagtgtgtgtttctc

SEQ ID NO: 127188 - DNA, 201 bp, Homo sapiens
taagcccggaaacagctccgccccctcgcttcctgagccgccacatcccggcagccctcctaccggcgcacgtggtgccgccgctgctgcctcccgctcgycctgaacccagtgcctgcagccatggctcccggccagctcggtgaggccctagcggagcggcgcggtctgcgtcctcgcctgcggccccccacgctcccg

SEQ ID NO: 127189 - DNA, 201 bp, Homo sapiens
aatgaatcaaaggccatgttagaagcttctgtgcatatgtacacactagagataagtagctttaattgtgtataaatgggatcatgtcttccataatctgrctcctgtaacttggcttttttccatgtgctaggctacaaatgtgtttttatatcaatacatatagatgctgggtgcagtagctgacatttgtaatcccaa

SEQ ID NO: 127190 - DNA, 201 bp, Homo sapiens
tgtacaaatcagtggttcacagaagttgtgcaaccattactgtgttagtctgttctgcattgctataaaggaatactagaagctgggtaatttatgaaaayaggtttattttggctcgtgattctatagacagtacaagaagtgtggtgccagcatcaacttctggtgagggcctcaggaagtttataatcacagtggaaa

SEQ ID NO: 127191 - DNA, 201 bp, Homo sapiens
cttagacaccatccacaagtgctttcgatgaagtttaaaacaggagtgaagagagcagaaatctccaatgccatcgatcaatatgtgactggaaccattgrcgaggtgaaagacttggcattgggttctcggctgtgttaatattcagttcatccctttatgtgtaacagattttaacttcatcaccacacagagaaaaag

SEQ ID NO: 127192 - DNA, 201 bp, Homo sapiens
tgttcctcaggttatcggcattggagcaggacagcagtctcgtatacactgcactcgccttgcaggagataaggcaaactattggtggcttagacaccatycacaagtgctttcgatgaagtttaaaacaggagtgaagagagcagaaatctccaatgccatcgatcaatatgtgactggaaccattggcgaggtgaaaga

SEQ ID NO: 127193 - DNA, 201 bp, Homo sapiens
caggctgcgcacggcttgttggggcaacagcaagaaatgatgttgatagagtacatctaggcaggggctggggagaaggccttcacaggttgtaggtcacraggtctcagtaaggattttgatttctattttaatttattttatttctttgcatttcatttttttgaggtaaggtctcactctgtcatccaggctggcatg

SEQ ID NO: 127194 - DNA, 201 bp, Homo sapiens
cctttttgtcttattattattattctttattatttatttatttgtttgtttgtttgagatggagtcttgctctgtcacccaggctggagtgcagtggcacratctcggctcactgcaagctccatctcctgggttcacgccattctcctgccttagcctcctgagtagctgggactacaggtgcccgctgccaatcccaga

SEQ ID NO: 127195 - DNA, 201 bp, Homo sapiens
tctaagaattatgcaagctagcaacattcagtctcctggcatgtcaatcatcaaaatgccaaaacacatgctgctcactgataaaattcagtgtttaaatwgaagactaaaaacatttatacacaatttacacatctctttctaataaaggaagtatatcttagtcctgtccttcttgagtgggtaaacaactctttctta

SEQ ID NO: 127196 - DNA, 201 bp, Homo sapiens
attactagtccataatgatgtccacaattcactaagcttggcacgtacctctatggggtatgcacatggttatttttataatgcctttgtgttccatgaakttttgccttattcagatagaaaaaggcaacttttttttctatctgaataatgaagttcactggttaattcattagtgaaagaagattttttaaagtttgt

SEQ ID NO: 127197 - DNA, 201 bp, Homo sapiens
ttgaaagaagctaggagggagtcatataacagaggatagagaaatgcccatttaaataatttaagcagattgcccttgcttattccacaccacccaactgcttttaatttttaccacttggaaataggtaatgctggttgtgtacttagaaagccccaattcagcaagtgaagagataagtcttcccagataaaatagtga

SEQ ID NO: 127198 - DNA, 201 bp, Homo sapiens
atcctgattctactaccttctacttgggtaaccttcaggaaattatttactctcactgtgcttcactctcctttcttctgggatagttataataataaaartgttttcttcatagttttgttgtgagttcctacatgtaaaattatttgaatagtgcctgacacatattaaataaatactacttataaatatgaaaagata

SEQ ID NO: 127199 - DNA, 201 bp, Homo sapiens
cagatagttcatatggttccttccttcattcattccttctttccttttttccttccatccttcctttctttcatctcctcctccttctttctctctctcckttcctcccatcccctcccttttctcctttccttcttcttatttttaatataccctttccccatatctcaacccccaattattagaaataccacatcctca

SEQ ID NO: 127200 - DNA, 201 bp, Homo sapiens
gaacaagaggccaaataccagaagatctataaaagaagaaaatgatcagaatccggacagacttcaatgaagtgctattcaaaggttcatcattaactaasatagcacaactaagtgaatctgatcctacatcagaggctgtctcttcactctcttttgtgtgtgtcccacccccacctgagaagttcatttttttctgta

SEQ ID NO: 127201 - DNA, 201 bp, Homo sapiens
ataagtgatactaaagataagagtaatctcatatcttgagaaatactcaattttattccttctggctataaatggaaaaaaaaatgaagcacaatccagtyatgaatactggtctgggccagcagaggtctgggctatgtcagtgtcagatctaaagtggtaactggagagacaaagctggtgcatcttgccaaaagtgaa

SEQ ID NO: 127202 - DNA, 201 bp, Homo sapiens
ttatatcaactcataattatatcaactcaaattttactatttatatagtaaaataaaactgaaatttaaaaactaaaataaaacatatatttgacatgatyatcaagacaaaaactgatgctaagtaaaagatacacatctctggtaagattgagcagaaaggaaaaggaaaagcaaaataaacaatattaagaatgaaaa

SEQ ID NO: 127203 - DNA, 201 bp, Homo sapiens
tctgtagagcaggggcaaaataccaccagtatctttgcatagcaagaatgacctttactccagttcccaacgagttcctcatctccatatgacaccaccgmagcctggactttactgtccatatcactattcagcattttggccaaagccatttaagtctctaggaagtctcaaactttcccacatcttactgtcttctga

SEQ ID NO: 127204 - DNA, 201 bp, Homo sapiens
tcataattatatcaactcaaattttactatttatatagtaaaataaaactgaaatttaaaaactaaaataaaacatatatttgacatgatcatcaagacaraaactgatgctaagtaaaagatacacatctctggtaagattgagcagaaaggaaaaggaaaagcaaaataaacaatattaagaatgaaaaagcgatgcaa

SEQ ID NO: 127205 - DNA, 201 bp, Homo sapiens
tgtcaagatttaaggaaatataggaagactattttgggctgggatataaaggaggaaatattaatagtgattattaagatatctttacacaatgttaaggrctgcaagttcacttgatagacagccttgctggtaatctgggaattacctgagggctttcaagtggctattgaattaatttatattgctttgtgaatataa

SEQ ID NO: 127206 - DNA, 201 bp, Homo sapiens
acgtgactgggcactaacaaatttgctgagggcccagacagaacaaaaagcagaggaaagaagaattcactctctctctctcccttctggagctgagacawtcagcttctcctgcttttggacatcagaactccaggatctccagccttcagactccagggcttgcgccccttccctctctaccttcagccttggaccgag

SEQ ID NO: 127207 - DNA, 201 bp, Homo sapiens
cttatgcaaatttatacagctagcttgaatttctacccccaaaatggggttttcttttctatcacattatcaggctgcaaatttttcaaacttttatactmtacttcctcttgcatgctttgccacctagaaatttcttcctccagataccctaaattatctctcttaagttcaaagttttacagatctgtagagcagggg

SEQ ID NO: 127208 - DNA, 201 bp, Homo sapiens
cattggtgacatagcaaactatttttatccttcctctatcgcattgattagcatctgaataaattgaaaaataaatgtgagacttaaagcagtttaagtartgttaggtatgaacttcagatttcagtgggctaagctgttactggagaaatgaggaaagttatgctttggtaaaaatataattgtagataatatcttctc

SEQ ID NO: 127209 - DNA, 201 bp, Homo sapiens
ttttgctttttatcttcaaagatatattatttatttgtaaggtcttatgattttctaactatcgaataaggatagtttcactttgtttaatgttttactayaggatgttaatagttaaggtaagtaggcataatttttttaatgatttcaaagagatatccttaagtacttctttttttgactcctaagtatagaagccca

SEQ ID NO: 127210 - DNA, 201 bp, Homo sapiens
aaatctcctgctggagctctccaccctttttccatctggattgattgttctttagtctcagcaagcagtgatcattctgtagattccctacagctctttgwtggctggattattgttttctgagttctctttctgggttttctctcttgcttttttggagcatatcctacaataacgtctgaaagaacacatgaaaataca

SEQ ID NO: 127211 - DNA, 201 bp, Homo sapiens
tcctggagggattacaaagtgttaatttacagactaacctaaagtgtttttgttttgcatgtttgtatagtatactttgctaaaattacttgctaaattastagactctcaagtaaataataaattttgctttttatcttcaaagatatattatttatttgtaaggtcttatgattttctaactatcgaataaggatagtt

SEQ ID NO: 127212 - DNA, 201 bp, Homo sapiens
atttgaggccatgaaatagcttggcttgcccaagaggaaagtataagaaaagaaaaaaagacagtaatattgaaaaacaaaacaatcctcctagaaataayaatacttaaggaatgagtagaagatggtcctcgtagtagtctgaagatcagagatatactagaagaccatgcaaagacgggtgagttaaccaaaaatacc

SEQ ID NO: 127213 - DNA, 201 bp, Homo sapiens
tttggaaatcaaccatgtacaggtcatatttgaggccatgaaatagcttggcttgcccaagaggaaagtataagaaaagaaaaaaagacagtaatattgaraaacaaaacaatcctcctagaaataataatacttaaggaatgagtagaagatggtcctcgtagtagtctgaagatcagagatatactagaagaccatgca

SEQ ID NO: 127214 - DNA, 201 bp, Homo sapiens
tttagtctaacattcaaagcaaatacacaaaaagcatattattctgttcacttcagaggactttatgtatctatagccatttatttatttatttatttatwatttcaataggttttggggaacagatggtgtttggttacatggatatgttctttagtggtggtttctgagatcttgttgcatccatcacctgagtagtgt

SEQ ID NO: 127215 - DNA, 201 bp, Homo sapiens
gactaaacattgctgtggactaaataatagtgttgctattccgatcacgattttaccttaataattaggcattagctagattgaagactttttttttttttcctggagctggactgagaaaatgtcctcagcaagatatcaagtgtctttcaagaactatttaaagctaaaggaatatcttgtggctcccagttaccagac

SEQ ID NO: 127216 - DNA, 201 bp, Homo sapiens
cgttacccatgatacattgttttttctcatcctaacatttacatcactagatattggaacaaaatcaaaagtcatttgtttttgatattatttgtttttttaataaatgctaatactttatgggagataggaattcttttccactccatgaaactttttattagtactcaacatcattccagaaaactgaccgaaaaacaa

SEQ ID NO: 127217 - DNA, 201 bp, Homo sapiens
gcaacaatcaaaccagaagaaagaaaagtgggtattagagaaaagcaagagctgaaataagcaagttgaagtataagagaataagagaaactctgaaagtrccagacaaaatttggccagactgtcatatgctatcccagctagattttgttttatgttgttccatgtgccacatacatctagtttctgacattatcatct

SEQ ID NO: 127218 - DNA, 201 bp, Homo sapiens
cacctgtcttcatgtattaaataagatgaagtaaaaatgtaacctggtgtgaatgctaatgtcacattaataatgccattagttatattctctccccaccrtcatcttgaatgtctcagtgacacaataacatgggctccatttagtgctttaaaaattaaattaactcccatccttttttgaaaatatctctctaaaaag

SEQ ID NO: 127219 - DNA, 201 bp, Homo sapiens
caaaccaagaggtgagaattgaaaagcaaaggcaaataatgctggattaaaatgactggtggaaatgtcagagcaggagctaaagaaccagcaacaatcaraccagaagaaagaaaagtgggtattagagaaaagcaagagctgaaataagcaagttgaagtataagagaataagagaaactctgaaagtaccagacaaaa

SEQ ID NO: 127220 - DNA, 201 bp, Homo sapiens
ctgagtaggaaggatctcttgagcccaggagttcaagatcagcctgcgcaacatggtgaaacatctccacaaaaaaatacaaatagccaccgggtgtggtrgctcatgcctgtaattccagcactttgggaggccgaggcgggcggatcacaaggtcaggagatcgagaccatcttggctaacacggtgaaaccccgtctc

SEQ ID NO: 127221 - DNA, 201 bp, Homo sapiens
cccagctaatttttttttaatttttttttaaattttagtagagacggggtttcaccatgttagctaggatggtctcgatctcctgacctcgtgatccgccygcctcggcctcccaaagtgatgggattacaggcgtgaaccaccgtgcctgggcaagaccacctttttttttttttttttttttttttctgtactaagact

SEQ ID NO: 127222 - DNA, 201 bp, Homo sapiens
cacgcccagctaatttttttttaatttttttttaaattttagtagagacggggtttcaccatgttagctaggatggtctcgatctcctgacctcgtgatcygcctgcctcggcctcccaaagtgatgggattacaggcgtgaaccaccgtgcctgggcaagaccacctttttttttttttttttttttttttctgtactaa

SEQ ID NO: 127223 - DNA, 201 bp, Homo sapiens
ggactacaggcgtccgccaccacgcccagctaatttttttttaatttttttttaaattttagtagagacggggtttcaccatgttagctaggatggtctcratctcctgacctcgtgatccgcctgcctcggcctcccaaagtgatgggattacaggcgtgaaccaccgtgcctgggcaagaccacctttttttttttttt

SEQ ID NO: 127224 - DNA, 201 bp, Homo sapiens
tatttttactgtaccttttctatgtttagatatacaaataccatcgtgttaaaatttcctaaagcattcagtatagtaacatgctataagtttgtagcctrgaaacaatagcctaagtgtgtagcaggcaataccatctaggtttgtgtaagtccactctctgatgtttgcacaacaatgaaatcacctaacatcacattt

SEQ ID NO: 127225 - DNA, 201 bp, Homo sapiens
acttgcctaggatcagcagtttgtaaaggatggagcatctacatagaacaatcttacttcattcttaatcttaacttgtaccacatcaagaagtctacacratatggaaatattcttatttgttaaattatttgttttcaatttccagaaataatcaagctctttctcttaatttaaataaaattctggcaaattttatat

SEQ ID NO: 127226 - DNA, 201 bp, Homo sapiens
tattttcccttgttgaatttctatttaggacattaaacaatctgttgatatatctacagtcaccatttctgcctcctgttaatcccgatgagtctcctctygttatggcctaaaccttttatggaaaaatattattgaagggtagtgttttttctgttattgttctaatacagaaataagagaattacaattattatttgt

SEQ ID NO: 127227 - DNA, 201 bp, Homo sapiens
tcccttgttgaatttctatttaggacattaaacaatctgttgatatatctacagtcaccatttctgcctcctgttaatcccgatgagtctcctcttgttayggcctaaaccttttatggaaaaatattattgaagggtagtgttttttctgttattgttctaatacagaaataagagaattacaattattatttgtagtaa

SEQ ID NO: 127228 - DNA, 201 bp, Homo sapiens
ttcagttatttccagactctctgctcagttcactcccccaccatcccgacatccctaggttcatcctggtcaggtcagtgagaactggatgccaagctgtrcctgcagtcaccagagcctcccacagcctctgggcaggcatggttatgtctataggggcaccatcacaaccagcaactatggacatggaggcaagtatca

SEQ ID NO: 127229 - DNA, 201 bp, Homo sapiens
agtgaacctaaccatcttacaaatgtaatatataaacttactgaaggtgatgcagtcaaaggatctagcctatattttggaaaacagtattttgaaaggamaaaatctgcaaagaatgaggctaactctaaaaagaactatacatagacattgtattttagttgatttttttcaaaggagtgcaggttagcaattatgaaa

SEQ ID NO: 127230 - DNA, 201 bp, Homo sapiens
aatatatgaaggacattgatgaaaaatgttggcagtagaaaactacccaagtgtaaattattttttttgttttgtttgtttgtttgagacggagtctcgcyctgtcgcccaggctggagtgcagtggtgtgatctcggctcaccgcaatctccgctttccaggttcatgccattctcctgcctcagcctcccgagtagctg

SEQ ID NO: 127231 - DNA, 201 bp, Homo sapiens
ttgatggatgaaaattgtataaataagatatacagcatgcttttgatatacatatacatagtaaaataattactataataaagttaattggtggatccatyttaacttgattgcactggcaaatgatgtatttcccaataaggtcccattcacaggtaccaggggttaagacttcaacatgtcttttaggggtgccataat

SEQ ID NO: 127232 - DNA, 201 bp, Homo sapiens
ggccatgagttcacttttgagacacattttgctacaatacagtcatcttgtcttagagttatatgtgtaaacagccttaagcctataactttacttataakcacatatgattcattggatttgaagttcaagcttcttaattttctttttttaatcagctttttcaggttgaaaaatcttaagctccagatgtagttgagt

SEQ ID NO: 127233 - DNA, 201 bp, Homo sapiens
acaccatttcttaaaattatcaaaaagtgtcctcaaaggaattattacttggaatttaacacacacacacaccaacacacacacacacacacacacacacatatataatatttaaaatgctgttctaggctccaaagttacaacataaataaaacagtcaatgtcctcaaaaatctcacaatctaatgagaaaacagaaat

SEQ ID NO: 127234 - DNA, 201 bp, Homo sapiens
cacaccatttcttaaaattatcaaaaagtgtcctcaaaggaattattacttggaatttaacacacacacacaccaacacacacacacacacacacacacacatatataatatttaaaatgctgttctaggctccaaagttacaacataaataaaacagtcaatgtcctcaaaaatctcacaatctaatgagaaaacagaaa

SEQ ID NO: 127235 - DNA, 201 bp, Homo sapiens
gtagaggattctagggtcaggctatttgtctaagttattgcctattcccagcatgtgtctgacatactgacacttaaaaaaagaaaacaaagaaaaaaaaataagacttgcagattgaataaatggatggaatgaatagttattttagttgcttcttagatcttctctttccctaaacacctccaattttgtcaactactt

SEQ ID NO: 127236 - DNA, 201 bp, Homo sapiens
gttatcagaccttgtcacagtatctcagtgcttatgttcaagtaacctttcttttacttaataatggccccaaagcacaaggatgctggctatttggatayggcaaagagaacacataaagcactttctttaatgaaaaagtgaaagttctgtactaaataaggaaatttaaaaaatcgtatgctgaggttgcaacctatg

SEQ ID NO: 127237 - DNA, 201 bp, Homo sapiens
caccatgttggccaggctgttctcaaactcctaacctcaagtgatctgcctgcctgggcctcccaaagtgctgcgattacaggcgtgagccatggcacctrgccagcatacttaacctttacagaggcatttttagctggacatttacagcatttaaaggatggaattcaattaataaaaaagactttttataacattgaa

SEQ ID NO: 127238 - DNA, 201 bp, Homo sapiens
tctgcccctgtgtctttgcagggtacagatccctcctggctgttttcatgctctggtgttgagtgcctgcagcttttccagccacatggtgcaagctgttsgtatatctattattctgcagtctggaggacggtggcctccttctcacagctccactaggcagtgccccagtggggacactctgtgtgggggttctcaccc

SEQ ID NO: 127239 - DNA, 201 bp, Homo sapiens
tttcagtactttaatgatgtttccctgctgtcgtttggcttccattgtttctgatgagaaatatgctgtcattcttatctttatttcctatattacataayatgtcttcttctttggctgctttgagaaatatctaatgtaaatgacaagttgatggatgcagcaaaccaacaaggcacatgtatagctatgtaacaaacc

SEQ ID NO: 127240 - DNA, 201 bp, Homo sapiens
atgggggtacaggcattgtgtaaatatacctgttccaagtgggagaaaatggccaaaatgaagggcctgcaggccccatgcaattctgaaattcaacaggrcagtcaaatcttaaagcttcgaaagacctcctttgactccatgtctcaaatccaggtcatactgatgcaagaggtgagttcccacggtcttgggaagctc

SEQ ID NO: 127241 - DNA, 201 bp, Homo sapiens
gtttctttatggtgtggtctgttttcagttacacagactatagataattgttttttgttttcgtttttgtttttgttttctatttctttttcttttttttyttttttcctagagatagggttctgccatgttggccaggatagtctcaaactccaggcctcaagtgatctgcctgccttggcctcccacagtgctgggatt

SEQ ID NO: 127242 - DNA, 201 bp, Homo sapiens
ttctgtctaactcttatgtcacttgtcaccataacagattttttttaagtatctgcaaatgaatttgatcccaaaagcttatcttttctgcagcatgtgtyatttcttttaaaatagaagtttctcttgaacttctacttaaacttagtatggagctttcaggtaaaactctcaaacaaaaagtgtttgacaccagcaagg

SEQ ID NO: 127243 - DNA, 201 bp, Homo sapiens
tttggaacatacaacaactttctctactctctctgtaaatttcctgtacatctaaaactattctgaaattaagagtttatttaaaagttacatattaaggkatgcctgaaggtttagtctaagagggcatatggaacatcccacttatgactaaaagtaggcaaacctgtctctatgtgcttataactgctcatctgttga

SEQ ID NO: 127244 - DNA, 201 bp, Homo sapiens
ccaaagagagaagtaagtcttcttcatatatctagaagcaatgtgaacatttgccactagtaggatctagagtgaagatttcttaactcttcatcctttcyatgctaattgaatgatgaagaccctaggagtttttcaaaaaatctcatacagagtgctaacacatcacttgatgacatccagccatgacggattcaggct

SEQ ID NO: 127245 - DNA, 201 bp, Homo sapiens
atttattatatatagaatggaaagtcttatcatcactcttaaaccaggcaagcttagtaaatggcaactacatccagttgcagatgcaaaaagactcggatgcttccttgattcctttctctcagaccatcaatccatctgtcaaatctagattgttctgaattgaagttttccagaatcttgctacttctcacctcaatc

SEQ ID NO: 127246 - DNA, 201 bp, Homo sapiens
tatttgtcttctatgttgaaacaatttatcaaaatatcaaaataatatttgaagtagtatatcaaagtcttgcattttagtcttgcatttgaagtcttcttctatttctatctagcttaagttctacttttaaaaaagaatttatattttagatatgttgagtctctgctgctacttgaagtttcatgcttgttatacctt

SEQ ID NO: 127247 - DNA, 201 bp, Homo sapiens
ataatcgtgatggtgcagatgattattagacataaatgctaagtaattcacataaatgactatcagtagaattacttggttaaactaactttttgggtttygtttcttcccattttgtcagtagggcctttagcggtggtaacttccccataacatgtacatttaatcatgattgttattaactcaaatataacataatgt

SEQ ID NO: 127248 - DNA, 201 bp, Homo sapiens
ccatgaagctgagtcccagattaaaaaccattgctgtggtttgtctgtattttggtgtatcaaagcagacaaaagaaaaggaaagcacctccaatccatcytaataatcatcccaccttcctttctgctttcatatgacatttatttaaaccaagctatagctgtgcttctcaaaccttacagtccatgtgaatcacctga

SEQ ID NO: 127249 - DNA, 201 bp, Homo sapiens
ttctgtcgtatctgggtcagacgaattcactgcaatcttggaatctgaaacatgagtaatattagaaaactgaggccatctcaggcttctattagcagaayatctggctaaccaaaacaagccaaaacccatttttaattcttcttctttgccgttatgcgttaaaactataaagtgaatttgaaaaagaatgtgggagac

SEQ ID NO: 127250 - DNA, 201 bp, Homo sapiens
cattagcaatagttgaacattacactttctccattccctcaccaatactcattattgtctctgacttttaatttttgtccgtctgtggagtataaggaggmatctttttgttattataaatttttgttttcctgattgctaatgcagttgagcaatttttctttacttaatggctgtttatatttcctttcctctgaaatg

SEQ ID NO: 127251 - DNA, 201 bp, Homo sapiens
aaaaaaaaagccagaaagaatgacataataattttttcaatggttatttgtaagaggatataaaagtgtagctataaataacttctttaataattgtctaraatctaggacttattttagtagactttacataagaggagtgaagagatcaataaaatgaaattttaaggtacatttttctatgccttaggcaatttagtg

SEQ ID NO: 127252 - DNA, 201 bp, Homo sapiens
ctagcagaaagctactatagcacataaatcagaaatacaacaaaaagtttgttgtgttaggagccaagtttgaaactaataatagtgaagactttaaacartaggagaaaaatcaaagtttcacattccctttgcatacatcagaaacaaagccttcgaccagggtttgataccaagaaaacttgagaaaccatggaatcc

SEQ ID NO: 127253 - DNA, 201 bp, Homo sapiens
gacttcatgaaatacattctataggctgggttcctaggcaatatagtaagaccttatctctatttaagaagaaaagaaaagaaataggttctattatagaytccatttcttaatgagaaactaggggtttagagatgttaattaacttgctgaggtcatatagctgcaagtagcagagtcaagattcaaacccaattgact

SEQ ID NO: 127254 - DNA, 201 bp, Homo sapiens
atttttaaaaattgtcactaagatctcttctatccctaaacatctatgaccaaaattttaacaacagccaatcaataattatataaatgataatagttaayatttaaaattaaaatttaagtttttttttcttttgtagagacagggttccactatgttacccaggctggtctcaaactcctgggctcaagcaatgctctc

SEQ ID NO: 127255 - DNA, 201 bp, Homo sapiens
gtatgcagtttaacttacaaaccagaatgtatatgtatatgtataatatatcctagattctctttcaatcatttttctcttgggatctgaattatgcattrctttgctaaggatgcagtaatctaaatagaaacattgaagcatatgtaagtaggggcttatcagatagatgttagtcttctcgcttaaatttagcatata

SEQ ID NO: 127256 - DNA, 201 bp, Homo sapiens; identical to SEQ ID NO: 21699

SEQ ID NO: 127257 - DNA, 201 bp, Homo sapiens
gttgtgccacttttctacaagcaaataaaagtagaacagttaaggatagcattgaaaaaaacgttacttggtttgaagatatgctggtacttttagaagagtttttgggaaacttccttttgaaagctgtttcttggctttgaggaaagttctgtttctctcaatggtttgataacactgaaaaggaaaatgctgttgatt

SEQ ID NO: 127258 - DNA, 201 bp, Homo sapiens
tgtaaatgacaagttaatgggtgcagcacaccaacatggcacatgtgtacataggtaacaaacctgcatgttgtgcacatgtaccctagaacttaaagtawaataataaaaaataaaatttagtgtacgtcagaactacttggagggctcgccaaagcatgttgctaggcctctttccaaagtttctgatttcatatgtct

SEQ ID NO: 127259 - DNA, 201 bp, Homo sapiens
tagcttaaaggatattgatatatatgtatacatatatatatatttatatatttattaggctatggatatataaactcattaggctatgaatatatatatawgaatatatacatatatgttgtatacgcacgtactcatgtttaggtaataataagtaatcattacaactgggaacatatgtttgaggtagggttgaggggc

SEQ ID NO: 127260 - DNA, 201 bp, Homo sapiens
ctgcatgttctcactcataggtgggaattgaacaatgagaacacttggatacaggaaggggaacatcacacaccagggcctgtagtagtgtcaggggagargggagggatagcattaggagatatacctaatgtaaatgacaagttaatgggtgcagcacaccaacatggcacatgtgtacataggtaacaaacctgcatg

SEQ ID NO: 127261 - DNA, 201 bp, Homo sapiens
aataaggcatgacctctccattgaggaattcctagcttaaaggatattgatatatatgtatacatatatatatatttatatatttattaggctatggatayataaactcattaggctatgaatatatatatatgaatatatacatatatgttgtatacgcacgtactcatgtttaggtaataataagtaatcattacaact

SEQ ID NO: 127262 - DNA, 201 bp, Homo sapiens
tcagctgttagtcagatcggcttccttttgtgggtaacccgacctttctctctggctgcccttaacattttttccttcatttcaactttggtgaatctgayaattatgtgtcttggagttgctcttcttgaggagtatctttgtggcattctctgtatttcctgaatttgaatgttggcctgccttgctaggttggggaag

SEQ ID NO: 127263 - DNA, 201 bp, Homo sapiens
tttctttataacatttcataccattctttcccttttctttttttggaaacagggtcttgctctgtctcccagactggaatgcagtggcacaatcacagctyaacctcctgggctaaaacaatcctcccacctcaacctcctgagtagttaggacttcaggtgcatgccaccatgcctggctaattaaaaaatttaaaaaaa

SEQ ID NO: 127264 - DNA, 201 bp, Homo sapiens
agtaggatacatttatcaagcaactgttttagtacaaacattttatttttcttttcctagctaatgtatgatttagatgctgtcatttcacttgccaggtrtttgtgcagctaaatgactcaggtcaccactgcattgtttagagttacacaaccctgatttttgagtggttattgtgtttatcccaataactaccttata

SEQ ID NO: 127265 - DNA, 201 bp, Homo sapiens
tctgggttgaaaattcttttctttaagaatgttgaatattggcccccactctcttctggcttgtagagtttctgccaagagatcagctgttagtcagatcrgcttccttttgtgggtaacccgacctttctctctggctgcccttaacattttttccttcatttcaactttggtgaatctgataattatgtgtcttggagt

SEQ ID NO: 127266 - DNA, 201 bp, Homo sapiens
tgtcatttcctctttctggagtattttagctctattcttcctcttaaataacttatctttcagctctcatcccatattcaggagatgcgaggtcaaattcmgtcatttttctttataacatttcataccattctttcccttttctttttttggaaacagggtcttgctctgtctcccagactggaatgcagtggcacaatc

SEQ ID NO: 127267 - DNA, 201 bp, Homo sapiens
tgcaacccctgcctttttttgttttccatttgcttggtagatcttccttcatccctttattttgagcctatgtgtgtctctgcaagtgagatggggctccrgaatacagcacactcatgggtcttgactctttatccaatttaccagtctgtgtcttttaattggagcatttagcccatttacatttaaagttaatattgt

SEQ ID NO: 127268 - DNA, 201 bp, Homo sapiens
taggaatctgcatcatctgatttttgctgacatttctagaatggtcaaatattatacttcttctagctgtctgctccagcttcacctgacttcttcattcwtacacttgaatgtgtcttgtcacaactcacaatcgagactttgcatatgtcatttcctctttctggagtattttagctctattcttcctcttaaataact

SEQ ID NO: 127269 - DNA, 201 bp, Homo sapiens
tctggttgtgagatttaaaggaattattacctgcaaaatgcttggaaccatgcttggcatatagaaagaaatatatatatatatgtgtgtgtgtgtgtgtktttaaacacatgcacatatatttttcatttaacaaatatatattatttgatatatatatatatatatttgttaaatgaacagtaagaaatacatttttcc

SEQ ID NO: 127270 - DNA, 201 bp, Homo sapiens
catcctggtcaggtcagtgagaactggatgccaagctgtgcctgcagtcaccagagcctcccacagcctctgggcaggcatggttatgtctataggggcaycatcacaaccagcaactatggacatggaggcaagtatcagaaaccctaaccttaaatataactaagggaattcccagataagtgttagaaacaatgtctg

SEQ ID NO: 127271 - DNA, 201 bp, Homo sapiens
tttctggagcaggataaaaacaaaatagtgatatctttaacctaaagtatgtaaaaattctaaacagcagctttagaaagggcccatgcagcaaaactttraatccttctaccttattcaagactttccatcacctcatgggatttctactcttggttcccttcattcatcctaaccctaacccttaagttagtcaagtgt

SEQ ID NO: 127272 - DNA, 201 bp, Homo sapiens
aatattattttatttgaacattttctgtctataaaatccccaaatctgagaactgttgatttatactagaagtacattattaagtgtcttacacatttaasttctcattgaagaaaattaacaaaattataattattagttattcaagagcacaattgttgtgaatgattaatcttctttgaatagcatattattttttaa

SEQ ID NO: 127273 - DNA, 201 bp, Homo sapiens
gcttgttcaggttctggtgaaggatctcttctgtttgtatcctcacatggtggaaagagttcctgggatccttatcacaaggcactaattctatttatggragagggggcttcattctcaggacctaatgaattccccaaatcccaacctcctaataccaaaacactgggggtcaggatttcaacatataaatttgggaga

SEQ ID NO: 127274 - DNA, 201 bp, Homo sapiens
tgtcatatgctatcccagctagattttgttttatgttgttccatgtgccacatacatctagtttctgacattatcatctaatataaccattttgttgattyctagataattttcaatgactctctttattaaaaatgaattttaaaccagacactttaagtgtttaaattacctaagtatcccaagactgacaagtaagca

SEQ ID NO: 127275 - DNA, 201 bp, Homo sapiens
tgtccagtcacaatggcatttttccatttccctgagttcctctctgctgatttttcttcagatatttgaggtgctggctcccacttgtcatttaagtcttsccttaagaatgcctgtgtcatcttacttatgtagacactagtctctctgtagaattatgccttattttattttcctcaaaggacttgccttaactgatat

SEQ ID NO: 127276 - DNA, 201 bp, Homo sapiens
caatgtgaagagattaaattccacgtggaatgtgaaaaaaatgagtagtaaatattgccaattctcagctctgaaaaaaaatggctaaacattattttagrttacattatatactatatattatacctaatttacatacctggcctttgtggggcatgcttttatagggcactagattatcatgtctctttttcattttta

SEQ ID NO: 127277 - DNA, 201 bp, Homo sapiens
ctctgctgagttccctgcattttattccctaattctttcaccccatagcttcttggaaaatgcatcacaaggttccaagtatttagcaatttctgttattyattaagcacagtttattttcctcaactcccaattgattaagtcaaggcagaaagaaatagaaagttggaaagccaaatctcatgtgctccctaacctggc

SEQ ID NO: 127278 - DNA, 201 bp, Homo sapiens
aatcttctctttttttcctttttttttaactttattgttcaagggtaaatgtgcaggcttgttacctaggtaaacatgcatcatgggggtttgttgtaccrgttgtttctttatggtgtggtctgttttcagttacacagactatagataattgttttttgttttcgtttttgtttttgttttctatttctttttcttttt

SEQ ID NO: 127279 - DNA, 201 bp, Homo sapiens
tgttttctatttctttttctttttttttttttttcctagagatagggttctgccatgttggccaggatagtctcaaactccaggcctcaagtgatctgccygccttggcctcccacagtgctgggattaaaggtgtgagccactgaccctggccggactctagacatttgaaaagaaatttaccactctattacataaagt

SEQ ID NO: 127280 - DNA, 201 bp, Homo sapiens
gtctggccatttatcaaaaatgaacattgaagaaaagtaggatacatttatcaagcaactgttttagtacaaacattttatttttcttttcctagctaatstatgatttagatgctgtcatttcacttgccaggtatttgtgcagctaaatgactcaggtcaccactgcattgtttagagttacacaaccctgatttttga

SEQ ID NO: 127281 - DNA, 201 bp, Homo sapiens
ttgtatttttttgtagagacaggttttcaccatgttggccaggctgttctcaaactcctaacctcaagtgatctgcctgcctgggcctcccaaagtgctgsgattacaggcgtgagccatggcacctggccagcatacttaacctttacagaggcatttttagctggacatttacagcatttaaaggatggaattcaatta

SEQ ID NO: 127282 - DNA, 201 bp, Homo sapiens
tctcctgcctcagcctccccagtagctggggttacaggtgcccgccaccacacccagctaatttttgtatttttttgtagagacaggttttcaccatgttrgccaggctgttctcaaactcctaacctcaagtgatctgcctgcctgggcctcccaaagtgctgcgattacaggcgtgagccatggcacctggccagcata

SEQ ID NO: 127283 - DNA, 201 bp, Homo sapiens; identical to SEQ ID NO: 21698

SEQ ID NO: 127284 - DNA, 201 bp, Homo sapiens
tgcttgttttgaatttagtttgtggaatgatttctcagcttgccccataatatctactctgtacagaaaaatgttatccctttttctttgcaaagtgtgamtataaagcaatgaggctgtttttcttttatgagtcatatccggtctctgaaaacagttcctaaattggagttgccaaaatatttcatgtcatggaagcat

SEQ ID NO: 127285 - DNA, 201 bp, Homo sapiens
gactgtaattcctagaaaagtttggaatccatataaaactcctgtggtcttttacagaaacaactggggaaagaaaagaaatttccagtggtaagatcaaygaaggatcaaactatcacaatatagtcagttaatatctgaccttatatagtagcttgatgagatccagggaatttggattataaaaatttgcagggaggg

SEQ ID NO: 127286 - DNA, 201 bp, Homo sapiens
gcctaactacaaaaatttccccctcttttatattgggactaatgatatgttaaacaatctgatgtatcactttagaaaaacagtaatggcagttgcatttrccaggaaaatgttacaatagattttagctctcttaatagaacataaaatattagtttttaatatcttgctatatgtggtgtttttaaataaaaaggcata

SEQ ID NO: 127287 - DNA, 201 bp, Homo sapiens
tggtctgagagagaagcatctctattttatacttaagattgttgtatagcttatgtgacattccctagtgagccatgtctcataaatccatcaaagtttargtttgtttacagtaagcaattctaaatcaagaacacctttctcaaagtagctcatagatagaaatgctttttttttaagcaaacgttcttagtctgttgc

SEQ ID NO: 127288 - DNA, 201 bp, Homo sapiens
ccttttcacaagccctggaacaagtggattaagagagtaagagtaaaagtgcaaagactgggaacctggctttattccaaaaaaaaaaaaaaaaaaaaaaagccagaaaaaagccacagttagaagtaattgaacactttggaaatccctttgaagacctaatgcagtagaattttttgaaatgaataaaagctaaatgca

SEQ ID NO: 127289 - DNA, 201 bp, Homo sapiens
cccttttcacaagccctggaacaagtggattaagagagtaagagtaaaagtgcaaagactgggaacctggctttattccaaaaaaaaaaaaaaaaaaaaaaagccagaaaaaagccacagttagaagtaattgaacactttggaaatccctttgaagacctaatgcagtagaattttttgaaatgaataaaagctaaatgc

SEQ ID NO: 127290 - DNA, 201 bp, Homo sapiens
ttgagcccaggagttcgagtaggcagagctatgatcgcaccacatccagcccggatgacaaagcgagactccatctttaaaggaaaaaataaaaaaaaaamcctaagcttttaaaattagtcatctaatgaaccactgaatacgataattatgtcttacatatttacaatatacactctctgacttaacgatggtctgact

SEQ ID NO: 127291 - DNA, 201 bp, Homo sapiens
tagaagagtttttgggaaacttccttttgaaagctgtttcttggctttgaggaaagttctgtttctctcaatggtttgataacactgaaaaggaaaatgcwgttgattactacttgtttatctcatatttatgattttaaatatatctccaatatatttatgattttctcttcattcccaccgctacctccccttctgtct

SEQ ID NO: 127292 - DNA, 201 bp, Homo sapiens
ccccttttcacaagccctggaacaagtggattaagagagtaagagtaaaagtgcaaagactgggaacctggctttattccaaaaaaaaaaaaaaaaaaaaaaagccagaaaaaagccacagttagaagtaattgaacactttggaaatccctttgaagacctaatgcagtagaattttttgaaatgaataaaagctaaatg

SEQ ID NO: 127293 - DNA, 201 bp, Homo sapiens
atgttagttggaattctacaaataattgttatgaatgaagcaattaatttgataattgagacatcattggtgacatagcaaactatttttatccttcctctatcgcattgattagcatctgaataaattgaaaaataaatgtgagacttaaagcagtttaagtagtgttaggtatgaacttcagatttcagtgggctaagc

SEQ ID NO: 127294 - DNA, 201 bp, Homo sapiens
caaacataggtaatatgtgagaaaatataagatgacttaagacaggcaacaagaattaagaaagatttcctgaaatctctagggcatcagtagatgatttrtagaggatgtattagttttctattcctgctataacaaattgccagaaacttggtagcttaaagcaaggtaagcttattatcttacagttatctaagtcag

SEQ ID NO: 127295 - DNA, 201 bp, Homo sapiens
attttgtggaatgctttttctgtgtctattgagatgatcatgtgacttttgtttttaattctgtttatgtgttgtatcacatttattaacttgcatatgtyaaaccatccctgcatccctggtatgaaacctacttgattatggtggattatctttttgctgtgttattggattcagttagctaatattttgttaaggaat

SEQ ID NO: 127296 - DNA, 201 bp, Homo sapiens
accccttttcacaagccctggaacaagtggattaagagagtaagagtaaaagtgcaaagactgggaacctggctttattccaaaaaaaaaaaaaaaaaaaaaaagccagaaaaaagccacagttagaagtaattgaacactttggaaatccctttgaagacctaatgcagtagaattttttgaaatgaataaaagctaaat

SEQ ID NO: 127297 - DNA, 201 bp, Homo sapiens
aacagtgacagttggacttcctctttatctatttggacgccctttatttctttctcctgtctgattggtctgagacttccagtactatgttgaggagaagyggtgagagtgggcatccttgtcttgttccagttctcagagggaatgctttcaatttttccccattcagtattacattggctgtgggtttgtcatagatgg

SEQ ID NO: 127298 - DNA, 201 bp, Homo sapiens
aaccccttttcacaagccctggaacaagtggattaagagagtaagagtaaaagtgcaaagactgggaacctggctttattccaaaaaaaaaaaaaaaaaaaaaaagccagaaaaaagccacagttagaagtaattgaacactttggaaatccctttgaagacctaatgcagtagaattttttgaaatgaataaaagctaaa

SEQ ID NO: 127299 - DNA, 201 bp, Homo sapiens
aaatcaggtaatgtgatgcctccagatttgttctttttgcttagtcttgcttccgctatgcagactcttttttggattcatatgaattttaggattttttktctagttctgtgaagaataatggtggcattttaatgggaattgcattgaatttttaaattgtttttggcagtatggttattttcacaatattgattctac

SEQ ID NO: 127300 - DNA, 201 bp, Homo sapiens
ttgctttgtcgaagatcagttggcttgtaattatttgggtttatttctgggttctctattctgttcccttggtctatgtgcctatttttaaaccagtaccrggctgttttggtgactattgccttatagtatacattgaaatcaggtaatgtgatgcctccagatttgttctttttgcttagtcttgcttccgctatgcag

SEQ ID NO: 127301 - DNA, 201 bp, Homo sapiens
gttcatgcctccatggagcttatggtttaataggggagaaacacaggcaaatcaattatagtgtcattataatgcaagtgctatgtcaaagagatgcacarcagctatgggagcacagaggaggaacatctttcttactaagacaaaatctttcaaaggtatttattattcaacaggatttatatgttactttaacaattt

SEQ ID NO: 127302 - DNA, 201 bp, Homo sapiens
cattactttcttaattcattcatgtgttcagccaaaacttattgaatagctgccatgtgcagagtattgtatattgttaaggttaaaaaatatagatcaayaaggcatgacctctccattgaggaattcctagcttaaaggatattgatatatatgtatacatatatatatatttatatatttattaggctatggatatat

SEQ ID NO: 127303 - DNA, 201 bp, Homo sapiens
cttagtagagtgtgggtttctacatcataccaccagtgtttagagattgctgccaaaagtcaagacaaggaggaaaggaagcccgttattgaaaaaaaaaactggacaaacactaaaagtttaaggctgacgagtagcagcaaacaaacaggttcttcatcaaaacaaaagattgtctgcacaatacattgacaaacatgc

SEQ ID NO: 127304 - DNA, 201 bp, Homo sapiens
cttccaccatgcaaaaaataactcttcctctctcttcttttggctaaactttccaaaaagatgtataattttttatttttgaaaaatgtgttagtgacatycgtcctggttaacttattccaaataatgtctctatcttgcattctgtcttactgttctacaacctattccagcaccatcaacagatgactcatttcagcc

SEQ ID NO: 127305 - DNA, 201 bp, Homo sapiens
tgggcccacacatccaatagggaggagcagaaatgagcttgcatcagacagattctcagactagtggcagccaaatgataaagggcaagtagggtgggtgsagactgtaattcctagaaaagtttggaatccatataaaactcctgtggtcttttacagaaacaactggggaaagaaaagaaatttccagtggtaagatca

SEQ ID NO: 127306 - DNA, 201 bp, Homo sapiens
taaagtaagatcttttagagtgatgtaagtctttgtctcagattcactaaatgatgagagaaaattcacaatagaggataactagagttgactcacaggcygggagtggtggttcacacctgtaatcccagcactttgggaggctgaggccagcggatcacctgaggtcaggagttcgagaccagcctgacaaacatggag

SEQ ID NO: 127307 - DNA, 201 bp, Homo sapiens
aaacttgctctgttgttttaatgatcaagtattctggagagacttaaagaatctccaaccatctcttccgcttccataatattagatttgttgcttcatcmcccaaattgcccatgactttcttctataccataaatgactaaaattgaaactcttgcttctttttcctgaatcaacctcttaggcttgaatcctcagaac

SEQ ID NO: 127308 - DNA, 201 bp, Homo sapiens
gacagacactcattaatcagctctcagataagaaacttgctctgttgttttaatgatcaagtattctggagagacttaaagaatctccaaccatctcttcygcttccataatattagatttgttgcttcatcccccaaattgcccatgactttcttctataccataaatgactaaaattgaaactcttgcttctttttcct

SEQ ID NO: 127309 - DNA, 201 bp, Homo sapiens
tttgaatttatgatttgacaaggggagttattaacttctttcagatggaaaccgttttgcaacagggcaaaacagattggtccctaatttcttaatcactyctttggtgattcgaaggacagacactcattaatcagctctcagataagaaacttgctctgttgttttaatgatcaagtattctggagagacttaaagaat

SEQ ID NO: 127310 - DNA, 201 bp, Homo sapiens
aaaccccttttcacaagccctggaacaagtggattaagagagtaagagtaaaagtgcaaagactgggaacctggctttattccaaaaaaaaaaaaaaaaaaaaaaagccagaaaaaagccacagttagaagtaattgaacactttggaaatccctttgaagacctaatgcagtagaattttttgaaatgaataaaagctaa

SEQ ID NO: 127311 - DNA, 201 bp, Homo sapiens
ggtagatgattttgcctactctaggctaataaaagtgttctggcaaagcaagctagaatgtttggtaggttagttgtttaaatgcatttttaaatcatgayattttcaatttataaagggtttattgggacataatcccatcagaaattaagggacatctgtatgtaattcttaattgtggataataataataaaagagag

SEQ ID NO: 127312 - DNA, 201 bp, Homo sapiens
tttgtcttctatgttgaaacaatttatcaaaatatcaaaataatatttgaagtagtatatcaaagtcttgcattttagtcttgcatttgaagtcttcttctatttctatctagcttaagttctacttttaaaaaagaatttatattttagatatgttgagtctctgctgctacttgaagtttcatgcttgttataccttca

SEQ ID NO: 127313 - DNA, 201 bp, Homo sapiens
ctgctcacaaggcatctcgaaggccatgtgcaaacagggttgcaaggaatgggtgcctatgttcatttcacatctctcctctgctcatatgcatgctccawcaccacactagatttcaaaacacactttaaaagatatagttattaagaatttcaagatggcagcagcagagtatttaatgaagtgtaggacccttctgag

SEQ ID NO: 127314 - DNA, 201 bp, Homo sapiens
atttgtcttctatgttgaaacaatttatcaaaatatcaaaataatatttgaagtagtatatcaaagtcttgcattttagtcttgcatttgaagtcttcttctatttctatctagcttaagttctacttttaaaaaagaatttatattttagatatgttgagtctctgctgctacttgaagtttcatgcttgttataccttc

SEQ ID NO: 127315 - DNA, 201 bp, Homo sapiens
acatatatttaggtaattaaatgaaggataatttctcccgttttttggaaggaaacatctaatgtttctatgctagtttctgtcaaaatttcaaaatactytaatgagtctgaaatttataggccatattattttcgtaagagaagcaacatgaatttcaaatgacccgtgagaattttatcaataaacagtttttgcaaa

SEQ ID NO: 127316 - DNA, 201 bp, Homo sapiens
ttatgaatacatgtgactatacttttaatttttatttgacccaataactaggataataatttaaatctcgagttaatggctgtttggggtttgttttttttctttacgtttttcctgtttgaaaaccattaagttaatttcaaattttagtgtatctttgtcaaagattatatttagtatatgcaatatctgctttggtaa

SEQ ID NO: 127317 - DNA, 201 bp, Homo sapiens
atttaaggaaacttttaatcagagtatttctaaaaacattaaacattggtctcacaggaagaaaacactgcaacagtcagtcaaatcattcatattaaaasttaatgtttttccaatgaaaagagaccctttcagtaaggtttttcagtctgtaagttctggagtctagatggaattgagagattgtccaattaaatttat

SEQ ID NO: 127318 - DNA, 201 bp, Homo sapiens
ggattctttaaattaattttcattatatcaataattatgccccttgatttagtaatgaaatacattgttttattggttataccaacaaacaggaaaaataygaagatattgtttaatatttccaaattcattaaattctgctcttatttaatactgtatttttccttctgattaattgatttataaattatgagtggtctg

SEQ ID NO: 127319 - DNA, 201 bp, Homo sapiens
gcccataattatgttaatgataaattaaagtcaatgtattctaatataattccaattaacatgaaaatattaacaaggtctcagaattatctatgagaatscaaataactagtctgccaaaaattttggcaagaatttctataaagaattatggtgagctgaaagtcaagaagatctgccaggatttaatgtcattggcat

SEQ ID NO: 127320 - DNA, 201 bp, Homo sapiens
tgtaaaagtgttcctatttctccacatcctctccagcacctgttgtttcctgactttttaatgattgccattctaactggtgtgagatggtatctcattgyggttttgatttgcatttctctgatggtcagtgatggtgagcattttttcatgtgttttttggctgcataaatgtcttcttttgagaagtgtctgttcatg

SEQ ID NO: 127321 - DNA, 201 bp, Homo sapiens
gagctttctggtgtgggatggcagatctggcagagagttaaatttaaggcacttgcaacagttgaatgagccactttttcatgtaaaggtgagatggcacyggagagctgggcaagctacaagctggaatatactctttctattttataagcgaggttcataggacccctttttacctttgttcgtcattgaatctgagtt

SEQ ID NO: 127322 - DNA, 201 bp, Homo sapiens
ctgattttgtgtttgtgatttccttttcttcattagatttccaaggattctttaaattaattttcattatatcaataattatgccccttgatttagtaatsaaatacattgttttattggttataccaacaaacaggaaaaatacgaagatattgtttaatatttccaaattcattaaattctgctcttatttaatactgt

SEQ ID NO: 127323 - DNA, 201 bp, Homo sapiens
acacacacacacacacacacacacacccctgaagcaatcattttatgaaaattattttctgaacgtatgcaatgcactttgatttttcttattcttttctrttctatttcatttaagaaaattgttgcatgtcactgaattgatttcaaggccaacaaattgatcacagaccaatttgaaaaatattaacctacaactcca

SEQ ID NO: 127324 - DNA, 201 bp, Homo sapiens
gaatctgagttggtacaccccaaaatgaaatagtatgccagacagtcataaggtcttcaggatcaggagttcagttttgacaagagcccagtagcaagctwatagctgcttttcaaatgaggtgtacctggtacgtgtatatcctgtatgttaaggaggtgatctgtccaaaatcccaaagggctcctgtgaatggaagct

SEQ ID NO: 127325 - DNA, 201 bp, Homo sapiens
acttaataatgtaagacctcattgctatttcagatcaactgagtgatgtgtgcatatattgtccaggcatttgtggcgtggatcatgtctctctctctctstgtgtgtgtgtgtgtgtgtattggggcaatttcttcagataaatttttggattctccaatgtgaagagattaaattccacgtggaatgtgaaaaaaatga

SEQ ID NO: 127326 - DNA, 201 bp, Homo sapiens
tcagagcaggagctaaagaaccagcaacaatcaaaccagaagaaagaaaagtgggtattagagaaaagcaagagctgaaataagcaagttgaagtataagrgaataagagaaactctgaaagtaccagacaaaatttggccagactgtcatatgctatcccagctagattttgttttatgttgttccatgtgccacataca

SEQ ID NO: 127327 - DNA, 201 bp, Homo sapiens
cattgctatttcagatcaactgagtgatgtgtgcatatattgtccaggcatttgtggcgtggatcatgtctctctctctctgtgtgtgtgtgtgtgtgtgkattggggcaatttcttcagataaatttttggattctccaatgtgaagagattaaattccacgtggaatgtgaaaaaaatgagtagtaaatattgccaatt

SEQ ID NO: 127328 - DNA, 201 bp, Homo sapiens
tttttcttaatcatttgcactaactttaattcaacagcaactgaaaacaattatataaaactagtgtgtctccatattcttcatctttggtgaatttttcsccaaatttactaaagtatcttgcataaagatctatattttattatttaaactgacccttctctacaaaaaaattactcaacaatgattcaaaaatgatga

SEQ ID NO: 127329 - DNA, 201 bp, Homo sapiens
actctctaccactctgttccacagaggccaatatgatattagtcctaaaatgacattatccttgttatgcttatctttgctcatgctgaagtgccttgtcrttattcagtattcactttgcataacctattttccattaagcttccaccttgcaaaatagaatgccactacattgtacccgaagccagacacacacacacc

SEQ ID NO: 127330 - DNA, 201 bp, Homo sapiens
cccaggggttctccagctcaccttcactgccttgtgcatgtcttccattacactctctaccactctgttccacagaggccaatatgatattagtcctaaawtgacattatccttgttatgcttatctttgctcatgctgaagtgccttgtcattattcagtattcactttgcataacctattttccattaagcttccacct

SEQ ID NO: 127331 - DNA, 201 bp, Homo sapiens
taatgagaatcaagctctcagcatgacccaggggttctccagctcaccttcactgccttgtgcatgtcttccattacactctctaccactctgttccacaraggccaatatgatattagtcctaaaatgacattatccttgttatgcttatctttgctcatgctgaagtgccttgtcattattcagtattcactttgcata

SEQ ID NO: 127332 - DNA, 201 bp, Homo sapiens
ttcggagcgttgccacaaggtcaatggctcctaagtaagatgtataagatgacaacagacaacttcaagtaaaagaaatacaaaatatgtaattacaacayttttaggaaggcatgagtttccatttaatttccaattatggaatcaaatcagaagaagagtaaagttttcaaaagagaggttcagaacggttgcacatat

SEQ ID NO: 127333 - DNA, 201 bp, Homo sapiens
tttgcaatccataaaatcacatggtgaaaaaaaatatgtcctttttctttaaggatctcattaatactttgatttcacagttatcaactacaaaaaaaaamaccttttgtagtttctgtcattttgggatttcgaaagaatctgggtcttattttataccacaagaagcagaaacctcattctctcaatgcaatgaaattg

SEQ ID NO: 127334 - DNA, 201 bp, Homo sapiens
gggcctaaccctgtccagtgtgattttcatctttttctttccatcttttctttattgacgtatatttgatggatgaaaattgtataaataagatatacagmatgcttttgatatacatatacatagtaaaataattactataataaagttaattggtggatccatcttaacttgattgcactggcaaatgatgtatttccc

SEQ ID NO: 127335 - DNA, 201 bp, Homo sapiens
caaatctgatgtggttacaaaatactaaaaattttagtcatggctttagcgatgacagtctaggttgtgccacttttctacaagcaaataaaagtagaacwgttaaggatagcattgaaaaaaacgttacttggtttgaagatatgctggtacttttagaagagtttttgggaaacttccttttgaaagctgtttcttggc

SEQ ID NO: 127336 - DNA, 201 bp, Homo sapiens
cacaattattagttaaagagaaaccagctctaggctttgaataatccatcatttttagaattatttatgggtttcaattcctcatttgattttctttttamctgaaatataaatggaaggaatatgaactgtagtatctaagggtcttctttacctatcattatgttaatcatttaatataataaacacagagatatccac

SEQ ID NO: 127337 - DNA, 201 bp, Homo sapiens
tgatgttaacttgcctttctcactgtgaacactgcttaaactccattagctaaatcagacaatcttttctttctataaatccagttaaaaacatgacttargtgtccacatcccaatatcctaaaagtctgattcccttattttcctgaaattccccaacattcttggataggtgcatatgtcatttgatacccattggga

SEQ ID NO: 127338 - DNA, 201 bp, Homo sapiens
tggactcgattccagtctggaattctcagacaaggaactcgttccatttagaggaaaattctggcatctgtattttacctatttttgttatttagcttgcratgacctccttgattcctcctcattaaaaggcaaagaagtgaaggactgtctatcgcccagtggcccatataatttgcaaacatctttgttactgattct

SEQ ID NO: 127339 - DNA, 201 bp, Homo sapiens
cttgccaaaaactagaaacaacctaagtgtccatcaactgctgaataagtaacaaactggtatattcatacaatgacatactacttagcaataaaaaggaytgaactactgcccagtgaaaaaatacactcaaaaggctacatgctgcacaattacatttatacaacattaaaaaaataaaaacgtaggaacagaaaacat

SEQ ID NO: 127340 - DNA, 201 bp, Homo sapiens
tgtctatcgcccagtggcccatataatttgcaaacatctttgttactgattcttacagacttctctcaaatatttatcttcctgaaatttttcaacattcytggatgagtgtgtatatcctttgatacttattggggatatggacccttagttatgtttctgtgtaaataagcgaggtcgtggtacagggacagagaggaa

SEQ ID NO: 127341 - DNA, 201 bp, Homo sapiens
cagttttgagacatcctgaaacatttcaaattttgcatttatagtgaaactttaagattttatatcgcttttatacttttagacattgaagagagcctcamaaaattaaatgtaagactttggttaattatcaaaaggtttggagtcactgatttatattatacagaatttacttctattctaaccctgcattagaaattt

SEQ ID NO: 127342 - DNA, 201 bp, Homo sapiens
tgacttgttgcccaggctagagtgcagtggcacgatcgtagctcactgcagcctcgaactcctggattcaagcaatttttctgtctcagcctcctgagtcrcaagcaatcctgccttggccttccaaagtgctgggattacaggcatgagccactgcactcagttgtcaacatttattcttaaagcaatacgtgtgacctg

SEQ ID NO: 127343 - DNA, 201 bp, Homo sapiens
ggggagttgctgttcaatgggtataaagtttctgttgtagaagacgaatgagttctaaatatttggtgtacaacattgtgctaatagtgaacaaatactgyattgtgtacttaaaaatttgataaaggttagatcttattacatgttcttaccacaattttttaaaaatataaagtagaaggaatggtgcttttgaaataa

SEQ ID NO: 127344 - DNA, 201 bp, Homo sapiens
gccagggcttgtagaaaaaaatttagagatatatttagagccattgaaactgttcccatttttacatagggagagatcagcattatattttgagaaaccayagggaaggagcctgtcttttaaagtctggtgctacccaggattctgtctttgatcataggcttatctaatgggtcatatcttactctgtcatagttttta

SEQ ID NO: 127345 - DNA, 201 bp, Homo sapiens
aagcagcatatcttagtgatatattcgatatctagtatagcctgaatcaattacccattgccaaagaaatgacttttctgagatgaaggtaatagacttcyttagcaagatcaaaaggaaatcatgtaaaagagctgatggcttatagattgactttttccaatccttaatgattgcctttatctcctacttgcctgagaa

SEQ ID NO: 127346 - DNA, 201 bp, Homo sapiens
atattcgatatctagtatagcctgaatcaattacccattgccaaagaaatgacttttctgagatgaaggtaatagacttccttagcaagatcaaaaggaartcatgtaaaagagctgatggcttatagattgactttttccaatccttaatgattgcctttatctcctacttgcctgagaaatatattgatggggtatcag

SEQ ID NO: 127347 - DNA, 201 bp, Homo sapiens
ttttagtccttagaatggtatttaataactgttaaaaatgattgaatgaatcaagcactataattttatatatgtctcatatcaacaggattctaaacacrttgattattttagcagtagatgtaataaactgtcttgataaactgcatcactgatccatgctttattagtgacaaagttaaccatgtcaacttttagtta

SEQ ID NO: 127348 - DNA, 201 bp, Homo sapiens
taaagtttctgttgtagaagacgaatgagttctaaatatttggtgtacaacattgtgctaatagtgaacaaatactgtattgtgtacttaaaaatttgatraaggttagatcttattacatgttcttaccacaattttttaaaaatataaagtagaaggaatggtgcttttgaaataagaaagtgggaaacaaacatttct

SEQ ID NO: 127349 - DNA, 201 bp, Homo sapiens
cccccagcataagacaaccataaatgtgtaggaacaacagccttagccccaacaaccacaacagcacctaacataatagggattccataaatgttttgatwaaataagtctttaaaaatatatgtacattctgcattttatttacgatatactgtctctctattttagaacaaatttcattttctccaatctttgaataaa

SEQ ID NO: 127350 - DNA, 201 bp, Homo sapiens
ccagtaattccttcatgggttttgcagtcacagaccacttcaagccctactttagaaattcacaagcaacactttaaagagatgtgattaaataaatacaracttttcaccactcctgtaaaatgactcaaaattaatgtcctaacaattccagctttgtatttaagggcagcacattattatagagatgttaaagaaact

SEQ ID NO: 127351 - DNA, 201 bp, Homo sapiens
tgtactgattatacttgttcagtagaattttgtacacttgcaaatggaatttttagacacaagaaacaaggtacaaaaattgcctaactacaaaaatttcyccctcttttatattgggactaatgatatgttaaacaatctgatgtatcactttagaaaaacagtaatggcagttgcatttaccaggaaaatgttacaata

SEQ ID NO: 127352 - DNA, 201 bp, Homo sapiens
gaagtgctaaagtgtggaaaaccagacaattctggaatgcagagggaggagagaaagccccagtaagctacatgcttcagacataggcactgaataataargaaacagaaagaaatatagaaactgaattgctaaggcacttttattgccactcctaagaaactcaacattatcagcagtagtaatggccatcatttatac

SEQ ID NO: 127353 - DNA, 201 bp, Homo sapiens
gcagtttgagtgtctacttctttattttatatctaacattaggaagtgctaaagtgtggaaaaccagacaattctggaatgcagagggaggagagaaagcyccagtaagctacatgcttcagacataggcactgaataataaggaaacagaaagaaatatagaaactgaattgctaaggcacttttattgccactcctaag

SEQ ID NO: 127354 - DNA, 201 bp, Homo sapiens
gcagaaagaaatagaaagttggaaagccaaatctcatgtgctccctaacctggccaggttgtggctcaaagaaaataggattaggaaggagaacatcagakaattttccaatggaactaacttggcttcactacagatactcagatgtcaagtgccagaaagatgttggggaaatgactacactataattaaaagtttcta

SEQ ID NO: 127355 - DNA, 201 bp, Homo sapiens
tgcatcacaaggttccaagtatttagcaatttctgttatttattaagcacagtttattttcctcaactcccaattgattaagtcaaggcagaaagaaatakaaagttggaaagccaaatctcatgtgctccctaacctggccaggttgtggctcaaagaaaataggattaggaaggagaacatcagagaattttccaatgg

SEQ ID NO: 127356 - DNA, 201 bp, Homo sapiens
cagcagagtatttaatgaagtgtaggacccttctgagagcagggacctgtgtgaatgcacaggtcacacacccatcagtctgtctctgtgtttaccccaamctaatttgagttaaaattcaatagtttaagatgttaaaatcaccattttaaaaattttgaacagaaatagggttctgtttaccatcattccatttaatta

SEQ ID NO: 127357 - DNA, 201 bp, Homo sapiens
aatgttttcttcatagttttgttgtgagttcctacatgtaaaattatttgaatagtgcctgacacatattaaataaatactacttataaatatgaaaagayaagggaaaattatggaatggatcctcttgaagtaagggtttgattggtctaagtcagaaagtaatggataggaagaagaggcggacatagagtcatcaaa

SEQ ID NO: 127358 - DNA, 201 bp, Homo sapiens
tttttcctgaaataaagtacaattgttacaatttctgttttctgagttgcaatcttatttctttcttcttgagattgctaacaaattacttcaataagaaytgtggatatttcacaaatcttacttcatacacttaaaaaccaaaattttggttttgttcctgagatagttaattacattcattgtatatgtactttgtga

SEQ ID NO: 127359 - DNA, 201 bp, Homo sapiens
tcctgaaatttttcaacattcctggatgagtgtgtatatcctttgatacttattggggatatggacccttagttatgtttctgtgtaaataagcgaggtcrtggtacagggacagagaggaatcagagagcagggaaggagagagacttcatatgtactataagtttcaagtgatgtggtggtggttcatggcataaccca

SEQ ID NO: 127360 - DNA, 201 bp, Homo sapiens
atttagagatatatttagagccattgaaactgttcccatttttacatagggagagatcagcattatattttgagaaaccatagggaaggagcctgtctttyaaagtctggtgctacccaggattctgtctttgatcataggcttatctaatgggtcatatcttactctgtcatagtttttacctattacacgctgtatatg

SEQ ID NO: 127361 - DNA, 201 bp, Homo sapiens
atagaatactccacccaataacagcagaacatggaagaaaatacttacaaaatacacatcataaaggactgatatgcaggatatataaagaattctcacarttcaatgatcaaaaccatataacccaataaaacaagttgcaaaatatttgaacagacattttaacaatggagatacatggtaggcaaaaaaagtagtgaa

SEQ ID NO: 127362 - DNA, 201 bp, Homo sapiens
catatatatatatttatatatttattaggctatggatatataaactcattaggctatgaatatatatatatgaatatatacatatatgttgtatacgcacrtactcatgtttaggtaataataagtaatcattacaactgggaacatatgtttgaggtagggttgaggggcaagtgaagaatgtccagaaacttaatacaa

SEQ ID NO: 127363 - DNA, 201 bp, Homo sapiens
ggtagggttgaggggcaagtgaagaatgtccagaaacttaatacaactttagaatataaaagaccttgtgtactttgtcaagaagtttgaattttatcctstatgaaacagaaagatttttaaacagaaaacagaagtgctttaaacataggaatgacggagtcacacctgatcgtatcagaggcatcatgaaagcataaa

SEQ ID NO: 127364 - DNA, 201 bp, Homo sapiens
ttatcctcatgtttgtcctaaagcaaaagaaaaagatgagcaactgtggaaaatgaaaataccaaagcttggtgtgttttctgagaaaacttaagcttcargatacttataactgtagttattaaacccaaagagagaagtaagtcttcttcatatatctagaagcaatgtgaacatttgccactagtaggatctagagtg

SEQ ID NO: 127365 - DNA, 201 bp, Homo sapiens
agaaaacaatggcaatcttgaagaaataccagcaaggacattagagagatgaagtagagaagcattcaaaatgggatcagaggatgcatctattcacaggyccacctgatgccagggcttgtagaaaaaaatttagagatatatttagagccattgaaactgttcccatttttacatagggagagatcagcattatatttt

SEQ ID NO: 127366 - DNA, 201 bp, Homo sapiens; identical to SEQ ID NO: 21700

SEQ ID NO: 127367 - DNA, 201 bp, Homo sapiens
tctgaatttacattttctgttcaataaaagctgtattatacattatgcagatatttaaatcagtacctataacttctgcattattaatatgtgaatgccaratatccaaaaaaatacatccacttcactttgccttttaccatgggatgtgaaaaagtgataatcaccattccaagaatttctactagtggattttgactt

SEQ ID NO: 127368 - DNA, 201 bp, Homo sapiens
atttttctgcttaaatttttcatctgttcttgcgtgttttccatagagcccttaacatattcatcattgttattttaaattctgtctgttaattccaaaayctgtgtcatatctgagtctagttctgatgcgtgctttttctcttcaaaacatgttattttgttgttgctttttagcattcctcttattttattgatattt

SEQ ID NO: 127369 - DNA, 201 bp, Homo sapiens
gtggaatgaagaaagactcattcattcattcccaacttgaatccccacaggtagtaatggagttttcaaactaaactaaaattccatttagattttcagtmttacaaaataacagtataactacggcttgtttactgatttaaaatcttttaaaatttagggcctgcaattaaaataataaaaaatatctactagtgagaa

SEQ ID NO: 127370 - DNA, 201 bp, Homo sapiens
ctatatgcctaatatactttattagaaagtttggtcctctatgacataaataacaaaattgataggaaattctcagtgaaaatacttaacagttatgatcygcaagataacagaaaggaatagattgttgtcgcaagataatggttgctgactgtgagataagtgtcaaggcaaagtcattccaaagtctggccatttatc

SEQ ID NO: 127371 - DNA, 201 bp, Homo sapiens
cccagcaatacaatttctaggtatttactcaagtagaatgaacatgtgtttctacatacaaagttataatgaatatttaagtgtgaatgaatacccatacwtgccaaaaactagaaacaacctaagtgtccatcaactgctgaataagtaacaaactggtatattcatacaatgacatactacttagcaataaaaaggatt

SEQ ID NO: 127372 - DNA, 201 bp, Homo sapiens
tgaccacctgctatataaaaaaacagaaaacctatctgtttctgactacactcctaattctcattcaaccacaattcctggaagacaggaagttaactccyggtaaagagcatggtttgtgttccagccccaaagcctccaaataaatgaacttctctccacctttgcatggaatcactgggattaaatgaggtaagtata

SEQ ID NO: 127373 - DNA, 201 bp, Homo sapiens
ctattctatgaataaagaaaaagcattccacaatcaaataagtttcagaaatgtttcctattacagtcctctctgtatctttctattagcacacaaaatgktttggtaagtcctgtaaaaaagactctgaatcaggtgagatgcaggagaatgaaaagcctcaagggagaatgaggaaattaaagcaagaaagtggagggg

SEQ ID NO: 127374 - DNA, 201 bp, Homo sapiens
ctaatgggtcatatcttactctgtcatagtttttacctattacacgctgtatatgctggtaacatccaagtctaaaaatccagcccagacataatccctgrggttcagatttgaagatctgtgtaatgacctagatttatatgtggatatcgctcccacaggcatctggcacccaccctgtcttctagagtacccctcata

SEQ ID NO: 127375 - DNA, 201 bp, Homo sapiens
agggggatcagagaagctggggtttaggtcaaaagagaggaaggtggagcagcatagcagtctaaggctgaacagaaaggagaaggcagatattcacagasgcttgcactttgtgtaatgagctagaacagtgggaatagaaaatataatgaattaactcacttcaaaattttaaagagaactcaagaattatgttgcaag

SEQ ID NO: 127376 - DNA, 201 bp, Homo sapiens
taacatccaagtctaaaaatccagcccagacataatccctgaggttcagatttgaagatctgtgtaatgacctagatttatatgtggatatcgctcccacrggcatctggcacccaccctgtcttctagagtacccctcatagcactccttgtattgagttctaagtgcttatgtcactgcctatctcttccactggacca

SEQ ID NO: 127377 - DNA, 201 bp, Homo sapiens
atataaaaatataaaatcgttgggtggattgaaattttagataagatggctgagtcactgtttgtttgcacagaggtaagtgggaatgtactatcttgaargaagctaggagggagtcatataacagaggatagagaaatgcccatttaaataatttaagcagattgcccttgcttattccacaccacccaactgctttta

SEQ ID NO: 127378 - DNA, 201 bp, Homo sapiens
gaatccggacagacttcaatgaagtgctattcaaaggttcatcattaactaagatagcacaactaagtgaatctgatcctacatcagaggctgtctcttcrctctcttttgtgtgtgtcccacccccacctgagaagttcatttttttctgtatgcagatctattatgaggtcagtattgcaggttgttaacaaaattttc

SEQ ID NO: 127379 - DNA, 201 bp, Homo sapiens
gtaattcttctcatcagtaaaagtaatgaagtgcctttaaaaacatccttccatttctcctgcttaataagtagatataaaattggggtacttacaaaaaktatttaattgtcataggtagttggcaagataaatttttaagaatccaaatttggtaaagaaatacatataaacaacttttgaagagcatcagaaattgaa

SEQ ID NO: 127380 - DNA, 201 bp, Homo sapiens
caaagagagaagtaagtcttcttcatatatctagaagcaatgtgaacatttgccactagtaggatctagagtgaagatttcttaactcttcatcctttccrtgctaattgaatgatgaagaccctaggagtttttcaaaaaatctcatacagagtgctaacacatcacttgatgacatccagccatgacggattcaggctt

SEQ ID NO: 127381 - DNA, 201 bp, Homo sapiens
tctcatcagtaaaagtaatgaagtgcctttaaaaacatccttccatttctcctgcttaataagtagatataaaattggggtacttacaaaaagtatttaaytgtcataggtagttggcaagataaatttttaagaatccaaatttggtaaagaaatacatataaacaacttttgaagagcatcagaaattgaacagcctat

SEQ ID NO: 127382 - DNA, 201 bp, Homo sapiens
agacaatgtgagaaaaagttacaaatacttttcaggtctcttcccaagtatgaaattgagaaatattctgaaaaatcagagtcagactgattttggttagraaatacaaatcctatgatttctgctacaatggtatctgaatcaagataatgaccattaagtctcagacctttacaaaggtcttcagtcaggcgagacaaa

SEQ ID NO: 127383 - DNA, 201 bp, Homo sapiens
tgcctttcttgtccttggtgcctaaagtgaaatgaaattgttttcctgttatcaggccaagtgcagacatactttaagggaccagccttctttaaagattktatcaggtagagacatcagttctgccttcctccttgcttcagggcactgcaaatggcttcagagtacatctatatgctagttcactggaaggaatcgttg

SEQ ID NO: 127384 - DNA, 201 bp, Homo sapiens
ttagcaaaagtgatagaaatacatgagcacagagtagcaaaatcattttcacaaatggtgatctgttaatgttgagtttttagttcttcttattccctttrgtcatttatatagtcaaattatctggtctaattttatttttaaaaattatgatttttcttagattccaacagtaatataaaagcaaacaaacagtactta

SEQ ID NO: 127385 - DNA, 201 bp, Homo sapiens
tcacaaatggtgatctgttaatgttgagtttttagttcttcttattccctttagtcatttatatagtcaaattatctggtctaattttatttttaaaaatyatgatttttcttagattccaacagtaatataaaagcaaacaaacagtacttagttactttttacttgttagttgaaaattataaggcataaaagtaaaca

SEQ ID NO: 127386 - DNA, 201 bp, Homo sapiens
ctgttaatgttgagtttttagttcttcttattccctttagtcatttatatagtcaaattatctggtctaattttatttttaaaaattatgatttttcttakattccaacagtaatataaaagcaaacaaacagtacttagttactttttacttgttagttgaaaattataaggcataaaagtaaacatgtttttacttttt

SEQ ID NO: 127387 - DNA, 201 bp, Homo sapiens
ctaggctatttgaggaacttcttgaatatgagggggttattaacaataaaagaagatacacccaatagagaaacaatttctataccttcaaataatagtayagtaggtataggaggcaaatgcaaaatcagtgtgatccattatatatttaaccctcatttgttatctgttacaatgcataaatatgttttgaaaagaata

SEQ ID NO: 127388 - DNA, 201 bp, Homo sapiens
tccctatttgtataaggcataaattccaggtggctctgccccattccccctagcgtgcatgtggacccttaatcttctccgggcatgtttaggcaagcctrctgtacaagttcccttatctgcacaaaatatctggtgtaggcacttgtgggttaggtcggatgttttccagggacccttcccttactgtctgcctaaagc

SEQ ID NO: 127389 - DNA, 201 bp, Homo sapiens
atgcctctccagaccccaaacttatccctgcaagaccccagagggcttgtttaacaggtgcaaagaatgctaccaaagttcttaactggaggtgaaaaaargaaattagccatgatttctcttgtttttcaacttttaactttgtaagaaagatcagttttggaacaatggcctattacaaagcagaagcatgagaatagt

SEQ ID NO: 127390 - DNA, 201 bp, Homo sapiens
atatttagagcttacactgaagatggaaagctgctttatatgataaagtgagagaaacttatcagtaagtcttcaagcaggagaagatgagatgcgctggrtagccaagagaattttagtaaagtgatggtctgtgttcaatattagcttgtgcactttgctatgatataacagctctccatctaaaacttctgctaacat

SEQ ID NO: 127391 - DNA, 201 bp, Homo sapiens
atattatgtaatactatacaagccttaaaattgtaattatgcctgtaattccagcactttgggaggccaaggtggcaggatcgcttgagctcaggagtacragaccagcctgggcaacacggggaaactccatctctacagaaaatacaaaaagttagctgggcatggtgtggcacacctgtagtcccagcaacttgggag

SEQ ID NO: 127392 - DNA, 201 bp, Homo sapiens
ataattttttatttttgaaaaatgtgttagtgacattcgtcctggttaacttattccaaataatgtctctatcttgcattctgtcttactgttctacaacytattccagcaccatcaacagatgactcatttcagcctgacctcatgaaaagagcttgcattctaggttcagacagaataacaagagactcctatttttac

SEQ ID NO: 127393 - DNA, 201 bp, Homo sapiens
tttttttccaattagttgaacgaatgatggtatttgtttgcagcttccagtgttgcccataaagaagagtagttattcatttagggaaattgcttgatcartgctatgcagggccattatatcttctttgtgctggtaggagaaaagagtgatattctagattgaaacaactggaaaaacagattgctgaattaggagtga

SEQ ID NO: 127394 - DNA, 201 bp, Homo sapiens
attattcttctgactcattctaaaactcttacaatgtacgaggaaactcttggagctttgcttttctctttactgtggcagtgcaaacttattgcttgctmctctgcagctatttctgaactcaagttattttagaaattcttcaaaatttaacattttctcctgatcctttttgaggaatcagtacaccatagtggtcgt

SEQ ID NO: 127395 - DNA, 201 bp, Homo sapiens
aaagtcttgcattttagtcttgcatttgaagtcttcttctatttctatctagcttaagttctacttttaaaaaagaatttatattttagatatgttgagtytctgctgctacttgaagtttcatgcttgttataccttcattatatattctctttttctgcataaaatgacaatttgtatctaatttaatgctttctgcct

SEQ ID NO: 127396 - DNA, 201 bp, Homo sapiens
aagaaaagaaaagcaagagctaccagaggtgagagcacacaaaggaatgaccaagtgaagaggcagcaatagggcagccatctgcaagccaagaaagagtytcagaaggacctaaccctcctgaccccttgatcttggacttccagcctctagaactgtgaggaaataaatttctgctgcttaatctacccagtttgtggt

SEQ ID NO: 127397 - DNA, 201 bp, Homo sapiens
acaactaagtgaatctgatcctacatcagaggctgtctcttcactctcttttgtgtgtgtcccacccccacctgagaagttcatttttttctgtatgcagwtctattatgaggtcagtattgcaggttgttaacaaaattttcagagagaaatagctaatagaaggatcatgatatattattttgtttatgcttaaaaata

SEQ ID NO: 127398 - DNA, 201 bp, Homo sapiens
tgattattttgatcttttatgtgcagaattataaccaatacactgcatactttatatgcaatattgtgtttgtggttttactcatttaacaatcctaagayagctatacacagtttcaacaaagaaattcatttactctataaagcattttattattttttctaattgggacttctaatagtattgaaagtagatagttaa

SEQ ID NO: 127399 - DNA, 201 bp, Homo sapiens
ggttcattgctggtgatgaaggattttatctccttagctcatctaggtctgggttcttgtcttgtctcatgaccaggaaaaatcaggcacgtggacactcraagagtgagtggagtagaatgtattaagtgaaaaggaaagctctcagcaaaaaggggcatcctgaaagcaggttgccagttttccttcgcagtacaaggg

SEQ ID NO: 127400 - DNA, 201 bp, Homo sapiens
ctggtttaaggttgcttataaaacatcaatccagaatctgtggatttatggaaaatgagaaatataaaagctggctgacaatttagggtgtattaggccaytcttgccttgctataaacaccagaggctgggtaattcttaagaaaataggtttaattggctcacggttctgtatgttttacaggaagtatggtgccaaca

SEQ ID NO: 127401 - DNA, 201 bp, Homo sapiens
ttcatgaagtagcaagggaaaatggctgattagaaggtatgtaataggaatagaagtagaaaaagtgaagaaagtgaacatgtagacaattagttcagagwgttttgctgcaaagtgaaatacaagagtaaatcagtagatggcagggaagtggagtcaagagaagtttgatgacttattttaagatgagagatatctttg

SEQ ID NO: 127402 - DNA, 201 bp, Homo sapiens
atagatgttagtcttctcgcttaaatttagcatatatatttaatattactgcatgacaaaataaatatgagcactctcaaaatgagttgatgaaaagtgayattaaaacaatctcagtctatcaaggtagctaatgcatattggataaaaattctttgaaatctaattttgcattttatgaacaaattgaaagtaaagaaa

SEQ ID NO: 127403 - DNA, 201 bp, Homo sapiens
gatagatgttagtcttctcgcttaaatttagcatatatatttaatattactgcatgacaaaataaatatgagcactctcaaaatgagttgatgaaaagtgwcattaaaacaatctcagtctatcaaggtagctaatgcatattggataaaaattctttgaaatctaattttgcattttatgaacaaattgaaagtaaagaa

SEQ ID NO: 127404 - DNA, 201 bp, Homo sapiens
atgtgttatgttatttgaggagagttttaccagacttttttttctagtcatatcttttagacacataatctacttgctccctgtctatccccaattaccasgtgaaaattataaaataaaattacggctcacagaaatcagttaataatgttccacttgtttttatatttactgaatgtgtgttaactcaccctctggatc

SEQ ID NO: 127405 - DNA, 201 bp, Homo sapiens
ttgaatgttccatgtgaaaccatgttttgccttgtgtgtgatgaagagaaagaatggttaaggaagagaaagctgcaggaagggagagatagagagaaagscttcaaccccttggagactggcttaaattctttaatcaaattaaggtaactaaatatgagttctattattttggtatttagttaccttatttgattcttt

SEQ ID NO: 127406 - DNA, 201 bp, Homo sapiens
cactgatagccagagggatcaatggaagtgaatgactaaatcaataggaaaccatcatcattactgcgtaaaaaaataagctctaaactgtattcttggtkatggtggctcatcaccatcatttcatctaggaagaataacatggtgacatattttgatatctccattacattttctggaacaacactatattatctaaac

SEQ ID NO: 127407 - DNA, 201 bp, Homo sapiens
atttgcttttgggttctcggtcatgaaatccttgcctaagccaatgtctagaggtcttttccaatgttatcttcttgaatttttatagtttcaggtcttaratttaagtccttgatccatcttgaactcaggtttaagcccttgatccatcttgtgtatagcaagagatgaggatccagtttcattctcctacatgtggct

SEQ ID NO: 127408 - DNA, 201 bp, Homo sapiens
ataagactagatgttcataaagatacctcccagagaaaaattgtcttttgaatattttctattatcctcggctcaaatgctaatgagtctcttcgtctttrgtcaacataagacttgaaattgtttccattggcaaccacctcacaattattagttaaagagaaaccagctctaggctttgaataatccatcatttttaga

SEQ ID NO: 127409 - DNA, 201 bp, Homo sapiens
attttagttataaagaaagttccagtttagaatttattctagacaaataatgacatttgaaggcaaccatggttttaatggttctctgaatcaagcaaaarcaatgtaggaaaatttaaacatctaaccctcagaaatgccaatgaagactataaaactaattcagttaatgatttcaaaatcttatttgacatgttttat

SEQ ID NO: 127410 - DNA, 201 bp, Homo sapiens
aagcataacataaaaagcgtttgcattcccacgaacacggttcagttaaagctgagctttgcctcacagaggataggcaaactgcatctgggaaccttccrggaaaactacagaaatccaattaggaacagtcctaaatggactcagaatgtttaggtatgatagagaaaccagtaattcttctcatcagtaaaagtaatg

SEQ ID NO: 127411 - DNA, 201 bp, Homo sapiens
ccaaagtcgcttccacattttcaggtatctttatagcagcacctgtagcagtaaactggtaccaatttactgtattagtccattttcacactgctatgaaraaatacctgagacggggcaatttataaagaaaaagaggtttaattgacttacagttccacatggctggggaggccttacaaacatggcagaaggtgaagg

SEQ ID NO: 127412 - DNA, 201 bp, Homo sapiens
ggaacaagcgcatcacatggcaaaagcaggaacaagggagagagtatggggggcacactttacaacaatcagatctcatgtgaactcagagtgaaagctcrgttattaccaagggaatagctcaagccattcaggggcattcgggggcatgatccagacacctcccaccaggacccacctccaacactggggattacattt

SEQ ID NO: 127413 - DNA, 201 bp, Homo sapiens
aatttaattattcttcaccatgattcaacataaaaggaaataatgagcattgggaatataataatattatggatgctaagtatactgcataaagacatgcrcagcaaatgcaaaactgccagtttcaggaaaaaaaaggtaccgggggagaaagaagtgggaggggagttgctgttcaatgggtataaagtttctgttgta

SEQ ID NO: 127414 - DNA, 201 bp, Homo sapiens
tcactattcagcattttggccaaagccatttaagtctctaggaagtctcaaactttcccacatcttactgtcttctgagccttccaagtctataggacgtyacaaactttccaacatcttcctgtcttcttctgagacctccaaactattccaacctctgcctgttgcccagttccaaagtcgcttccacattttcaggta

SEQ ID NO: 127415 - DNA, 201 bp, Homo sapiens
aaaaattaaattaactcccatccttttttgaaaatatctctctaaaaagcagagacattgttcttggacattaaagaaattctgtagattaactgcaattmatgagcctgagtgaaactttcaagcactttgatcattgctataattatgaatacccaacctgtttttacatattatttttaaaggttacaaaagtaattc

SEQ ID NO: 127416 - DNA, 201 bp, Homo sapiens
actgtttcactggtcatacagtgctgttgtattaaaacactgcatctcttagcacccatgttcccttcaagtctgtaatcaaggctgtgattttctttccyctttttcttcttattgtttttgttggaccatctgggaggaaatagagaacaagaccagaaagtgatttatgtgtccctttagcacttcactacatttggc

SEQ ID NO: 127417 - DNA, 201 bp, Homo sapiens
tcatggcataaccaaattaacttagaatattgttgtccagccaatactctatattgggagcaggactcctgtggctggcaccatctatttcatccttgggratcctttgactcagtagccacagatacattgctgtttttctagggtatggggtttgtgacctctggctgactcagtcttggctcacacaatggtgacttt

SEQ ID NO: 127418 - DNA, 201 bp, Homo sapiens
aacatgaagtatacacattacaaacaaaaaggccctcaatttaaggaatgtcacccctttataatgggcagtgaacatgcctctctttgttccagaagatrctatttctatccaaggctgtctgctttacaaacatgttcttaaaacagttcaaaacaaaagcagtcaatgattctttcataagatgtgcaaaatgtgaaa

SEQ ID NO: 127419 - DNA, 201 bp, Homo sapiens
taagatcaacgaaggatcaaactatcacaatatagtcagttaatatctgaccttatatagtagcttgatgagatccagggaatttggattataaaaatttrcagggagggaattctttattttgttttaagtgattaaaataaatattttaaaattatcaactgatggtgttgtgtggaaaactctgggacataagtgaaa

SEQ ID NO: 127420 - DNA, 201 bp, Homo sapiens
gccaaagactgactgacagtttagaaactctggtaatccctgacgcaagggtagtttgatgtcacccattggggcttatatgtggacttccactaggtacktatgagaaatattggaagcagggtggggacaggagggagcctcttggtaatacaggtgcagagtaagggattggctgccacttcagataaagcacaaaat

SEQ ID NO: 127421 - DNA, 201 bp, Homo sapiens
tttgttactgattttattgaatgagcctctttttaatggctgctaggaagctcagtgtcaactttctatccctaatgactatggagagactatgatatgcmtttttaaattaagtgacttaatttatgaatgttgttgtttaattttatgtttccaaccttattcagtcagtaatttttttcgcataatacatgttaactt

SEQ ID NO: 127422 - DNA, 201 bp, Homo sapiens
aagtagggtgggtgcagactgtaattcctagaaaagtttggaatccatataaaactcctgtggtcttttacagaaacaactggggaaagaaaagaaatttycagtggtaagatcaacgaaggatcaaactatcacaatatagtcagttaatatctgaccttatatagtagcttgatgagatccagggaatttggattataa

SEQ ID NO: 127423 - DNA, 201 bp, Homo sapiens
tttattgaatgagcctctttttaatggctgctaggaagctcagtgtcaactttctatccctaatgactatggagagactatgatatgcctttttaaattawgtgacttaatttatgaatgttgttgtttaattttatgtttccaaccttattcagtcagtaatttttttcgcataatacatgttaacttttaataaagtaa

SEQ ID NO: 127424 - DNA, 201 bp, Homo sapiens
tacttgtacatagttgagatgcagcaattcacccatttattcatatgagacatacagcatttattaagcatctactacattctggtgataaggatacagcmgtgaagaaaacaaagcccctcacaaagcttacattctggtatcactaaaatgattgcatattctggctgcaacctggggaatcagtgatctaaaatgtta

SEQ ID NO: 127425 - DNA, 201 bp, Homo sapiens
ctcctagatacctagttgaaaaatattctttgaaaatataactttgaaaattttaatgttaagaatacctgcagtagggggaaatttaatactattgtctwtacgtgaaagtaggcagtaaaattcacccatatttccttttcagaactccctgttcttaaccaggttatgtaaactgggagtcccttcattattatctct

SEQ ID NO: 127426 - DNA, 201 bp, Homo sapiens
ttaagactcgaagacttaaggtgaactattcatttttatgcttgggattaatgaagaatggacagtcatatggaaatgtgattgggcaaaaatgatctgayctaataataataaacaaaggagggacgggcgcagtggctcacgcctgtaaccctggcactttgggaggttgaggcgggcagatcatgaggtcaggagatc

SEQ ID NO: 127427 - DNA, 201 bp, Homo sapiens
cccttattgtttttaggcaacttggttttttgaggttagttaattttgaaagctgactcaacaaagcagcacataaggaatttatctgaaagagaatgtgsctaggaggggatacaactatcacagaggccttggatcagcaattaatgcatcattaatccttgatgttccttgaatttcttcataaacaccccaataata

SEQ ID NO: 127428 - DNA, 201 bp, Homo sapiens
tatgaaaaaatattaaaagcttatttgttatcagtagtttcataaccactgccaagctttgttctaagattttgaatatattggattgactttcactgaakaaagagtaattgtaatacttttcagcttgtgagaccttacatctaagtctcactgagaactttttgatcactaattaaagctgctaaacagttagtgtac

SEQ ID NO: 127429 - DNA, 201 bp, Homo sapiens
ccatctgatttctttcatttgaaaatggaactgctgagaacaacatatatacttggcattggcttcataagtataaagtaaataatttaaattattgtcartgtattatactgtttgatatatagaaatataaatattaaactcctaatgaaattcaaagttaacataggcatgttgtaacactgttttatgtttgcagtg

SEQ ID NO: 127430 - DNA, 201 bp, Homo sapiens
gcccaagcaagttaacacataaaattaaccatcacaaactggaagagcaagaattttatgtaaacataatagcaaaagattagaccaggttaccagcctgscctaatgttagaaaaaagggtgtaggaaagagtcaaggaggataaagcagttggtttcccatggattctctatcctgccctgtaaactggactaaagcct

SEQ ID NO: 127431 - DNA, 201 bp, Homo sapiens
aataaagagtaattgtaatacttttcagcttgtgagaccttacatctaagtctcactgagaactttttgatcactaattaaagctgctaaacagttagtgwacttctattgaatagaagcattttcatgattgatgagacagagccaccattaaaatggggtacagcaatccacagatagaataaaattacttataaaggg

SEQ ID NO: 127432 - DNA, 201 bp, Homo sapiens
tctatttgaaaatacaatcaaactatataataaggctataagactagatgttcataaagatacctcccagagaaaaattgtcttttgaatattttctattrtcctcggctcaaatgctaatgagtctcttcgtctttagtcaacataagacttgaaattgtttccattggcaaccacctcacaattattagttaaagagaa

SEQ ID NO: 127433 - DNA, 201 bp, Homo sapiens
tgacaaaagaaccactgtcctggtattagaaagaaatatctttttctaactctccattcatacaacatattttaaaccctggagaatgggacatttggggrttgtgctctgagtcaagtagaaattcaaagaaaattccagtgataaaacaaactgtcccactttctctaagttactcataacagtgatttagtacataaa

SEQ ID NO: 127434 - DNA, 201 bp, Homo sapiens
taggctgacagataaaatcagaggatagaagaattatcaggacacttgttagttacattaagataaaacgttttagacttttgcccatacagacattttgrttgagcttttaaaaatactgccattccctgtgtttccaacttaaagatggctcaaaccttaaaccactaatttaatttttggcacactgaataaaaactg

SEQ ID NO: 127435 - DNA, 201 bp, Homo sapiens
gtagttttcaatatgagtgagaggaaaaagtagaagagatgttttcaatccaatggttaatctgtttgacacaacatttgcttcctcataatgggtgatgrtagtttatattactctttaaatcagagctcaacacatgtttatagtatcaaattaataatattcactgtgctccttaaagttggatattagcaaaagtga

SEQ ID NO: 127436 - DNA, 201 bp, Homo sapiens
tccacattcaattgaaacagcaggtccagaaaacatgtaagaaacaattaattatataggctgaaaattgtccaaatccctggaaaactgtccaaggtcartttcccttcaccctaaaattattttcctgaggcacataaaaattttattgacatagaccagttgtataaatagcacagaatatgttagacagctaatttt

SEQ ID NO: 127437 - DNA, 201 bp, Homo sapiens
tccaaggtcagtttcccttcaccctaaaattattttcctgaggcacataaaaattttattgacatagaccagttgtataaatagcacagaatatgttagamagctaattttttcaaactaaacaattatatagacaagctgtcttctttcataaatttgtcttctgatataccaaaatataaatattcatacacactcaaa

SEQ ID NO: 127438 - DNA, 201 bp, Homo sapiens
gaaaataatattgtgtcttcaccttactgtttttttttgtcttcattcaatcaccatccagccatgcacaccacaaagcccaatcatcactgaaaatataycaaaaggaaagtaattttaaaattatttttaatgcaagtactgaatcagactaattagcaaacctttatcctggtctactgagaaagatgtcaaaataat

SEQ ID NO: 127439 - DNA, 201 bp, Homo sapiens
aattttttgaaatgaataaaagctaaatgcataataatttcaggtaaaaaaatacaaacgaatgtttgaagaacaaaataataaatttataaatgtttaaygcagcgggaccaagcagtaccaacctttgataatgtatggtaagcattagcaatgttgttacttggaaaagacaaattaaaaacctggcaatcttacctc

SEQ ID NO: 127440 - DNA, 201 bp, Homo sapiens
tgaataaaagctaaatgcataataatttcaggtaaaaaaatacaaacgaatgtttgaagaacaaaataataaatttataaatgtttaatgcagcgggaccwagcagtaccaacctttgataatgtatggtaagcattagcaatgttgttacttggaaaagacaaattaaaaacctggcaatcttacctcatgttgttttgt

SEQ ID NO: 127441 - DNA, 201 bp, Homo sapiens
gtgcctttaaaaacatccttccatttctcctgcttaataagtagatataaaattggggtacttacaaaaagtatttaattgtcataggtagttggcaagayaaatttttaagaatccaaatttggtaaagaaatacatataaacaacttttgaagagcatcagaaattgaacagcctatcagaccatctgggactgtattc

SEQ ID NO: 127442 - DNA, 201 bp, Homo sapiens
tctcttaggagggataagtcatgtccaagaatagaatacaaaaagagaaaatggtgtcagtagtatggtgttatactggtgtgctatactaaatggtgtcygtttcaggtaaaatgacattagaattcagaatgaaggagtgattccagctggagcaattaggaatcagggaagtcattgtaaacaaagtggcatttttga

SEQ ID NO: 127443 - DNA, 201 bp, Homo sapiens
agcctgtggtaaccatcattctattctctataatttgtaataattatacttctagagcaaaagataaactctgcctacctgggtcttgattctcttaggasggataagtcatgtccaagaatagaatacaaaaagagaaaatggtgtcagtagtatggtgttatactggtgtgctatactaaatggtgtccgtttcaggta

SEQ ID NO: 127444 - DNA, 201 bp, Homo sapiens
tatgaatgttttgaaatgaactagccatacaaacaatgctctcttaaggatttgcctttcaatttttcctctccttgcatgctctgagaagcctcctgtarccacaggagcaagaacacttggaaaaaatatgtttattgagaagattgccaatggttacaaattcctggcaacttgctcagttctctaagtaattggcca

SEQ ID NO: 127445 - DNA, 201 bp, Homo sapiens
gccttgatagtagggtcaaaatcaatgtctatggaagactacctataatagtgactactttaaattcttttctcttcttatcccttataatgatatatccwtactttcaacatgcagatataagcagttctaagtctatgcttcaaattacatgctctggggaaagaattagtaaacaaagatgtcaagaaaatctgaatt

SEQ ID NO: 127446 - DNA, 201 bp, Homo sapiens
tcagaaaacagaacaaatgctctgacttgcaatgtgagcacagggaacaccacgttatttctacctggatatagtgggaggatggaaatcagatgtctcayagagaagaagagatttgaactgtcattagaagaaacattggccaggtgtggtggctcatgcccgtaatctcagcactttggggggccaagacaggtggat

SEQ ID NO: 127447 - DNA, 201 bp, Homo sapiens
actgtggcagtgcaaacttattgcttgctactctgcagctatttctgaactcaagttattttagaaattcttcaaaatttaacattttctcctgatccttkttgaggaatcagtacaccatagtggtcgtccctgcttataagacggggttaataatattaccacctacactgttggtttgagaatgacacaagatggtgt

SEQ ID NO: 127448 - DNA, 201 bp, Homo sapiens
gcaggttagtcattactgtgtgtaagcatgcattccacagcagaatcatgagggtttggataatagaggaaggttaattagactgtagtaagtacataatwtagaggaatatttttcttcacaaaaaagctgaaaattgtccctggactgacaccaaaagagaaagggcgacaattttgggggacttgttagcactaagct

SEQ ID NO: 127449 - DNA, 201 bp, Homo sapiens
atgcagagggaggagagaaagccccagtaagctacatgcttcagacataggcactgaataataaggaaacagaaagaaatatagaaactgaattgctaagrcacttttattgccactcctaagaaactcaacattatcagcagtagtaatggccatcatttatacatgttgattttataaacttattttttttaaagttct

SEQ ID NO: 127450 - DNA, 201 bp, Homo sapiens
agtaatcaccaattactgaatgctatttgacaattatagtgttaaaattttatatacactatttcatgggactattacaataattattacaataatcccaygaaacagatacatcattaactacattttaccaaatagtgcaactgaaaattaataaagttgaataattttccaaaagtccacagaaagcaggaattataa

SEQ ID NO: 127451 - DNA, 201 bp, Homo sapiens
gtctcttagactctcactaaaactccgtcatcaagttgtaattcacacatgtagacaagccttcagcctctccaaacatttttaaaatctgtaaattcaaracatttaaaaagaagacacatgatctcatctggactgctgcttgatctggtttgatattcttcagcactctactttttataacgggtcaatagcagacgg

SEQ ID NO: 127452 - DNA, 201 bp, Homo sapiens
tgtagacaagccttcagcctctccaaacatttttaaaatctgtaaattcaagacatttaaaaagaagacacatgatctcatctggactgctgcttgatctkgtttgatattcttcagcactctactttttataacgggtcaatagcagacgggctgtaactgatctccttatttcagagctgaaaacacaaggcactttgc

SEQ ID NO: 127453 - DNA, 201 bp, Homo sapiens
atttaaaaagaagacacatgatctcatctggactgctgcttgatctggtttgatattcttcagcactctactttttataacgggtcaatagcagacgggckgtaactgatctccttatttcagagctgaaaacacaaggcactttgcgttgggtgcagttctattctgttatgctactcccgtttgtcagtaggtaaaaac

SEQ ID NO: 127454 - DNA, 201 bp, Homo sapiens
aagcagagacattgttcttggacattaaagaaattctgtagattaactgcaattaatgagcctgagtgaaactttcaagcactttgatcattgctataatwatgaatacccaacctgtttttacatattatttttaaaggttacaaaagtaattctttttcctccttcaagataatacagtaaaatttgttttctttgaca

SEQ ID NO: 127455 - DNA, 201 bp, Homo sapiens
ggcagtacttctatgaatagttgctttagacaagcattcattgttcaaagggtttgattcctcactgagcaaaagctacagcattataaagatgccagttkaaatttttttaagcttgaattttttaaagctagaaaggaaccctcactgttggggaagtcatgaaagaaaaccccttttcacaagccctggaacaagtgg

SEQ ID NO: 127456 - DNA, 201 bp, Homo sapiens
tagattaactgcaattaatgagcctgagtgaaactttcaagcactttgatcattgctataattatgaatacccaacctgtttttacatattatttttaaakgttacaaaagtaattctttttcctccttcaagataatacagtaaaatttgttttctttgacacaattttaattgaactacatacacatgttttccaactt

SEQ ID NO: 127457 - DNA, 201 bp, Homo sapiens
atccctttgaagacctaatgcagtagaattttttgaaatgaataaaagctaaatgcataataatttcaggtaaaaaaatacaaacgaatgtttgaagaacmaaataataaatttataaatgtttaatgcagcgggaccaagcagtaccaacctttgataatgtatggtaagcattagcaatgttgttacttggaaaagaca

SEQ ID NO: 127458 - DNA, 201 bp, Homo sapiens
taactgatatgtatggtggagtttgacagaatcctggatcaggaaaaataacaatcttaaggttggaggagatttttaaaatcatcttgaccagctatccrtttcattacatcattcctcactctgaggctcatttctaactggtgttaccttggaagatgactaatttttagtgcttgttttgaatttagtttgtggaat

SEQ ID NO: 127459 - DNA, 201 bp, Homo sapiens
attaaacctttccatttagtgtcaaactgaacagatgcaaactcacttatggggagccatcctttggaaataaactctttaattcaaaaaatatctaataytagaatattccacagaatatgaatacctacttaaattcatttcgagtaccaaagaatatttcagtaataacatttacatactaaattaaacttaattata

SEQ ID NO: 127460 - DNA, 201 bp, Homo sapiens
gggaggccgaggcgggcggatcacaaggtcaggagatcgagaccatcttggctaacacggtgaaaccccgtctctactaaaaatacaaaaaaaaaaaaaaatagctgggcatggtggcgggcgcctgtagtcccagctactggggaggctgaggcaggagaatggcatgaacctgggaggcggagcttgcagtgagccgag

SEQ ID NO: 127461 - DNA, 201 bp, Homo sapiens
actgtccttttttttcttccaaaagaatagccaatgaactagttagagctagttaaaccagaataaaatccctttcacacacacacacacacacacacacaattgaatagtaataaaataagaaaataatgttactgtcacttagaatcattgccttctaggttgaaaacaatggttttcctatgatatcttcataagtta

SEQ ID NO: 127462 - DNA, 201 bp, Homo sapiens
aactgtccttttttttcttccaaaagaatagccaatgaactagttagagctagttaaaccagaataaaatccctttcacacacacacacacacacacacacaattgaatagtaataaaataagaaaataatgttactgtcacttagaatcattgccttctaggttgaaaacaatggttttcctatgatatcttcataagtt

SEQ ID NO: 127463 - DNA, 201 bp, Homo sapiens
catcattacaggaatttctattagtcagagatgggctagaggaattctctaaagaaatctcatggggcaactagaatcacaagacaaaatgggtcagtatraagtaagatcttttagagtgatgtaagtctttgtctcagattcactaaatgatgagagaaaattcacaatagaggataactagagttgactcacaggccg

SEQ ID NO: 127464 - DNA, 201 bp, Homo sapiens
ttccttgtttcaaagacagcagtaactacttccaagctctttttttttttttttttgaaaacgagagtcttgctatgtttaccagtgttaaagcaaactamatatggcctgagaaggactccatacttctatatttgagttattgcggatgaactgtaacctagcttaataggcagacaagattgaaaatctaacttaaga

SEQ ID NO: 127465 - DNA, 201 bp, Homo sapiens
cagtggctcacacctgtaataccagcactttgaaaggctgagtaggaaggatctcttgagcccaggagttcaagatcagcctgcgcaacatggtgaaacayctccacaaaaaaatacaaatagccaccgggtgtggtggctcatgcctgtaattccagcactttgggaggccgaggcgggcggatcacaaggtcaggagat

SEQ ID NO: 127466 - DNA, 201 bp, Homo sapiens
tatttgttgtttatgagccacacagtttattatatgttgttgtaacagcctgactgaactaagacagaaacatagatacagataaatatagatataggtaragacagatagatagatagataaccaagttgattttgacatcttttgaagaatttaaatagtttcagtgttagaggtgactgcctgaatgtggatgtgaat

SEQ ID NO: 127467 - DNA, 201 bp, Homo sapiens
ccagtaattctacctgtggtaatttattcatcaaaaacacttgtatgcaccactaagaagccttcaccaaaatgtttattgcaaatttagaatgacaaagyattaaaaataatcaaaatgtccatcaataggagaaaagtaaaatatataataatatattcttaccaatcagtgctaagcaaccattgaaaataacttggt

SEQ ID NO: 127468 - DNA, 201 bp, Homo sapiens
tggactttccagccttcagagctgtgagaaataaatatttgttgtttatgagccacacagtttattatatgttgttgtaacagcctgactgaactaagacrgaaacatagatacagataaatatagatataggtagagacagatagatagatagataaccaagttgattttgacatcttttgaagaatttaaatagtttca

SEQ ID NO: 127469 - DNA, 201 bp, Homo sapiens
atgtcaaaacttaatcccaaatgtgatgatattaagaggtggggtcattggtgggtgattagatcatgagtacagagctctcctggatgggataagtgccyttataaaataggctcaaggaacatcattggccccttccaccatgagccgatacagttagaagatgtcctctttgaggaacaggcgctcctcagacaccaa

SEQ ID NO: 127470 - DNA, 201 bp, Homo sapiens
tggcacaagaccaagctcaaggaaaagactttatagctagaaatttgctatcatctgaatgtttatatctgccccaaatttatatgtcaaaacttaatccyaaatgtgatgatattaagaggtggggtcattggtgggtgattagatcatgagtacagagctctcctggatgggataagtgcccttataaaataggctcaa

SEQ ID NO: 127471 - DNA, 201 bp, Homo sapiens
aagagagagagtatgggtgacggacagaaataatgaaagacaatattctgtttttaaactatgattttgaaaacgtgaattgtaattactggataacatcmatctacttctatagggtaaattaagatgggttatattccttagtagaggaaaatctagattcattttgtaacacaagagtagaaacagtaattggcacaa

SEQ ID NO: 127472 - DNA, 201 bp, Homo sapiens
acatttggatttttctctactatttcttattatgtacttaaagtagtagaaataacaataatgagaaggtgctaatgattaagagagagagtatgggtgayggacagaaataatgaaagacaatattctgtttttaaactatgattttgaaaacgtgaattgtaattactggataacatccatctacttctatagggtaaa

SEQ ID NO: 127473 - DNA, 201 bp, Homo sapiens
cattgcaaagttaaggagtaacatgttgcttggaaagaaaattactctttcaatgactttattgaatgtcacataatatgaatgggagacaatgtggaagwtaaattatcatgtgtattatggatgatatttttttctatacaatcttacaaaagctgaggtgtgtatagtataatcaaatgttagtatatgtacagtaca

SEQ ID NO: 127474 - DNA, 201 bp, Homo sapiens
atttgtgccagtagaggtatttctttagttactgcttattattattttgaacaatattgtagcctcagacaatgtcctattggaattagaaatgaatgagyactacttattgggcccaagagaaaggtgttaaagaaggaatggcaaggtttgcaccttagtgccaatactcaaactgctttaggctggaaaccagttggc

SEQ ID NO: 127475 - DNA, 201 bp, Homo sapiens
gtaactttacccatttagatttcagaatttaatgaggagggatcagccttagatgtgaggacagatgtcttttccactctggtgggagggaaaaaagcaasaatgttctctttgatgtattctcttctagtggcctccattttttctattgtgttcacaaaatatggaactttcttctgagtatttagcaacttggtaaac

SEQ ID NO: 127476 - DNA, 201 bp, Homo sapiens
ttttattccaaagaaatgtagtcataagtgtggtaaagctctgtgtttgagagggtagcagcattgtgggatttaaaacaatagcagaaaaaaaataattrcgaggctactctcaaaccaaatgccattctcaaacaaatttcacaaataacaaatttgatataacttttagtatcccttaagaatatcaacttttaatga

SEQ ID NO: 127477 - DNA, 201 bp, Homo sapiens
aactgaacagatgcaaactcacttatggggagccatcctttggaaataaactctttaattcaaaaaatatctaatattagaatattccacagaatatgaayacctacttaaattcatttcgagtaccaaagaatatttcagtaataacatttacatactaaattaaacttaattatacagcataaaacatttataaccatt

SEQ ID NO: 127478 - DNA, 201 bp, Homo sapiens
  misc_feature (1)...(201): n = A,T,C or G
agttactggatctagtgagtacataaagtgggaagcaaaaagttttatctttggagacgtaatttggtgaaggatcctgaagatgccacctataccctgcncaccaggcagatgcaccaaagtatctcagccaatttcattgagattcagactggcaaggagcttatggtaaagtctttataattgaattaaaaacttaag

SEQ ID NO: 127479 - DNA, 201 bp, Homo sapiens
gtaaagtctttataattgaattaaaaacttaagtaattgtttctgttatttaaactcactggaaaagcttcaaaatgagacaatgatttgaatgaaccagyagtctcttggttacactattagggataatagatatccccatcgatctagaacttataatggcacaattgctaccaaagttcacaggagagttagtgtaag

SEQ ID NO: 127480 - DNA, 201 bp, Homo sapiens
gaaaagcttcaaaatgagacaatgatttgaatgaaccagcagtctcttggttacactattagggataatagatatccccatcgatctagaacttataatgkcacaattgctaccaaagttcacaggagagttagtgtaaggaaatccagaactactcacattggggtagaacaattacctcatttttgctagctcaggatt

SEQ ID NO: 127481 - DNA, 201 bp, Homo sapiens
tgaatgaaccagcagtctcttggttacactattagggataatagatatccccatcgatctagaacttataatggcacaattgctaccaaagttcacaggasagttagtgtaaggaaatccagaactactcacattggggtagaacaattacctcatttttgctagctcaggattaaccattagtggataagttgcttgttc

SEQ ID NO: 127482 - DNA, 201 bp, Homo sapiens
tatttctatctagcttaagttctacttttaaaaaagaatttatattttagatatgttgagtctctgctgctacttgaagtttcatgcttgttataccttcrttatatattctctttttctgcataaaatgacaatttgtatctaatttaatgctttctgccttggactctatcttgtctaagactaaaataatgatcaata

SEQ ID NO: 127483 - DNA, 201 bp, Homo sapiens
acttttagttatggccacagctactttctgctattctactttatattcattgattataccttgaatataatttttcattagcttaaatttatattatcaamgaaacaagaaattaattaggctgacagataaaatcagaggatagaagaattatcaggacacttgttagttacattaagataaaacgttttagacttttgc

SEQ ID NO: 127484 - DNA, 201 bp, Homo sapiens
ataaaactaattcagttaatgatttcaaaatcttatttgacatgttttataaaacaggaataaaaccattcctcagtaggaactactcagtcctgcaattrtaatttgaatcaatatcatattaatatagagcaacactgccttgcatttttttctctgttgattcaaaaatcacttgtcttcaaatctactcctgtctgt

SEQ ID NO: 127485 - DNA, 201 bp, Homo sapiens
cattgaatttcaatttttcttttatctgaaaataaatttgagatttgatgagctttatttgatgatttttcatgaatttgagatgtctgtgggaagtccaratggaaggatcaagcaggcatcttgatatatgagtctagagttcaggagtgatctgctctggagatacataattggtaactttgcacatatatgtggaac

SEQ ID NO: 127486 - DNA, 201 bp, Homo sapiens
attctgcccatgacacctcagagtctgttaccaaagtcactgaaaacatcacaaaggaggaccttgagctcctcagaatatgttaaataagtattaaatgyggtaaactgtaaagattctctgtcttttcataatctttttattattttggtgagtttagttttgtgtttttcctttggaagagaatgcctaataaaatga

SEQ ID NO: 127487 - DNA, 201 bp, Homo sapiens
gccattggttgaagaaaataaaatatttcctatactttttttaaaatgtgacatttggacaaaatgtgatacttattagtaagaggcaataaatgtatgtygcactacatagttgcccctcagtatcccttggggcttggtttaaggatctcccactgatataaaaatctatgcatgctcaagagtctgatgtaaaatggt

SEQ ID NO: 127488 - DNA, 201 bp, Homo sapiens
ttatttttttcttaataatgttatatataactgtatttaaaaatgccaatatgctgctctgagttcctcacgggagccacaagtttttactttgaacaatstgttttttaaattgaaggttaaaattagaggtttatcattttgcctttgatcttttacttttatcagaaagtaagcgccattaattctggaatgccattg

SEQ ID NO: 127489 - DNA, 201 bp, Homo sapiens
ttaaaatttgtgaccttaaattcatgtcatttaaatcccccaaatgaatataatgattcatccacttttgtgtttgaaatataatctgccttaaaataaayatgttgctaaagggtaaaacctagtatatgcctcttgattttatgagagcacaagatcaaatcttcattatatttagagcttacactgaagatggaaagc

SEQ ID NO: 127490 - DNA, 201 bp, Homo sapiens
agaatggtgtgaacctgggaggcggagcttgcagtgagccgagatcgtgccactgcactccagcctgggcgacagagtgagactccgtttaaaaaaaaaaraaagaaagaaagaaaaagaaaagaaagaaaagaaaagcaagagctaccagaggtgagagcacacaaaggaatgaccaagtgaagaggcagcaatagggca

SEQ ID NO: 127491 - DNA, 201 bp, Homo sapiens
agtgtaatacagcagttaaaaatatctttttatttttttcttaataatgttatatataactgtatttaaaaatgccaatatgctgctctgagttcctcacrggagccacaagtttttactttgaacaatgtgttttttaaattgaaggttaaaattagaggtttatcattttgcctttgatcttttacttttatcagaaag

SEQ ID NO: 127492 - DNA, 201 bp, Homo sapiens
gtaaagtaagattgtgtgagacagaatgtacatcttaaactctctcaaggaaagtaaatgtattaatttaagagttcagaggttagtggactctgggtatrgtctgatcaagtcactcagttttttacaattctactggctcttttatattccatgaaaagcttcattctgtgacttaactttttttgtgcctgcaaacag

SEQ ID NO: 127493 - DNA, 201 bp, Homo sapiens
tagtcctagctgcttgggaggctgaggaaggagaatggtgtgaacctgggaggcggagcttgcagtgagccgagatcgtgccactgcactccagcctgggygacagagtgagactccgtttaaaaaaaaaaaaaagaaagaaagaaaaagaaaagaaagaaaagaaaagcaagagctaccagaggtgagagcacacaaagg

SEQ ID NO: 127494 - DNA, 201 bp, Homo sapiens
tcgataagccaagaagtgaagacgcaggttagaatttgaagaaccccctttcttttccatgttaagttgtcaggtagtgaggtactactgaacagtttgamctttggaatgggttgagttaaacctgagtgtctatgttttagaaagttatcatttgtgacaacacaccgttgtaaaatctgtagttttcctaatatatgt

SEQ ID NO: 127495 - DNA, 201 bp, Homo sapiens
taaaatctgattctttgaaatccagaaagttactaattgggagttagaaggggtaaaaaaaacgctcagtgtcaaaagatttattgtaaaaggtctttcttgtctttttgggaggggagagagtgttatggtctgaaatgtgttctcaaattcatgtcgaagtcccaatctccagtatgtttttggagataaggtctttaa

SEQ ID NO: 127496 - DNA, 201 bp, Homo sapiens
agaaatattctgaaaaatcagagtcagactgattttggttagaaaatacaaatcctatgatttctgctacaatggtatctgaatcaagataatgaccattragtctcagacctttacaaaggtcttcagtcaggcgagacaaaaacattaatttgttaaatgagactatgggaaatactaccaacctcctgagatctctca

SEQ ID NO: 127497 - DNA, 201 bp, Homo sapiens
agaaaccagtaattcttctcatcagtaaaagtaatgaagtgcctttaaaaacatccttccatttctcctgcttaataagtagatataaaattggggtacttacaaaaagtatttaattgtcataggtagttggcaagataaatttttaagaatccaaatttggtaaagaaatacatataaacaacttttgaagagcatcag

SEQ ID NO: 127498 - DNA, 201 bp, Homo sapiens
ttgtaaattcaaactacactttaattcatgttatttactattataaacatacttatttcacctaaatactttcaatggaggtagaggcaatatcatttctktattctttaacttccctgtggagattatagcatggccaggcagtgaatgagaaatataaagtgatgattaaaatggaaatgagccatctgtaataatatt

SEQ ID NO: 127499 - DNA, 201 bp, Homo sapiens
gaagcataacataaaaagcgtttgcattcccacgaacacggttcagttaaagctgagctttgcctcacagaggataggcaaactgcatctgggaaccttcygggaaaactacagaaatccaattaggaacagtcctaaatggactcagaatgtttaggtatgatagagaaaccagtaattcttctcatcagtaaaagtaat

SEQ ID NO: 127500 - DNA, 201 bp, Homo sapiens
cagtgcaaacacaattaccttctcacatacaggataaagcaactctccccctttttgtcatccaatatcatagtagcacgatcttttctccctacctgtcyaattttttttttatttttctttttttttttttcttgagatggagtctcactctgtcgcccaggctggagtgcagtggcctgatttcggctcactgcaacc

SEQ ID NO: 127501 - DNA, 201 bp, Homo sapiens
atcctttaatgataagtttcttctgaaatgtatttttattactgtttttatacttttacaatattaatcttaatgataaaatctagacagaatatataggyttttgtatcatttttccaaagtttggaatactactagttatcagagatttttattagctattctatgaataaagaaaaagcattccacaatcaaataagt

SEQ ID NO: 127502 - DNA, 201 bp, Homo sapiens
agttatcagagatttttattagctattctatgaataaagaaaaagcattccacaatcaaataagtttcagaaatgtttcctattacagtcctctctgtatytttctattagcacacaaaatggtttggtaagtcctgtaaaaaagactctgaatcaggtgagatgcaggagaatgaaaagcctcaagggagaatgaggaaa

SEQ ID NO: 127503 - DNA, 201 bp, Homo sapiens
ggcttgttggggcaacagcaagaaatgatgttgatagagtacatctaggcaggggctggggagaaggccttcacaggttgtaggtcacgaggtctcagtawggattttgatttctattttaatttattttatttctttgcatttcatttttttgaggtaaggtctcactctgtcatccaggctggcatgaccactgctcac

SEQ ID NO: 127504 - DNA, 201 bp, Homo sapiens
ctgggattaacaatctgtgacttttctcacagagtgattttcactaagcaattgaaattttgaattttaataggctttacttgttcactactttataaggmatacatttatattattctcttcacttttccttttccctattctttttctccttttctctccagagggcagaatcagcctgttttgaatatcacaaacaaa

SEQ ID NO: 127505 - DNA, 201 bp, Homo sapiens
tgaatatcacaaacaaacaggctttcattactgctcagaatcatggctatgccttggacaacaccctccctgctggctggaaaccactttttgtgaatgtsaacgatcaaacaaatgaggtaaatgatgtcaataaacctgttcagttggtgatgagaaacgcagggcttttaaaaataattgatacataagcattgtata

SEQ ID NO: 127506 - DNA, 201 bp, Homo sapiens
tgcaccaccacatgcagctaattttgtatttccattagagacagggtttctccatgttggtcaggctggtctcgaactcttgacctcaggtgatccgctcrccttggcttcccaaagtgccaggattataagtgtgagccactgcgcccagctagctcttttcaaatgcattgtaggtcaacttctcctttgctcaatctg

SEQ ID NO: 127507 - DNA, 201 bp, Homo sapiens
aataaacctgttcagttggtgatgagaaacgcagggcttttaaaaataattgatacataagcattgtatatatttatgagatacatgtgatattttgatayatgcatatcatatgtaatgatcaaatcacactaggataaccatcacctcattttttatttctttgtattgagaacatttcaaatcttctcttctagctgt

SEQ ID NO: 127508 - DNA, 201 bp, Homo sapiens
caacaagagcaaaaaaccccatctcaaaaaaaaaaaccaaaaaaaaaaaaaagaaataagagcaggttgaataggcaaaacagctagcctgactcggtacyggctcctaacccgcatatcttttaagtcctccctgaccaggaaaaggatccttgtagaaccgaagtggatctgaacttacaaagaccaagtggattaaat

SEQ ID NO: 127509 - DNA, 201 bp, Homo sapiens
catgcaccaccacatgcagctaattttgtatttccattagagacagggtttctccatgttggtcaggctggtctcgaactcttgacctcaggtgatccgcycgccttggcttcccaaagtgccaggattataagtgtgagccactgcgcccagctagctcttttcaaatgcattgtaggtcaacttctcctttgctcaatc

SEQ ID NO: 127510 - DNA, 201 bp, Homo sapiens
aggtacgtcaaaaagatgaggcctattatgtatgcaaaaaaaaaatgtatttgtgtggaaattcgagaaaccaaaataatcaccccagatgatcttgagcrgaacattctcaagaagagtgctttggtaacacacattttgtattaaaatctccccatgaatgtcacagaggaaatttttatcttttttaaaatttaaagt

SEQ ID NO: 127511 - DNA, 201 bp, Homo sapiens
agctgggcatggtggtggatgcctgtaatcccagctactcgggaggctgaggcaggagaatcgcttgaacccagaaggcattgcagtgagccaagatcgtrccattgcactccagcctgggcaacaagagcaaaaaaccccatctcaaaaaaaaaaaccaaaaaaaaaaaaaagaaataagagcaggttgaataggcaaaa

SEQ ID NO: 127512 - DNA, 201 bp, Homo sapiens
taggatgggctgaagcctcttttctttttttgagatggagtttcactcctgttgcccaggctggagtgcaatggtgcgatcgcggcttaccgcaacctccrcctcctgggttcaagcgattctcctgcctcagcctcctaagtaactgggattacaggcatgcaccaccacatgcagctaattttgtatttccattagaga

SEQ ID NO: 127513 - DNA, 201 bp, Homo sapiens
actagaattaatatgcttcctttaatgagtctaattagtattttataatttagatttatgacactacctcttttcaaagttgctataattattttccttamctgtgcctttataaatcttgtattaaagaagcttgatcacgagcaagaatttcaactttctgtaatgtgcacatctgtaaattgaggaggttaatctcca

SEQ ID NO: 127514 - DNA, 201 bp, Homo sapiens
ggcaggaatctagtttttaggggggctgaaaaaacaattattgtaattataataatatttattaagaactattaataggcaagtaactgtgctaaattatrgtagtaacacttaagtagtgcttacttctaaattagtttattgaacactcatactaatgtaagaactgttactattcctgttcaacagatgaggaaactg

SEQ ID NO: 127515 - DNA, 201 bp, Homo sapiens
aaacatttgttgatgttttctctttggcttcagcttgtcttttcattctcttaaatgtctttgaagagcatctaatgactggtcactcacagaagtacacstgcccaacacccttgcttcaatctaggaccatcttatgtccttatatcatcttatcatcttacgttttatatccagagctgcccataggatgggctgaag

SEQ ID NO: 127516 - DNA, 201 bp, Homo sapiens
ttaagtatgcatcaaaatcacctggagggtttgtaaaacaacaaattgctaggatccactcccagagttcctgattcaatagatctggggtggggttcaarttttcatatttttaataaattcccaggtaatgctgatgctgctctgccagggaccacagtttgagaaccactctacttgagcgatggtactttagaaacc

SEQ ID NO: 127517 - DNA, 201 bp, Homo sapiens
attcataatagctttgagagatctttatatataagtcatttatgagatatatgtaaaaacatttgttgatgttttctctttggcttcagcttgtcttttcrttctcttaaatgtctttgaagagcatctaatgactggtcactcacagaagtacacgtgcccaacacccttgcttcaatctaggaccatcttatgtcctta

SEQ ID NO: 127518 - DNA, 201 bp, Homo sapiens
cacctactctgtatgccatttgtggatatagttggcaccatctttatgtttattggaaggaatgtcagtgatgtcagtttcatgttttgtaactcagtctrcagtctcgggctctctaaataacacacagaggcatgactgctatgtattttaaaccaaataagacatttagaaaaatgtttgccaaagaaagtatctctt

SEQ ID NO: 127519 - DNA, 201 bp, Homo sapiens
gaagttttctggaagaccctttaacattaaatgatttactctagagtagatcaagagcactcactgtgttttcctctctgattgggctattcagtgatgcytgtggagtggcaagtaccaatctgacatctgcgcttcagcatcgctcagaaacacaaagcaagcattttatttgaaaagacaactccaagtgacatgaat

SEQ ID NO: 127520 - DNA, 201 bp, Homo sapiens
attcataacatcaatcttataactaggacttaggataaaagaatcaagatgtagattttgtcaaaggattcttctcaatctattacattccctgtgtctcyaccaaggcatttctaacataagaaaggcataacacaggtttatatggcaacaaaaatcatctttgattttcctgtaatatttctagccacctttcatcgc

SEQ ID NO: 127521 - DNA, 201 bp, Homo sapiens
aatctcaactttttaccacagcttcatagcaattgcagataaagtaattagggttccatattttaggatacattgtacttttaaaaaacattttatttaaygtgatcctacttggtcagaagaactcatataaacacttttggatatattaagttagaactgaaaaatagcacaaaaaagactgctaatatataaatgggg

SEQ ID NO: 127522 - DNA, 201 bp, Homo sapiens
tctactatattattaataaacaagcacaggtacaaatatccttcagctggactccccttgctataagtatgtaaggaattcaactataatagaacttgtgrgaaagaactatttcaggactttacacccccaagcattattatttataataccaatttggattggcaattttatattgaaagacaatcatgatacttaaaa

SEQ ID NO: 127523 - DNA, 201 bp, Homo sapiens
aaataaatgttctagcagctacatgagttgttgcgaagaactttctgcacatgagagcatacggacacagatttaaaaatatattaaaaagtacttaaagraacttaataaaattatacttaagaaaatatttacagccatggcaaaattgatcagctaatgcatagtttcttcattactatatgtaggattttcattcat

SEQ ID NO: 127524 - DNA, 201 bp, Homo sapiens
gtagtattttaataaataccaaaagaaaaatatccttactccgatctgtaagaaattataaaaatctcacctatagttcttttttccattagtgcatagaktcaattttggtcatgtaaagatctcctgcctggagagaggaaatgcaggtaccataaatcaaataaagatgtcaaatgtcttcaccaactaggttcttct

SEQ ID NO: 127525 - DNA, 201 bp, Homo sapiens
gtcaattagaaggaaaaaagtactaaattggaaccaaaatacttaaattttagttttgactgacaacctcattgatttctttaagttacataaattctccrtgctttatctttattttaaatgaatcgtctgagtataaacacatgctacttgcaaatactgtgaagttaacatagagtttatggccgaagtcagattgta

SEQ ID NO: 127526 - DNA, 201 bp, Homo sapiens
cgacggtgaatagttagagcagaggctaacaagatgacttgcaattgtgaagcttaatggcagtttagagacaaatcacaccatatgatagactcatcatrttataaatgggtattaagtattattaagtcccaagtaggagaatatttgcccaacttccagttatggcttaaagtttaatgtgagacttgggggcattca

SEQ ID NO: 127527 - DNA, 201 bp, Homo sapiens
tctaattcccaacaagttcctcatctctatctgagaccatctcagcctggacttcattgtccatatctctgtcagcattttagtcaaaaccattagacaaktctctaggaagttccaaactttctcacatcttcctgtcttcttctgagccctccaaactgttccaacctctgcctgttacccacttctaaagtcatctcc

SEQ ID NO: 127528 - DNA, 201 bp, Homo sapiens
atgataggacaactagtttaattaaatggaataataacacttaatgatttctgcatcttccttttcttatttcctcaggagcatgatgtcaattttgatgwccatggaatgatggtgctaggctgtggtccatatcacattggtaaaataataaattatgtgtatataggactttacacaatttatatagttttcttcata

SEQ ID NO: 127529 - DNA, 201 bp, Homo sapiens
aaatagaagacttcatagaggctagaagattgagtgggttagttatttgtgtatttttaaaagataacaagacttaaatatgtttgaaggtggaaaataaraagcccttggtgttcttgaaattgaacttgtcaccgctttttattgtttttggtctaaacttgaatctctcttttctattaaatcctagtgagtccatga

SEQ ID NO: 127530 - DNA, 201 bp, Homo sapiens
gattcttcagcttaggattttaacaatgtaaaataaaggaagcactgaattgccaaagataggtccagtgatgatgaggagtcagagctagtaacctgccwgagagccaagagaattttacagaaatcaggcacagtaatcagaatctgggggcattttgtgcaggaaaaatatttattcatacactaaagatttattgtg

SEQ ID NO: 127531 - DNA, 201 bp, Homo sapiens
gaggcttctagttgacctgtacaaacatgtagctgttttccatcttcatttcaagaatgttttatatatttaatattaaaactcctaattctgcttgttgytgagcttaactctatgtaacatttatatatgtaaatattacttgaaatagttttaaagccacaaattattttcaactggatttaattagaattttcctcg

SEQ ID NO: 127532 - DNA, 201 bp, Homo sapiens
ctatttgcaaggaatttggctgtttctcagcatgagatgagaaggcatcagaggatactgaatagagaagtgacataacctacatagaacttaaccttagktgcactactctcttgctagcttcctgctcttcctccaacatgcaggcacacttcctcctcagggctttggtacttgctcttctatttgcttgagacgttt

SEQ ID NO: 127533 - DNA, 201 bp, Homo sapiens
cataatgatgggaaggatggaaagtatccccttctggaggggtcttctcaggacgctgaattgttaatcaagtggattgtttttgcttccatcccatccamccacacaaaactcagccatggaaagatgatatattaccaaagccctgcattgtcccattctgatgtgttcttttggcatatctgatagttgtacaccctg

SEQ ID NO: 127534 - DNA, 201 bp, Homo sapiens
gcataacaccaaattagcatgcgtattgggagactcttcatcgtacctccttattagagaataccagcaatattcaaatcatgatttcaaattcttgtcarttttattaacaaacatttgcatggatagcatgcatggtagcagatgctgtggatggcctgtgtatatctcaatctcaagttaccattttaattcatgttg

SEQ ID NO: 127535 - DNA, 201 bp, Homo sapiens
tttggtgtcattttggagcaaagtaaagctgaataaaagagcaagcaactagaaggttattgtaacttatcagaacaaaactcacgagagcctgaactgarcagtagtagcaagaacagatacggcaacctaggcagcttatacaaatgggaggaagaggggctgaatgtggtcaggtaaaagatcaccttactttctcag

SEQ ID NO: 127536 - DNA, 201 bp, Homo sapiens
gctttggactccagccagctgccatcactgaggtggtgaaagaacaccgtagtataactggatggccctggtccctgccaggagtcaggatggactttcaktgttgaagagccatcttggcctgttactagcgctgccccacaccattgtgtttgcctaagagctgagccaaagaatttacatatgtatgagccaaggtct

SEQ ID NO: 127537 - DNA, 201 bp, Homo sapiens
tatttatagcatttaatattaatctaaattcattttgagatatattttatcatgcttttatcttttatatgttattagaaagcacttggtattttaaaaayatatattaatgtgagatttcacaatttataccttgtctttgtagtcacatgcgtagaggatatttacaattttactcaagttaatttgctcagtgttgat

SEQ ID NO: 127538 - DNA, 201 bp, Homo sapiens
ggtagtagcaataaattataaatgtatgaatttatacattatggatttataatttcataagtttttgagattttaagacttactattttttacacgatgcsttatgtatttatagcatttaatattaatctaaattcattttgagatatattttatcatgcttttatcttttatatgttattagaaagcacttggtatttt

SEQ ID NO: 127539 - DNA, 201 bp, Homo sapiens
acctgtctcctgaactttgaagccatttctttccttcagaggagataagaaaatgtgtcttatcttaagtctggaagaaacacggagcccagtatcaaggkagtggagtagttcttttcccagacgtagcacagggtttttcaagcctgaagaaaaagattaatctccttaaaacaaggctttgttgacttgggtctggtc

SEQ ID NO: 127540 - DNA, 201 bp, Homo sapiens
ttccaaagtccttattctaggatcaggaggtctgtccattggtcaggctggagaatttgattactcaggatctcaagctgtaaaagccatgaaggtgagaraatatgatccttactagaattaatatgcttcctttaatgagtctaattagtattttataatttagatttatgacactacctcttttcaaagttgctataa

SEQ ID NO: 127541 - DNA, 201 bp, Homo sapiens
tcacctgaacctgggttatttattattacattacttttatttccttacttctaaaaaaggactagaatatttttcctttcgactccttcctctttcaaacytccatttaatgatctcttgatgagatctttgagacttatttttggtccacctaagttataccatttacctagatagatattgagctctcccaccttcttt

SEQ ID NO: 127542 - DNA, 201 bp, Homo sapiens
atggacattctgatgtcactataaattcatggtcacggatctcaaatgggagcccaagactactggctttcctgctgtggttgtctaatgacagcatgatyttactcttcacagatattagtttaaactctccaaccttcaattgaaaagtctacatcttactttattagaaagtagaaacaatcaagggttatgctccca

SEQ ID NO: 127543 - DNA, 201 bp, Homo sapiens
tcaccaagattccccgctgggatcttgaccgttttcatggaacatctagccgaattggtagctctatgaaaagtgtaggagaggtgagtccttggtttatkacgcttttcttcttgttctcagttattttgttaaatttgtgacaccattgacagtgttaaagttgcctggataccatcaacacatggacagtgttaaagg

SEQ ID NO: 127544 - DNA, 201 bp, Homo sapiens
taccaaaaccatggagaaagtgagagaggaagaaaaaaaggaacacctttttttttttttaatttgagaggctttatgatatattttttgttcttatttgktttataaaatatattttacgtccagttcagttacaaattaaagatacataagctctttctttcaatatgaggtcttaaacatgtattacaggtcatggct

SEQ ID NO: 127545 - DNA, 201 bp, Homo sapiens
ttgtcccttgtctgttatgatctacctgcagtggttttctaccttgtccccaggcttcttaattcttcctgtactctcagaacctctgtgttgtcacaacsagacttgggttattttgggtccccagtttccaggccctgaatgccatgggctctgtctcaggaataggtatctgctggcctgctgctgtcatttctacta

SEQ ID NO: 127546 - DNA, 201 bp, Homo sapiens
accaagattccccgctgggatcttgaccgttttcatggaacatctagccgaattggtagctctatgaaaagtgtaggagaggtgagtccttggtttattaygcttttcttcttgttctcagttattttgttaaatttgtgacaccattgacagtgttaaagttgcctggataccatcaacacatggacagtgttaaaggtg

SEQ ID NO: 127547 - DNA, 201 bp, Homo sapiens
taatcccaggatttggggaggctaaggagggtagatcacttgaggccaggagttcaagaccagcctggaccccatctctactaaaaataaaaaaaattagytgggcgtggtggtgcatgcctgtaatcccagctactagggaagctgaggcacgagaattccttgaacctgggaggcggagattgcagtgagctgagatca

SEQ ID NO: 127548 - DNA, 201 bp, Homo sapiens
aggtgaaggttgagcgttgtagcaatgcatgtagtgcacagagagtaaattctcctgtgacctgtgcctctatactttgtatcatgactcctattattcckcaagtggctactaaatattgatgcagaacagagaatcaagtgtcttataccctgaagtagaataataccagaaattttaagaaagaccaatttatgtttt

SEQ ID NO: 127549 - DNA, 201 bp, Homo sapiens
gatagggaacactgaggaaggagaaaagtatagagggaggaattatatatttattttttaaccttttgaatgtgaactgcctgtgaggaatccaagtggakatgatttaaaggcaagggttattataataggtttggaattgaggaccaagatcatggctagagatagagaaggaaatatagattttgaaatgaatagcat

SEQ ID NO: 127550 - DNA, 201 bp, Homo sapiens
aaaaaataaatttttcttctttttatagctacccattggcattcattgctgcaaagattgccctaggaatcccacttccagaaattaagaacgtcgtatcygggaagacatcagcctgttttgaacctagcctggattacatggtcaccaagattccccgctgggatcttgaccgttttcatggaacatctagccgaattg

SEQ ID NO: 127551 - DNA, 201 bp, Homo sapiens
ctgaggaagggacttttaaattgatacctgatggttgattcagaattaactgggcaaatggcttacattgtgggagtaggaggaagaaaggaacagcattyatgaaggtctgaagatgagaaagagtagggagtttctcaaaactgataaagcattccttatatggctaggacatcaaacatgatgctgattattaatgat

SEQ ID NO: 127552 - DNA, 201 bp, Homo sapiens; identical to SEQ ID NO: 21730

SEQ ID NO: 127553 - DNA, 201 bp, Homo sapiens
aatcaatcagtaatctatgtatgtattcatttatttatagcacctgttatatggtggcattgttctcagtatcaggaattgtaatcgtgaaaagaaagatrtggtctctactgtcacataggacttctttttgctaggctcaacagacttcaaataattacaattaaatatgatgagcaatgaacatcgcaatagagaaaa

SEQ ID NO: 127554 - DNA, 201 bp, Homo sapiens
cctcagcttcgtcagttttatactttggttgattgtcctggtgattaaatggagaaaagtctcaatttagcaagaggcaccttcttattcagccccgactkgaactataggttgtctggaactgttctgagaaccagtcaagtctagtattagcataaacctgacctgctttttttccccttccttttccagtgggtctgc

SEQ ID NO: 127555 - DNA, 201 bp, Homo sapiens
caaccccagcattattttagcaggagaaggtagtatttgatgtgttgcaatttgtgttacatgcccatggaacatctctggacattacctcaggaggaggrgttaagagaaggaggagctgtggctgaagacatttaatggcagaatgaatggaaattcaaagatcgctgtgcagtcagccttaaacactgactgcacccc

SEQ ID NO: 127556 - DNA, 201 bp, Homo sapiens
aagtagccttcggccagggatttgttataatcagcataaggattcgggaaggccctttgagccatgacgccggaagcaagcctgcagaacaggggaaaaasagaaactaggttgagataggggcctcggccgagttgcgagggcggcggccggcgcccaggtatcccccttcctccagctccagggccatcgagccgtctc

SEQ ID NO: 127557 - DNA, 201 bp, Homo sapiens
gactataatactggataacaaagctctaaaaaatactgaaaaccaacacagcaggagatccacaacattcaatttcaatgttttaacagtccctgctatckgaaacatttttctttcatttaaaattaaatcccacctggtacatattaggcccattctattgctcagagaattttggagttcagttaaaaagtcagcctc

SEQ ID NO: 127558 - DNA, 201 bp, Homo sapiens
cttttttgcaatctatatctttgttccagtttcacatactctgaatgataagcattattgctctagccttcctctcttaaacaaatgaagcaactgaaagycctttaggcagaaatttgtaataggataaactggtgaggtgatggatatataaataacttgattgactttctataatgtatacatagatcaaaacatcac

SEQ ID NO: 127559 - DNA, 201 bp, Homo sapiens
tcagtattatagaaagaaagaagttggcccttctttgaaactaattggtatttaaaatatagtattactatatattaggaggtaatttaaaatatgttggmggacataatatgatgtacatatgtaaatgtagacaatggtacttctgtcacaaaacaagttaaatgaatgaattaatgacagacattaattagtgatagg

SEQ ID NO: 127560 - DNA, 201 bp, Homo sapiens
tgtggtagatttggggagtaatctggtaaataagccaaatgtattctttgcctttatggaacttaaatccagcaggaaaaagcctgattgacgaataaaakttaggagacattaaaagtatcaggtgataatggacatgctaaactgtatgattctatgtccatcgttccaagcaaaagaggcagtaaaaagcacaagaag

SEQ ID NO: 127561 - DNA, 201 bp, Homo sapiens
tatttgttttataaaatatattttacgtccagttcagttacaaattaaagatacataagctctttctttcaatatgaggtcttaaacatgtattacaggtmatggctattggtcgtacctttgaggagagtttccagaaagctttacggatgtgccacccatctatagaaggtttcactccccgtctcccaatgaacaaag

SEQ ID NO: 127562 - DNA, 201 bp, Homo sapiens
attcataaattatatttacatttaatttataaaatatatgcattttatttatatgtttatattacttatatttatccttcatttatttattttcataaatrtttattgaatgctgtctgtgggccagataatgtggtagatttggggagtaatctggtaaataagccaaatgtattctttgcctttatggaacttaaatcc

SEQ ID NO: 127563 - DNA, 201 bp, Homo sapiens
gggatttttggaaaatttttaattcttttatagtattaaactggaaacatctatagatttcattagagtcttttacaattaatgataaattatcatttttrtttgactttaagcctggatttaagggcaaattgcagttttaaaggatgattaaatagataaaatgtccccctttttaagtatacttagtactaatactca

SEQ ID NO: 127564 - DNA, 201 bp, Homo sapiens
aaatgttttcttaaggcaagttagatcttctggcaatacactattttaatttcattgtattgactatcaaactattataattgaattgtattgtattaacwattacatgaaatagctggcccacaggtatctggttaaagatgcttttacagtagtattttattcttctgtcccttagctctttacaaattatttttgcat

SEQ ID NO: 127565 - DNA, 201 bp, Homo sapiens
cctaccagactctgattatcctttttaatttaggtgaaggatgctaccccaacaggatagcattaatttattcatgaaaaatccacccctcggacccaaamacctcccactagtctccagcttccatcatggccacactggggaccaaatttcaacatgagttttgatggggacaaaccacatccagaccatagtagtaac

SEQ ID NO: 127566 - DNA, 201 bp, Homo sapiens
atgcaatagatttaatccaattacattttattaacagcatttcatgaaaatgttttcttaaggcaagttagatcttctggcaatacactattttaatttcrttgtattgactatcaaactattataattgaattgtattgtattaactattacatgaaatagctggcccacaggtatctggttaaagatgcttttacagta

SEQ ID NO: 127567 - DNA, 201 bp, Homo sapiens
gcaaggaaagtggaaacatacctttctaaaacaaataacaacaataacaaaaaaaaatcttcgccaggcgcggtggctcacgcctgtaatcccagcacttygggaggccgaggcaggcggatcacaaggtcaggagatcaagaccatcctggctaagacggtgaaactccgtctctactaaaaatacaaaaaattagccag

SEQ ID NO: 127568 - DNA, 201 bp, Homo sapiens
taatattgttgttactggctctcaatgtcctctttctcattttgaattttatctcttcaggtgattgagtgtaacttgagagcttctcgatccttcccctytgtttccaagactcttggggttgacttcattgatgtggccaccaaggtgatgattggagagaatgttgatgagaaacatcttccaacattggaccatccc

SEQ ID NO: 127569 - DNA, 201 bp, Homo sapiens
gtcacaattatagatgtgatggttcttttcaaggcatgtgttttaagtgtatctggatgactgttcttcagagttaggattttagtcatttaagtaaaagyggttattgttctaatttagaaaaatcgcttatttgtcaagcacttccaccgaaaggctgagtgcatacttgcacataaacaaatgagcaattggtttggg

SEQ ID NO: 127570 - DNA, 201 bp, Homo sapiens
tttattgcatccctaatagaaatgtgaggaatctaattttttcttatttaataccattatttataattttcattttaaacaacatagcgacctttgaaaamctgactggtattccatgtaagaaggaatgcaaacaaataattaaagaccctctaaaaattgcaacaacaaacaaatagaaaaacctgactgaaaaagcta

SEQ ID NO: 127571 - DNA, 201 bp, Homo sapiens
cttttgccaatctcattgtctctgcaggcagcagtgtggaatttgattggtgtgctgtctctagtatccgcacactgcgtcaacttggcaagaagacggtsgtggtgaattgcaatcctgagactgtgagcacagactttgatgagtgtgacaaactgtactttgaagagttgtccttggagagaatcctagacatctacc

SEQ ID NO: 127572 - DNA, 201 bp, Homo sapiens
agtttagctggtaaatagaaatccaggacacaccttgttaggataaagcttgaattgtgccaactcttacatgacttttgtaaaaagggttagcctgtggrgttgattaaattcctaccacattgaccacctttgcttagtatatattttcttcagtggcatgatttttccatttgaaaaattgagacagctgttgctgta

SEQ ID NO: 127573 - DNA, 201 bp, Homo sapiens
tgttcagccttgagtattttgcaagtattgccctgatacttataatacttaaagtacatggcttattgacactatatacatagcgttagctaaatgttcgrctcctctgttttccttcgtgacaggagcacccagtggtgctgacaaaatttgttgaaggggcccgagaagtagaaatggacgctgttggcaaagatggaa

SEQ ID NO: 127574 - DNA, 201 bp, Homo sapiens
acaagagaaattatgcatattccagaaatgaaaatactacattcctgaatgaaaatactgcattgctgaatgtagacgacacaaatgcaaatttattgcawccctaatagaaatgtgaggaatctaattttttcttatttaataccattatttataattttcattttaaacaacatagcgacctttgaaaacctgactggt

SEQ ID NO: 127575 - DNA, 201 bp, Homo sapiens
aaaacatctgccagttacaagagctatatatttgaagaaaagtgacaagtaataggaaagcaactggaaatctgggcattatggtttcattaaatatactktgcctttatttaatatgtctgtgtattttacctttggaatatttttgtgtgttttgtattatgtattctgctaagattcatgcaactgtttcttcaggca

SEQ ID NO: 127576 - DNA, 201 bp, Homo sapiens
atctcttcaggtgattgagtgtaacttgagagcttctcgatccttcccctttgtttccaagactcttggggttgacttcattgatgtggccaccaaggtgwtgattggagagaatgttgatgagaaacatcttccaacattggaccatcccataattcctgctgactatgttgcaattaaggtaacattttcaaaaattta

SEQ ID NO: 127577 - DNA, 201 bp, Homo sapiens
tgggaataacgtttcttcttcttaagaataagaaatatgtgtgtgtgtgtatatacacacacgatatgtatatgcacacacacacacacacacacacacamgatatatttgtatttttcctctcacccaaacttaaaaatatagccctcctgcattcctccctaattccatatcagtactttaaaatagttagttggcatc

SEQ ID NO: 127578 - DNA, 201 bp, Homo sapiens
tactattactactagtgatccaatgccctgtttctcaggtgataactagaccacatcactattttctctctcttattttcagaattagaaagcaattccaygggtcatacattttcctgtttgcatactttacagtaataggaattaaaggaatatgtatataaagcacaaaaaatttagtcttgaaaaaattataataac

SEQ ID NO: 127579 - DNA, 201 bp, Homo sapiens
gctcagtgccacaggccacttaaatcctgcgcattaatttgcaagccaaagagatccttacgtataggtcattttgctcagattttagatttcatatacakctgcttttagagagctggtggggtaagtcttcctagtaaccagttgactataggaccactttgcgatgttcatgagagttactattactactagtgatcc

SEQ ID NO: 127580 - DNA, 201 bp, Homo sapiens
caaaacatctgccagttacaagagctatatatttgaagaaaagtgacaagtaataggaaagcaactggaaatctgggcattatggtttcattaaatatacygtgcctttatttaatatgtctgtgtattttacctttggaatatttttgtgtgttttgtattatgtattctgctaagattcatgcaactgtttcttcaggc

SEQ ID NO: 127581 - DNA, 201 bp, Homo sapiens
gggttcatgagtcagagaacatatatcttactcaattctcttattaaagcagatgtcattactgaacgtcaggcttagtttttttctgccttttggagtgkttttttttttttttaaagaggataataataaaattgcaaacccattccataattgtaggccaggtggagtgctcattttcacattagagcttgtgcaatc

SEQ ID NO: 127582 - DNA, 201 bp, Homo sapiens
gcaactttcatggcaccagttattttattaattatttgtataaactagtatgagcctattttgtttagctttctatcaccaggagccatgaagcactttgmaatcaaatactgtttgtacttgaatatattaagtaagcgtgaggacttaaattaaactttgttcctctttaaaaaaatccttaccccaactctagcactg

SEQ ID NO: 127583 - DNA, 201 bp, Homo sapiens
attgaatagatttaaaattataaataaatgtattcatcagaaataacagaagcaacatttcatagtatggacttaacccgttaatccaattggctcaagcraaagctatttgattggtatcagcatcctttttttttctttttttttgagacggagtctcgctctgtcgcccaggctggagtgcagtggcgcgatctcggc

SEQ ID NO: 127584 - DNA, 201 bp, Homo sapiens
atctgccagttacaagagctatatatttgaagaaaagtgacaagtaataggaaagcaactggaaatctgggcattatggtttcattaaatatactgtgccwttatttaatatgtctgtgtattttacctttggaatatttttgtgtgttttgtattatgtattctgctaagattcatgcaactgtttcttcaggcacagac

SEQ ID NO: 127585 - DNA, 201 bp, Homo sapiens
gaaaaaccccagataataaagatatctgctttccatgtaggtagtaagcctcatatcaacatagactgaatatgacatgtcaccaggaatttaattctagmattttcccacatcctcctaaaaataacttctccttttcctcctttctaaaaatggcttacattttttccttcaagaactagaaaaatgtagtcaaaaatt

SEQ ID NO: 127586 - DNA, 201 bp, Homo sapiens
aaatggtttccaattctttatttaccatatattttcttgggaattgatatatggtgctttgtataaacactcaacaatatttgtatgataatataacaaakaaactttcttggtagaaagtgaaaatcatcatttcttagtgatggcaaaggagggggaattgtagtggagcaaaatgcatatgattcctggttgttcaaa

SEQ ID NO: 127587 - DNA, 201 bp, Homo sapiens
aaagccatctttcaagtcggatgcttggacccaagagattttttacatgtctactgtagcctaagtgaactctgtgagagatgatttgctaatatatttaycctctcttattcattttctacttttccctcacataatttttctccctgttttttttttttccaacaggctcccatgttttcctggccccggttgagggat

SEQ ID NO: 127588 - DNA, 201 bp, Homo sapiens
ataccataatgtcttaatatgtttttattataggtctttcttagcaaaaaattgtgttaatttgtatgaatgcagaatagagttcactgtggcataaggtrtaagtcataatttctgaaacagatacaaatggtttccaattctttatttaccatatattttcttgggaattgatatatggtgctttgtataaacactcaa

SEQ ID NO: 127589 - DNA, 201 bp, Homo sapiens
gagaaacatcttccaacattggaccatcccataattcctgctgactatgttgcaattaaggtaacattttcaaaaatttattagtcattttatgagttctrgtgaaattaaaagaacaatttgtcatcaaaaatcttgttacttttaaaaccttctaactaaagggttggactagggatttacatttcctttcaataatgt

SEQ ID NO: 127590 - DNA, 201 bp, Homo sapiens
gaaatcactgtgatacggtaattgattttttcattttaaatgcagctgtttgccacggaagccacatcagactggctcaacgccaacaatgtccctgccamcccagtggcatggccgtctcaagaaggacagaatcccagcctctcttccatcagaaagtaagaactaggcatactgttttctgaaataatttagaggatt

SEQ ID NO: 127591 - DNA, 201 bp, Homo sapiens
cccttcttattttactggtcagtcatgcagctagctgaatatatactatatgtgaagtaacaaactttaaagaaaaacagtcttaccagttattacatatkaccattctatgctttcagtcttcatactccaagccatttatataatgaacctcttcaggtgtactaaaaaatggggcttatatatacaagtacttatttc

SEQ ID NO: 127592 - DNA, 201 bp, Homo sapiens; identical to SEQ ID NO: 21735

SEQ ID NO: 127593 - DNA, 201 bp, Homo sapiens
atttttacttaaaagggaaagaaggaaaggacactaggatgtaaagataagagtgagtacctgattttcttggcctaactgaacaaaacaaaacaaaaatktaaactctcctctgctttttgacctgtgttcaaatatgtaagtagttaagaaatccttagtgtaattgaaggacttgaaatttcctagcatggtggctga

SEQ ID NO: 127594 - DNA, 201 bp, Homo sapiens
gcttatgcttgattgaagtttctgggggaaaagtgtcacctaagagttgttggaacttagatataagaaacagaagggtcagtactttactttctgatgamaatgtatattttctggtagaaaaaaatcaacaactttcatcttaaactactaaatatacaagtaatttaaagaaagataatataacatataatcacatta

SEQ ID NO: 127595 - DNA, 201 bp, Homo sapiens
tgaaggggagagataaacatgtttcatgttcatgattacgtatgaagtctcatctttctgcagggtgatgagacaagagggataggtgtattaggccattyttgcattgctatgaagaaatatctgagactgggtagtttatgaagaggtttaattggctcacagttctgtaaacttcacaggaagtgtggtgctagcatc

SEQ ID NO: 127596 - DNA, 201 bp, Homo sapiens; identical to SEQ ID NO: 21718

SEQ ID NO: 127597 - DNA, 201 bp, Homo sapiens
gagatggcttccactggagaggtaactagttaataatccatggaagctttcattaaatctactttgaaatctatggttttatgatttgaatacagtaaaayaaagggaataaaaacatctgctatcagagtaagactcaaagagcttatgaattttgaatttaaaaaatattttacttctattttgaatagggtctaaatt

SEQ ID NO: 127598 - DNA, 201 bp, Homo sapiens
actcagcatggcattgacttgaatggctaagagagcaatttatgttagtattttataaactaactataaaatatgccttgttgtctataagtttttgtttrtttttccagattgattagagatggcagcattgacctagtgattaaccttcccaacaacaacactaaatttgtccatgataattatgtgattcggaggaca

SEQ ID NO: 127599 - DNA, 201 bp, Homo sapiens
aaaagaaagtccccatggtgaggtctgagacatgggagaaagtctccattacataaaaaacttttatgccttttatcccatacccctttgaaaactggggrcagacacttgtgacttttgtcttcattcattaaaaattcacttttatctcatggagggtgctgattcctaccattatattttcaggtgaccaaacttttt

SEQ ID NO: 127600 - DNA, 201 bp, Homo sapiens
ctttgggaggctgaggcgggcagatcatgaggtcaggagatcgagaccatcctggctaacacggtgaaaccccgactctaataaaaatacaaaaaaaaaawtaaattaaaaaaataaaattagccgggcgtggtggcaggcgcctgtagtcccagctactcgagaggctgaggcaggagaatggtgtgaacctgggaggcg

SEQ ID NO: 127601 - DNA, 201 bp, Homo sapiens
aacacttgcttttctttttgagaaaaattaggttctttttcatctatttaattattgcccatgtcaaatgcttggttttgaaaactgaggaattctatctsacaaagatgaaaccagctatagttgcttgtaaatcatcctttctagtgatcacataaaatgaacagtagacagcaaataatttaggaattgaacctatac

SEQ ID NO: 127602 - DNA, 201 bp, Homo sapiens
tatttcaggactttacacccccaagcattattatttataataccaatttggattggcaattttatattgaaagacaatcatgatacttaaaaaaaaaaaaagacacatgaacaggcaagaaaaaaaaagtgagagtacaattaccagctttaagcatctgcttatccctctggctgtaactgtttttaatttttttatttc

SEQ ID NO: 127603 - DNA, 201 bp, Homo sapiens
agtggaaaatctcaaaacctggattgctcaactatttagcaattgcaacatatacttgggttactgtatttgcctgatcaatatgtgtacaaactaggtamtaaaacacttgcttttctttttgagaaaaattaggttctttttcatctatttaattattgcccatgtcaaatgcttggttttgaaaactgaggaattcta

SEQ ID NO: 127604 - DNA, 201 bp, Homo sapiens
ttttaagaattttttttaaactttagctagagtagattttgttgtttgcaagtcagaaatctgactgatatgataattaaagaaaaaggccaagagaattrcattttcattccataaattttgaatctaaaatgtgagtgagatactctggaatcataacaatttattctggactcatagtttctgttgcttgtctttgct

SEQ ID NO: 127605 - DNA, 201 bp, Homo sapiens
ctatttggttcttctttaggagtggaactattcaagagaggtgtgctcaaggaatatggtgtgaaagtcctgggaacttcagttgagtccattatggctayggaagacaggcagctgttttcagataaactaaatgagatcaatgaaaagattgctccaagttttgcagtggaatcggtaaggattctttgctttggaaaa

SEQ ID NO: 127606 - DNA, 201 bp, Homo sapiens
cagaaaaccaagtaccacatgttctcactcataagtgggagtggaacaatgagaacatatgagcacagggaggggaacatttcacaccggggcctgtcggrgggtggggaggtaggggatgcatagcactaggagaaatacctaatgtagatgacaggttgatgggtgcagcaaaccatcatggcccgtgtatacctatgt

SEQ ID NO: 127607 - DNA, 201 bp, Homo sapiens
acttatgaaataactactttaatttccttgtcaattctaaaatttgagtcagttccaggttagttttgattgacttatttttctccacattatcaattatrtttcctgcttctttgcatgcctggtaatttttattggatgtcagacactgtgatttatttgatgctagagatttttggtttattataaatatccttaagc

SEQ ID NO: 127608 - DNA, 201 bp, Homo sapiens
actggcaggatcttgcttgctgttgagaaatcatggatttttttttttatccagtctatcattgatgggcgtttgggttggttccaagtctttggtattaygaatagtgctgcaataaacatacgtgtgcatgtgtctctatagtagaatgatttataatcctttgggtatatacccagtaatgggattgctgggtcaaat

SEQ ID NO: 127609 - DNA, 201 bp, Homo sapiens
ctcagtataatactatgacttttattaataaggataaaaatgattttcagaagatggtaatataagtaaaagtagcatcagtaacatattttgtcagaccrtcttcagaatttttatttcaatttttttccctaagtgcaattctattgtagacagtggtaacttctcggattttaagattaaaaaagtagttgtattcag

SEQ ID NO: 127610 - DNA, 201 bp, Homo sapiens
agaatatttgggtttgtttttagctactacaaaataaagctgctaagagcattcatgtgcaaaagttttatgggcatatgttgtcatttctcttgggggaraaaggggatccaatagtggatcatgcggtgagtgtatgttaggcttttcatgaagcttcaaaattgtttatcaaagtggttgcaacattttatattccca

SEQ ID NO: 127611 - DNA, 201 bp, Homo sapiens
gcaaaggacagtaaatagattttttccttaagtctagcaatcatgtttctgccactttgaaggagatgaaaaaggcaagcatttccaagttcccagctaarctgtaaaactcaagcaaatctctcattcttttctaacagacttataaaagatgagaatctgggaaaaatgtgtggaggttctttctttcacagggtaccc

SEQ ID NO: 127612 - DNA, 201 bp, Homo sapiens
ctccctgagtggtaaaagactgacctaatgaagatgcattataccaaaaccatggagaaagtgagagaggaagaaaaaaaggaacacctttttttttttttaatttgagaggctttatgatatattttttgttcttatttgttttataaaatatattttacgtccagttcagttacaaattaaagatacataagctctttc

SEQ ID NO: 127613 - DNA, 201 bp, Homo sapiens
ataaacattaaaaaggtgttgcatctgaagtttgaaatactgtagtgtacaaaattttctttcctagaaagtgatgcttaaagaaatgttagtagtttggyataggtctaattctgaataattattgtcattgacaactatcattatttgcagctacccattatcttctaaatggccttcagaaatgatggagaaactgac

SEQ ID NO: 127614 - DNA, 201 bp, Homo sapiens
caatgttgggagaagacttccggaggcagtgaagatctgagcgtgtttgaaggcagaagggatggagactaagattgcagatataaggggctatgatgagrgaagtgaagatggaaagggatgagatacagaaagccagctgatgagccagtctgagtgataatattcaatgaaaggaagaacttcagaaataatttgaga

SEQ ID NO: 127615 - DNA, 201 bp, Homo sapiens
aggaaaatctaccaagcaaatggaaaacagaaaaaaaaaggggatacaatcctaatttcagaaaaaacagatttcaaatgaacgaggatttaaaaacagayaaagaagggcattatgtaatagtaatgggttcaattcaagaagaagatctaactatcctaaatatatatgcacccaacacaggagcacccagtttcataa

SEQ ID NO: 127616 - DNA, 201 bp, Homo sapiens
atagactatgtgcatctaaagtattcctaatatatttcatattcttttgatgccattctgaaagtgaaactataattcatcactttagtatcagtaataarcattaaaaaggtgttgcatctgaagtttgaaatactgtagtgtacaaaattttctttcctagaaagtgatgcttaaagaaatgttagtagtttggcatag

SEQ ID NO: 127617 - DNA, 201 bp, Homo sapiens
tgagctctattaaaaggaattacatggtatcaagtggtaagcagaattggcaaactttcaagaagctcattcatgtaaagaatgagagagaagctttgtayggttgtctggcaatgttgggagaagacttccggaggcagtgaagatctgagcgtgtttgaaggcagaagggatggagactaagattgcagatataagggg

SEQ ID NO: 127618 - DNA, 201 bp, Homo sapiens
cagagcacttacctgccatttctttagagtaaataaatgcacatgtaccctaaaacttaaagtataataaaaataaataaataaataaataaataaataaaataaaaaataaaataaataaccataccttacgtggttgacagttgtttgactacctgataccacttttgttgcatttttggaaagcagccttctctaatg

SEQ ID NO: 127619 - DNA, 201 bp, Homo sapiens
cttaggatttaaaagtgctaaatttggggtgtgagcagagctgtcaaaaaagggagttgagaatgtggagatggaatttaagaaataaaatagaaataaakaagttgatacaaagacactggaaactgttggcataaaaggggaaattgaagttgtaggcatagacaaagtattcaaggacataggtatagaaagaggaga

SEQ ID NO: 127620 - DNA, 201 bp, Homo sapiens
tcagagcacttacctgccatttctttagagtaaataaatgcacatgtaccctaaaacttaaagtataataaaaataaataaataaataaataaataaataaaataaaaaataaaataaataaccataccttacgtggttgacagttgtttgactacctgataccacttttgttgcatttttggaaagcagccttctctaat

SEQ ID NO: 127621 - DNA, 201 bp, Homo sapiens
taaagactacaaccactggctggctaccaagagtttagggcaatggctacaggaagaaaaggtaagaaatgtaatagggcatccatcatcacctaaggaargttgagaaggtgcctgtagattcagaagtgccaagcagacagaggaagatcatgtagtttgggatctttgcatttcagagagggattccttctcttacta

SEQ ID NO: 127622 - DNA, 201 bp, Homo sapiens
taaccgtttacaaccatcatcatctcctttctcctcctcatcaacatcaactaacttttattgtgtgtgtcactgtacaaagcaccctcagctattttagrgagagccagagtctttagacttatttttccatatttattcacacttatcacattttctggtttcacagaagcctagctgctgaaataatttcatttccct

SEQ ID NO: 127623 - DNA, 201 bp, Homo sapiens
ctcagagcacttacctgccatttctttagagtaaataaatgcacatgtaccctaaaacttaaagtataataaaaataaataaataaataaataaataaataaaataaaaaataaaataaataaccataccttacgtggttgacagttgtttgactacctgataccacttttgttgcatttttggaaagcagccttctctaa

SEQ ID NO: 127624 - DNA, 201 bp, Homo sapiens
gacacaagaatgctgactaaaataattcgggataaggtataatcatcatctttagccaaatctatgtttcttcgggtgtgtgtgtgtgtgtgtgtgtgtgktgtttccctcagtgcctaagggatccattaatatgtaaaggagtgaatctggccagcttctgctatctgggtctctgttattttgttttactattttcac

SEQ ID NO: 127625 - DNA, 201 bp, Homo sapiens
ttggattatcagccactgcatgtcctaaggtcagagattaccactttcctattttgggttcagtattctacccattgtgggtgtgccgtaaatatgaaatkataattatgctaattcatatctgtctaatcaggcatacatgatatatgactcagagtatttaagcatttaggcagtgattaaccataataatagtcccat

SEQ ID NO: 127626 - DNA, 201 bp, Homo sapiens
actcagagcacttacctgccatttctttagagtaaataaatgcacatgtaccctaaaacttaaagtataataaaaataaataaataaataaataaataaataaaataaaaaataaaataaataaccataccttacgtggttgacagttgtttgactacctgataccacttttgttgcatttttggaaagcagccttctcta

SEQ ID NO: 127627 - DNA, 201 bp, Homo sapiens
tgactttgccttcatcaggcaatggtgtcagccctagaagaactaattgtatttccaagagtatttcccaaaatgtatgtgcaaattgcttaatcttttcwgtttgagaagatgaagatcttccatgatggttacgagtagttataaagacatctaagtcttgcagcagctgtttaaagtccctgtgagtttatcttgtca

SEQ ID NO: 127628 - DNA, 201 bp, Homo sapiens
caaactgctttccctttcactgtcaatccaaatcaaatatattataagacaataagacatttctcccttggattatcagccactgcatgtcctaaggtcaragattaccactttcctattttgggttcagtattctacccattgtgggtgtgccgtaaatatgaaatgataattatgctaattcatatctgtctaatcagg

SEQ ID NO: 127629 - DNA, 201 bp, Homo sapiens; identical to SEQ ID NO: 21741

SEQ ID NO: 127630 - DNA, 201 bp, Homo sapiens
tattaatagaaaagaagactaaatctaaaaaaaaaaattcattttatcagagagtgactcataagtttagaaaacctttgatgacctggctcacaaaaatrtacttccaagtacacagggtccccagcctgatgtgtgtgcctgcattcatgcctgtcactctgctcagctgcgtgcagacagcttatatgaaggaggact

SEQ ID NO: 127631 - DNA, 201 bp, Homo sapiens
tgtgatataaaacaccataaagttcgcagttagaaggatgtcttaaataattttgtcaaaactcttatggctatgctgtagtttgaactggccaaccaaayggtcatccaaaattagagttttatacctttggtaactgttagccaccgtttctaatttcatatcgtaattatatgtcagacccaggccattatacatgct

SEQ ID NO: 127632 - DNA, 201 bp, Homo sapiens
caagaaggatgggctctattgaagagggagaaaaggagctcagccagcttgtgaaatgaagaggaataaagaatgatccatttatagatttaggattttawagctttggagaggtaagtataatattttaacttcacttctgtcaaactttcctcttaaacagaattcctattggaaacttaaaaacaactataacagtca

SEQ ID NO: 127633 - DNA, 201 bp, Homo sapiens
gcagttattccatttacagagtttagccttttttcttcttcctgattgttgtttcttccagttttctttttgtatctgaataatcacagcatgtagctttwgaatttttttcctagaggaatgtgtgatataaaacaccataaagttcgcagttagaaggatgtcttaaataattttgtcaaaactcttatggctatgctg

SEQ ID NO: 127634 - DNA, 201 bp, Homo sapiens
ttcagtggcatgatttttccatttgaaaaattgagacagctgttgctgtatatggtgctgtgcggttgttgaaattgatgacacctttataaagagtgacmaggaaaatttaaagtttgttcactaatttccaatacatatgtatattttaaataataccttaataataaagccattgtgatctcctagctgcatcagtat

SEQ ID NO: 127635 - DNA, 201 bp, Homo sapiens
cacttgtctttcatgtgatatgttaggttaaaacgagccctccttttatcataggcagttaggttttcaaaattggcggaatagattggcacagacaaaayagtattgcctcatatttctttatcagtgatggtggttcatattaaaaatgtatattatggctttcacttctattaaccttaatttgaaaagtaagatcgt

SEQ ID NO: 127636 - DNA, 201 bp, Homo sapiens
ttttttagaaataatgtggctggcatgggtgacatccagaaagtgaaacaaagcacattgagtagtttgactttactcaaaattaaggtgtctaaaatatrcatggtataaaccactcaatacagtaaatgactgaactccaccaactgccatatactcataaaaacacgagagatttgagggtttataatttattttcta

SEQ ID NO: 127637 - DNA, 201 bp, Homo sapiens
agctgagatcatgccactgcactccaacctgggcgactacaggaccctgtctcaaaaaaaaaaaaaaaaagtacatatgggaaaaggagtcttcaaaaaawttttttgtagatttcttgttaggatatatacatatatatattgacacaggctttctgtaaacagaaggaaaaaacagctttgaaaataaaaacatggcca

SEQ ID NO: 127638 - DNA, 201 bp, Homo sapiens
tgaagtgccaatgaatctcagatctcctgaactgaaactaagaaccataccaacttgcaataacaaagcaatttttaccttgtttctgggatcaatcacayattttgcatgtgtgaattccctgcaaatgagaaatttgctttaaattttttttaaataaaataaacattttagaataaaatggatccagtcattaaaatg

SEQ ID NO: 127639 - DNA, 201 bp, Homo sapiens
tggacacaagaatgctgactaaaataattcgggataaggtataatcatcatctttagccaaatctatgtttcttcgggtgtgtgtgtgtgtgtgtgtgtgkggtgtttccctcagtgcctaagggatccattaatatgtaaaggagtgaatctggccagcttctgctatctgggtctctgttattttgttttactattttc

SEQ ID NO: 127640 - DNA, 201 bp, Homo sapiens
ctcgttgtgctaatcaggccattcggaggcaatgtgagctcttggtgacattgcctcaggctttgcagtgtaatgccattcaccagagaccaggctagtaragtcagcatagaatggcaacagaagactaggacagcaaacctgggaaaaatagttggccaaaggttttcttatttttctttttgttagtattctatagtc

SEQ ID NO: 127641 - DNA, 201 bp, Homo sapiens
gttggtaaaagatgtacaaacatttaagctttttcctttctccacctaacacttgtgatgggctctttatcaagcagtgttagtatgtgtctttaacgagmaaaaagaaaaggagacttccccctttgctgttgaaaatatgtgtctatattgcattgttaaatttatgcaggtccccatttctctatatgattgaatttc

SEQ ID NO: 127642 - DNA, 201 bp, Homo sapiens
ctccttttctctccagagggcagaatcagcctgttttgaatatcacaaacaaacaggctttcattactgctcagaatcatggctatgccttggacaacacyctccctgctggctggaaaccactttttgtgaatgtcaacgatcaaacaaatgaggtaaatgatgtcaataaacctgttcagttggtgatgagaaacgcag

SEQ ID NO: 127643 - DNA, 201 bp, Homo sapiens
ttttaggctgcaagaaaagtctcattttgacttgttttccatcttgatataaaagacccgaagaaaactggttcgaagtaaaggatcgatgtccttagaaktagttcagaatgctgatgggttgtgaaacaatacatgagcaatgagtagatgatttttaataacataatactgaatgcaaaggagaacctaacaataatg

SEQ ID NO: 127644 - DNA, 201 bp, Homo sapiens
tgatgggctctttatcaagcagtgttagtatgtgtctttaacgagaaaaaagaaaaggagacttccccctttgctgttgaaaatatgtgtctatattgcaytgttaaatttatgcaggtccccatttctctatatgattgaatttcataatgatgggaaggatggaaagtatccccttctggaggggtcttctcaggacgc

SEQ ID NO: 127645 - DNA, 201 bp, Homo sapiens
gacatctaagtcttgcagcagctgtttaaagtccctgtgagtttatcttgtcaacacctttatcgttgcttccttttaactgtctaatttttttaatttgwtagggtaccatgcttgggaagattgaatttgaaggtcagcctgtggattttgtggatccaaataaacagaatttgattgctgaggtttcaaccaaggtga

SEQ ID NO: 127646 - DNA, 201 bp, Homo sapiens
ttctccttttctctccagagggcagaatcagcctgttttgaatatcacaaacaaacaggctttcattactgctcagaatcatggctatgccttggacaacdccctccctgctggctggaaaccactttttgtgaatgtcaacgatcaaacaaatgaggtaaatgatgtcaataaacctgttcagttggtgatgagaaacgc

SEQ ID NO: 127647 - DNA, 201 bp, Homo sapiens
taaaatactaaatactaaaaagttttagataccataatctttttccattagtactgaaaatgttcagcactcattattacattcagcaggctgtaacagtrtaatagtgggatatactctggattgggcacaaaaagatctggaatctaacccctgttatgcatttcctaatgccctgttcttggacaagtcacatattct

SEQ ID NO: 127648 - DNA, 201 bp, Homo sapiens
aagaaaagtttccataatgaggattgagtttatatcgttttcttaattaaggaaagacaaccctcactacacacacacacacacacacacacacacacacataaaaagacaagaggtgagatcaaggcgtaaactagtattggactaagccagtaagtactgcttctcagtcctcagttctctaggttgggagttttcctt

SEQ ID NO: 127649 - DNA, 201 bp, Homo sapiens
aaagaaaagtttccataatgaggattgagtttatatcgttttcttaattaaggaaagacaaccctcactacacacacacacacacacacacacacacacacataaaaagacaagaggtgagatcaaggcgtaaactagtattggactaagccagtaagtactgcttctcagtcctcagttctctaggttgggagttttcct

SEQ ID NO: 127650 - DNA, 201 bp, Homo sapiens
accgacaactcatggttccttatcatgaccttgggacccataagacctgcaggtctctaaagaaatattaaattagatttagtttagtttgaatgtaaagyacatcttaatgaattataatgctacaaatttgtcaattatgtccttttttatattcttctttaattcagttactattctctttaccttcttaagaaaaaa

SEQ ID NO: 127651 - DNA, 201 bp, Homo sapiens
aaaagaaaagtttccataatgaggattgagtttatatcgttttcttaattaaggaaagacaaccctcactacacacacacacacacacacacacacacacacataaaaagacaagaggtgagatcaaggcgtaaactagtattggactaagccagtaagtactgcttctcagtcctcagttctctaggttgggagttttcc

SEQ ID NO: 127652 - DNA, 201 bp, Homo sapiens
tgtccttgagttaaaagaactggagtccaatggccaaatgtattttgctttacagttttaaaccgacaactcatggttccttatcatgaccttgggacccrtaagacctgcaggtctctaaagaaatattaaattagatttagtttagtttgaatgtaaagcacatcttaatgaattataatgctacaaatttgtcaatta

SEQ ID NO: 127653 - DNA, 201 bp, Homo sapiens
gctctataccctcaaagggctgtgatacattttatttattcaggcatttttcaatgctggtatttgtgacttctgaggcagtgtcagtagagatattctgyaggggaaccaatgaggagagaatatcagagaaaatagggtttttcttcaggcaaagtaacttggggatcatgtccttgagttaaaagaactggagtccaa

SEQ ID NO: 127654 - DNA, 201 bp, Homo sapiens
aaaaagaaaagtttccataatgaggattgagtttatatcgttttcttaattaaggaaagacaaccctcactacacacacacacacacacacacacacacacacataaaaagacaagaggtgagatcaaggcgtaaactagtattggactaagccagtaagtactgcttctcagtcctcagttctctaggttgggagttttc

SEQ ID NO: 127655 - DNA, 201 bp, Homo sapiens
ccaccccagtggcatggccgtctcaagaaggacagaatcccagcctctcttccatcagaaagtaagaactaggcatactgttttctgaaataatttagagrattaactttgagaaccagtatatgaatatttcaccttacttgattgcaagtcttttaaaacaaatttaaaaatgaatacatttgtggatgattgtcaagt

SEQ ID NO: 127656 - DNA, 201 bp, Homo sapiens
ggtagataggggaatttggcagagagataatcgtgtacaattatttgttcttttcctattattttgtgtgtatttattgcatattattttgttaatagaarcctaatagtgccctccattataattattaatgtagatatatagctgtctgtgaagagaaattaaagacatccaaatttaaggtactgtgccttttagaaa

SEQ ID NO: 127657 - DNA, 201 bp, Homo sapiens
cctaattacttctgactataatagaaaaagatcaagaggatttgaaatagagtacagttagtactaggaatcaagacaactttttttttttttttttttttgagtagcttcctcggaaaatttgacaggacattgtggctagctgactatgagacaagaaacaaaaggatgaataaaaaacgttaacttttacagcatgag

SEQ ID NO: 127658 - DNA, 201 bp, Homo sapiens
tgatgggtgcagcaaaccaccatggcacatgtatacctatgtaacaaacctgcacattctgtacatgtatcccagaccttaaaatatattaaaaaaaaaaagaatgagttttataaataggctgtcctgggcgaaaattccagctttatttctttggtgccatggactcaaggaagttacttaactcagttttcttatctg

SEQ ID NO: 127659 - DNA, 201 bp, Homo sapiens
tccccttccttcctttcattcattcagtccttcacatttcaatcacttctaaatgccaaggattcaaagttgaatacattgatgttatttgattaaatttytcaacttaacactccagattgaaagtttttgaagggtagtgacttaatgggcctaatacagtcagtttatttcatagtatactgtagaagttcttgaaat

SEQ ID NO: 127660 - DNA, 201 bp, Homo sapiens
ctattattttctagcaaaacagcctactttattcctgcagagtttgtaatcatatattgtaataaaatttgtaattatatattgtgagattgattactaarctgtcttaatatactgaaagctccaattcatttatatttctttagcatctcccatgaggtatcatgaggtttgggaccatgtcatttcatttcaccattg

SEQ ID NO: 127661 - DNA, 201 bp, Homo sapiens
catctagaattgtataacttcaaaatcaattagctgagtgaattataagctttttgtgcagctgacacatgatggtgctagtttagctggtaaatagaaayccaggacacaccttgttaggataaagcttgaattgtgccaactcttacatgacttttgtaaaaagggttagcctgtggggttgattaaattcctaccaca

SEQ ID NO: 127662 - DNA, 201 bp, Homo sapiens
atgctgctgtttaaaagcaaagtaatatttttcttatttttatttttgctttctgttactcctcctctcctaccctcccaacccattttgcaaatgtcaarattcagagtaaattgatttcagatagcattttttctcaagcatttaaaaagaaaggatatagttgaaaaggttttattcacatactgcacattgtattag

SEQ ID NO: 127663 - DNA, 201 bp, Homo sapiens
ccagcgtgttttctgatacccagaaatgacagcttatctttgactattgtcagcaccttctgatagtgcctttgttttaaaattttcagtttttgagatcmgattgtttaatagataaattataagggtgaggaacaggaacagtgaggatcttttatattaaactttaaaacaaagttttatcataaaagaagaagttgt

SEQ ID NO: 127664 - DNA, 201 bp, Homo sapiens
gaaatgcttcatgggaaaccctcaaagacaccttcctatgtgcttttatattaaaagaaatttctaagttttccattcgaatataaatcttacagaaaatragaaaaccctaggaaagaaggctgattaaaatttgataagactaaaaggcaagactgaaaaaggtctgacgtgggccaacttaacattttcagaaaatgg

SEQ ID NO: 127665 - DNA, 201 bp, Homo sapiens
tatacacatatatatatgtatgtatatatacatacatatatatatgtatatatacacacacatatatatatgtatgtatatatatacacacacatatatawgtatgtatatatatacacacacatatatatatgtatgtatatatatacacacacatatatatatgtatgtatatatatacacacacacaccgtagtttgc

SEQ ID NO: 127666 - DNA, 201 bp, Homo sapiens
tatacatatatacatacatatgtatatgtatgtatatacacatatatatatgtatgtatatatacatacatatatatatgtatatatacacacacatatayatatgtatgtatatatatacacacacatatatatgtatgtatatatatacacacacatatatatatgtatgtatatatatacacacacatatatatatgt

SEQ ID NO: 127667 - DNA, 201 bp, Homo sapiens
gtttttaaaggctttaaaaaaagttattaaaagagtaaaacagtctgatcagtaacatgtaagactcagagaaaacacacattgatattatctggtattcyggctcctgtcacgtgaaaatgagagacaaggattttgggttcctagaaattagtactgagtcgtgatgttcatgtcgggcagggatgtgcattcaaaaca

SEQ ID NO: 127668 - DNA, 201 bp, Homo sapiens
ttgtcattgagagtctttagaaaggatgttcccatgcccttcctgacacctgttcatctgggaaatgattcatgttgtgatacagcaccaatcagaaggcrtatagaggacatttcataaggaagagttccagcgtgagagtttttaaaggctttaaaaaaagttattaaaagagtaaaacagtctgatcagtaacatgta

SEQ ID NO: 127669 - DNA, 201 bp, Homo sapiens
ttggttggctctttgaggggagaggccatggtttacttatttgaatccccagcactgcccatagtacctttcacatagtacatggtcaacaaataatgaawaaataaaggaatatacaaagccagtaaatggtagttacagttggtggtaaagaaattgcacattcttattttcccttcaaatcctttaatcagtgtttct

SEQ ID NO: 127670 - DNA, 201 bp, Homo sapiens
agggtttcaccgtgttagccaggatggctacgatctcctaacctcgtgatccgcccgcctcggcctcccaaagtgctgggattacaggcgtgagccactgygcctggccgtatttaggtacttctttagatataagccccatggattggcaatccaaattgagctagtagatcttcaaagaacactggaactacaaatacc

SEQ ID NO: 127671 - DNA, 201 bp, Homo sapiens
ttgcatttaactctttgaaaggattgtctctttcacttgtcttggttggctctttgaggggagaggccatggtttacttatttgaatccccagcactgccyatagtacctttcacatagtacatggtcaacaaataatgaaaaaataaaggaatatacaaagccagtaaatggtagttacagttggtggtaaagaaattgc

SEQ ID NO: 127672 - DNA, 201 bp, Homo sapiens
ttccaaggatgtggagtactgttaactctgaaaatcacacaattctttggtattcttttaaagttaggtctctgattaacactacatttctgcatcatggyttttttatttaggggccctggggtgaaagcttaagcatttcattagtcttgaccagatcacaaagaactatgaggcattttagagagcatttaaataatt

SEQ ID NO: 127673 - DNA, 201 bp, Homo sapiens
aattcaagaaacctcttcaagactccctgtgaaccaattttctatttggcctgcttcttacaaggcctgaatatgtttgtttgcttctctacgtagaaatyttttcccatgctttctccttccccttctcgcctgaagaagtcagtttcaagagtcagctcattgttcctttgtgaagcttccatgactcatctcaccttt

SEQ ID NO: 127674 - DNA, 201 bp, Homo sapiens
ccatgtcagttcaattctattctatttcggcttgagatatacccacaatataatgctagacatttttagtcaaaagcattttcaaatcttgtcaccagatyagtcttctcttcttatgcatttcacgtttcctgtagtaaattatagtgaatttaaacttgtaatggttttcaacttgtagaccttaaacattttattaaa

SEQ ID NO: 127675 - DNA, 201 bp, Homo sapiens
atgtggacgcaaaatttgattttaaatagatgtattcaccacaacattttatttctagatataacatacacttttttgcccatgatatttcataattatcrtggtccattcaatgtggcagctctggtcttcaaggaaaataataacaaccaagcttttttgaacactcagttaattttcataaaaactccatgtcataga

SEQ ID NO: 127676 - DNA, 201 bp, Homo sapiens
gttgggaaaaggagactgggtgagagaaaagaatggcacgtgcaagaaaatgcaagcagtcccacatgactggtatgactgcaatgaagagtccactggggaactaatgggagatgagcatggaaagggaggcagaggacaaagtgtggtgggtaaagaatcagggatgagtttatgtcctttgcagggacatggatgaag

SEQ ID NO: 127677 - DNA, 201 bp, Homo sapiens
aatttagcaagaggcaccttcttattcagccccgactggaactataggttgtctggaactgttctgagaaccagtcaagtctagtattagcataaacctgwcctgctttttttccccttccttttccagtgggtctgctatgaatgtggtattctctgaggatgagatgaaaaaattcctagaagaggcgactagagtttc

SEQ ID NO: 127678 - DNA, 201 bp, Homo sapiens
tcagaacaaaactcacgagagcctgaactgaacagtagtagcaagaacagatacggcaacctaggcagcttatacaaatgggaggaagaggggctgaatgwggtcaggtaaaagatcaccttactttctcagctaaggatttcaactagttaggttgagcatagtgattatgtcatttgatatctgagatgtttatgggat

SEQ ID NO: 127679 - DNA, 201 bp, Homo sapiens
ttgtgcaggaaaaatatttattcatacactaaagatttattgtgttatagctttgtttcaaaattaatgttcgtaacgatgactgagtcaccctaaagtgwaatatctttagtatacatttataaaaaggtaaagaatacattttagaaagaagtccattggttttgattgaatatctactaatgtaggtgtgagtgagtt

SEQ ID NO: 127680 - DNA, 201 bp, Homo sapiens
ctgtgttctggccaatggaatgaaggtggaagtaatgtccagcttactgaaagtgtctccaaagggaatggcttgctactttttcttctttcttttttctrtatgactggaatacagatatgatggctgaggcaccagcagccatgttggaccttgggaaaggaagtcacgtaagaaaaggaacagggtctcattctgtgt

SEQ ID NO: 127681 - DNA, 201 bp, Homo sapiens
agaatatctcatcaccatctgcttgttgagtttattattattttacttgaaatttccatattccaaatctgaaagaaacattacgtcactaacgttaactraattccccaaatgcaactaaagttttcttactaaatataattacataaaaataaaaagataaatgacacaatttgaaactacacatgtgggctgggtgca

SEQ ID NO: 127682 - DNA, 201 bp, Homo sapiens
ggccagggatttgttataatcagcataaggattcgggaaggccctttgagccatgacgccggaagcaagcctgcagaacaggggaaaaacagaaactaggytgagataggggcctcggccgagttgcgagggcggcggccggcgcccaggtatcccccttcctccagctccagggccatcgagccgtctcggcggtccgag

SEQ ID NO: 127683 - DNA, 201 bp, Homo sapiens
gttatctctacctcatacccccacctcatcttttgcatgcagtgctccacatgggctactggatcaggtcttgctatctttatatatgctgttctctctaycatcccttacttgtccttcacaactcagctcatgctatcttctgcagaaagcttttaaatgatagaccccagctatatagttaagacttcactttttctt

SEQ ID NO: 127684 - DNA, 201 bp, Homo sapiens
gtacttctagtactatgttgaattggttgaattggagtggtaagaataggcatccttgtcttgttccagttctcaatgggaatgcttctttttttttttttggtctgtttagtgtgatgctggttgtgcatttgtcatagatgactcttcttattttcaggtacattgcttcagtgcctagtttgttgagttttttttttt

SEQ ID NO: 127685 - DNA, 201 bp, Homo sapiens
tttttgtagctattgtaaatgagactgcattcttgattaggctctcagcttgaacattattggtatatggaaatgctctggatttttgtacattgattttrtattgtgaaactttactgaaagtgtttatctgttccagaagctttggcagggtctttagggttttctaggcatagaatcatataatcagtgaagagagat

SEQ ID NO: 127686 - DNA, 201 bp, Homo sapiens
gtagctttatagtatagttttaagttgggtgatgttatgtttccagctttgttctttttgcttagtattcctttggcttctcaagctcttttttggttccwtatgaattgtagaatagtttcttctagttctgtaaaaaatgacattggttgtttgataggaatagtgttgaatctgtagcttgctttgggaagtgtggcc

SEQ ID NO: 127687 - DNA, 201 bp, Homo sapiens
gcactactctcttgctagcttcctgctcttcctccaacatgcaggcacacttcctcctcagggctttggtacttgctcttctatttgcttgagacgtttgycccacagatagctgcacggctcagtgcctcaccttctcagcagcatccttcctggccaccctatttaatacttaaacttcttatactttttcttcgctac

SEQ ID NO: 127688 - DNA, 201 bp, Homo sapiens
tttccctaggggcaagcaaatactccaagttgaacatctcatttacagcactgtcatttggggtgatagttatttgtagtttgtagaggaattatttcattcatatgagtgaacagatgggttaataaagctgtctgaagttgcaaactggtacacagactatttcagggacatccatcatggtgtcatgttgctgaatgc

SEQ ID NO: 127689 - DNA, 201 bp, Homo sapiens
atatgtagaaagctgaaactggatcccttccttacaccttatacaaaaattaattcaagatggattaaagatttaaatgttagacctaaaaccataaaaamcctagaagaaaacctaggcaataccattcaggacataggcatgggcaagggcaaggacttcatgtctaaaacacccaaagcaatggcaacaaaagccaaa

SEQ ID NO: 127690 - DNA, 201 bp, Homo sapiens
aaattttaaaagggagaagaaggcatccatatcatatcctgggccatagccattttcttctcaactattatctgaatttatcttccttatccaggcagctmatttctgtaatcgtcatttgggagacacttctctccccccagcccccaacaacccaagctttccttttcctttttgttatttaggacacttgttctcata

SEQ ID NO: 127691 - DNA, 201 bp, Homo sapiens
agccctcagaaataatgccacgttatctacaactatctgatctttgacaaacctgacaaaaacaagcaatggggaaaggattccctatttaataaatggtsctgggaaaactggctagccatatgtagaaagctgaaactggatcccttccttacaccttatacaaaaattaattcaagatggattaaagatttaaatgtt

SEQ ID NO: 127692 - DNA, 201 bp, Homo sapiens
ctgccaccatgcccggctaattttttgtatttttagtagagacggggtttcaccatgttggccaggctggtctcaaactcctgacttcatgtgatccaccygactcagcctcccaaagtgctgggattacaggctcacatgagccaccgcgcccagccataaatattaatttccaatgaaaaaagagcatttgccttgttt

SEQ ID NO: 127693 - DNA, 201 bp, Homo sapiens
actacaaggcaacagtaacccaaacagcatggtactggtaccaaaacagagatctagaccaatggaacagaacagagccctcagaaataatgccacgttayctacaactatctgatctttgacaaacctgacaaaaacaagcaatggggaaaggattccctatttaataaatggtgctgggaaaactggctagccatatgt

SEQ ID NO: 127694 - DNA, 201 bp, Homo sapiens
ttcaacagcacttcatgctaaaaactctcaataaattaggtattgatgggacatatctcaaaataataagagctatctatgacaaacccacagccaatatyatactgaatgggcaaaaactggaagcattccctttgaaaactggcacatgatagggatgccctctctcaccactcctattcaacatagtgttggaagttc

SEQ ID NO: 127695 - DNA, 201 bp, Homo sapiens
taaaccaggaagaagttgaatctctgaatagaccgataacaggctctgaaattgaggcaataattaatagcttaccaaccaaaaaaagtccgggaccagamagattcacagctgaattctaccagaggtacaaggaggagctggtaccattccttctgaaactattccaatcaatagaaaaagagggaatcctccctaact

SEQ ID NO: 127696 - DNA, 201 bp, Homo sapiens
cagttatgttgctccattgagtgttgttggatagaaaaagaattgcttattcattcattatgcttaattaaaaacataagatacatctgccctggccagcyttttaatccctggattcagattgcacaggctttgggcaacattaataaaatctacagaaggagtctatgagtaaagtactttccatttgtgcgtgcatgt

SEQ ID NO: 127697 - DNA, 201 bp, Homo sapiens
aaaaaggcaggggttgcaatcctagtctctgataaaacagactttaaaccaacaaagatcaaaagtgacaaagaaggccattacatgatggtaaagggatsaatgcaacaagaagagctaactatcctaaatatatatgcacccaatacaggagcacccagattcataaagcaagtccttagagacctacaaagagactta

SEQ ID NO: 127698 - DNA, 201 bp, Homo sapiens
ttatgatttgaatacagtaaaataaagggaataaaaacatctgctatcagagtaagactcaaagagcttatgaattttgaatttaaaaaatattttacttytattttgaatagggtctaaattcttatttatattttaacatgggaatataatacatgtgttactaattcattttcacatgagaacatcttccaggtattt

SEQ ID NO: 127699 - DNA, 201 bp, Homo sapiens
gattaaatactaatttacagctggggatttaaacaattatgtgtcttaaaaacatgactagattgattgaaggggtttccaatacagattcaatccaactrgtattctatgaaatatttgataaattctttagagaaattcaagttagtctcataaagacaagggggcattaggttcactgatactgaatatactaattga

SEQ ID NO: 127700 - DNA, 201 bp, Homo sapiens
aagaatttggtagacactggctcaaagattattatggcaaagttatcaaattccgaatgccatagtatagagaaggaagtagacatggatataattaactstaataaaaaagcaaaatacaatatacttctagaatgttccacagtgcttggttttgtgtcagcattaagagagtgataaagtttcagtttcttcatgaac

SEQ ID NO: 127701 - DNA, 201 bp, Homo sapiens
accaggcctgccctaaaggagctcctgaaggaagcactaaacatggaaaggaacaactggtaccacccactgcaaaaacatgccaaattgtaaagaccagygaggctaggaagaaagtgcatcaactaacgagcaaaataaccagctaacatcataatgacaggatcaaattcacacataacaatattaaccttaaatgta

SEQ ID NO: 127702 - DNA, 201 bp, Homo sapiens
cttaaaaatgtaactacaatcctaagaagatcaatcttaaaaaattacttagtataatcaaatatcaatttatgattctaatttcctcaattattgcagakatgtttttctttatactttaatttttaaaaaccacattctaattagtttgtcctatagagtttcttagagaatctgtattttgtctcctaaggtgtagtt

SEQ ID NO: 127703 - DNA, 201 bp, Homo sapiens
cttatccagtgaaactaagcttcataagtgaaggagaaataaaatactttatagataagcaaatgctgagagattttctcaccaccaggcctgccctaaargagctcctgaaggaagcactaaacatggaaaggaacaactggtaccacccactgcaaaaacatgccaaattgtaaagaccagtgaggctaggaagaaagt

SEQ ID NO: 127704 - DNA, 201 bp, Homo sapiens
ttgagatttcaaacactgggtcgaaggaaatagataaatctttaactcaaagataatttgataagcctagtaaaggacaaaatatttttggctaatcttgyccaggaacacacgcatatgctcactcacacacatacaaacacacataaaatgtacagtagagtacattgttcaatctttctcagaaatacaaacttgaaa

SEQ ID NO: 127705 - DNA, 201 bp, Homo sapiens
agagaagtctcatgaaatatttcaaagacaaattgtgctgaaattctaaatttcaaaaatccatatcttaatagtgtaattccaagaataaaagaataagrtttcatttacttgattttaactttttaccatattatctacacaataattacctgaaataaattctggctttaggctttctacttttcagtgcttagttca

SEQ ID NO: 127706 - DNA, 201 bp, Homo sapiens
tggatctctcggcagaaactctagaaggcagaagagagtgggggccaatattcaacattcttaaagaaaagaattttcaacccagaatttcttatccagtsaaactaagcttcataagtgaaggagaaataaaatactttatagataagcaaatgctgagagattttctcaccaccaggcctgccctaaaggagctcctga

SEQ ID NO: 127707 - DNA, 201 bp, Homo sapiens
attttatttacaatgagaaaccttattagaataaaaatgattcataaatcttaatcttttgtttataaatgttcaaacataaaagtacttaagtaaattarccttttgattttgtccccttaacattggcttatgtttaaccaaagaccgatgacttaatattaacttggaatgttgtaagattattaactgagaatgtgg

SEQ ID NO: 127708 - DNA, 201 bp, Homo sapiens
tttccttttccctattctttttctccttttctctccagagggcagaatcagcctgttttgaatatcacaaacaaacaggctttcattactgctcagaatcrtggctatgccttggacaacaccctccctgctggctggaaaccactttttgtgaatgtcaacgatcaaacaaatgaggtaaatgatgtcaataaacctgtt

SEQ ID NO: 127709 - DNA, 201 bp, Homo sapiens
tactagttgttccatcatttacacaattatttctatttgaaatgcagtaattgttcagaacttatatttctatactgatgtctactaacagctttagatcraatattaaataactcaagaataatgagatgatcttggcttacttagatatttggtttttatatctatagaacaaaggaattagaaaataattttgaagat

SEQ ID NO: 127710 - DNA, 201 bp, Homo sapiens
attattgggtaaagttctacgcagcataactcctgcttttccaagtcagattgctgcccacctacagaccatctaaagtaggtgccaactgtgagggaggkgctattatgatcttcatttctcagatgagaaaacttatttggagagattacatccagatgcactcagctcataagtgacaaagttgggattcatggtcag

SEQ ID NO: 127711 - DNA, 201 bp, Homo sapiens
atggatctctcggcagaaactctagaaggcagaagagagtgggggccaatattcaacattcttaaagaaaagaattttcaacccagaatttcttatccagygaaactaagcttcataagtgaaggagaaataaaatactttatagataagcaaatgctgagagattttctcaccaccaggcctgccctaaaggagctcctg

SEQ ID NO: 127712 - DNA, 201 bp, Homo sapiens
gcagaaaaactgaaaattctaaaatcagagcgcctcttctactctactccaaaggaacgcagctcctcaccagcaatgaaacatggagaatgactttgacragctgagagaaggcttcagacaatcaaactactccaagctaaaggaggaagttcgaacccatggcaaagaagttaaaaaccttgaaaaaagattagacaa

SEQ ID NO: 127713 - DNA, 201 bp, Homo sapiens
ttctactataacttttcctctcttatcaaattcactatttaatcatttagaaacattctgctaaatactcagttgattatctgactaaagtaatttcactraagtgtgaacaaagcttagtgacttgtctactctgtgctagccactggtataggctggaggtgcactagtgcaagaagcagacccaatactctgcctgca

SEQ ID NO: 127714 - DNA, 201 bp, Homo sapiens
gaaagggaggatgaaattctcaggactaatttcctgcctcctgagggacaggacttggcattcaaggagttatataaaacttttttccctgggtaactccragttcggaagcagcaattctcatacattgtatcaggagcttgtttaaaacacagattcccagacctcaggaggtttgggttgaatctgcattttaaaaat

SEQ ID NO: 127715 - DNA, 201 bp, Homo sapiens
aaagaaataatcaggaggatgggtgtggggtaggagagcatatgctttttttttctactataacttttcctctcttatcaaattcactatttaatcatttrgaaacattctgctaaatactcagttgattatctgactaaagtaatttcactaaagtgtgaacaaagcttagtgacttgtctactctgtgctagccactgg

SEQ ID NO: 127716 - DNA, 201 bp, Homo sapiens
tctcctcatccaggagaaactggatgagcagctttcctccagctccaggcctgtgacaggggagagcacaattccagtgcctactgatgaggcactttctrtaattctggctgtagagacctctacaccactccagagcaagcgctccaatctctggcccaagacaaaaatgcctgtgcagccacggtgccagattgccaa

SEQ ID NO: 127717 - DNA, 201 bp, Homo sapiens
gtgtaagatgaaaaaattactgtttaatattttcagaattaaaagaaataatcaggaggatgggtgtggggtaggagagcatatgctttttttttctactrtaacttttcctctcttatcaaattcactatttaatcatttagaaacattctgctaaatactcagttgattatctgactaaagtaatttcactaaagtgtg

SEQ ID NO: 127718 - DNA, 201 bp, Homo sapiens
cctcatgttttttccttagatctagactaaatattgatcaaccagaaacttaaacatattttgcgcagaataaagaacaactagtcaagataagtcttttwaagttataaaagtttaatttgatcttcttcaggtggaataattcaattttataccctttcatcttggggcctaagtactttaataaagatctataccttt

SEQ ID NO: 127719 - DNA, 201 bp, Homo sapiens
caacagtgtataagcattcccttttcttcacagcctcgccagcatcggttgttttttgactttttaataacggccattcttactggtatgagattgtatcytattttggttttgacttgtgtttctctgatgattagttatgtggagcattttttcatgtttgctgacgtatgaagatgacatatgttgtatgtcttcttg

SEQ ID NO: 127720 - DNA, 201 bp, Homo sapiens
gcagtgtaagatgaaaaaattactgtttaatattttcagaattaaaagaaataatcaggaggatgggtgtggggtaggagagcatatgctttttttttctmctataacttttcctctcttatcaaattcactatttaatcatttagaaacattctgctaaatactcagttgattatctgactaaagtaatttcactaaagt

SEQ ID NO: 127721 - DNA, 201 bp, Homo sapiens
tgatcaaccagaaacttaaacatattttgcgcagaataaagaacaactagtcaagataagtctttttaagttataaaagtttaatttgatcttcttcaggyggaataattcaattttataccctttcatcttggggcctaagtactttaataaagatctatacctttaagccaggggtaagcaaagtaacgctgagggtac

SEQ ID NO: 127722 - DNA, 201 bp, Homo sapiens
aaggcacctaggttgattccacgtctttgctattctgaagagtgctgcaataaatatgtgcatgcatgtgtctttttggtagaacaatatatacatacatmtatatatatatatatatatatatctccagtaatgcagtcatggggttgctgggctgaatggtagttctgctttgagttctttgagaaatctctaaactgc

SEQ ID NO: 127723 - DNA, 201 bp, Homo sapiens
aaaagtaaaggaagaaaaagagaatgtttgggttatatatactgaatgcagctttattcttttccctagtgatggaggattagatttctacataacatagrtaattattaatattaatgatagaaacaattcatgaggaaacctaaagaatgacatttagaaatcacctttttgggtcttcttctgaaggcattacttata

SEQ ID NO: 127724 - DNA, 201 bp, Homo sapiens
ttttaagttataaaagtttaatttgatcttcttcaggtggaataattcaattttataccctttcatcttggggcctaagtactttaataaagatctatacstttaagccaggggtaagcaaagtaacgctgagggtaccaggaggcatgctgtcgctctgtgtgtaaagactcataaaccttccagagcaattagtggtgt

SEQ ID NO: 127725 - DNA, 201 bp, Homo sapiens
tcaagaactatagtaatgctttcagttcatgtctttgatggccaaggcagtctttataaagttgttgcctttaaattactatttctagttgacagactagygataacattttggacaagcatagtattttacagtattgaaaatgttctcacatttaatttgatcttcacacaaaccctgtgaagtaaggcggatattaca

SEQ ID NO: 127726 - DNA, 201 bp, Homo sapiens
ttatgttttaataggttatcagtaaagtaatggcagaaggtagaaataggatagtgacaggtcaatctacgtctaccagacatgcttaagaagtgttaacrctttactttatccaaatatcagtattacagcttttttaagggaggtattttaacatttgaactcacactagtgtaagtttaaagtatacgttatctttaa

SEQ ID NO: 127727 - DNA, 201 bp, Homo sapiens
tttttgataatgacattgaaacttcctcattattgggtaaagttctacgcagcataactcctgcttttccaagtcagattgctgcccacctacagaccatytaaagtaggtgccaactgtgagggaggtgctattatgatcttcatttctcagatgagaaaacttatttggagagattacatccagatgcactcagctcat

SEQ ID NO: 127728 - DNA, 201 bp, Homo sapiens
ttaaaggcacctaggttgattccacgtctttgctattctgaagagtgctgcaataaatatgtgcatgcatgtgtctttttggtagaacaatatatacatayatatatatatatatatatatatatatctccagtaatgcagtcatggggttgctgggctgaatggtagttctgctttgagttctttgagaaatctctaaac

SEQ ID NO: 127729 - DNA, 201 bp, Homo sapiens
ttccagttgctaatagaatgatctttacttctctgaggctcagttagttcaagtgtaaaatggagatttcaatattacctacatcattattttttgtgaasattagatgagaaaacccactaatggctttaaagatagtattcagtacgttcatgttaactgttattaaggatgtcatagggaattgatcagaatggagtt

SEQ ID NO: 127730 - DNA, 201 bp, Homo sapiens
cccatggtgtatatgtagcacattttctgtatccaatctaccattaaaggcacctaggttgattccacgtctttgctattctgaagagtgctgcaataaayatgtgcatgcatgtgtctttttggtagaacaatatatacatacatatatatatatatatatatatatatctccagtaatgcagtcatggggttgctgggc

SEQ ID NO: 127731 - DNA, 201 bp, Homo sapiens
ctcctcacagcagggcagcaagtttttccattattaatatgaataattatctatgttatctagaaattgaatcctccatcactggggaaaagggagggggkactgagaggtggatctccttattcatcacatcatctagggttccaacaatcttcagtgcttgagaactcaagggcctaggatcagtgcaaattgttctcg

SEQ ID NO: 127732 - DNA, 201 bp, Homo sapiens
gttttagtccttctaaatattgtgtgtgaaaaaatctgcagtcttatgaatcttcctccaataaatttgctaacaaaggaaacatttagtattactaggcygtagagactagtaatttaatctttaatttttaaatttatatgaagtaacaagagaacacaatttttcaccgcttattttataacctgattggctcccaga

SEQ ID NO: 127733 - DNA, 201 bp, Homo sapiens
ataagaaaaaaatgggtttgtataattttattctgaaatgtgtttcctttattttctaactataaaatggttttgacatcttcaaaaacatcatcgcataratgcaaacatattttttaaagaactaacactttatagactttaggtgaagggattctgcaaggactgtgacatccaatgggagggtgcttatgtgtggtg

SEQ ID NO: 127734 - DNA, 201 bp, Homo sapiens
tttttcaacttgttaaatgctatacattgatcttttaaatttcatagggaggtaactgactaatttgaagttctcataaatgaatcaatagggttgctacrttatgaaagaattttactaagtttcttctataatgcagactgaaatataagaccattttaatttatcaccaccatacagtaaaaattagcttatgatatg

SEQ ID NO: 127735 - DNA, 201 bp, Homo sapiens
cttatgaggcatattaggtatcacatgtgacataagcaaaagcctgtgatccttagcatgttggaaagttgctactctttaggataaggttgtccatgatktctaggtcattccattcagctgcataaacaattcctttgatggatggctggttttctacaaccccagcattattttagcaggagaaggtagtatttgatg

SEQ ID NO: 127736 - DNA, 201 bp, Homo sapiens
caatatttatgcagatacatacataattatagtgccacatttgaaatatcctacttttgtatattacagattgcatgaaatagcccagaatggaggttcarttgatctttaagagaactcaggagaactgaattttgtattagctaaacttatttaatatattaaaatgatatacttatacattttaattttaatccttta

SEQ ID NO: 127737 - DNA, 201 bp, Homo sapiens
gccagccctgcagtgattgatggatgttctgctcccttctggtgtatcttcacttgtgctgggaaagggatgaagggcacctttgaaagaggaggaaccayagtaatcacttcatctctcttctgcttaatgcaaacttactctggaaagataaatgactatccactcctgtaacaactcctcaaaatcattactatatat

SEQ ID NO: 127738 - DNA, 201 bp, Homo sapiens
ggacagggaattgccacctggtgaggtctatctctgtctttcccatactacttcctatggatgagtcgtctggactcaaagaagaccttaatccatggaartggtctctggttttctgaagggttaaatgtagatacagtaagggatttggagaattgaaatcccatgaatagagtcttgagattgcaaaaataacaacaa

SEQ ID NO: 127739 - DNA, 201 bp, Homo sapiens
aaaagagagaaggtggtaatatgtccgttttaacatattgaaaggactaaatggatttatgaatgaaaagcacctagcatggggcctgccgcatagtagamttcaaagacatttttctttcctcacttccctgccacccctaccccacacaccctgaaatctatcacaagagccataaaactagaggttactgttaaaaag

SEQ ID NO: 127740 - DNA, 201 bp, Homo sapiens
aaagaggccccgttttgcaaccccgttcccacgcccgcgacttgaagcaagtgcgcctcccgcgtcctgaagcccttctcggccctggcctctcaccccgyagccccggacagtaacagaagggctattttaccgcccagttcctgccaggagggccaatcagagccttcgccgttcccgagacccgcccccttctctctt

SEQ ID NO: 127741 - DNA, 201 bp, Homo sapiens
tttaagataccccagaaaggcatcctgataggcatccaggtaagtggtttgtggctgtgtgcttgcccatggtcatacatggtgagtggggaggggcaggrtagaatgttaattgtggtatagaggaagggagatttgttttacgtttccgtttatggcaacttccaggaagaagggacatttgttctctatttgcttcct

SEQ ID NO: 127742 - DNA, 201 bp, Homo sapiens
caatatgcttaaccatctactgtcctcctccttctgcccaggtagctccagccaccagcatttcctcccccttttctccctgctggacatcagggctcttwtatgctgccttgactatatgggtcctctcgtaactcccactctccattataaattcctaatttactctctctgcaccaagtctgtatttccctcactctg

SEQ ID NO: 127743 - DNA, 201 bp, Homo sapiens
tttttttttttgataatgacattgaaacttcctcattattgggtaaagttctacgcagcataactcctgcttttccaagtcagattgctgcccacctacaraccatctaaagtaggtgccaactgtgagggaggtgctattatgatcttcatttctcagatgagaaaacttatttggagagattacatccagatgcactca

SEQ ID NO: 127744 - DNA, 201 bp, Homo sapiens
ttttgaaactggccaattgtcccatagaactgatgtttatgatttcttttgaataaacatagaaattgaccctcctggttttaaaacttgagacatttacrtttgtcttatctgagttcctttctcaggaaaccaaccatcaggcctcccagatagtatcaagggactgtaacttaccagatcaccacatctggacgatga

SEQ ID NO: 127745 - DNA, 201 bp, Homo sapiens
ttttgactgctaataggagatttggacttatggaagaaaatcttacacaaatgtctgaaataaggctaaagattctggcactgtttgtaaagcaagtagtraggcagtaggaactaaaatcagttactaggtactgttgacaggtaccaaggctgcagccaaggagaggggaaggtggaaggtcatcaaagtggaaggaca

SEQ ID NO: 127746 - DNA, 201 bp, Homo sapiens
tccttgtttttttttttttttttttttttgataatgacattgaaacttcctcattattgggtaaagttctacgcagcataactcctgcttttccaagtcarattgctgcccacctacagaccatctaaagtaggtgccaactgtgagggaggtgctattatgatcttcatttctcagatgagaaaacttatttggagagat

SEQ ID NO: 127747 - DNA, 201 bp, Homo sapiens
agaaaacatatcacattgaaatacagttatacaataacttaaaacattgtgatagagtaatgtgtatgcttcttatttacacattataaacagaatatagyggctgggctaataataataaattcaaagtactgacacatagattttcaagacgtctgcaacaactgcaataataaataaaagtatctataagttctatct

SEQ ID NO: 127748 - DNA, 201 bp, Homo sapiens
acacttacggtatataggacctttaatgtttagtgtttaggcaggtattatcctaattttatacacaagaagactaaacgttgggggaaagttcagtcttsttgtctataaaattagacaagaaggggtgggtggtacacagaaggaaccaagttaggaagggacttcgactggaaatctatttcctcaccgtctcacgct

SEQ ID NO: 127749 - DNA, 201 bp, Homo sapiens
actccaccataacctcttacatgccaatttctaccttgagtttgtttccaggaaccaagcctaaaaacaggacccatgccttttatttatttatttatttwttttttgcttgctttgaattcttactctgtaaatgaattgtgctgtctacacacacaaaaatatacattgaagcatgtctttgtttattcctagttacat

SEQ ID NO: 127750 - DNA, 201 bp, Homo sapiens
ggcctttgatattattacagttattattactttttaccagaaaatcatctctatgtggaaaatatggtcaattagaaggaaaaaagtactaaattggaacsaaaatacttaaattttagttttgactgacaacctcattgatttctttaagttacataaattctccgtgctttatctttattttaaatgaatcgtctgagt

SEQ ID NO: 127751 - DNA, 201 bp, Homo sapiens
ggaatgccaagcacaaaaaatagaagttcttgaacttcacaatagtgaattaaaattccatagaacagcccaaggggacttgtgttattattcagttattrtgaaatagtcctctatctacttttcttcctgccttcactttaaaaactcaactgtcttagaaaaatatatccaaatttactatttttagatggacatcat

SEQ ID NO: 127752 - DNA, 201 bp, Homo sapiens
tatatatatgtatatatatgtgtatatatatacatatatatatacacacacacatacacacacacacacacacacacacacacacacacacacacacaccctgtatatatatatatggtaatgtgtttgttcaaatctttagtcccttcccccattcccagcttttaaattgggatgtttatttacttaatattattcata

SEQ ID NO: 127753 - DNA, 201 bp, Homo sapiens
tacttcaaagttgggtgacttggaatatcttcttctcactctgtgagaaggtaggtatgtaggtaaggataggtgcatcttcatcagaccccagaaaccgygaaattgagtacttacttaaaatggcacagatatgattgaaattagaatccaattctccaagatcacaataagtgctccatacaaccaccaccacaatca

SEQ ID NO: 127754 - DNA, 201 bp, Homo sapiens
atatatatatgtatatatatgtgtatatatatacatatatatatacacacacacatacacacacacacacacacacacacacacacacacacacacacaccctgtatatatatatatggtaatgtgtttgttcaaatctttagtcccttcccccattcccagcttttaaattgggatgtttatttacttaatattattcat

SEQ ID NO: 127755 - DNA, 201 bp, Homo sapiens; identical to SEQ ID NO: 21720

SEQ ID NO: 127756 - DNA, 201 bp, Homo sapiens
ggaaagaaacattaattgcccttcttcctgccccccagcattgaattatgaaattcctgtaggaacctctgctccttcctgcaactttatgaagacgttcmttatcagagaagcctgaagttactccataggaactttgccaatgaaaataatctttagtgactataagtttaagtaattatattagctttagatatattg

SEQ ID NO: 127757 - DNA, 201 bp, Homo sapiens
atatatatatatgtatatatatgtgtatatatatacatatatatatacacacacacatacacacacacacacacacacacacacacacacacacacacacaccctgtatatatatatatggtaatgtgtttgttcaaatctttagtcccttcccccattcccagcttttaaattgggatgtttatttacttaatattattc

SEQ ID NO: 127758 - DNA, 201 bp, Homo sapiens
aaaaaccaaaaaaaaaaaaaagaaataagagcaggttgaataggcaaaacagctagcctgactcggtactggctcctaacccgcatatcttttaagtcctycctgaccaggaaaaggatccttgtagaaccgaagtggatctgaacttacaaagaccaagtggattaaatagagaataaaaggagataagaacaaggtgaa

SEQ ID NO: 127759 - DNA, 201 bp, Homo sapiens
ttctttttacaaatagtaaaaatgctatttgtaggatgctctgatttttactttttgtaaaaagaacattgtctttttaccccaacagaaaatggcaagcrttcagctttctttgggaatccaaaatctcttatgaggcatattaggtatcacatgtgacataagcaaaagcctgtgatccttagcatgttggaaagttgc

SEQ ID NO: 127760 - DNA, 201 bp, Homo sapiens
agaatcgcttgaacccagaaggcattgcagtgagccaagatcgtgccattgcactccagcctgggcaacaagagcaaaaaaccccatctcaaaaaaaaaamccaaaaaaaaaaaaaagaaataagagcaggttgaataggcaaaacagctagcctgactcggtactggctcctaacccgcatatcttttaagtcctccctg

SEQ ID NO: 127761 - DNA, 201 bp, Homo sapiens
ttaaactttactgaaaatgcacaaggaacttgatctttctttcttattttccccattttatttattttcccattgcatttgggcaactttcatggcaccakttattttattaattatttgtataaactagtatgagcctattttgtttagctttctatcaccaggagccatgaagcactttgcaatcaaatactgtttgta

SEQ ID NO: 127762 - DNA, 201 bp, Homo sapiens
aaatatatatatatgtatatatatgtgtatatatatacatatatatatacacacacacatacacacacacacacacacacacacacacacacacacacacacaccctgtatatatatatatggtaatgtgtttgttcaaatctttagtcccttcccccattcccagcttttaaattgggatgtttatttacttaatattat

SEQ ID NO: 127763 - DNA, 201 bp, Homo sapiens
gcatactaagtctcccatgatatggtaccttttcattttcccattctataccctgcatctaggcttttaaaaaatataccacatgacttcatgcctctagrctattgctcatgccacggcatcccttctgggttttttcccctctttatctacttggtgaatttgcatccttcagtataacacagctcaacataattctat

SEQ ID NO: 127764 - DNA, 201 bp, Homo sapiens
atgatcattggaggaaatatatatatttttcacttttaaaggactgtcttctttataaacatttccaagaaaataaatcagcttgtacttttcacctttcrtaacaaatggtttcttacacaggtattttcaatcagcttttaaatctgaggctactcagatgcaagctgacagctgtaatttctttttgtagagaggctg

SEQ ID NO: 127765 - DNA, 201 bp, Homo sapiens
tgcttatttgccagccaaatatatatatatgtatatatatgtgtatatatatacatatatatatacacacacacatacacacacacacacacacacacacacacacacacacacacacaccctgtatatatatatatggtaatgtgtttgttcaaatctttagtcccttcccccattcccagcttttaaattgggatgttt

SEQ ID NO: 127766 - DNA, 201 bp, Homo sapiens
ggctttgggcaacattaataaaatctacagaaggagtctatgagtaaagtactttccatttgtgcgtgcatgtgtgtgtgtgtgtgtgtgtgtgtgtgtgtattttaattttaatttttggtaggagtggttgactattctttgcatcctctattttaattttttatttatttctaaacaggtggcttgctttggtgaagg

SEQ ID NO: 127767 - DNA, 201 bp, Homo sapiens
aatgcttatttgccagccaaatatatatatatgtatatatatgtgtatatatatacatatatatatacacacacacatacacacacacacacacacacacacacacacacacacacacacaccctgtatatatatatatggtaatgtgtttgttcaaatctttagtcccttcccccattcccagcttttaaattgggatgt

SEQ ID NO: 127768 - DNA, 201 bp, Homo sapiens
aggctttgggcaacattaataaaatctacagaaggagtctatgagtaaagtactttccatttgtgcgtgcatgtgtgtgtgtgtgtgtgtgtgtgtgtgtgtattttaattttaatttttggtaggagtggttgactattctttgcatcctctattttaattttttatttatttctaaacaggtggcttgctttggtgaag

SEQ ID NO: 127769 - DNA, 201 bp, Homo sapiens
gaacccgggaggcgtgagcttgcagtgagccaagatggtgccacggcactccagcctgggtgacagagcaagactacatctcaaaaaaaaaaaaaataaaataaaaataaaaatagatcttatgagacataatggacataagtaaacggtatctaaagtataccatttcataagttttgacttaggtatatacccataaat

SEQ ID NO: 127770 - DNA, 201 bp, Homo sapiens
gaatattttgtaatcatttaaagtaatgttttaaaagaactttgtaataacatcaaaatacatttaacataatattgcctccaaaaagcattatgcaagtsaatggcaattttcaaaactatgttctgagcattgacataaatgctagaagataatactttagtgttaacagagattatgtttgtgtggtgggttattatc

SEQ ID NO: 127771 - DNA, 201 bp, Homo sapiens
ttattaaatagggaatcctttccccattgcttgtttttctcaggtttgtcaaagatcagatagttgtagatatgcggcgttatttctgagggctctgttcygttctattgatctatatctctgttttggtaccagtaccacgctgttttggttactgtagtcttatagtgtagtttgaagtcaggtagggtgatgcctcca

SEQ ID NO: 127772 - DNA, 201 bp, Homo sapiens
acagtttttaaaaatagatcttggccgggcatggtggctcacgcctgtaatcccagcactttgggaggctgaggtgggcagatcatgaggtcaggagatcragaccatcctggctaacatggtgaaaccccgtctctactaaaaatacaaaaaaaaattagccgggcatggtggcaggcacctgtagtcccaactactcgg

SEQ ID NO: 127773 - DNA, 201 bp, Homo sapiens
actttctatggttctgtagaaaatttttaaaacctcgtctgtgttgttgcatctgcactatgatgggattacccaattcttttcaatagaatttgagactyattaacttaggttgaccttatttaagttagttgcccagtacttgactgagtaaaatgttcactgtggagagaaaagcagcaaccacatgtactggtgacc

SEQ ID NO: 127774 - DNA, 201 bp, Homo sapiens
ggaggagattctggttatttgggattttcattttccctgtgcaatatacttgagacactcagcttaagaagcttcgtgggggaatgacattttagctcctytcccaaagctcgaggcccagaaggtagagctgttttgcttgacaagttgatagagagagactcattaaataaacgttctatcgtctgaagggagaaagta

SEQ ID NO: 127775 - DNA, 201 bp, Homo sapiens
gtggtaaagtggggatattagtcctaatctttaatggcacatttaactactttctatggttctgtagaaaatttttaaaacctcgtctgtgttgttgcatytgcactatgatgggattacccaattcttttcaatagaatttgagacttattaacttaggttgaccttatttaagttagttgcccagtacttgactgagta

SEQ ID NO: 127776 - DNA, 201 bp, Homo sapiens
agaagaaaaaaaaagaagagaaaaaatcagaaccgaatcatactttttgttagatcatgtgtataatattcccttttgtggtggtggaaagaactcacctmctctggtttagagggaagaagagtcagttgtcaatgcaaagttctattacaacatctccaaagccatagtttttatttgaaaagcgaggaagtgtgacaa

SEQ ID NO: 127777 - DNA, 201 bp, Homo sapiens
ttacagcatccctggaaggtggtcatctgttttcttttaaacactttggtgatacaaagctcaacacattgtaagattatatattgtggtcacttttttttgacatctcaggtattctttatcttgaactaaggtctgtttccttggaagtcttatccctgattttctgagtttcagagcaaaaacttaatctatttcctt

SEQ ID NO: 127778 - DNA, 201 bp, Homo sapiens
gaatgcagggcctggtaaaaagacagtggcccaggttgttttagcctatggtacagaggagaagatatctaaaccctggagatcttccctcaacctcttcrtttagtatggagaaaagcaagtggggattatgttgtggagggcatcccgaccctgacatggaggaaatgagtgtgggaagcacttcaagatgagaagtgt

SEQ ID NO: 127779 - DNA, 201 bp, Homo sapiens
cctgtgaggcattcagaacagagcctgtcatacaataaatgccatgtcagtgtttgctcttattctcagtatacagagatctgctttgatcttttcatctkctgcaaaatattccacaaattggcatattgtgttttgtaataatctctattgattattttcaagcaagatttggaattatccgcagtagtttcaaatgta

SEQ ID NO: 127780 - DNA, 201 bp, Homo sapiens
ctatcagaggaaaaaattattactattatgataataccccttcagacctttttctagtcacttacaggtaaaaattgtagtactggttggtacatagtgtrttttattaatgttttactgcgtatattgttgtataaattgctttccgcactcattggcatgccttagaattctttttatttaggcttcatgactaatttg

SEQ ID NO: 127781 - DNA, 201 bp, Homo sapiens
cagtgtattgctttgttcatcatgtgaaaaaattgaaacattacaaataagtttaagatcttcctatgggaaaaaataatttcctctatcagaggaaaaawttattactattatgataataccccttcagacctttttctagtcacttacaggtaaaaattgtagtactggttggtacatagtgtgttttattaatgtttt

SEQ ID NO: 127782 - DNA, 201 bp, Homo sapiens
gaaaataattttgaagatttcatccagctatgtaaaactatctagggaatacatttactaggttttcaattttctacaaaacatctttcagcagaaagcartcctgtttcctgatatacaatgtctgatacatagaaactactcagtacataattcctgaattgattattcttttggaaatcctagatttgatttctgaac

SEQ ID NO: 127783 - DNA, 201 bp, Homo sapiens
tgaacagtgtgccattttatatgagaattataaaacagcaatgattattttaggatcagagatgttgtgattcatcaggtactgttgatggatgatgcatwtgtgcttagtctggccttgcgcagaggctcgagtaatttgttatcctacaagacatgtgctgtttcctcttccatactactccccagtgctactaatatt

SEQ ID NO: 127784 - DNA, 201 bp, Homo sapiens
gttttcccaagggcttgtagtgttttctggctatgctttgagagcaggttaggcacctacccctgtcagaatgattcaataggctcaatctctcttacccsgttcccctcccaatccctccacatattaaaagctttctatctacctttttgcatttaaaaacctcatgacctcatgtttcatcccttctttaagttttat

SEQ ID NO: 127785 - DNA, 201 bp, Homo sapiens
aactgattgtctcagtgattggttttctgtgtggcatgcagcagaatctagactgcatccctagtgtttcagtaacagtttttaaaaatagatcttggccrggcatggtggctcacgcctgtaatcccagcactttgggaggctgaggtgggcagatcatgaggtcaggagatcgagaccatcctggctaacatggtgaaa

SEQ ID NO: 127786 - DNA, 201 bp, Homo sapiens
gggaaacagggcaaccaatcactagaactctctccacttggtttaatgagacagtgaatcgttgaattaagccagtgtccttaagctgcccttagttggtygctccttgattagtcaaagtgtaatttgagtgatacagccatgttggatgttcctgccacatattctgatgagttagcactctgttgctgctgtcacaca

SEQ ID NO: 127787 - DNA, 201 bp, Homo sapiens
gctctgtcgcccaggatggagtgcagtggcgtgatctcggctcactgcaagctccgcctcccgggttcacgccattctcctgcctcagcctcccgagtagmtgggactacaggcgcccgccaccatgtccggctaatttatttttgtatttttagtagagacgacagggtttcaccgtgttagccaggatggctacgatct

SEQ ID NO: 127788 - DNA, 201 bp, Homo sapiens
ctctgggatctttttatgaaatctaccatttaaatgcaaacaattgcacggcaacctaaagggactggtggtctatacctgcttagcaattcctgtgactyatactgattttatccattaggcccaactgcagaagccttatgtacagtaattcagctttaccccatttgatctttactgcaagttgaggatcaagtggta

SEQ ID NO: 127789 - DNA, 201 bp, Homo sapiens
gcctaagtactttaataaagatctatacctttaagccaggggtaagcaaagtaacgctgagggtaccaggaggcatgctgtcgctctgtgtgtaaagactcataaaccttccagagcaattagtggtgttggtaggaacacataaaggccaagaaggggaggttaatccacatccccttcctaataacagcatctactgtt

SEQ ID NO: 127790 - DNA, 201 bp, Homo sapiens
agtaattcctagttttgcagtttagaggcttcttggatgatccctacagctgtttctggaaggaacctgagggatcatgcaccagacagtggcctaccagsgggcattaatcaaatgatcattcataaacactgtgggagcaagttcatttcagagtaatcagaaattatcttttgttcctccatctcttcaaaggaaagc

SEQ ID NO: 127791 - DNA, 201 bp, Homo sapiens
aattacataggtgggagaagaaaaacatacaaacataatttcaaaaagatggaaataatgttaataattgcagccacaatttaaacatattggttcaaaartttaaacgtatttctttgttttatgagattcaaacaaaatctcataaaaacatgagatttttagaaagtacagaaaaatctctctctctgtatgaatttt

SEQ ID NO: 127792 - DNA, 201 bp, Homo sapiens
ggcctaagtactttaataaagatctatacctttaagccaggggtaagcaaagtaacgctgagggtaccaggaggcatgctgtcgctctgtgtgtaaagactcataaaccttccagagcaattagtggtgttggtaggaacacataaaggccaagaaggggaggttaatccacatccccttcctaataacagcatctactgt

SEQ ID NO: 127793 - DNA, 201 bp, Homo sapiens
tcagttattatcaagctaatgtgggtagtggacaacaccgtgaaaacaaggggccaattaacttgggaaatgtggggaagagcaacggtgagcggggaggraagtcgctttacaggtgtaagattttcttggagagtagtgtgaccatgaaggacagggaattgccacctggtgaggtctatctctgtctttcccatacta

SEQ ID NO: 127794 - DNA, 201 bp, Homo sapiens
gtaatttaatctttaatttttaaatttatatgaagtaacaagagaacacaatttttcaccgcttattttataacctgattggctcccagattcacaatacstgtaggctccagactaaaaaatgccaaactgttagtggaaagtaaccttaaggcatttttcttgatatccatattagctacaatccttggcctatttctt

SEQ ID NO: 127795 - DNA, 201 bp, Homo sapiens
tttacagcatccctggaaggtggtcatctgttttcttttaaacactttggtgatacaaagctcaacacattgtaagattatatattgtggtcacttttttttgacatctcaggtattctttatcttgaactaaggtctgtttccttggaagtcttatccctgattttctgagtttcagagcaaaaacttaatctatttcct

SEQ ID NO: 127796 - DNA, 201 bp, Homo sapiens
agatgtgagccactgctcccacctgaatcttaatcttaatgtgattcttttgcagactatagactagagtttgacatatgctggtgagagagagagagagrgaaagagagagagagagagagagcacaattctgaatataaaagccatggttctaaaggttaacagactgaaattccttgagttatcgtgcccatcaattt

SEQ ID NO: 127797 - DNA, 201 bp, Homo sapiens
gattgaccgggtctcctaggttaaacaggtcttcaagaaggtgatcctgcaagaactaatctcagttattatcaagctaatgtgggtagtggacaacaccstgaaaacaaggggccaattaacttgggaaatgtggggaagagcaacggtgagcggggaggaaagtcgctttacaggtgtaagattttcttggagagtagt

SEQ ID NO: 127798 - DNA, 201 bp, Homo sapiens
ctttacagcatccctggaaggtggtcatctgttttcttttaaacactttggtgatacaaagctcaacacattgtaagattatatattgtggtcacttttttttgacatctcaggtattctttatcttgaactaaggtctgtttccttggaagtcttatccctgattttctgagtttcagagcaaaaacttaatctatttcc

SEQ ID NO: 127799 - DNA, 201 bp, Homo sapiens
ttaattagtgataggcaaaacccattagagaatgcatgactcgagacagaattgaggttcatttatatcatttggtttaattgtaattaaatgtaatcctmaaatactgcctaaactataaatcatttttactaacatgtaaattagtaaaatataaagcatcatccttctcattggcaggtgtacagatagtagaatttt

SEQ ID NO: 127800 - DNA, 201 bp, Homo sapiens
actcccattatttaacaatttctgcaaagaggttaagatttcaactagacttgaaaatacatttagtaggataaaatatacttcaatgttaatacaaaagscctataaatctcagctagatagaagagtgcatctatattgagaacacgtcatctactgtatatagatcatatataatttatcatcttgcctggccttcaa

SEQ ID NO: 127801 - DNA, 201 bp, Homo sapiens
ttggaaccaaaatacttaaattttagttttgactgacaacctcattgatttctttaagttacataaattctccgtgctttatctttattttaaatgaatcrtctgagtataaacacatgctacttgcaaatactgtgaagttaacatagagtttatggccgaagtcagattgtaaagtataaagtatagtgctagaataat

SEQ ID NO: 127802 - DNA, 201 bp, Homo sapiens
tccagacttctccattggcagctggggtcccctgccctgagccacggcttcaacttgtgcacacttctcccacagcacctctcatgatgtagacatatcawtggctatttgtgcttcctaacatactctgacctcctaaatgtaagagtacaatatttcatcttccatcattaatacaggcaggacaggtctgatacagag

SEQ ID NO: 127803 - DNA, 201 bp, Homo sapiens
ctaaagtcacctctggggtaaagcctttccagacttctccattggcagctggggtcccctgccctgagccacggcttcaacttgtgcacacttctcccacrgcacctctcatgatgtagacatatcattggctatttgtgcttcctaacatactctgacctcctaaatgtaagagtacaatatttcatcttccatcattaa

SEQ ID NO: 127804 - DNA, 201 bp, Homo sapiens
cggagtttgcagtgagccgagatcctgccactgcactccagcctgggagagagagcgagactatgtctcaaaaaacaaaaaaacaaaacaaaacaaaaaaacaaaaccatgaaaaaacaaaatgtggtttattatggctcaaaaattgcaattaacctacattaagcgtttttcttcatcattattccttgtattcataga

SEQ ID NO: 127805 - DNA, 201 bp, Homo sapiens
tgggaggcggagtttgcagtgagccgagatcctgccactgcactccagcctgggagagagagcgagactatgtctcaaaaaacaaaaaaacaaaacaaaamaaaaaaacaaaaccatgaaaaaacaaaatgtggtttattatggctcaaaaattgcaattaacctacattaagcgtttttcttcatcattattccttgtat

SEQ ID NO: 127806 - DNA, 201 bp, Homo sapiens
caattttctgtttcgttcatagtacagaattcatggattgacaggagcaattgccagtggaggaaacaagaacataaacagatgtacaccaagcgcactayggaacacttttaatttcctggagacagtatttcttatggcactggcagcctttcctccctgccttgtcaggatcttattaatgtgctgacagattccttt

SEQ ID NO: 127807 - DNA, 201 bp, Homo sapiens
tttgggaggctgaggcgggcagatcatgaggtcaggagatcgagaccatcctggctaacacggtgaaaccccgactctaataaaaatacaaaaaaaaaattaaattaaaaaaataaaattagccgggcgtggtggcaggcgcctgtagtcccagctactcgagaggctgaggcaggagaatggtgtgaacctgggaggcgg

SEQ ID NO: 127808 - DNA, 201 bp, Homo sapiens
gatttgatatttagaatcagaagctaggaattttatgtatttcagtgtccaatttacatttaatggtgcctttagagaataaagaagctgggctaccactygagctaatgatacattctgtaattttattgcatattttaaactactcatacatttttattgttgtttctattaattagaatgaagcactggaatttgcaa

SEQ ID NO: 127809 - DNA, 201 bp, Homo sapiens
gtatcacatgtgacataagcaaaagcctgtgatccttagcatgttggaaagttgctactctttaggataaggttgtccatgatgtctaggtcattccattmagctgcataaacaattcctttgatggatggctggttttctacaaccccagcattattttagcaggagaaggtagtatttgatgtgttgcaatttgtgtta

SEQ ID NO: 127810 - DNA, 201 bp, Homo sapiens
cccactgtagaatcagacgtacatcacctctttcatttctccagattcatgttctttctcttaatctctgcttctagtttttttgtgaagcttaatttatrtaagtataaatgacatctgacatattgtgagggcccaagaaaatttttcctcttttcccctgaaaataaaaatgctacttgttgtaataaaggttacttt

SEQ ID NO: 127811 - DNA, 201 bp, Homo sapiens
cattttcctttgaatctgacaaaaagaagaacaagtctggaaagatagcatcccagaatatttttgcttactcttcactatttaatcaatacttccaccaraagtaagacagaatgtcttacttcacattagaagtagaaaccaggttagacatcctgataataagtgaccttattgtggagatggatgaggatggataaa

SEQ ID NO: 127812 - DNA, 201 bp, Homo sapiens
ttagaaaataactatttctaaataaacatatgtgtttaccagtgagtttaatgccaataaaacagttcctattcagggtgccttatatctggtaagcagawctaccaactgggcagagggccaacccacagtccaaatgggaaatattttttaaagttttgataggacacagtactcagttttaaagatcatactctgatt

SEQ ID NO: 127813 - DNA, 201 bp, Homo sapiens
atgttaagttagcagctcaagtttcccaagtcagcgagagtaagattttctgattggcttacatgatgctttcttccaaggatgtggagtactgttaactstgaaaatcacacaattctttggtattcttttaaagttaggtctctgattaacactacatttctgcatcatggtttttttatttaggggccctggggtgaa

SEQ ID NO: 127814 - DNA, 201 bp, Homo sapiens
gcattattcttgtgaggtgaacaccttgaatacagtttttttctattatttgttgggaaaatgtatacttccatgttaagttagcagctcaagtttcccargtcagcgagagtaagattttctgattggcttacatgatgctttcttccaaggatgtggagtactgttaactctgaaaatcacacaattctttggtattct

SEQ ID NO: 127815 - DNA, 201 bp, Homo sapiens
tatttgtggaaaatgccaacaatttctaaatgatttttaaaaaattccattgatttttaatactttatactttttcttccaacctcaactataaaaataarattattcactattttctatcaaatttcctttcttatgttgcaataatagccaaactactgagcattgtgtagaattctgctaaccactttacaagagaga

SEQ ID NO: 127816 - DNA, 201 bp, Homo sapiens
gtttttgatgagtggagttactgaacttttcaaatagattagactcttctgatttggaaacgtatttgtggaaaatgccaacaatttctaaatgatttttwaaaaattccattgatttttaatactttatactttttcttccaacctcaactataaaaataaaattattcactattttctatcaaatttcctttcttatgt

SEQ ID NO: 127817 - DNA, 201 bp, Homo sapiens
tttagtcaaaagcattttcaaatcttgtcaccagattagtcttctcttcttatgcatttcacgtttcctgtagtaaattatagtgaatttaaacttgtaayggttttcaacttgtagaccttaaacattttattaaaagtgtaatataatatcttggtaagggttaccactttataattatttccattgataggaaagttg

SEQ ID NO: 127818 - DNA, 201 bp, Homo sapiens
aataactctctctggagctaattttgtatgtatttcactcttctcatttctttgaacataggaaccaagccttaatcatttttcaatctcctaaggcttarcacttagtaggtggaactaaaacatcatttagacattaaattgagtgactcagagagaaaagaccagagaaccaagaataatttccactttctcttggga

SEQ ID NO: 127819 - DNA, 201 bp, Homo sapiens
gtttttcagtttcaatgtgtttcttcctcttatagtcctgtaagctccacatatacaaaagcctaatgcaattttaggctgcaagaaaagtctcattttgmcttgttttccatcttgatataaaagacccgaagaaaactggttcgaagtaaaggatcgatgtccttagaattagttcagaatgctgatgggttgtgaaac

SEQ ID NO: 127820 - DNA, 201 bp, Homo sapiens
ctactttagatccctataaaaattgtttttacacttatacattatttctttgtgtcaacagcacaattaagctttctggtaatattttaagtaaaatattrtacatttgagagactatctcctctcattatgtattgatttaattcatgtaatgctcaatcttatttctttttgtattggttaaggttcttctggttaaaa

SEQ ID NO: 127821 - DNA, 201 bp, Homo sapiens
ttgccacacatgtgagtgtcacaaatgatattcacgtgtacttgtatggaaatcttgcacagattttagcatctaagtgccagaaagtaaaaattttgtgrcatcatttaacagtattcattggtaggagagatgtaaatatcacagtcaggttaagaattatcagtaaggaaatagacacaatattagcatagttgtcca

SEQ ID NO: 127822 - DNA, 201 bp, Homo sapiens
acaacatgtcccttgatgagattgagaagctcacatacattgacaagtggtttttgtataagatgcgtgatattttaaacatggaaaagacactgaaaggsctcaacaggtaaggcagtgctgctctcattcatgccagacaccttcagtgcaatttttaaagagtcttcttcctactcttaagcatttggtctacattgt

SEQ ID NO: 127823 - DNA, 201 bp, Homo sapiens
tggaacctcaagaagatcacttatgtgcttcactttccacatatgtaaaatgggaataacaacagaatctgcctcatagtactgctgaagggtgacatggrgaacacctgtgaggcattcagaacagagcctgtcatacaataaatgccatgtcagtgtttgctcttattctcagtatacagagatctgctttgatctttt

SEQ ID NO: 127824 - DNA, 201 bp, Homo sapiens
cagttaatccattatttattgtaaacaacttaaagctaccatggaattccaacatctgagcaaactctggtgaaataagaaaagaactgaattagaaaatrggagatccagggtaaagtcctggccctaacactaactagctgtgagatactgggcaactctcttttcttatctaagcctctgttttgtcatctgtaaaat

SEQ ID NO: 127825 - DNA, 201 bp, Homo sapiens
tagtcacatctataatcattgccctgtaaattgggttgctttttcgacatatttagaggtttgcttttcctctctctttgatgacagagacggtgggtttkacgacagcaatgacgcacttataattttatgtggcccttccctgggtatttgtcagcggctaatatttatagagtgctttgccaatcggcacagttgtat

SEQ ID NO: 127826 - DNA, 201 bp, Homo sapiens
ctcagggctttggtacttgctcttctatttgcttgagacgtttgccccacagatagctgcacggctcagtgcctcaccttctcagcagcatccttcctggycaccctatttaatacttaaacttcttatactttttcttcgctactttattttccttcattgcatttatctaatactatgtgttaactgtctatgtcattt

SEQ ID NO: 127827 - DNA, 201 bp, Homo sapiens
atcaatactgtaatttatctatgacatttctatttggtaaatgccaaaatctctattttcagtttttacagatttgcagaaatattacgttggtgcaaaartaattgtttttggcattaaaagtaatggcaaaaccacaattagatggcatatgtacctttgaatttttattaaaattaagccttgatatttttaagttat

SEQ ID NO: 127828 - DNA, 201 bp, Homo sapiens
actagaggttactgttaaaaagtgcttggtggatacatttgggaagcagtaggaaactgaagagagagaatgaagctgaattaaggagagcctttgaatgrgtagcacagattgtacttaaaaatcacaaagatttaaacattactcaattgcaagcatagtattgaaatgaaaacagataccaatgatacaaattgctat

SEQ ID NO: 127829 - DNA, 201 bp, Homo sapiens
gtcattgactcctgtttcctagaacctcagagctttactagttcttgttggttccaaggctttattttttggctgttctttctgtgcaaaacctccttcastgtttcttgtttaagttgctgaatgtacttttgtgttgcttggaatccagtagtcctaacttataccaaatctggtaaagtaagaagtattagtttttac

SEQ ID NO: 127830 - DNA, 201 bp, Homo sapiens
ttgattggagtcttagtgggactgtacctaaaaatactccaatctcccttagctaattcatggatatagtaaaccatgctggaccaatcagattctctgtyaggttgagtaacaagaaaataattggagtgaattcagctcaaagatggcactcagacaaggtcattgactcctgtttcctagaacctcagagctttacta

SEQ ID NO: 127831 - DNA, 201 bp, Homo sapiens
ctgtctccatggagcttataccgaaataatgcaaagtaggactataattaagtagtggatatattatttttgtcatcccaaatgtatttatctgtttcctyattttatggtttctataccccagtatttctatggggaacttgtcatccttatttgattggagtcttagtgggactgtacctaaaaatactccaatctccc

SEQ ID NO: 127832 - DNA, 201 bp, Homo sapiens
atatatccatgggtttagtgtaaccattacatacataatgtacaatgtacctgctaaacaatttctcctctctcacctccttcctaccctcccacctttcygagtctccagtgtcttttattctacactctgtgtccacgtggacgcattatttagctcccatttgtcaatgaggacatgaggtctttgattttctgtgtc

SEQ ID NO: 127833 - DNA, 201 bp, Homo sapiens
tggcatttgcacactttattaatttttttgtataatgtattttgtattaatttttttgcgtaatggtgcaatatatccatgggtttagtgtaaccattacmtacataatgtacaatgtacctgctaaacaatttctcctctctcacctccttcctaccctcccacctttccgagtctccagtgtcttttattctacactct

SEQ ID NO: 127834 - DNA, 201 bp, Homo sapiens
ggatactggagaaggaataacccgaaaaggtaagttggttgtggcatttgcacactttattaatttttttgtataatgtattttgtattaatttttttgcrtaatggtgcaatatatccatgggtttagtgtaaccattacatacataatgtacaatgtacctgctaaacaatttctcctctctcacctccttcctaccct

SEQ ID NO: 127835 - DNA, 201 bp, Homo sapiens
gtaagatatagaatgttctaggggcaaagttggaaaatccccttgaggactatgatgttccagactaggacactttataatgcttccaggatgctaatttytggaggcaattagtaggtttgtaaacaaattcttttgaagtgaaggtttgaattgtgtattggcaggaattatttggataattgacttgaatgagtttaa

SEQ ID NO: 127836 - DNA, 201 bp, Homo sapiens
taagattcaacagatgctccaaacccagttctaccccatgctggaggacctaagtacattgtggcatacccacttcttactggcagaaaaattaaaaggcrggaaacttccttctcagttgtgactgggatcatttagtgtgtctgcacaatcctaaataaatttggaaagtgaacaattgggaggacgacctactttttt

SEQ ID NO: 127837 - DNA, 201 bp, Homo sapiens
tggagagttaatagctataaaacttacttgactacttcttagttagtatggggccaaatctaatctcaactttttaccacagcttcatagcaattgcagataaagtaattagggttccatattttaggatacattgtacttttaaaaaacattttatttaacgtgatcctacttggtcagaagaactcatataaacacttt

SEQ ID NO: 127838 - DNA, 201 bp, Homo sapiens
ttactagtaatatggagaatgacagcattataaagatcatagacctaaacattgtggaatctgcagatacatgcaaaattttaggactacttttaacctcctggggattatctaaaaactataatggaatcggccactggatgtccctcttcacttgtgttggggctgtgtcagctgaaggtttctttaggattgtgaaat

SEQ ID NO: 127839 - DNA, 201 bp, Homo sapiens
ctaagtgaactctgtgagagatgatttgctaatatatttatcctctcttattcattttctacttttccctcacataatttttctccctgttttttttttttccaacaggctcccatgttttcctggccccggttgagggatgctgaccccattctgagatgtgagatggcttccactggagaggtaactagttaataatcc

SEQ ID NO: 127840 - DNA, 201 bp, Homo sapiens
ttgccatctctggtccattcaacgtccaatttcttgtcaaaggaaatgatgtcttggtaagaaatgccaaggtgcctgagaggacaccaccactgtgttaygtcatgttggtttgcatctctctggtaatcttctctgtgaacaccagacaaagagcaactgagacccctggatctgtttgtgtctgagtgtggaatgatg

SEQ ID NO: 127841 - DNA, 201 bp, Homo sapiens
gagactcagtattcaaagacttttacaacttcataagcaaagcttaagactcagtgataggctcacgtgatactcccggtcaaacctaatgagacaaggayggtaatggggtttgcctagaacaacatagaaaggagctattaccagatccacctggttgagggtaaatacaattcctgaatgagggaggactatagacta

SEQ ID NO: 127842 - DNA, 201 bp, Homo sapiens
catggatggtgacttttatgtgtgcaaatatttacttatgtttttcttttattattattttttcaacttttattttggattcagacgttacatgtgcaggkttgttacatgggtatattgtgtgatgccaaggtttgggatacaaatgataccatcacccagatagtgggcatagtacccaacaattttccaatccttgtc

SEQ ID NO: 127843 - DNA, 201 bp, Homo sapiens
tgtgctcttctctttgctttggtgatttttctaacacgcatatctgatcatattacttctctgtttaaactccttcagtagttctgtagagcctttaggaygaaactaaactctgccttactgaattaagcacatgatgatttgaactctggttatctctacctcatacccccacctcatcttttgcatgcagtgctccac

SEQ ID NO: 127844 - DNA, 201 bp, Homo sapiens
tatttctggaattcccagtctcaagggctgctcaaccatgctcaccattaacaagtgaaagctttcctgatttttaattttcacatctgggaactttgcctagtcaaacatgcaactttaatagtaagtccctcactcaactattttttattttttcctgttggcacattcagtttgtgagttaatacaagcatttcttat

SEQ ID NO: 127845 - DNA, 201 bp, Homo sapiens
ataattccacatcatttcagcatctctttacttcaacctgatacagctaagagacaatcatgactctctggtacgtaattcagatctatagaaggtaaggmcatatttattttattgactgttgtgttcccagagcttaaatatagttgatgttcaaaactattgaatcttcaatattttgatactaaaaaatgattgtag

SEQ ID NO: 127846 - DNA, 201 bp, Homo sapiens
ggaggactatagactaaactcaaaactgactgaaatattttacaattgcaggcatatataccttgtgtatttttcttatttacacattgtggtttcaatartcttcaataaatttattcacatcaacatcattctctagttaaagaatttctcttaagtcttattctacatgagtcattgaaccccaaattgagccaaatt

SEQ ID NO: 127847 - DNA, 201 bp, Homo sapiens
gtcaaacctaatgagacaaggacggtaatggggtttgcctagaacaacatagaaaggagctattaccagatccacctggttgagggtaaatacaattcctkaatgagggaggactatagactaaactcaaaactgactgaaatattttacaattgcaggcatatataccttgtgtatttttcttatttacacattgtggtt

SEQ ID NO: 127848 - DNA, 201 bp, Homo sapiens
aaaacagcagaatcacagggcaaatgtccatgggagctgatgaagagagactcagtattcaaagacttttacaacttcataagcaaagcttaagactcagygataggctcacgtgatactcccggtcaaacctaatgagacaaggacggtaatggggtttgcctagaacaacatagaaaggagctattaccagatccacct

SEQ ID NO: 127849 - DNA, 201 bp, Homo sapiens
attgggtcactcccaccctaacactttgcttttccaaccgtcttagcaaacggcacaccaggagattgtatcccacacctggcacgaagggtcctatgccyacggagacttgctcattgctaatacagcagtctgagatcaaactgcaaggtggcagcgaggctgggggaggggcacctgccattgctgaggcttgagtat

SEQ ID NO: 127850 - DNA, 201 bp, Homo sapiens
tcatgaagaaagaaaagaagcacagtccttgctagaaaacagtgataatctcaatagaagaatctaagagctagaagactcagttggaaacagcagaatcsggccaaataggaacagctccagtctactgctcccggcgtgagcgacacagaagacgaatgatttctgcatttccaactgaggtactgggttcatctcact

SEQ ID NO: 127851 - DNA, 201 bp, Homo sapiens
gcaccaacctaatatcatgaagaaagaaaagaagcacagtccttgctagaaaacagtgataatctcaatagaagaatctaagagctagaagactcagttgraaacagcagaatcgggccaaataggaacagctccagtctactgctcccggcgtgagcgacacagaagacgaatgatttctgcatttccaactgaggtact

SEQ ID NO: 127852 - DNA, 201 bp, Homo sapiens
tttatcttttcccttttcttggtttctgtctgtaaccactgtttgtaaactggttatgatgaatttacaggtggattaaatcttagtttgccacctttgtsgtagataaaaattttaggaatccaaaaacgatacctacacaatattcttagaagggtgaacacattcaggttacaatggaaaaattcttattcaggagac

SEQ ID NO: 127853 - DNA, 201 bp, Homo sapiens
ccctttgtacttttcatagagatccttgagaagacaggcagtggggctctcacttgggaaaagagaagtaaattaagagaaaaaatatagaatgctagacrtgggttttctggttccacccttgtgcattggaaggagcagactatggagccagagattggtgcgcagtcctccccactgtagaatcagacgtacatcacc

SEQ ID NO: 127854 - DNA, 201 bp, Homo sapiens
gccccttataaaaccatcagatctcatgagaactcatccactatcatgaaaacagcatgggggaaccgcccccatgattcaattatctccacctgatcccrcccttgacacctggggattatcatttcaagattacaattcaagatgagatttgggtggggacacagccatgtgatatcatcccaccactggctcctccca

SEQ ID NO: 127855 - DNA, 201 bp, Homo sapiens
aggcagggtggggtatcttaggttgctagtcaatgtcaccaggtgtttcaaatacctggatttctgcctgggagtggagtggagagggacccactgcaccrtgatcccagagaaggaggttgggccacccagaaatgatacacataaacctgttctatgtctccaagctggtcctggctgcaagtctcctcatccaggaga

SEQ ID NO: 127856 - DNA, 201 bp, Homo sapiens
ccataagtttaatgcttgtttttaaaaatatctctcatgactcaactgcttgaacttatgaaataactactttaatttccttgtcaattctaaaatttgartcagttccaggttagttttgattgacttatttttctccacattatcaattatatttcctgcttctttgcatgcctggtaatttttattggatgtcagaca

SEQ ID NO: 127857 - DNA, 201 bp, Homo sapiens
aaagttctattaaatattaaactggcaatgacagaaaaatagatttggaaggagtaacctggggccatctttcaggtccaactttaatgcaatttcctcargaagtgtttcctgatatccctgaccaggataagtccctttctgagtgccttaatagaaccttctatttgttctttgttatgtttactagcataatattaa

SEQ ID NO: 127858 - DNA, 201 bp, Homo sapiens
gtccctttctgagtgccttaatagaaccttctatttgttctttgttatgtttactagcataatattaataaattatttgttattgtccatcttatggacaygttcaatgtccatacttacccatgaagtatcgtggtaagtatgaacatgatacttcattacctaatatattcttgacagattaaaaaaggctgaaaaata

SEQ ID NO: 127859 - DNA, 201 bp, Homo sapiens
cagatttggcaaggctttgtccttttggaacatatttattctttcatataaacatgttaacacatttttaaatgtccaaatctattatatatcacaagttyggacaacacagggtctatgtctgtagagctgaataacaaatctaagtagctttttccatactgagaattcaatggtgtgcaagaaggatgggctctattg

SEQ ID NO: 127860 - DNA, 201 bp, Homo sapiens
ttgttttggttgcctttctgttttccaacattccaaactttaaaaagacttaacaacagataaataacacatttaagatctttggttggaggagagaaatscaagaaagtagaaacatttgtgctcagatttggcaaggctttgtccttttggaacatatttattctttcatataaacatgttaacacatttttaaatgtc

SEQ ID NO: 127861 - DNA, 201 bp, Homo sapiens; identical to SEQ ID NO: 21738

SEQ ID NO: 127862 - DNA, 201 bp, Homo sapiens
ggcacacttcctcctcagggctttggtacttgctcttctatttgcttgagacgtttgccccacagatagctgcacggctcagtgcctcaccttctcagcarcatccttcctggccaccctatttaatacttaaacttcttatactttttcttcgctactttattttccttcattgcatttatctaatactatgtgttaact

SEQ ID NO: 127863 - DNA, 201 bp, Homo sapiens
ccatctcattagggtgtcttaatattagcaaattagactctggagactttacaggtagtggctttggagaagtttctgcaaagagtaacttgggattttgstttataaaggtaccagaaggacgacggtgaatagttagagcagaggctaacaagatgacttgcaattgtgaagcttaatggcagtttagagacaaatcac

SEQ ID NO: 127864 - DNA, 201 bp, Homo sapiens
caggggcactagaagcttctgtggcatctgtccctgggttctgtgatttgcacaagagaatgctcaacttttccactccacattttactatgtaaggaatkaaaccaaaactgtgtatgtctctctgtctccagagcctttggtggaaacaagtccttctgcctttgttctcctatctctcagatggtggttgataacccc

SEQ ID NO: 127865 - DNA, 201 bp, Homo sapiens
gtctcgaactcctgacctcaggtgatccgcccgctacagacatgagccaccgcagccggcccatgctgttttctttagcatggcaaatttgttttcagtgsttatgttcattctgcatccatacatatgttatgggagttattgaaatataaaaataagaaagaatgagaaattcagctcccctttgttatatctgtttct

SEQ ID NO: 127866 - DNA, 201 bp, Homo sapiens
ttctgtcttgcatatttaatctactctggagaatattcttttgtacacctgtttccaaattaggtgtaaagttttggaaaagagtatatgaagaaaagtaytcagtaggcaacttgcaatgtttgctttgccatttctctcttatttgtcaccgagcatagaattcactacctgcttgaggtatatgtgactgtgtatgtg

SEQ ID NO: 127867 - DNA, 201 bp, Homo sapiens
aaacactccaggtgattctaatatgcagccagggttgaaaatcattggtaaaatggatgcaaatatcagtccataaactcaaatgtgcaagaagcagaacytaattttttattcccagcctcaattttgctactaacttcattcttttttatggtttacttaaccctgtagttcagagttcttatgcagcgcaaaattttg

SEQ ID NO: 127868 - DNA, 201 bp, Homo sapiens
gaaatgcaagtaaaagcatttactacgtttactatcactgaagtttgatcatctgcagaaaataacttttaatgtgttctttagaatgaagtatacatagrtagtatctgccttctttatttcaccatgaagcctagagggcaactggtagcacagaatttagaagatacttttttttttttgcctatcttgcttttatta

SEQ ID NO: 127869 - DNA, 201 bp, Homo sapiens
atccctccagaattctttttctgtgcaataccatgttatcattatataacattcatcatttggaaatctcaaaataagttataagatatagcagcatttgmtggctggaaaacctttagacatagttacatagcttaatgacccaaaactttctgctttatgtacatatgaaagtagaggttccaaaatgttaagttaatt

SEQ ID NO: 127870 - DNA, 201 bp, Homo sapiens
acctataaagagaggagtgcagaatacttgtagaagtttgtggggggacagtgaaggacatttattggtctagttaatggtaataggatatatccaaagtrgaaataaaagagaggctgtcttaattcaatggtgagccagggctataagtaacaaaaggtggatttcttgggaaatgaatcaattcattttttgtaccat

SEQ ID NO: 127871 - DNA, 201 bp, Homo sapiens
cgtaaggaaacacatagcaacttgtctccttgaatgaagagaggtgacaaataatttctccactgatggcattattgtgattgtggcatggtcttgaaccygtgaaacgccaaaaataataagtgaagcagtaaaaaactcaagagagaggctagtgagggttcatgagtcagagaacatatatcttactcaattctctta

SEQ ID NO: 127872 - DNA, 201 bp, Homo sapiens
aaaggaagaaaggatggaaggaagaaggaaggaaggatgaagaaagaaataaacatatttcactttatacacagccttgcttcagttggagagtgattcarctactctcagctttctctgtaaccactcaggaataccatttagaaaaacgttcttgtagagctagagcctattgctaatagtaatattctggaaaattat

SEQ ID NO: 127873 - DNA, 201 bp, Homo sapiens
tcttataccctgaagtagaataataccagaaattttaagaaagaccaatttatgttttggtctgttttcaataattgctcgaagaaaaaaaaataaatttktcttctttttatagctacccattggcattcattgctgcaaagattgccctaggaatcccacttccagaaattaagaacgtcgtatccgggaagacatcag

SEQ ID NO: 127874 - DNA, 201 bp, Homo sapiens
gataccacttttgttgcatttttggaaagcagccttctctaatgataaccttgctataatttaaagttattttccttcccttggcataaattgaggttatratactcaatcaaatgatattccaagggaaattgttctgattttaagcttgatttcagaacattgtaacattttaagaaggtaagtgtgacttaagagccg

SEQ ID NO: 127875 - DNA, 201 bp, Homo sapiens
aacttaggtcaagtccccatttgttcagttggctgaaaacagttacttttgctgtttcaatttaatttagtcacatacagtttattcagtcaaattctacrttctcttcctggtcccttctttgattatccttatagatgatctaagttactgggtggcttataggtcatcctggcatgaggggaggagtgtcctattcct

SEQ ID NO: 127876 - DNA, 201 bp, Homo sapiens
atgtaataaaagatactcaacttgttgaatgaataaataaatgcataaatgatgaataaattagatacacaaaattaggacgtcaagaaagaatcacttcyccccctcccgcaagttattccttaacaattctcctagggctatcagcactgggacatgagaggtttaatcaaatttgtgttcctttggtgctctcttctg

SEQ ID NO: 127877 - DNA, 201 bp, Homo sapiens
tgggaaaattactgggattaacaatctgtgacttttctcacagagtgattttcactaagcaattgaaattttgaattttaataggctttacttgttcactrctttataaggaatacatttatattattctcttcacttttccttttccctattctttttctccttttctctccagagggcagaatcagcctgttttgaata

SEQ ID NO: 127878 - DNA, 201 bp, Homo sapiens
tgtatcggagtcatccattcatcttgtagtgatgcttttcctgtatcttaattctttcagtttttctttattattatatattttaccgatggggacaccarggccagagaggtggggtgacatgcccaaggtcatacagatagaaaatgacagagccaaggtgtcttcctccacataccaggctattagagatggtcctgt

SEQ ID NO: 127879 - DNA, 201 bp, Homo sapiens
tgtaatttgttactacatattatgttgtgctccttttaaggcctgtgtttctcactagcctgtgagccatgatggcggtctgcgaggtttcttgttgcacrctggtgcctcgcgtatcagtgatccttgaagagttattgtatgcgtcacttccgtgaagccgtttccttcctcagtatccgttcctcttgttgctgttcc

SEQ ID NO: 127880 - DNA, 201 bp, Homo sapiens
cccttgcttggaaggcccctcactgctccagtccttctcatctctacaggctgagtttgctgtcagtttaaattgtcctttcttggaggagcctttgtgastgttctgtttgaagtaaatccattcccgctgccgttgtttctcacagcaccttcctctttgccatcagagtacgagtccttttttatttctatttatttt

SEQ ID NO: 127881 - DNA, 201 bp, Homo sapiens
ggtattattcatctctttctttgtgtttaagctaacaaatagttgcagtttaatgaggaaagatgccttggctgatctttcattcagtaaatatgtattgmatgtcaagctttgtacttgggattaaatttttaattgtttaaaacttgctctaaatagaacttcagttttaaaatacatagcaattagaaatttttttca

SEQ ID NO: 127882 - DNA, 201 bp, Homo sapiens
aaatcacccgtcttctgcgtcactcacgctgggagctgtagactggagctgttcctatttggccatcttggctcccagaacttttttttctttttgagatkgtcttgctctcttgcccaggcacagtcatggctcactgcagcctctaccacctgggctccagcaatcctcccacatcagtctcttgggtagctgggacta

SEQ ID NO: 127883 - DNA, 201 bp, Homo sapiens
gttcaattcctgggtatccttgttgactttctgtctcgttgatctgtctaatgttgacagtggggtgttaaagtctcccattattactgtgtgggagtctmagtctctttgtaggtcactcaggacttgctttaggaatctgggtgctcctgtattggatgcgtatatatttaggatagttagctcttcttgttgaattga

SEQ ID NO: 127884 - DNA, 201 bp, Homo sapiens
ctcgttggtttcaaagaacatctttatttctgccttcatttcgttatgcacccagtagtcatttaggagcaggttgttcagtttccatgtagttgagtggytttgagtgagtttcttaatcctgagttctagtttgattgcactgtggtctgagagatagtttgttataatttctgttcttttatatttgccgaggagagc

SEQ ID NO: 127885 - DNA, 201 bp, Homo sapiens
gttctcgttggtttcaaagaacatctttatttctgccttcatttcgttatgcacccagtagtcatttaggagcaggttgttcagtttccatgtagttgagyggttttgagtgagtttcttaatcctgagttctagtttgattgcactgtggtctgagagatagtttgttataatttctgttcttttatatttgccgaggag

SEQ ID NO: 127886 - DNA, 201 bp, Homo sapiens
cttcctggtttagtcttgggagagtgtatgtgtcgaggaatttatccatttcttctagattttctagtttatttgcgtagaggtgtttgtagcattctctratggcagtttgtatttctgtgggatcggtggtgatatcccctttatcattttttattgcatctgtttgattcttctctctttttttctttattagtcttg

SEQ ID NO: 127887 - DNA, 201 bp, Homo sapiens
cttgcatttcctctcctgtactccttctgattgtgttactgtcttatatttcagaagattcctcaatttcatcttctaatccttctgcttttgcgctgatgtttttagttttcaagagcttcactttttggttttgttaatattccttttttatttcatcctgttcttattttgcatgtcaattgttttctcttgtctctg

SEQ ID NO: 127888 - DNA, 201 bp, Homo sapiens
tcttgcatttcctctcctgtactccttctgattgtgttactgtcttatatttcagaagattcctcaatttcatcttctaatccttctgcttttgcgctgatgtttttagttttcaagagcttcactttttggttttgttaatattccttttttatttcatcctgttcttattttgcatgtcaattgttttctcttgtctct

SEQ ID NO: 127889 - DNA, 201 bp, Homo sapiens
ttcttgcatttcctctcctgtactccttctgattgtgttactgtcttatatttcagaagattcctcaatttcatcttctaatccttctgcttttgcgctgatgtttttagttttcaagagcttcactttttggttttgttaatattccttttttatttcatcctgttcttattttgcatgtcaattgttttctcttgtctc

SEQ ID NO: 127890 - DNA, 201 bp, Homo sapiens
acttgtgttagtattctgtgcatgatggttacgtatcgtgttttgccgttagaaacgagaacagacaaatgagaacatgttcgttaaagggctctgaaacwgtgtgaattataaatgtattgatggtggggatgtgtcaccatttgcagttaggttcaggagctgatgaacaacccacgagatggaggtttgcacacagtg

SEQ ID NO: 127891 - DNA, 201 bp, Homo sapiens
attctgtgcatgatggttacgtatcgtgttttgccgttagaaacgagaacagacaaatgagaacatgttcgttaaagggctctgaaacagtgtgaattatmaatgtattgatggtggggatgtgtcaccatttgcagttaggttcaggagctgatgaacaacccacgagatggaggtttgcacacagtggccttgggcctg

SEQ ID NO: 127892 - DNA, 201 bp, Homo sapiens
tctcccccagtccttggtaaccacgattccactttctgtctctatgaaataaaatactctagggacctcagataagtggaatcatacagtcttttcatgaytggcttatttcattcagcgtgacgtcctcagcgttcatccatattgaagtatatgtcagaatttacttccctttaaaggctgactatactccattgtgtg

SEQ ID NO: 127893 - DNA, 201 bp, Homo sapiens
agagccagggcacagacctacacctctggccccaagcctatgctcttttctttatattattattattattattattattattattattattattattattwaatcttcccagaatcacctgtgagtgtgaactggctccatggctgaactggtgttctctgtgtgtaacattctggtcactggggtggaggctggagtcac

SEQ ID NO: 127894 - DNA, 201 bp, Homo sapiens
aaatatatagatatcaaatatttatcaaaatggcaaatattttgatataaaatatcaaatatttttcaaaatatatgtgtgtgtgtatatatatatatatwttttttttttttttgagacagagtcttgctctgtcactcaggctggaatgcagtagaatgatcaagcttactgcagccttgaactcttgggctcaagcaa

SEQ ID NO: 127895 - DNA, 201 bp, Homo sapiens
aagtccaaaatctgaaatgctccaaaatccagaactttctgagcatcaaaatgatgcttaaaggaaatgctcattggagcattcaattatcagattagggrtgcttaactggtaagtataatacaaatattccaaaatcagaaaaaatcagaaatccaaaacacttgtgatcccacacattttggataaggtatacccaac

SEQ ID NO: 127896 - DNA, 201 bp, Homo sapiens
tattttgcagttatagataaagctacaataattttatgcatatatatatttgtaccattggaagtacagttttcctgttaaatttctagaagtgggattgstgggtttcgtgagagtaagtgcataaacagtgttgtcagatactgccaaatttcttcccatcacacttgtacctttctgtatctcccccacaatgaagat

SEQ ID NO: 127897 - DNA, 201 bp, Homo sapiens
tgacacctgaggtaaggggtggcggccagagggaagggcaagctgggctgtggctccttctcactcagaatggaatattggctttctccttccttccatcrgggagctgaggatggtaactagcgtgcataaaaacttgactgcagcgcgcaatttgctcatcattttacatacattatcccatttgatctttatgaccgt

SEQ ID NO: 127898 - DNA, 201 bp, Homo sapiens
attagggacactcaccaattagttcctcctttttgaatgccttggtgtcctccagctgacattggagaagtgcctggagtgtgctgggcactttattgacmccaggtcagttctttaattgattgagttcaaaacagcccgaagagtaggtacttttagcccctaccttttaaaatactaagtaagattgaatctcatttc

SEQ ID NO: 127899 - DNA, 201 bp, Homo sapiens
aggtggtgtgtcccagcacatccaaacctttccattggaaatcccaacgtcctctgatcacatccttctaggatcgtggtccatttcagtttcttacattrtttatctggttttggaaggctctgctctgaccaacgggggattgaacctgcacagtccagtgaagaggaagctggaagcggagaaggactacgtctttga

SEQ ID NO: 127900 - DNA, 201 bp, Homo sapiens
cacattttgaatccagtactcaaggaggctctgatccctgcttggctcagaggtgttgcatctttctaagtttatcggagaggcgagcccagtgtcctggyagagggtaggagggtctctttgcctctgctagtttcatggcttatttggtaagatggcctcagggccctcgtctcttcgggtgcttctccaccctgttgc

SEQ ID NO: 127901 - DNA, 201 bp, Homo sapiens
gcgccactgcactccggcctgggcgacagagcgagactccgtctcaaaaaaaaaaaaaaaaattgttttggtcattctaattatttaccttttccacatasctttcaaccttttaagaaaagtttttgacacataataattatacatatttatggagtatagtatatttcaatacatatagataatgtgtaatgatcaaat

SEQ ID NO: 127902 - DNA, 201 bp, Homo sapiens
aggtggcaagtaactagattttgaatgaatgaatgaataaaatgaggagatggctggctccaatcctggctcttccatttacaatctctgtgacttccagsaaggtactcacttttccttatctgtaaaatggactaactagaatggcaaatgtataagactgttcaataattgacacccagccttagagctgctcagaaa

SEQ ID NO: 127903 - DNA, 201 bp, Homo sapiens
catgcctgggccctcctcttcagatttttggaagacttggagaagaattagttttagagtccttctttaaaagtttggtagaattcagcagtaaagccatyctgttctggacttttctttgttgggaggctttttttttttattactcttccatcttgttacttgttaattggtctattcaggtttcctatttctattttg

SEQ ID NO: 127904 - DNA, 201 bp, Homo sapiens
ggtgccacgggtgttatgcagcgctgggctctgagtgtgccagtggccttgccttcagacattatgttattagagagacagcaaatattaccagaatggtrttgtgctaagctgggcatgatgattataaagcaaataagagccaccatttattcctggtttactgtgtgctgcttctttaaatgttatcttacttgatcc

SEQ ID NO: 127905 - DNA, 201 bp, Homo sapiens
ccctcctcttcagatttttggaagacttggagaagaattagttttagagtccttctttaaaagtttggtagaattcagcagtaaagccatcctgttctggrcttttctttgttgggaggctttttttttttattactcttccatcttgttacttgttaattggtctattcaggtttcctatttctattttgtatttcctgt

SEQ ID NO: 127906 - DNA, 201 bp, Homo sapiens
attaaagaagtggctattgatataaagtagatattatttttcctgttaaagtttctacagctagtttactgttttttcttcttgacaaagaatggatattmcattttattacattcatttttgatacttactggagtgatcgtatactcttccccattatcactagatataatttagtaacagatttttttaaaaatttcc

SEQ ID NO: 127907 - DNA, 201 bp, Homo sapiens
gttatcttacttgatcctcatatcctgctcaccaaggatcagaacacggagcctgtccaggctgtgtacacacagtaatcttccttaggaggggcatgggrcaggttggcttcccgggctgggcttctggttgggttccggagtctcagtctctgtagtgactttttcccaacccagcccggcagagcgctgagcacatgg

SEQ ID NO: 127908 - DNA, 201 bp, Homo sapiens
ggggcttttggttccactcaactgtagaactgatgagtcttctcttttatttaactctcccctccacctcacctcctgacatgattgatgaccggaagtgstcaagctgaactccccctgggttggtctgttctctctgttaattgtatctgctccccaagatgataagagtgattggaacactggggagaatggactgga

SEQ ID NO: 127909 - DNA, 201 bp, Homo sapiens
cagatcttaggcatcagagtgggcaggcttgggttcaacttttggctcttagggtgagcactttaattctcacagcctcagtttccacacctgtaaattakgtatgatagtcctaacctccccttcagtgggttgatgtgaggattaaatgggattgtgcacataaggtaatagttcagttttaactattatgtgagtttg

SEQ ID NO: 127910 - DNA, 201 bp, Homo sapiens
cacttcattggcagaaatggtgacagtccaggagattttccaacttccgttggcatgcaagcatggggcagccccatgcatgaggaagatggctcacactygacaccacagtgactcctggggtttgaggaattcttgggttgtctggatcctggctctcaaagcctggaccctggagcagcctgatttttcacaatcctc

SEQ ID NO: 127911 - DNA, 201 bp, Homo sapiens
tgtacacgcaagtgtaagaaccatgggttgaagttctcaagcttgcctgcatgtctgaatcacctgggaagcattgtcatcatttttaatgaacttaattyctaaaacatattctttaaaataatagcttaaagagtgtaactagattgtttgtaactcaaagaatacatgcttgaggaattggagaccccattctccatg

SEQ ID NO: 127912 - DNA, 201 bp, Homo sapiens
accccctggttatggactggtaccaggccgtggcctgttaggaaccgggccacacagcaggaggtgagtggtgggtaagggagcattaccacctgagctcygcctcctgccagatcagcagtggcattagattctcataggagtacgaaccctcttgtgaactgcgcatgcaagggatttgggttgcgtgtttcttatgag

SEQ ID NO: 127913 - DNA, 201 bp, Homo sapiens
tcacagaaaaattggaacacgaaatacagcaagtttctatatagcccacacctagtttctcctatgaacatcttacattagtatgattttttttgttgttraaactggtgaaccggtattcaagtattattatgaactgaagttcatactttatttaggtttcacctagtgtctgttccagagtcccattcagggaatatt

SEQ ID NO: 127914 - DNA, 201 bp, Homo sapiens
gtggagaagcccctgaccaccaggtgcggttctgggaggggctgggtcacttgtccctctccttgagccagagtgtgatgcatggtaaccagattggttgmtagagcaccccacagggaggccctgtggcctgagccaccacagggtgatggggatacctgctgtaagggcagagtggctgggtgggcattgactcatggg

SEQ ID NO: 127915 - DNA, 201 bp, Homo sapiens
gggtcagctccttttccctgtctcttgtatttaggttgtatcatacatctgtaatacagtgagattcatttgtcactggatgcattccatcctgggagccyctgacaccttggttgatttttttttaaaagtgcgtacagaaaaggtcactctttttttgtggtctacagctctgtggtttttgacaaatgtacagtcatg

SEQ ID NO: 127916 - DNA, 201 bp, Homo sapiens
gaggcttgtcatccaagctcaggcaaggccaggtgtggtctggaatcagaggtcaagagggcaggaccctgcagtaggggtcctggtaaccagcaggactyaggggagcctgtacccaggaatagccgtggagaagcccctgaccaccaggtgcggttctgggaggggctgggtcacttgtccctctccttgagccagagt

SEQ ID NO: 127917 - DNA, 201 bp, Homo sapiens
ttttccttagtgctttctttaaaatttctgtgtccttttttcctgctctcttggacagcttttcgagtatgttgtctatgtcgctggtgtgatttcccgcmtgttggttctgtcctttcctggttccagcgggaattttattcccttgcttgcgttttctctttgattcctttacatcctttcttatgtaaatgaatcgtt

SEQ ID NO: 127918 - DNA, 201 bp, Homo sapiens
tgtggttttgtatcatacctacttccttaagcattttatctttaacatttcctcaagtataatagttaaataatgaacaattatttagatttaaatataawtttacttatatcttcacttataatatatttttatatattccattgttttctttttcttggacttctgtttcaagatgctgaagtatttcttatagtagct

SEQ ID NO: 127919 - DNA, 201 bp, Homo sapiens
tatgttttaaaaatttttatgaccatgttgtgtgatgatgctgctattactaattttgtgtgaggtctctctaggcatagtgttttccagcagaatggatrtggaaattcctgttggtctctctcaccacttggatgccacagagtcccccagtcagacccttgcccagaatctagcttggtttacatggctctgagccaa

SEQ ID NO: 127920 - DNA, 201 bp, Homo sapiens
ctctgagcaagtgttcccctcctggatctgtgtggatattgtgtagtttcagggcccgagagatggctcaaattcttatgttcccagtttcattctctacytgcccatttctgcctaaatattatttgctcgaccactaaaggctggtggctttacagtgtcaaggcatgggagaggggacactgttgggaaatgagccag

SEQ ID NO: 127921 - DNA, 201 bp, Homo sapiens
atgaactgtttctggccagggatggctgctctggtatatggatgggcagaggctgtaggcgtggatgtcttctttctctgttcttttttttttggccttgytttttgctcccagagaccaagacatgtactagtaaacccacaatttctcaatccagtgccatgtgttgggaagatatcccttcagcagtctgcaaaatct

SEQ ID NO: 127922 - DNA, 201 bp, Homo sapiens
tatttatttatatatttttattattatactttaagttttagggtacatgtgtacaatgtgcaggttagttacatatgtatacatgtgacatgctggcacamtgcacccactaactcgtcatctagcattaggtatatctcccaatgctatccctcccccctccccccaccccacaacagtccccagagtgtgatgttcccc

SEQ ID NO: 127923 - DNA, 201 bp, Homo sapiens
cctcatattcaagagactgggggttcagctttgtacctctcttgctcactgtcatgttgcacataagggcttcgtaaattaaaaattagtaacttgaaaawaagtgcttagtctgttgaatgctgtgtgttggacagtgttgcaaactaaactcacgcaaggagtcacttgtgttagtattctgtgcatgatggttacgta

SEQ ID NO: 127924 - DNA, 201 bp, Homo sapiens
gtggcttaggtttcttcatatgaaatttggcagaacataaatgttcagactgtagtgggtcctaaatgctgtcttgacctcatcctgcactaattctttcrattggcagcctcttactctaacacagcctgcatatgttgtgttaggttatggaattcctcctttttccaaagtctctgtaggcaaaattaaggaaacagg

SEQ ID NO: 127925 - DNA, 201 bp, Homo sapiens
aggcagagccagggcacagacctacacctctggccccaagcctatgctcttttctttatattattattattattattattattattattattattattattatttaatcttcccagaatcacctgtgagtgtgaactggctccatggctgaactggtgttctctgtgtgtaacattctggtcactggggtggaggctggag

SEQ ID NO: 127926 - DNA, 201 bp, Homo sapiens
caagaagactttgtgcagaacttttgttagggtggtcataccttctcaccaccatttggaagacacagcctaatgctgatgtacttaatgtgccccttccrgcatagaaataatgtctgggtaacagccatcaaaatcactaagaatgacattggatagctatgagaaagtagtagagaattgatttaaaatatcattctt

SEQ ID NO: 127927 - DNA, 201 bp, Homo sapiens
aaaggcagagccagggcacagacctacacctctggccccaagcctatgctcttttctttatattattattattattattattattattattattattattattatttaatcttcccagaatcacctgtgagtgtgaactggctccatggctgaactggtgttctctgtgtgtaacattctggtcactggggtggaggctgg

SEQ ID NO: 127928 - DNA, 201 bp, Homo sapiens
gtatttggaaaaaggctctttgcagatgtgattaagttcagagtcctgaggtgagatcatcctggattggagtgtgggctccagacgcagagagaacttayttcataagaggggacacagagacaggagaaggtaatgtgacagaaagggagagcgtagagtcatgcagcctcaagccaaggaactccaagaatggccagc

SEQ ID NO: 127929 - DNA, 201 bp, Homo sapiens
caccgtgttagtcaggatggtctcgacctgctgacctcgtgatctgcctgtctcggcctcccaaagtgctgggattacaggcgtgagccagcgcgcccggyccacccacctgagttttaaaggcagagccagggcacagacctacacctctggccccaagcctatgctcttttctttatattattattattattattatta

SEQ ID NO: 127930 - DNA, 201 bp, Homo sapiens
gattctttctacttcactactttctaaaagcgtgctctaaaaaggcacagcattttctttcaagaaattgaacacatgtgaagtctccagttcattccctytgtggagcagccctgggtggtaactgttgcccactcatcatggaaaacatgttgtgctcgtctgatttaaggtgcacaggttctcacctcctgagctgcg

SEQ ID NO: 127931 - DNA, 201 bp, Homo sapiens
tggttccaagtctttgctattgtgaatagtgccacaataaacatatgtgtgcatgtgtctttatagcacatgcacatgtatgcttttttttaaattttttwaaaaaaattttcatataaggctatttttccccctgaactcagcttcagctgaattcttaagttttggtatgtgttggagttgttgtccttattttgtagg

SEQ ID NO: 127932 - DNA, 201 bp, Homo sapiens
acattgtatttggaaaactttaaaaaatttttagcgttttgagatcattttctcccctacagttcacttaaagaggcatttgctttcccctcactatgtgstggggacgaaggctgtagagatgaccagccgtgtcttccaaagaactcaaagcttattaagctgattaagggatcagctggtccccagtgacctgctgca

SEQ ID NO: 127933 - DNA, 201 bp, Homo sapiens
acatttgggttggttccaagtctttgctattgtgaatagtgccacaataaacatatgtgtgcatgtgtctttatagcacatgcacatgtatgctttttttwaaatttttttaaaaaaattttcatataaggctatttttccccctgaactcagcttcagctgaattcttaagttttggtatgtgttggagttgttgtcctt

SEQ ID NO: 127934 - DNA, 201 bp, Homo sapiens
agactgggtaatttataaagaaaaggaggttgaatagattcactgttccatgtggctggggaggcctcacaatcatggcggaaggccaaaggcatgtcttmcatggcggcagacaagacagaagtgacaaccaagtgaaaggggaaaccccttataaaatcatcagatctcttgagacttcttcactaccaggagaacagt

SEQ ID NO: 127935 - DNA, 201 bp, Homo sapiens
cattttatcctacttggaacaagatgatatttgtgggtgtgttttttgctttttgtactttgtgctttacatatttttcttctttttaactttttttaaartatatttttattatattttaagttctagggtacatgtgcaggtttgttacatatgtatacatgtgccatgttggtgtgctgcacccattaacttgtcatt

SEQ ID NO: 127936 - DNA, 201 bp, Homo sapiens
ctcatcacaaccttcacctccccagttcaagtgattctcctgcctcagcctcctgagtagctgggattacaggcatgcgccaccacgcctggctaattttktatttttattagagatggggtttctccatgttggtcaggctggtctcgaactcccgacttcaggtgatccgcccacctcgccctaccaaaatgctggggt

SEQ ID NO: 127937 - DNA, 201 bp, Homo sapiens
agatgagagaagcagaagaatctgtcagagtgacacaaactgagaaggtgaggaagacccagctcggcattattgcctttgatgatggaggaaggggccakgaaccaaggaatgtgggtggcctctataagctggaaaagggaagaaaatgattctcccttagcgcctccacaaaggaatgcagtcttgctgacaacttga

SEQ ID NO: 127938 - DNA, 201 bp, Homo sapiens
ttgagcaccttttcatatccctgtttgccatttgtatgtcctcttttgagaaatatctaaatcttttgccagttttttaattggattagatttttttccartagagttgtttgagctccttatatatgctggttattaatcccttgtcagatggatagtttgtacacgttttctcccattctgtggcttgtctcttcactt

SEQ ID NO: 127939 - DNA, 201 bp, Homo sapiens
ctgtctctttagctctaataatatttgctttatatatctgggtgatccagtgttgggtgcatatatatatttaaaattttatatcttcttgctgaagatayaaagatagctctgtaatgtaatttgaagtcaggtaatgtgattcctgcagttttgttctttttgcttaggatagctttggctattctgggtctttcacag

SEQ ID NO: 127940 - DNA, 201 bp, Homo sapiens
tgcctttagttgccatgtctgtgtagtctcctttaatctggaacagttcttcagtctgccattgtttttaatgacgctgacatttttgaagaatacaagcyagttattttactgagtttatctaatgtttcttcaaggttagatttagcttatgcactgaactagctgatatgatgctcttccttcttatccatctcatct

SEQ ID NO: 127941 - DNA, 201 bp, Homo sapiens
caacgtctgcttccctgcctgggagattgggctgacttggagcttctgacacaaatggttcaagatacgtactttatattgttcacagaatctattgggcrgttgattttgttaacgtgaaaatgccccacttcttgttggccatctgctttgtccagaaagttgtcttcctggtaacagcgccgcttgaaacaaatcctc

SEQ ID NO: 127942 - DNA, 201 bp, Homo sapiens
tacatattatgttgtgctccttttaaggcctgtgtttctcactagcctgtgagccatgatggcggtctgcgaggtttcttgttgcacactggtgcctcgcrtatcagtgatccttgaagagttattgtatgcgtcacttccgtgaagccgtttccttcctcagtatccgttcctcttgttgctgttccaatggttcatgct

SEQ ID NO: 127943 - DNA, 201 bp, Homo sapiens
tccgcaacaaccccaagagataggcgctatacttctgccttgctctatgagtcatctgaggcccaaagaggtttaataacttgctcaagaacacatgatargaggcatagcaggggatttaaaacagatcgttttgttacaaagccctgttcttaaatattttgctaatgccattttgataagtgtcatctattaatctat

SEQ ID NO: 127944 - DNA, 201 bp, Homo sapiens
taaagacaagggaggttttcttgcctttgaagacatgtagacagtagctcatggctttagggcctgacacataaaggttcaaatcccaccagtatcgcctscgagctgtgcatggtaggcgagttgccttatatgcaatatcttcatctatcaaatggaaaaataatagtggtgtacacccacagggacatgtgaggtgca

SEQ ID NO: 127945 - DNA, 201 bp, Homo sapiens
tcccagagctcctgatgtatcctgtgtgaggctggagactgggaaccgttatacatctggatcattctgtttttagttttcaaaccttttcaggagggcaytttcaggccatttgtgaatgttaatatgtgaaacagaaaaatgcaaagccattgtaattgatttgcgagaggaagagagagacctaaggatactgcctgc

SEQ ID NO: 127946 - DNA, 201 bp, Homo sapiens
aatagtggtgtacacccacagggacatgtgaggtgcatagtaggtactcagcaaatgttacctatctctttgcctcctagctgtgcctctgtgttgcagcygggggagctgtgtggggagagctggacattttcagttcaagtcctttttggtcactgtggaagatttttgcagttaagagagttagtatggcctagtgag

SEQ ID NO: 127947 - DNA, 201 bp, Homo sapiens
cagttttaactattatgtgagtttgccatccatctttaaacaagtaatgaattttattttaagatgattttgacaatgaagattttagattaatattttayttcaaattggtccttcaattttgtgtgaagacaaaacaaaactcacttctcactccctatgcagcctggtatagcagaaagagcacgggctttggagaca

SEQ ID NO: 127948 - DNA, 201 bp, Homo sapiens
gggagaagggagagtatgcatctagtctagggtatggggaaatctcccttgaaggtggttgcatttgagataggcctggtgtgactggatttcagcaggtrcagatgaagtatacagagaaggaccctgattgattcctcttttacatcacattctaattaatttggttatctgggtgtaaacccacgccggatccaaagc

SEQ ID NO: 127949 - DNA, 201 bp, Homo sapiens
accaccagctgggcgtgtcatctagcgtcatcatgggaaatggctgcatgtgccttaggttccatccagtgatgtcgtaaaataaaccagccttcttgaamcctcctgccagtgttggcttctggcattgaatggctcgtggctcaccccctggctagggtagatgcctctatcccaaaggctttatggtgttcttgttgc

SEQ ID NO: 127950 - DNA, 201 bp, Homo sapiens
gtgttgagtgaatagctctacatcacccacctgagttttttttttttttttttttttttttttttttttaatggagttttgctctgtcgcccaggctggakggcagtggcgcgatccgcctcccaggttcacgccattctcctgcctcagcctcccaagtagctggtactacaggcgcctgccaccaagcctggctaatat

SEQ ID NO: 127951 - DNA, 201 bp, Homo sapiens
atctctttcaatattgactttctcctcttctctgtgatctcctgatagaatccctacagcaccaattttaaatcttagcattcttgtctttaatctctccrttatattttccatctctgtttttctgtgctacgttttggtcaattacttcaggtctttcagttactttatgctccctttagcaccacctaatctgctgtt

SEQ ID NO: 127952 - DNA, 201 bp, Homo sapiens
tcctgccagtgttggcttctggcattgaatggctcgtggctcaccccctggctagggtagatgcctctatcccaaaggctttatggtgttcttgttgcctsgaactgagttttttcctccctctctctctgttttctgaccctctcatcttgtatcgcaggttgaaaggattgtagacaagaggaagaacaagaaaggaaa

SEQ ID NO: 127953 - DNA, 201 bp, Homo sapiens
cagtgtgtttgctttcattgactctaagacactacagattataagatgctctgttattttatgtacctctgaataatagaatcacctagtgagctttcacrtgtcttggtgcccagccctgctccagatcaataacatcagtaatctggggggtggacattggttttttcattcacttatttattcattttattcattttc

SEQ ID NO: 127954 - DNA, 201 bp, Homo sapiens
gattattcctacctaattggccggttgtccagcgaccggcgaaaggagagcactcggattgcagaagccatcaggtgagctgtgctccttttcacacaccytggggtcctgcgtaggattaccaagtaaaaatacaggctgctcagttaaattcgaatttcaaacaaccaggaattttatttttagcataagtatatcctg

SEQ ID NO: 127955 - DNA, 201 bp, Homo sapiens; identical to SEQ ID NO: 21763

SEQ ID NO: 127956 - DNA, 201 bp, Homo sapiens
cctgcgtaggattaccaagtaaaaatacaggctgctcagttaaattcgaatttcaaacaaccaggaattttatttttagcataagtatatcctgtgcaatmctcgaggtctgcttacatttttaaaatgttggttatttatctgaaattcaaattttaattgggcatcctatattttcatctctaaccatggtcctgccaa

SEQ ID NO: 127957 - DNA, 201 bp, Homo sapiens
ccagtgcctcccagggcacagtgcagagcccttgcttgcagcctcatcatgcccccagcagtgtagcccagagaggtagggtctgggttggggtccgtgcygtcttctcagacacagtgtggacttggagttcaccacgccagtgcctgtgctggagcctcttgtccttctgctatctctaggttggatgattgacctata

SEQ ID NO: 127958 - DNA, 201 bp, Homo sapiens
gcatatttcttgactccatcctttttccttaatactctcaccactttaattcaggagaaaactgccattgcttgggtctttctagtacctctcagctgatrtttctgcatctagcccttcctacttccatttttctctggactatactcatgagtctttcaacaatgtccattttattatgtctctttcctgattaaatgc

SEQ ID NO: 127959 - DNA, 201 bp, Homo sapiens
cctatattaggtcctgtcttagtctgttcaggctgctgtcacaaaacaccttagaatgggtaatttatgaaaaatggaaatctaatttctcacaattctgraggctagaagtccatgatgaaggcaccagcagatgctgcatcgggtgagggcctgttcctcttagctggtgccttctgtgtcctcacatgatagaagggg

SEQ ID NO: 127960 - DNA, 201 bp, Homo sapiens
tcccacagtgaaaacctaagtcccaccatctgcaatccatttacttaatcattcaattccagtatacaagtataacagtatcagaattgttagcccctacygccatgggaatcaactttttcaactggagtacagtgctgtgtagagtttattttgcctttagtttcacaaactccgctcatttctaaagttatttatgtc

SEQ ID NO: 127961 - DNA, 201 bp, Homo sapiens
cctctcatcttgtatcgcaggttgaaaggattgtagacaagaggaagaacaagaaaggaaaatgggagtatcttatccgatggaaaggctacgggagcacygaggacacgtgggagccggagcaccacctcttgcactgtgaggagtttattgatgaattcaatgggttgcacatgtccaaggacaagaggatcaagtcag

SEQ ID NO: 127962 - DNA, 201 bp, Homo sapiens
gtaatccattctgcataaggcaggcagaatgatcttccagaaatgcagctgtggccaagtcaaccctttatacacacacccctccccaaccaaatgtgtcratggctcctgattaccctggctgacagtcagaaccctcagcgtggtgcagtcccgcctcatcgtgcagcccacctcacatacctgtcctcctgtacctca

SEQ ID NO: 127963 - DNA, 201 bp, Homo sapiens; identical to SEQ ID NO: 21771

SEQ ID NO: 127964 - DNA, 201 bp, Homo sapiens
atatatagatatcaaatatttatcaaaatggcaaatattttgatataaaatatcaaatatttttcaaaatatatgtgtgtgtgtatatatatatatatttwttttttttttttgagacagagtcttgctctgtcactcaggctggaatgcagtagaatgatcaagcttactgcagccttgaactcttgggctcaagcaagc

SEQ ID NO: 127965 - DNA, 201 bp, Homo sapiens
tatataaaccatatatttatataaaccatatatatatatatatatatatatatatatatatatagtatatggtttgtagatattacatttatacccaggtrtgtacatatggggtcatatgtcttagtatgctgtaacatgtgttttccatttagcaattattcaaatattttcctgggtcagatatttttctacaccaaa

SEQ ID NO: 127966 - DNA, 201 bp, Homo sapiens
tatcgtcatgcatgaaagcagcctgctagtctaagggagtcctatagcaaaccatctttataaagtgaacagtgacacccaatttataaatctaaattttygccattttcttaaaatgaaatatagtttcaaactggggtactaatgtctgaaaaggttttatgcctctacagttaatttaccctgagacagtaatttcta

SEQ ID NO: 127967 - DNA, 201 bp, Homo sapiens
ttttttctgttattttttcttttcttttagtggttactctagaaattacaatatgtatacttgagttaaattctaattttaattggcattttgggccaggygtggtggctcacacctgtaatcccagcactttgggaggccgaggtgggtggatcatgaggtcaggagattgagaccatcctggctaacacggtgaaaccc

SEQ ID NO: 127968 - DNA, 201 bp, Homo sapiens
tactgttttttcttcttgacaaagaatggatattccattttattacattcatttttgatacttactggagtgatcgtatactcttccccattatcactagrtataatttagtaacagatttttttaaaaatttccatatttaatagcacacacacttgatgataatacatttttttttattttagtattatgctaagtttc

SEQ ID NO: 127969 - DNA, 201 bp, Homo sapiens
gaaaaggagatactcctgggtggatacgtgatactcctgggtggagtatcacgttatccatgacaccatcccttcttgccctttactggtaggtgagtctytgtactctggatccccagaacacacctgtcaccttggttgtacttttggttgttggtgcttcccttgaaaacatcacttgtcatttgcagcttcttgttg

SEQ ID NO: 127970 - DNA, 201 bp, Homo sapiens
ggagtcttccctgactgccaagaccaggttggctaccttgtacacaccggtggtgaacgtctttccttttgtctagagcacttatctcagtttgctattawtgttggttggtgactttatgtattagaagctggctgtccccatggactgtgtgcttcatgagcatgagggccacatttgtttttattcaccgttgcacct

SEQ ID NO: 127971 - DNA, 201 bp, Homo sapiens
tttctggggcctccagtctctatggttctgtggaggggccacacagagggaggctgattcccacgtggctatagggggctttgaggggttgctttgtctcyaagaggtgatgctaggatgctcttgtgtgtggaattctgagtccctcttcagggtgaagcagccattggagcccctgctccgaaatacccgtgtgtttcc

SEQ ID NO: 127972 - DNA, 201 bp, Homo sapiens
agggccatcagattccctgatgaaaccagggtgcgtgtggagaccgggatgcttggatgcagggggaatggttagaagggctcacagaaggttggggtgaygaggccaacacacttcagtgtgacgatggtagatttggagtccagaacgtgcagagctggctcccctgcaagagcttgctgtctttaggtactcttgctg

SEQ ID NO: 127973 - DNA, 201 bp, Homo sapiens
cccagcctggggagggcgtggggatccttcttgcatgcaggaataaggtattgtagctgggtcactgaagggatggaagctgaacagaaacagggtacccrgggggtcaggtctcatgatggatttccccagagcccccaccgaatggttccttcctgtggctttgcacgcccagtctctctggtgagggaagtgtctcct

SEQ ID NO: 127974 - DNA, 201 bp, Homo sapiens
tgagaaatctgagcaatccgtgttgaggctcctctttctccagagagaggaatttcacccaaacaggatttacttagcatctttgccccagactgactcaygtttccgtctcgggatccctgacgctgacgtgactgtgcctgtgaacatatgtaaaagctgtttgttttagaaattcatctctcggggagaagtgggctc

SEQ ID NO: 127975 - DNA, 201 bp, Homo sapiens
gtatcaaagctgaggggcaaaacctcttctcctgtccccatagcctctacccattggggtctgctgcgtggtatctgtgcgtctctggactcttgagaacsaaattcatggagaaagaggtgtcagaggcagatgggattgaaaacatcagctgtaggagaacgtggctggggcctgaggcccaaactggctcctgacttt

SEQ ID NO: 127976 - DNA, 201 bp, Homo sapiens
cagctgttagcagctccctgccctgctcatatggggcaatcccaagagtaaagcatgagggaggaagatttgctgactgtagctgacagtctgcagtgtgraggagagaagccagactcatagaggggtctacatgagggtgtgcctcttgtgctgtgcaatcttctgcggtgaggcagagctgcgagctctgtgctcttc

SEQ ID NO: 127977 - DNA, 201 bp, Homo sapiens
ggaattcttctcgatgcttcaaagggagcagaagttgctagttcatgaactagcaaggatgggggcgtgggaaaggagatgtcccctggaccactggttcycagccctgacagcacagagaggcccaagggagcattcccaagaccctgatgcttggcaacacccccaggggactctgagttatttaggctgaggtggggc

SEQ ID NO: 127978 - DNA, 201 bp, Homo sapiens
tttgctgactgtagctgacagtctgcagtgtgaaggagagaagccagactcatagaggggtctacatgagggtgtgcctcttgtgctgtgcaatcttctgyggtgaggcagagctgcgagctctgtgctcttcacccttcggctttgctgatgccccctggtccatgacctggtgataaggcatggtaccccacaagcagg

SEQ ID NO: 127979 - DNA, 201 bp, Homo sapiens
tctgcaccaacatccagaagcaagtctggacaggggagagcactgatgacagctggcacgtaggaagcacttgctgtgtgctgggctgggctgtcaacgcmgtccacgcccctgtgaggcaggacagctgtgatccccattttgcggatgtggagactgaggctagagaggtttagtgagttgtctaaaggcatgcagtgg

SEQ ID NO: 127980 - DNA, 201 bp, Homo sapiens
cagaaggttctcagggagtcccctccttccagccccctctagccagtcagctccctttttcctctccctttcttcaaatactgcaaatccactaagtgccyggctcgccacacccaccaggagtgcaggggtgaacaaaaaccctgctcttcagaccttctattccccagctctctgtcttggaaggaggtcccaccttgt

SEQ ID NO: 127981 - DNA, 201 bp, Homo sapiens
atgctattctagacctttcttgtctctctgatctcttatcttcctcatatttgcctgacgttgtgtgttctctactcccacttgagccaatgctggcctcyattttgttctgttttgtctgtttcaaaagggcccttttgcttaatcacatcccatagcactggtgcccgtaaggttaaggcactggttctcagattctgc

SEQ ID NO: 127982 - DNA, 201 bp, Homo sapiens
ggtcttcaccagggacaccctacctctgcccaagaatctcctttctctctgagtccttaggcttctggataatacccttaagttccctcttcaaaagagarcagtccattgtggccccacggctattgtgaattgttcctttttaggaacagactccaggatgtttcttttgatgtcttgattttatcggaaggtcaacac

SEQ ID NO: 127983 - DNA, 201 bp, Homo sapiens
actgatttttttttatgacttcctaagagttattcaccatgctgggtgcttgaagtagagtaatgaagagataggtatggacttttccctctgaaacttatagcttccctctgaaacttgccaggaagttggaatgccggcctctggccccatgctgagaaggcgcccgaggctggctccatggaaggagtaacacatatt

SEQ ID NO: 127984 - DNA, 201 bp, Homo sapiens
agtgttctatggattcacacgagcctttactctgtgaaacgtccctaactaggagccatcgtttctctttgagccctagaatagcataaagacttgcagcrttctccaaattaccaggaaggtgatgagcatcactgttgatgccagtcttgtggccccatgtccacatttctgaaaggacgtttaagatcctttccttgc

SEQ ID NO: 127985 - DNA, 201 bp, Homo sapiens
taattgtgtattcagatatttaaccttgctgcgtttttggtctgattgttctatcatttattgagaggcatgtgtgaaaaatctctgttccgattatggawatgtctatttctccttgtaatgtcaatttttacattttgtattttggtatagttttgccaatttttacattatatattttatgatattaagtgcatacac

SEQ ID NO: 127986 - DNA, 201 bp, Homo sapiens
agtcagaaatctaaaatgcattggcagggctgtgctccttctggaggccctgtgggagaatccatttccttgccttttccagcttccagaggctgcacgtwctcctcggctcgtggtccctcatctctataacctttgcatccatcctcacatctccttctcttgactccaagccccctgcctccctcttacaaggactta

SEQ ID NO: 127987 - DNA, 201 bp, Homo sapiens
actcagcagtgtgtttgctttcattgactctaagacactacagattataagatgctctgttattttatgtacctctgaataatagaatcacctagtgagcrttcacatgtcttggtgcccagccctgctccagatcaataacatcagtaatctggggggtggacattggttttttcattcacttatttattcattttattc

SEQ ID NO: 127988 - DNA, 201 bp, Homo sapiens
gtctggaagcacattcattctgacatctgctgtttgatcctggctcttgactggggcctgagctatgttgtcggttggcacacctgcatgtagtctctccrtgagggcttgcttgggcttcctcacagcatggctcctgagttccaagaatgggcatcccaggagagcagagtggaaatgaatgtcacttttatgatatag

SEQ ID NO: 127989 - DNA, 201 bp, Homo sapiens
ggtcatgctgcgggtcaaggagatggcatcctgcagtgccgtggtgagttcctgcgcctcctgcgtgcttgtccttttgatagacccattttacacatgargacagcaaggctcagagggcttcactgacttgctagaggtcgcacagggaataagcaaaagaccctttgcaatttaacaaatgccttttctcagtattga

SEQ ID NO: 127990 - DNA, 201 bp, Homo sapiens
gcacagggaataagcaaaagaccctttgcaatttaacaaatgccttttctcagtattgacagcttcaatcagagggagacagtcagcattattacaaattstccatcatctccaggcagagaaacctcacaggagagatggatactctagggtagcgtcactgctttcaaagaaagtcctaaacaccacaaaaacgcaaaa

SEQ ID NO: 127991 - DNA, 201 bp, Homo sapiens
gatggatactctagggtagcgtcactgctttcaaagaaagtcctaaacaccacaaaaacgcaaaacatctatagctttcaaagaaacgagaagcagcggcsaataaggataaaaagtattgaacccatccggaagatgactagagaaagctgtacacaccatgcctctatttcatttgttttctccaccgactgctcgtca

SEQ ID NO: 127992 - DNA, 201 bp, Homo sapiens
agctgtacacaccatgcctctatttcatttgttttctccaccgactgctcgtcacatttaaatgtcactgtttgaagatgcactgaaaaatacataaacamataacacctctgcagaggcagtggtttttaattaagtgttgattttatctcataacagtcactcagagcgcggcaggggaatatcctgtgggaaggtgga

SEQ ID NO: 127993 - DNA, 201 bp, Homo sapiens
acatgtgactgaaaaggagggtgggagactggcctgcaagctgcatggagggggttggcctgttctgtggcagggaagagaggctcaggtgaaaccaagtrttgaaggacacctgagggtacaggctcttaggacaaggaatactgcaaggaggtctctgctgccaaaagctgtgaattcaggaatgctgggggggtttcc

SEQ ID NO: 127994 - DNA, 201 bp, Homo sapiens
ggagggtgggagactggcctgcaagctgcatggagggggttggcctgttctgtggcagggaagagaggctcaggtgaaaccaagtgttgaaggacacctgrgggtacaggctcttaggacaaggaatactgcaaggaggtctctgctgccaaaagctgtgaattcaggaatgctgggggggtttcccaagaaaggaactac

SEQ ID NO: 127995 - DNA, 201 bp, Homo sapiens
tactccagcagagtaaggcccatggcctctgggagacggtgctcttcgaggccattccagggggaaagagccagctgggtctggcagctcatcccaccacytgcagcctctagcccaggcaggggagtgagggtgcagcccctcccagtctgctggagccagggagctgccatcttgcttctttctgtttgagggcatttc

SEQ ID NO: 127996 - DNA, 201 bp, Homo sapiens
tggagccagggagctgccatcttgcttctttctgtttgagggcatttcaggagaggctggtggaggccagcgaagaatgcacgaaggcctcacttctggcygtaacgtctgccagagggcggcagcagcagcgtggctgttggaatcagccagaccaggttttcctgctccctctacccatgagtggtcaggcagccctgg

SEQ ID NO: 127997 - DNA, 201 bp, Homo sapiens
ctctgtgtgtgtgtgtgtgtgtgtgtgtgtgtgtgtaacattttgtatgaaaacacttgtattttgatttttctgctcaatatagcgtatgtctgtttccrtctatttccatattgggcaactcttcatattggaattttagtagtgccatttatatgttttcagaaggatatacaggttgaatgtccccaagtccaaaat

SEQ ID NO: 127998 - DNA, 201 bp, Homo sapiens
cttctttccttctttcctttccttctttctttcctttctttcttttcctgggcattttaaaatggctttcttacatcaccttatcctgtgatatctgactktatcattagatcttaatcacacacaaagggaaagcctgttctactcatctctctctctctctctgtgtgtgtgtgtgtgtgtgtgtgtgtgtgtgtaaca

SEQ ID NO: 127999 - DNA, 201 bp, Homo sapiens
gacctatccctgcatttgtgtcttagatgtatcaaagctgaggggcaaaacctcttctcctgtccccatagcctctacccattggggtctgctgcgtggtrtctgtgcgtctctggactcttgagaaccaaattcatggagaaagaggtgtcagaggcagatgggattgaaaacatcagctgtaggagaacgtggctgggg

SEQ ID NO: 128000 - DNA, 201 bp, Homo sapiens; identical to SEQ ID NO: 21768

SEQ ID NO: 128001 - DNA, 201 bp, Homo sapiens
ctttcatttattcttcactggaggccttgagagtgggtccacccacttatagatggggacattgaggatgaataaccagcatggctcaggtcccatggctwgtaaggtgcagagccagaatttggaccaggggcttggaactccagtgggacactgaacccaggtctggatctgatgccaaagcccacttgccatgtggca

SEQ ID NO: 128002 - DNA, 201 bp, Homo sapiens
ttatcagcctgctagtggaaaggctgaggaggagggggtggtctcccttgcttggaaggcccctcactgctccagtccttctcatctctacaggctgagtwtgctgtcagtttaaattgtcctttcttggaggagcctttgtgactgttctgtttgaagtaaatccattcccgctgccgttgtttctcacagcaccttcct

SEQ ID NO: 128003 - DNA, 201 bp, Homo sapiens
aagaaggtagaatcttagccatctgtccaaattgaattagcaacaccaaaaggaaagaaaagagatataaactagatataacttttttaaaaatgaaaaayagtatagtttgtacttttgtatcaataaaatgcaaatttattttcagtttaattcataaatgagatggctgttttgtttggtcttttatttattttttct

SEQ ID NO: 128004 - DNA, 201 bp, Homo sapiens
gcttggaaggcccctcactgctccagtccttctcatctctacaggctgagtttgctgtcagtttaaattgtcctttcttggaggagcctttgtgactgttstgtttgaagtaaatccattcccgctgccgttgtttctcacagcaccttcctctttgccatcagagtacgagtccttttttatttctatttatttttttat

SEQ ID NO: 128005 - DNA, 201 bp, Homo sapiens
atcctttccccatttcttgtttttgtcaggtttgtcaaagatcagatggttgtagatgtgtggaattatttctgagggctctgttctgttccattggtctstatctctgttttggtaccagtaccatgctgttttggttactatagacttgtagtatagtttgaagtcataatttgaatcatgggggcagtttcccccata

SEQ ID NO: 128006 - DNA, 201 bp, Homo sapiens
ttctttctctctttgagttgaaatatgcctccctgttacaccttccctgtggttctgcttctgcaccttaacattcaggttgacttccttaggatatatasaaattctgtcaatatctagggtgcccatataacttactgtgtaagctatggcttttgagagtggaaggagatggtaactgggtgcagtgctaggacatgg

SEQ ID NO: 128007 - DNA, 201 bp, Homo sapiens
gttatcatgagaagtaaatgaaagaattcaggaaaagtatttctcttagatcctgttggataatggtgatcatagtggcattattatagttattacaaatrttactacaatcattactcattactattattagtattactattactgttatgaatttttactcactactatgattattactattgttactgtgattattgc

SEQ ID NO: 128008 - DNA, 201 bp, Homo sapiens
taatacagtatatattttcaaaatataaacttttatatttctgtgataagttaggatatgcgttttaggcaatatttttcattaatatcacttgttctttygaaaaatagcatactggtttggtgccaattttttcattagaatataatgctcttatattgttggagagcaggttaatcttttttcgaagtaattgcgttt

SEQ ID NO: 128009 - DNA, 201 bp, Homo sapiens
ttggtgccaattttttcattagaatataatgctcttatattgttggagagcaggttaatcttttttcgaagtaattgcgtttgaagtataatttcaaaatrtattgaatttgtgaataagccttaccattaggatcagtaaatttttcaactttgcaactacataagtagtttaagatctccccgtaaattctcactgtgt

SEQ ID NO: 128010 - DNA, 201 bp, Homo sapiens
aggcagtagaatttccccaagccctgattactgacagagacattttgtgactgggggagggtcaggagtgcttggtggtacaggatgtacttctttgacascctccttgtttgtttatttatttatttatttatatatttttattattatactttaagttttagggtacatgtgtacaatgtgcaggttagttacatatgt

SEQ ID NO: 128011 - DNA, 201 bp, Homo sapiens
ttgatttttttttaaaagtgcgtacagaaaaggtcactctttttttgtggtctacagctctgtggtttttgacaaatgtacagtcatgaatccacccccayaggaccacgcagaacagtttaatcacctaaagattcccttgtgtagccgattggtaatcatcccctcttcttctggtccttggcacctgaatgtaagatt

SEQ ID NO: 128012 - DNA, 201 bp, Homo sapiens
agaagaattagttttagagtccttctttaaaagtttggtagaattcagcagtaaagccatcctgttctggacttttctttgttgggaggctttttttttttattactcttccatcttgttacttgttaattggtctattcaggtttcctatttctattttgtatttcctgtttaatcttggtaggttgtatgtgtccagga

SEQ ID NO: 128013 - DNA, 201 bp, Homo sapiens
gaccctggcagttggccccagattccttgtcgatgacttggaaacgtccattctgggtaaggtcagcactccctgagagatgttaacaaagtttacctatragtcttactgtgtagacaatctgaagtcaattttagttacacaatcagcattcccatgtgtcctcagtgtcttatcaatgaactatgtgtatcaagccat

SEQ ID NO: 128014 - DNA, 201 bp, Homo sapiens
tgaaccctcctgccagtgttggcttctggcattgaatggctcgtggctcaccccctggctagggtagatgcctctatcccaaaggctttatggtgttcttkttgcctcgaactgagttttttcctccctctctctctgttttctgaccctctcatcttgtatcgcaggttgaaaggattgtagacaagaggaagaacaaga

SEQ ID NO: 128015 - DNA, 201 bp, Homo sapiens
taatcttttttcgaagtaattgcgtttgaagtataatttcaaaatgtattgaatttgtgaataagccttaccattaggatcagtaaatttttcaactttgyaactacataagtagtttaagatctccccgtaaattctcactgtgtggcagttgatggagtttgtgaacagagccttaagcttgttgcaaaaaaatttaaa

SEQ ID NO: 128016 - DNA, 201 bp, Homo sapiens
gaagaatgcacgaaggcctcacttctggctgtaacgtctgccagagggcggcagcagcagcgtggctgttggaatcagccagaccaggttttcctgctccytctacccatgagtggtcaggcagccctgggccactttacatcatggagctttgggttctgcatctgtaacatggggatcaaaagactacttacttgcagg

SEQ ID NO: 128017 - DNA, 201 bp, Homo sapiens
tccttattagcactcttctgccttctccggggatggtgctggagggctttggctatgataagtgtttttctccttgctctggactcttgcttgtactcagrggaggctccctgcacaggcagaagcagattccctggcctctaccctcagggggtcaggcctctggctgtcttgcagtctgaaagccccaggcttacagga

SEQ ID NO: 128018 - DNA, 201 bp, Homo sapiens
tttgactgcaaatttaactatagagctggcctctataccacggcccagctggattccaggcagtagaatttccccaagccctgattactgacagagacatkttgtgactgggggagggtcaggagtgcttggtggtacaggatgtacttctttgacaccctccttgtttgtttatttatttatttatttatatatttttat

SEQ ID NO: 128019 - DNA, 201 bp, Homo sapiens
atccagaattcatcactacctcccaggaatgtgaacctgcaggtggccatagcataacctttcctttcatttattcttcactggaggccttgagagtgggyccacccacttatagatggggacattgaggatgaataaccagcatggctcaggtcccatggctagtaaggtgcagagccagaatttggaccaggggcttgg

SEQ ID NO: 128020 - DNA, 201 bp, Homo sapiens
aggctgataagcattgtcccttttccttccttgatattcccccttgttctgttttgaaaataacatcaccaaccatacaaaaatagcaaatttttgctacyccttctgcactaccaggccctgttctaagcacctctcagttaaccttgcctctgtgctgggagcttggtgctgtcatgatgcctcctggacagcagagaa

SEQ ID NO: 128021 - DNA, 201 bp, Homo sapiens
tttcatctgtagcacctagcacagtgcaagactcaaaaaccaatctgtttaatgaaataattaatttattcaatctttcatttatatgaaagttggaatcrtctcagatatctctatagtctctttggtctgatgcttaaagccattttcagtctctcagttttccttaattcttgaatgtgtttcctatgtctttatgga

SEQ ID NO: 128022 - DNA, 201 bp, Homo sapiens
cagtttttaatggttgaaaacaaacaaacaaaacagtcatagttgtttgtttttttcttgttgagttgagttctttgtagattctgggtattagtcctttratgagggcataataaaaacagtaataatagcatttaatatgtgccagacactatggtaaattctccacgtgtatggtatcatgtaatcctttctatgaga

SEQ ID NO: 128023 - DNA, 201 bp, Homo sapiens
ggactagaaagagatatataaaactatttttcaccacctgatgacaggcagtaaaacactgatggtaatttaccatgatagttttctgtgaggaactcaamgggaatagagaggaaaactgagatatgagataatacacacacacagaggagagagaggagagagaggagagagagaacgaacatattttatatctgtcct

SEQ ID NO: 128024 - DNA, 201 bp, Homo sapiens
tcctgtcctgttggttatcttttcactctcttttaacaacgtcctttgatgcacacaaattgtagttttaaagaattctactgtatctgtgttttctttcrttgccttagctcttggtgtcatgtttaaggcagaacttccagtactgtgttaaacagaagtggagaaaatggtcatcattgtcttattcctgattttagg

SEQ ID NO: 128025 - DNA, 201 bp, Homo sapiens
tggtgtcatgtttaaggcagaacttccagtactgtgttaaacagaagtggagaaaatggtcatcattgtcttattcctgattttaggtaaaaagctatcaktcttttacctgaatatggtgttagctgtgcgttttcttaattatcttttatgatgttaagagagtttcattttattactagtttttcaaaattttatttt

SEQ ID NO: 128026 - DNA, 201 bp, Homo sapiens
tctcagattttaaaccgtttattaaagcctgtcttgtggcccaacatgtagtctattcaggagaacataccatgtgtacctgagaagaatgtatgctctgytgttgttgggtgggatgttctgtatgtatctgttaggtctaataggtttacagtgttcttcaagtcatctattttcttactgttctgtctagttgttctg

SEQ ID NO: 128027 - DNA, 201 bp, Homo sapiens
atttgttttgctgtattatgtgaagtagggatatggtctctgtgattgttgatctttcgtttcagtccacttattaaatgagtcattattttccctctgayttgaaatgtccgatttgtcattgatgaaattgtaacatattaatatgagtttgtttccaggcattctactctgttctacaatttccattattgtgctttt

SEQ ID NO: 128028 - DNA, 201 bp, Homo sapiens
ataagatagtcacatcatgcttaaattatatcatcttacctgtctttctgtcagttataattttatatatatttctactcttattttattagctagaattytcagaaatgctaaattatagtgtaatagctagtattcatgtttcttgtttctcattcaataaaactgctttttgtttcaccatgaattaaagaagtggct

SEQ ID NO: 128029 - DNA, 201 bp, Homo sapiens
agagtgtgatgcatggtaaccagattggttgctagagcaccccacagggaggccctgtggcctgagccaccacagggtgatggggatacctgctgtaaggrcagagtggctgggtgggcattgactcatgggcaccagctttggtctagtgcacattagagaaagtccagggaccagtgacgaggttggtagctctagtcc

SEQ ID NO: 128030 - DNA, 201 bp, Homo sapiens
ggttcttcttgaataggtccttcacatcccttgtaagttgtatgcctaagtattttattctctttgtagcaattgtgaatggtagttcactcatgatttgsctggctgtctgttattgttgtgtaggaatgcttgtgatttttgcacgttgattttgtatcctgagactttgctgaagttgtttatgagcttaaggagatt

SEQ ID NO: 128031 - DNA, 201 bp, Homo sapiens
tgttaggtgtgagaagaattgtcttcagttctctctccattctcattcatgatggaatcattgatccattgaccagttgagaaatgattgatgctgaagargtggtattctattggtaaggcttattaccaaacttccgataatgaagcaggctaccaaaaacttatccagcccaccctaggagtgtttggatttgatcat

SEQ ID NO: 128032 - DNA, 201 bp, Homo sapiens
ttgtgcacacctggcctcagtctcctttccgacgcaaatctgtgtgactattagggcttggtcttaaaacccaattgagtgatttgcaaacccagatattstacatttagaaatgttttgttaaatatatatttttaaaacaatgtaagtggaaattctgataatttatgtgtattatatgtaaagctagttttgcaaaaa

SEQ ID NO: 128033 - DNA, 201 bp, Homo sapiens
tggtggccatcaatgggccggccctgggcctgggtgcctccatcctgcccctctgtgacatcgtgtgggccagtgagaaggcctggttccagacgccctaygccaccatccgcctcacgcctgctggctgctcctcctacaccttcccccagatcctgggcgtcgcgctggtaagcctcctgtgatacctggattcgggtc

SEQ ID NO: 128034 - DNA, 201 bp, Homo sapiens
atgtccagatgaatattaaaattttatagatcatacatagcaactaggaaaaggcaaaaagccttctgaggcaaaggaaatacaggtcattgttgatggcyctgtgtaattggtaaaggtacatgccttgctcagtgcagaagggcagggagagaaaatattgcccagtcttgtagccaggattgtagctccttcctacag

SEQ ID NO: 128035 - DNA, 201 bp, Homo sapiens
ttacacatttcagtggaggtgttagctggatttccagaagtccagggaaacctggctgacacagcccctcgttttcactccatgcacgagcagctcattarcatgcagaccccttgtagtgagttgaagtgtggcccccaaaagatatgtccacgtgccaatccctggaacctgtggaggtgaccgtatttggaaaaaggc

SEQ ID NO: 128036 - DNA, 201 bp, Homo sapiens
gaaacctggagaggtaagctgaggcaggtcaaggtcaggccaaggtcagaccaacgtaatgggcatttggattttattcttgtgagttcttatagtttctratctttcctctgaaagtaacgaaggatgcagactttactagacatcttgtgtctttcctccatgtccagatgaatattaaaattttatagatcatacata

SEQ ID NO: 128037 - DNA, 201 bp, Homo sapiens
gtctttatctggtttacacatttcagtggaggtgttagctggatttccagaagtccagggaaacctggctgacacagcccctcgttttcactccatgcacragcagctcattagcatgcagaccccttgtagtgagttgaagtgtggcccccaaaagatatgtccacgtgccaatccctggaacctgtggaggtgaccgta

SEQ ID NO: 128038 - DNA, 201 bp, Homo sapiens
agagaaacaagtgcccatttttgtgacccgtggagcgtcaatcatggtctttatctggtttacacatttcagtggaggtgttagctggatttccagaagtycagggaaacctggctgacacagcccctcgttttcactccatgcacgagcagctcattagcatgcagaccccttgtagtgagttgaagtgtggcccccaaa

SEQ ID NO: 128039 - DNA, 201 bp, Homo sapiens
atttaggacttcaaaatgcatagcagtctgggactatttgttatagaatcacatcccagaagcctctaagaagaattttctgttataggccagcaggtgaycattgagaggtagttatatgcatacagtatattctgtttaagaaggaaacagaatgtggactaatttcggaacattttactttaaatgaaccagttacat

SEQ ID NO: 128040 - DNA, 201 bp, Homo sapiens
caactcagcctcccaagtagctgggattacaggggcatgccaccatgcccagctaatttttgcatttttagtagagatggggtttcatcactttggccagkctggtcacgaactcctgacctcaagtgaagcacccacctcggcctcccaaagtgctgggattacaggcgtgagccaccacacccggcgactaataaatat

SEQ ID NO: 128041 - DNA, 201 bp, Homo sapiens
gagtagctgggattacaggcatacgccactctgcccagctgatttttgtatttgtagtagagatagggtttcaccatgttagccaagatggtcttgatcasctgacctcgtgatctgccttccttggcctcccaaagtgctgggattacaggtgtgagccaccacgcccgacctgggtcttgttttttaattcagccactc

SEQ ID NO: 128042 - DNA, 201 bp, Homo sapiens
actgtgctcttgggatggaagtcactgtgcgtggtgctcactcaggaatgggaagttatactccattgctttgaggttgcaatatttacacaaactatcgrgaattcttctgcatggaagatttgtctcttctgcatttatttattcaatcatttatttaaagcagtatggactcatggatggtaattttatattttcaga

SEQ ID NO: 128043 - DNA, 201 bp, Homo sapiens
cttgactttaaaaaataattttacatgccgggcacggtgactcacgcctgtaatcctagcactttgggaggccaaggcggacggattgcctgagcttaggmggtcgagaccagcctgggcaacacggtaaaaccccgtccctattaaaaaaaaaacaaaaaattagccgggcgtggcagcgtgcgcctgtagtcccagcta

SEQ ID NO: 128044 - DNA, 201 bp, Homo sapiens
ctgaaattaagctctccttccctgagaaattcagcttagtatatttagtgtctccaaagtaaaataggctcagagaacttttctttgaaaattttcagagracttttctttgaaaaattctgtgcaaaaatgcagttggggtattcctcgatgtggtttggtaattggagaatcaaaggaaaaatctgtctacatatttgc

SEQ ID NO: 128045 - DNA, 201 bp, Homo sapiens
tcaagtgtagttttctctggcaccatggcagcaacttttccaagcagtggcgtgacctctgcatcacgctttggcctgaaatgacttgatgccatctgacrctttggcgattgtgagttccttctgggttttagcgttgcccaccgtgttcaggctttttggagctgtgctgcttgtatggactgtagtcatattctgctc

SEQ ID NO: 128046 - DNA, 201 bp, Homo sapiens
tccttgcgatggtctgcatttgtatagtcagaatttcactctgcgactcttctgaagttcatttgaactttattcctagcgcttctggacaatagatgtarcctttgtttttttgttttttatttatttatttttgagacaagtctcactcttgtccaggctggagtgcagtggcatgatcttggcccactgcagcctcga

SEQ ID NO: 128047 - DNA, 201 bp, Homo sapiens
agtggcatgatcttggcccactgcagcctcgacttcctgggctcaagtgatcctcctgcctcagcctcccgagtacctgggactactgttgtgtaccactrtgcctggctaatttttgtattttttgtagagatggggttttgccatgttgcctgggctagtcttgacctcctggcctcaaacaatcctcctgccttggcc

SEQ ID NO: 128048 - DNA, 201 bp, Homo sapiens
gacaatggggaatccattccctcaagcatttatcctttgtgttataaacaatccattgacactcttagttattttaaaatgtacaattacgttattattgrctatagtcaccctgttgtgctttcaaatagtaggtcttattcattcattctattttttttgtactcattaactatccccatctcccctccaaccccccac

SEQ ID NO: 128049 - DNA, 201 bp, Homo sapiens
atggggaatccattccctcaagcatttatcctttgtgttataaacaatccattgacactcttagttattttaaaatgtacaattacgttattattgactayagtcaccctgttgtgctttcaaatagtaggtcttattcattcattctattttttttgtactcattaactatccccatctcccctccaaccccccactacc

SEQ ID NO: 128050 - DNA, 201 bp, Homo sapiens
gtatttattagtagacttggaaagaatagactcatttataataggccaattggcttatctctctaatttacctaggtctaattaggtcctccaataatttrttattttgatttgtgtggattttacatattgttacatttttccctaggtattttgttctgttcaattttgcttttgttgttattatgaatatacctttcc

SEQ ID NO: 128051 - DNA, 201 bp, Homo sapiens
gaacttccttcaaaatctagcagggctaaaacgttgtttggacatagaactgccaccatctcttctcttgggacacgctcctggtagggctgaccaggcaygccgcatggccttggcaccccgtgagtggtactctcaccccctcctcatccttgcctaaagaaaacttgcatacacgtgactgggactggtgactgggac

SEQ ID NO: 128052 - DNA, 201 bp, Homo sapiens
tgctaaccagatttctgcaccactgattgagagcactaagagaaacgcaagattcttatttttatgcaagagagtaaaggtggttattaaggggatgagtrtgaggaaagaggtgatacaggcatgagaaaggtgaggacgatgagcgaagatggatggaagtgcagaagatgcggcgtgtagagacagatgctcccgggg

SEQ ID NO: 128053 - DNA, 201 bp, Homo sapiens
catcttttgatgtcagtcgtccttggtggttctcaggtgcagccagggttgagaacacccgccctatgctaaccagatttctgcaccactgattgagagcrctaagagaaacgcaagattcttatttttatgcaagagagtaaaggtggttattaaggggatgagtatgaggaaagaggtgatacaggcatgagaaaggtg

SEQ ID NO: 128054 - DNA, 201 bp, Homo sapiens
ggattgaaaacatcagctgtaggagaacgtggctggggcctgaggcccaaactggctcctgactttcccagctgagtagttctggggaaacatgactagtrgaattcagacatttgccatctcagcgggcaagtgagctccccttaggcagagcacagggcaagatggcggaggcaggaggaattcttctcgatgcttcaa

SEQ ID NO: 128055 - DNA, 201 bp, Homo sapiens
tggtctccagaactatgagagaataccttttgattgttttaaactgccaagtttgtggtgactgttccctgggaaactaatacagcctggaaggaaatcaktagcagctcaaagagccccatcttttcaggctctcctcttaggcaagggcccatcctgacctctgcccaacgtcctcaatggctgctccttctggtgggc

SEQ ID NO: 128056 - DNA, 201 bp, Homo sapiens
cccacacagtttgcgctttgcgtggtcccagctatgccctctcactactgcctttccatgtatcaaagggggaccacaggatttccagcgtgcttctctcrtcatgcatgaggccaccagagcccatccagagaaacaagtgcccatttttgtgacccgtggagcgtcaatcatggtctttatctggtttacacatttcag

SEQ ID NO: 128057 - DNA, 201 bp, Homo sapiens
gttgcagaatccttgccagaagagacatgacgagcctgggcactgttatgtgaaaggtgttgtggttatggaggcacaggcttcctggctgtgcccacacrgtttgcgctttgcgtggtcccagctatgccctctcactactgcctttccatgtatcaaagggggaccacaggatttccagcgtgcttctctcgtcatgca

SEQ ID NO: 128058 - DNA, 201 bp, Homo sapiens
gatagaatccctacagcaccaattttaaatcttagcattcttgtctttaatctctccgttatattttccatctctgtttttctgtgctacgttttggtcamttacttcaggtctttcagttactttatgctccctttagcaccacctaatctgctgttgatctcagcagatgtccatgactttgtttttcatttccagaag

SEQ ID NO: 128059 - DNA, 201 bp, Homo sapiens
gagaaggtgaggaagacccagctcggcattattgcctttgatgatggaggaaggggccaggaaccaaggaatgtgggtggcctctataagctggaaaaggsaagaaaatgattctcccttagcgcctccacaaaggaatgcagtcttgctgacaacttgattttaacccagtaaacctgcatcagacatctgacctaaggg

SEQ ID NO: 128060 - DNA, 201 bp, Homo sapiens; identical to SEQ ID NO: 21772

SEQ ID NO: 128061 - DNA, 201 bp, Homo sapiens
ctgtcactcaggctggaatgcagtagaatgatcaagcttactgcagccttgaactcttgggctcaagcaagcctcccctctcagcctcctgagcagctagkactacaggcattcaccgctacacacaactaatttttaagtattttgtaaagacagggtcttgctatgttgcccaggctggtctcggactcctaggctcaa

SEQ ID NO: 128062 - DNA, 201 bp, Homo sapiens
acagtttatggagcataatgggtctgacggttctcggattctggtatattttccaaactccggaaagttcctctgcagaaattcctgttttgtaatagcarcatctcctaatttatgatgttagggtggcctttgcttgtggcttaatctctgtttgttccaaatcctagattcttgtccacccagcccccagaaagccat

SEQ ID NO: 128063 - DNA, 201 bp, Homo sapiens
tctgcagaaattcctgttttgtaatagcaacatctcctaatttatgatgttagggtggcctttgcttgtggcttaatctctgtttgttccaaatcctagaytcttgtccacccagcccccagaaagccatatattctggatatctctccttgggctctgtccacctgttggttgtagctcctctttccaggtgaaccatga

SEQ ID NO: 128064 - DNA, 201 bp, Homo sapiens
gctgggattacaggcatgcgccaccacgcctggctaattttgtatttttattagagatggggtttctccatgttggtcaggctggtctcgaactcccgacytcaggtgatccgcccacctcgccctaccaaaatgctggggttacaggtgtgagccaccgtgcccggcctggaattgatttttttaatacatggtgtgagg

SEQ ID NO: 128065 - DNA, 201 bp, Homo sapiens
tacaggcatgcgccaccacgcctggctaattttgtatttttattagagatggggtttctccatgttggtcaggctggtctcgaactcccgacttcaggtgrtccgcccacctcgccctaccaaaatgctggggttacaggtgtgagccaccgtgcccggcctggaattgatttttttaatacatggtgtgaggtgtaggag

SEQ ID NO: 128066 - DNA, 201 bp, Homo sapiens
tcgcccaggctggagtgcagtggtgcgatcttggctcactgcaagctccacctcccgggttcacgccattctcctgcctcagcctccccagtagctgggastgcaggcccccgccaccacgcctggctagttttttgtatttttttagtagagacggggtttcactgtttagccacgatggtctcgatctcctgagctcgt

SEQ ID NO: 128067 - DNA, 201 bp, Homo sapiens
ggtttcactgtttagccacgatggtctcgatctcctgagctcgtgatccgcctgcctcggcctcccaaagtgctgggattacgggcgtgagccactgcgcscagcctgaaatagtttattaataaaatcatttggacatagtactctctctcccttcatagttgttctttggcaactttttctaatttctgattattagct

SEQ ID NO: 128068 - DNA, 201 bp, Homo sapiens
ttgggtgggttgttttaatgcaatcattaatttcttctgtatttgccaagtttatttgttgtggagaatacataatattttaagatctctttgtgtttatrgcctctttttcacagataatgtttttaagttttttatttctctctctgggtttgttttttaatcagtgcttttaaagaactgattttttttttttttgga

SEQ ID NO: 128069 - DNA, 201 bp, Homo sapiens
atgtgcaggtttgttacatatgtatacatgtgccatgttggtgtgctgcacccattaacttgtcatttacattaggtatatatcctaatgttgtccctccsccatccccccaccccacaacaggccccggtgtgtgatgttccccttcctctgtccaagtgttctctttgttcaattcccacctctgagtgagaacatgtg

SEQ ID NO: 128070 - DNA, 201 bp, Homo sapiens
ttgggatagtttgctgagaatgatggtttccagcttcatccatgtccctacaaaggacatgaactcatccttttaatggttgcatagtattccatggtgtmtatgtgccacattttcttaatccagtctatcattgatggacatttgggttggttccaagtctttgctattgtgaatagtgccacaataaacatatgtgtg

SEQ ID NO: 128071 - DNA, 201 bp, Homo sapiens
ggctaatccgaagagtttgattgagttgatggcggcagggaccagatagacaccttggtgattgtctttggccataagaatagaccaaggataggttttcyagagacaccttcatactgtaaacatggtttagacacggtcatagggaaggctgctggtccatcatttgttctgaacaaatggcatttcctgctcctgacc

SEQ ID NO: 128072 - DNA, 201 bp, Homo sapiens
aagatgtccagactccttggtaattaaaggctaagattcaggtttcctccattctccaaacacagcctcttagagtccctactgccacataggagaaattkacatttgctgagtaaccaggatggacatgtcacatactttgtcatcttaaaatatatgtgtgcattaaataggatgtggatgaggaaaccaaggctgtga

SEQ ID NO: 128073 - DNA, 201 bp, Homo sapiens
agtcttgtagccaggattgtagctccttcctacagggaacccaattttagtcagagccatcctaacatattcagcattttagaaccacccttgatgagtcyggcatccctgcaggtaattcagaatcagaccatcctaggtgtgatttttgaaagaaaaatgtcatcaatcccaacatgtacccaccatctgaagcttgaa

SEQ ID NO: 128074 - DNA, 201 bp, Homo sapiens
attggatgaacactgggttaagcatgcggtgtcctctaggcactgcgctctgtgttgcagacacacaggtgaatacatctcaggcttatccctcaagaggscacagtctggtagggtcttcaagcaggtgtatggatgatgataacatagtgaaatgagctctgcttggtaaagcatcacatgacacaggaatcagatgtg

SEQ ID NO: 128075 - DNA, 201 bp, Homo sapiens
gctagtatctcatgacagtttattaacatacctgagcatgtttttcacctctatattctttcccatggtgtgtctgttcattcttgttccagcaacatagmctttattataaagattttagtattgataatgattgtctcttttcattgcttttatactggaagacttttttttcctgtcctcccattgggatagggaatg

SEQ ID NO: 128076 - DNA, 201 bp, Homo sapiens
ccacaaaatagattgatagattcctatatttttctataatgtaaaatgagttgagcagcttttacattatcttttgaaagtttgaagtaacttttttttttaagatggaatctcactctgtcgcccaggctggagtgcagtggtgcgatcttggctcactgcaagctccacctcccgggttcacgccattctcctgcctca

SEQ ID NO: 128077 - DNA, 201 bp, Homo sapiens
gtgaaatttcttagccagatgccctggtctatattcggctaaacataggggccatggagtggcagcctgtgagccaggtctaggctgcatacgcattttgmcttggctcaatggtagataagaaaaacgatttgaacacttttagatggagcatatgatctctagcttgtccctgtccccttgctccctattaccaggcac

SEQ ID NO: 128078 - DNA, 201 bp, Homo sapiens
tctctctgggtttctacctgcttgtacgttcaattacttgttgactgaatcagtgagcagaagactggtttaagtatataaagtacccttgtgtgaccttygttgtccttctgttgagtgttaccctctattgtctttttctttcccaagctcatggcctcttggtggtggtaaaaccgtgtgtaggggtggctcagttct

SEQ ID NO: 128079 - DNA, 201 bp, Homo sapiens
tgactatggtgattggaccagtaagacagcatatgagctacattggcccaatagagtccttccctgggatttagaaatactgtataaggcataagcccagrtgagtggccaggtgccatattctcagctgcatggaagaagcctgtcttcagcaggaaagataccagcatgcagaaagaaggagagagtaagagaggctat

SEQ ID NO: 128080 - DNA, 201 bp, Homo sapiens
tggacctccaggccctcagtctttgcctgcttttgctttttcaggccaatgagatgctgttctgtgggcggaagctcaccgcccaggaggcctgcagcagrgggctggtgtcgcaggtcttctggcccaccacgttcagccaggaggtcatgctgcgggtcaaggagatggcatcctgcagtgccgtggtgagttcctgcg

SEQ ID NO: 128081 - DNA, 201 bp, Homo sapiens
caggggcatgccaccatgcccagctaatttttgcatttttagtagagatggggtttcatcactttggccagtctggtcacgaactcctgacctcaagtgargcacccacctcggcctcccaaagtgctgggattacaggcgtgagccaccacacccggcgactaataaatattttataccttaacttcatccccctgcttt

SEQ ID NO: 128082 - DNA, 201 bp, Homo sapiens
gtggggaagatgtctgcggggtttgccagaggtcttcacagcagaccctcccatcacaggcctggaggcctaggggaaaatggttttgtaggctgggcccrgggtcctgttgctgtgtgcagcctagggacttggtgccctgtgtcccagctgctccagccatggctgaaaggggccaacatacagcttgggccatggctt

SEQ ID NO: 128083 - DNA, 201 bp, Homo sapiens
tgttttggttactatagacttgtagtatagtttgaagtcataatttgaatcatgggggcagtttcccccatactgttctcatggtagtgaataagtatcaygagatctgatggttttatcaggggtttccgcctttgcatcttcctcattttctcttgccactgccatgtgagatgtgcctttcgcatgctgccatgattc

SEQ ID NO: 128084 - DNA, 201 bp, Homo sapiens
aatggttctcccagctggaaagcagaagtggcagttcccttggggagacagggctggggaattcaagtaccatcaggtctctctctctttctcttaatctytctctctctctctctcttcccctatttctcctttccttgtagccccacctctccacaggccgggacacagccatggatggtccttgggctcactgatgtt

SEQ ID NO: 128085 - DNA, 201 bp, Homo sapiens
tctagagtgggttgtttgttaattttatgggtctttaccagggacaccctacctccacccaagaatccccctttctctctgaatccttaggcttctggatratacccctaagttctctcttcaaagagggcactgcagggtatggtgtctgaggggtggccaggagcctttccgtatgaatgggggcctcgccttgtaact

SEQ ID NO: 128086 - DNA, 201 bp, Homo sapiens
gttatttctgcaaattttggttgaaatgcttacagactttaatacagtatatattttcaaaatataaacttttatatttctgtgataagttaggatatgcrttttaggcaatatttttcattaatatcacttgttcttttgaaaaatagcatactggtttggtgccaattttttcattagaatataatgctcttatattgt

SEQ ID NO: 128087 - DNA, 201 bp, Homo sapiens
tagtaatgtacttctcacatacatgaacctaaaatagatgtcaccatcagcctgtggctgtcttcccattggtgactcaggaacctagacttcttccatcytgtggctcggcaaatgtcttccaagactgctgtgcccatcaagatgaatgggcttggaggacgccatggtgggaggtttgatgtgcacctggaagtggta

SEQ ID NO: 128088 - DNA, 201 bp, Homo sapiens
tgcgtctctggactcttgagaaccaaattcatggagaaagaggtgtcagaggcagatgggattgaaaacatcagctgtaggagaacgtggctggggcctgaggcccaaactggctcctgactttcccagctgagtagttctggggaaacatgactagtggaattcagacatttgccatctcagcgggcaagtgagctcccc

SEQ ID NO: 128089 - DNA, 201 bp, Homo sapiens
ttttagttttttgaggaaccatccaactgttttgcatagtggttgtactaatttacattcccaccaacagtgtgtgagagttcccttttctccacatcctstcctgcatttgttactgcctgtcttgtgggtataagccattttacataaaatgcggtgagatgatatctcattgtagttttgatttgcatttctttgatg

SEQ ID NO: 128090 - DNA, 201 bp, Homo sapiens
tagcattcttgtctttaatctctccgttatattttccatctctgtttttctgtgctacgttttggtcaattacttcaggtctttcagttactttatgctcyctttagcaccacctaatctgctgttgatctcagcagatgtccatgactttgtttttcatttccagaagtttctttttctcctcaaatctattttttcccc

SEQ ID NO: 128091 - DNA, 201 bp, Homo sapiens
ttgttttggtttttagatcccacaaataagtgaaatcaggtaatgcctgtctttttgtgcctggcttctttcactcagcagaatgacctccagttccatcygtgttgttgcagatgacaggatttcatttttttatggctgagtagtactccattgtgtataagtaccacattttctttatccatttgtctgttgttggat

SEQ ID NO: 128092 - DNA, 201 bp, Homo sapiens
ggaaactagtggatctttcatcaattctgttaaattctcatcctttatctctttcaatattgactttctcctcttctctgtgatctcctgatagaatcccyacagcaccaattttaaatcttagcattcttgtctttaatctctccgttatattttccatctctgtttttctgtgctacgttttggtcaattacttcaggt

SEQ ID NO: 128093 - DNA, 201 bp, Homo sapiens
aacccagtaaacctgcatcagacatctgacctaagggactataagataataagtttatgttattttatgctgccaaatttatagtaattttttacagcagycataggaaactagtggatctttcatcaattctgttaaattctcatcctttatctctttcaatattgactttctcctcttctctgtgatctcctgatagaa

SEQ ID NO: 128094 - DNA, 201 bp, Homo sapiens
tacaaagttagttaggcagctggcctgcagcctccagatggtaacaaggtagagccagaattgtggtcctctttcttcctttcctttcctttcttttcctttcctttcctttcctttcctttcctttcctttcctttcctttcctttcctttcctttcctttcctttcctttcctttcctttccttttccttttcctttgc

SEQ ID NO: 128095 - DNA, 201 bp, Homo sapiens
ttacaaagttagttaggcagctggcctgcagcctccagatggtaacaaggtagagccagaattgtggtcctctttcttcctttcctttcctttcttttcctttcctttcctttcctttcctttcctttcctttcctttcctttcctttcctttcctttcctttcctttcctttcctttcctttccttttccttttcctttg

SEQ ID NO: 128096 - DNA, 201 bp, Homo sapiens
tttacaaagttagttaggcagctggcctgcagcctccagatggtaacaaggtagagccagaattgtggtcctctttcttcctttcctttcctttcttttcctttcctttcctttcctttcctttcctttcctttcctttcctttcctttcctttcctttcctttcctttcctttcctttcctttccttttccttttccttt

SEQ ID NO: 128097 - DNA, 201 bp, Homo sapiens
gattctcccacctcttgaaagttattttaaattattccctctgggcaggcatcagcttattttcaagtaggcttttatgtcaggtcattccttagtgcatragataatttcttcaggggcttaagctgtcctagtaaggagttgatacggctccttgcagcctggccaattgctaagaagtggttcaggcctggtgattat

SEQ ID NO: 128098 - DNA, 201 bp, Homo sapiens
attctcccacctcttgaaagttattttaaattattccctctgggcaggcatcagcttattttcaagtaggcttttatgtcaggtcattccttagtgcatgwgataatttcttcaggggcttaagctgtcctagtaaggagttgatacggctccttgcagcctggccaattgctaagaagtggttcaggcctggtgattatt

SEQ ID NO: 128099 - DNA, 201 bp, Homo sapiens
taataatgacaataacagcaattgcaccaacaacagatatttattaagcccttgctatgagtcaggtgttggtgggctaaggatgttacatttagcagctstgttaatcctgacaattctatgaagtaggttgtctttttatccctggtttgcacataaagaaatggaggctttacaaagttagttaggcagctggcctgc

SEQ ID NO: 128100 - DNA, 201 bp, Homo sapiens
caggaggtcatgctgcgggtcaaggagatggcatcctgcagtgccgtggtgagttcctgcgcctcctgcgtgcttgtccttttgatagacccattttacasatgaagacagcaaggctcagagggcttcactgacttgctagaggtcgcacagggaataagcaaaagaccctttgcaatttaacaaatgccttttctcagt

SEQ ID NO: 128101 - DNA, 201 bp, Homo sapiens
gcatcctgcagtgccgtggtgagttcctgcgcctcctgcgtgcttgtccttttgatagacccattttacacatgaagacagcaaggctcagagggcttcaytgacttgctagaggtcgcacagggaataagcaaaagaccctttgcaatttaacaaatgccttttctcagtattgacagcttcaatcagagggagacagtc

SEQ ID NO: 128102 - DNA, 201 bp, Homo sapiens
ttttccccagcagtgtttgtggggcgtgtgcagcagttctacactgctcttgattctgagtcttctctgataatgagtactggctttgtggtccggggccsatctgcctcagtatctcttggggagcttgttaaaacgggctgtatcccagttgaatgaatcaggatctcagggggctggaggggtgggttctgcacgttc

SEQ ID NO: 128103 - DNA, 201 bp, Homo sapiens
tgccttccagaactgggatggttgcaggtggcaagccctggaccagctgagggacatgggtggacctccaggccctcagtctttgcctgcttttgcttttycaggccaatgagatgctgttctgtgggcggaagctcaccgcccaggaggcctgcagcagggggctggtgtcgcaggtcttctggcccaccacgttcagcc

SEQ ID NO: 128104 - DNA, 201 bp, Homo sapiens
atgtcatgtggttgatggagctgaggtggcaacagtatcagagaggcttacaggagacccacagcagggaggctgtcttgacaggcacggaccctcttttwttaaaaacgtccagcagaggcggaatgatgcatcgttggaatgttatggagggaattctgcaccgagtggaagatacggtcccatgagtcctaaagtcct

SEQ ID NO: 128105 - DNA, 201 bp, Homo sapiens
tcttccactttgcatcctgcgtgttcagaggaggagaaagcttttgcgtatgggaaatgtcaactcttttattaacttcaagtgttaataaaaacaggackctctgttaagcactcaaagcagtccccacctttgccccctcccaggtgtgcatgcagccctccacaagctgtcaacgtctgcttccctgcctgggagatt

SEQ ID NO: 128106 - DNA, 201 bp, Homo sapiens
gctcccctgcaagagcttgctgtctttaggtactcttgctgagaaatctgagcaatccgtgttgaggctcctctttctccagagagaggaatttcacccamacaggatttacttagcatctttgccccagactgactcacgtttccgtctcgggatccctgacgctgacgtgactgtgcctgtgaacatatgtaaaagctg

SEQ ID NO: 128107 - DNA, 201 bp, Homo sapiens; identical to SEQ ID NO: 21775

SEQ ID NO: 128108 - DNA, 201 bp, Homo sapiens
acagcagagaaccaggagatgaacagaaatgccccttaaggaaagagtcagtgaaacagatgacacagtctccttgattgaaagcttatccacttccccaytgggagaagactccaggtcttccttcagtgcccttggcctcagcccacaatcctaccactactctcaggaacacagcagacatgcaggagtcccttttca

SEQ ID NO: 128109 - DNA, 201 bp, Homo sapiens
gtagtatgtgagggttctaggttctctgtatcctcgataacacttgttacgtctgtcttttttattatagcaatactagtgcatgtgaggtggtatctcaytgtggctttggtttgcatttccctgatgactagtcatgttgagcatcttttcatgagtgcattggtcatttatctcttctttctattcacatcctttgcc

SEQ ID NO: 128110 - DNA, 201 bp, Homo sapiens
gaaagtctttattcccccttcatgtttgaaggagattttcaccagatatactatactagggtaaaagtttttttgttttgttttgttttgttttttgtttytctcctttagcactttaaatatgtcatgccattctctcctggcctgtaaggtttccactgaaaagtttgctgccatatgtattaaagctcctacattgtg

SEQ ID NO: 128111 - DNA, 201 bp, Homo sapiens
cactttggccagtctggtcacgaactcctgacctcaagtgaagcacccacctcggcctcccaaagtgctgggattacaggcgtgagccaccacacccggcsactaataaatattttataccttaacttcatccccctgcttttcaacttctgtttctatttatatcttattgtactatgtcttgaagagttgttgtagtta

SEQ ID NO: 128112 - DNA, 201 bp, Homo sapiens
ctttacaaagttagttaggcagctggcctgcagcctccagatggtaacaaggtagagccagaattgtggtcctctttcttcctttcctttcctttcttttcctttcctttcctttcctttcctttcctttcctttcctttcctttcctttcctttcctttcctttcctttcctttcctttcctttccttttccttttcctt

SEQ ID NO: 128113 - DNA, 201 bp, Homo sapiens
gattttggaattgcctgggccctgtaacccctttgttttggccaatttctcccatttggaatagctgtatttacccaatacctgtaccccccttgtgtctrggaagtaactagcttgcttttgattttacaggcttataggcagaagggacttactttgtctcagatgagactttgcactgtggacttttgggttaatgct

SEQ ID NO: 128114 - DNA, 201 bp, Homo sapiens
gctttacaaagttagttaggcagctggcctgcagcctccagatggtaacaaggtagagccagaattgtggtcctctttcttcctttcctttcctttcttttcctttcctttcctttcctttcctttcctttcctttcctttcctttcctttcctttcctttcctttcctttcctttcctttcctttccttttccttttcct

SEQ ID NO: 128115 - DNA, 201 bp, Homo sapiens
tggtggcattttgcccctgccttagagatttgtggaactttgaacttgagagagatgatttagtgtgtctcgtgaaagaaatttctaagcagcaaagcatycaagaggtgacttgggtgctgttaaaagcattcagttttaaaagggaaacagagcataaaagtttggaaaatttgtagcctgacaatgtgatagacaaga

SEQ ID NO: 128116 - DNA, 201 bp, Homo sapiens
cacaactctgcaagtcacactaaaaatcactgaattgtgcactttatatgggtgaattttatagtatgtaaaataaatctcagtaaagctgtttttgtttwaaaaaaaaggagaagaaaaagaagctagcaagtaggatgaaaaataacagctaccgtttccctactgcttgccatgtgcaagggagccttctaaatgctc

SEQ ID NO: 128117 - DNA, 201 bp, Homo sapiens
ttttgtttttttttaattatactttaagttctagggtacatgtacacaacgtgcaggtttgttacatatgtatacatgcgccatgttggtgtgctgcaccyattaactcatcatttacattaggtatatctcctaatgccatccctcccccctcccccctccccccaccccatgacaggccccggtgtgtgatgttcccct

SEQ ID NO: 128118 - DNA, 201 bp, Homo sapiens
tagccagttttcccagcaccatttattaaatagggaatcctttccccatttcttgtttttctcaggtttgtcaaagatcagatagttgtagatatgcaacrttatttctgagggctctgttctgttccattgatctatatctctgttttggtaccagtaccatgctgttttggttactgtagccttgtagtatagtttgaa

SEQ ID NO: 128119 - DNA, 201 bp, Homo sapiens
tgggaattctgtgcacttcttttccttctttctttcattcctgtcttccttttagtgaaggtgatttttgtctggttatgatttagtttattgtttgttawtttttttgtattcattatatattttttggcttgagtgatatagtttggctctctgtccccatccaaatctcatcttgaattgtattcccataattcccac

SEQ ID NO: 128120 - DNA, 201 bp, Homo sapiens
ttctcccattttgtgggttgcctgttcactctgatggtagtttcttttgctgtacagaagctctttagtttaattagatcccatttgtcaattttggcttktgttgccattgcttttggtgttttagacatgaaggccttgcccgtgcctatgtcctgaatagtaatgcctaggttttcttctagggtttttatggtttta

SEQ ID NO: 128121 - DNA, 201 bp, Homo sapiens
cccaatgttttcttgtagtaggttcatagtttgaggtctcagatttaagtcttttcaattttgatttgatttttatatatggcaggagataggataggggyctagtttcattcttctgaatatggatattcagtttttctagcaccatttattgaagaagctatctttccccagtgtatgttcttgacacctttgtctaaa

SEQ ID NO: 128122 - DNA, 201 bp, Homo sapiens
ccaagccctgattactgacagagacattttgtgactgggggagggtcaggagtgcttggtggtacaggatgtacttctttgacaccctccttgtttgtttrtttatttatttatttatatatttttattattatactttaagttttagggtacatgtgtacaatgtgcaggttagttacatatgtatacatgtgacatgct

SEQ ID NO: 128123 - DNA, 201 bp, Homo sapiens
tttgggtacagaggagggcctttggcctctctatgccaggggagggccagggttggacagcaggtagccaaggcaggtcccaacaatgtctttggtacccycttgggctgattctgttgtcatcatccctgtgtggacagacacgggctgtgaacaaggcacttcctgtcttcatgactacatagtgtgaagcttggtggc

SEQ ID NO: 128124 - DNA, 201 bp, Homo sapiens
ctgatatgatgctcttccttcttatccatctcatctgtctgttcatccatccatccgtctgtccatccatccatccatccatccatccatccatccatccatcacctctatcgtgagtacaaattcaaggattcttactttatgtgacagtttataatctattactgccattatttattttactattgaaaacatccaaga

SEQ ID NO: 128125 - DNA, 201 bp, Homo sapiens
gtgactgttctgtttgaagtaaatccattcccgctgccgttgtttctcacagcaccttcctctttgccatcagagtacgagtccttttttatttctatttwtttttttattttttttttatttttgagacagagtcttgctctgtctcctaggctagagtgcagtggtgcgatctcgcctcactgtaacctccgcctcctg

SEQ ID NO: 128126 - DNA, 201 bp, Homo sapiens
actattcacgacaacattggtaacaacaatccctggcatttattaagcacgtaataggcccaggccttgtgtctagatttattaagcacgtgataggtccmggccttgtgtctagtcctttgcatgcgatatcttcttaaatccttcccctaaccctatgaggtataggtatttttattctccttttaataatgagaattc

SEQ ID NO: 128127 - DNA, 201 bp, Homo sapiens
tccagaggcatcacagagcaatgctatcattgtggtattttgctaccaaaagctaaatctagggcagaaatcacctcttgctccaggttgataacttgcgmactgtcatctctttgtggtagtagtaataacaacaataattataacagctgacgtttactcactgtgttcctacagtacacagccatcatttgaagtgtt

SEQ ID NO: 128128 - DNA, 201 bp, Homo sapiens
cattgtagagatctttcatctccttggttaaatttattcctaggtattttatgtttttgtagctactgtaaatgggatttctttttcagctagtttgttaygattgtatagaaatgtgacttttttgttgattttgtatcctgcaactttactgaatcatcagttctaagaggtttttggtggagtctttagatttatata

SEQ ID NO: 128129 - DNA, 201 bp, Homo sapiens
actgtttttatattctttttagggatgaggaattgaaggcacagaaaggtctggtggctttctcaaggccacacagctagtaagtgtcaggctgggattakgtactgcgggcactcttgattccagtctactggactgcttgttgctgtgggtatttgagtatttatgtgtttcttttggctcctgtttgcatggtcactg

SEQ ID NO: 128130 - DNA, 201 bp, Homo sapiens
agttaacgtttgcaattcggtgtttttttggttgttttttggaatgtgctcatttttccccatgatatgttccagttggtcatttttaaaaacagaaatcraattaatttaaaaaatatttttattgatttttaaatggaatagatactatgtaaataatgttcattgaaaaaaagctttacagaagaatttgaatagaaa

SEQ ID NO: 128131 - DNA, 201 bp, Homo sapiens
ggttggctggtgtcatggacagcacatgggatttggagttagaaggtctcagttaaaaaccctcaggcccctgcattctagctgggggaccctcgggcagkttgcttgaacctctcaccttgattggtttgttgaacttgcagggtgctagcagcacctgcccccagcgtgggggagtggttttgcagattaaagtgttgt

SEQ ID NO: 128132 - DNA, 201 bp, Homo sapiens
tgggggctaatgccaatcccgcttcactgggatgtaggtgagacctgtggctacacaagttttaagaaacatctctcctgacccattcatacaccccagttccaggttgaagtgctgctacttctgttagagctgatgaatcactgcagacagctgtggggctttttgtctgtggttccttgagatttagactgcaaataa

SEQ ID NO: 128133 - DNA, 201 bp, Homo sapiens
tattttccccataatgtttttttaaaacctagattatgacactttttgatatatgaaaatttaaaatgtttaataaaagcttttatgtttttctgtaagcytagaccttgtctgtctctaaatcacaagtgtgtgtgtgcattttttttttacatttaattcttgaggtaaattggattcatgttggttaatgatataagg

SEQ ID NO: 128134 - DNA, 201 bp, Homo sapiens
tggttccagagctgagagaggcattttgggagattgaggctctaggactcgctctgtgcttgagaaacagggagctgctgcgtgcatttttggggccagamccttgcccctcccttccttgtctccctgtgcctgtgttcacacccggctgtcatgcttctcatccctgactgttggcacctactgtgtttaagtctttct

SEQ ID NO: 128135 - DNA, 201 bp, Homo sapiens
atgctatagtcacctgttcaagaggatcttctttctctcccagggactttgtgaaggcctttatccagtttaagaagcctatcgtggtggccatcaatggkccggccctgggcctgggtgcctccatcctgcccctctgtgacatcgtgtgggccagtgagaaggcctggttccagacgccctacgccaccatccgcctca

SEQ ID NO: 128136 - DNA, 201 bp, Homo sapiens
caagatatgggtgaatgtgacgtgaatcacgctacactggcggagaacgggctcggtttgtagcttttctttctcttgggtttggctctggccatggcgamaggggagctctgcctgtagcctagggacatacataagacccccacctccatccccgtctcttagctagccagcaattcccccttcatctctctcacctag

SEQ ID NO: 128137 - DNA, 201 bp, Homo sapiens
tgggccggccctgggcctgggtgcctccatcctgcccctctgtgacatcgtgtgggccagtgagaaggcctggttccagacgccctacgccaccatccgcytcacgcctgctggctgctcctcctacaccttcccccagatcctgggcgtcgcgctggtaagcctcctgtgatacctggattcgggtcccagcaggatcct

SEQ ID NO: 128138 - DNA, 201 bp, Homo sapiens
acatccttctaggatcgtggtccatttcagtttcttacattgtttatctggttttggaaggctctgctctgaccaacgggggattgaacctgcacagtccrgtgaagaggaagctggaagcggagaaggactacgtctttgacaaaaggctcagatacagtgtccgccagaatgaaagcaactgtcggtttcgagacatcg

SEQ ID NO: 128139 - DNA, 201 bp, Homo sapiens
ctcccgagtcttctcttctatggggactgaatcctccagccaagaataattttccctcctgtgaactcaaccctttgtatgttggaagcttagggcaccargtatgctcatgagtagggccgtagtctgtctcctggcatggattataaaattgaagagtgcatggactgtggttaatccatccttgaattccagctccta

SEQ ID NO: 128140 - DNA, 201 bp, Homo sapiens
ttctagactagattcccagaggcaggattatactgctaattttaccatatccttctaactccatccaaaaaagaataataaccagtgaggcataattttcyagttttgtcattgccttgccagacgtgtgtgtttaaggggaacaagaggagcctcggtatcgtttatttgcatttctttagtctccactgaagctgagct

SEQ ID NO: 128141 - DNA, 201 bp, Homo sapiens
gtagtctgtctcctggcatggattataaaattgaagagtgcatggactgtggttaatccatccttgaattccagctcctagccctgtacaaagaaggagcrcagtatcttggagagtcagtgtggtgttttgaaaagggcctggttttcggatgtctgtcagtttcttcctctgtaaccttgggcaactttgactttttgg

SEQ ID NO: 128142 - DNA, 201 bp, Homo sapiens
aactccatccaaaaaagaataataaccagtgaggcataattttctagttttgtcattgccttgccagacgtgtgtgtttaaggggaacaagaggagcctcrgtatcgtttatttgcatttctttagtctccactgaagctgagctttttctctgcatgctcaagtactctttgtaacttcctctttgtggctggttcactc

SEQ ID NO: 128143 - DNA, 201 bp, Homo sapiens
gggatggatactcctgagcaaaataccctcaacttttaaagagttgtcagcagagaacagtgtccttgctctgtagacgagcataccctcctttctagagyatttcctgttggagtcaaatgacactgatgacaaggtttgtcagaggcatttgtgagaataggttgtttttgctctacctggtcattggatactacatgg

SEQ ID NO: 128144 - DNA, 201 bp, Homo sapiens
ttttgagattggggagaattcagatacacagggaagaggtatggtatggcaaaggaggagagcccagagcatgtttgctggttggtgagaagatgcgtttrgggcaggggctggtgtgcttagggaaagacttgggcgacagctgaaagacaggctggggccaggtgcaggaggggcctgggtggcagggaaccccctgtt

SEQ ID NO: 128145 - DNA, 201 bp, Homo sapiens
tcagaattggggtctgggtggccttgttttctcctgggcaacccaaggtacagatacttgtttgtctcaattctaagttgttggctaggccccatgtgatrgaagcaggaactgcctgcagagctgaaaattatctagtgattctcaaaatttagtgcacacaaatgacgaggggtcttgttaaaatgaacccctattcct

SEQ ID NO: 128146 - DNA, 201 bp, Homo sapiens
gccaggagcctttccgtatgaatgggggcctcgccttgtaactcacacctgccagggagtagcttccagtggatctgaatccaggttcattggagcagatrtggccatttgccccttctcccagcgaacttctgctgagttcatttgactgaggtgttcttcagaaagtatcaagtcctccatttgtgttcaaatcttgaa

SEQ ID NO: 128147 - DNA, 201 bp, Homo sapiens
gctgatatgatgctcttccttcttatccatctcatctgtctgttcatccatccatccgtctgtccatccatccatccatccatccatccatccatccatccatcacctctatcgtgagtacaaattcaaggattcttactttatgtgacagtttataatctattactgccattatttattttactattgaaaacatccaag

SEQ ID NO: 128148 - DNA, 201 bp, Homo sapiens
agctgatatgatgctcttccttcttatccatctcatctgtctgttcatccatccatccgtctgtccatccatccatccatccatccatccatccatccatccatcacctctatcgtgagtacaaattcaaggattcttactttatgtgacagtttataatctattactgccattatttattttactattgaaaacatccaa

SEQ ID NO: 128149 - DNA, 201 bp, Homo sapiens
tagctgatatgatgctcttccttcttatccatctcatctgtctgttcatccatccatccgtctgtccatccatccatccatccatccatccatccatccatccatcacctctatcgtgagtacaaattcaaggattcttactttatgtgacagtttataatctattactgccattatttattttactattgaaaacatcca

SEQ ID NO: 128150 - DNA, 201 bp, Homo sapiens
tgtctttcaatgaaaaatgagatggctgtctacctctgtcttgttttcttctaagtttttatagttttgtgtgtgtgtgtgtgtgtgtgtgtgtgtgtgtkttttaggccttctgactcttggaacctcttggaattaattttcagaaaacccccaaactctgattcctctactgtgaagtgggggtttgtttctcactcc

SEQ ID NO: 128151 - DNA, 201 bp, Homo sapiens
actagctgatatgatgctcttccttcttatccatctcatctgtctgttcatccatccatccgtctgtccatccatccatccatccatccatccatccatccatccatcacctctatcgtgagtacaaattcaaggattcttactttatgtgacagtttataatctattactgccattatttattttactattgaaaacatc

SEQ ID NO: 128152 - DNA, 201 bp, Homo sapiens
cacaagtgtggtccagaacacactcgcttggtgaactgggggagctcatgggtgtttgaggaagtgtgtgtgtgtgtgtgtgtgtgtgtgtgtgtgtgtgkctgtttattcctgcatggctcagtttacttaggtgcagctttagctttctgcattcatctagtgcttctcgtggacgaaattgtgcacaagaaaatgcaa

SEQ ID NO: 128153 - DNA, 201 bp, Homo sapiens
aaatgacattcctggccaagggaacagaggaagtaatggctcagagggtggaaaactcagtttcggagaacctcagacagtcctggaagttaaggtgtttwtggggcaagagtgggagttaaggccagaaaacaggatgaggccagacgatggaggcatgtgaacttttgagcaggggagttgcaagaaaaggtgataaaa

SEQ ID NO: 128154 - DNA, 201 bp, Homo sapiens
catacttgcaaacttctcacagtgactgtactttgattttgtcattcataaaatggagcttcaacaagtgactcccccagaaggctaagtgagttcatatygtaaagcagcacttctcaaacaataacatgcatatgaatttcctgcaggtcccatgaacatgaagaaactcatcctgtcggtctgggctggggtccaaga

SEQ ID NO: 128155 - DNA, 201 bp, Homo sapiens
gcacaagtgtggtccagaacacactcgcttggtgaactgggggagctcatgggtgtttgaggaagtgtgtgtgtgtgtgtgtgtgtgtgtgtgtgtgtgtgtctgtttattcctgcatggctcagtttacttaggtgcagctttagctttctgcattcatctagtgcttctcgtggacgaaattgtgcacaagaaaatgca

SEQ ID NO: 128156 - DNA, 201 bp, Homo sapiens
ccagcatttactgagcccttgctaagccaaaccctcttgctagcactggcagttcctcagttaatcctagcagggagggtcattacccttcccatttcacrgatatggaaactgaggtatatgcaggtgaaatagcttgcctacagtctattagtcagtaggtggctgttccaggattcagatctagttgtcctggcttga

SEQ ID NO: 128157 - DNA, 201 bp, Homo sapiens
gggcatcacagagctcatttcctgctgctcccgtagccacactgctatcatgtggaggtcttcagatgaaaagccctgatgctttgagaggcagcctagcytgcggtgaaggacatggtccccaaagtctgacttcctgagtcctagtctagctccaccccatacttgcaaacttctcacagtgactgtactttgattttg

SEQ ID NO: 128158 - DNA, 201 bp, Homo sapiens
taagtaaaagccactataccagaaaggaaactcaagcaaatccatcctctgcaaaagtgttaacatctctgtgagttcaacatcctgtggaacagcagtcyacatggggtacttacacactggtaggtacaagcagacttggtctgggggcatggatagatttgtgaggctcaatttcaagatcctcagttttcctacagg

SEQ ID NO: 128159 - DNA, 201 bp, Homo sapiens
tggggttgtgaaataggtttttctgaaagttgtgcacaagtgtggtccagaacacactcgcttggtgaactgggggagctcatgggtgtttgaggaagtgtgtgtgtgtgtgtgtgtgtgtgtgtgtgtgtgtgtctgtttattcctgcatggctcagtttacttaggtgcagctttagctttctgcattcatctagtgct

SEQ ID NO: 128160 - DNA, 201 bp, Homo sapiens
ctagtattgtatacctagaagcaggtctcagcatgcctcgttctgggggtatgatgagtaaggcaagacacagtttagggaagaaaacaaacaaatggggwaatgacaaatacattgacaatctccataccatgtcaaaatagccagcatttactgagcccttgctaagccaaaccctcttgctagcactggcagttcctc

SEQ ID NO: 128161 - DNA, 201 bp, Homo sapiens
cagaagcctctaagaagaattttctgttataggccagcaggtgaccattgagaggtagttatatgcatacagtatattctgtttaagaaggaaacagaatstggactaatttcggaacattttactttaaatgaaccagttacattattaaatttggggtctttcaagaaggtagaatcttagccatctgtccaaattgaa

SEQ ID NO: 128162 - DNA, 201 bp, Homo sapiens
aacgagaacagacaaatgagaacatgttcgttaaagggctctgaaacagtgtgaattataaatgtattgatggtggggatgtgtcaccatttgcagttagrttcaggagctgatgaacaacccacgagatggaggtttgcacacagtggccttgggcctgtggccagctgtgacagctgggagttccacagtctcaaggtc

SEQ ID NO: 128163 - DNA, 201 bp, Homo sapiens
gtggggttgtgaaataggtttttctgaaagttgtgcacaagtgtggtccagaacacactcgcttggtgaactgggggagctcatgggtgtttgaggaagtgtgtgtgtgtgtgtgtgtgtgtgtgtgtgtgtgtgtctgtttattcctgcatggctcagtttacttaggtgcagctttagctttctgcattcatctagtgc

SEQ ID NO: 128164 - DNA, 201 bp, Homo sapiens
atgaaatatttattaaatgactgctgtgagctagtattgtatacctagaagcaggtctcagcatgcctcgttctgggggtatgatgagtaaggcaagacasagtttagggaagaaaacaaacaaatggggaaatgacaaatacattgacaatctccataccatgtcaaaatagccagcatttactgagcccttgctaagcc

SEQ ID NO: 128165 - DNA, 201 bp, Homo sapiens
ggtcactggcctatgtcataaaaggctggttactgaggacaagctgggaaggtgacccttagtccagcggatggagccacctggggtgaggagtaattacytgcttgaggcccctgagctactaagtgcagacccgagtctctgtgattcctaagtgcctgccttgccctgctctctctagccttggatgtggacaggctg

SEQ ID NO: 128166 - DNA, 201 bp, Homo sapiens
tatacacacacatctatatacacacatctatacacacacatctatatacacacatatatatacacacatatatatacacacatatatacacacatatatayacatacatatatatatgtgtatacacatatatatacacacacatatatatgggtgtccttctcccctgtcggttggataatggataattcagggtcccgt

SEQ ID NO: 128167 - DNA, 201 bp, Homo sapiens
gcattgagtgctgaggatacagcccaactcatattcctgtgggaagaactgaggaaagagccaaatattccagtgaactgtgagcaggtacggcagtgccstacatgaacgtggataccaccgaagcaaggagattatagacgcagcttccacctgaaggatgcatggagcttgatcaggcaaagaggagaggggagagtg

SEQ ID NO: 128168 - DNA, 201 bp, Homo sapiens
agtatcaaggaagaagttaaggttgggagataaatgtggcttttgtgatgatttgacgcagggcaccttcatggaattgatgaaggaaacagaggaggaarctcagtgctcagggatcactgggaagcctttgaatggaggggcatcaacagcatcatagcctgggaggaccaaggattgtcagtcattggaccatatcgt

SEQ ID NO: 128169 - DNA, 201 bp, Homo sapiens
ctctggacattattttaaaacatacgcaaatttaattgcattcagttaaatcacagtgagcagtggtttggagatatatatatatatatatatatatatayacacacagacacaaagacacatatatatacacacatgtatatacacatatatgtacacacatatatatacacatatatacacatatatacacatatatat

SEQ ID NO: 128170 - DNA, 201 bp, Homo sapiens
ggggcatcaacagcatcatagcctgggaggaccaaggattgtcagtcattggaccatatcgtggtggcaggtccattatgacttctagctttaaattgaaracaccgtagcagcaggttacaaaattaggaaccagttctagagggaatgtgtaatagtatgtggcagtgatccattcaacacctgcatttcctagaatgc

SEQ ID NO: 128171 - DNA, 201 bp, Homo sapiens
gtggtatatctaggtccctaaaatgttcttctttttttctttactttttcctctcctctcttctcctctcttctctttttgttttctaaagttacaaatasgtgagttgtaaaaaattcaaacagtatggaaaatataagcatttaattttaattttatttttaaattattattattatttgagatggtgtctgactctgt

SEQ ID NO: 128172 - DNA, 201 bp, Homo sapiens
tgttgtcctcatggctcatggatctgtcttaactatctcaacctcgtgcctatggaaagtgttcctcaaaaacttcatggtacagacacaaagatgattaygaccccgaagtcctactccatgtagcgtggctaccatggttctaacttgaaatctccttgcctttccccggcccccaaccaggaatatgcaacaagattt

SEQ ID NO: 128173 - DNA, 201 bp, Homo sapiens
agatgtgaggcgcagccgacatggagagcagccagggaccagcaatgttgtgacattgacgaatagaccaggagagacttgtaagggtacacaaaggacascaggcagggatagtttgcactgggggtcttatgcatggtctccaggtgatccagtggctacgtttcagggactctctggacattattttaaaacatacgc

SEQ ID NO: 128174 - DNA, 201 bp, Homo sapiens
ctcaacctcgtgcctatggaaagtgttcctcaaaaacttcatggtacagacacaaagatgattatgaccccgaagtcctactccatgtagcgtggctaccrtggttctaacttgaaatctccttgcctttccccggcccccaaccaggaatatgcaacaagatttatatattggccaaataaagtctctgggtaactctat

SEQ ID NO: 128175 - DNA, 201 bp, Homo sapiens
ggaggtaaaattgcaaatcttggaagtggaggtaaggatgagggccctctggttgtcagaatggctcctcgccttggataactggattagttggggtattrttggtggttatggtcttccagagccctcaatcattgttgactatggtgggatcatgactccgggtcccacaaggattcctgtatcctcaggccagtgcca

SEQ ID NO: 128176 - DNA, 201 bp, Homo sapiens
tgacagttgcatcactgcattactttatctttagagcacctatgggcagcttcctttgtggtgacaactgctttacttgagtttattgagaaagcacttgmgaagaggcacatccaagatacttcatttcctcttgctcaggcatttctccatcttggcatagtgatgatgtccccagggcaaggggacttaaaaactgca

SEQ ID NO: 128177 - DNA, 201 bp, Homo sapiens
tgggttcaacttttggctcttagggtgagcactttaattctcacagcctcagtttccacacctgtaaattaggtatgatagtcctaacctccccttcagtrggttgatgtgaggattaaatgggattgtgcacataaggtaatagttcagttttaactattatgtgagtttgccatccatctttaaacaagtaatgaattt

SEQ ID NO: 128178 - DNA, 201 bp, Homo sapiens
ctttccaacacgatgactaaaagggcctccaaacttgagtgtaactttttatgcaagggacataccatatgtcaccgaacccaagataagaggtcccactragacagaaaactgtgcagcccattaaactatgatactctctcagttgtagaatgtatcctgatttcagagatgttaaaatgtggaaaaagtgttttcatc

SEQ ID NO: 128179 - DNA, 201 bp, Homo sapiens
gagatgttaaaatgtggaaaaagtgttttcatcatcagtgaaatgtggtacttcatgttctcattattcagtgtcatccacacactgtcatcattatggawttcgtcaataaaaatgatgactctcataatttgcattatgactgtctatttaattctggagagaaaagtggctgtgaatacagagccttgcactatcctt

SEQ ID NO: 128180 - DNA, 201 bp, Homo sapiens
tgaagaggaagctggaagcggagaaggactacgtctttgacaaaaggctcagatacagtgtccgccagaatgaaagcaactgtcggtttcgagacatcgtygtgcggaaggaagaagggttcacgcacatcctgctgtccagtcagacctcggataacaatgccctgacacctgaggtaaggggtggcggccagagggaag

SEQ ID NO: 128181 - DNA, 201 bp, Homo sapiens
agaactcacttcagtatcacaagaacagcatgagggtaaccgccccccgtgatccagtcaactcccactgggtccctcccaccacacgtggggattataaraactacaattcaagatgagatttgggtggggacacaggcaaaccatatcactcctgttttatttgtttcatgtgagggtttgtcatgtgcttttgttgag

SEQ ID NO: 128182 - DNA, 201 bp, Homo sapiens
aggactacgtctttgacaaaaggctcagatacagtgtccgccagaatgaaagcaactgtcggtttcgagacatcgttgtgcggaaggaagaagggttcacrcacatcctgctgtccagtcagacctcggataacaatgccctgacacctgaggtaaggggtggcggccagagggaagggcaagctgggctgtggctccttc

SEQ ID NO: 128183 - DNA, 201 bp, Homo sapiens
gggtggggacacaggcaaaccatatcactcctgttttatttgtttcatgtgagggtttgtcatgtgcttttgttgagggaaaagaagacaggaaatgagargacttaaagcatatttctgaatacaccagtttaataaatctgcccaccagtggcatgagctacttgatgaggttgttgtgccccatgtcttgggttgttt

SEQ ID NO: 128184 - DNA, 201 bp, Homo sapiens
gggacacaggcaaaccatatcactcctgttttatttgtttcatgtgagggtttgtcatgtgcttttgttgagggaaaagaagacaggaaatgagaggactwaaagcatatttctgaatacaccagtttaataaatctgcccaccagtggcatgagctacttgatgaggttgttgtgccccatgtcttgggttgtttgggtg

SEQ ID NO: 128185 - DNA, 201 bp, Homo sapiens
tcgagacatcgttgtgcggaaggaagaagggttcacgcacatcctgctgtccagtcagacctcggataacaatgccctgacacctgaggtaaggggtggckgccagagggaagggcaagctgggctgtggctccttctcactcagaatggaatattggctttctccttccttccatcagggagctgaggatggtaactagc

SEQ ID NO: 128186 - DNA, 201 bp, Homo sapiens
attaaagtaaacatgagtttatactgatatctcttactccgattcagtattccagggtttattctaatcttctcctttagcttatttatagctttttttttaagccagtgagaaacctggctttcatttcctatcaattatttacatatttgctcaaacctagtgtatgcttaaggtcattttttaaattctttgtacctc

SEQ ID NO: 128187 - DNA, 201 bp, Homo sapiens
cctgcatgtagtctctccgtgagggcttgcttgggcttcctcacagcatggctcctgagttccaagaatgggcatcccaggagagcagagtggaaatgaawgtcacttttatgatatagccatagaagtcacatagggtcacttccctatggccacgacagtctcaaatgtacacccagttcaaggggagggggcatagac

SEQ ID NO: 128188 - DNA, 201 bp, Homo sapiens
gattaggtggcctcacaggaccgagtcagctcctcagagcatgtgtctggctgggcagggtcgtggccgctctgcagtcaagaccctcatggtgtgcactyactctcctcatggctgagccatgtgtcaccacagcccatgtgtgcagaaatactcagctcatttttggaggctccttgtccaagttccgacaggtgctca

SEQ ID NO: 128189 - DNA, 201 bp, Homo sapiens
catctgtgcaaaatacccacacccagccataggatggtagagaagattgtgttgaggccggtcatcccccaccgaggaatctttgattagagctcatcaawggttcagagggacctttggtgctctgggctaagctttaatatcccaatggaacatcctgaacagtaacctatggctgtggtgacagtgcatctgaaaggc

SEQ ID NO: 128190 - DNA, 201 bp, Homo sapiens
gccgctctgcagtcaagaccctcatggtgtgcactcactctcctcatggctgagccatgtgtcaccacagcccatgtgtgcagaaatactcagctcatttytggaggctccttgtccaagttccgacaggtgctcagggagcttttgcagcgaccatgcagggagggagaacacaggctctgctttcagtgggggcacctg

SEQ ID NO: 128191 - DNA, 201 bp, Homo sapiens
gttcatccatattgaagtatatgtcagaatttacttccctttaaaggctgactatactccattgtgtgtgtataccacgttttgtttatccattcatccaytgatggaaaatcgggttgcttccacctttttcaccttgtgaaatactcctctgatcttttacagctgaagacaatagtggtcaaagcatgtagcgctttt

SEQ ID NO: 128192 - DNA, 201 bp, Homo sapiens
ttatgaatttttactcactactatgattattactattgttactgtgattattgctcattactaagactattactatgattattgttcattaatatgattaytgttactatgattattactattgttactatgattattgctcattgctgtgattattattgctattgttactatgattattgctctttgttgtgactatta

SEQ ID NO: 128193 - DNA, 201 bp, Homo sapiens
aaaaatgctaccagtcttctggaggtgtgtctacaaatggcatgtgacaatctgattgagtctcttgaatgattgcagacttctcccacaatgcactgttstcagagcctctcacagcttgttttgtaacttcatccagctacatatttatccgtgcatttatctttccagccacctagcgcttattaaatgcctgcagtg

SEQ ID NO: 128194 - DNA, 201 bp, Homo sapiens
tgactcttctcctttacttttgcttgtgttaatacttaaaaaaaaatcttttactgccattttagagtggtttcaagaaagaggagacaaatttgtcagtrtggtatatctaggtccctaaaatgttcttctttttttctttactttttcctctcctctcttctcctctcttctctttttgttttctaaagttacaaatag

SEQ ID NO: 128195 - DNA, 201 bp, Homo sapiens
tctttaagccatgcatttcccattcatcccagagctgtacactgtagcttagggctgtgttacccataggcaccttttgggggccattgtggtttggtttycctttccaagcacctcgcagagacctatggagtccaccttctttctgcctccagccacccacttctcccacacggtggaaggagacgcccctgccccatc

SEQ ID NO: 128196 - DNA, 201 bp, Homo sapiens
ctactgctgtggccttgagtgtcaggttacacttgccagactggacttccagctccttcagctgcattctttttccatagtggccaattctagctcctgarcctggctgccatccagcttgccttgtcacggagcagtaaatcagctctgttttaatatagccaggtgatgcagatcttaggcatcagagtgggcaggctt

SEQ ID NO: 128197 - DNA, 201 bp, Homo sapiens
tgtggcttttgcctattttgtatatttcatacaaatggaattgtataacatatggccttttctatttggctttttaaaactcagcctaatgtttctgtggytcagccatgttgtagcttgtaatcagccatgttttagcatgcattacatatatgtagcatgtaatctgactcattaaatcagagttctaatatactcctt

SEQ ID NO: 128198 - DNA, 201 bp, Homo sapiens
cattcacatctgagagggttcagtttcttgctgtggtggtgaggaaacagggagatgtgaggcgcagccgacatggagagcagccagggaccagcaatgtygtgacattgacgaatagaccaggagagacttgtaagggtacacaaaggacaccaggcagggatagtttgcactgggggtcttatgcatggtctccaggtg

SEQ ID NO: 128199 - DNA, 201 bp, Homo sapiens
acaaataggtgagttgtaaaaaattcaaacagtatggaaaatataagcatttaattttaattttatttttaaattattattattatttgagatggtgtctsactctgtcgcccaggttggagtgcagtggggtgatctcggctcactgcagcctctgcttcatgggttcaagtggttgtcctgcctcagcctcctgagtag

SEQ ID NO: 128200 - DNA, 201 bp, Homo sapiens
catatatatacacacacatatatatgggtgtccttctcccctgtcggttggataatggataattcagggtcccgttgacgtctctattccgcagtgccatmctgagtgtggtcagccagggcattatgctcttgctaggtacatcagacaagggcccaggattgggagtacaggtggcaggagtgtcccttgaaacactat

SEQ ID NO: 128201 - DNA, 201 bp, Homo sapiens
agggattttttcaagatgtacaatagatcaccttcaatcctatcgtgacaatacaactaaaatcattattgtcctctgtgtccttgttttcatacagttawcctgtttacacacatttttattttctattcactgaacaatatactgtagttatttactacttggttacatagtcttttcagttaaaatgtttgctggctt

SEQ ID NO: 128202 - DNA, 201 bp, Homo sapiens
tggtgaactgggggagctcatgggtgtttgaggaagtgtgtgtgtgtgtgtgtgtgtgtgtgtgtgtgtgtgtctgtttattcctgcatggctcagtttasttaggtgcagctttagctttctgcattcatctagtgcttctcgtggacgaaattgtgcacaagaaaatgcaaaatttgcgttatgctcaaattattccct

SEQ ID NO: 128203 - DNA, 201 bp, Homo sapiens
ggccttttctatttggctttttaaaactcagcctaatgtttctgtggctcagccatgttgtagcttgtaatcagccatgttttagcatgcattacatataygtagcatgtaatctgactcattaaatcagagttctaatatactcctttttatggctgaataatatttcgtggtattttgaatataccacatgttgtttat

SEQ ID NO: 128204 - DNA, 201 bp, Homo sapiens
agaagtgctgagcaaccgggggaaagccccttataaaaccatcagatctcatgagaactcacttcagtatcacaagaacagcatgagggtaaccgccccccgtgatccagtcaactcccactgggtccctcccaccacacgtggggattataaaaactacaattcaagatgagatttgggtggggacacaggcaaaccata

SEQ ID NO: 128205 - DNA, 201 bp, Homo sapiens
ccatgctgatggactgaatgcagtctgtaattcatggctaatccgaagagtttgattgagttgatggcggcagggaccagatagacaccttggtgattgtstttggccataagaatagaccaaggataggttttccagagacaccttcatactgtaaacatggtttagacacggtcatagggaaggctgctggtccatcat

SEQ ID NO: 128206 - DNA, 201 bp, Homo sapiens
ttatctagtgattctcaaaatttagtgcacacaaatgacgaggggtcttgttaaaatgaacccctattcctccatgatgatgtagaaaattaaaatgatgaagatcatgatgatcctggcttgtgtcaagcccctaccctgtgctgagtgcactcacttaatacagcaacttgtgggtcattcgtgttcctagtcccattt

SEQ ID NO: 128207 - DNA, 201 bp, Homo sapiens
attatctagtgattctcaaaatttagtgcacacaaatgacgaggggtcttgttaaaatgaacccctattcctccatgatgatgtagaaaattaaaatgatgaagatcatgatgatcctggcttgtgtcaagcccctaccctgtgctgagtgcactcacttaatacagcaacttgtgggtcattcgtgttcctagtcccatt

SEQ ID NO: 128208 - DNA, 201 bp, Homo sapiens
aattatctagtgattctcaaaatttagtgcacacaaatgacgaggggtcttgttaaaatgaacccctattcctccatgatgatgtagaaaattaaaatgatgaagatcatgatgatcctggcttgtgtcaagcccctaccctgtgctgagtgcactcacttaatacagcaacttgtgggtcattcgtgttcctagtcccat

SEQ ID NO: 128209 - DNA, 201 bp, Homo sapiens
ccactgtaaaactattttgctctccagaagatttcacagtcttatctttgaaatcccattctgaatttttatagggatatgtgctgggttaggcctatttytggtcattgtgtggggttcctggtgggctctttgaatctggaaacacatattctttgttgtgggaatttttcagaattatgttattgattttctcctttt

SEQ ID NO: 128210 - DNA, 201 bp, Homo sapiens
attgttgttgttgttgctattgatacttccttactttctggcactgcaggatgctccaggctcattttgtatattccatgtttcaaccctagagtcaaacrtttttctaagaagcccttgctccttttattggagaatgatattagaaccaagatctgaatgctaggtattattcatctctttctttgtgtttaagctaac

SEQ ID NO: 128211 - DNA, 201 bp, Homo sapiens
gaaaagcgcagtattcgggtgggagtgacccgattttccaggtgccgtctgtcacccctttccttgactaggaaacggaactccctgaccccttgcgcttsccgagtgaggcaatgcctcgccctgctttggctcgggcacggtgcgtgcacccagtgacctgtgcccactgtctggcactccctagtgagatgaacccgg

SEQ ID NO: 128212 - DNA, 201 bp, Homo sapiens
tttaagtataattactctgagattcatccatgttcttgtgtgtatcagtaattcattcttttttatatctaagtaatagctcattgcttagatacaccccwacatatttatccatcacttattgccagtattttgttgaggatttttgcatcaatgttcatcaagggtattggtctaaaattcttttttttggttgtgtct

SEQ ID NO: 128213 - DNA, 201 bp, Homo sapiens
aaagtttttaacttctttgcctttggtttgaatttcctcctgtagctcgtagtttgatcgtctgaagccttcttctctcagctcgtcaaagtcattccccrtccagctttgttccattgctggtgaggaactgccatcctttggaggaggagaggtgctctgctttttagagtttccagtttttctgctctgtttttttcc

SEQ ID NO: 128214 - DNA, 201 bp, Homo sapiens
agaggcagcatctcattatgtgcccaggctggtcttgaactcctgggctcaagtgatcctcctgcctcagcctccaaagtgttgggattataggcatgagycaccatgcttagctgtttgtttgtttgttttgtgattgttgttgttgttgctattgatacttccttactttctggcactgcaggatgctccaggctcatt

SEQ ID NO: 128215 - DNA, 201 bp, Homo sapiens
ttatgaagtctttcatttcattgttggttttaaaaacaaatgcttcttactgggagaaaacctatggatgaatattgatttgagttacaaaatgttcctcraatccctttgcaacatgtatgtggaaaattttaaatgtacgcaaaaatagaatcttatacggaactcctatgaacccattatcctgcctcaaccgtttga

SEQ ID NO: 128216 - DNA, 201 bp, Homo sapiens
aagcacttctctgtattggttattctagttatacattcgtctaaatttttttcaaagtttttaacttctttgcctttggtttgaatttcctcctgtagctygtagtttgatcgtctgaagccttcttctctcagctcgtcaaagtcattccccgtccagctttgttccattgctggtgaggaactgccatcctttggagga

SEQ ID NO: 128217 - DNA, 201 bp, Homo sapiens
ggcctttgtaagagcaggtgagtgactaagtgtcatcccacttcagaagatgaaaacttcatgccccaatgtcttagaagctgtgggttgaatggcaccartaatttttgtaacaagtgagaatttgaaaaaaatggggattccctcatccgggtcgtagaattcagattccagtcctcttgaatagcgggcagcgtgctt

SEQ ID NO: 128218 - DNA, 201 bp, Homo sapiens
tgaggcttctgcattcttcacgtagttctcgagctttggctttcagctccatcagctcctttaagcacttctctgtattggttattctagttatacattcktctaaatttttttcaaagtttttaacttctttgcctttggtttgaatttcctcctgtagctcgtagtttgatcgtctgaagccttcttctctcagctcgt

SEQ ID NO: 128219 - DNA, 201 bp, Homo sapiens
ttgtaagagcaggtgagtgactaagtgtcatcccacttcagaagatgaaaacttcatgccccaatgtcttagaagctgtgggttgaatggcaccaataatwtttgtaacaagtgagaatttgaaaaaaatggggattccctcatccgggtcgtagaattcagattccagtcctcttgaatagcgggcagcgtgcttgttgc

SEQ ID NO: 128220 - DNA, 201 bp, Homo sapiens
aaacttcccttctcgcttcatttcattcatttcatcttccatcactgataccctttcttccagttgatcgcatcggctcctgaggcttctgcattcttcaygtagttctcgagctttggctttcagctccatcagctcctttaagcacttctctgtattggttattctagttatacattcgtctaaatttttttcaaagtt

SEQ ID NO: 128221 - DNA, 201 bp, Homo sapiens
cagtctaggggtagaagtggatcgtcaccatgaatcccacaaatcgctaattactgttgcaataagtgttgtaaagggatagaaaagagtgctcaaatatrcgggtctccaattttatctaagatgtcagggatgtcagggaagatgctccaaggaagtgacattaaactaggactgaagggatgaatagatgttggtgag

SEQ ID NO: 128222 - DNA, 201 bp, Homo sapiens
gtatttcctgaatctgaatgttggcctgccttgctagattgggcaagttctcctggatgatatcctgcagagtgttttccaacttggttccattctccccrtcactttcaggtacaccaatcagacgtagatttgatcttttcaaatagtcccatatttcttggaggctttgttcgtttctttttattcttttttctctaa

SEQ ID NO: 128223 - DNA, 201 bp, Homo sapiens
tttggcctcccgaaatgctggggaaaatataagcattttagaaattaaagtctccatattctcccttcccaaatcctatttagaggtgacttctgttaatrtttccttatggatcttttgggactattctctaagtttatatatatgtatatgtatttatatatattaaatctatgtactttattacataccatatattat

SEQ ID NO: 128224 - DNA, 201 bp, Homo sapiens
ataatgggtctgacggttctcggattctggtatattttccaaactccggaaagttcctctgcagaaattcctgttttgtaatagcaacatctcctaatttmtgatgttagggtggcctttgcttgtggcttaatctctgtttgttccaaatcctagattcttgtccacccagcccccagaaagccatatattctggatatc

SEQ ID NO: 128225 - DNA, 201 bp, Homo sapiens
ggaaggaagaagggttcacgcacatcctgctgtccagtcagacctcggataacaatgccctgacacctgaggtaaggggtggcggccagagggaagggcargctgggctgtggctccttctcactcagaatggaatattggctttctccttccttccatcagggagctgaggatggtaactagcgtgcataaaaacttgac

SEQ ID NO: 128226 - DNA, 201 bp, Homo sapiens
aactctaaaagctcaaactaataacttattgagctcatgctctatgccaggtgtgctatgtgtattccctcacggaatcctccctgatgtggagttagtascatctgcattttactgataagggaagtaaggcttacaacagctaagtgacttgtccagagtcacagcactgagaagctgtggagccaggagggtggacgc

SEQ ID NO: 128227 - DNA, 201 bp, Homo sapiens
tttccaggccctgttgttttaattttagtttctaaatgtgggtgagcatcttctcatgttccttccacttgtgtctctccctgggcattgcccgggtgccrtcctgctgtggaaacagtggtggcgagtcaggggcattcagccatgttgcctggaacaaatgacccagcctctgtgggccagattcttaatttataagat

SEQ ID NO: 128228 - DNA, 201 bp, Homo sapiens
cctgctgtccagtcagacctcggataacaatgccctgacacctgaggtaaggggtggcggccagagggaagggcaagctgggctgtggctccttctcactyagaatggaatattggctttctccttccttccatcagggagctgaggatggtaactagcgtgcataaaaacttgactgcagcgcgcaatttgctcatcatt

SEQ ID NO: 128229 - DNA, 201 bp, Homo sapiens
ttaccttaaaaaagactgaaagttggcctgtggaagtagatgtgagaagggctagtaattattgtggggttgtgaaataggtttttctgaaagttgtgcayaagtgtggtccagaacacactcgcttggtgaactgggggagctcatgggtgtttgaggaagtgtgtgtgtgtgtgtgtgtgtgtgtgtgtgtgtgtgtct

SEQ ID NO: 128230 - DNA, 201 bp, Homo sapiens
ccgtattttgtcagggctcttcacagcaacgacaggattcccttcccattggctcatctggtgattgttgtcgccatctgccacgatggccctgcttgctrtgttcctcttccctttatattcacgaagccacagtagactcttaataaagcgccaggctccctcccccatgaagggcattgtgagttcttttcagcaggg

SEQ ID NO: 128231 - DNA, 201 bp, Homo sapiens
agtcagacctcggataacaatgccctgacacctgaggtaaggggtggcggccagagggaagggcaagctgggctgtggctccttctcactcagaatggaayattggctttctccttccttccatcagggagctgaggatggtaactagcgtgcataaaaacttgactgcagcgcgcaatttgctcatcattttacatacat

SEQ ID NO: 128232 - DNA, 201 bp, Homo sapiens
caaatatttatcaaaatggcaaatattttgatataaaatatcaaatatttttcaaaatatatgtgtgtgtgtatatatatatatattttttttttttttttgagacagagtcttgctctgtcactcaggctggaatgcagtagaatgatcaagcttactgcagccttgaactcttgggctcaagcaagcctcccctctcag

SEQ ID NO: 128233 - DNA, 201 bp, Homo sapiens
tcagtgtcacaatcaacactttagtgcacatcatctttctgttttcttattcaattatgtccttagagtaaattctgtcgaattacttggttcaaagatawggacataacttggtaaatattgttatgtgactgctggaagggttgtaccaatttgtagtactgtgtacttcctctaaaaattaaataagccatggaagaa

SEQ ID NO: 128234 - DNA, 201 bp, Homo sapiens
aagccacagtagactcttaataaagcgccaggctccctcccccatgaagggcattgtgagttcttttcagcagggtgcatctcatttgggctgcagcctcygtattttgcgcagttctttgctatgagagagcgaatgcccaaatcatgtaatttatgacctgccttgatggtaacataggacatgaaattggtggacttc

SEQ ID NO: 128235 - DNA, 201 bp, Homo sapiens
gcatgtttgacacatggagacttcatgatctgtgagtgaggtgaatacggaatgcaccactaggaacatactaggaacattattaagaatttggcgtgggrtatgttgtgattgctggagtgagttcccccacctgattgtttgctcatgcagtcattggatgaacactgggttaagcatgcggtgtcctctaggcactgc

SEQ ID NO: 128236 - DNA, 201 bp, Homo sapiens
gtgtgtgtgtgtgtgtgtgtgtgtgtgtgtctgtttattcctgcatggctcagtttacttaggtgcagctttagctttctgcattcatctagtgcttctcrtggacgaaattgtgcacaagaaaatgcaaaatttgcgttatgctcaaattattccctgatatataaattgtgttggaacaaatttgtattttcttttttt

SEQ ID NO: 128237 - DNA, 201 bp, Homo sapiens
taagaatttggcgtggggtatgttgtgattgctggagtgagttcccccacctgattgtttgctcatgcagtcattggatgaacactgggttaagcatgcgstgtcctctaggcactgcgctctgtgttgcagacacacaggtgaatacatctcaggcttatccctcaagaggccacagtctggtagggtcttcaagcaggt

SEQ ID NO: 128238 - DNA, 201 bp, Homo sapiens
ttataataagcaattttttatatctttaaatattttctatgaggattgcagcaactttataataaagatttcatcattaccagattcctgtctgctctatytcgatgctttggaactgagaacaacctgaactacacaataagcttctagtactttctacatataagtacaaaaaaaaacaaccctgtgtgttttatttat

SEQ ID NO: 128239 - DNA, 201 bp, Homo sapiens
cagataaactgtattcccctcacttatgaggctgcctctctggatgctggacttggccacacttttacaaacagacacagattctgttaaaaactaggaarggattatgacttaagcattggatctgaacactcagaaagacaccaccaaagcatctggagtttggtgatgccaacccaaagaagctgcatgttctgaccc

SEQ ID NO: 128240 - DNA, 201 bp, Homo sapiens
gtgactttatgtattagaagctggctgtccccatggactgtgtgcttcatgagcatgagggccacatttgtttttattcaccgttgcacctctggtgtctsctgcagtgcctggcatgtgatgagcacttgataagcatttgttgaatgatgatcaagttccatctttggtattggttctgagagaatagctgtggctgcc

SEQ ID NO: 128241 - DNA, 201 bp, Homo sapiens
atttatttttcctgtcctaatgctacactcacaagtatagtggctttatattctacttgagtatgttattgtagaagtgccttctcattattcttcttttwcaaaaatctcttggctatttttatttaattctcccaaaggtacttgagaaccattttgtaaagttctgaaaatgaactcattgggactttgattgtaaac

SEQ ID NO: 128242 - DNA, 201 bp, Homo sapiens
aagtgtggtccagaacacactcgcttggtgaactgggggagctcatgggtgtttgaggaagtgtgtgtgtgtgtgtgtgtgtgtgtgtgtgtgtgtgtctrtttattcctgcatggctcagtttacttaggtgcagctttagctttctgcattcatctagtgcttctcgtggacgaaattgtgcacaagaaaatgcaaaat

SEQ ID NO: 128243 - DNA, 201 bp, Homo sapiens
ggctggttcaagggtttgtgcagatttttttcccagtggcttaagactgcaggggtttatttctcactcatgctacctgtccaacagtgtttagtgggatsttctgcccgccgagtccctcagagacccaggctgctgctgaaggcttaactgtttcttagctgcacggcgttacaactcatggcctgctctgttgctgtg

SEQ ID NO: 128244 - DNA, 201 bp, Homo sapiens
ttgatagaagttagcaaggagatcttacccaaaagatagatgggaacgagaaatgtggcatctttgaacctctcaggagcaggttatttgtggaatcagaragtgcctctcgccatctttgtcttcataacccccgtcttcccgcacagcccaagatagtcagatgtaagaacagcagtactgcgagtcaagagtaaacta

SEQ ID NO: 128245 - DNA, 201 bp, Homo sapiens
ggtacatttgatgataataggtagccagatatatttgttaatgatccaaattgtatcgggacagtcactgtaacctatacctttttttttttttttttttkgagacggggtcttactctatcaccctggctagagtgcagtggcaatcagctcactgcaacctccacctcccaggctcaagtgatcctcctgcctccactt

SEQ ID NO: 128246 - DNA, 201 bp, Homo sapiens
tttggggatcttggagaatgaaaaaggatatgctagaagtcttcctcaaagtttggattcatatcccgtgaagactgagtagtataaggaagtatagatarttcctgaacaggaaatcgaggccctgtgagaagagtagggagataggacgtgtaggagccaacaataagatttcgcccactatggtgaatataaatatgg

SEQ ID NO: 128247 - DNA, 201 bp, Homo sapiens
tagcaaggagatcttacccaaaagatagatgggaacgagaaatgtggcatctttgaacctctcaggagcaggttatttgtggaatcagagagtgcctctcrccatctttgtcttcataacccccgtcttcccgcacagcccaagatagtcagatgtaagaacagcagtactgcgagtcaagagtaaactaaattgttacat

SEQ ID NO: 128248 - DNA, 201 bp, Homo sapiens
tctcagcctactatctgtctggagaagaggtaagatgaaaagtggtatataaatgtgaattataaagtgtcttaaactacatttttggtaaaatatgccaytcgtgacatatatttagaaggaatctatggaatttttatatttcaatgaagctgtagcttacactgagtttcttacaatatgtactaatgaaatgagcaa

SEQ ID NO: 128249 - DNA, 201 bp, Homo sapiens
agtattttaagaacaaatcaccatcagaagtagatagaccccacattgatatcagctcaagattgttaaatttgtatgcaaaagcaggagaagaagtactrctgatttgtgatatgtgtttcaggaaagttacagttagaaacactggacaatagttaagaatcccagcagaagtctaagctaccaaaaaaataatagaaa

SEQ ID NO: 128250 - DNA, 201 bp, Homo sapiens
tggcatctttgaacctctcaggagcaggttatttgtggaatcagagagtgcctctcgccatctttgtcttcataacccccgtcttcccgcacagcccaagrtagtcagatgtaagaacagcagtactgcgagtcaagagtaaactaaattgttacatcttcggtttcagctctgtctaaaacaactacccgtgatgagatg

SEQ ID NO: 128251 - DNA, 201 bp, Homo sapiens
ttttattctgagcctcttccctgggcttgtagatgacgagaactgtcccagtgtgtgttcacatgatgtcttctttgtgctctgagggagagaaggagtcacagagagagagagagagctcttgtgtctctcatgagggcactaatcccatttaaggctctaccgtcataacctaattaccatctccaaataaatctccaa

SEQ ID NO: 128252 - DNA, 201 bp, Homo sapiens
atgaacatactttatattctaaatccagttttctttctattagtataacatttcctctgctagtgattttaatgttcttgcttccgtggttgggggttggrggggtggtgacagaaaagagtaccattttccttctgatatgaatgtgtacaaagaggaaggaaggataaatttaaccctttttaaattaaatgttaagaa

SEQ ID NO: 128253 - DNA, 201 bp, Homo sapiens
tttattctgagcctcttccctgggcttgtagatgacgagaactgtcccagtgtgtgttcacatgatgtcttctttgtgctctgagggagagaaggagtcacagagagagagagagagctcttgtgtctctcatgagggcactaatcccatttaaggctctaccgtcataacctaattaccatctccaaataaatctccaaa

SEQ ID NO: 128254 - DNA, 201 bp, Homo sapiens
tttggcccttagttaaaaagttgtgtggagatttaccctgctgctgtttgaaagcaggaagctggggtttatgggttaattcagtaaatagctgccctctrttagccacctttccccagagagatagtcattgggaaatagtcctccacagtcagtttctgcaagctgcaatagaatcgtggctagtcttagaatgccagt

SEQ ID NO: 128255 - DNA, 201 bp, Homo sapiens
ttattctgagcctcttccctgggcttgtagatgacgagaactgtcccagtgtgtgttcacatgatgtcttctttgtgctctgagggagagaaggagtcacagagagagagagagagctcttgtgtctctcatgagggcactaatcccatttaaggctctaccgtcataacctaattaccatctccaaataaatctccaaat

SEQ ID NO: 128256 - DNA, 201 bp, Homo sapiens
tagttagcatatttgtggacctttaattatcaatagaattgctcgaaagctgtcttaggaagtaatgcctttgattgatttgaaatctcatgcatcacccrtgttgctagtgttttccaaaacactgagggatttttgcagacagcattttcaggggctgatttgaaggtaataaaccaaactggcagggagggagggttc

SEQ ID NO: 128257 - DNA, 201 bp, Homo sapiens
agtagtggatgtttatgtctctaatacacattcccaagtccttcctcattatcagtttagataattaaactgacatcttccagctggcatctttgtagacmtttttgtctgaacataagttagctttaaaaagaaatgattcataaacatgacaggaatgaaaaaaaaaagaaactagacaccactgaattgtttatagtg

SEQ ID NO: 128258 - DNA, 201 bp, Homo sapiens
tattctgagcctcttccctgggcttgtagatgacgagaactgtcccagtgtgtgttcacatgatgtcttctttgtgctctgagggagagaaggagtcacagagagagagagagagctcttgtgtctctcatgagggcactaatcccatttaaggctctaccgtcataacctaattaccatctccaaataaatctccaaata

SEQ ID NO: 128259 - DNA, 201 bp, Homo sapiens
catgttgtctgtatgcctaaatcacaaggtcttaattaaccgtgtaaacgagatttacgtagtctctgtctaacatcttagcacctagatgttttgaaacygctcagtcttgcataaagcagtggaactaaatgtgttctttaaaattccttgttgctgtgagaacccaaaagagccagcataattagctttagtgtttag

SEQ ID NO: 128260 - DNA, 201 bp, Homo sapiens
ggcaccttgcagggtcatttctcaatatcgtacagtacaagataaatagaatttaggttttagaatatgtaattggatcaataactggttgaataactgcrtccaacagttgattgatgtctagctgaagatatatttctggcagtgtttgacatgactcagaccttcaccttggaataatttttatcggatgtctacata

SEQ ID NO: 128261 - DNA, 201 bp, Homo sapiens
ttcatgatttgtaatactcatctcttgattttaggtgtaaatttaggcataccatgtattttattcaatttatatgaattcaatttagatgaatctggttyagtgtgttctttgattaagtggtcattgctataagtaaatcaaaatgaaagaacaatttctccaattctgatttttttattggttggtcttaaccaaaaa

SEQ ID NO: 128262 - DNA, 201 bp, Homo sapiens
cctgggctcaagctgggctcaagctatcttcccacctcggccccccgccccgagtagctgggactacaggtgcacgatgccatgctcagccaatttttaattttttttttttttggtagagagaaggtctcatatttcccaggctggcctcaaacttttaggcttgagcgatccctttgccttggcctcccaaagtgctgg

SEQ ID NO: 128263 - DNA, 201 bp, Homo sapiens
gggcttattattgatgagttcgtacttagtctatttagtttgtaaatgtcagaggtttctgtgttgatttaggaaactgtaaaggtcacttcaagaatcasacttagaatttttaaaatatatttttacactaaaatttaaactataattctacactttctgcaaaaagaaaatcacatacttaactactttaaaacatgg

SEQ ID NO: 128264 - DNA, 201 bp, Homo sapiens
atcataacccaaggggaggaaaacatcaagctgcttctggccattggttttcagctctcattgctttaactccaaatgacacgtctggatcctggccatcrtttcctatcacttcatcgagtcagtgttgttttgacaatgccaaaccatgatttgcttttccacgcatcacttgcatgtgtctcctacaatcatgttgat

SEQ ID NO: 128265 - DNA, 201 bp, Homo sapiens; identical to SEQ ID NO: 21785

SEQ ID NO: 128266 - DNA, 201 bp, Homo sapiens
tcataggaaaaaaatggaaatttgtaatcccaaagatgtagccattataaaattggtctttctaacaagaggtctgggttattttgacataggcgtacttktttatttaaatataaatgcagcttgctttgttctggttaactacactgagtatgacattggtttcctttacaagtcttcactacttcacacgtaggaacc

SEQ ID NO: 128267 - DNA, 201 bp, Homo sapiens
tgctcagtttgtttggaaaagcctctcaagagtaatattgtgctcaacttaacaactatatttactagtatgtgttcatgtatgtttatatccccttgatwatatatatatatatatatatatatatgcataatatgtacatggttatgtgcgtgtatataattatctaaaataataccttaagcattaatgaaagttatt

SEQ ID NO: 128268 - DNA, 201 bp, Homo sapiens
ataaattcctgtgttatcaagtttttacctcttggaattaagctttaaattttctatttcattttaccagtgggttcactggtgattggatcagcaactcyaaatatcatgatgtcctttacaaaccttatatattgtccatagtaaagtagttgtcgtaatgaacaagttttggcagaagaaagatttctatggtagtct

SEQ ID NO: 128269 - DNA, 201 bp, Homo sapiens
atgtggtaatacatatattcttttaatattattatcaaggcttctcaagtagtgttgtaaaatagtggctcagtcctcagaaaaattttatttttcttgayagcttagaaattttttaataaagtgttaattcataggaaaaaaatggaaatttgtaatcccaaagatgtagccattataaaattggtctttctaacaaga

SEQ ID NO: 128270 - DNA, 201 bp, Homo sapiens
cagtcacattttagtactagttttgtagcttctgagtacttatttttccagtgataaatcaaaaacagaaatgatcagccttactctccctcttttttctrgggaaattgagaaccagaagagttaactgaccagctcaggcctcacatggaaacagtagtacagccagtccaaggacctgggtccggggctctctccatc

SEQ ID NO: 128271 - DNA, 201 bp, Homo sapiens
aagtttctgagacatttatttttataactcagaagaaactttaaagattagtatatcagtcgatagcccgtgataatttttagtttggtgctgttttataytttcattgaaagaattttagactatgtttaatattattgcttattaataaatccagcattaccctctccctttcttagttatggtcaatttacatatatt

SEQ ID NO: 128272 - DNA, 201 bp, Homo sapiens
aaaacatttattcattgcacttaagtctttctcaaaacacaaagctgtccttgaatttttaatatagttcattaaattgaaaaaattctcattttctttcycatgtttttattcttcaatctctgactcttttcatcaatagagtaaaatggttttcattatccagtgagtacatataacaaaaactttcaatatatataa

SEQ ID NO: 128273 - DNA, 201 bp, Homo sapiens
ccatttctctgagacacacagacacatttcagctgtggcggcatgtggtagatagatgtgtgccccatgtcctcatctaatgtctatagttgtgccatctytaatttcttgaaccccttccctgacttataaagagccagtagaaccgttgatctcataagtaatctaactgaaatacattaattctgcagactgaatgaa

SEQ ID NO: 128274 - DNA, 201 bp, Homo sapiens
ccaaatcagccttcaatcccaggtctttctgatttctgcaggatagccaaccaatttggtgtggtgggagaatttttatcttcttagtccttttcatctaygaatctataaagagttaactaaagggtctaaatttcaatcttttggcctaaaaacataatacaacctagaatactgaaagagacctcaaattaaggtttc

SEQ ID NO: 128275 - DNA, 201 bp, Homo sapiens
aggcgtggtggcatgcgcctatagtcccagctactcaggaggctaaggtaggagaatcacttgaacccgggaggtggaggttgcaatttgctgagatcgcrccactgcactccagcctgggcaacagaatgagactccatctcaaaaaaaaaaaaagagagagaatgcaatcactaatgaaatttctaagagaagtttctg

SEQ ID NO: 128276 - DNA, 201 bp, Homo sapiens
ttattggttacctagaacctcacatgagaaatattgaaaactatcttctgtaatgaattttatggaatatgtagaatttttctccagataacaatttcttrtattaaccctctgtaaaagctaaagctgtgttaaaattttccttaaagctgtatttctggactgcagtaaagcgatatctcagtatgagaggcagagcct

SEQ ID NO: 128277 - DNA, 201 bp, Homo sapiens
agatggggagcgggcgaagttgacgagtctcccgcccacgctgcgcccctcctgcccagaggtgcgctgcccctccccgaggtgctcgcgcgctgccctgmccccttcctgcgcgggacacccctcccctacccacgggacctgataacttcaccccaagtccagagagtgggctgcgagggcggtgcccggactggacag

SEQ ID NO: 128278 - DNA, 201 bp, Homo sapiens
atgtaattacatcagtcttaaaaagtctgttgctccttggttttaggcctattcttttcttgctagagaatgcaatcacaggccgggtatggtggctcacrcctgtaatctcagcactttgggaggcctaggtgggtggattatgaggtcgagagattgagaccattctggccaacatggtgaaaccccgtctctactaaa

SEQ ID NO: 128279 - DNA, 201 bp, Homo sapiens
aataattatatgtgttctttgagtcattgaaaaaagtttatacaactaatttatggcagagggatttggcttttaaaaccattattggtgtgtagactctsaattaggaatatactggatcaatcttcagttacatacatatacacacatgtatccaattaaagattgattacattaaaataaacaagtttttccaaaatc

SEQ ID NO: 128280 - DNA, 201 bp, Homo sapiens
gcttcaaaaaatttaaaggaaattggattacagtaaaacatttcacaaaatgcaagggtcttcaggtttctttctcattattattagataagatttacaayttttatcttttttgaaaatcaagtgttttaatattctattatttatagtttcctaatgataacttcttaacttggcatttgaaaggcatgtgccagtgaa

SEQ ID NO: 128281 - DNA, 201 bp, Homo sapiens
gagatagtaaatgagacagcatcctgtatacttcccttttagtcctttagaatcttttcatagtgtagcagatactcaataaatgacctggcctaattaaygagccctgatgccaattaagaagaaagtacaaatcaaagaatcttttcttataagcatggagtcaaggggaagtaatactatttctttaatgccttatac

SEQ ID NO: 128282 - DNA, 201 bp, Homo sapiens
atttcagtggtacaaaagatttcaagttaaactgtacctcaaagagaggtattttgtgcttgaccaattatactcatttaaagctaaaatacaagaaatamaaatattaacttaaggctcttaataacttagaaatgaaatgtcaatgaaaatatgaagctgatatatttcaaaatgcccactttaaaatattccctccag

SEQ ID NO: 128283 - DNA, 201 bp, Homo sapiens; identical to SEQ ID NO: 21779

SEQ ID NO: 128284 - DNA, 201 bp, Homo sapiens
aaactagaactatttatttcaagatttcagtggtacaaaagatttcaagttaaactgtacctcaaagagaggtattttgtgcttgaccaattatactcatktaaagctaaaatacaagaaatacaaatattaacttaaggctcttaataacttagaaatgaaatgtcaatgaaaatatgaagctgatatatttcaaaatgc

SEQ ID NO: 128285 - DNA, 201 bp, Homo sapiens
taatcgaacatgtgagtacatgttattcttcatttatggtctattcccacatgctttgatttaatgcagttttgtcattgctgccctcaaaagactatccrctctgcctatgaagcttgatgatcgtgattaatgtctcaaaggaatgtatattttattttaaaaggcaatgcttttcttcctaaaaatatctacctttag

SEQ ID NO: 128286 - DNA, 201 bp, Homo sapiens
aaatcttaagtattcatgatctcccaattccatcttaagcaggaaactagaactatttatttcaagatttcagtggtacaaaagatttcaagttaaactgyacctcaaagagaggtattttgtgcttgaccaattatactcatttaaagctaaaatacaagaaatacaaatattaacttaaggctcttaataacttagaaa

SEQ ID NO: 128287 - DNA, 201 bp, Homo sapiens
aacatttatagagtttttgttcttatctttattccctaaacaatacagtataacacctagttacataacatttacactgtattaagtagtataagtaaacraggtgatttaaagtatatgggaggatgtacctaggttgtatgcgaatactttgccattttatataagggactcaaggatccatggattttgttatccttg

SEQ ID NO: 128288 - DNA, 201 bp, Homo sapiens
gttctttaccacctggcttcttaggaaatagtttttagtttgagctaagttattttgagtcttgaccctaaaaacaacctttttggagaaagtattaggcrttatgaatcttttcccagttattagccgttggggagctcttcaggtctgcttccttctcatggttgtttctcaccagctatgttgaagcatccatctttt

SEQ ID NO: 128289 - DNA, 201 bp, Homo sapiens
tccctaaacaatacagtataacacctagttacataacatttacactgtattaagtagtataagtaaacgaggtgatttaaagtatatgggaggatgtaccyaggttgtatgcgaatactttgccattttatataagggactcaaggatccatggattttgttatccttggagggtcctggaaccagtccctcatagatact

SEQ ID NO: 128290 - DNA, 201 bp, Homo sapiens
cgaggtgatttaaagtatatgggaggatgtacctaggttgtatgcgaatactttgccattttatataagggactcaaggatccatggattttgttatcctyggagggtcctggaaccagtccctcatagatactgagggatgactgtactttctagtttcatttaagttattgactgtaagcactgtccaggaaaataacc

SEQ ID NO: 128291 - DNA, 201 bp, Homo sapiens
tactttgtataaggatattcctttaccagtctcaggtttcttggaatatctataagctttccatctgcccagtgtgttgttttgtctgtcacctcttgggyctcttcctgccgaggatagtatacttccttcctaaaccaatctagtgaatgctttgtgtgccgaatgcctgaggaggcaacctgcaggatatgcatctaa

SEQ ID NO: 128292 - DNA, 201 bp, Homo sapiens
tcaaaaacgaaaacttcccatttgtaaacataaaagggtagtgtgtatgtgtaccagcatgtttgtatgagcatgtgtgttctggtttatataatcataaytcttttacttagtcatccttttaactaatgaattttaatgttttagcctttgctcttcaatatattacctattttgtagcaaaaacatctccattcaaat

SEQ ID NO: 128293 - DNA, 201 bp, Homo sapiens
tatcaagtatgcctgattcagaatatcaggcatggctataattgcaggtatattctcaataactaggttcagtgacttggtactgctaacaccaaagcacygagtagctgctttaccccatgttaatgagtataacccctcagggttttgatatatttgactcttgtccatgtttcttggtaagatgaatgcagacattga

SEQ ID NO: 128294 - DNA, 201 bp, Homo sapiens
agatgtctttatcatgaacacattcaagtaatatcaagtatgcctgattcagaatatcaggcatggctataattgcaggtatattctcaataactaggttsagtgacttggtactgctaacaccaaagcactgagtagctgctttaccccatgttaatgagtataacccctcagggttttgatatatttgactcttgtcca

SEQ ID NO: 128295 - DNA, 201 bp, Homo sapiens
gggggggtggtgacagaaaagagtaccattttccttctgatatgaatgtgtacaaagaggaaggaaggataaatttaaccctttttaaattaaatgttaaraaatgtttctaaacgtattgaatgcttttccagtatatctctggatttttctcgattcaccacattaatggcagagaacaaatacatggatacaaagtaa

SEQ ID NO: 128296 - DNA, 201 bp, Homo sapiens
taaaagccaccttcttgaggaaataccattatcattatcaccataaaaactacaactacctgttagtgtttactacgtgtcttaaagtctttaaatataayaacttattatttctttccacagcctttaaaaaagtaaatgctgttgttatctccattgtacagatgaggaaggttaggacagagaaattaggcaagttgt

SEQ ID NO: 128297 - DNA, 201 bp, Homo sapiens
aaaaaacaaagtgggggtggacaccaagagcattttgatggggtctaccttagaaagagaggaaagcaagaattccacaagccattaagacctggctccarcctgtccttccagccttctctcccaccaaccttcctttcctccattctgcagtgtaacagctgcctctggttcctggccagcccctctgctcgtgtgttc

SEQ ID NO: 128298 - DNA, 201 bp, Homo sapiens
taaaacaaatgtattcttatataacacttttttcttttttaaaaaaaatccccagctgctcaaacttgcttcttccgtctattagaaaatcataacccaargggaggaaaacatcaagctgcttctggccattggttttcagctctcattgctttaactccaaatgacacgtctggatcctggccatcgtttcctatcact

SEQ ID NO: 128299 - DNA, 201 bp, Homo sapiens
tattatgttatttccagaagtaggttgatcctttcctgctgataaattcgggcctgctctccccgacatccactaagatgtttacacaggactgtgttgasaaacagccatccaggcctgaaggaagcttagtgagtgacatgctaaattaatgagaagacctgtttctcttctacgttcctttgtcttgttttttttttt

SEQ ID NO: 128300 - DNA, 201 bp, Homo sapiens
atattgaaagagagaatattgtcattaaagattggagcctaaaaaaatagaaaaatttattttatgctcagaaattttttcagataatgctaaagcactgsgcttgtaactgttgttgacctgctgataatacatttagaatttgcttcgggggtattaaaaaattggacttctttttctttgttacaacatgtcagcatt

SEQ ID NO: 128301 - DNA, 201 bp, Homo sapiens
tctgtcatcctctaattaccatactggcagacattttaattattctaatcttaaattggccgtctaagatcttgatgttcaaaaaaagacagctttaaaayattatttgaaatattttcttcctaattcctaaaaccatacccacacaacttttagtatattgtattcagacaaatcattgacaggaaaatccattaagaa

SEQ ID NO: 128302 - DNA, 201 bp, Homo sapiens
ttactgagtatgtaaacaggcagtatcttatgtttccatacattatcaatgagatagtaaatgagacagcatcctgtatacttcccttttagtcctttagratcttttcatagtgtagcagatactcaataaatgacctggcctaattaatgagccctgatgccaattaagaagaaagtacaaatcaaagaatcttttctt

SEQ ID NO: 128303 - DNA, 201 bp, Homo sapiens
tctctctgaatgtttcccagttacacttccctaggtagagtggatggttgggttgactcatcccatccattagtgagaactacacaccagggcgccccacsttggaggctcatggctagctctcagcaatctgcctttgagttgggcaccaggccctggttcattcagctgggccagcatcacatcctacaaactacggaa

SEQ ID NO: 128304 - DNA, 201 bp, Homo sapiens
aatgtaggcatggcacagagcctcctaagtgacagaaagaagaggattgcctggctgcacagaggttttctggcatctctgctgcatccagacatctgctktgctgtatttatcttattgaaaatttctctgttgtgggcctacttgtcagaggcaagttgtccagagttctgctatatattcattatggaaggttttacc

SEQ ID NO: 128305 - DNA, 201 bp, Homo sapiens
gaaacagattttgacgtgttcattttctctgttgcctagatggggttagatacttcctgtccatgatctcatggtatgttggtttagaaaaagcctttctktgcagagagatggagcatgatgttaggattgaaggagggaagcatacaaaataatttatatattagactctctttttcatgttagcagtctttgtcactt

SEQ ID NO: 128306 - DNA, 201 bp, Homo sapiens
tcttgccatgtagaaagaataatttcttaggtgatgaacaagtatctgcttgaaggactttattgcaatttgtgttatgagaagtataaatagctaagatrttcagtcgcataaaataagaatgaaatattaatgtaataactaaaccatcaataacattagcttaaccacggttaatgagcacagtaatatgttcattta

SEQ ID NO: 128307 - DNA, 201 bp, Homo sapiens
tttaaagaaatatccggaaatagggtttcccataaaaaccttgcccattttttctaaattctgatttttttcctttttttaaccaataatttttggcttaytctacatatctggtatttgactctttgtcaaaaaaaaaggaggaaagaaaaaataataggacttgaaagtttctttcttcatgctcatcctccatttgac

SEQ ID NO: 128308 - DNA, 201 bp, Homo sapiens
cctgaacccacgaggtggagattgcagtgagccaagattgagccactgcactccagcctgggcgacagagcgagaccctgtctcaaaaaaaaaaaaaaaacaaaaaaaaaaaacggaatgcttcataaatttgcacatgatccttgcggaggggccgtgctaatcttctctgtgttgttccagtgttcatacatgttgaca

SEQ ID NO: 128309 - DNA, 201 bp, Homo sapiens
ccaaatattcattaaattcagacaactacagaaatgtaggatcatttctctctagagagttgtcagtggagtcatcccatcttcttccatactagactgaaaaaaaaaaaaaacatgtattttaggaatagatcccagccacatgtctctcactgtctttcattttcttcttttagctctgttaccaatatcactgatgag

SEQ ID NO: 128310 - DNA, 201 bp, Homo sapiens
tacacacacaaaagaaaggataaaagggaaatacttgtgccctacaattctcctcttgctaactgaagaatggggcttgactctagggatagcttgtttcaaaaaaaaaaaaaaagaataataataataaaaaaatgtaatttaaaaaggtaactatatctgactttgctcattttaatgaaattcaagctaattcatttt

SEQ ID NO: 128311 - DNA, 201 bp, Homo sapiens
ggctgtaatcccaactctttgggaggccgaggcaagcagatcgcttgagcccaggagtttgagacaaccatgggcaacatggcaaaaccctatctctacaraaaatacaaaaaattagccaggcatggtggcgaatgcctgtggtcccagctacttgggaggctgaggcaggagaatcacctgagcccaagaggtagaagc

SEQ ID NO: 128312 - DNA, 201 bp, Homo sapiens
gctctgcccactctgagttcagctaaaggtcaaagcatcaaaggaaggagaacttccttcctaagttctcccttatctgtttaacctcctgaagcctaggmggactctgaggaggtggcgtgagtggataaaggtcagccaggctcattgagtgtcttctagtcaggtgccctgtcacacctgatctcctcactgtgctgt

SEQ ID NO: 128313 - DNA, 201 bp, Homo sapiens
ctgaggcaggagaatcacctgagcccaagaggtagaagctgcagtgacccatgatggtgccactgtactccgcccaggcaacagagtgaggccctgtctcaaaaaaaaaaaatgttttatctgaacttgacaatctaataataaaaattagtgacaatcagtttactgaaatgtgacttttttttttcctcctctataatt

SEQ ID NO: 128314 - DNA, 201 bp, Homo sapiens
tgtatacttcccttttagtcctttagaatcttttcatagtgtagcagatactcaataaatgacctggcctaattaatgagccctgatgccaattaagaagaaagtacaaatcaaagaatcttttcttataagcatggagtcaaggggaagtaatactatttctttaatgccttatacccaatttaatattttctgggttaa

SEQ ID NO: 128315 - DNA, 201 bp, Homo sapiens
gggaggcatatgggaagggtgcctgagtataagatctgcatgtcttgttctggtggctgtatctagctgtagtctacctggagtgcggctgacatatcaayaatagctgggttgctgactaactgccttgaggtagtctctgaagttttgcagctgggtctccatgcttgatctgtcacaagattagcccctggaacttct

SEQ ID NO: 128316 - DNA, 201 bp, Homo sapiens
atagaaataccaatacaatggaacttgttacaaagacatacaaagttttcatttttatggatgagaaatgatttctttagcccacttctcagccaaatttyttatctgtgtaatatgtagtcccgtatattcgctcagcaaaccagggagaggataggaaaatgtaagttctttaccacctggcttcttaggaaatagttt

SEQ ID NO: 128317 - DNA, 201 bp, Homo sapiens
cagatgctggtattatgctgcttctatcatctgcagaaccatgagccaaaataaacctcttttctttataaattacccagcctcaggtattcctttatagygacacaaaacagactaatatagtaattaaattctttacaatatttttcatatgctgtagacaatgaaaattttaggaaaatatgtacatcatacctccaa

SEQ ID NO: 128318 - DNA, 201 bp, Homo sapiens
ctcatgcagttgaaaacctgcgtataactttcgattcccccccaaacttaactaccaatagcctactgctgaccggaagccttactgactaaacataagcmgtcagttaacacgtattttgtatgttatatgtatgatatactgtattattatggcaaagtaagctatagaaaagaaaatgttatttaaaaaattgttaga

SEQ ID NO: 128319 - DNA, 201 bp, Homo sapiens
tttgaaaatcaagtgttttaatattctattatttatagtttcctaatgataacttcttaacttggcatttgaaaggcatgtgccagtgaaataattttcacttatatttatagatttggtcttggatcgtccagagtgctaattacatataggaagtgtagtgcccagtctttcagcagcaattcattgtgctcctgagtg

SEQ ID NO: 128320 - DNA, 201 bp, Homo sapiens
tgtagtgtacaaatctgtgctttgggattcgacaaactcttggaaagcattttctgcatccttctgattgtggaaatgttttccctgcaaaaagttgtcgmgatgcttgaataagtggtaatgggttggcaagaggtcaagtgaatgtggcagatgagacaaaacttcatagcccaatttgttcaacttttgaagcggttt

SEQ ID NO: 128321 - DNA, 201 bp, Homo sapiens
aatcacttgaacccgggaggtggaggttgcaatttgctgagatcgcgccactgcactccagcctgggcaacagaatgagactccatctcaaaaaaaaaaaragagagagaatgcaatcactaatgaaatttctaagagaagtttctgagacatttatttttataactcagaagaaactttaaagattagtatatcagtcga

SEQ ID NO: 128322 - DNA, 201 bp, Homo sapiens
aaatccaagtataaacagactcccacagttcaaacccatgttgttcaagggtcagctgtacttggatttggaaacttgctgttactgtgtatgttgaaacrcagtgagagttaagataactatgcattacagttgcttatgtggaatttacctatattgtagtagtggtaaattttgcaagtccccaaatgtttttgccac

SEQ ID NO: 128323 - DNA, 201 bp, Homo sapiens
ttctaattcagtccttaaatttcagttaacatggataaattctgtagtgggccctattattgtattataatgtaccctaacaaaaatattgcaactttagrtagtacaaatactattatcttatactatattcttaaattgtcctcactacacaaatgtgtgtctttgttttttggcaaatgaagagtaagagaaaagaag

SEQ ID NO: 128324 - DNA, 201 bp, Homo sapiens
taattcagtccttaaatttcagttaacatggataaattctgtagtgggccctattattgtattataatgtaccctaacaaaaatattgcaactttaggtastacaaatactattatcttatactatattcttaaattgtcctcactacacaaatgtgtgtctttgttttttggcaaatgaagagtaagagaaaagaagtta

SEQ ID NO: 128325 - DNA, 201 bp, Homo sapiens
aaaaatattgcaactttaggtagtacaaatactattatcttatactatattcttaaattgtcctcactacacaaatgtgtgtctttgttttttggcaaatkaagagtaagagaaaagaagttagtatttattgagacctacatgtgcctagtattcttgttcagtcccactgcaactctatgagatgggcattaatttcac

SEQ ID NO: 128326 - DNA, 201 bp, Homo sapiens
aatatacattttataggtgagaaaaatgaggcccagagaatagttttcccagagatagccacctactaactggcagagctgggacttgaaccctggtgtgkctaacattagagtccatgctcttaattctgacattttgcttttccatttatttagaaccttccatgtgtttggctttacttgtagcactggtgataatga

SEQ ID NO: 128327 - DNA, 201 bp, Homo sapiens; identical to SEQ ID NO: 21778

SEQ ID NO: 128328 - DNA, 201 bp, Homo sapiens
ataacctgctggaataacctgcgtaactttaaagagtactgacgcctggggcatacttctaaagattctcacttaatggttatagggtgcagtatcataamttttagcctctggggtgattcctagcatagaagcacttggtgggctgcactaactgcttcctgttaggtaaaagctgtgcctttatagataatctgggca

SEQ ID NO: 128329 - DNA, 201 bp, Homo sapiens
aaacttgcacacctgatggaattagataaggattgtgcatagtgtgtccttcagctagagtagtggctatgtgttcgaataacctgctggaataacctgcrtaactttaaagagtactgacgcctggggcatacttctaaagattctcacttaatggttatagggtgcagtatcataaattttagcctctggggtgattcc

SEQ ID NO: 128330 - DNA, 201 bp, Homo sapiens
aaggttatgcctggggattaaatgaactcaaacctatatcaaaaggaggccattcaagcagtttgtttggtgagtagatgtgctttggtttcttagtgacrataacttctccccaattgcttgagcttatggatggtggagaagtctgtgtaacatggccctccaggccatttggttaggaaacttgcacacctgatggaa

SEQ ID NO: 128331 - DNA, 201 bp, Homo sapiens
atagtactgattcttggtaactgttggtagtaatagtggtgagttaggaaggtaatttacaagttggttaaagatgctgattgttgtgttcaggaacatakgaaaactttgttattaataaaatgatactgatctcaatgaagattttgagtggtaaatggcccgtaaataatatctataactttgtgtgatgctttaaga

SEQ ID NO: 128332 - DNA, 201 bp, Homo sapiens
gaccctcaaatctgttttacttctcaacaaaattaatgtataagaaaaaaatcctgaaaacactaccatatacacattcttttgattgttgaaagatcaayaatctgattcagtaaaggaagattttttttgctgactcattaaaggaaggtgatgcaatgtgttggttaatgccatgggctttggagtcaggctagcttg

SEQ ID NO: 128333 - DNA, 201 bp, Homo sapiens; identical to SEQ ID NO: 21787

SEQ ID NO: 128334 - DNA, 201 bp, Homo sapiens
cctaagggatgtttaccttcttcatgagagttatgatgatgtgcagcagagtttcttcctggcagagacattgaagtaggtgaaaattattctaaaaccawgtggctaaggtacctgaacagatctttgtagatgtctttatcatgaacacattcaagtaatatcaagtatgcctgattcagaatatcaggcatggctata

SEQ ID NO: 128335 - DNA, 201 bp, Homo sapiens
gtatatgtggagactgactcatgatccaaagtacaggaaatgggcctgggaagccgtagaggtgatgttttaatttgcatgtttcttatagataaatttcrtagtaaaaaatgttcagtgatacccataaatcaggcttatcaacttttctataatttttaatgcttcgaccaggattttttccacccaggactgtgtatt

SEQ ID NO: 128336 - DNA, 201 bp, Homo sapiens
tatgtgttcatgtatgtttatatccccttgattatatatatatatatatatatatatatgcataatatgtacatggttatgtgcgtgtatataattatctraaataataccttaagcattaatgaaagttattgggggttctggaaagttgtttaaatcaagagaaaaacaattgtcactggaagaaacaaatctaaattt

SEQ ID NO: 128337 - DNA, 201 bp, Homo sapiens
ttcttcaaggggttgcttgtttatgagatcataaggttggtttatgtgttatgatttttatttcttgtcaactctttaacataatatatgacctgaaatcrtttccctgtgtcacaacactgaggtctcaattttggggatgcccccagtaacctctgctagaacctgagctatagtggtgagccaggagtgctgtagggt

SEQ ID NO: 128338 - DNA, 201 bp, Homo sapiens
agtttgagatcagcctgggcaacaagtcatcaccctgtctttacaaaatttaaaaattagcccgtcatgctggcacactcctatagtccctagctactcargaggctgaagagggaggatcacttgagcccaggagttcaaggttattttgagctaagatcacaccgctgcacgccagcctgagcaacagagcgagactct

SEQ ID NO: 128339 - DNA, 201 bp, Homo sapiens
tttcatattgatggctagtagttaaaattcacatttattatactttatgctagccttaggcatatagcctataatttatattaactattgacagtttatamccttttggtaaagatcagatgtgagaataatctgccttggcaggttaaaacaaaacacttttattttgacacttaactttccagtttatttttatgggta

SEQ ID NO: 128340 - DNA, 201 bp, Homo sapiens
cacactcctatagtccctagctactcaagaggctgaagagggaggatcacttgagcccaggagttcaaggttattttgagctaagatcacaccgctgcacrccagcctgagcaacagagcgagactctcttgaaaattttaaaaaaaaaaatcatgagaaactgacaaattccttccatttaaacatctgataacttacag

SEQ ID NO: 128341 - DNA, 201 bp, Homo sapiens
gttgtctgtatgcctaaatcacaaggtcttaattaaccgtgtaaacgagatttacgtagtctctgtctaacatcttagcacctagatgttttgaaaccgcycagtcttgcataaagcagtggaactaaatgtgttctttaaaattccttgttgctgtgagaacccaaaagagccagcataattagctttagtgtttagtca

SEQ ID NO: 128342 - DNA, 201 bp, Homo sapiens
tgcatgctacatggttcttcagagggtttctagcaggagtgagcctcgttgcacacagttgaacaatatgattcattggctcttctgtccctgttttgctyttcccacttgcccacttcctgatgtcacctccctgatagacttcctgcatcctgcgtccaacccttgtctcatgctttatttttaagggaacgcaaactg

SEQ ID NO: 128343 - DNA, 201 bp, Homo sapiens
tccttcaagaatcattctggaatgcatgctacatggttcttcagagggtttctagcaggagtgagcctcgttgcacacagttgaacaatatgattcattgrctcttctgtccctgttttgcttttcccacttgcccacttcctgatgtcacctccctgatagacttcctgcatcctgcgtccaacccttgtctcatgcttt

SEQ ID NO: 128344 - DNA, 201 bp, Homo sapiens
attttttaaaccagaaaaactgggacttcgaaggcatggccgcacgtttttcccctggtgttatgcccacccccgtggcctcctgtgtttcagcagcagcyccgcatatgcttgcagctcccacctccagcacttggctgttctgatgcatacttgagaccacagctggaaaccatgtcaggaaaagaaggtggaagagct

SEQ ID NO: 128345 - DNA, 201 bp, Homo sapiens
ggctgaagagggaggatcacttgagcccaggagttcaaggttattttgagctaagatcacaccgctgcacgccagcctgagcaacagagcgagactctctygaaaattttaaaaaaaaaaatcatgagaaactgacaaattccttccatttaaacatctgataacttacagcatgagctttatcagaatattgtatgtata

SEQ ID NO: 128346 - DNA, 201 bp, Homo sapiens
cactgaggtctcaattttggggatgcccccagtaacctctgctagaacctgagctatagtggtgagccaggagtgctgtagggtcttgcattttttaaacmagaaaaactgggacttcgaaggcatggccgcacgtttttcccctggtgttatgcccacccccgtggcctcctgtgtttcagcagcagccccgcatatgct

SEQ ID NO: 128347 - DNA, 201 bp, Homo sapiens
gggaggatcacttgagcccaggagttcaaggttattttgagctaagatcacaccgctgcacgccagcctgagcaacagagcgagactctcttgaaaatttwaaaaaaaaaaatcatgagaaactgacaaattccttccatttaaacatctgataacttacagcatgagctttatcagaatattgtatgtatatattcacat

SEQ ID NO: 128348 - DNA, 201 bp, Homo sapiens
gtagtacaaatactattatcttatactatattcttaaattgtcctcactacacaaatgtgtgtctttgttttttggcaaatgaagagtaagagaaaagaarttagtatttattgagacctacatgtgcctagtattcttgttcagtcccactgcaactctatgagatgggcattaatttcacacctttgtatattaaacat

SEQ ID NO: 128349 - DNA, 201 bp, Homo sapiens
gttcttcaaggggttgcttgtttatgagatcataaggttggtttatgtgttatgatttttatttcttgtcaactctttaacataatatatgacctgaaatygtttccctgtgtcacaacactgaggtctcaattttggggatgcccccagtaacctctgctagaacctgagctatagtggtgagccaggagtgctgtaggg

SEQ ID NO: 128350 - DNA, 201 bp, Homo sapiens
tgaggcaggaggatcgcttgaacccaggaggcggatgttgcagtgagccgtgattgcaccactgcactccagcctgggcagtagagcaagacgccgtctcaaaaaaaaaaaacaaaaacaaaacaaaacaaaaaaacttcagttctaccttcttattaaaatcagctcctaccttcaaaaacctgcaggcttttctttagc

SEQ ID NO: 128351 - DNA, 201 bp, Homo sapiens
ggaggatcacttgagcccaggagttcaaggttattttgagctaagatcacaccgctgcacgccagcctgagcaacagagcgagactctcttgaaaattttwaaaaaaaaaatcatgagaaactgacaaattccttccatttaaacatctgataacttacagcatgagctttatcagaatattgtatgtatatattcacata

SEQ ID NO: 128352 - DNA, 201 bp, Homo sapiens
ctatgtagaagagaagaatttactgggcttccttacttgtaaggtgaaaggattagactaacattgagttattgctaagatactgaactttgaagttttckttatttaaatttttattttagtttttaataaaattttactcaattagtatgcagacttttgcatatatattttaggcctgttaatgatagttttgggtta

SEQ ID NO: 128353 - DNA, 201 bp, Homo sapiens
cagtggctcactcctgtaatcccagcattttgggaggccgaggcgggtggatcatgaggtcaggagattaagaccatcctggctaacatggcgaaaccccrtctctactgaaaatacaaaaaatttcccaggcatggtggcacacgcctgtagtcccagctacttggggggctgaggcaggagaatagcttgaacctggga

SEQ ID NO: 128354 - DNA, 201 bp, Homo sapiens
atctgtcatgctgtatggaatcataagataataaggagaattctaatataagtgtgactctaaataaacatcataaggcttgaagatccaaagaaacaatttattatctgttcctcgaaagcttgcatctcgatatagctcctcaagcaaaaggaaactggctgaatctgctccaaaactaaaatttgttattttcattgt

SEQ ID NO: 128355 - DNA, 201 bp, Homo sapiens
tctgtcatgctgtatggaatcataagataataaggagaattctaatataagtgtgactctaaataaacatcataaggcttgaagatccaaagaaacaatttattatctgttcctcgaaagcttgcatctcgatatagctcctcaagcaaaaggaaactggctgaatctgctccaaaactaaaatttgttattttcattgtc

SEQ ID NO: 128356 - DNA, 201 bp, Homo sapiens
ctgtcatgctgtatggaatcataagataataaggagaattctaatataagtgtgactctaaataaacatcataaggcttgaagatccaaagaaacaatttattatctgttcctcgaaagcttgcatctcgatatagctcctcaagcaaaaggaaactggctgaatctgctccaaaactaaaatttgttattttcattgtca

SEQ ID NO: 128357 - DNA, 201 bp, Homo sapiens
ggaatcataagataataaggagaattctaatataagtgtgactctaaataaacatcataaggcttgaagatccaaagaaacaatttattatctgttcctcraaagcttgcatctcgatatagctcctcaagcaaaaggaaactggctgaatctgctccaaaactaaaatttgttattttcattgtcaagcctgttatttca

SEQ ID NO: 128358 - DNA, 201 bp, Homo sapiens
gaatcataagataataaggagaattctaatataagtgtgactctaaataaacatcataaggcttgaagatccaaagaaacaatttattatctgttcctcgaaagcttgcatctcgatatagctcctcaagcaaaaggaaactggctgaatctgctccaaaactaaaatttgttattttcattgtcaagcctgttatttcac

SEQ ID NO: 128359 - DNA, 201 bp, Homo sapiens
aatcataagataataaggagaattctaatataagtgtgactctaaataaacatcataaggcttgaagatccaaagaaacaatttattatctgttcctcgaaagcttgcatctcgatatagctcctcaagcaaaaggaaactggctgaatctgctccaaaactaaaatttgttattttcattgtcaagcctgttatttcact

SEQ ID NO: 128360 - DNA, 201 bp, Homo sapiens
cagcgcggggtgcattcatacatacatattcattcattcattcagactaggaccatgtagacatgccaattcacctaacatgcacagctttgagatgtggragaaaagctggtgtactcaaaacccatgcagacatgagacaacatgcaaactcagtacaggcagtggccccagcctggaatcaagttttttgtgtttttt

SEQ ID NO: 128361 - DNA, 201 bp, Homo sapiens
cagcgtgcttgattagatcaggacattaaacttaatttgttagaaacaacaatagagttgtatacaacatttaattagttttcttactcttctatattcayaaacatttactgagtatgtaaacaggcagtatcttatgtttccatacattatcaatgagatagtaaatgagacagcatcctgtatacttcccttttagtc

SEQ ID NO: 128362 - DNA, 201 bp, Homo sapiens
tttgctggtgacaaattatctcattttttgccaatccaaaaatacttccctttcacttttgaagaaaagtttcatcagatatattgttgtttaaaaaatayataaagaagggttgttggttttcagattttttatcaaattttgaagatgccattcttgcgtcttatggctgttcattgtttctgagaagtcagccattaa

SEQ ID NO: 128363 - DNA, 201 bp, Homo sapiens
gtagtaaacttcagaaaatatcagagctgtagacagcagcttggcatgaggagaggaattcatggttttccataaatctagtgacaggccaggtcgaatargacaacaccatcttgtctgccccagtagcatacagggcaggaggagaaaagttaggtacagagctggagctgagagccgaagtggaggaggaggaaggct

SEQ ID NO: 128364 - DNA, 201 bp, Homo sapiens
gctcccgtggtggtagtaaacttcagaaaatatcagagctgtagacagcagcttggcatgaggagaggaattcatggttttccataaatctagtgacaggycaggtcgaataggacaacaccatcttgtctgccccagtagcatacagggcaggaggagaaaagttaggtacagagctggagctgagagccgaagtggagg

SEQ ID NO: 128365 - DNA, 201 bp, Homo sapiens
attatctcattttttgccaatccaaaaatacttccctttcacttttgaagaaaagtttcatcagatatattgttgtttaaaaaatatataaagaagggttrttggttttcagattttttatcaaattttgaagatgccattcttgcgtcttatggctgttcattgtttctgagaagtcagccattaatcttgtcattgttt

SEQ ID NO: 128366 - DNA, 201 bp, Homo sapiens
gcctttggggtacagaggatatataggaactttgtactttccactcagttttgctgtgcatctaaaacttctgtttaaaaaaaagtctgttttagaaaacrtacacacacaaaagaaaggataaaagggaaatacttgtgccctacaattctcctcttgctaactgaagaatggggcttgactctagggatagcttgtttc

SEQ ID NO: 128367 - DNA, 201 bp, Homo sapiens
acaattcataatcctttaattaagaaaatagtgatttctggccttaattcaaaaaggaaatgcttatactgtgcaagtctcttctttaacagctttattcrtaattgccaaaacttggaagcaacaaagatgttcctcaataggtaaatggataattaaactgcagtatatccagacaatggaatattattcagcactaaa

SEQ ID NO: 128368 - DNA, 201 bp, Homo sapiens
aatctgagactactttgcagaaattctcgtaaagtctcttgtctttcgggtaagcatttgatagtttctgtaaatcccagtcaccacgcacaagtaacatsctgtgtgttgaaagtggacaaagagaatttccctgctgttgcctctgctttgtggcactcttgttctctcagagaccaaatgaggacaccagtgttaggt

SEQ ID NO: 128369 - DNA, 201 bp, Homo sapiens
gtttcccccagattgcatgggtcacacatttggctcaggacagtgtacaaggtaatatatgttaggcttcagactcaatctgagttcatagccaacctccwccaccaagatctgatgttgggaaaattactttacctcttgatttcttcatctgtgcaatgggactctctctggggagactaccttccttgcagagttgtt

SEQ ID NO: 128370 - DNA, 201 bp, Homo sapiens
ggaagttggttttgcatgtcatgtttctgaaagcctcactcttaaacataatgtaaatttttccagaataatgagataagtaacagaaacatacaaagatrtatatcaacagcacatgagtaacactttatttggaagccaagtttcccccagattgcatgggtcacacatttggctcaggacagtgtacaaggtaatata

SEQ ID NO: 128371 - DNA, 201 bp, Homo sapiens; identical to SEQ ID NO: 21790

SEQ ID NO: 128372 - DNA, 201 bp, Homo sapiens
atgagtgagttacaaagtatttccaattaggtagagttcgatatctgctaatatcatcgtaataatggtaatcatatttgatgtttatttctaatagggcygttaaagtttttgcatggtttaaacctcagttaagagtcacatatctgaaaaagtagtattctttgataaatatgaattctctccttaggaccacaattt

SEQ ID NO: 128373 - DNA, 201 bp, Homo sapiens
aatatctttctgaaaataagagatttgttggaatttaaatgtaacagtgacttgcagttgacatagggttgcatcctagttgctaatgtgattttgctgcrttatctgaattaaaagctgaatcactctaaaattcatttccctctctttccagatcatgtatcagttggaggacttggagacagcttctatgagtatttg

SEQ ID NO: 128374 - DNA, 201 bp, Homo sapiens
aatcaattatagaaggattaaatcacaaaatatatcgtactcttttttctaatcaattatctgtatccttgacacagttttttcagatctactaaagactrtccttctttgtatttatttatatttcccatggccacacaaaattattgtttgaaggtcttggaatttcattgtagtttttattaggaggtagcaacttgg

SEQ ID NO: 128375 - DNA, 201 bp, Homo sapiens
gatacctgggcagatgacatatcagacacttacgattctgaaggcttcatcaaaccagttttttaaatcaattatagaaggattaaatcacaaaatatatmgtactcttttttctaatcaattatctgtatccttgacacagttttttcagatctactaaagactatccttctttgtatttatttatatttcccatggcca

SEQ ID NO: 128376 - DNA, 201 bp, Homo sapiens
cacaaaacaagaatatgatcttaatggtatgtttagtttgctagtattaggtaacatgaggaagatatctattcatatttgtcagtatatgcaaaaattawctttaaaatgcgattgaagaaacaagtaacagtggttatctgtggagagggaataggaaaagtgtggatggggcaggaattggaagtaaaatttgtggtt

SEQ ID NO: 128377 - DNA, 201 bp, Homo sapiens
agttcaaggttattttgagctaagatcacaccgctgcacgccagcctgagcaacagagcgagactctcttgaaaattttaaaaaaaaaaatcatgagaaaytgacaaattccttccatttaaacatctgataacttacagcatgagctttatcagaatattgtatgtatatattcacatagattatataatgtctcagctg

SEQ ID NO: 128378 - DNA, 201 bp, Homo sapiens
ataacttacagcatgagctttatcagaatattgtatgtatatattcacatagattatataatgtctcagctgatctatggtaaagggtaaagccttacctmgggatttgggatttttttttggctttagggggtttttttttggtagtttcaggttttttggttttgtttttttgcacagacattttctttgctcttctaa

SEQ ID NO: 128379 - DNA, 201 bp, Homo sapiens
taagatcttggcctggggaccaagtgagggagatcacctgtcaccacaggcctgcaaggggtcacttgctggcctcacattgaccacagaggtcttagcasggctaatctaatgaattcaaagtttccgtgttaattaaaaatctgccgaataaacagaccaaaaaccctgaggttaaacctttaaacacaaagtgacaac

SEQ ID NO: 128380 - DNA, 201 bp, Homo sapiens
ggatttaactcatgatgcttgctattttcttacctacccttcatcctttgtttagagctccaatcattataaacattctcatatcctgttctctgctattwgcacatcccagtcacataggatcactaataatagaagcatttactcaaaaccaaggtggtccccatgcctagaggctgagaatcccaagaacagattata

SEQ ID NO: 128381 - DNA, 201 bp, Homo sapiens
gctaacagcagttatctttgttctaactctgcatcatttaagtcaacttgtatgttcaagaagaagaagaatggcatgaaaattgttttttagattttcayggtaacattttattttctattataggtaatgaatattcgaacagtactgaacaaactggaaaaaccacaaggcctttatcctaactatctgaatcccagt

SEQ ID NO: 128382 - DNA, 201 bp, Homo sapiens
agatcatcttaacagtcttcaataggcagaaatgtgggaaactgttaccaggtttaaaaactgaaaaacacaagtactaattgagaggaatatgatttgagggtttaagtttattagattttattattagatattattactcttaaacataggaaacgtagtcacgtgaaccaaactaaatacatgggttagcttcgcttt

SEQ ID NO: 128383 - DNA, 201 bp, Homo sapiens; identical to SEQ ID NO: 21784

SEQ ID NO: 128384 - DNA, 201 bp, Homo sapiens
aggcctgcaaggggtcacttgctggcctcacattgaccacagaggtcttagcacggctaatctaatgaattcaaagtttccgtgttaattaaaaatctgcsgaataaacagaccaaaaaccctgaggttaaacctttaaacacaaagtgacaacttctgaactcagtgacagcttctgcctggagaccatagtcatcaacc

SEQ ID NO: 128385 - DNA, 201 bp, Homo sapiens
ttatcctgctttcttatatatggaaagaactttaattatgatctctaattaggtagatttaaatccagaaagtagagatatcaacaaaaggcctaattggaaaaaaaaaaaaagaattgaaaacagtgatcacaataccttaaaataaaaatatatgttaatcccatacagtgaagaaataacagctatgcaatatagtta

SEQ ID NO: 128386 - DNA, 201 bp, Homo sapiens; identical to SEQ ID NO: 21788

SEQ ID NO: 128387 - DNA, 201 bp, Homo sapiens
cctggctaattactttttatttatttatttatttatttatttatttatttttactttttttttttttttttttttttttgagatggagtcttgctctgtcrcccaggctggagtgcagttgtgcagtctcggctcactgcaagctccgcctcccaggttcatgccattctcccgcctcagcctcccgagtagctgggacta

SEQ ID NO: 128388 - DNA, 201 bp, Homo sapiens
tgaggtgggaaggtcacctaagcccgggaggtcaaggctgcagtgagccaaaattgcaccactacacttcaacctgggtgacagagtgagaccctgtctcaaaaaaaaaagtaaaacaatagtaagaagagccagttaccttggtttcaagattagcaaaagggagctggaacatgcattggagggagccctaccttctga

SEQ ID NO: 128389 - DNA, 201 bp, Homo sapiens
gatttggttgctaaaaccatataagatagtaaatgccaggatgtggttactttgggggagagagaaggaagtatgattgggacaaggcccacgtagggttwctagggtggctggcaaagtcctgtttcatgatctggatgctgcttactatggcatgtgtcttataatgttacactaggctatacagctgtatgtttgtgt

SEQ ID NO: 128390 - DNA, 201 bp, Homo sapiens
agcatcaaccctaagtgtagttttaagagaaatggcacatcactttcaggtttaacaatcagtgagttagattgctcttccacctcagaccttgcctgaaycagacacagccccttgtgtccccaagaacagcagggacatgagtatcactggaccacagaacttcttccctttcatgacaaacagcggactgttatataa

SEQ ID NO: 128391 - DNA, 201 bp, Homo sapiens
tgaggtaggaggatcactggagcctaggctttcaaggctacagtgagctatgattgtgtcactgcactttagcctgggtgacagagtgagaccttgtcttaaaaaaaaaaaaaaatttaaaaaaggcacttaaaagaagtccaaaatgtatctcaggaaagttgtacaaaatgtatctcaggaaagttgtacataaaataa

SEQ ID NO: 128392 - DNA, 201 bp, Homo sapiens
attgccgtcttttcttgatccatggagaaattctcttccaatggataagtgaaggtttggagaaattgtgaattaatttcccccaagttgctttttatctrtgtctctccgttctgttttccagttccaccaaagattgaaagaaataaggttaattcaatgaccctaaaaatattttatctgaaagctctagaagttact

SEQ ID NO: 128393 - DNA, 201 bp, Homo sapiens
actggagcctaggctttcaaggctacagtgagctatgattgtgtcactgcactttagcctgggtgacagagtgagaccttgtcttaaaaaaaaaaaaaaatttaaaaaaggcacttaaaagaagtccaaaatgtatctcaggaaagttgtacaaaatgtatctcaggaaagttgtacataaaataagacaggcctcatttt

SEQ ID NO: 128394 - DNA, 201 bp, Homo sapiens
ttgggggaatggattctactttccagaacaactgtctagcagtttcctttctccatgaaatcctgcctgtgctaccaaatcaggaaggtggaacaaagctstacctcttaccaaatcctcccagactccttaataatatccaaccaaaaccataggaaattaacccaaatgatctgtatctgcctgtgtttctgttaaatt

SEQ ID NO: 128395 - DNA, 201 bp, Homo sapiens
tttcttactcttctatattcacaaacatttactgagtatgtaaacaggcagtatcttatgtttccatacattatcaatgagatagtaaatgagacagcatyctgtatacttcccttttagtcctttagaatcttttcatagtgtagcagatactcaataaatgacctggcctaattaatgagccctgatgccaattaagaa

SEQ ID NO: 128396 - DNA, 201 bp, Homo sapiens
ggagcctaggctttcaaggctacagtgagctatgattgtgtcactgcactttagcctgggtgacagagtgagaccttgtcttaaaaaaaaaaaaaaatttaaaaaaggcacttaaaagaagtccaaaatgtatctcaggaaagttgtacaaaatgtatctcaggaaagttgtacataaaataagacaggcctcattttaca

SEQ ID NO: 128397 - DNA, 201 bp, Homo sapiens
tccctaggtagagtggatggttgggttgactcatcccatccattagtgagaactacacaccagggcgccccacgttggaggctcatggctagctctcagcwatctgcctttgagttgggcaccaggccctggttcattcagctgggccagcatcacatcctacaaactacggaaattttatgtaagaacccatagaaggag

SEQ ID NO: 128398 - DNA, 201 bp, Homo sapiens
taggctttcaaggctacagtgagctatgattgtgtcactgcactttagcctgggtgacagagtgagaccttgtcttaaaaaaaaaaaaaaatttaaaaaaggcacttaaaagaagtccaaaatgtatctcaggaaagttgtacaaaatgtatctcaggaaagttgtacataaaataagacaggcctcattttacagatgtt

SEQ ID NO: 128399 - DNA, 201 bp, Homo sapiens
ctccaagcctacggaagtgaaaggaagagttctgccaccatcctggatctcatgcacaaatatgctgtgttcttcatccaccttagggcctgggctgtgtyatttcaccacttatggaaatgaaaatgtaccaaaccaactattactgctgcacagtggcctgtctttgggaaggggaaagttttttgaatatgaggaata

SEQ ID NO: 128400 - DNA, 201 bp, Homo sapiens
taaagcaaagttctgtttcagtatatgtcaggtaactttttccctacagggtacagaagtaagagatactcatattttcacttttttaatatagcagtacrtttaatgctttccctgtatctgcaaggttttcaaaaaaagaaagattggaagttggttttgcatgtcatgtttctgaaagcctcactcttaaacataatg

SEQ ID NO: 128401 - DNA, 201 bp, Homo sapiens
tagagtaatgcatttgcaggcccaggaaatatttgccatcacttacaaaatacctcagatgatcttcagtccatagaaaatatgattttagggtggtaatratacaggcatattagatgttagtgcttgccttaaagatggtactgtatcacatatagtctaaaataatcatttgccatttttagtgataatcttagtaat

SEQ ID NO: 128402 - DNA, 201 bp, Homo sapiens
gcagtctattttaacaggttgctgaatctggcatatatttattgctggccacttgccatccatcaacaatagaatgaatgatgatgatgatgatgattatkattattattattattattattatttttaccattttgaagaaaaaaaatcaggctctatcagattttaaaaccctaccagaagggttagagtaatgcattt

SEQ ID NO: 128403 - DNA, 201 bp, Homo sapiens
aatgcagtctattttaacaggttgctgaatctggcatatatttattgctggccacttgccatccatcaacaatagaatgaatgatgatgatgatgatgatkattattattattattattattattatttttaccattttgaagaaaaaaaatcaggctctatcagattttaaaaccctaccagaagggttagagtaatgca

SEQ ID NO: 128404 - DNA, 201 bp, Homo sapiens
tgggatttgtgactttgtattataagatcagctgaatttggttaagctgtaattgagcaagttaaagtggacttggatccctttcggtttaggaagaatgycttcatccttcctatgcagatagcttccttccacagtccatcagcatatctgcttttctgagacccctcctcagggacagaaccctcccatacttggggg

SEQ ID NO: 128405 - DNA, 201 bp, Homo sapiens
tggaactttgaccaatagccacttctagctgtgaagaggccaggaaagaacattaggcttttacagttgtcagtttcagcaagaagcaaaggaaaaagagktttggttgtggggtaaatatatctatattatctgcagtaggtctaatatatattcatatttttattattgttttgcagctttgtgtagtcttttggaata

SEQ ID NO: 128406 - DNA, 201 bp, Homo sapiens
aaaaaaaaaaaaaaaaaattgcaggccatgtagtcaatccactagatttcaggaccttggttctttgtcagtaaaattcaaaggtgagtagttagttgttrggaaggtgaccttctgagacaggaccaaggaagcaggcgagagggacagatccttcataaatcctgacagaggatcctgtagaaggtaaaatatccttct

SEQ ID NO: 128407 - DNA, 201 bp, Homo sapiens
acattttataatgcgatcttttgttcaatttgactagtttgtttttctgacactctctaaagtggtgtaacagtgataagtacttcttcacagactttgtrattaagagagatcagccttaaatataattggcacctttcaagggtttgggcaaagtccagccagtgtcctgtgatgtcagggtattagaacagagaacgt

SEQ ID NO: 128408 - DNA, 201 bp, Homo sapiens
gccagtgtctggagataagggttgtcacatctgttggggtgagatacagacatctagtgtatacaggccagggacaccactctgcgtccaaaaatgcacarggctgccctccccaaccccccaaacacaggcttatccagcccgaatttcagtagtgtcaagattaaaagccccagtttaaaccagtggccttttattttt

SEQ ID NO: 128409 - DNA, 201 bp, Homo sapiens
caaattagagatagtgtcagagctggaatttgaagccaagtcttccggccccagaacacctcctctttgccactctattttgttatccctccaagcctacrgaagtgaaaggaagagttctgccaccatcctggatctcatgcacaaatatgctgtgttcttcatccaccttagggcctgggctgtgtcatttcaccactt

SEQ ID NO: 128410 - DNA, 201 bp, Homo sapiens
gagaccccaatcctccagcatttcagggtaggatatcttggtcatcaaaaataacctgagcatatttcctagggtgtttggtgtttggatggcacggtaaygggcatagagtaagcactcagtaaattatgcctgactgactggctcagtcttaagttgctgagtttggcaagatgcatccccgaagtgcttactttttaa

SEQ ID NO: 128411 - DNA, 201 bp, Homo sapiens
attctcctgtttatggatgtttgtgttatctctaattttcagtgatcataagtaaaactgcttatgaaaattcacgttcaggccgggcatggtggctcacrcctctaatcccagcactctgggaggccaaggcaggaggattgcttgaggccaggagttcaagaccagctgggcaacatggcaaaactctgtctctactaa

SEQ ID NO: 128412 - DNA, 201 bp, Homo sapiens
atgttctctttcagaatctggattcttcctctagtaacctcatcagagctcaggaggagataacaaatcaaacattgagattgaagttgattcagtctcgkgtatgatttgactcaagtatcaatgagctaattaatatttttatctaaaaatattttgtaattgtgccaaaggttgagactctagaatactggagataat

SEQ ID NO: 128413 - DNA, 201 bp, Homo sapiens
atactatttctttaatgccttatacccaatttaatattttctgggttaaaataatgggttgcaattatgaaattttggtcctttgtttcctttcacacagygtgtcagctctacctttcaccaggagcaaatatacgtattcaggaagaaaacatctttggcttgctttcagtttatctttttttgtgagggtttcactac

SEQ ID NO: 128414 - DNA, 201 bp, Homo sapiens; identical to SEQ ID NO: 21780

SEQ ID NO: 128415 - DNA, 201 bp, Homo sapiens
cactaggaactcacaatggcaaatgatacctgggcagatgacatatcagacacttacgattctgaaggcttcatcaaaccagttttttaaatcaattatasaaggattaaatcacaaaatatatcgtactcttttttctaatcaattatctgtatccttgacacagttttttcagatctactaaagactatccttctttgt

SEQ ID NO: 128416 - DNA, 201 bp, Homo sapiens
ttattttaataacaaaatattttgagctttcaactggctatcatggccctatctggagactacactaggaactcacaatggcaaatgatacctgggcagawgacatatcagacacttacgattctgaaggcttcatcaaaccagttttttaaatcaattatagaaggattaaatcacaaaatatatcgtactcttttttct

SEQ ID NO: 128417 - DNA, 201 bp, Homo sapiens
tatacttccattcatgtttactctgagaaatgacagtgggatctggagtatgtggcagattcatttctgttacataatcttttgtttcttttcaatttttyaccatatgtatgttattgttatactttttaatgatttcagaaaagccattgcagaaaaaatgttcctcaaattgaacaaattgatctttataaataacta

SEQ ID NO: 128418 - DNA, 201 bp, Homo sapiens
tcaaggctacagtgagctatgattgtgtcactgcactttagcctgggtgacagagtgagaccttgtcttaaaaaaaaaaaaaaatttaaaaaaggcacttaaaagaagtccaaaatgtatctcaggaaagttgtacaaaatgtatctcaggaaagttgtacataaaataagacaggcctcattttacagatgtttctcaat

SEQ ID NO: 128419 - DNA, 201 bp, Homo sapiens
caaggctacagtgagctatgattgtgtcactgcactttagcctgggtgacagagtgagaccttgtcttaaaaaaaaaaaaaaatttaaaaaaggcacttaaaagaagtccaaaatgtatctcaggaaagttgtacaaaatgtatctcaggaaagttgtacataaaataagacaggcctcattttacagatgtttctcaatt

SEQ ID NO: 128420 - DNA, 201 bp, Homo sapiens
ggctacagtgagctatgattgtgtcactgcactttagcctgggtgacagagtgagaccttgtcttaaaaaaaaaaaaaaatttaaaaaaggcacttaaaagaagtccaaaatgtatctcaggaaagttgtacaaaatgtatctcaggaaagttgtacataaaataagacaggcctcattttacagatgtttctcaattatg

SEQ ID NO: 128421 - DNA, 201 bp, Homo sapiens
acagtgagctatgattgtgtcactgcactttagcctgggtgacagagtgagaccttgtcttaaaaaaaaaaaaaaatttaaaaaaggcacttaaaagaagtccaaaatgtatctcaggaaagttgtacaaaatgtatctcaggaaagttgtacataaaataagacaggcctcattttacagatgtttctcaattatgttat

SEQ ID NO: 128422 - DNA, 201 bp, Homo sapiens
cagtgagctatgattgtgtcactgcactttagcctgggtgacagagtgagaccttgtcttaaaaaaaaaaaaaaatttaaaaaaggcacttaaaagaagtccaaaatgtatctcaggaaagttgtacaaaatgtatctcaggaaagttgtacataaaataagacaggcctcattttacagatgtttctcaattatgttatt

SEQ ID NO: 128423 - DNA, 201 bp, Homo sapiens
agtaatgcagtctattttaacaggttgctgaatctggcatatatttattgctggccacttgccatccatcaacaatagaatgaatgatgatgatgatgatkattattattattattattattattattatttttaccattttgaagaaaaaaaatcaggctctatcagattttaaaaccctaccagaagggttagagtaat

SEQ ID NO: 128424 - DNA, 201 bp, Homo sapiens
agtgagctatgattgtgtcactgcactttagcctgggtgacagagtgagaccttgtcttaaaaaaaaaaaaaaatttaaaaaaggcacttaaaagaagtccaaaatgtatctcaggaaagttgtacaaaatgtatctcaggaaagttgtacataaaataagacaggcctcattttacagatgtttctcaattatgttattc

SEQ ID NO: 128425 - DNA, 201 bp, Homo sapiens
gtgagctatgattgtgtcactgcactttagcctgggtgacagagtgagaccttgtcttaaaaaaaaaaaaaaatttaaaaaaggcacttaaaagaagtccaaaatgtatctcaggaaagttgtacaaaatgtatctcaggaaagttgtacataaaataagacaggcctcattttacagatgtttctcaattatgttattcc

SEQ ID NO: 128426 - DNA, 201 bp, Homo sapiens
tgagctatgattgtgtcactgcactttagcctgggtgacagagtgagaccttgtcttaaaaaaaaaaaaaaatttaaaaaaggcacttaaaagaagtccaaaatgtatctcaggaaagttgtacaaaatgtatctcaggaaagttgtacataaaataagacaggcctcattttacagatgtttctcaattatgttattcca

SEQ ID NO: 128427 - DNA, 201 bp, Homo sapiens
gctatgattgtgtcactgcactttagcctgggtgacagagtgagaccttgtcttaaaaaaaaaaaaaaatttaaaaaaggcacttaaaagaagtccaaaatgtatctcaggaaagttgtacaaaatgtatctcaggaaagttgtacataaaataagacaggcctcattttacagatgtttctcaattatgttattccaaat

SEQ ID NO: 128428 - DNA, 201 bp, Homo sapiens
tatgattgtgtcactgcactttagcctgggtgacagagtgagaccttgtcttaaaaaaaaaaaaaaatttaaaaaaggcacttaaaagaagtccaaaatgtatctcaggaaagttgtacaaaatgtatctcaggaaagttgtacataaaataagacaggcctcattttacagatgtttctcaattatgttattccaaatct

SEQ ID NO: 128429 - DNA, 201 bp, Homo sapiens
aatcccagctccttgggaggatgaggcaggagaatcgcctgaacccacgaggtggagattgcagtgagccaagattgagccactgcactccagcctgggcracagagcgagaccctgtctcaaaaaaaaaaaaaaaacaaaaaaaaaaaacggaatgcttcataaatttgcacatgatccttgcggaggggccgtgctaat

SEQ ID NO: 128430 - DNA, 201 bp, Homo sapiens
tgaagatatacagtgcatttgagctttatctcttacctgtgagagtgatgataatgcctacctttcctggatgtgaggagccagcaagtgagcggatgcamaactgtttgcatgctaggaaacctttgcagatattgattacttaaggaaatagttttggggtttgaagaccgggtttctaaatccctgtctgccacttgg

SEQ ID NO: 128431 - DNA, 201 bp, Homo sapiens
ataaattcttgcctgttcttatcccctgaacagcagaaaattatttttctctgtttttatgactcactttgttttaacctacttactactttcttagtgtyaaaggcagcacacacaaaggcactgagatgagagagcttgtggctttgccacttattaacagtccaaccctgtgaagatatacagtgcatttgagcttta

SEQ ID NO: 128432 - DNA, 201 bp, Homo sapiens
ttcagtcatacatgctttattctttcctctgcagacaggctgtcttatgaatcagtactcaagtttacatagccaataagtttaaacactaatagactttrtaataagcatctcagaggctcaattccaaattcccagaatggagaatctgacccagctttagttaagtgtctaatcatctatggccaggggggtggagta

SEQ ID NO: 128433 - DNA, 201 bp, Homo sapiens
cattagtgagaactacacaccagggcgccccacgttggaggctcatggctagctctcagcaatctgcctttgagttgggcaccaggccctggttcattcasctgggccagcatcacatcctacaaactacggaaattttatgtaagaacccatagaaggaggccataagtgggacttgaacttgtaggcttcagtgaaata

SEQ ID NO: 128434 - DNA, 201 bp, Homo sapiens
gggggggggatatttattataaaaaggaatctctcatggatttaggtgaagacctcacagaacctggaattacaaatgtgaaggtacagggaaccaagacygctattcctcatttcttactctgggctacttagtcttttgtcttcagtcatacatgctttattctttcctctgcagacaggctgtcttatgaatcagtac

SEQ ID NO: 128435 - DNA, 201 bp, Homo sapiens
ctgtccattacaagtagtgattactagaattctcattttttaaaactggctttatcagtcattctgactctttttctaaagaaattgctattgctaaccaygctttcatttcactggggaattaatgctcagtggcacattagaattcatgcaatagcattaaataattactgtttctttatatatctcctgccaacttag

SEQ ID NO: 128436 - DNA, 201 bp, Homo sapiens
ggagtcagtgggtgggggggggatatttattataaaaaggaatctctcatggatttaggtgaagacctcacagaacctggaattacaaatgtgaaggtacmgggaaccaagactgctattcctcatttcttactctgggctacttagtcttttgtcttcagtcatacatgctttattctttcctctgcagacaggctgtct

SEQ ID NO: 128437 - DNA, 201 bp, Homo sapiens
gagaaccattaaatgcatatgatccaatttttttagctagaactggaaacactgggttttccttaggagaacgagatacttcttagaaacagaacaatctktccattacaagtagtgattactagaattctcattttttaaaactggctttatcagtcattctgactctttttctaaagaaattgctattgctaaccacgc

SEQ ID NO: 128438 - DNA, 201 bp, Homo sapiens
ttggcatagattttgtctcctttatctgcagttttaattctggaatggtgaaaagtatgccagtaactacaggataccatttgttgagtgttcacttcctrttagatactatgctcaccactttatgtacatattctcattaaattctcagaacaacaagtatttggtttttctcagaatatgggtatttgacattattct

SEQ ID NO: 128439 - DNA, 201 bp, Homo sapiens
taacttttgagttgctaaattataatcccttagaatgttttagagaaatggacttatattttggtcaagtatttctttattctttttcttttcccctgtaycctctgccatttggtaacagcacaagagtttttataaaataatgtcaaaatttggccataaaaaaagagaaccattaaatgcatatgatccaattttttt

SEQ ID NO: 128440 - DNA, 201 bp, Homo sapiens
cctcagctattaatttccaagtatttttggtttatgaataacaacagcaataatagcaatgtctgataattttctctttttctctaggtttaaaacagagrcaacagttaaaactatacttttaataaaaagtgcagcttctcagttatactccatcatgtattccctttttctcctaatagaatgtgtttgttattcttc

SEQ ID NO: 128441 - DNA, 201 bp, Homo sapiens
ggcaaaaggaaggtgttaattgcagcgaggatgataaccactgcatcatttttgggtcattgtattacaactttgaatctataggcataaagggaaacacmctgactccttatttaaaaggaagaaacaaaacctttttgattcagatcatgtctgccatatttttaaattagggctagaacctgggaaaagcagcttaca

SEQ ID NO: 128442 - DNA, 201 bp, Homo sapiens
aatctgcatcagtttatttgttgagttgtatctctgttacttcccaggaaggactgtgcttccacaaaacttacatagttactatctccagaacacatgtmgtttaggatttcaccttgtttactttatggttctcaaaaggagagtcttctcacttgctcaaaatccatgtcctcatgaagccctctctacactctcaac

SEQ ID NO: 128443 - DNA, 201 bp, Homo sapiens
accctgcacctgtggggtcacagttttcttctctcagttctaaaacaagactttagtattttattccagacctatttgtgtaatcatgaatttaaagaacrttttcatattgatggctagtagttaaaattcacatttattatactttatgctagccttaggcatatagcctataatttatattaactattgacagtttat

SEQ ID NO: 128444 - DNA, 201 bp, Homo sapiens
gttttcaagttgttttccagaatgatttataaaatgaaaactgcattcattttcttatatgactgtaaactggtgaaagtggtgccaaaaacaaaaaaaartcttttgaccaaatacaacactgctgaaataaatgtagatgattgtgagattcctttaaaggtcaacactcgaatataaagattctgttattttattgaa

SEQ ID NO: 128445 - DNA, 201 bp, Homo sapiens
ggattttgttatccttggagggtcctggaaccagtccctcatagatactgagggatgactgtactttctagtttcatttaagttattgactgtaagcactstccaggaaaataacccttattcattcattccatgtcctttagttatgaaactgggaccagaagctttcagatttgatggtggtgttgaagccatcgctac

SEQ ID NO: 128446 - DNA, 201 bp, Homo sapiens
aagaagagagatttatttggctcacggttctgcagtctgtataagcaaggctccagcatctgcttggcttctcatgaagcctcaggaagctttccactcayggcagaaggcagtgggggagcaggcatgtgacatggtcagagaagggaccaagagagagaagggaggtgccatactctaaacaaccagatctcatgtgaa

SEQ ID NO: 128447 - DNA, 201 bp, Homo sapiens
ttcatagtacctggcaatgagaacatggcctatgctcctatcagagaatgaactgcatacaagacatttcaaatgagttaacagtgatacttagtgactgrtggaggcggtaaatcaaaaatcaaaatgcctgttcacttgagtccaagggactgaccagaaaataatgtcagtgatagagctggggaagtttgcccagaa

SEQ ID NO: 128448 - DNA, 201 bp, Homo sapiens
caaaagcagcacagattttgttgagaaatgtttagaaaaggagaaaggggcatggctcctttaataaacaggcttctgtcatcagattgtgttattaggamactggattgtgtatttttcatatataactccaagtgtgatgacatataagcacatttacagctattaatcagaaagggaagatctggccagagtagtgtg

SEQ ID NO: 128449 - DNA, 201 bp, Homo sapiens
atttgcattattatagctctttttggtactgtactcgtggagagagaggaagcacaaaagcagcacagattttgttgagaaatgtttagaaaaggagaaargggcatggctcctttaataaacaggcttctgtcatcagattgtgttattaggaaactggattgtgtatttttcatatataactccaagtgtgatgacata

SEQ ID NO: 128450 - DNA, 201 bp, Homo sapiens
ctatctgaatcccagtagtggacagtggggtcaacgtaagtcagaagatttgcattattatagctctttttggtactgtactcgtggagagagaggaagcrcaaaagcagcacagattttgttgagaaatgtttagaaaaggagaaaggggcatggctcctttaataaacaggcttctgtcatcagattgtgttattagga

SEQ ID NO: 128451 - DNA, 201 bp, Homo sapiens
gaaaagcttttcggtaatgagcaggagaaaaaagaaaacctggtctgagagataaaagaggtgactattaaaacggaaggacacagtctaccagaaactcrtgaggctttacaaatcaaaatctagactcactttaccatggaaactgaagacaattagaaagtatatgtttacaattttgtaatattttactttattttt

SEQ ID NO: 128452 - DNA, 201 bp, Homo sapiens
tgtttgtaataataagctaacagcagttatctttgttctaactctgcatcatttaagtcaacttgtatgttcaagaagaagaagaatggcatgaaaattgytttttagattttcacggtaacattttattttctattataggtaatgaatattcgaacagtactgaacaaactggaaaaaccacaaggcctttatcctaac

SEQ ID NO: 128453 - DNA, 201 bp, Homo sapiens; identical to SEQ ID NO: 21783

SEQ ID NO: 128454 - DNA, 201 bp, Homo sapiens
tgctttatctcttgtcttcctccacattaatccagagcacatacacaaacatgtacataccttctcccaaataagtacatacctgcatctatataagtgtmacgtcttcaaccttacctctccccctagacctaactcactttttaaaaaaaattcccacagttacagcatgtatcacttaatttattctctacctatggt

SEQ ID NO: 128455 - DNA, 201 bp, Homo sapiens
caacagagtgaggccctgtctcaaaaaaaaaaaatgttttatctgaacttgacaatctaataataaaaattagtgacaatcagtttactgaaatgtgactwttttttttcctcctctataatttaggccttggaaaaccattgcagagtgaatggaggctattcaggcctaagggatgtttaccttcttcatgagagttat

SEQ ID NO: 128456 - DNA, 201 bp, Homo sapiens
atgattgtgtcactgcactttagcctgggtgacagagtgagaccttgtcttaaaaaaaaaaaaaaatttaaaaaaggcacttaaaagaagtccaaaatgtatctcaggaaagttgtacaaaatgtatctcaggaaagttgtacataaaataagacaggcctcattttacagatgtttctcaattatgttattccaaatcta

SEQ ID NO: 128457 - DNA, 201 bp, Homo sapiens
tggttttaatttttttttacctaaaactctataacaaactttcatttaatttgaatccaatttgtaaaaaataaattttgactgggcacagtggctcatgsctgtaatcccaactctttgggaggccgaggcaagcagatcgcttgagcccaggagtttgagacaaccatgggcaacatggcaaaaccctatctctacaaa

SEQ ID NO: 128458 - DNA, 201 bp, Homo sapiens
tgattgtgtcactgcactttagcctgggtgacagagtgagaccttgtcttaaaaaaaaaaaaaaatttaaaaaaggcacttaaaagaagtccaaaatgtatctcaggaaagttgtacaaaatgtatctcaggaaagttgtacataaaataagacaggcctcattttacagatgtttctcaattatgttattccaaatctac

SEQ ID NO: 128459 - DNA, 201 bp, Homo sapiens
tttacatttagtttatggttttaatttttttttacctaaaactctataacaaactttcatttaatttgaatccaatttgtaaaaaataaattttgactggrcacagtggctcatggctgtaatcccaactctttgggaggccgaggcaagcagatcgcttgagcccaggagtttgagacaaccatgggcaacatggcaaaa

SEQ ID NO: 128460 - DNA, 201 bp, Homo sapiens
gattgtgtcactgcactttagcctgggtgacagagtgagaccttgtcttaaaaaaaaaaaaaaatttaaaaaaggcacttaaaagaagtccaaaatgtatctcaggaaagttgtacaaaatgtatctcaggaaagttgtacataaaataagacaggcctcattttacagatgtttctcaattatgttattccaaatctaca

SEQ ID NO: 128461 - DNA, 201 bp, Homo sapiens
gaattggtaaaaatcagtgaaaaatttttccaaaactaaaggcagaagtgtttcaaattaggtaagatatgtggtccatatgttctatgacttcatttttwatttacatttagtttatggttttaatttttttttacctaaaactctataacaaactttcatttaatttgaatccaatttgtaaaaaataaattttgactg

SEQ ID NO: 128462 - DNA, 201 bp, Homo sapiens
ttaggaggtggaggcgggtggatcacgaggtcaggagatcgagaccatcctggccaacacggtgaaaccccgtctctactaaaaatacaaaaaaattagcygggcgtggtggcaggcgcctgtagtcccagctgctcaggtggctgaggcaggagaatggcatgaacctgggaggcggagcttgcagtgagccgagatcgc

SEQ ID NO: 128463 - DNA, 201 bp, Homo sapiens
gtagaaaagtggtaactattagataatagtatagttcatcttgttttgcttgcaacagtagcttacagttaactgtttgacttttcagatttttcgaaagraagcagtggaacttggggtaaaattgctacctgcatttcatactccctctggaataccttgggcattgctgaatatgaaaaggtaaaactcttcattttc

SEQ ID NO: 128464 - DNA, 201 bp, Homo sapiens
aggtggaggcgggtggatcacgaggtcaggagatcgagaccatcctggccaacacggtgaaaccccgtctctactaaaaatacaaaaaaattagccgggcrtggtggcaggcgcctgtagtcccagctgctcaggtggctgaggcaggagaatggcatgaacctgggaggcggagcttgcagtgagccgagatcgcaccac

SEQ ID NO: 128465 - DNA, 201 bp, Homo sapiens
ctgctcaggtggctgaggcaggagaatggcatgaacctgggaggcggagcttgcagtgagccgagatcgcaccactgcactccagcctgggcaacagagcragactccatctcaaaaaaaaaaaaaaaagcaataaaaaaacaagacatttagatagtgcatgagtagctacaatggacaacataaattatgtttcttgtt

SEQ ID NO: 128466 - DNA, 201 bp, Homo sapiens
aagcttacaaccatagaaattagaatctcaagagtaagacgttcacatcagtagcatccaaatctccccacatgattctaatgagcaaccaagattgggawtaaatatcccccagtatgatggcccctggaccattgttgctttactgggtaattctgttaatttggtaaactttttgtcagatattaaaagtagaaaata

SEQ ID NO: 128467 - DNA, 201 bp, Homo sapiens
aagttcttcccagcattccccatttttcatcttgcctccttaactttataaaaccctctctattcaggaactagggaatgaatgagagtcctctctcatgaaaaaaaaaaaaaaataatgagatacaattttattcattcatttatcaacatttactcattttgactaggagatagcataaaagccacttctcttcactac

SEQ ID NO: 128468 - DNA, 201 bp, Homo sapiens
ttccagaacagatttgtagtggcccctgataacaggaagatcagttgcataagaacaaatgatcaagggtttcctatttgggcatttctaatttcaattgkgttcttttactggcacttaaaacattattggttacctagaacctcacatgagaaatattgaaaactatcttctgtaatgaattttatggaatatgtagaa

SEQ ID NO: 128469 - DNA, 201 bp, Homo sapiens
accattgcactccagcctggtgacagagcaagactccgtctcaaaaaaaaaagaaaaaaaatgaagataccttatcctacagttgtgagattgttaatacrtgtagtggatctggcatgataaatggcagtgaaggtggactataggaatggagtattaggaggaaaaacttcttcttctgccccatatcctttctgactg

SEQ ID NO: 128470 - DNA, 201 bp, Homo sapiens
ttccccatttttcatcttgcctccttaactttataaaaccctctctattcaggaactagggaatgaatgagagtcctctctcatgaaaaaaaaaaaaaaataatgagatacaattttattcattcatttatcaacatttactcattttgactaggagatagcataaaagccacttctcttcactacctcttattttttcat

SEQ ID NO: 128471 - DNA, 201 bp, Homo sapiens
aaggtaggatagaccagatctcctggttctcagtccgggtcttatcctccaacaacagtggttctcccactggcttgcacattgaaatcacctggcgtcgcctgtgatgcttttaaaatcctgatccagaagcttacaaccatagaaattagaatctcaagagtaagacgttcacatcagtagcatccaaatctccccaca

SEQ ID NO: 128472 - DNA, 201 bp, Homo sapiens
tatatattattaaagaaaaccctaagtcaataataccacaatgtcatgatatttgcattatgatcatttgtgttacccaaagcttcggattcattataaayacatgaaataccactagggttggagtgaagttaatcacattctttgctcttaaactaaaggtaaaactttcttcagttaagttattgaggaataaatatg

SEQ ID NO: 128473 - DNA, 201 bp, Homo sapiens
taaagtttctgattttccagtgaccctgggaaggtaggttttagttcgtttaggctgagctgcacagtggtagtggcaacagctgtctattgagtgtctgwtgagtgcgttaccagctattgtgtacattgctttacatcatggaggaattcattgtccctttctacgtatgacaaaaccaagactcagaataaattagtt

SEQ ID NO: 128474 - DNA, 201 bp, Homo sapiens
gaaaatccccatccatatatatatattctccactcagtagataagaggcaacctcgagtacctggcaacaaacgaattgcacacatagcaacaagaagtckagtaatacagaaagaggaaagagaagctggtccacattagctcccgtggtggtagtaaacttcagaaaatatcagagctgtagacagcagcttggcatga

SEQ ID NO: 128475 - DNA, 201 bp, Homo sapiens
gccaacacggtgaaaccccgtctctactaaaaatacaaaaaaattagccgggcgtggtggcaggcgcctgtagtcccagctgctcaggtggctgaggcagragaatggcatgaacctgggaggcggagcttgcagtgagccgagatcgcaccactgcactccagcctgggcaacagagcaagactccatctcaaaaaaaaa

SEQ ID NO: 128476 - DNA, 201 bp, Homo sapiens; identical to SEQ ID NO: 21782

SEQ ID NO: 128477 - DNA, 201 bp, Homo sapiens
tatatttctgttttgttgtttgagatgggagtctcgctctgtcacccaggctggagtgcagtggcacagcctcagctcactgcaacctccctgtcccatgytcaagcaattctcctgcctcagcctcccgagtagctgggactacaggcatgtaccaccacacccagctaatttttgtatttttagtagagatgggggttt

SEQ ID NO: 128478 - DNA, 201 bp, Homo sapiens
ccaataatttttggcttattctacatatctggtatttgactctttgtcaaaaaaaaaggaggaaagaaaaaataataggacttgaaagtttctttcttcaygctcatcctccatttgacgcactgtctggaacttagaatttaatcgaagcatctgtttttaagttgatcggtcttattttcttcggggctttttaaaagt

SEQ ID NO: 128479 - DNA, 201 bp, Homo sapiens
atttcttaaaaatgtttttaacctcctatcaccagtcctatgctaaaacagggtattttacccataaactaccacaaatagataaaaatagctactttacrtataaatggccctttaaaactggatactattgtatgccaatttgcaacatagtctgtatgaaaagagaaaacagtaataaatgctgtgttatggaccaat

SEQ ID NO: 128480 - DNA, 201 bp, Homo sapiens
ctctcttcgcagtgtgattttttcacagcttatggtccaacttgttcttttagtagatttatatttaaaaaaaaaaaaaaaaaaaactgggaggccaaagkgggtggatcatgatcatggtcaggagatcgagaccatcctggctaacacggtgaaaccccgtctctactaaaagtacaaaaaaaaattaaccaggcgtgg

SEQ ID NO: 128481 - DNA, 201 bp, Homo sapiens
actagggaaattccaacgtatttctttcttcagcgtgcttgattagatcaggacattaaacttaatttgttagaaacaacaatagagttgtatacaacatytaattagttttcttactcttctatattcacaaacatttactgagtatgtaaacaggcagtatcttatgtttccatacattatcaatgagatagtaaatga

SEQ ID NO: 128482 - DNA, 201 bp, Homo sapiens
ggtcttttagggctgaatagtgtgaacctctcttctctcttcgcagtgtgattttttcacagcttatggtccaacttgttcttttagtagatttatatttaaaaaaaaaaaaaaaaaaaactgggaggccaaagggggtggatcatgatcatggtcaggagatcgagaccatcctggctaacacggtgaaaccccgtctct

SEQ ID NO: 128483 - DNA, 201 bp, Homo sapiens
tgatcttgttactattgaggccagatggcagggtttcctgtctgtacacagagtatttatcatcccttgatttctataacagccatccatctatctatatytagtctagctagctatgtgtagtgtcactagcatcattgggggattgtttcaaagagagaaattcagatgaagtcaacaaaaattttaaaagggagatat

SEQ ID NO: 128484 - DNA, 201 bp, Homo sapiens
gtactcatttggaaacagattttgacgtgttcattttctctgttgcctagatggggttagatacttcctgtccatgatctcatggtatgttggtttagaaraagcctttctttgcagagagatggagcatgatgttaggattgaaggagggaagcatacaaaataatttatatattagactctctttttcatgttagcagt

SEQ ID NO: 128485 - DNA, 201 bp, Homo sapiens
gcccccagtaacctctgctagaacctgagctatagtggtgagccaggagtgctgtagggtcttgcattttttaaaccagaaaaactgggacttcgaaggcwtggccgcacgtttttcccctggtgttatgcccacccccgtggcctcctgtgtttcagcagcagccccgcatatgcttgcagctcccacctccagcacttg

SEQ ID NO: 128486 - DNA, 201 bp, Homo sapiens
ttcattgtcaagcctgttatttcacttagtgaaatctattaaaatacgtcatcgtatagctaattttggtgaataagttgcctataaaaatatcaaatttyagagttgtttaaagtgctgtcttgtctagtgtgaagaggttggtctttcaggtactcatttggaaacagattttgacgtgttcattttctctgttgccta

SEQ ID NO: 128487 - DNA, 201 bp, Homo sapiens
aagtagtacaaatagagattctaaggtccttcaaaaacaaggaaattccagagctttaataggataggcatagaacagaagaatttttttcgtggctcttyattctaaacacttttgtttttcattcttgacattaggtagaaggctagggttagaaaagataagcagaagagattgtcatcttagttttataaataccat

SEQ ID NO: 128488 - DNA, 201 bp, Homo sapiens
tttcttgtcaactctttaacataatatatgacctgaaatcgtttccctgtgtcacaacactgaggtctcaattttggggatgcccccagtaacctctgctrgaacctgagctatagtggtgagccaggagtgctgtagggtcttgcattttttaaaccagaaaaactgggacttcgaaggcatggccgcacgtttttcccc

SEQ ID NO: 128489 - DNA, 201 bp, Homo sapiens
ggctggtggatttcttgaacccagaagttcaagagcagcctgggcaacagagtaaaaccctccccaccgccgccatctctatttaaaaaacaaaacaaaamaaaaaaactccagcctgggcgacagagcgagactccatctcaaaaaaaaaaaaaaaaaaaaaaggaaactatttagtaatatgtgatacataccaagtat

SEQ ID NO: 128490 - DNA, 201 bp, Homo sapiens
tgatttttatttcttgtcaactctttaacataatatatgacctgaaatcgtttccctgtgtcacaacactgaggtctcaattttggggatgcccccagtamcctctgctagaacctgagctatagtggtgagccaggagtgctgtagggtcttgcattttttaaaccagaaaaactgggacttcgaaggcatggccgcacg

SEQ ID NO: 128491 - DNA, 201 bp, Homo sapiens
ttttggaaaataatttctattggaccaactcctcacttcgctggaagtagtcggatccaagacttaatttcaacacagtgttcgacttattgcttgaagcyaccgcagcataaaactcgtcttcgaatggaaaatttgaccaacttctatgaggtaaatgaatagtgaaagtacgggtgggcgggagagacatacaagttt

SEQ ID NO: 128492 - DNA, 201 bp, Homo sapiens
agaatgtacaaaatgtatggccgagaaggtatcaaaaatgggaagtaagcaaattcgtattgccaggtagacaggatgctttggtttgctgtgttcttcarggggttgcttgtttatgagatcataaggttggtttatgtgttatgatttttatttcttgtcaactctttaacataatatatgacctgaaatcgtttccct

SEQ ID NO: 128493 - DNA, 201 bp, Homo sapiens
ggcatatgggaagggtgcctgagtataagatctgcatgtcttgttctggtggctgtatctagctgtagtctacctggagtgcggctgacatatcaacaatrgctgggttgctgactaactgccttgaggtagtctctgaagttttgcagctgggtctccatgcttgatctgtcacaagattagcccctggaacttcttagt

SEQ ID NO: 128494 - DNA, 201 bp, Homo sapiens
ctgcagttacttcctccactgaagtcttgaacccctcaaagtcatccaggagggttagaatggttagaatcaacttcttccaaactcctgttaatgttgatttttttttttacttcctcccataaattacaaatgttcttaatggcatctataatggcaaatcttttccagaaggctttcaatttgctttgcctagatcca

SEQ ID NO: 128495 - DNA, 201 bp, Homo sapiens
tagtgaatgctttgtgtgccgaatgcctgaggaggcaacctgcaggatatgcatctaacaatgtctgtctaattgtaagagttattattcctcaaggagtrggagggaattcaggggataagaacaagcaaatgctttaattacactctcattctctagcactctttgttagaaagttagctatctttaaaaactgtccat

SEQ ID NO: 128496 - DNA, 201 bp, Homo sapiens
cagctaccagttaacatgggtaaggggaggtatgaattgaagagagaaactctgaaacctcatgcagagccagaggcctttattttttcattgtttattayaacattttttgaaaaaattataactccattttgcttttatctctataaaagtctttggtaccattaagaaatcagttaatgtgttaaattgccataatct

SEQ ID NO: 128497 - DNA, 201 bp, Homo sapiens
atttgctttgcctagatccatcagaggaatcactgtctatggcagctatagcctaatgaaatgtactttttaaataataacacttgaaagtcaaaattcctttttttttttttttttttgagacaaagtctcactttctcgcccaggctggagtgcagtgtcacgatcttgactcactgcaacctccacctctcaggtgta

SEQ ID NO: 128498 - DNA, 201 bp, Homo sapiens
aataaggttaattcaatgaccctaaaaatattttatctgaaagctctagaagttacttttatatgacagccaagtaattttaagcaaagtttgatggaaaktgctgtcaggcttttaaaatcactgtttttcaaagcatcaaccctaagtgtagttttaagagaaatggcacatcactttcaggtttaacaatcagtgagt

SEQ ID NO: 128499 - DNA, 201 bp, Homo sapiens
atgtattccttacatgcatcctgtaaggaattatcccaaattttcagataagagtcacaaaaactgtgactcatccttaagtatgtgactcatcagtggcsttgtagggattataaatcaagtcatgtgaccctcaaatctgttttacttctcaacaaaattaatgtataagaaaaaaatcctgaaaacactaccatatac

SEQ ID NO: 128500 - DNA, 201 bp, Homo sapiens
gttataaatatatgtgctatcatccaggcttttgtcttccatttatagagcacaggcagaacagatttagcataattctttttttttttttttttttagayggagtcttgctctatcatccaggctggagtgcagtggtacaacctcagcttactgctccacctccctggttcaagcaattctcctgactcagcctcctga

SEQ ID NO: 128501 - DNA, 201 bp, Homo sapiens
aggaaaattatgaatttagaagctataggcagccagataagctaatattagtgccttatgcttctgtaattttctatagcctacaaggatttccaaatatmcacacacacacacacacacacacacacacacacacacatatatatgtgtatatatgaaatctcattaatttgatttaatctaatctggtacaagcatgaa

SEQ ID NO: 128502 - DNA, 201 bp, Homo sapiens
atttgtggccctccatgttttggcctgagctgtggatgcctgacctcatttaccagtatcccctttttgtcagggaggctgccccattccctgtttattcygtagggccccacttgccgccttctgtcgggaggaggctgatccctcagggattccctctttacttttcaatcttcactccggtctgtggtattatcggcc

SEQ ID NO: 128503 - DNA, 201 bp, Homo sapiens
gtctttttcccagatcaacctcaaatccctcgaacaaacccccactacacagcagtaccttggcacaactaagattttatgaaagctagtgtatgaacctscatagctaaagattaccccacattgccttacacctggagaggacctttctactcttcctttcttcctccatcttttggataccaaatagttgtgtatatt

SEQ ID NO: 128504 - DNA, 201 bp, Homo sapiens
ttttattggcattgtaggctatcactcattggcattgtaggctatcactctgtctatttgtagtatattgatcattaagtaattccaatgtttttcttttytttttttttttttttgagacagagtctcgctctgtcgtccaggctggagtgcagtggtgtaatcttggctcactgcaagctacacctcccaggttcactc

SEQ ID NO: 128505 - DNA, 201 bp, Homo sapiens
ggaattaatgctcagtggcacattagaattcatgcaatagcattaaataattactgtttctttatatatctcctgccaacttagaagtacattaaaattgkctgtaggagaattcaggacacctcaatctgaagaaaatccccatccatatatatatattctccactcagtagataagaggcaacctcgagtacctggcaa

SEQ ID NO: 128506 - DNA, 201 bp, Homo sapiens
cacctctaatcccagcactctgggaggccaaggcaggaggattgcttgaggccaggagttcaagaccagctgggcaacatggcaaaactctgtctctactaaaaatatataaattagccaggcctggtggctcacacctgtaatcccagctactcaggaagctggggcacaagaatcgcttgaacccaggaggcagaggct

SEQ ID NO: 128507 - DNA, 201 bp, Homo sapiens
aagatcttggcctggggaccaagtgagggagatcacctgtcaccacaggcctgcaaggggtcacttgctggcctcacattgaccacagaggtcttagcacrgctaatctaatgaattcaaagtttccgtgttaattaaaaatctgccgaataaacagaccaaaaaccctgaggttaaacctttaaacacaaagtgacaact

SEQ ID NO: 128508 - DNA, 201 bp, Homo sapiens
tagggattacaatttacttagagttagtattgtatttcaagtaaattataggaactttaaaatggtagagatctttttaaccatcttaccttttgcgaaamaattcagatagatgcatggataggcagacagatgtactttatatctacctacataatttgccattttcaatgcctttagttttttcctctgtagctattc

SEQ ID NO: 128509 - DNA, 201 bp, Homo sapiens
ctagagttcaatggcacttcatttcagcctcaaactcccaagatcaagtgatcctcccacctcaacctcccaagtagctgagactacaggtgtgagccacygcacctggctccagttatacttttctttgacccctaaatgttatttcacaagtctccaaagctctgttcatttatatttaatcttttctgaatattcttc

SEQ ID NO: 128510 - DNA, 201 bp, Homo sapiens
accccttatttgtggagcaacaggagaattacaacacattttggaaaataatttctattggaccaactcctcacttcgctggaagtagtcggatccaagayttaatttcaacacagtgttcgacttattgcttgaagctaccgcagcataaaactcgtcttcgaatggaaaatttgaccaacttctatgaggtaaatgaat

SEQ ID NO: 128511 - DNA, 201 bp, Homo sapiens
ttcctagctggataggcccttgaaatgttgggtatagtattaaactctggttggtctcctggaattggtttcaccatcaagcagtaaagatttcatttgasatcatctgtcatcagatcatttgactagaaactgctaccaaaacaaaggcctgacttgtgagaaagagcaggtatttgacacagctagcaagtttgtatt

SEQ ID NO: 128512 - DNA, 201 bp, Homo sapiens
gagttgtttatagtactgtaagaatataacactgatctattaaaaacagatgcagtgttgtcatgaaatgggatatatgaaaatatgttaaagcctctaartgaaaaaaagataaagatgctttcaagtaaattagcaaaattcagggattagcaaagtatagccaagcccattcattcacattttgtctatggctacttt

SEQ ID NO: 128513 - DNA, 201 bp, Homo sapiens
ccagtctcaggtttcttggaatatctataagctttccatctgcccagtgtgttgttttgtctgtcacctcttgggtctcttcctgccgaggatagtatacytccttcctaaaccaatctagtgaatgctttgtgtgccgaatgcctgaggaggcaacctgcaggatatgcatctaacaatgtctgtctaattgtaagagtt

SEQ ID NO: 128514 - DNA, 201 bp, Homo sapiens
gtgatttctggccttaattcaaaaaggaaatgcttatactgtgcaagtctcttctttaacagctttattcataattgccaaaacttggaagcaacaaagawgttcctcaataggtaaatggataattaaactgcagtatatccagacaatggaatattattcagcactaaaaagaaatattattcaacactaaaaagaaat

SEQ ID NO: 128515 - DNA, 201 bp, Homo sapiens
attattattattattattattatttttaccattttgaagaaaaaaaatcaggctctatcagattttaaaaccctaccagaagggttagagtaatgcatttkcaggcccaggaaatatttgccatcacttacaaaatacctcagatgatcttcagtccatagaaaatatgattttagggtggtaatgatacaggcatattag

SEQ ID NO: 128516 - DNA, 201 bp, Homo sapiens
caggaaagaacattaggcttttacagttgtcagtttcagcaagaagcaaaggaaaaagaggtttggttgtggggtaaatatatctatattatctgcagtasgtctaatatatattcatatttttattattgttttgcagctttgtgtagtcttttggaataataaaacaatttcacctctgctgacaaacttgacatttct

SEQ ID NO: 128517 - DNA, 201 bp, Homo sapiens
aggcagaaggaagagggaaagcaaagatacccattgaccttgacaaaagtcccattggctggaactttgaccaatagccacttctagctgtgaagaggccwggaaagaacattaggcttttacagttgtcagtttcagcaagaagcaaaggaaaaagaggtttggttgtggggtaaatatatctatattatctgcagtagg

SEQ ID NO: 128518 - DNA, 201 bp, Homo sapiens
cactagatttcaggaccttggttctttgtcagtaaaattcaaaggtgagtagttagttgttgggaaggtgaccttctgagacaggaccaaggaagcaggcragagggacagatccttcataaatcctgacagaggatcctgtagaaggtaaaatatccttctggtttggaggagcattttacacaaggatattttaaatca

SEQ ID NO: 128519 - DNA, 201 bp, Homo sapiens
aaatatgtaaccattgtggaatggccaaattcagctaatcaccatatctgttacctcacatacttaccatttcttttggtgggagcacttaaaatttactktcttagcagttttcaagtatacagtacagtgttcttagctatagtcaccatgttttactaccatcttaaaaatatggaatgtagcctggccaacatggtg

SEQ ID NO: 128520 - DNA, 201 bp, Homo sapiens
aaccctgtgaagatatacagtgcatttgagctttatctcttacctgtgagagtgatgataatgcctacctttcctggatgtgaggagccagcaagtgagcrgatgcacaactgtttgcatgctaggaaacctttgcagatattgattacttaaggaaatagttttggggtttgaagaccgggtttctaaatccctgtctgc

SEQ ID NO: 128521 - DNA, 201 bp, Homo sapiens
atcttattcattccataaattcttgcctgttcttatcccctgaacagcagaaaattatttttctctgtttttatgactcactttgttttaacctacttackactttcttagtgttaaaggcagcacacacaaaggcactgagatgagagagcttgtggctttgccacttattaacagtccaaccctgtgaagatatacagt

SEQ ID NO: 128522 - DNA, 201 bp, Homo sapiens
tttccctgagatggtaaccgtttcacagcctctcatattgctgcttcattatgtgatgaagtctaaacacgtaaatggtgaccagttaaaacacacacctrcacacatcaaatcaagaatttgattccaaatttacaaaataatcaggtcttatcttttgaaatcctacctgtctatcaagacccaatttaaatcttattc

SEQ ID NO: 128523 - DNA, 201 bp, Homo sapiens
ttcttactctgggctacttagtcttttgtcttcagtcatacatgctttattctttcctctgcagacaggctgtcttatgaatcagtactcaagtttacatrgccaataagtttaaacactaatagactttgtaataagcatctcagaggctcaattccaaattcccagaatggagaatctgacccagctttagttaagtgt

SEQ ID NO: 128524 - DNA, 201 bp, Homo sapiens
gtttggagaaattgtgaattaatttcccccaagttgctttttatctgtgtctctccgttctgttttccagttccaccaaagattgaaagaaataaggttarttcaatgaccctaaaaatattttatctgaaagctctagaagttacttttatatgacagccaagtaattttaagcaaagtttgatggaaattgctgtcagg

SEQ ID NO: 128525 - DNA, 201 bp, Homo sapiens
ttgttacaaagacatacaaagttttcatttttatggatgagaaatgatttctttagcccacttctcagccaaatttcttatctgtgtaatatgtagtcccrtatattcgctcagcaaaccagggagaggataggaaaatgtaagttctttaccacctggcttcttaggaaatagtttttagtttgagctaagttattttga

SEQ ID NO: 128526 - DNA, 201 bp, Homo sapiens
ttatggattaggatgctgagatttagagatatagtaagcaaattgttcactcccacaaattagagatagtgtcagagctggaatttgaagccaagtcttcyggccccagaacacctcctctttgccactctattttgttatccctccaagcctacggaagtgaaaggaagagttctgccaccatcctggatctcatgcaca

SEQ ID NO: 128527 - DNA, 201 bp, Homo sapiens
agacacatgttcccaagtgcttttttgagaatctgatacaagagatcatttgttagtaagaatgtaaatccacttaatttggagtcagtgggtgggggggrgatatttattataaaaaggaatctctcatggatttaggtgaagacctcacagaacctggaattacaaatgtgaaggtacagggaaccaagactgctattc

SEQ ID NO: 128528 - DNA, 201 bp, Homo sapiens
ttagcgggattcaaccactctgccatatttggacaaggcaaacaagtagattgacctatcaaggaagacacatgttcccaagtgcttttttgagaatctgrtacaagagatcatttgttagtaagaatgtaaatccacttaatttggagtcagtgggtgggggggggatatttattataaaaaggaatctctcatggattt

SEQ ID NO: 128529 - DNA, 201 bp, Homo sapiens
atgacagtaaacaagaccattatcaccactgcccacatggagcccaaaggggtagagagtaaggaggccctgtgacaagtaccctgggaggggcctagagktactatgggaacctggagtagaacataactctggcagattagggggttcaggaacactttctaaatgaagtaaagtattagacctgaggatgagtgggaa

SEQ ID NO: 128530 - DNA, 201 bp, Homo sapiens
aagtgacaacaaaggctctgtttaattgatcttaagagatccggacagtataactctttctgcaaatggggcgatacagttatcattcaaacccaaataawttttttttaattttaatattttcctttaataaatcagattaagaatcacttccaacaaccctcctacaaatatttagaagtaccaccctgtgcaaggcac

SEQ ID NO: 128531 - DNA, 201 bp, Homo sapiens
gtatgaattttaaattcacagtgaggtatatcaccaaaaagaattctatgagtcaaaataatatattgttactgacttgacagtcaagttgtatatagaartgacaacaaaggctctgtttaattgatcttaagagatccggacagtataactctttctgcaaatggggcgatacagttatcattcaaacccaaataattt

SEQ ID NO: 128532 - DNA, 201 bp, Homo sapiens
gattctataaagtgtgaccacattaacaaaaatgcagtatgaattttaaattcacagtgaggtatatcaccaaaaagaattctatgagtcaaaataatatrttgttactgacttgacagtcaagttgtatatagaagtgacaacaaaggctctgtttaattgatcttaagagatccggacagtataactctttctgcaaat

SEQ ID NO: 128533 - DNA, 201 bp, Homo sapiens
gcaactatgactcctaaagtttaggatacataatgttacaattatttaatttttaagcaagagattctataaagtgtgaccacattaacaaaaatgcagtwtgaattttaaattcacagtgaggtatatcaccaaaaagaattctatgagtcaaaataatatattgttactgacttgacagtcaagttgtatatagaagtg

SEQ ID NO: 128534 - DNA, 201 bp, Homo sapiens
gtccccaagttagatatttctcttttaaaaagaattttgccttcatatttaaaataaaaattatattcctcaattggctttttttttttttttcttgagayggagttttgctcttgtcgcccaggctggagtgcagtggcatgatctcagctcactgcagcctcagcctctggagtagctgggattacaggtgcccgccac

SEQ ID NO: 128535 - DNA, 201 bp, Homo sapiens
aggtttttataaggtaaaggcactagaatttagacatttagaagggacttctttgaaaactaggaagaagatgggcaaagtataataccaggtattggtcygagttaaccaggagtagattatttattagaaaactagtctgaatttatgtattcttgataaatacaggttttgacagaaattctccacttttgactgatc

SEQ ID NO: 128536 - DNA, 201 bp, Homo sapiens
gcaaaatatcagttcaggaaccaaacttactttccctgagatggtaaccgtttcacagcctctcatattgctgcttcattatgtgatgaagtctaaacacrtaaatggtgaccagttaaaacacacacctgcacacatcaaatcaagaatttgattccaaatttacaaaataatcaggtcttatcttttgaaatcctacct

SEQ ID NO: 128537 - DNA, 201 bp, Homo sapiens
aatataaagaaagaaaatattttggtacaactatacaaagtgtgttttaagctaatggttattacaaaagagtcaaaatttttttaattaaaaagtttatmaagtaaaattacagtaaactaacgttaatttattattgaaagaaaaatacttttataaatgtattaataatggctaagtgtaccatgtttataaagttta

SEQ ID NO: 128538 - DNA, 201 bp, Homo sapiens
tgattttcttattatagaaataccaatacaatggaacttgttacaaagacatacaaagttttcatttttatggatgagaaatgatttctttagcccacttytcagccaaatttcttatctgtgtaatatgtagtcccgtatattcgctcagcaaaccagggagaggataggaaaatgtaagttctttaccacctggcttct

SEQ ID NO: 128539 - DNA, 201 bp, Homo sapiens
ataagatacataatgattttcttattatagaaataccaatacaatggaacttgttacaaagacatacaaagttttcatttttatggatgagaaatgatttytttagcccacttctcagccaaatttcttatctgtgtaatatgtagtcccgtatattcgctcagcaaaccagggagaggataggaaaatgtaagttcttta

SEQ ID NO: 128540 - DNA, 201 bp, Homo sapiens
tatattccaagatatagcatagtaggatgagctgaaataggaagtttaaaacaggtgtctttgggagagttggggatggtgatgctttccatctgcttctkgcttaaagctttaactacggtcctattagaatatacctgagagtctgggaagtcagtgtatttgcttctgtggttgtagttctccacccacctgtgatct

SEQ ID NO: 128541 - DNA, 201 bp, Homo sapiens
gcatggtagaggctcaatgaattttatgcatttgtcagtggtcccttttgcagtttattctacagatgactattaatattcctaaaacatcacttctctcrtattgcccaactcaggttttaatggtcctccatttcctataaagtaatgattcagacttcaacatgcatcagaatcacctggagggcatgttaaaacaga

SEQ ID NO: 128542 - DNA, 201 bp, Homo sapiens
agagctgcatatttcaaaatgtatttatattctgaccttggttcataaaagtctgccaagcgccagaactatttaaatttggctataacactgtgttaacrtgatgaataacgattgacataaatgtactatattatttttataaattgtggttagacatgatagtaattttagaatatttacagtgctatttttggagac

SEQ ID NO: 128543 - DNA, 201 bp, Homo sapiens
tccatttattgattcttaaaggcttgctttagaaatagatggataaagttgctcagcagaattattaatattatactttgagatttgtcttatcaaaggayagaataggtttgttgaagcaagtatcttccattgtcttatttcgctttataaactcatgtctgcttgggaaagaaaaatttgaaagcacactagagtaga

SEQ ID NO: 128544 - DNA, 201 bp, Homo sapiens
tataactatttaatgctttgtttatatattcatctggcaatttttagaattgcttcagttctataaattatctggtacatttgatgataataggtagccaratatatttgttaatgatccaaattgtatcgggacagtcactgtaacctataccttttttttttttttttttttgagacggggtcttactctatcaccctg

SEQ ID NO: 128545 - DNA, 201 bp, Homo sapiens
ttttattttgctacggtcaactctgattttctttgatttttaccaaattccaaaaaaacttaagtatctttagaatgatatacttactgcatatacatctycagcttcttcagaatatatgttaaagaattaatttgtctctttctcatagtcaaatatgcctattcccgcagataccatctttcagagtagtcacagtcg

SEQ ID NO: 128546 - DNA, 201 bp, Homo sapiens
aactcaggaaagtggataatgaagtttcaaaagggtatcaaaaatagttaaaattgagttttagtgcttaaagggatacatttccagttcatcaaaaagaycttccatacctataattttattttgctacggtcaactctgattttctttgatttttaccaaattccaaaaaaacttaagtatctttagaatgatatactt

SEQ ID NO: 128547 - DNA, 201 bp, Homo sapiens
agctgtggtggtacaaatttttcattgaagagaattttaagcatgtgtccgaaggtcagaggggaggaatgcctgcagatccgtgtgagggatgagggctraatacacagggtagatcagaattgcactggaacctggttatacctcctaacccagtcaagcacctgtggtcttttaaatttctttctttataatcttgtg

SEQ ID NO: 128548 - DNA, 201 bp, Homo sapiens
gcccttccccagagcagggaggacatggagtgtttgtgaaggtttttctctccttaacaagtaggttagttttcaacagtttaagtactggagtaggtgcygactgttaatatacaaaagcaaaaaaatacatatatacagtaatgggtagttaattatgttcagcttcattttctgtaagctgttgatagtttctcctag

SEQ ID NO: 128549 - DNA, 201 bp, Homo sapiens
taacaagaactttgagtgtattactcattttacacaaaacaagtagacgacaaataatgatggttaaaattaataattaaatgattaaatgaaaactagtwaggatttctgattacttttctactttctcatacagcttaacacctggaaacaactgtactggagccaccttcccgaaaggtgccagctgtttcctttgtc

SEQ ID NO: 128550 - DNA, 201 bp, Homo sapiens
agagcttcaggtattagcataaggaaatgaaatattaataattcaaatggtatttaatctcattccatcttcaaattaaaataagatacataatgattttyttattatagaaataccaatacaatggaacttgttacaaagacatacaaagttttcatttttatggatgagaaatgatttctttagcccacttctcagcca

SEQ ID NO: 128551 - DNA, 201 bp, Homo sapiens
agttgtatacaacatttaattagttttcttactcttctatattcacaaacatttactgagtatgtaaacaggcagtatcttatgtttccatacattatcartgagatagtaaatgagacagcatcctgtatacttcccttttagtcctttagaatcttttcatagtgtagcagatactcaataaatgacctggcctaatta

SEQ ID NO: 128552 - DNA, 201 bp, Homo sapiens
aggatattaagggagcatctgtgatatcccagcaaggaatacctttttttggctgggcatggtggctcactcctgtaatcccagcattttgggaggccaargtgggcagatcacctgagctcaggagttcgagaccagcctggctaacatggcgaaaccccgtctctactaaaaatacaaaaattagccaggcacctgtaa

SEQ ID NO: 128553 - DNA, 201 bp, Homo sapiens
ttgcattggtggcactctataactcataatccgcaatacatcaaaagcctctgaaagctgtagaacagtgagggtcccattgccaacttcttattgtggastctctgcaagaatctctagcatctcttgtgtgtcacctttcacagaagcaccaagggatgggagcaatgtatgtctgaagatttaagaaagccttttttc

SEQ ID NO: 128554 - DNA, 201 bp, Homo sapiens
aaaaaatttcaaaaattagccgggcatggtggcacatgcctgtagtctcagctactcgggaggctgaggtggaaagattgcttgagtccaggagatcaagrctgcagtgagccatgattgtaagactgcactccagcctaagtgacagagtgagaccctgtctctcaaaaaaaaaaattttttttaatgtttattttgcat

SEQ ID NO: 128555 - DNA, 201 bp, Homo sapiens
ctcttaaaaaaaaaaagaagataccactgcagttctcctggcttttaattcatttatgacagcagaacaaccactgcgacagcatatctgcatgtgccacmccttttttcaaggcagaaggaagagggaaagcaaagatacccattgaccttgacaaaagtcccattggctggaactttgaccaatagccacttctagctg

SEQ ID NO: 128556 - DNA, 201 bp, Homo sapiens
attttatcacttctctgtatggatttttctgacgcctgcttggtgttacatttagtagagctgtctacagtgtgtgcttttattgcacaccatgaaggtgygtataggaaatgactgatcttcattcagactctcattagtcagtgaggtgatgaatgaggcacaacccctcacctgttttatttcctgctttgtaaagct

SEQ ID NO: 128557 - DNA, 201 bp, Homo sapiens
aaataaggatggccaactttgtgtggggtggttaggaaaagacctctcgaggggacatttacacagattcctgaaggtaagaatgagcaaggcatacagarggctcaggaaagagcattgcaggcagaggaaactgcaagtgcaaaaaccccgatatgggaaggggccgctgttcctgtctgttaactgagaatattaata

SEQ ID NO: 128558 - DNA, 201 bp, Homo sapiens
ggagattataaggatgaaattacaggtgacccttgaacaatgcagggattggggcaccaacccctcatgcagttgaaaacctgcgtataactttcgattcscccccaaacttaactaccaatagcctactgctgaccggaagccttactgactaaacataagcagtcagttaacacgtattttgtatgttatatgtatgat

SEQ ID NO: 128559 - DNA, 201 bp, Homo sapiens
gagtacttatttttccagtgataaatcaaaaacagaaatgatcagccttactctccctcttttttctggggaaattgagaaccagaagagttaactgaccmgctcaggcctcacatggaaacagtagtacagccagtccaaggacctgggtccggggctctctccatcatgcctatccccatttgaagtagcactaaagtg

SEQ ID NO: 128560 - DNA, 201 bp, Homo sapiens
attgttttgacttttgttatgaatgtaatcagaatccttagaatgcaaaatcttttagaaaattcttgttggatcattagatgtctgcccatcccaaactrattgctagttgtacaaaaaccatattttcttttagtggacatttaaaaatatcttctattagcaaggattacattttatgaactgtaatttttcacctga

SEQ ID NO: 128561 - DNA, 201 bp, Homo sapiens
ctaaagtgcctattcactagaacattctacatttagatttttaaactatgcttacaattggaagtgttttcctttgtttaaattttatgcttttatatatyagtaaactcaagactaaaggacagctaccttgattcttcttggttataattgatggttattggcaggatagcatgtgtagcctttttattttgaaaaaaa

SEQ ID NO: 128562 - DNA, 201 bp, Homo sapiens
caatgaaattgggaagccaagtgctgtcgtgtcatagttgtagatagtttctccaaaataggaacaagcacatgtggtggtttcatttcactttatttcaygaaaaataattataactgggcagaatgacgtctcactatttttttccctttctgaattttttgttgttctggaaaagcatgtggtttttatgggacagag

SEQ ID NO: 128563 - DNA, 201 bp, Homo sapiens
ggcaacctgcaggatatgcatctaacaatgtctgtctaattgtaagagttattattcctcaaggagtaggagggaattcaggggataagaacaagcaaatkctttaattacactctcattctctagcactctttgttagaaagttagctatctttaaaaactgtccatgaggaatgacttctctcaggaaatctaaaatga

SEQ ID NO: 128564 - DNA, 201 bp, Homo sapiens
aggatattcctttaccagtctcaggtttcttggaatatctataagctttccatctgcccagtgtgttgttttgtctgtcacctcttgggtctcttcctgcygaggatagtatacttccttcctaaaccaatctagtgaatgctttgtgtgccgaatgcctgaggaggcaacctgcaggatatgcatctaacaatgtctgtc

SEQ ID NO: 128565 - DNA, 201 bp, Homo sapiens
ttttttccacccaggactgtgtattttcattgaagtcattttatatccctggcttcagctttgctttgtataacattgatatagatatatctactgatagrcttagatattgaaggagataactagaaaggcatagtctaaaattaagttcccattaatacaaaaatgatgatctcttaattccacctaagggttgttggc

SEQ ID NO: 128566 - DNA, 201 bp, Homo sapiens
ctcggggctgaaattgcccgtacttgtcatgaatcatataatcgaacatgtgagtacatgttattcttcatttatggtctattcccacatgctttgatttmatgcagttttgtcattgctgccctcaaaagactatccactctgcctatgaagcttgatgatcgtgattaatgtctcaaaggaatgtatattttattttaa

SEQ ID NO: 128567 - DNA, 201 bp, Homo sapiens
gggagcgggcgaagttgacgagtctcccgcccacgctgcgcccctcctgcccagaggtgcgctgcccctccccgaggtgctcgcgcgctgccctgaccccytcctgcgcgggacacccctcccctacccacgggacctgataacttcaccccaagtccagagagtgggctgcgagggcggtgcccggactggacaggactc

SEQ ID NO: 128568 - DNA, 201 bp, Homo sapiens
cagaaccaagcaaaaccaaatgtgctggcgcagcagtgttaattctgactaatcaaacaaataaggcataaactagaggaggaatacagaaagcaatagcwtgtaatttcaggttgaatggatttttaacaccaaactctgattgtcaggtgtattctattcttttttttttaatgttgggcatatttttagtataaattt

SEQ ID NO: 128569 - DNA, 201 bp, Homo sapiens
atccaccttagggcctgggctgtgtcatttcaccacttatggaaatgaaaatgtaccaaaccaactattactgctgcacagtggcctgtctttgggaaggrgaaagttttttgaatatgaggaatacaatgtttggtcacagaaccaagcaaaaccaaatgtgctggcgcagcagtgttaattctgactaatcaaacaaat

SEQ ID NO: 128570 - DNA, 201 bp, Homo sapiens
ggcaggtattttagtaattagaaagcctacaataacacatgtggtacacttaagaatagtttgaagcactagagctgtatagccattgggtttcctctccsttttttaacttccatattgaatgcatattagaaggacatgtaacttttatcatactatttccttgctcccagcccgctacttatttatgtgtacaaaagc

SEQ ID NO: 128571 - DNA, 201 bp, Homo sapiens
tggtagtgctgatattgatagagctaaatatgaaaaattaaagcactggaaaaaaacggtttcattttggaggcttgctttcttaataatacttctgtggrccgggcgtggtggctcacacctgtaatcccagcactttgggaggtcgaggcagttggatcacgatgtcaggagtttgagaccagcctggccaacatggtg

SEQ ID NO: 128572 - DNA, 201 bp, Homo sapiens
gctaagttgtactttagaagattattgtaaccaaggggaggatgctgtacactattgttctggacaattgattactaaagatatggctactctgttgtagyttcaagtagattttgggaagcatttaatcccagagtgatatgttttatttgattattttaataacaaaatattttgagctttcaactggctatcatggcc

SEQ ID NO: 128573 - DNA, 201 bp, Homo sapiens
tgtattttgtattctttaaaaaaaattgagcatttctaatctcttcattttccttaaccatttagaagtcaaaagttgaattatttgtgataagtgtataygctctattaatatattattgctatagataagcatataataaagtttatatttattactaacatacatggaaattttgggctactgagatacctggcacag

SEQ ID NO: 128574 - DNA, 201 bp, Homo sapiens
agtttaattaacttgcctggagggacacaaacataagacaaaaattgcattgatgccaaattttctgtccagcagtgtcaccatttgataatttaaaatgytcatctgtcagctgaaataaaactatatactctgtacccaaaggcaatttaaaggtatcagtgtataatatatgataaaggaggattatgcagaaataac

SEQ ID NO: 128575 - DNA, 201 bp, Homo sapiens
tcacaagtagatgaacaccaacccttcctgaggccccccatctgcatcttttggcagaccgcttgaggcatgctgcttcgcaagaccaagcgaggccaggmcgtccctgaccaccccaaggtgtttaatgggatcccactgccctatgacaagaaaaagtggatgatgcttcctgctgctcccaaggttgtgtgtctgaag

SEQ ID NO: 128576 - DNA, 201 bp, Homo sapiens
catgaacctgggaggcggagcttgcagtgagccgagatcgcaccactgcactccagcctgggcaacagagcaagactccatctcaaaaaaaaaaaaaaaarcaataaaaaaacaagacatttagatagtgcatgagtagctacaatggacaacataaattatgtttcttgttattatttgtgtttgtattctaaagaggca

SEQ ID NO: 128577 - DNA, 201 bp, Homo sapiens
tataaaatggtacagtatttgcatataacatgaatacatcctcctgtattctttaaatcatctctagattacttataatacctaatataatgtcattgctrtgtaaatagttgttatactgtgtagtttaggaataatgacaagtctatacgtgttcagtacagatgcaaccatacatttttttccaaatatttttgatct

SEQ ID NO: 128578 - DNA, 201 bp, Homo sapiens
gatcgcaccattgcactccagcctggtgacagagcaagactccgtctcaaaaaaaaaagaaaaaaaatgaagataccttatcctacagttgtgagattgtraatacatgtagtggatctggcatgataaatggcagtgaaggtggactataggaatggagtattaggaggaaaaacttcttcttctgccccatatcctttc

SEQ ID NO: 128579 - DNA, 201 bp, Homo sapiens; identical to SEQ ID NO: 21786

SEQ ID NO: 128580 - DNA, 201 bp, Homo sapiens
agtgagaacatgcggtgtttggttttctattcctgtgttagtttgcttaggataatggcctccagctttattcatgttgatgcaaggacattgtattagtyagggcgctcttagagggacagaactatatatctgtagatctacatatatcctgtaagtattaaattaatacttaataaaatataattattaagttaatat

SEQ ID NO: 128581 - DNA, 201 bp, Homo sapiens
tataggtaggtacatggcgtgtcatggaagttaggtaaacagattattttttcacccaagtaataagcatagtacccaataggtaacttttcagtcctcayccttcttacacccaccactctcaagaaggccccggtgtctgtggttcctttctttgtgtccatatgtactcaatgtttagctcccacttacaagtgagaa

SEQ ID NO: 128582 - DNA, 201 bp, Homo sapiens
taaggggagcggtcctggaggctcgccaggagtcggagggcggagacccgctggaaactttatcatcgccgtaattactacgttttactgtttctctcccsgcaggggctgcagccagcggtctgtcgcgcgtgcctgtgtgcccgaggagccgccccggggagaagacccggcgcggagttgttcccccagggaggatcc

SEQ ID NO: 128583 - DNA, 201 bp, Homo sapiens
tgtcagtcttctcactaattttttgttttgttttgtaaaatataacttttttgaaaaattgtatatgttaacataatgggcatgtaattattattttaaaygaggtaacgaaaatatttttaaattattttaattttccaatgtagtaaatataggtattatttacataaattatttggggtgtccatttcttttgaagat

SEQ ID NO: 128584 - DNA, 201 bp, Homo sapiens
atcacaaggtcttaattaaccgtgtaaacgagatttacgtagtctctgtctaacatcttagcacctagatgttttgaaaccgctcagtcttgcataaagcrgtggaactaaatgtgttctttaaaattccttgttgctgtgagaacccaaaagagccagcataattagctttagtgtttagtcaaaggctaatgggaagaa

SEQ ID NO: 128585 - DNA, 201 bp, Homo sapiens
tgtgtttcccagcatgtatccctgtcattaagggacacatgactagacttattgatttattgtctgtcccgtcccactaggatgcacaattctaagagtgyggtgactttgtttatccactggccccttgttcctagtatggcatctggctaatggtagataactaatcagtgtgactatattcacttactgccattatgt

SEQ ID NO: 128586 - DNA, 201 bp, Homo sapiens
aaattatgatgctgttctaaaaactgtgctgtaaatatttggctttagagaggcaagagtggttgcccattgtaaatagggcactggactttaactttacrtatttggattcagtttcaggcaccactgtggacattttgttatcaaccagtagatctttgccttagtttttttctttaccattgtgttttcttttctttc

SEQ ID NO: 128587 - DNA, 201 bp, Homo sapiens
aaatgccctatacaaagtgccctgtatttatgtatagggttataaaatgtataaccctatagaaaggtatcatttttcatcttttatagtgtatttttctrtgtttagatacacaaatacttcagtacagtaacatatgctacacaggtttgtaacctagaaacagtaggctgtgccaactacatttgtgacagtgtgctc

SEQ ID NO: 128588 - DNA, 201 bp, Homo sapiens
gaccacatatgtgacagtggtcctgtaagtttataatggagttgacaaaattcctacggccttgtgacatcatagttgtcataatgtcgtagtgcaatgcrttacttacatgtttgtggtggtgatggcataaacatactctactcccagtcacataaaagtatagcacatataattatgtacagtacataatatttgata

SEQ ID NO: 128589 - DNA, 201 bp, Homo sapiens
cactaatcccatttaaggctctaccgtcataacctaattaccatctccaaataaatctccaaatacaatcacactgggaagtagggtttcagcatatgaawttaggggtatgcagttcaatccatagcacccttttatttttttccacagtatttatcatctcctgacatactatacagttaggtgttacttaacagtgtt

SEQ ID NO: 128590 - DNA, 201 bp, Homo sapiens
ctcctctacctgctgacattctcccctttgtctcctcacctctggcctcagtagcattgcaaacctgctgtctcctcagggcctttgtacttgctcctctstctgttccgagtgctcttcctccacatttccacgtggcctactccctcacttctttaatattctgctcaaacacctccgccttgccaggccactctgact

SEQ ID NO: 128591 - DNA, 201 bp, Homo sapiens
ctgtcctgatctgggatccatcaggtcacctggtgtactgtatgtacaccatacagtagccacctgaccaccccttcctcaccccctcagccttctcatgrcactcagagtaaaatatgcccttattgtggcctgtggggcctgggtgacctgggccctggctctcctctcctctacctgctgacattctcccctttgtct

SEQ ID NO: 128592 - DNA, 201 bp, Homo sapiens
tttaacttttactttaggttcagagatacatgtgcaggtttggtatataggtaggtacatggcgtgtcatggaagttaggtaaacagattattttttcacmcaagtaataagcatagtacccaataggtaacttttcagtcctcacccttcttacacccaccactctcaagaaggccccggtgtctgtggttcctttcttt

SEQ ID NO: 128593 - DNA, 201 bp, Homo sapiens
aaattacagattatatttcaacataaaacaagcataattcaaacatgtacatgtaagtattctataatacatgtctgaaagtgctgctgtaaacatctgtscagttttttgtatggtcataaattttcagttcgttagtttaaatactaaggagtgctattgctgtatcatatggtaagagtgtgtttagttttgtaactg

SEQ ID NO: 128594 - DNA, 201 bp, Homo sapiens
ctctgtaaataatacttaatgtactgagttatcttgatgtatgtaaattacagattatatttcaacataaaacaagcataattcaaacatgtacatgtaartattctataatacatgtctgaaagtgctgctgtaaacatctgtgcagttttttgtatggtcataaattttcagttcgttagtttaaatactaaggagtgc

SEQ ID NO: 128595 - DNA, 201 bp, Homo sapiens
gtcttataatgttacactaggctatacagctgtatgtttgtgttggagagttcatatctgtgtgtgtctttttaattaaaaatattttgaaataactacayaatttttaaaaggttatttagaaagtcaagcttagtggaatctgccttacatcttgagatatattttggatctctctctgtaaataatacttaatgtact

SEQ ID NO: 128596 - DNA, 201 bp, Homo sapiens
ctggtaactaaatagtagataagcaatgtttctcttaaaattatacctgcttacaaatgaaagtgaaatgataaaagtagaaaatcaccatttttacaacycctgatgaattaatggatctggaccatggtcaccaacagctgcttgcttctcaaaaggagagcaaaccacatagtgcctcctgataacatatcacctata

SEQ ID NO: 128597 - DNA, 201 bp, Homo sapiens
taagcccgggaggtcaaggctgcagtgagccaaaattgcaccactacacttcaacctgggtgacagagtgagaccctgtctcaaaaaaaaaagtaaaacartagtaagaagagccagttaccttggtttcaagattagcaaaagggagctggaacatgcattggagggagccctaccttctgagtgggccatctgttttaa

SEQ ID NO: 128598 - DNA, 201 bp, Homo sapiens
aatgaaaagcaaaaataattggtcaccttcaaagaatgacaggaaagcagttatcttgaaaactggtattttcccaggcagctgccaaagatggaggggcrggtcctggtgctcactggccaaggccaccttctggtctgcctgacagccgtcctggataggcaggtactgctgggccagaaggtggtggtcgtgcactgc

SEQ ID NO: 128599 - DNA, 201 bp, Homo sapiens
caaaattccttggtctcttaggctgaaattaaaatgttgaagagctttatgtggcatttgggcatggtgggagtgttttggtcagattttcttttatattytatgtggaatggttatgcatctatatagcacctgtattttccaaaagatttgtgtgttcaccaacagcaagtactcagcagcttttttctaaattaagtc

SEQ ID NO: 128600 - DNA, 201 bp, Homo sapiens
tgtgactgatacatggcaaaaaacaaagtgggggtggacaccaagagcattttgatggggtctaccttagaaagagaggaaagcaagaattccacaagccrttaagacctggctccagcctgtccttccagccttctctcccaccaaccttcctttcctccattctgcagtgtaacagctgcctctggttcctggccagcc

SEQ ID NO: 128601 - DNA, 201 bp, Homo sapiens
acttcccaggtagctgggactacaggtgcacaccaccatgcccagctaatttttgtattttttgtagagatggggtctcaccatgttgcccaggctggtcycgaactcctgaacccaagtgggctggctgcctcagcttccgaaagtgctgggattactggaatgatgcatcacacacagcaacctgtaccttgagttacc

SEQ ID NO: 128602 - DNA, 201 bp, Homo sapiens
ggagttcgagaccagcctggccaagatgttgaaaccccgtctctactaaaaatacaaaaattaagccaggtgctgtggtgcacgcctgtaatcccagctastcaggaggctgaggaaggagaattgcttgaacccaagaggcggaggttgcagtgagccaagatcgtgccactgcactccagcctggctgacagagcaaga

SEQ ID NO: 128603 - DNA, 201 bp, Homo sapiens
tccatcagtaataagataaagccacagtgtagggttggaagtacttctgttttccctaactcccaagaatacagaatttctatgacattggctctttgcartcgtccgtcccttccagaactatcatattgagggcaggagaaagagcttcccctattcatccatgtgtccaacagatcagttagctctgggccctgccca

SEQ ID NO: 128604 - DNA, 201 bp, Homo sapiens
gggcagatcacgaggtcaggagttcgagaccagcctggccaagatgttgaaaccccgtctctactaaaaatacaaaaattaagccaggtgctgtggtgcaygcctgtaatcccagctactcaggaggctgaggaaggagaattgcttgaacccaagaggcggaggttgcagtgagccaagatcgtgccactgcactccagc

SEQ ID NO: 128605 - DNA, 201 bp, Homo sapiens
atttttcacattggcattccacttaactgaaataagtaatcttaaattctaagaatatctgttttcccccttgggatccaagaaaacattttcattttgartaaagagaaaaatagcccaaaaaatattgttattatacttaaattgacattcaaggaaaaagaaggaactcatcccaaccataagatatattttgtgcca

SEQ ID NO: 128606 - DNA, 201 bp, Homo sapiens
gtcatctttgatcctgtcttcccttatccccaaatccaattcttcctgacaactcttacctcccgaacatcgctccagttcctccacgtcagtccatctcyactatcagcacccagaccaggccaccaacgatctgccttttgcctatacaatcatttgcttgcttgcctacactcctccttttatgtaacctattcttcc

SEQ ID NO: 128607 - DNA, 201 bp, Homo sapiens
tatagatcaggaaattgctgtcaaagacttgaagggacatgcccaagataacacctgaaaattctgtaagtgcataaatgctgcttaatgattatctgacmcattccctaatttacctttagtctctctattgtcaaaactcctctggataaaatgttctctgttgtttaaatgcaatgattttcccttctctttatggag

SEQ ID NO: 128608 - DNA, 201 bp, Homo sapiens
gctatgagcatctctaacacacagagtgcgggcttgaattaatattttccactaaccagggcttcttggagaagagactgaaattggaaatgtacaagatkagtctgaaatatcaaaccaggtaacaaagaagctaacaaagactgctagagtaaggtcaaaggactcaggagccaactggaagaggcttccattggccaa

SEQ ID NO: 128609 - DNA, 201 bp, Homo sapiens
tgtaaatgacacaagcgggctattgtcagcatgcaagaacttgggaatattgtttccaggaccctttcctgatgaatatacctgggaacaaacttcagacmaccaaataaatactgtatgatgtccaaaataggcatattcatagagacagaaagtagatcagtggttgcctaggacaagaggggttggagggaaatgggg

SEQ ID NO: 128610 - DNA, 201 bp, Homo sapiens
aggccgaggcaggcagatcacctgaggtcaggagttggaaaccaggctggcaaacatggtgagaccctgtctctactaaaaatacaaaaaaaaaatagctrggtgtagtggtgcatgcctgtaaccccagctactcgggaggctgaggcaggagaattgcttgaacccaggaggcggaggttgcagtgagctgagatcacg

SEQ ID NO: 128611 - DNA, 201 bp, Homo sapiens
tggaatctatagatgtgacaaaaagctaataatgtattctgtcactttacttccttgtcaccctaagactgtgtttctccttccagtaataggatacgagstacttgtctgagaacatgtaactggagtagacttttatgtagtgatctgaggcccttactagatctctttctttctaagggaaatcaccaaattttgagc

SEQ ID NO: 128612 - DNA, 201 bp, Homo sapiens
agcctttttcctgttgttacaagcagtaaatggcccttaagaaacttcaaaaagaatgaatgcttgcttgagaaagaagggagtaagagaaaagcttttcrgtaatgagcaggagaaaaaagaaaacctggtctgagagataaaagaggtgactattaaaacggaaggacacagtctaccagaaactcgtgaggctttaca

SEQ ID NO: 128613 - DNA, 201 bp, Homo sapiens
tgtctgtagcaaagcacatgaccgtgtccacatattattcccaaaaccagtgttgccagggttggtaccacaacttttcttccttttctgtttacttgctyatcagttacatacctaaatctcataaaaatgaactagcagttgccgggcacagtggctcacgcctgtaatcccagcactttgggaggccaaggcgagcga

SEQ ID NO: 128614 - DNA, 201 bp, Homo sapiens
tagtctctggaggattcagcagtgaacaaattagacaaagtttctgctttcgtaagatttacatgataagggggtaaaatgttaaacaagttcacaggatmattttagatggcaataagagctctgaagaaaatacaatataaccatgtgataaagtgatggagggtgggaaagggagatgatgaggactactttaggcca

SEQ ID NO: 128615 - DNA, 201 bp, Homo sapiens
tagctattaaggcaaataactccagcatttatgagtttctgccgtctaatgctttataactaaacttggaataatactaatttagaattgagccctgaatractagttatagtagacttctctctatcatctggtcaggcttccaatttttaacatgtctagtcccttatgattcactcctttattcagcaaatgtgttaa

SEQ ID NO: 128616 - DNA, 201 bp, Homo sapiens
tttatggtagcctcaatccttataaatgtatgatgctttttccaacagtgttcggcactttaggtacaagcatggagaaggcagttagttggttttagttraggtttggtagccaggtaacacagagagaaaggcatggattttaaagtattggcagaatttattgaatgtatagaccatgcagtccaagatgaatataag

SEQ ID NO: 128617 - DNA, 201 bp, Homo sapiens
gattaccgtgatatgttagaaatggatttgtcgctgccttattacaaatgcagcagttataaaatggcatctattatgtaactatctttttgagggagcgstggtggtagtaaaagaaacagaattgtttttctgcctttagatcggcatgagaagttgaaacacagaagatgtcgcaaggcagcaaagagctgattatat

SEQ ID NO: 128618 - DNA, 201 bp, Homo sapiens
tcttcaataggcagaaatgtgggaaactgttaccaggtttaaaaactgaaaaacacaagtactaattgagaggaatatgatttgagggtttaagtttattmgattttattattagatattattactcttaaacataggaaacgtagtcacgtgaaccaaactaaatacatgggttagcttcgcttttccttatcagtaatt

SEQ ID NO: 128619 - DNA, 201 bp, Homo sapiens
ggtttaaaaactgaaaaacacaagtactaattgagaggaatatgatttgagggtttaagtttattagattttattattagatattattactcttaaacatrggaaacgtagtcacgtgaaccaaactaaatacatgggttagcttcgcttttccttatcagtaattttgtagaatattaaagcctttgccaatatttatgt

SEQ ID NO: 128620 - DNA, 201 bp, Homo sapiens
attgagaggaatatgatttgagggtttaagtttattagattttattattagatattattactcttaaacataggaaacgtagtcacgtgaaccaaactaamtacatgggttagcttcgcttttccttatcagtaattttgtagaatattaaagcctttgccaatatttatgtaaaattcattcagagtgatagacctcaaa

SEQ ID NO: 128621 - DNA, 201 bp, Homo sapiens
gaatatgatttgagggtttaagtttattagattttattattagatattattactcttaaacataggaaacgtagtcacgtgaaccaaactaaatacatggrttagcttcgcttttccttatcagtaattttgtagaatattaaagcctttgccaatatttatgtaaaattcattcagagtgatagacctcaaagttaaatt

SEQ ID NO: 128622 - DNA, 201 bp, Homo sapiens
aatacacccattttaagtataaatttcagtgtattttgacaaatgtatacgtctgtgcagacactgccacaatcaagatatacaacttttcgttactcacraaactttcctagtgaccctttgcagccattcatttgccatcatctgaccccaggcaaccactgatatgttgctgtcagtatacattagttttgtcccttc

SEQ ID NO: 128623 - DNA, 201 bp, Homo sapiens
taggatgggagaaagtattgcacaagaacttttgatcctagaagcctgcacttaagactcttcagacgattttgagcaggggcataaagattcagagtagytgaaagaaatgttctcaagctgatttggaaaaacagtagtagattaaatagctgaaaacaagtgaagaatattgagatacccaactgtagcaagagtaca

SEQ ID NO: 128624 - DNA, 201 bp, Homo sapiens
ttgtgtatttttcatatataactccaagtgtgatgacatataagcacatttacagctattaatcagaaagggaagatctggccagagtagtgtggggatgwtaatctgtaacaagctggtcatgtggatagaaaggaaattcattcctttgtactaatgactatgagggttttatagagagtaggtagaccattctgcttc

SEQ ID NO: 128625 - DNA, 201 bp, Homo sapiens
acaactatatttactagtatgtgttcatgtatgtttatatccccttgattatatatatatatatatatatatatatgcataatatgtacatggttatgtgygtgtatataattatctaaaataataccttaagcattaatgaaagttattgggggttctggaaagttgtttaaatcaagagaaaaacaattgtcactggaa

SEQ ID NO: 128626 - DNA, 201 bp, Homo sapiens
atgataaattctataatcagagctcagtccatcacttagtagtcaaagttagcataaatcagttttattttgtagctcagagagtttggtctttttgagascttcacattgaatttagatttattaggattccagacccactactcattttacacatgagaaataaggcctgtgagctgtgacttcctgagattcccccag

SEQ ID NO: 128627 - DNA, 201 bp, Homo sapiens; identical to SEQ ID NO: 21781

SEQ ID NO: 128628 - DNA, 201 bp, Homo sapiens
aattgtcattctaaagggttgagtacagaaacatggtagaggttctggacagtgtctaggctggtagccatgaatttatggtagcctcaatccttataaaygtatgatgctttttccaacagtgttcggcactttaggtacaagcatggagaaggcagttagttggttttagttgaggtttggtagccaggtaacacagag

SEQ ID NO: 128629 - DNA, 201 bp, Homo sapiens
gaaactaactaaaacttaatgacacatttatgccaatttcctagaaaggaacaattttaattatatttatcaggtgatactgattgttatattaatgtaaytatataattatgtaattgttgtatattaatatgtttggccctttgatttcttagaggtttagatttagccttacatatattttaaatgttaatttactat

SEQ ID NO: 128630 - DNA, 201 bp, Homo sapiens
cagtaaatactttcatattttttaaaaagttttggtttcctaagcatttcaatgaacagagcaatgaaatattattgcagatgtatttctctatatatagygcattctcttaaaattttagtgagtaaaactttttgttaaattcactttataaaacagtttcttttttctgattatagaaaaattttcatgggaaaaaat

SEQ ID NO: 128631 - DNA, 201 bp, Homo sapiens
attgtttaacttttagttgaatatgttaaactaagaactaggatataaaatgttttgtttcttgtctctttttctctccagtaaatactttcatatttttwaaaaagttttggtttcctaagcatttcaatgaacagagcaatgaaatattattgcagatgtatttctctatatatagtgcattctcttaaaattttagtg

SEQ ID NO: 128632 - DNA, 201 bp, Homo sapiens
gcaggtatcaaaataaccaagccataaagccagctttatcaaacaataatttcctattaacaagaactttgagtgtattactcattttacacaaaacaagyagacgacaaataatgatggttaaaattaataattaaatgattaaatgaaaactagtaaggatttctgattacttttctactttctcatacagcttaacac

SEQ ID NO: 128633 - DNA, 201 bp, Homo sapiens
cgtactgccagcgtctcccctcttcagtctcttccccactgtggcactaaggaaagttgtcatcactccacacagtcttcttgcaaaccaccactggtccrtgtggccttaaaagttgagtcgttttgatttggcctacaaagcctttgtaattcagcctcagcctaccttttctggtttccttcataacagtcctcatgg

SEQ ID NO: 128634 - DNA, 201 bp, Homo sapiens
gcacatggaaatggtgcttatcagattgggcggtgattgggaaaaaaccgtgagagatgtgctccagatcacaatcactatttggaagaaatcaagtatcycttcagcagatattggatgagtgccaactatatgtcagacactgctcatggcctcgagatatgcctgagataaaatagcccccaatccctggccttgtgg

SEQ ID NO: 128635 - DNA, 201 bp, Homo sapiens
taaatttgttggaaagcagccagagttatacttaaaaaaatacataattccaaaggtctgcattaagaaaaaataaatatgtggttaagtctatatttcaktaatttaggggaaaaaaaacaaaaagacgtaacaaaaataagaatataaatagattgcaaaatgaaagaaaagctgataaagctttctctgccccttctc

SEQ ID NO: 128636 - DNA, 201 bp, Homo sapiens
gataccataaaataacccacatatattgcttatattgaattttccataaaaggtagaaatatgtggtataaacaagaaaaatccaacaatacatttggatscaccagaaatacattagcaccctcccaaatcctgcctaaatactaaattataaaaattgagctcacatttatcctgctttcttatatatggaaagaactt

SEQ ID NO: 128637 - DNA, 201 bp, Homo sapiens
ttgcattttttaaaccagaaaaactgggacttcgaaggcatggccgcacgtttttcccctggtgttatgcccacccccgtggcctcctgtgtttcagcagyagccccgcatatgcttgcagctcccacctccagcacttggctgttctgatgcatacttgagaccacagctggaaaccatgtcaggaaaagaaggtggaag

SEQ ID NO: 128638 - DNA, 201 bp, Homo sapiens
aatgcctttagaaactggctctattatgttatgtatggtgtgattatagctacaaattatatgtgcctatggacaaattaaagaagtttagtgtagtggcrggcttgtggatgaatttttttctttgagaattattttaatgttaatacaaataaaaacttttttaaatgaataaagcctggcaagtaagatataaaaatt

SEQ ID NO: 128639 - DNA, 201 bp, Homo sapiens
ttatttttccattctaaccagaatgaaagttttagcctcgcatttgtggccctccatgttttggcctgagctgtggatgcctgacctcatttaccagtatmccctttttgtcagggaggctgccccattccctgtttattctgtagggccccacttgccgccttctgtcgggaggaggctgatccctcagggattccctct

SEQ ID NO: 128640 - DNA, 201 bp, Homo sapiens
agaaggaatctatggaatttttatatttcaatgaagctgtagcttacactgagtttcttacaatatgtactaatgaaatgagcaagctgggaaagtttggsagaacatattgtcagggaatgttaagtaatgcctttagaaactggctctattatgttatgtatggtgtgattatagctacaaattatatgtgcctatgga

SEQ ID NO: 128641 - DNA, 201 bp, Homo sapiens
gtcttaaactacatttttggtaaaatatgccattcgtgacatatatttagaaggaatctatggaatttttatatttcaatgaagctgtagcttacactgartttcttacaatatgtactaatgaaatgagcaagctgggaaagtttggcagaacatattgtcagggaatgttaagtaatgcctttagaaactggctctatt

SEQ ID NO: 128642 - DNA, 201 bp, Homo sapiens
gtaaatgccaggatgtggttactttgggggagagagaaggaagtatgattgggacaaggcccacgtagggtttctagggtggctggcaaagtcctgtttcwtgatctggatgctgcttactatggcatgtgtcttataatgttacactaggctatacagctgtatgtttgtgttggagagttcatatctgtgtgtgtcttt

SEQ ID NO: 128643 - DNA, 201 bp, Homo sapiens
ggtcaagaactgaaggaaacatttcttctataggagatcatagtaaagcttcttcttgaagtcttacaaatgttgtatttatcaaatggagtgttaaactmttcgaggtttcatttatatttgggaaaactcttgttaaataaaacaggtagaagagccctcttaaaatccctgaagaatgtatgacacaaatttctatca

SEQ ID NO: 128644 - DNA, 201 bp, Homo sapiens
aactccatcacctagtcccagctctgtatgcatatgatggtgatgctgagtaaaggcaggatcattctacatttcaccgaatcataaaaaaaagataaacrtgtctttaaaacttatataaattattaaactataaatattttgatgctcttcagagatgaggttcagttaacaggaaaaaaattcactagtgtagaatgc

SEQ ID NO: 128645 - DNA, 201 bp, Homo sapiens
tccatagtaaagtagttgtcgtaatgaacaagttttggcagaagaaagatttctatggtagtcttttgaaaatcattctaaaatgaagattgtggtaaaaktcctcttatgatggaataaagagaacaacttttattaatttcctgtgcatgtggatattcaaaagtgtatggattttttaaatgatgattctgtaagaac

SEQ ID NO: 128646 - DNA, 201 bp, Homo sapiens
gctagtgattttaatgttcttgcttccgtggttgggggttgggggggtggtgacagaaaagagtaccattttccttctgatatgaatgtgtacaaagaggraggaaggataaatttaaccctttttaaattaaatgttaagaaatgtttctaaacgtattgaatgcttttccagtatatctctggatttttctcgattcac

SEQ ID NO: 128647 - DNA, 201 bp, Homo sapiens
tttgtgcatttttcaaactgtagaaaactagtcatggtgaagaagtttctctgtgctaatgtgaaaatgaaatcaagatcattttgtgttgtcattgtttygtaaagatgaaaggtggaccgggcatagtggctcatgcctgtaatcccagcactttgggaggctttggcaggaggatctcttgagctcaggagtttgaga

SEQ ID NO: 128648 - DNA, 201 bp, Homo sapiens
taaaagacaaaaatgactttagaaatcattcagttcatctccctcaatctgtgagtgaccaaagcttacatgcttgctatgcaagacaggaggcagccatytctctgagacacacagacacatttcagctgtggcggcatgtggtagatagatgtgtgccccatgtcctcatctaatgtctatagttgtgccatctctaat

SEQ ID NO: 128649 - DNA, 201 bp, Homo sapiens
ctcaggacttagagcaggagttagacactgaagcccttccctctggagaagccacacgtgacttctttgtcgattgctttagtgaatgcttccccagtggyggacagagaactttgcctccattttccatgctcttcagggctcctccagcctctctcacttcttccttgtttgaggaggaaatggtacgcttccagtcca

SEQ ID NO: 128650 - DNA, 201 bp, Homo sapiens
gcccttagttaaaaagttgtgtggagatttaccctgctgctgtttgaaagcaggaagctggggtttatgggttaattcagtaaatagctgccctctattakccacctttccccagagagatagtcattgggaaatagtcctccacagtcagtttctgcaagctgcaatagaatcgtggctagtcttagaatgccagtcccc

SEQ ID NO: 128651 - DNA, 201 bp, Homo sapiens
ttactacaaaactgtattacaggggtctctctgaaccatatccctttcacaagtctaataaatttcaacattgtttaacttttagttgaatatgttaaacyaagaactaggatataaaatgttttgtttcttgtctctttttctctccagtaaatactttcatattttttaaaaagttttggtttcctaagcatttcaatg

SEQ ID NO: 128652 - DNA, 201 bp, Homo sapiens
tctctgaagctattgatagaatatcccaacttgcccagtaactggacagaaactgcactcgacttatctgcaatttgttgatagaagttagcaaggagatmttacccaaaagatagatgggaacgagaaatgtggcatctttgaacctctcaggagcaggttatttgtggaatcagagagtgcctctcgccatctttgtct

SEQ ID NO: 128653 - DNA, 201 bp, Homo sapiens
ccatcacatcaacctgttttattttctattttgcacgtcacacattacaagacagttttgccatttttcacattggcattccacttaactgaaataagtartcttaaattctaagaatatctgttttcccccttgggatccaagaaaacattttcattttgagtaaagagaaaaatagcccaaaaaatattgttattatac

SEQ ID NO: 128654 - DNA, 201 bp, Homo sapiens
agtaaagtagttgtcgtaatgaacaagttttggcagaagaaagatttctatggtagtcttttgaaaatcattctaaaatgaagattgtggtaaaagtcctyttatgatggaataaagagaacaacttttattaatttcctgtgcatgtggatattcaaaagtgtatggattttttaaatgatgattctgtaagaactcata

SEQ ID NO: 128655 - DNA, 201 bp, Homo sapiens
gaattacaagggtcttttgtgttctaataacgtattccattatgtatatttgaatggcaagtctagatggttgagtttctcagtgaaaaatttggtgaaakaattattaagatttttgaaaattatcactatatattattaaagaaaaccctaagtcaataataccacaatgtcatgatatttgcattatgatcatttgtg

SEQ ID NO: 128656 - DNA, 201 bp, Homo sapiens
ctaaaatatggagcctgattggaacctttttcaattatgtccatattttgattactgagttctagacagttgaagagtcccaatccttttaaaaaatatgyatacaaaaataattatatgtgttctttgagtcattgaaaaaagtttatacaactaatttatggcagagggatttggcttttaaaaccattattggtgtgt

SEQ ID NO: 128657 - DNA, 201 bp, Homo sapiens
aggatgtagggcaggcaaggaaaggtggtgctgtgagggtcttcagttgagccagctcccagtcctgattcggcatgtgtcattttggtgccaggcctggscacagcttctcagaccccagatagagctgccttctgtgcatggaggagcaggagggctcagaggcctcagatgactgtctgaggtttgcaagcagcaaaa

SEQ ID NO: 128658 - DNA, 201 bp, Homo sapiens
ttattagggtgttcttttggtgatgaaatacaatcctcaatgaaaccaagactcatggtgatgaaagaacccgtgtaggatgcccaagtagaggtgaacaratacctttcaaaggaaagaacttttagctattaaaatgtatgtaaagcaaagttctgtttcagtatatgtcaggtaactttttccctacagggtacagaa

SEQ ID NO: 128659 - DNA, 201 bp, Homo sapiens
taataccttaattttaaaagggagaacatttccccctgtatataaacttctctgggcaagcataagatttgaacaaaatttaagtatttagtataatttawcacaataatggttttctgaattgtgtactatcatcatgtttgaattttttttttccatagaatgctgaaatttctgtctttgaagtaaatatacgctttg

SEQ ID NO: 128660 - DNA, 201 bp, Homo sapiens
tgtctcttttcagtaacacaaaatgaaattattagggtgttcttttggtgatgaaatacaatcctcaatgaaaccaagactcatggtgatgaaagaacccrtgtaggatgcccaagtagaggtgaacagatacctttcaaaggaaagaacttttagctattaaaatgtatgtaaagcaaagttctgtttcagtatatgtca

SEQ ID NO: 128661 - DNA, 201 bp, Homo sapiens
tgttgttcaagggtcagctgtacttggatttggaaacttgctgttactgtgtatgttgaaacacagtgagagttaagataactatgcattacagttgcttrtgtggaatttacctatattgtagtagtggtaaattttgcaagtccccaaatgtttttgccactgttatttttatttctgaatattatataaggcttatgt

SEQ ID NO: 128662 - DNA, 201 bp, Homo sapiens
gcagtgagattagtgctcgcggggccgcggcggagtgtaccgtgctgctctactcgctgccattcgcccgcaggtcggcgcgctcgcccacctgagccgckccggggctgcgggaccgtgggacagcgcgctcagcccagcctaggaaagaggcagcagtctcagcgcggagatggggagcgggcgaagttgacgagtctc

SEQ ID NO: 128663 - DNA, 201 bp, Homo sapiens
ctgttgcctctgctttgtggcactcttgttctctcagagaccaaatgaggacaccagtgttaggtagaatattaaggatcagtaaagctaagtctttcccycatctatttcaattaaaaacttatataaattaaaagtttaatattttgtttctactcccctaattaattgctatatataccgcatttgggagacctaaaa

SEQ ID NO: 128664 - DNA, 201 bp, Homo sapiens
agggtaaggatgaaataaggcgactacaaaccagctttcagaaatgcgaagtcagtcaacgttttcctctctgataaccccttatttgtggagcaacaggrgaattacaacacattttggaaaataatttctattggaccaactcctcacttcgctggaagtagtcggatccaagacttaatttcaacacagtgttcgact

SEQ ID NO: 128665 - DNA, 201 bp, Homo sapiens
actttgcagaaattctcgtaaagtctcttgtctttcgggtaagcatttgatagtttctgtaaatcccagtcaccacgcacaagtaacatgctgtgtgttgmaagtggacaaagagaatttccctgctgttgcctctgctttgtggcactcttgttctctcagagaccaaatgaggacaccagtgttaggtagaatattaag

SEQ ID NO: 128666 - DNA, 201 bp, Homo sapiens
gagactactttgcagaaattctcgtaaagtctcttgtctttcgggtaagcatttgatagtttctgtaaatcccagtcaccacgcacaagtaacatgctgtrtgttgaaagtggacaaagagaatttccctgctgttgcctctgctttgtggcactcttgttctctcagagaccaaatgaggacaccagtgttaggtagaat

SEQ ID NO: 128667 - DNA, 201 bp, Homo sapiens
ttgttttactttataatgatattgacaaagaacttatactaagagaagaaagcatgtaggccatggaagtttttagtcgttcacttcagtgtgtgttatcrgtattatttctaatctgagactactttgcagaaattctcgtaaagtctcttgtctttcgggtaagcatttgatagtttctgtaaatcccagtcaccacgc

SEQ ID NO: 128668 - DNA, 201 bp, Homo sapiens
tcttgataattttgactggggaggactacgtcttatcagctctaatttgatagtcattgttttactttataatgatattgacaaagaacttatactaagaraagaaagcatgtaggccatggaagtttttagtcgttcacttcagtgtgtgttatcagtattatttctaatctgagactactttgcagaaattctcgtaaa

SEQ ID NO: 128669 - DNA, 201 bp, Homo sapiens
gattctgatgtaggtccatggggctccagtgcttatgcttttacactgtgtcatggtgtatccagcagtagcagcagcattcattttcccgtaaagaaagmttcaaattttgtggatcttattcatctctcagtaaaaataaattgattatatatgtgatatattttttaaattctgtatgctatcattcttagcaaatat

SEQ ID NO: 128670 - DNA, 201 bp, Homo sapiens
agtcgatagcccgtgataatttttagtttggtgctgttttatactttcattgaaagaattttagactatgtttaatattattgcttattaataaatccagyattaccctctccctttcttagttatggtcaatttacatatattttatctaggcaaagtattttatcaaatatttttctgatcttttcaggtaacatcaaa

SEQ ID NO: 128671 - DNA, 201 bp, Homo sapiens
tcaggacttagagcaggagttagacactgaagcccttccctctggagaagccacacgtgacttctttgtcgattgctttagtgaatgcttccccagtggtkgacagagaactttgcctccattttccatgctcttcagggctcctccagcctctctcacttcttccttgtttgaggaggaaatggtacgcttccagtccac

SEQ ID NO: 128672 - DNA, 201 bp, Homo sapiens
tgtgatttaatggaaagtactcatttaataacctagatgctatacagttcctcactagactaacatgtttccttcaccaatatgatcatagaatgagaatrcataagttacacacctctgctaaaagaaaatcattgcctttctaatattaggttttggtagaactcaatttctctaatgtgaaaatgtcaaagtttggtg

SEQ ID NO: 128673 - DNA, 201 bp, Homo sapiens
gccatgttggtgtgctgcacccattaactcgtcatttaacattaggtatatctcctaatgctatccttcccccttccccccaccccacaacaggccccagwgtgtgatgttccccttcctgtgtccatgtgttctcattgttcaattcccacctatgagtgtagtatctctaattttaaaatgctattctgagatttttat

SEQ ID NO: 128674 - DNA, 201 bp, Homo sapiens
gtatggagtgttctggcctttaccttggtgtttttgatggatatctcaagagacagttacttagtcctttagggagcagattagaagaaagatggtgtcarttttgctatttgccagtgtgttctttcatttcagatcctgcatgccatggggaagattccagaggatgaaatctggcagtcagaaccagagtctgtggta

SEQ ID NO: 128675 - DNA, 201 bp, Homo sapiens
tgctttggtgtctattttgtggaaggaagaaattcctgggaacaagatacattgaaagataaagtccaacttttcttctgattggctggagacagccagaraagcttgcttaggaggtggatgtagccgtcaggtgctggggcgtgtagcgtggtgataccacagaagacctggagccacttaacccatcaggcagaacct

SEQ ID NO: 128676 - DNA, 201 bp, Homo sapiens
attgaccatatctgctgtcctttctttttgggtaatgactttcaagctttggacacatcaaatcaagatccagtattaagtatataattgtgacttgaaarcatttagtcaaaatttccttgaagcctggatgatgcatgcatttgattgcatgatccatcatgggtggcatatgtgtgagcatgctgaaaatgatttata

SEQ ID NO: 128677 - DNA, 201 bp, Homo sapiens
tgagtaatcttttctaattcagtgttttaaagtatgggtttataaagccaatcaccaaggttgagattctgaaaatgtcttggctctctctcactagtgtygattctaccatattaaattaaattcatttattcacttgcacatattcaacaagtgtactactcaattgggcagaacattgcagggttgctcactaaagtg

SEQ ID NO: 128678 - DNA, 201 bp, Homo sapiens
aggtgagagatttagatgaactttgataaatttgtagctgtcacattcattacagattattaggaaaaaatattttttgatgaggagggagacatttctcrgagacttctaaaaataataactcaataaatgcctgtcaaataaatatctagcctggtgattctccacatgaggtaggaaaagaaaggaaagtgtgttagc

SEQ ID NO: 128679 - DNA, 201 bp, Homo sapiens
ccaaggttgagattctgaaaatgtcttggctctctctcactagtgtcgattctaccatattaaattaaattcatttattcacttgcacatattcaacaagygtactactcaattgggcagaacattgcagggttgctcactaaagtgctggattctacaatgatgggaatgttctagagctgctttaatacactagtcact

SEQ ID NO: 128680 - DNA, 201 bp, Homo sapiens
gacatgatatcaaaaattgactctaaagtactgacatatgtccctggaagggaataaggataaaggagggcactactgtatcaccactcagaatgttaccrctgaggtaaatgctctaatacaggggcatagagataccactggaacacacagaggcacaggctagctttacttagagaaatctgggaaggcttcataatg

SEQ ID NO: 128681 - DNA, 201 bp, Homo sapiens
gagctgatctcctctacttcctcactgcccctagttttcctatggaaacagagtgtacctaacagagacatcttttctctgccaacattcacctgccctcytatctgcttcctttaaaacgttaactctgcttgtccccagttactagtcctctgtcattgcataccctttaggatcttgtctcctggccaatatgttagg

SEQ ID NO: 128682 - DNA, 201 bp, Homo sapiens
agttttggttttatgttgctttgttttgtttcacaagttcagtgtggcttgggttattaaagagaaggtaacattttgtattttgatacagacagtggtarccaactcttgattgcttctcccctccacaccccccacccaatcccagcatcatgctaaacactgcttttattttatttttaattgtagatatttaaggtg

SEQ ID NO: 128683 - DNA, 201 bp, Homo sapiens
gggaagtcattggaggttttgaactaaggaacaataagggctactttaggtttcgacaaaatccttgtcacttctttaagagactgaaaagaatataacgrtagaatgagagagaatcattgggaaaaaaacaaaagcaacacggcaacaatgtttaaccatgttgcttttctttcaggctaaatatgtgattagtgctat

SEQ ID NO: 128684 - DNA, 201 bp, Homo sapiens
gggaaccatgtaacagattaaagagagctttggcaacttgcagtaccaagagattgacagaaagtgcaagatggcctgaaatgtgttagcctgccttaccrtgtcctctgcagagcagcagcctgcagaaaggcttaggcgtggattcccaggctgcgtatcacatgtcctgggcatttctcttggcctctgcaaccacca

SEQ ID NO: 128685 - DNA, 201 bp, Homo sapiens
gctatttgccagtgtgttctttcatttcagatcctgcatgccatggggaagattccagaggatgaaatctggcagtcagaaccagagtctgtggtaggctrtgttttatttcatgaaattagatatcttttctctaaacccattattttcaagaagagcacacttgtatatattcacataccttttcctaagtgattcaac

SEQ ID NO: 128686 - DNA, 201 bp, Homo sapiens
ctaaaaaattgagtacttgagggttttaaaaaatcgtgttgtagaggaatatttaatgactggaaaaaatagtaatattaaacacatagaaaagcaggctrttgtggtatggtatatgatctcatttctaaaaacaactatttatatatgcactgcaaaagcaatggacatccattgaagtatttttaacgtttaatatta

SEQ ID NO: 128687 - DNA, 201 bp, Homo sapiens
ggaggttaaagggtaaagtgttttattctgcttcatgatagtttcctttacatattgtttggttcccatttactcacacatttactctgtttttggttttmgagtcttgagcaaacctcctttctaggagcattcctgagttaggagggctttaacagctggtctttgacaccattgcattgctgggattattgctatttg

SEQ ID NO: 128688 - DNA, 201 bp, Homo sapiens
aatatttttgggactccattgaatgagaatccgtataattcagctgaggtgacatttcaactgggttattcagatgggatctgtcaaatagagtcttggarggggccccttcccaccctcatcacagcatttccatatgacatgtactgtacaaataatttatctctggggaaaggaaggagggatggtggagaggtgccc

SEQ ID NO: 128689 - DNA, 201 bp, Homo sapiens
atgaaactaatttttataatacattttatttaacccagtatatccaaaatattatttaaacttgtaatcaatataaaacattattaatgagagattttacrttcttcttttgtactaagcttttaaaatctgatgtgtggtttccactcacagcatatctcaattcggaccaggcacacagtgctcaatagcctggtgagt

SEQ ID NO: 128690 - DNA, 201 bp, Homo sapiens
taaacgtataaagtcttattaaaaggattttagtatgcagcaaatgtgaaaaaagtgttaaccatgatgatgatgatgatggtgatggtggtaatgatcaygatgatactggtggtggtggtggtgatgatggtgatggtgatgatggtaattatgatacttgcctatcacaatccttatttctcatacccactttctttg

SEQ ID NO: 128691 - DNA, 201 bp, Homo sapiens
tctttgtgattccctttactcgtgggcacaatgccacactgatagtgcagaaggatgactttgtacaccagtcatagatgcacattgctctcaatgtgcaycttgatttggttctttgctatttaagttccatcccacacccactttgtacaagtgcattgtgttgagggggcagggttgggcactactctgctggtaggg

SEQ ID NO: 128692 - DNA, 201 bp, Homo sapiens
taatatttgtatttttagtagagacggggtttcaccatgttggccaggctggtcttgaactcctgacctcaagtgatccgcccatcttggcctcccaaagkgctaggattacaggcaagagccaccacacccgaccggaaacaacaggtttttaatatagaccaaacagcattatattggaagaaaatgccatctaggact

SEQ ID NO: 128693 - DNA, 201 bp, Homo sapiens
atgttggccaggctggtcttgaactcctgacctcaggtgatctgcctgcctcggcttcccaaagtgctgggattacaggcgtaagccaccgtgcctggccrgtattttcatttttaacaaacaaattgttaattgcattatatcaggagattattgcataagtgtttaaacagtggcgattacattgtctaatgttttaag

SEQ ID NO: 128694 - DNA, 201 bp, Homo sapiens
gagacattcgctgaaatatccgttaatgaaaagctggacagtaagaaagaagtaataagaacattttatctctttgggaatcttctaataaaaaaatgaarggaaagtaagttcattttaattgatgaaagggacatagatttcatcaagttgaaaaggcacacaaacactgctaggggcaaactgcactcctctgcgcct

SEQ ID NO: 128695 - DNA, 201 bp, Homo sapiens; identical to SEQ ID NO: 21805

SEQ ID NO: 128696 - DNA, 201 bp, Homo sapiens; identical to SEQ ID NO: 21809

SEQ ID NO: 128697 - DNA, 201 bp, Homo sapiens
atagctggttaatacataactttcttttttgatgttttaaaagttccaagatagttgtagactaactttttagaaatgtgtatggtgtataaatgagtatkcactgaaatctcttttacccaaggggcagatcatctccagagacttggcagagcaatgacatctcccacatggaactggacagcagcacgttgcatctgt

SEQ ID NO: 128698 - DNA, 201 bp, Homo sapiens
gggcatccatgttacttaaatgagatgctgagatttctgagtcccagtagagaagagccaagaccagcccagtcttcagctttccagggacgaccagcacrtgggaagggaagaccaggatatcctggcccagagaggtggtgacctggagtatccaaaattaagatgggcctcaggacatgtatgagtttatctcagaga

SEQ ID NO: 128699 - DNA, 201 bp, Homo sapiens
atgcattgaattcttgtggtctccttgcttttgttcatctatgaaccatttctactttcccttgaatatttacatctaatttatctcaatttatgttttcratggcagaagctgtacttgtttttctaaattacagaaataaatataatgaccataaaactttcaaaaactgaaagtatgtgaaaaatgtttctcttctat

SEQ ID NO: 128700 - DNA, 201 bp, Homo sapiens
catattttctgtgtggtattagtgtatgtaaaatttgtgatgtaattctactgctttcacaagcctttagtgaaactcagtggattcaaaactcacttttmctaagatgactcccaaatctctatattttcagctgagttaacaaatgtgaaaataaataaatgtttattggctttgaatttgggtcagttaagagagaca

SEQ ID NO: 128701 - DNA, 201 bp, Homo sapiens
gcaaacagagacaatttgacttcctctcttcctatttgaatatcctttatttctttctcttgcctgattgccctgtccagaacttccaatactatgttgartaggagtggtgagagagggcatccttgtcttgtgctggttttcaaagagaatgcttccggcttttgcccattcagtatgatattggctgtgggtttgtcc

SEQ ID NO: 128702 - DNA, 201 bp, Homo sapiens
aatataatgaccataaaactttcaaaaactgaaagtatgtgaaaaatgtttctcttctattgttcctccccctagagggccactgttaaaaatttagattrtttatccttaaagatttactgtatgcataggtaatacaagttgaacatccctaatctgaaaactcaaaattcaaaatgctccaaattctgaaacttttga

SEQ ID NO: 128703 - DNA, 201 bp, Homo sapiens
tttgtgattccctttactcgtgggcacaatgccacactgatagtgcagaaggatgactttgtacaccagtcatagatgcacattgctctcaatgtgcatcktgatttggttctttgctatttaagttccatcccacacccactttgtacaagtgcattgtgttgagggggcagggttgggcactactctgctggtagggat

SEQ ID NO: 128704 - DNA, 201 bp, Homo sapiens
actctaaagtactgacatatgtccctggaagggaataaggataaaggagggcactactgtatcaccactcagaatgttaccactgaggtaaatgctctaawacaggggcatagagataccactggaacacacagaggcacaggctagctttacttagagaaatctgggaaggcttcataatgcacataccacctgagggtt

SEQ ID NO: 128705 - DNA, 201 bp, Homo sapiens
atattacccagcctcaggtatccctttatagcaacaccagcagtctaagacaccagctaataatatttaaaatttttttgtcaatcaggtaggagaaattrcctcatttatctataatttgtaatttttatcattaacaaagtatcattttgtaaattacctttgctcattaaagtttttttctgtttatattgcaaatat

SEQ ID NO: 128706 - DNA, 201 bp, Homo sapiens
tgctatatacataccacattttctttatctaatccacctttgatgggcacctacgttgattccatatgtttgctattgtgagtagtgctgcgatgaacatrtgagtgcatgtgcctttttggtagaacaatttatattcctttgggtatatacctaataatgagattgctgggtcgcatgatagttccatttttacttctt

SEQ ID NO: 128707 - DNA, 201 bp, Homo sapiens
gggtctgggttcaaggggagacttaaaacaagtaggatagatagttataacataaggaaccaaagtacaaaagatcagtttataaatcggggcattgtgtrtcaaataaatgacaagttcaaggtcacacagctgagattatatcaagcatatattgtgaacctactgtgtgccagcagtctctgccagcacgtcctaggc

SEQ ID NO: 128708 - DNA, 201 bp, Homo sapiens
tccatcccttcaattatcctgagaaatcttacaaaactaactgtaagtcgctttaatgtatatatgacaccatttcacaggctgtaatgatggggactgtmatagacgggctgtcaggttgttacagctgcaaataatgtcaataattggtatgtgtgttaggcatgattctacaaacttctagggtcaagatacagtaaa

SEQ ID NO: 128709 - DNA, 201 bp, Homo sapiens
atcttacaaaactaactgtaagtcgctttaatgtatatatgacaccatttcacaggctgtaatgatggggactgtcatagacgggctgtcaggttgttacrgctgcaaataatgtcaataattggtatgtgtgttaggcatgattctacaaacttctagggtcaagatacagtaaagtagagagatgccccttggtgagta

SEQ ID NO: 128710 - DNA, 201 bp, Homo sapiens
gtttttcgtggatatacccttaagctgtatctataacttgtgaaatgtcgatttgcttatttcaggactgtcttttgttattttatacattttttacaaawtttttttaattttttcctatgggaaaacagaaccaaaaggttaaatatgtggaccttggaggatcctatgttggaccaacccagaatcgtatcttgagat

SEQ ID NO: 128711 - DNA, 201 bp, Homo sapiens
tagaaatagcccagttacaacatgcctctatttattgtgcaggaagttttatcacaaattaaatatggcttgggtggtacagatttataataggaaagctrcatagacagcattgattatgcagtaaaagcaatattggatgaatttggaaaacttaacatttttcctctttaaggtagagtttttaatactatttgaata

SEQ ID NO: 128712 - DNA, 201 bp, Homo sapiens
actgagtaaatgatggtgctttttactgagatggggatcactggaagagcagcaggaatgtaaggagaaatcatgaaagcacagaatctggaatagaagcygattctgagtaaggtgttttgtttacagggaaaataatctgatatttcaaaaacctccgatgtcacgttttgtaatattagattctagtgacaatttttt

SEQ ID NO: 128713 - DNA, 201 bp, Homo sapiens
tgacctcaggtgatctgcctgcctcggcttcccaaagtgctgggattacaggcgtaagccaccgtgcctggccagtattttcatttttaacaaacaaattkttaattgcattatatcaggagattattgcataagtgtttaaacagtggcgattacattgtctaatgttttaaggcaaatgtatttctgctactgtatgat

SEQ ID NO: 128714 - DNA, 201 bp, Homo sapiens
cgttggcaagaatgggtcatgttcagagagctggagaaagtacagactttctggaataaagtgcacaagccctgtactaatacccaatgttttctgaaccyaggatgtccctgcacagcccatcaccaccacctttttggagagacatttgccctccgtgccaggcctgctcaggctgattggattgaccaccatcttttc

SEQ ID NO: 128715 - DNA, 201 bp, Homo sapiens
gccccagccgattggattggatggtgcccactacattgagagccggttttcctctcccagtctgccaactcccatgccagtttcttctggaaacaccctcrcagggacacccagaaacaatgcttcacctgccatctaggtatcccaccatccagtcaagttgacacctaaaattaaccatcacaatgggtaaagtttatt

SEQ ID NO: 128716 - DNA, 201 bp, Homo sapiens
catgcagacagcacaacgctagaatcttgtcatatttgctcttatagaacccacttttcttccaagtggaggccatgtaagaagagtcagtatctagaackgagggtgaagggcgggatgtactccaaggaggagcaagactgcagaaagaaggttggaggcaaatggggaaagtgccacaattttggcttagggtgcttc

SEQ ID NO: 128717 - DNA, 201 bp, Homo sapiens; identical to SEQ ID NO: 21814

SEQ ID NO: 128718 - DNA, 201 bp, Homo sapiens
aggtagtgaacatagtaccaataggtaggttttcaactcttgctgtactccttacctccccctttagtagtcctcagtgtctattattttcatctttatakccatatgtaccccatgcttagctctcacttataagtgggaacatgtggtatttggttttctgtttctacattgattcacttaggataatagtctccagct

SEQ ID NO: 128719 - DNA, 201 bp, Homo sapiens
gcatctacacaggactggtcagtttacaagtggttccagagagtgtgggccctggctgtgctggtggcaggtcagggaacttgcaatatgctgtggtttargtgatgctacattgtccctgaattcagagtttcttcctgggagagggcattgggtcactctgcttccagttctgttaggggggtaaaagaggggagcttc

SEQ ID NO: 128720 - DNA, 201 bp, Homo sapiens
tagatattcaagctttgtgaagttacattctgaggcactcccaggctaaagcagtttgttaattgaagttcctgcaacaactcgtgagatggttgtttggrgaacttcagttgaaggggaaagcatttgtcctcatattttgaaaaaggctgatcatttttcatttgagaaagtctcttttcctaagaagggtgtgcatga

SEQ ID NO: 128721 - DNA, 201 bp, Homo sapiens
tgtatggagtgttctggcctttaccttggtgtttttgatggatatctcaagagacagttacttagtcctttagggagcagattagaagaaagatggtgtcrcttttgctatttgccagtgtgttctttcatttcagatcctgcatgccatggggaagattccagaggatgaaatctggcagtcagaaccagagtctgtggt

SEQ ID NO: 128722 - DNA, 201 bp, Homo sapiens
gatagtgataattagtgcggaaaaaatcaagcaggaaggtggggagagggcataccagaaagtgagatgggagaattggttatgcaagtttaaataaggtsatcagggaaggcctcactgagaaggtgatatctgatagagaattggaggagacgagggattgagccatgtggttccctgagagaagaagatggaacagcc

SEQ ID NO: 128723 - DNA, 201 bp, Homo sapiens; identical to SEQ ID NO: 21807

SEQ ID NO: 128724 - DNA, 201 bp, Homo sapiens
tccaaattttatataatgtgtatgtatttttcatgtagaaaaatattataacatttatcttttaaaaagtcaacagggcaaaaaatacggaaatattgcaytaacttccttgaccttccatccttcaaatattgttcttatttcttttcttactgaagctcctagagtaaattcaaataaaggattaggaatggactggcc

SEQ ID NO: 128725 - DNA, 201 bp, Homo sapiens
attcagctctccaaagcccttgctgttggctattgttttacacttgcccatctcacactttacctactattctattcagctccctgggacttttgggtttmcaagtcctaacttagaatgaaaaatgaagacgaaatcttgccagaacctcaatatctctgactccgagacaagtccaggcaacgtaacttccagaagcta

SEQ ID NO: 128726 - DNA, 201 bp, Homo sapiens
aaatatagtatatccatatataggagtattattcagccctaaaaaggaatgaaattctgacacatgctacaacatgggtgaacgttgaagatatgctaagkgaaataaatcagacacaaaaagacagatattgtatgactttgtttatatgagcattattactatgtgctctgaatctcttctggccactaaacatggttt

SEQ ID NO: 128727 - DNA, 201 bp, Homo sapiens
tctcagtttggtctgttcacctatttgagtatgtttgtagcagctattgctctatgtctcatttcctttagcaaggttctgataagaataatagaaacaaytgggaccttgccaccaatctccgccccaaaagaaaacacctcaattctcaaatgaggtcccattaagcctgtgtcagaagtttctcatgaggtctgggcc

SEQ ID NO: 128728 - DNA, 201 bp, Homo sapiens
tgatttttaaaccccttcctcttatttctctctcagaggaagtcagtcactacagcaagtatggacattgaacatccctttccagggaaattaccttgtcyagtgatatggatgtctttacagtgcatcaggttggttaggaagcttttctccataacaatagagcaatgctggctgtagaaagttgaaagttgaagtctc

SEQ ID NO: 128729 - DNA, 201 bp, Homo sapiens
gaataaagtgcacaagccctgtactaatacccaatgttttctgaacctaggatgtccctgcacagcccatcaccaccacctttttggagagacatttgccytccgtgccaggcctgctcaggctgattggattgaccaccatcttttcagcaacggctcttggcttcctggcccacaaaagggggctacttgtgagagtct

SEQ ID NO: 128730 - DNA, 201 bp, Homo sapiens; identical to SEQ ID NO: 21811

SEQ ID NO: 128731 - DNA, 201 bp, Homo sapiens; identical to SEQ ID NO: 21812

SEQ ID NO: 128732 - DNA, 201 bp, Homo sapiens
atgttataattatgatgccgtaaatctctgttttcatggacctgcctctccaggactttggagcttctggagcctggaactatgtcttatttaatttccgyttcttcagtgtatttcttaatgcctgtttcatagcttgcgctttttccattttgtttaagtgttagtagcacttaaaagtatgatgcctagatttctcct

SEQ ID NO: 128733 - DNA, 201 bp, Homo sapiens
tgcgggctagttttcaaccctgtgattcagcctcatatatttactatctacccgaaatctttgccggcaacatgccattctatccccgtctgtctgctacraggctatcatttagaaaacattaactgaatgcctcctgtgtgctaagtgctaggaatgaataatcaggttccagttcaacacattcacacacacacacac

SEQ ID NO: 128734 - DNA, 201 bp, Homo sapiens
atttttaactcaacaaatacagcgttcctataaggtggtctgtacagtatattggtttgtataattcacacattaagtgaaaggaaagaaagagatgaggmgtggaaacacttatctcatactcttgtctagttgaatattgttttttccatctttgacatttgaattttgtagtacagtgcagtatgaggtgtttaaagc

SEQ ID NO: 128735 - DNA, 201 bp, Homo sapiens; identical to SEQ ID NO: 21813

SEQ ID NO: 128736 - DNA, 201 bp, Homo sapiens
ctttggccaccaatgtttccggtttcaggaagtggaaccatattctggccaggtttccagccaagagtcttgacatttgtagcagacattgcagggatccyaccaaatctccttggcacttattttcatacacatgaacttaaggcctctgtctgatgcaagtttttgcctgcaggctttctctggccactggagctcctc

SEQ ID NO: 128737 - DNA, 201 bp, Homo sapiens
tgtgtgaagccttaatatatcatcacaatctgttctattacttcatctcatcaattggtaattgaagtattcttaggatcctgctgtgttctctagctttraaactcacagcatcctattcaaactcatgtacatatgtgtgagaaatgggagggctgtcagcagtcattcaataattttgaagaggagcacttcgaaact

SEQ ID NO: 128738 - DNA, 201 bp, Homo sapiens
agttgagtgtatatcacatattgataactcacataattttgcttgcagacatttaccaatttggcagattacctacttttacattgtagtaaatatttccktttaaaaatatcttgtatctcacagggcaaatcataccccttcagggggccattcccacctgtatggaatccaattacctacttagatcataacaacttt

SEQ ID NO: 128739 - DNA, 201 bp, Homo sapiens
tccatatctagaaatagcccagttacaacatgcctctatttattgtgcaggaagttttatcacaaattaaatatggcttgggtggtacagatttataatargaaagctacatagacagcattgattatgcagtaaaagcaatattggatgaatttggaaaacttaacatttttcctctttaaggtagagtttttaatacta

SEQ ID NO: 128740 - DNA, 201 bp, Homo sapiens
gttagctagcaccttgtggcctgctttggaatttaaagccatcatatgagacaatatctctgaacagaattttaaaattgaagctatacataagaatggtrtgggaagtagggaccttctgaattaaaagtttaattttgggtgggtccaaatggtacagatcaaagaaagagaaaatactagcacagtgaccgacttcct

SEQ ID NO: 128741 - DNA, 201 bp, Homo sapiens
actggacaagctctgctggactgagtaagtcttgccattaggcacaggcatttactgtgaccaccttttaggtttatttagcaataccgttcaacaagtawgggacaagtagctgctttgtgtctaaaaccacaccaccagccagtggcatgctgaaaaccattggaattggctcctaccctgaagatatctgtacataca

SEQ ID NO: 128742 - DNA, 201 bp, Homo sapiens
tgtatgtgtttggagaacattttctggggcgtatacctagaagtgggtcatagtaatgtgtacatgcagctttagtaggtactgccagttttccaaagggraatatactatattacactaccattagcaagatatgagagttctggtggcttctttacttcaccaacacttggtgttgtcatcaagctttctcaacctcat

SEQ ID NO: 128743 - DNA, 201 bp, Homo sapiens
ttatatttattttttatttttgctttttcaagggcaaattcctgaatgctggggggagatgctgtttctccatggtgatggaagacatgttttgtctcttyagatttaggctgctgccagagacaccgactgtagactaaagcagggagaattagctccaaagcactgggacagaggccatctgcttgtgaaagcagcttc

SEQ ID NO: 128744 - DNA, 201 bp, Homo sapiens
gcatgaggagcttgtctggcatccttgtatttgatcctgatgtcttactgtcttttctcccaggtatggcagcagccaaacttctgcatgactctggactkaatgtggttgttctggaagcccgggaccgtgtgggaggcaggacttacactcttagggtaaggcattaagaatccggaggacaaatgtgggactgaagct

SEQ ID NO: 128745 - DNA, 201 bp, Homo sapiens
taagacaccagctaataatatttaaaatttttttgtcaatcaggtaggagaaattgcctcatttatctataatttgtaatttttatcattaacaaagtatmattttgtaaattacctttgctcattaaagtttttttctgtttatattgcaaatattttctcccagtgaatcagtttttaacgatttgttgtatgatggtt

SEQ ID NO: 128746 - DNA, 201 bp, Homo sapiens
tccttggtaaacttcttcagttattcatccagatgaatgttattatcatctcatcaaagctcctgcctccacacccctacattacaaaagcttctattgamttattttattctgaacatgcctctttgttacctcccagagctacaatggcttcttttctctctgagaaagttagcactttgggggaaatttcttctacta

SEQ ID NO: 128747 - DNA, 201 bp, Homo sapiens
tcaaagctcctgcctccacacccctacattacaaaagcttctattgacttattttattctgaacatgcctctttgttacctcccagagctacaatggcttyttttctctctgagaaagttagcactttgggggaaatttcttctactacctgaattattgggtccctccccctacccacccccccatagtttttctgtttc

SEQ ID NO: 128748 - DNA, 201 bp, Homo sapiens
ttttctgtctttttttcctatccagtcactccagtaaacataaatccttttaaaaacttttcttgaaaccatcaggcactaaaactttttaataggtaaawccaaggtaaaaatggaattagattatcgcaatttatgaacagtacttaagatacaaagaaaccaaatgaaaaaaacattctaagatctgaatttcttaga

SEQ ID NO: 128749 - DNA, 201 bp, Homo sapiens
gattagttctctaagcctttgttctgtcttctaatatttcattcttagggtctagccaggcctcctagaggtctccagctggggttagttttctccattgaaaaaaaagtaaacatgtagtgaaaaacggcattgtttaatcaacacggggaaagtcaatccaccttctcttgtaggaagggttccttcctgagtaccctt

SEQ ID NO: 128750 - DNA, 201 bp, Homo sapiens
gaagatgtccagctaaggttggagtctgggaatctacaagagcatagcttgtaaagtaacttagaaatcctgtaactttgtccaaagacagcaattcctasttagaaaaccatggtgaaagccactattcactgcagcaaaatgaaatgttagacatctcagagtagacatatgtgaggacaactaagaatttagcaattt

SEQ ID NO: 128751 - DNA, 201 bp, Homo sapiens
acaagattaacaatatgcaaacttcatgtcaaagtcaaaaggggaattggaccttattaaagaaatcccagagtgcacactactactgatgaattttatgstgtgctagatataatggagtcctcgaaattgcatgagatagtttgctttctggtgtgcttcctgataggtgataacctctcaccatttacctgccaatgt

SEQ ID NO: 128752 - DNA, 201 bp, Homo sapiens
ctgcagcaaaatgaaatgttagacatctcagagtagacatatgtgaggacaactaagaatttagcaatttatgcccattcctgcgtttctctttcacctcyttttctctttccaggagaggaaatttgtgggcggatctggtcaagtgagtgagcggataatggacctccttggagaccgagtgaagctggagaggcctgt

SEQ ID NO: 128753 - DNA, 201 bp, Homo sapiens
acactactactgatgaattttatgctgtgctagatataatggagtcctcgaaattgcatgagatagtttgctttctggtgtgcttcctgataggtgataayctctcaccatttacctgccaatgtcaagcaaaagcttacccatttatgctctattaattgtttgtcccctcatccattatttgagcttgtcttctgttag

SEQ ID NO: 128754 - DNA, 201 bp, Homo sapiens; identical to SEQ ID NO: 21816

SEQ ID NO: 128755 - DNA, 201 bp, Homo sapiens
gctctttagtttaattaggtcctacctggcaatttttgtttttgtttcaattgcttttgaaaacttaaagacatgtgtttgcatgtaactgttttgttagwatgctggacataaaatgttaatccaggttctaagcacagttctttcaaataaaatatattggcacaaactcatggaattaactttctttagaatataacc

SEQ ID NO: 128756 - DNA, 201 bp, Homo sapiens; identical to SEQ ID NO: 21817

SEQ ID NO: 128757 - DNA, 201 bp, Homo sapiens
cattgtatcttcatacaaaggacagtacacacttgggtaattaaaaataaaagttgattgaccatatctgctgtcctttctttttgggtaatgactttcargctttggacacatcaaatcaagatccagtattaagtatataattgtgacttgaaagcatttagtcaaaatttccttgaagcctggatgatgcatgcattt

SEQ ID NO: 128758 - DNA, 201 bp, Homo sapiens
tgaacctgtgtgtcactgcagagacccatgaggtctctgctctctggttcctgtggtatgtgaagcagtgtggaggcacaacaagaatcatctcgacaacraatggaggacaggtacccatccattcttccacagtcccaatggaaaaacactgctactgaaatgaaagatcatcatccttcaatcatgaactgctgaagt

SEQ ID NO: 128759 - DNA, 201 bp, Homo sapiens
tccttgttaaatagttaaatttatgagtgttctctagaagttagtaacttaggaatccatatctagaaatagcccagttacaacatgcctctatttattgwgcaggaagttttatcacaaattaaatatggcttgggtggtacagatttataataggaaagctacatagacagcattgattatgcagtaaaagcaatattg

SEQ ID NO: 128760 - DNA, 201 bp, Homo sapiens
ggtctcaggaaagaaagcctccctgaggaagtgaagggtccagtgaggaagacagggtaaacagtataagcagagggaacatcgtgtttactggtctagasgttggcaagaatgggtcatgttcagagagctggagaaagtacagactttctggaataaagtgcacaagccctgtactaatacccaatgttttctgaacct

SEQ ID NO: 128761 - DNA, 201 bp, Homo sapiens
gtataattgaattctgaactgtgggacccaaggactaagttagaagaatcattaaagaccccaggagttggagaaggtctcattaagggagtagaatttarcagattctgaagaacagtccaggtttgggagggtagagaagagagaggctttaaagatgagaagaatcatttaaatcatagggccagagacttcagttag

SEQ ID NO: 128762 - DNA, 201 bp, Homo sapiens
tatgttaatggcaaagcctctttctcacctttggtgaagaaaaatggagaacttccctgggctcctgtaacccacttgaatgtcctaaaaaataataattrtatagatatgcctgaaaatttgtatatcctagtcaaggaaagaatacacagaggtaatacagcaatattaaaagaacatacgatttatcttggaaggttg

SEQ ID NO: 128763 - DNA, 201 bp, Homo sapiens
tcatttggttttctaataaaaggcccagtggtgtacagtgttgactaagatggaacatggatgttagttcttgacatcgcttatcagatataagagaaccmtgagacaggatgaataatggcatgttgacggtgctttccttatggtatttttgtcagagcaacaatgaactgcccctcttacaggccaagtgctatgaca

SEQ ID NO: 128764 - DNA, 201 bp, Homo sapiens
ttttaggtttatttagcaataccgttcaacaagtatgggacaagtagctgctttgtgtctaaaaccacaccaccagccagtggcatgctgaaaaccattgraattggctcctaccctgaagatatctgtacatacaacttacttctttggagtagttttgtatcacaaaggtggtattaccctgtgaagtcctcagaacag

SEQ ID NO: 128765 - DNA, 201 bp, Homo sapiens
gtacatacaacttacttctttggagtagttttgtatcacaaaggtggtattaccctgtgaagtcctcagaacagaccagaaggtaccactttctttatctraaacagcttaaagaccatcagcttaaagctctcatttattaagttgttgatataggacaatttttgtattcttcactggtggtcaaatgtggagatggtt

SEQ ID NO: 128766 - DNA, 201 bp, Homo sapiens
ttggacagcagggaaaatggaaaggattatgagggttcccattcaagcacgtggtaaatttgtggtaaacaaaataagagaaatggaagccaaattcaagragactgccctgtcttgctaaagagcattagttgagaatatgtttggctcgggggttaatgtcttcatttttaggcattcattcactgccaactaaaagta

SEQ ID NO: 128767 - DNA, 201 bp, Homo sapiens; identical to SEQ ID NO: 21806

SEQ ID NO: 128768 - DNA, 201 bp, Homo sapiens
tgagtcaatacatatgaagtgcacagaacagggcctgaagagagtaagcactcaatactacttgttgtcattattgcttcttattattattcttgcagggsttcacctggtttctcagccactatgactcccatcttccccatttctttctatgtggacaatcccaggcctttcacatgctgtggtgctgctggaagattc

SEQ ID NO: 128769 - DNA, 201 bp, Homo sapiens
agaacagggcctgaagagagtaagcactcaatactacttgttgtcattattgcttcttattattattcttgcagggcttcacctggtttctcagccactaygactcccatcttccccatttctttctatgtggacaatcccaggcctttcacatgctgtggtgctgctggaagattccaaaaatgcagcattgccattgtc

SEQ ID NO: 128770 - DNA, 201 bp, Homo sapiens
gccagtgcattatgaagaaaagaactggtgtgaggagcagtactctgggggctgctacacaacttatttcccccctgggatcctgactcaatatggaaggkagagtaaaagcatgctaagctgttacagaaatcccctgcacctgaatccaaaacctaaataggttcaggtagctcttctcccttgtttcttataaataca

SEQ ID NO: 128771 - DNA, 201 bp, Homo sapiens
ttcaaaacagtaataatcactggaatgtttccatcatggccaaatgtgaggcacaaaactcttgcctcagattgtgtaatcttataaacttagacatttcytccttaccccacttactccctgaagcttgaagatttgcaaatttttatgagtctaacaatagctctttcctgtgtttatcagaagttttccctaatctta

SEQ ID NO: 128772 - DNA, 201 bp, Homo sapiens
tgtgaggagcagtactctgggggctgctacacaacttatttcccccctgggatcctgactcaatatggaaggtagagtaaaagcatgctaagctgttacaraaatcccctgcacctgaatccaaaacctaaataggttcaggtagctcttctcccttgtttcttataaatacaaaaaaaaaaaaaaaaaacaacccaattt

SEQ ID NO: 128773 - DNA, 201 bp, Homo sapiens
tacatatttgtataggagcatttctttttgataaatgctgtaggatggaattatcaagtcaattgatttgggtagacctgtgaaatttttgttagggtctrtcctctcacatccttgtcagttgatataagttccatatctgtcttctccaaatctcatgttgaaatttgatccccagtgttggaggtggggcctaaaagc

SEQ ID NO: 128774 - DNA, 201 bp, Homo sapiens
tctttttgataaatgctgtaggatggaattatcaagtcaattgatttgggtagacctgtgaaatttttgttagggtctgtcctctcacatccttgtcagtwgatataagttccatatctgtcttctccaaatctcatgttgaaatttgatccccagtgttggaggtggggcctaaaagcaaatgtttgggtcatgtggaca

SEQ ID NO: 128775 - DNA, 201 bp, Homo sapiens
tcttcgggttggggtggagggagaggaaaggacagaggcactatttctaggagtctccaagggacaccttgcctgagcccacagaaatatttctttttgcmactccatggcattagccatttcttttttctgctgtgtttccctgtagctgagatgtcaggccacccatgccctcaagaggcaatgtccttcagtttataa

SEQ ID NO: 128776 - DNA, 201 bp, Homo sapiens
ggaaaatgagagcttttcccctctcttctcattccggcacatagctgtcctactcgttgggggctggggagtccagagaaggaagtggtgtccccacaaakgaattgctaaggagttccacagcctccctcttgcctgccttttggcctcctcaaaaactatacaaataaaaggcgatttattctaccacactgtaacaaa

SEQ ID NO: 128777 - DNA, 201 bp, Homo sapiens
agtgaacgagcaagagaagcagaattcaagggaaaatagttcttttgcaagacatattttcctatagataaggcagctgtggtagacctttgtaattctakttcagtaaagcagattgtgctgaatatgccaaacggcttctcttagctggagggagtgcctccctgagacctgtcaggcaatagtatttatgcgaccatt

SEQ ID NO: 128778 - DNA, 201 bp, Homo sapiens
tgtgttttagtgcaaatacgtaattaatgcgatccctccgaccttgactgccaagattcacttcagaccagagcttccagcagagagaaaccagttaattyagcgtcttccaatgggagctgtcattaagtgcatgatgtattacaaggaggccttctggaagaagaagggtaggctgctattattcatgtttaaactgta

SEQ ID NO: 128779 - DNA, 201 bp, Homo sapiens
ctctaaagtgtgcggatgacccagggcctggttctgtgtagggaaaatgagagcttttcccctctcttctcattccggcacatagctgtcctactcgttgsgggctggggagtccagagaaggaagtggtgtccccacaaaggaattgctaaggagttccacagcctccctcttgcctgccttttggcctcctcaaaaact

SEQ ID NO: 128780 - DNA, 201 bp, Homo sapiens
agcgtaggagccaaagtgtggctttccagctctaagcccagtgttctgtgggttacatcaccttgttttttattccaaagttaacttgtgaacccttctartaaactgctccaagatatgacaaaatcactttatcccaacaggctctgaagttgtaagatgcccctttggaaacagggactcctgtggatatgggggtgg

SEQ ID NO: 128781 - DNA, 201 bp, Homo sapiens
atggaaagagcactgcgttgaagttacacattccgggacttcgcttgcttgctagcatcagtctgtagctgtaaagtggtgacagtaatacctaccactamggtgttgtgagaattaaatgaggcaggatcttggacttagaaagctgcccagatatggtggctactgttgataagcattctggttatactcatcggattc

SEQ ID NO: 128782 - DNA, 201 bp, Homo sapiens
tgtatttttcaacaagcttttcaggtgattatgataagcaaccagatttagaaaccagtgaataagttcaacgagatgatttgcacagtggcctcttttaktcatcacttaggttctgttatttttagagccaaattaatcaatcagtgcattgttttaacatccttgccttacatatcttttccaaaaatttttaatttt

SEQ ID NO: 128783 - DNA, 201 bp, Homo sapiens
gattgacttggcgatgcaggctcttttttggttccatatgaagtttaaagtagttttttccaattatgtgaagaaagtcattggtagcttgatggggatgscattgaatctataaattaccttgggcagtatggccggtttcacaatattgattcttcctacccatgagcatgggatgttcttccatttctttgtatcctc

SEQ ID NO: 128784 - DNA, 201 bp, Homo sapiens
agcttttacttcagaactttagccatgagataaatacaaattcacctgcttgcgaaaagaacttgttggattcaaacagtggcttttatctgaatagaaamataatagcagatttaaagcaggcagaaaagaaaatagaggaaaaagaggacttaggaactctatagtataaaggtcgaccttagggttctttttccttca

SEQ ID NO: 128785 - DNA, 201 bp, Homo sapiens
tcttctctctcactgatatacgatggttcaatttcactcttccagtctacattgaagttgaaataaagttacacagaaaacataaaagaaacttttaaatytatgtgtcaaatggaaattcaaatggaagaggaaggacacaaggatgggcggaatgaactttctgtcatgaaaaccaaagagccaaataaaagggattca

SEQ ID NO: 128786 - DNA, 201 bp, Homo sapiens
taatttgcctaaggtcacacaagggaggaaataatacttatggaatgtttcacagtcattcttttatttgtttatttaaaatgaacttttattgttttcawacaacacaaataaaatgaagagagaaaatactcatatttctactcatcgatttccatcctttatttaatgaaacttccacattttcatctccatccaaac

SEQ ID NO: 128787 - DNA, 201 bp, Homo sapiens
ttcagactgagagatttgaaagaaatcgttcttgggaagaagaggcccaacctgagggtgaaaaggccaattaggagttaagggaagctgggagagattgrccttctccaagggaagacctatgtctttgggagcatcccttgggagatggaaagcaaagtctaatgcagctagaactttaatttgtatctccctctctat

SEQ ID NO: 128788 - DNA, 201 bp, Homo sapiens
atagattagcaaatgatggctcctaagaaagaaggaagggactccagaaaactcctgattttgtaacaaacttcccacattgtggagtgaagtagcttttwctgaaatgtttacctaggaaccagaatatatttttaatcgacctaagttttgagtttttcagttcagtcacaggttcctaccaatggtggctggattagt

SEQ ID NO: 128789 - DNA, 201 bp, Homo sapiens
acagagctagaaagttaatacaaggtcacatttgtccactgaaaaggaggaagtatttattaaccttttcgttacaggagtttttagtctgttttttttttcttcttaattgagtcagatcgcctttgttaacaatagcaggattgatgaactggattagttctggtatcaaagtagaagtctagaagacaagactaagat

SEQ ID NO: 128790 - DNA, 201 bp, Homo sapiens
taaaaccaagtactgtgagtggtcatctgatttttggttctgatgaaggtgcttttttgtgtgtagatagttattaaattggtgtcctcgcagcaagaagkattggtggagccttctattctgccatcttgcctcaaattttcttttgatgatgatactagattttgagaacggaagaaccaactagagcaattaccagaa

SEQ ID NO: 128791 - DNA, 201 bp, Homo sapiens
tctatacccatcagttactccttccctaactttatttttttttttttttggctctgttttataggaagaagaaaatctgtgagctctatgccaaagtgctkggatcccaagaagctttacatgtaagaaactcccagctttaatccctagcaggttcttctctgttcactataagtagtaaagcaaagcatattctgattt

SEQ ID NO: 128792 - DNA, 201 bp, Homo sapiens
atctgtaataaatctggttgataccaagagctctagaactcactgtatttattctatacccatcagttactccttccctaactttatttttttttttttttggctctgttttataggaagaagaaaatctgtgagctctatgccaaagtgctgggatcccaagaagctttacatgtaagaaactcccagctttaatcccta

SEQ ID NO: 128793 - DNA, 201 bp, Homo sapiens
gctgctatttgacatgatgtactaaagcagatcaagaggggagctggaaggccagtttgaagctgttgcactgctccgtacctggatgaggaagatgccartggagaatggtgaaagtgggcagattcaggatatgtcttggagaaagaaactactaaacacttccatggattagatgtatgaagtgagggaaaggaagga

SEQ ID NO: 128794 - DNA, 201 bp, Homo sapiens
cttgtagggtttctgctgagagatctgctgttagtctgatgggttttcctttgtgggtaactcgacctttctgtctggctgcccttaacatttttttcctkcatttcaaccttggtgaatctgacaattatgtgtcttggggttgctcttttcgaggaatatctttgtgatgttttctgtatttcctgaatttgaatgttg

SEQ ID NO: 128795 - DNA, 201 bp, Homo sapiens
ttctcattcgtttcaaagaacatctttatttctgtcttcattttgttaattactcagtagtcattcaagagcaggttgttcagtttccaagtagttgtgcrgttttgagtgagtttcttcatcctgagttctaatttgattgcactgtggtctgacagacagttcgttgtgatttctgtacttttacatttgctgaggagt

SEQ ID NO: 128796 - DNA, 201 bp, Homo sapiens
tagaagcaatgacaccccagtagcaatgagcacacctagaacccagatcttggtttctaatactgttctccagtaaaagggaccaaagctcaatgaagaawtgcctgattctaaggctgtggcagagaaagataagatgagtcgggagcattgtgtagtactagaaaggaaggaagtgtttaaacacacacacaaaatgat

SEQ ID NO: 128797 - DNA, 201 bp, Homo sapiens
tctatgcagatccagaaagcaaaaagtggcctttcaccttgggctaagtcatacgggtgttttttaaacagtctgaatttctgtgccttctgcagactaartgagggcagtgattggctcatttaccctgcccaccttcccaagtaactctgtgtaacctcttggttcccttgaagggtgattcgtcaacccgtgggcagg

SEQ ID NO: 128798 - DNA, 201 bp, Homo sapiens
ttctccctgacttgaaagttcagatcctctatgcagatccagaaagcaaaaagtggcctttcaccttgggctaagtcatacgggtgttttttaaacagtcygaatttctgtgccttctgcagactaaatgagggcagtgattggctcatttaccctgcccaccttcccaagtaactctgtgtaacctcttggttcccttga

SEQ ID NO: 128799 - DNA, 201 bp, Homo sapiens
ggggaaaaataatttggggtagcaaaaaattcttaatgtttgtgtgtactagttttctctttgcaaacacagtgatgttctacaggaaacatatatatgcmgtacattcaagtgagtgtatattgaaagatgactcttcattccacttcagccccaagcactataacccaaaaataactgctatgatagtttattgtgtat

SEQ ID NO: 128800 - DNA, 201 bp, Homo sapiens
tagtgcaaatacgtaattaatgcgatccctccgaccttgactgccaagattcacttcagaccagagcttccagcagagagaaaccagttaattcagcgtcytccaatgggagctgtcattaagtgcatgatgtattacaaggaggccttctggaagaagaagggtaggctgctattattcatgtttaaactgtattatatg

SEQ ID NO: 128801 - DNA, 201 bp, Homo sapiens
tgagtgtgtttcattgagttgtggagatcttttgttaaattttgcaatgctgtgtcttgcagaaaaaatgaaaatgttggattccatttttttttttttttgctttccatgagtttcctgcacatcataatgcaggtagggtgaggggtatggagagggagaacccagccagaaatggagcaaggcattttgcagaggcta

SEQ ID NO: 128802 - DNA, 201 bp, Homo sapiens
tgaatgagtgcctttttgctagtgttttccaatacatcatatcatttctggaatgagaagtactcattgtagtagatgtttttatgattatcaggaaactrtattagggaaaagcaggaagatatttagttcaatattccagataagatgattaataaattgtatactaaaagtaactctacttattttaaaatatcttaa

SEQ ID NO: 128803 - DNA, 201 bp, Homo sapiens
aattcaagatgtagctagtttcatgaaaccagtatctatgtcttacttattaaaaattacataagcaaatattattctgtcttgggctaggtttgtagttytgtaactcctatgccaaattttgacaccctatagtatgtggcaggggttaagtatgaaattgcttgattaataaatgcaaacaaaaatgtatgctggaca

SEQ ID NO: 128804 - DNA, 201 bp, Homo sapiens
acaaatggcacctttaaatcacagccgctgtggttgatccctcaaggtcagtaccgctcccatagtaataataatgactacctcccctactgagctcccaktatgttccaggccctgtgccagggccttcacctccattatcttacttaaccctcacatggatcctaagttaggggttattgcgccatttcacagaaagag

SEQ ID NO: 128805 - DNA, 201 bp, Homo sapiens
tcaggagatcgagaccatcctggctaacacggtgaaacttcatctccactaaaaatacaaaaaattagccgggcgtgctggcaggtgcctgtagtcccagmtaccagttactcagaaggctgaggcaggacaatggcgtgaacctgggaggcggagtttgcagcgagccacgattgcgccactgcactccagcctgggtga

SEQ ID NO: 128806 - DNA, 201 bp, Homo sapiens
atggcatttgccctactagaggaggagggtctgagagagttcatttcatgctgaatagctacaggttaagaatacttcagaaagaaagggcagctcttaarataaacagctgtaacctgatcattcaatgtaacctctctctccagcttcattcttgcccggaaagctgatcgacttgctaagctacataaggaaataagg

SEQ ID NO: 128807 - DNA, 201 bp, Homo sapiens
ccatggcattggacttggtagcccgaggctgctttcaggaatgtaaggcagaaaataaaataaaaacaaaaaaagaggctaggcgcggtggctcatgcctrtaatcccagcactttgggaggccgaggcgggcagatcatgaggtcaggagatcgagaccatcctggctaacacggtgaaacttcatctccactaaaaata

SEQ ID NO: 128808 - DNA, 201 bp, Homo sapiens
  misc_feature (1)...(201): n = A,T,C or G
aattttccagctatttctctctctctggggagagaaagggaaggttggtttgtgtggatggagatggtatcttctaggaattacccaaaccagaagggtgratgtcttaggggaaggggaattttccagcaatgacccagagggatggtggggagacaggaaacannnnnnnnnnnnnnnnnnnnnnnnnnnnnnnnnnnn

SEQ ID NO: 128809 - DNA, 201 bp, Homo sapiens
aagagactagacaagttgcactgtatagacacacacacacacacacacacacacacacacacacacgcacgcacacatctttaaagcattaaagagccagygagctaacaagatagtgaagaatcactgggccaacatctggaaaggattaacctacttttccctgggtggcagggggagttgctgaccactgaagaagct

SEQ ID NO: 128810 - DNA, 201 bp, Homo sapiens
tttcatccacgtccctgcaaaggacatgaactcatcctttttttatggctgcatagtattccatggtgtatatgtgccacattttcttcatccagtctatyattgatgggcatttgggttggttccaagactttgctattgttaacagtgctgcaataaacatatgtgtgcatgtgtctttatagtagaatgatttataat

SEQ ID NO: 128811 - DNA, 201 bp, Homo sapiens
ttttgaattaattaggttttgagaattaagttccttccttttggtagcaggtaaaattaggctgtttatgtaggagaagctaaattcctaaaataatttcyaaaaaattctagaaattgtacaattattgtacttaaaatcatctctgttctagacacaaggtttctgtcccatctgtttatcagagtgattcttttatgt

SEQ ID NO: 128812 - DNA, 201 bp, Homo sapiens
tggatttcttcatggttaaattttggtaggttgtatgtgtctaggaaatttgtccatttcttctagattttccaatttattggcatatcatttctcatagwaatcactaatgatcctttgaatttttgtgataaaagttgtaatgtatcctttttcatctctgattttatttatttattctctcttttccttagtctagct

SEQ ID NO: 128813 - DNA, 201 bp, Homo sapiens
aacatgacaacaaattatttctgactcacatatgatcagcacagtcaatgggggactgtgctacacaatcagtcacccaagtcttggaagctccaccatcytgaatatataccattcggaaaacatggccttcacccacttccaccacacacaacccattacctagaatccagttacatggctgaaatttcaaagcaagtg

SEQ ID NO: 128814 - DNA, 201 bp, Homo sapiens
atgaaattaagcttcaactcttcaaaggagaaacatcaaataatttgtgaacttattttaaaaccacgataaccactgaagtaaaaaaaaaaaaaaaaaaactaatatagttccctgtgagacagaaaaagtttctattaaatactagtggtactcttttgtgatttctaaatcacagctaagaatgatgaattgctcagt

SEQ ID NO: 128815 - DNA, 201 bp, Homo sapiens
aatgaaattaagcttcaactcttcaaaggagaaacatcaaataatttgtgaacttattttaaaaccacgataaccactgaagtaaaaaaaaaaaaaaaaaaactaatatagttccctgtgagacagaaaaagtttctattaaatactagtggtactcttttgtgatttctaaatcacagctaagaatgatgaattgctcag

SEQ ID NO: 128816 - DNA, 201 bp, Homo sapiens
gcaggagaatcgcttgaaccagggagtcggaagttgcagtgagccaagatggcgccactgcactcaagcctgggcaacagagcgagactctgtctcaaaaraaaaaaaaaagaaaagaaaattaaacaattttaaatgcaaggtttcctacaattcttttcacaaaacctagaaatgttgattctttattctctacaaatt

SEQ ID NO: 128817 - DNA, 201 bp, Homo sapiens
ccgtgtgactcagtgaaagccttttattgaaaaagtaaacatcttaaaccaaatcaatcacttgctttttctcagtctatcaaaaacttcatatcattttkttgtccatcagatataggtgaaagaaagataataaaaagatatgttgaatgggggctgtggatgggaagtagaacaagctaatgttttgtagcattccct

SEQ ID NO: 128818 - DNA, 201 bp, Homo sapiens
ttttcacacttcctgtttctcctgagttaatggcatctgtgaaagaggaaaactatttttttaaaaaactctgtcaattatctttaattacacaaaagccrccagaagaactcattattgtttctatcttaactgttttgtttgtaatttctgtatataactagaatcccttggagaagatgacataaatttcttttaaaa

SEQ ID NO: 128819 - DNA, 201 bp, Homo sapiens
gaaagatgactcttcattccacttcagccccaagcactataacccaaaaataactgctatgatagtttattgtgtatcctttcagatatttactgtgcaastatgaagtatatacattttttgctattctacaatgggcctatactatatacagggaatctcaactttgcttattttaccttatttatttcaaagaacttt

SEQ ID NO: 128820 - DNA, 201 bp, Homo sapiens
tcgcgccactgcactccagcctgggcgactgagtgagactctgtctcagaagaataaaaaataaataaataaataaataaataaataaataaataaataawataaaaaggacacattttttttagaatgttttcctacaatatatttttattggaaaatgcccaaataatgaaatatctattatttaatttaatataattt

SEQ ID NO: 128821 - DNA, 201 bp, Homo sapiens; identical to SEQ ID NO: 21847

SEQ ID NO: 128822 - DNA, 201 bp, Homo sapiens; identical to SEQ ID NO: 21848

SEQ ID NO: 128823 - DNA, 201 bp, Homo sapiens
ctctatttccttccttccttccttttcttctttctttctttctctttctttccttttctttctttctctttttcttttccttcctccctccctccctcccttccttccttcctttctgtctctctttctttcttttctttctttcttcctttctttctttctttcctttttgatagctgttgttgctgttattttcttctg

SEQ ID NO: 128824 - DNA, 201 bp, Homo sapiens
tctctatttccttccttccttccttttcttctttctttctttctctttctttccttttctttctttctctttttcttttccttcctccctccctccctcccttccttccttcctttctgtctctctttctttcttttctttctttcttcctttctttctttctttcctttttgatagctgttgttgctgttattttcttct

SEQ ID NO: 128825 - DNA, 201 bp, Homo sapiens
ctctctatttccttccttccttccttttcttctttctttctttctctttctttccttttctttctttctctttttcttttccttcctccctccctccctcccttccttccttcctttctgtctctctttctttcttttctttctttcttcctttctttctttctttcctttttgatagctgttgttgctgttattttcttc

SEQ ID NO: 128826 - DNA, 201 bp, Homo sapiens
actgagtgtttcatgagcgggtgagaagcatcacttcccaagcattcttgtgaattcagaaacataccatttttgtgtgtgcttggcagtatcccatgaaktacttaatagtccctgtggcagttttatatgcctttggatgttctttataacttttattaggacttgtacactttgataggttacccacacattcataat

SEQ ID NO: 128827 - DNA, 201 bp, Homo sapiens
atttatttgcaagctccattactaagccatccgtgtgactcagtgaaagccttttattgaaaaagtaaacatcttaaaccaaatcaatcacttgctttttmtcagtctatcaaaaacttcatatcattttgttgtccatcagatataggtgaaagaaagataataaaaagatatgttgaatgggggctgtggatgggaagt

SEQ ID NO: 128828 - DNA, 201 bp, Homo sapiens
tctagggatcatttggtgggctagtcctaggtgggctcaggtgctctatttaagaatcatagcacaattacacagccattttcaaacactgtgactacagygccaccaatatgacacctttcaagccccatacttgaatttctacagctgggttaaaagccatatcccacactaagagggtgtgacatagtcttggccaca

SEQ ID NO: 128829 - DNA, 201 bp, Homo sapiens
gcatgagccaccgcacccagccctgctctgatattctttgcatgtaggtttattgtcttgtggtaacaagatggatgctgagattctaagcatcaagttcycattcaaggctgaaaggagagtgaaagggtggcactagccttgtctgcaactaagcttttccttcgccaaaagaccccagcagacatttgctttagtctc

SEQ ID NO: 128830 - DNA, 201 bp, Homo sapiens
aggtgatggatatcccaattaccctgatggatcattatacattgcagacaggtatcaaaatatcacatgtaccccccaaaatatgtgccaattaaaaatgatgtttaaatgtaatttatgcatatcttgttaagattttaaagaccaaaaacacccttcagtgttaaactcaagagacttttcattattttaatgcaattc

SEQ ID NO: 128831 - DNA, 201 bp, Homo sapiens
gctaatactaggactagctaaattgttattgaaaaaaaatgtgaagttcttttttatctttaggatatataccattagaaatgaactatcaaatccgtgtrttttaaaatcagttagaatagttctcctcctcaaccacttgtatacatatttaggtataatttgtatcactttactaatcttgtctctggtgccattctt

SEQ ID NO: 128832 - DNA, 201 bp, Homo sapiens
atacttaggaaaatgcaaattaaaaccataatgagctatcatctcatacccgttaggatggttattgccaaaaagacaaaagagcaagcgttaatgaggakgtggagaaaagggaacccttgtacactaagaatgtaagttagtacagctattatgaaaaatagtatagggttttctctaaaaaaactaagactagaatta

SEQ ID NO: 128833 - DNA, 201 bp, Homo sapiens
aaccctagagctccaaggaacacaagagtttgaggccacttctttagcctttgaactggttattcatcctcattcttacctggcattatttggaatgcttyatttcctctgtacctggccttcactcttgggaagtctagcttgtttgtgcagtttcctactgtttaaacaagagattgtttaaactctagccactgattt

SEQ ID NO: 128834 - DNA, 201 bp, Homo sapiens
tatgtattccagaccccaggaaaagcctgtgctcaaagaaatgtggtaaggatacaaataatacatggcagcattatttgtaacagcaaaaaaaaaaaaaacctggaaacatcctaaatgttcagcaataggatgatggctaatatgtcacatgcacatacttaaaaggataaaacagtaaaatgaaatgcactagaacca

SEQ ID NO: 128835 - DNA, 201 bp, Homo sapiens
tatttatttattcattcaaaaaacacttgttgagtacctgcaatgaagtggactgctgtttcccaaaatctggtcccactaggcaagcctcctaaaagcartatggttgtagatcactggaaaataaatatgatgacaatgtgttatatacattgactaggggttctgggtcctctcccatctccataccatctgtattct

SEQ ID NO: 128836 - DNA, 201 bp, Homo sapiens
gataagcactctgtggcttaggtatagagctgctgtcaggttgcacctgcatgaagttggaatccatgtagatttcatgactggccgtttgttccagcaayatctgctgctgcaaaggcaacataatgataaaaggatcagtccatccagaagccataacaattttaaattgtatgtaccaaacagagcctaaaaatacat

SEQ ID NO: 128837 - DNA, 201 bp, Homo sapiens
atctaggtatattgcgacttgcctaaagtcttgcagtggcttttgttgctcttaggatcgaggccaaggatgctaccttggcccagtcggcctcagcagcsttgtctcccccttgcccagagctccacagagtaacttttagttgccttaatgaactatgctttttttctaccacagggcctttgcacacattgtttcttc

SEQ ID NO: 128838 - DNA, 201 bp, Homo sapiens
gttgacgtccctgtcttcccacctgccactgcagttcctcctgacacactgggagtgcctgcaaagctggatctgtggctgttttcaagaagagtgcaccytcccccgagaaagacaggacagggagaagaatggactgccaacaggaaacagcaaagaaatctgatttggggattgaatacatgttcttatattccagct

SEQ ID NO: 128839 - DNA, 201 bp, Homo sapiens
gtgccaacgggttgagatgaaggccatcagggtggggggcaggacatgcagcttgggagagttcatgaaactagctgtggacatggcaggagtcaaagccraaaagttggaggggacagctgtccattcagtccagcccttctttgtaagaggagacccatttccttgctctcagccagtccccagagaagttcagagaag

SEQ ID NO: 128840 - DNA, 201 bp, Homo sapiens
gtgcatggcctgtagctcagcaattctagttcagggtatgtattccagaccccaggaaaagcctgtgctcaaagaaatgtggtaaggatacaaataatacrtggcagcattatttgtaacagcaaaaaaaaaaaaaacctggaaacatcctaaatgttcagcaataggatgatggctaatatgtcacatgcacatacttaa

SEQ ID NO: 128841 - DNA, 201 bp, Homo sapiens
tttcctgttgggatcctgcctgacacaacacctggctaaattatattcatcctctacaactaagctcatataaaacaaggaatagcaaggagtggtttacmtgaaggctgtggcatgttttcacagaggactatgagtaattcagtaccaccagaaaataagttataagactagacgtggcagttcagttaaaggtgacaa

SEQ ID NO: 128842 - DNA, 201 bp, Homo sapiens
agtggtttacatgaaggctgtggcatgttttcacagaggactatgagtaattcagtaccaccagaaaataagttataagactagacgtggcagttcagttraaggtgacaaggagttaatatgagacacgaggttctcttgatctggcacctagcatcttaaacttatgtctgaggaataaaggcagttcttaaagggcac

SEQ ID NO: 128843 - DNA, 201 bp, Homo sapiens
tcaggcagccctttcctaacagcattgtcactaaatttctggtgactgctttctcccactacctgttcagagtgataccttcttgctgttaccaacccagrgtactgcacgattccttacggcttctctccatcttgcccacatctttgaaaatagttcattgatgatacgctcttgaaattacttaatttgagtttgctg

SEQ ID NO: 128844 - DNA, 201 bp, Homo sapiens
ctgtgggctggctgtctccctgaactaaaggccacaccttgtgtcaggcagccctttcctaacagcattgtcactaaatttctggtgactgctttctcccmctacctgttcagagtgataccttcttgctgttaccaacccagagtactgcacgattccttacggcttctctccatcttgcccacatctttgaaaatagtt

SEQ ID NO: 128845 - DNA, 201 bp, Homo sapiens
cattcaaagcacaacatagaaagtggacacagatccagagccttgcttatcagctgctgtagtaggtcatgttgacatggtcgaccatcaatcaggatccyaataagaaacacatgacaaactcagctgagatttttgtatagagttttaaagatgggaatattcacaaaagtatgagctgggttaagaaaactgacaagg

SEQ ID NO: 128846 - DNA, 201 bp, Homo sapiens
acttttattttcatgttgtatatattttaacctttaagttatcgtggaaattccttaacagggtcttcttcccagtaaacatgcaaactgaaacattagcrcccatttattcagcatcttagaagaaatatgcttaatatagtagattttcctaaataacttaaaccttaacccttcaaattctaagaccttttagaaacc

SEQ ID NO: 128847 - DNA, 201 bp, Homo sapiens
actcatgctcatatttatcaatctaagtggtgctaaagaactttcatccccatgcaaaggactttggtaactgataacaactgaccgataacagatgtcaygtcccactttatctttttaaacattctttttgagctcagcaaatttacaatggtatattcaccatgcatatacactgtaattacaacttcatttttaaat

SEQ ID NO: 128848 - DNA, 201 bp, Homo sapiens
tgacacacaagtacaaaaaagagttggttataatccaagacttacatcttaaagtaggaataatttttaggttttgccattcaaatcagcagatagccacrgttattacattacaaaagatttctgagctccaagtgtttgcctgtactttgacttactaagcattcaaaaatattttcctaacagcatcatacttttatt

SEQ ID NO: 128849 - DNA, 201 bp, Homo sapiens
tttttgcactgacagtagtagaataacatgaggaaaaacacagtacttcacaaatattctcaaaattccaacaaaccaaccttttgtattttgctacagcyctcttgacctagcccttgcccgtgtgcatatattaattttacatgttcgtgtttattttacagtggttaagaggtaggatttccctgagagatggatgga

SEQ ID NO: 128850 - DNA, 201 bp, Homo sapiens
catcaagggaagcagggaggaaaaaaagaaaggagaaatcccagtaaagtctcactatgggcgaccaagatgccgagcaaggtatcagagccccagcatcraaaagtggtcagctcatgggttggtaagaagaatttaccaacgacagcataggtttgaaaaaggaaagttttgtttgtttgtttgttttgagatggagtg

SEQ ID NO: 128851 - DNA, 201 bp, Homo sapiens
agatcatcaagggaagcagggaggaaaaaaagaaaggagaaatcccagtaaagtctcactatgggcgaccaagatgccgagcaaggtatcagagccccagyatcaaaaagtggtcagctcatgggttggtaagaagaatttaccaacgacagcataggtttgaaaaaggaaagttttgtttgtttgtttgttttgagatgg

SEQ ID NO: 128852 - DNA, 201 bp, Homo sapiens
agaaaaaaacaagtgaaacaaaaatctggctcttcgaaaaaagtcaatagaattgataaacttctaacaagactgataaatagagaaaagatacaatcacmagtatcaggaataaaataagagacatcaatattaattttgcagctatcaaaaagataacaagcaaatactacaaataactttttgttcatgaatttgtca

SEQ ID NO: 128853 - DNA, 201 bp, Homo sapiens
catcaatattaattttgcagctatcaaaaagataacaagcaaatactacaaataactttttgttcatgaatttgtcaacttagaagaaatggatcgatttytcaaaagctactaaaactccatcaagaggaaatagataatatgagtagctgtgtgacgattaaagaaatcaaatttataatttaagagcttataaagaag

SEQ ID NO: 128854 - DNA, 201 bp, Homo sapiens
aattcatgggtgccaggagttaggatttcaacatacttttctgggggacataattcaacccacagcaccatctgaataagtagaacaacatttgaagaaawgctttgtttaatgtgatttcattaattaaaaaaagaggcacagatagttgatgccaaatttaaagatttacttttaacagaaatcacatctatgtaacca

SEQ ID NO: 128855 - DNA, 201 bp, Homo sapiens
aacacaataaattgttcacaaataacagagtaaatgaaaggaaaaaaagtggtgaggcaacgtagaaatgaggaaaaaccggaactgactacaattcttawcctagaaggtcaaaggaaagaagcaattctcagagcccagggggagttgaaagaggctggaaacatagcagaagttgggtttcaggaaggaatggaacca

SEQ ID NO: 128856 - DNA, 201 bp, Homo sapiens
cagctaccttcccctctccacacacatttgcacctacctccactgaacaggagatggggaactgcaaccagctatgttcatgctagcacttatagcggggkcatgccatgctgcaggggttgctataccatggcacccaaggctcagaaagcttttgcccctgctgctaggaagcacctggcccagtagacattgaccagc

SEQ ID NO: 128857 - DNA, 201 bp, Homo sapiens
actttactgagactttggcattaggatccttccagctattaacctcatcagcattactacaagatccacccattattttcgcagttttgccaccagacctrtctatgtgtcccacagtgtcctgttcctcatattcaggactccaagtgctctatctctacaaatacttcaaacacagggacaagggagttgcctctacac

SEQ ID NO: 128858 - DNA, 201 bp, Homo sapiens
ccttccaaagtttaactcatttcgttacttaagatccttaccaggttatagccaatactgagaagtttgttggagaatgccatttcccaaataaacctacrtcaagatgtattagaactttttttttttttttgagacagagactcgctctgtcacccaggctggagtgcagtgacgtgatcttggctcactgcaacctct

SEQ ID NO: 128859 - DNA, 201 bp, Homo sapiens; identical to SEQ ID NO: 21829

SEQ ID NO: 128860 - DNA, 201 bp, Homo sapiens
gtatagcatatcttacgttatgcttaaaagatgaaatgagctttatatgtttgtaggtaattaaaacacaagtataggatagttaaaagacaccatcactyatactatagacttataaaagggatcattttagaactctacgtattccagaaaagttatatagaatcagttcctaagactggctaaacttaattgaattca

SEQ ID NO: 128861 - DNA, 201 bp, Homo sapiens
cagggccttgaatctgtagaaactatacagcctcttttcataataccatggtgactttctttcaggtcttaaatggtctcgggaaggtgaccgagaaagayatctgggtacaagaacctgaatcaaaggtaagtttggtgactctgggcactatctctccttagaccaatcatggaacataaaactcacatctcccttctt

SEQ ID NO: 128862 - DNA, 201 bp, Homo sapiens
tcagatacactttgaaatactgtggtccacagaccattctatcaagtgacaaattcctagactgaaatgactgtagatactttctgtatagcatatcttaygttatgcttaaaagatgaaatgagctttatatgtttgtaggtaattaaaacacaagtataggatagttaaaagacaccatcactcatactatagacttat

SEQ ID NO: 128863 - DNA, 201 bp, Homo sapiens
tctgtgtaacctcttggttcccttgaagggtgattcgtcaacccgtgggcaggattttctttgcgggcacagagactgccacaaagtggagcggctacatkgaaggggcagttgaggctggagaacgagcagctagggaggtaagcaggaaagcccaggctctctccctcccgagtcacggcaacgtttttggcatctggt

SEQ ID NO: 128864 - DNA, 201 bp, Homo sapiens
gattgtgtttacagtgcaagttttagcaagacagtgtatagttccaagcctgagcctctcagatggatactgaggatacaccttagtggtgtttcctctayctgatcccttccttttctgagactatgcctatctactacgttcatagaggattcacatcgatatgctaaattcactcattgcttaatatttatatttatg

SEQ ID NO: 128865 - DNA, 201 bp, Homo sapiens
tctgtttgcttttatgttctaggggaaaacatatccatttcggggcgcctttccaccagtatggaatcccattgcatatttggattacaataatctgtggmggacaatagataacatggggaaggaggtaaaatgtgtgttcagtttgcacatgacccattactgaaataacaatggcaactgtttaatatccttccatag

SEQ ID NO: 128866 - DNA, 201 bp, Homo sapiens
gcctgaaaaatatcttggtcaaatctttgacccttcatattcccccatactcatgtctagctgctgcctcttagggtctcaagaagaaagggaaaatggcwcagtgaagagcggtgtcgagtctggttacctcctgctgaaagggagcattgaggggatacattgtgttttcccctttcttgctctctgtcatgaagggaa

SEQ ID NO: 128867 - DNA, 201 bp, Homo sapiens
ttccctcctgggatcatgactcaatatggaaggtattacgcaagcactacgccaattaatccaagacctgtgccaaatttaaaaggaaaagcagagttcartgcaaattctagaaatagttgtcaaaatccccatttcttatgtcctagataatacttgtatatttctggatgtccatagaaaaataaggatgtcattaca

SEQ ID NO: 128868 - DNA, 201 bp, Homo sapiens
gcttggtactatcatgtttccccttaagtgagttagaaaaacaggattttctttattttcttaatgtaaactttttgttaaagcaacgatattattgactygcagcatttcagctttgttttctcttttgtattttcttccccactgaactgcagccagtgcattatgaagagaagaactggtgtgaggagcagtactctg

SEQ ID NO: 128869 - DNA, 201 bp, Homo sapiens
aaatagcagattaggtaaattataacaaaatacaaagagactagacaagttgcactgtatagacacacacacacacacacacacacacacacacacacacrcacgcacacatctttaaagcattaaagagccagcgagctaacaagatagtgaagaatcactgggccaacatctggaaaggattaacctacttttccctgg

SEQ ID NO: 128870 - DNA, 201 bp, Homo sapiens
actctgtctctacaaaaatacaaaaattagccaggcatggtggtgcacgcctttaatcccagctactcaggaggctgaggcacgacaatcgcttgaacccrggaggcagaggttgcagtgagccaagaccatgccattgcactccagcctgggcaacaagagcaaaactccatctcaaaaaataaaaaaataaataccaat

SEQ ID NO: 128871 - DNA, 201 bp, Homo sapiens
cctttgggaagggaactgtaaaaagtatacaagacaagttgactaaaaatgttttcagataaatcatttaatcttttatcagatattgatgattaaaaaaactatatacatctaaacttactgattcttgcataaacccagaatctaactaaaataattaataacaagctataacttgaggtgttaaatcatgcaaaatta

SEQ ID NO: 128872 - DNA, 201 bp, Homo sapiens
accgtccttgacactttaaattttctgcccaagttttttcatatcatatggatagcttaaattcagatggaaaacataaataaagataagcttttttttttccttttctttgtgacaatacttagagctgcaaaataatggaaaatataaagtcgtggatgcagctaaagcaatacttagaagatgtatagtctaaattct

SEQ ID NO: 128873 - DNA, 201 bp, Homo sapiens
ttgagtaactccgggcttctctgagaagtatctttcactgggaactcccacttggctggcagagactttccagatctgcatctggatagccctcttctgamgtttcctttcagaaagagagataaagtttattttttgtttgtatgaagatgaatttcttttgccttcacaattgaataacaacttaccttggtaaaggat

SEQ ID NO: 128874 - DNA, 201 bp, Homo sapiens
ggtagatcacctgaggtcaggagttcgagaccagcctgaccaacatggtgaaactctgtctctacaaaaatacaaaaattagccaggcatggtggtgcacrcctttaatcccagctactcaggaggctgaggcacgacaatcgcttgaacccaggaggcagaggttgcagtgagccaagaccatgccattgcactccagcc

SEQ ID NO: 128875 - DNA, 201 bp, Homo sapiens
actttctattcactaactcaccagctatgagatgtaggggccaaggtccttggctctctggaggcttgaaagtgatatgaggcagactaataggagaaaargcatacaaatttagttaatgtgcatacacaggagccttcagaatgaagacacaaagatacaggggaaatggtccattgttatgcctaggttcaacaaagt

SEQ ID NO: 128876 - DNA, 201 bp, Homo sapiens
gctatggttggtcatcccagattccaccttcagggctgagacagtcactcattagcccagctgccaggaatgttggtggctggtaaccatcagctgagtcyctgtccaggagtttctgtaagccaaaaagagccacttgcctcaaggtcctgctgcctgcatagaggtagacatcatccaatgaccatttatgacaggagt

SEQ ID NO: 128877 - DNA, 201 bp, Homo sapiens
aaaatctattaagccagttaccaaaaggcaaaagaaaagaccttccgcactgcacagaatattatgttggaaggaaactttttctttagacctttaagaamacattgttagcatcaagccacaacaaacagaactggaggaaaaaacttacatgagttgaagaaaatgagttgaaggagagcattactatttcacgccctt

SEQ ID NO: 128878 - DNA, 201 bp, Homo sapiens
gtggggttgaagcacactgagcgaggggaaaatggtccaagattgggctggagagatgagcaggggccaagtgattcagggcctcataggtcatgggaagkaggttgggtttttttccaggtatagagggaagccatggaaaagctgtaagctaggaagtgacatgatctgtctaagactttaagaagattacttttgctg

SEQ ID NO: 128879 - DNA, 201 bp, Homo sapiens
aatccctaatgggagttgcactatttaaaaaagaatactcagagaaacttcacttccattcctactccttccatcccattttcattcatttctccatataygatttatccttcctatatatttttgaaaatataagtaatatatccttacacaaagatacaaatagacatacatacatatagacatattcaaaggtatgct

SEQ ID NO: 128880 - DNA, 201 bp, Homo sapiens
gatctcccattgatttttctcctggttaagattactgtggctgcatgatcattgaagatgaagatgctccaatttcaataaccttggatgacaccaagccwgatgggtcactgcctgccatcatggggtaggttagagcagggtgttctgcattttccaaattgtgttgatgtattggtgtggatgctgtcaaagtatatt

SEQ ID NO: 128881 - DNA, 201 bp, Homo sapiens
agaaccagtctatgattggtggtctctcatcagaagaaagttactgaaatcattctccttcatggcttttggtataagaggttagttagtcagtgcctggyggtggatgagccacaaatgtttaaaaattgtttatctcaggccatgtgcggtgactcacgcctgtaattgaaacactttgggaggctaaggcaggcagat

SEQ ID NO: 128882 - DNA, 201 bp, Homo sapiens
ttgtgtatctcaaggccagtgcttgtttagctactagtgaaaaagaaaaatgttgtggcagatagaacatagtttattctttaagtgtggtggtgcgtgayttaacccttgcctggcatgtttataatttggtatcttattgtcacaaagaccccgttctatcaatcttatgatctctatttaacactattgttggttaat

SEQ ID NO: 128883 - DNA, 201 bp, Homo sapiens
tctgaatgtaatttaaaaaattaaacagctaacccattagcagccgttgctttgggagttactctgatgactttagaagtgggggaaaggctgcagaatgwgttcctacatgtgcacacggatttgtttatttgaatctcatggtttgcaggtaagctttacatggaagaaactcccagtttcaattagcaggttcttctc

SEQ ID NO: 128884 - DNA, 201 bp, Homo sapiens
ttttaacatcagagttatttggctgttggagggttgcctctgggtagccctaaatcctctgctagcttttaaagaggtccaatacatacacaaaaatatakacttttctctgaatgtaatttaaaaaattaaacagctaacccattagcagccgttgctttgggagttactctgatgactttagaagtgggggaaaggctg

SEQ ID NO: 128885 - DNA, 201 bp, Homo sapiens
ttccaacaaaccaaccttttgtattttgctacagccctcttgacctagcccttgcccgtgtgcatatattaattttacatgttcgtgtttattttacagtrgttaagaggtaggatttccctgagagatggatggataaaaatcatagaaaatattagctgtgaaaaatgctgtagaaaccgaatcccaatcctctttcaa

SEQ ID NO: 128886 - DNA, 201 bp, Homo sapiens
atgttccttttatgtacattttaaaaactgggaaaaactggaaaaaactggaaatttacaagtatgtcctcaagctaggtacctgctagtctcccagccaygcccagtctaaaacttgatattgggctgggtgtggtggctcacatctgtaatcccagccctttgggaggccaaggcgggaggatcatctaagaccaggag

SEQ ID NO: 128887 - DNA, 201 bp, Homo sapiens
tcactgaggaaggggtcatttactcattctaatgtcaggattcccacaccaataaccacatcatttctcaacaaatacatcccttcccctactccacctcsggcaataactgtgggtccggaggctacagggctttgggtgtgtcctgggagttgaggatacttgtgacatatgtacactgataaccaatcaggagagacc

SEQ ID NO: 128888 - DNA, 201 bp, Homo sapiens
cttgagtggatgaggaaagattgccattttcagttgctctttataggggagatgtaaggcacaattaacttttaaaaaaataaatggggttatttttttamaagacaccttttttccaagttttaactaaagtcctctgaccaatttttctctttttgcagaatgagcatgttgattacgtagatgttggtggagcttatg

SEQ ID NO: 128889 - DNA, 201 bp, Homo sapiens
atcttactgcctgtggactggacagtctaaagccacaagattagaagttatggtaatcttaataaattcaagatgtagctagtttcatgaaaccagtatcwatgtcttacttattaaaaattacataagcaaatattattctgtcttgggctaggtttgtagttttgtaactcctatgccaaattttgacaccctatagta

SEQ ID NO: 128890 - DNA, 201 bp, Homo sapiens
gaggtcattatgttaagtgaaataagccagacactgaaagacaaatacggcatgttctcatattttgaagctaaaatagatctcatggaggtagaaagtaraatggtgattaccagaagatgggaagggaagaaggatggtagtggatgaagagaaattggttaaagggtttaaaaatacagttagatagaaggtataagt

SEQ ID NO: 128891 - DNA, 201 bp, Homo sapiens
tgtgaattgctataggtgtttaagagtttgtttttgttgttttttagtagaatttagaggaatggattaggatctggaaatggaatgggaacacatttttyttatttaaagtaatagctcctgcatttccaaaattctctgccaccaagttttgggaaacaaattaagagtcagaaattaagagatgcatggacttgccta

SEQ ID NO: 128892 - DNA, 201 bp, Homo sapiens
ttctgagactatgcctatctactacgttcatagaggattcacatcgatatgctaaattcactcattgcttaatatttatatttatgtatttgataaatatrtaagtatttacagagcaaaatctactctgtaccagatattgttccaagctgcagatagagtggtgaacaaatgatcaaaatttctgccctcatggtcctt

SEQ ID NO: 128893 - DNA, 201 bp, Homo sapiens
ctaacgaaggaaacaaccaaacccataaagattggaagaagcaatatatgtaaatccctggggtgggaaagctgctagtgaaaactggtggggttgaagcmcactgagcgaggggaaaatggtccaagattgggctggagagatgagcaggggccaagtgattcagggcctcataggtcatgggaaggaggttgggttttt

SEQ ID NO: 128894 - DNA, 201 bp, Homo sapiens
atagaggtagttcctcaattcccttgagggctcacataaaggttttgctattaatccaaaggaaggaatccatattctggcaaagctactgtttagtttcyggagttgtcacatttaaaacgagatcttttcaagcactagagaagctctttgtaccaggggttaaaataagactgagaggtgcttgttcttgcccttgcc

SEQ ID NO: 128895 - DNA, 201 bp, Homo sapiens
aagtcagtggacgaaagaggaaggggtgctcaacagtcaactgacacaatatgaaggcaaacaaaacaaaacaaaacaaaacaaaacaaaacaaaacaaaaaccctcgcatttgacagaagttcattaattaatgagcccctttgctagagtacacaaatagagtgttaaagactagggattgagagtaaagacaaaacta

SEQ ID NO: 128896 - DNA, 201 bp, Homo sapiens
taagtcagtggacgaaagaggaaggggtgctcaacagtcaactgacacaatatgaaggcaaacaaaacaaaacaaaacaaaacaaaacaaaacaaaacaaaaaccctcgcatttgacagaagttcattaattaatgagcccctttgctagagtacacaaatagagtgttaaagactagggattgagagtaaagacaaaact

SEQ ID NO: 128897 - DNA, 201 bp, Homo sapiens
gtaagtcagtggacgaaagaggaaggggtgctcaacagtcaactgacacaatatgaaggcaaacaaaacaaaacaaaacaaaacaaaacaaaacaaaacaaaaaccctcgcatttgacagaagttcattaattaatgagcccctttgctagagtacacaaatagagtgttaaagactagggattgagagtaaagacaaaac

SEQ ID NO: 128898 - DNA, 201 bp, Homo sapiens
cctctctatttccttccttccttccttttcttctttctttctttctctttctttccttttctttctttctctttttcttttccttcctccctccctccctcccttccttccttcctttctgtctctctttctttcttttctttctttcttcctttctttctttctttcctttttgatagctgttgttgctgttattttctt

SEQ ID NO: 128899 - DNA, 201 bp, Homo sapiens
ggtggtgggcacctgtagtcccagctactcgggaggctgaggcaagagaatggcgtgaacccgggagggagagcttgcagtgagccgagatagtgccactrcactccagcctgggcaacagagtgagactccgtctcaaaaaaaaaaaaaaagtaacagttgatcacaaaagatactcaattcatttatttaacaacattc

SEQ ID NO: 128900 - DNA, 201 bp, Homo sapiens
ggtaagtcagtggacgaaagaggaaggggtgctcaacagtcaactgacacaatatgaaggcaaacaaaacaaaacaaaacaaaacaaaacaaaacaaaacaaaaaccctcgcatttgacagaagttcattaattaatgagcccctttgctagagtacacaaatagagtgttaaagactagggattgagagtaaagacaaaa

SEQ ID NO: 128901 - DNA, 201 bp, Homo sapiens
cagctgcctctcattgcttaaaatttcagcccataccaaatcatctctcctgtgctattctgatccttctaggcctcagcatcaagcatgccccgggagcwagagataagcactctgtggcttaggtatagagctgctgtcaggttgcacctgcatgaagttggaatccatgtagatttcatgactggccgtttgttccag

SEQ ID NO: 128902 - DNA, 201 bp, Homo sapiens
tgaacacactaaatcgtgttgtaaaaacatgacattctctgactcctgtacatattgacacctgacttccacttttgttctatgaacaggactgctaggcrgtttgcttatctttttgtgaatatcaatgtgacctctgagcctcacgaagtgtctgccctgtggttcttgtggtatgtgaagcagtgcgggggcaccact

SEQ ID NO: 128903 - DNA, 201 bp, Homo sapiens
gaaaacatttggtttgtttttagttatttttctttcaaagcaattgtaaaagtaggctcttgactttgaagtagtatttgcctttcttttcttgttttctkttttctttttcttttgaaaaaaatctctaaagtctcctggaatcactgcaggatattatgactcagcttgaccttcctccctgtcaccctcagtggccct

SEQ ID NO: 128904 - DNA, 201 bp, Homo sapiens
aaggtaaggctgacttttcacccaagtgactgatagggaagcattttatttgagaaaacatttggtttgtttttagttatttttctttcaaagcaattgtraaagtaggctcttgactttgaagtagtatttgcctttcttttcttgttttcttttttctttttcttttgaaaaaaatctctaaagtctcctggaatcact

SEQ ID NO: 128905 - DNA, 201 bp, Homo sapiens
ggagatgtacagggaccagcacacctgaacacagatgtagcttattgatacttctgctgaagagctatgagatttatttgtttttttgggaagagcacatrtgagtccagtattgtactctactggatgtcaccaatggatgaccaatttaggggctacacaactgtcagtccaaaggtagcataatcatgacttggtctt

SEQ ID NO: 128906 - DNA, 201 bp, Homo sapiens
aagaaaaaagtaaggggtcaaatatataatatcatgttcaaaataaattactgttattattgttaaaaaaaaaaaaaagagtgggtgatttaatgttactsttctaattttaaacacttaagtttctgatagtctatgattttggagaacacatttctcagtaaaaacacaatagttaaagaaggaggtgcttatgacata

SEQ ID NO: 128907 - DNA, 201 bp, Homo sapiens
gccccagttcttgagtggatgaggaaagattgccattttcagttgctctttataggggagatgtaaggcacaattaacttttaaaaaaataaatggggttwtttttttacaagacaccttttttccaagttttaactaaagtcctctgaccaatttttctctttttgcagaatgagcatgttgattacgtagatgttggtg

SEQ ID NO: 128908 - DNA, 201 bp, Homo sapiens
acagccctaaaggaactgccaatccaatttgaggaacactttaatttgtgggtagggagaggaggaaatatctgttttttgcactgatctacctgtccttktggtcttgaataaaagaaatacaaatttaaaaattttttaatggaaaaataatttcattgtcctttagctcatttggatttttgaaagctttctaataat

SEQ ID NO: 128909 - DNA, 201 bp, Homo sapiens
tttaaagcattaaagagccagcgagctaacaagatagtgaagaatcactgggccaacatctggaaaggattaacctacttttccctgggtggcagggggarttgctgaccactgaagaagctcccgaaggctgagcagtgctttggacctagtgcaaagctagggtgacaggtcaagtccagagccccatgaagtgtgtac

SEQ ID NO: 128910 - DNA, 201 bp, Homo sapiens
actcatgcacatcatgtcattgaaggaaaattacaaaggcaaaaggagcagacccacatcccagggaagttagaaagcaggttgtgctgctggttactaaygagacattttataaccacttctctcattgtaacatataagaacaccagcctccctgagaaaggcaggtgcttacaacataatgactgttggaataacaca

SEQ ID NO: 128911 - DNA, 201 bp, Homo sapiens
atgtcctagataatacttgtatatttctggatgtccatagaaaaataaggatgtcattacatagaacaatagctgtcagcatacagaacaatagcagaacrgtggggaggatttcagatgtgaacagtgcttgtgagaatgaagcaagctacagtgtcctccaaggggacttcgtgagctcaacttgacatttagtctcac

SEQ ID NO: 128912 - DNA, 201 bp, Homo sapiens
ttccgtaaaacatttagggaactacagcccatcctagtgtgcagagtccaaggacagcaatatggagtgtccctggtgcattttaagtttcaatgaaagawtggggcgaataatgaattaaggggtaattgcattccctaacttgggtgagatccttttatctaaagtgaagatgaatgcggaacaataatcaaataaatt

SEQ ID NO: 128913 - DNA, 201 bp, Homo sapiens
gattcacttcagaccagagcttccagcagagagaaaccagttaattcagcgtcttccaatgggagctgtcattaagtgcatgatgtattacaaggaggccktctggaagaagaagggtaggctgctattattcatgtttaaactgtattatatgaagaaatcacagtcttttaggattattgaacagaaggtattgaacag

SEQ ID NO: 128914 - DNA, 201 bp, Homo sapiens
  misc_feature (1)...(201): n = A,T,C or G
tttagtgcaaatacgtaattaatgcgatccctccgaccttgactgccaagattcacttcagaccagagcttccagcagagagaaaccagttaattcagcgncttccaatgggagctgtcattaagtgcatgatgtattacaaggaggccttctggaagaagaagggtaggctgctattattcatgtttaaactgtattata

SEQ ID NO: 128915 - DNA, 201 bp, Homo sapiens
gggtaagtcagtggacgaaagaggaaggggtgctcaacagtcaactgacacaatatgaaggcaaacaaaacaaaacaaaacaaaacaaaacaaaacaaaacaaaaaccctcgcatttgacagaagttcattaattaatgagcccctttgctagagtacacaaatagagtgttaaagactagggattgagagtaaagacaaa

SEQ ID NO: 128916 - DNA, 201 bp, Homo sapiens
gtaaggataggcaagtagttacaggcctgtgctcatgataagaaattctgttttgatgatagaaatgaggtaatacagaagggattgctttcttctctcartcacaattctgagtaggttttaaaagcagagaggctaaaaatgtttacatattttcagtttgatctatccagtatccagtataaggatatatgaagatag

SEQ ID NO: 128917 - DNA, 201 bp, Homo sapiens
caggctgaagaccacagatgtattctattattttgttaaaatactaaatctggaggtctaaggcatggtttgaaattgctggctatatattatttttgttraatgatccatgtaaacttattattcaaagtatggcccaagtattggccagtattttatgttataccattatatcctgcctgattttaaaaataacaaaaa

SEQ ID NO: 128918 - DNA, 201 bp, Homo sapiens
atcttattcagatttaccaaataacagtgttttaaaaattgaagtgttgacatttcaacagtgacatgtatattagtcaggtatcattactaatggcttaygtggaccgtcattcagaaataacttcagtgatgctggtgaacatgtactaacctatataagtacatttcctggtatgaggcacagatggcccctgtctta

SEQ ID NO: 128919 - DNA, 201 bp, Homo sapiens
aaacagaatcttacgcttgtctaaggagctgggcatagagacttacaaagtgaatgtcagtgagcgtctcgttcaatatgtcaaggtaaggctgacttttmacccaagtgactgatagggaagcattttatttgagaaaacatttggtttgtttttagttatttttctttcaaagcaattgtaaaagtaggctcttgactt

SEQ ID NO: 128920 - DNA, 201 bp, Homo sapiens
ctggtcttgctagttcttgacactgatagaatctgtatgtccatttctctgcccctcactcatggggctcatctgtggctagcagggccttgaatctgtaraaactatacagcctcttttcataataccatggtgactttctttcaggtcttaaatggtctcgggaaggtgaccgagaaagatatctgggtacaagaacct

SEQ ID NO: 128921 - DNA, 201 bp, Homo sapiens
ctttgcgggcacagagactgccacaaagtggagcggctacatggaaggggcagttgaggctggagaacgagcagctagggaggtaagcaggaaagcccagrctctctccctcccgagtcacggcaacgtttttggcatctggtcttgctagttcttgacactgatagaatctgtatgtccatttctctgcccctcactcat

SEQ ID NO: 128922 - DNA, 201 bp, Homo sapiens
aagtgatctgcccacctcggcctcccaaagtgctgggattacaggagtcagccgctgcgcctggccgctgtttcctttttaattactcatctttagttcaraaaagcttttttctgccagtcaaaatcatttacagatttatggtggatggggtaggccctgttccaaacaaggaaaattttatccaatggatatagactt

SEQ ID NO: 128923 - DNA, 201 bp, Homo sapiens
ctttttttttttttttttttggaagtggaactcaatattttaatgattttacttaagataaatagtataaaaggaaaatgttaaacggttgtgttctgtgracagtggggctaaaacaaatataaaataataataattggttatagaggaccaagtacagaagatgagagtttccttggaaactggggaataccaaaataa

SEQ ID NO: 128924 - DNA, 201 bp, Homo sapiens
atttttatttcctttaaatcaaagttatacaaattaagagaaaaataacgtgtttgggtaggacatttattctctgaataatgtcctttatcatgtcatawgtttaaaaacaaagtttatggaaagaacagtgatataaaattttatatatgggacaaagccaatagagtcatcattcttcacgagaatggtgatcctgat

SEQ ID NO: 128925 - DNA, 201 bp, Homo sapiens
aaagtttattttgccaaggttgagggcacgtgcccgtgacacagcctcaggtgttcctgatgacatgtgcccaaggtggcaggggcacagtttggttttayacattttagggagacatgagacatcaatcagtatgatgtgtaagatgtacattggtttagtctcgaaaggtgggacaacttgaggcaaaggtgggacaac

SEQ ID NO: 128926 - DNA, 201 bp, Homo sapiens
gcaatatattaaattgtaggtgatgcagctcaagcaatgctaagggagatttatagcactataggtttatattagacatgagaaaaggtcttaaaacagtmcaacttgttacctcaagaaactggaaaaagataaagtaaacccaaagcaagcagaaggaataaaacatcagcagaaatcaatgaaattaaaaactagaaa

SEQ ID NO: 128927 - DNA, 201 bp, Homo sapiens
gagcacagaggtgatttccagtcctggaaagcttcccacagttaagcccgaggcagaagaaagaaccaagacataagataatttttctggagagaacataygcagaaaagaccaagccttttgactatgttcatagattagcaaatgatggctcctaagaaagaaggaagggactccagaaaactcctgattttgtaacaa

SEQ ID NO: 128928 - DNA, 201 bp, Homo sapiens
ttctcttcccttatgctcttccaaacaaacaaaatctctttctgtttggagccacctggaagtgggagtgttgtgacacaagcatccctgtggccatcacycccaggactacactgggtcagacctgaagccagcacagcactgggtcttaccaaagttctgctgtaaccactctctggctactgcctatgtttgctcaaa

SEQ ID NO: 128929 - DNA, 201 bp, Homo sapiens
tttatattttaagaaatcctgaccgagcaggaacccacatccaggaacagagccctttgctcctccctcagaatgaatggagaccagaaatcagatgtttrtgcccaagaaaagcaggatttcgttcagcacttcccccagatcattagggtgctgagtgaggatgagatggggcactcagagacaggagatgctgttgac

SEQ ID NO: 128930 - DNA, 201 bp, Homo sapiens
gggtatacacatcttcaattttactagatattatcacgttgctctctaagtgcctatataatttaacacttctatcagcaggacatgacagtttctgttaycctacatccttgccaaaacgtggtattatctgaatttttagcttttgtccacccaatgggggaaaatgatattttattactgttttaatttgcatttctc

SEQ ID NO: 128931 - DNA, 201 bp, Homo sapiens
agtttcactcttgttgcccaggctgtagtgcaatggtggaatcttggctcaccacaacctctgcctcccaggttcaagtgattctcctgcctcagcctccygagtagctgggattacaggcatatgccaccacactcggctaattttgtatttttagtagaggcggggtttctccatgttggtcaggctggtcttgaactc

SEQ ID NO: 128932 - DNA, 201 bp, Homo sapiens
tgcagagttcctatcagactgagattgggtagaccctggacctcatcacagccccccagggcaatgtggatcttggcagattcactgaaaagaggtacaawtctatcgtcaagtacaaggcagctttctactcctaccttcctgtagctgcagccatgtacagcaggaattgatggcgacaaggagcatgctaatggcaag

SEQ ID NO: 128933 - DNA, 201 bp, Homo sapiens
tgctgatagtctccagcaggccctgaccgtgggctggtgtgtggaactgctgcaagctttcttcctggtggcagatgacatcatggattcatccgtctccygccggggacagatctggtggtatcagaagccgggcatgggtttggatgccatcaatgatgctatgcttctggaagtatgtatctaccacctgctgaagct

SEQ ID NO: 128934 - DNA, 201 bp, Homo sapiens
tcctgcagagttcctatcagactgagattgggtagaccctggacctcatcacagccccccagggcaatgtggatcttggcagattcactgaaaagaggtasaaatctatcgtcaagtacaaggcagctttctactcctaccttcctgtagctgcagccatgtacagcaggaattgatggcgacaaggagcatgctaatggc

SEQ ID NO: 128935 - DNA, 201 bp, Homo sapiens
tcaaaaaaaaaaaaaagaactgtaagattgattttgagggggcagaaatcttgattatatttgtcagtgcattctagcacattgttggagatgagtctcarttgttgaatttctgaactgtaaaaagctactagctatggtataagaataacctcattatgaccacctataattttatgctatttataaatataaatatta

SEQ ID NO: 128936 - DNA, 201 bp, Homo sapiens
actgcgacctccgcctcccaggttcaagcaattcttctgcctcaggcttctgagtagctgggattacaggcgtgtgccactgtacccggctactttttgtrtttttagtagagaccgggtttcaccatattggccaggctggtatcgaactcctgacctcacgtgatgcacccacctcaacctctcaaagtgctgagatta

SEQ ID NO: 128937 - DNA, 201 bp, Homo sapiens
gtgctgagcacggtggctcatgcctataatcccagcactttgggaggccaaggcgggcagatcacctgaggttgggagttcgagaccagcatggccaacayggtaaaaccccgtatctactaaaaatacaaaaattagctgagcgggtggtgcacgcctgtaatcccagctactcgggaagctgaggtgggagaattgctt

SEQ ID NO: 128938 - DNA, 201 bp, Homo sapiens; identical to SEQ ID NO: 21869

SEQ ID NO: 128939 - DNA, 201 bp, Homo sapiens; identical to SEQ ID NO: 21882

SEQ ID NO: 128940 - DNA, 201 bp, Homo sapiens; identical to SEQ ID NO: 21883

SEQ ID NO: 128941 - DNA, 201 bp, Homo sapiens
gagccaccgcgcccggcccagagggtcttaattagtcatattttctaggaggagggcaacgaaccactgaattgagctaagaaacagtttctcagaaaaaygtggaatggctttcaaaatgttaggccaggttattacatcttttccttgagtagaaaagcaaaggttggaaagactaaaataaggcattctgtgtttttt

SEQ ID NO: 128942 - DNA, 201 bp, Homo sapiens
ctgttgaatggatagaaaatggagatacaaaaggcaaagaggtaagatcactgagtttaattttattcctagtcctgcaatcaagattctgaatataaaayaaaacagaaaagtacataatgttattttatttagtgcatatatttttattattccttgaaaactttcaaatgattaaaaattttcacttaaaggtagatt

SEQ ID NO: 128943 - DNA, 201 bp, Homo sapiens
ttgtaaggaaaagtagtgtcattttttttttaatttccaagttataaaattgtatttcacagtgtttaggaatgccataatttgtggcatttttaaggtgyatactttattcccacataggccgaatacatcaagcaatggtaacatctttaaatgaagataatgaaagtgtaactgttgaatggatagaaaatggagata

SEQ ID NO: 128944 - DNA, 201 bp, Homo sapiens
tcaggtccactgtttgaagacaaggacttgtgcggctcctcttaaaaatgctggtttttaaatgccgctgatttgctcctggagctagatttataagaaawtttccatcaaggaaggcagcccagtacagttatggtagaaatacaggggtattcagccactgtgcactgggaaaagtcataccaattattgtgactctgt

SEQ ID NO: 128945 - DNA, 201 bp, Homo sapiens
aagaaattttccatcaaggaaggcagcccagtacagttatggtagaaatacaggggtattcagccactgtgcactgggaaaagtcataccaattattgtgrctctgtctgttctgattggtcagttatctcacctttagaaatcattaacaggatacctagaaaacccccatgtctggaatttgagaaacatttctaaata

SEQ ID NO: 128946 - DNA, 201 bp, Homo sapiens; identical to SEQ ID NO: 21878

SEQ ID NO: 128947 - DNA, 201 bp, Homo sapiens
caggtggatcagagaaatgggatggtattggaaggccacatggaaagattgttgcattttctagggaaagatatttctagtcctgattagtcttattaacrtctatgcatgatccctattaacaactgagacttgagcatctcattgttctccccctagtggcatcattctcccagtcatccaggcttgaaaccttcttgt

SEQ ID NO: 128948 - DNA, 201 bp, Homo sapiens
gctaagattacaggcatgagccactgcacccagccgagttactgtattcattaagctaaagtaatttaagagttatttacttcatcaatttacttgaaaartaaaaggttaattgtcaaaatatactctcaaaagactatgtgtatgtgttgtgaacagattgacctggagagcatcttttcacttaaccctgaccttgtt

SEQ ID NO: 128949 - DNA, 201 bp, Homo sapiens
acacccagataattttgtatttttagtagagactgtgtttcaccatgttggccaggctggtcttgaacccctgacctcaagtgatctgcccgcctcagccwcccaaagtgctgggattacaggcgtgagccaccgcacccagcctggtctgaaagttttctgtgctcagtcctctttcctcccccttttatctttagcagt

SEQ ID NO: 128950 - DNA, 201 bp, Homo sapiens
agaagcatagtgattaatagcaagtacttttacatctgaccaaggtttagacccatgctgcttattcactgtgtaactttgagctttatttttctcatctwtaaatgcagttaccggctgggcgcagtggctcacgcctgtaatcccagcactttgggaggctgaggcgggcagatcatgaagtcaagagatggagaccat

SEQ ID NO: 128951 - DNA, 201 bp, Homo sapiens
tcagactcctgggctcaaatgatccgcccaccttgacctcccaaagtgctaagattacaggcatgagccactgcacccagccgagttactgtattcattargctaaagtaatttaagagttatttacttcatcaatttacttgaaaaataaaaggttaattgtcaaaatatactctcaaaagactatgtgtatgtgttgtg

SEQ ID NO: 128952 - DNA, 201 bp, Homo sapiens
ggtgggcagatcgcctgaggccaggagtttgagatcagcctggccaacatggagaaaccctgtcctctactaaaaatacaaaatttagccagggccaggcrtggtggctcatgcctgtaatcccagcactttgggaggccgaggagggcagaccacttgaggtcaggagttcgagactagcctggccaacatggtgaaacc

SEQ ID NO: 128953 - DNA, 201 bp, Homo sapiens
tcttcattttgttttatattcttacatgtctgcctacttttgtttaattgaaagaagctcagatcatgatacatatgagggagtaaagatagaaaacatartgaacattttttcctttcatagaatcgacggactgtagcttctattaagaatgaccctccttcaagagataatagaggtaaagtaaaaatttatctctta

SEQ ID NO: 128954 - DNA, 201 bp, Homo sapiens
aaaaaaatccataatggaaaaacatacatttgactacattagaattaagaatttaaatgcatcaaaagcaccataaagaacatgaaaagataagccacaaytttgtagaaaatatttgctatacatacaacaaaagattaatatcaagaatatatatagaattcctatagagaaatagcccaaacaaagaggccccaacac

SEQ ID NO: 128955 - DNA, 201 bp, Homo sapiens
gacataggcaacagttgcaggtaaatctcattttgattaagaaaggaaacatcagttttagaaactttgggtacagtataacaaaatgaggatgttatctrtcaatacatcttggaagtaaaaatcattgttcataaaaacttgtgttacatgtaaatgtgagtgacaattattatattgatactacattacaaatatatt

SEQ ID NO: 128956 - DNA, 201 bp, Homo sapiens
tgtatttatagggtcaaagaattgactgtagatccaactgctgctggtgatgttcgtccaataatgcaccatccaccaaaccagattgatgacttagagasacagtggggtgtggggagttcccctcagagagatgatctaaaacttctttgtgaacaaaatgtgagtgtactatggttgtaaatgttataatcttagttc

SEQ ID NO: 128957 - DNA, 201 bp, Homo sapiens
ttagattatatcagtgaaggtgattgatgtgaacaaaataattaaggcattttttttgaagaattttaagaattccttaaattgatattgaggaataatawaaactcttgtgcaaataagttaccgtaacacatttttactgcattgttcttttcatgttttattggtatgtgttaacgctaaaatttgttccattaagaa

SEQ ID NO: 128958 - DNA, 201 bp, Homo sapiens
tttggagttaacagaatgcataccgactaagagaattgtgtttgtaaaacacaattttacaaacacaaagtggttcagagcttattatgaaaccacaactrtgaaactatataatatcgtcagtttaagtttaggcttggttatgacaaatggcacaatttaattttaattttcaaaccaaatataaatgtaacaaataca

SEQ ID NO: 128959 - DNA, 201 bp, Homo sapiens
tgctaaattcatattgtgttcagctatgtagtttttcctttccttgtgggtgctcattccccatattttaagaagaaaatcaagaaattatccacattaaygcttattttccataatttggtatatgagatatgctccctatagagatgtccttctcgaagcaaaacctccctgtctttgggagggcaaagcaacacttaa

SEQ ID NO: 128960 - DNA, 201 bp, Homo sapiens; identical to SEQ ID NO: 21872

SEQ ID NO: 128961 - DNA, 201 bp, Homo sapiens
tccatcttctacaccaaatactattccatgccatggaagtgctatgcaataactctcccaggtagcaccttataccgcttaaaagcctttaaaatctccartctgaaggtgtcacagtaaagaaatgtaaacacttaggaaaacaaaaatgtaattacctgatgaagtcatctatgtccatggaacgggcccgtttgtcac

SEQ ID NO: 128962 - DNA, 201 bp, Homo sapiens
caggtgatctgcccaccttagcctcccaaagtgctgggattataggaatgagccatcatgcccggcctcctcacagcttcttaatgtgaacttaatgctastaacaatagtagtaccctctacagaattatttcctaaagtgatggttttccaaataacaaaataagcaagtttccattacactcagaattttagaagtaa

SEQ ID NO: 128963 - DNA, 201 bp, Homo sapiens
gtttccattacactcagaattttagaagtaattatatctgacaaccattaaaatttgtgcaaagctaatttgttttttaagcttacctatcatttatgctrtgtataaatttctaaaacccctggaggaaatattacataatttacgttttagtgttttacatgacactaataatcactgaaataaaatactttttatttc

SEQ ID NO: 128964 - DNA, 201 bp, Homo sapiens
gtaaaattattttctttcggtaccaatattgaaagaacgagagatgtgtgataatctcgagttgagcagtgttcctgactccatctctcataccgattcctttttttttttttttgagacggattttcacccaggctggagtgcagtggtgcgatctcggcccactgcaacctccgcctcccgtgttgaagctattcttgt

SEQ ID NO: 128965 - DNA, 201 bp, Homo sapiens
ttttttccactcctctcagctcatacctatgggtacatattcttaatactatgtttttaaactgcatggggtaatgggacttactaataactaataattctttttttttttttttttgagacagagtctcgctctgtcagtggtgcgatctccgctcactacaacctctgcctcccaggttcaagcgattcttatgcctca

SEQ ID NO: 128966 - DNA, 201 bp, Homo sapiens
tgtttgctgattatggtgtgaagttgtatactttagtatttctttctgagacatacaaacccctgtagtaaaattctttccactactaccaaagaagctcaaaaaaacttaaaataggcacttattgcttccaaaagtaccacagaaagccaggaatctgtattcattgcctagccacttgattcttatgacaaagatttt

SEQ ID NO: 128967 - DNA, 201 bp, Homo sapiens
atgcctttgatgactcagctcctaatgaaatggtttacaggtaggtaaattcattttaaatcagaattttgttcttatgccatgtggtcatcagcaccttsaaatttacattgattgtgggatatttcttaagaggtgcaatatgctgttttattctgagtttaaacaaagagaatgtaataaatgctgtaatgaatatta

SEQ ID NO: 128968 - DNA, 201 bp, Homo sapiens
atcacagggcagtgttccaggtaaagtaagacaggactttccttcaaaatatttcttgagataaattaagaatttgtcataattccttaaatatcacactrttccttaaaaaatacttgtttgtatatatgtatatgtgtatttgtagggcatgtgacatggcaaatttttaatacaatgaacgatggctacaaataacat

SEQ ID NO: 128969 - DNA, 201 bp, Homo sapiens
gaaaaaatgtaaatcatttcctttgatttgtatgtaaccattatgcagatttctatggctaaacttgtcagtttgttattgctctgaatcattgccattcygagtcttgcttcacagaaatcttgattttgtttttactttgctgttgaaatattttgtcttagtgagttgcatttttatgggatattatctttatatgta

SEQ ID NO: 128970 - DNA, 201 bp, Homo sapiens
ttcaaccctttatttaaattgttttgatcatttttctaatctgcaataattcacaatcagcttctgtatccattttattcagaagacagatcctaatgcaytctggtattttttctttgtagcattcaacttaattgacttcctttccttttctcaaatttcatgtgtatcaagcatatccataacttttaagaaattact

SEQ ID NO: 128971 - DNA, 201 bp, Homo sapiens
acagtagcaccacaccagttgggataaccaaaaatgtctctagacattaccaaatgcccgctgggggccaaaaatcatatccagttgagagccactgttaytgaaagatagcttatcttcacagctgcatgtaatttgtctgacaatttactaacctatttctagtttttacatgactctagagcagtacatgaccagaaa

SEQ ID NO: 128972 - DNA, 201 bp, Homo sapiens
tgagaaaaagaaagagaaaaaaaagaaagaataatggaaaacctgttatttaatataggttttgatcaatcacctgatatgaagtggcaaaggttttaccrtcaatgtgttctgaggtaatttatctggtgtggaatgacttggaagaaagtatttccttcaagcatctgtttaccaaccactttgagtaaacttatgtat

SEQ ID NO: 128973 - DNA, 201 bp, Homo sapiens
gtaatatttctttgttcttctgagaatggatatttatgcatgttttcctcttagtctctgcttgagaggtacaggagataactagattttattagcatatktttaaaagtctattaaaaatgcttttaaattatttggtggtattctgattgaaaatggaaggggttgctagaggttttatcaagaatagacacactatat

SEQ ID NO: 128974 - DNA, 201 bp, Homo sapiens; identical to SEQ ID NO: 21876

SEQ ID NO: 128975 - DNA, 201 bp, Homo sapiens
aaataatgattggggagctattctgcagggtttgcctgtactttccaaaactgtttgtgaggctgaggcggcagtcgctgtggctggaataggatgctggraggtgttgagggaggaacagtggcttgtactgggagggtgtcaggaaggaacgggaggaagatggcgacatcaggggcagggcaaatgagccttgttcgg

SEQ ID NO: 128976 - DNA, 201 bp, Homo sapiens; identical to SEQ ID NO: 21877

SEQ ID NO: 128977 - DNA, 201 bp, Homo sapiens
agacagcctactctagcctgaataggggcaacagtacctccaatttgactcacatcatgactcacctgggcattagtgagggcctgagcctggacttgggyccaggtcatgatgccccaggactttgttcacctctcagccacccatccctgcagtcctccctaagcaatcccgatctccagacttccctgagcagtcctc

SEQ ID NO: 128978 - DNA, 201 bp, Homo sapiens
ccccaaagtctctacagcagccagagctgccctctcaggcctgctcagcgcagccctcaggtgggtagcccctgagcaggcaattggattatggaatactmcccgcctcggcccactgggcttgggcaagtcttcactggccgatgagtgacttcagcctggggaactggagcagttcagcatggagagcccataaatcag

SEQ ID NO: 128979 - DNA, 201 bp, Homo sapiens
aggcatggatgtcaaaagtttgattcctataggatgatgcgggagaaagagactttaaaggagaatcagagtcaggtccactgtttgaagacaaggacttstgcggctcctcttaaaaatgctggtttttaaatgccgctgatttgctcctggagctagatttataagaaattttccatcaaggaaggcagcccagtacag

SEQ ID NO: 128980 - DNA, 201 bp, Homo sapiens
ggtgctcattccccatattttaagaagaaaatcaagaaattatccacattaacgcttattttccataatttggtatatgagatatgctccctatagagatrtccttctcgaagcaaaacctccctgtctttgggagggcaaagcaacacttaaaggagtgatagcagaagactcactttcctttctgactgtgagttatac

SEQ ID NO: 128981 - DNA, 201 bp, Homo sapiens
ccaaactatatcctttcatttctttaccagagagactgcaagttttcagtcaagttttagttgccctgtgtgacagcagcaaagcttgccctctgtcaaaragctgtttaaaaaaaaaaaagtcaggtggagtgggggtcagtcagtactattcccttccaggtattaacctcctccatttcagctggagtttgattgttt

SEQ ID NO: 128982 - DNA, 201 bp, Homo sapiens
aaactctaggcacacatatatccacataagcattgatgtatatatccagtttccaattttaaaattttaaattgtatatttgtagttattgttacagggasattatcaatgactagggaaggccgggcgcagtggctcatgcctgtaatctcagcactctgggtggtggaggcgggtggattacctgaggtcaggagtttg

SEQ ID NO: 128983 - DNA, 201 bp, Homo sapiens
cgtgatccctcatagcattcctgatgaatttagcctcagagttttttttgagagggagtctcgctcttgttgctcaggctggagtgcagtggcgtgatctyggctcactgcaacctctgcctcttgggttcaagcgattctcctgcctcagcctcctaagtagctgggattataggcatgcgccaacatgcccggctaatt

SEQ ID NO: 128984 - DNA, 201 bp, Homo sapiens
aagtgatctgtgtaaaatgtttagcacagtacctgggatatattaataggaatagttatccctattgctactttagtgagcagttctgtctaaaaaattcrgttagacagatgtgaaagcaatgttttttcatatccttatattagaatcatatactttgaaagttttatatgggaattgtgggatagtttgtaacagtac

SEQ ID NO: 128985 - DNA, 201 bp, Homo sapiens
tcatcaattgtaacaagtgtacctggtgcagggcattgatagcgcggagggtgtgtggggttaagaattgtacgggaaatctctgtaccttccactcaatwttgctgtgaacctaaaaaaggttggggaggagaggatgcaaactttaggtgttaaaagttaaaaccactcttgaaataatggaccaattaatgacaaaaa

SEQ ID NO: 128986 - DNA, 201 bp, Homo sapiens
tctttgtgaacaaaatgtgagtgtactatggttgtaaatgttataatcttagttcatttcatcagtagcagaacttaactgaaaactatcatttaaatgargtgtcaggctgtgggtgtggtggctcaagcttgtaatctcaccaatttgggaggctgagtgagaggactgcttgaggccaggagttcaagaccagcctgg

SEQ ID NO: 128987 - DNA, 201 bp, Homo sapiens
attgtaaaggaataaatgcacggagggagataagtaaaattattttctttcggtaccaatattgaaagaacgagagatgtgtgataatctcgagttgagcrgtgttcctgactccatctctcataccgattcctttttttttttttttgagacggattttcacccaggctggagtgcagtggtgcgatctcggcccactgc

SEQ ID NO: 128988 - DNA, 201 bp, Homo sapiens
acctaccgctataacttttggtcatgctagcattatgtcttgcctgtgctgttgcaacaaattcctaataggcctctctacctaggagagtaatttggttmacaacaacaacaacaacaacaacaacaaaaaacccaaaacaataatttggttaattactgtttcagagtaacctttcaggcatgtaggtttgaccctctg

SEQ ID NO: 128989 - DNA, 201 bp, Homo sapiens
aattttctctttaagtttaattgcctgttttgaatagcaatatagtcccatgactaatgaagttccaaaatgatatatatgtatgtatgtatgtatgtatrtatctattagtctccatcctacccctaccccacagctagctacccagttcttctccaagagacaaaaatattactagcttcttatatttgtagagcatta

SEQ ID NO: 128990 - DNA, 201 bp, Homo sapiens
tgctataggacgaaaatatgaatatattgtatatagttgtccctcagttatacatggaggattggttccaggactgcctgaatatacccaaattgcgcatrcacaagtcccacagctggccccgtggaacttgcaaatatgaaaagttgggcctctgaatatgaaggtttcacatctctcaaatactgtattttcagtctg

SEQ ID NO: 128991 - DNA, 201 bp, Homo sapiens
ttgaaagagtgctgttaatgtcatttttttaggtaaatacgagttcacagtataccagcaaaagtaggatttacatattattttgaagattctgggtgcamagcaacacctgtccctggtatacacccaagggagaggaaatcaccaccttgtgaagatatctgcactctcgcgttcattgcagcattattcacagtagcc

SEQ ID NO: 128992 - DNA, 201 bp, Homo sapiens
gcaaaaatgcctgtttcctcatactcttatccacacagtgtacattacacttttgaaatttgctagcttggattgtgaagttcaggctgtgactatagcatttttttttttttaagtggccctgtaagggatgacatgcttaatttatgaagtgtttatgaggtccaaacatataatagaaaacacctaagttctggtgtt

SEQ ID NO: 128993 - DNA, 201 bp, Homo sapiens
aaattatgtgtgtgtgtatacgtttatgtgtgtgtatagacaatgtacaatggaacattattcagccttaaaaaaggagatcctactgtttaccacaacayagatggacctgaaggacgttatgttaaatgagataagccagacaccaaggaaaatattgcataatctcactcatatgtagaatatttttttaaggagcta

SEQ ID NO: 128994 - DNA, 201 bp, Homo sapiens
actataaaaccactggaagaaaacctagcaagtaccattctgggcattggccttatcaaagaatgtatgaccaagtccccaaaacaattacaacaaaaagaaaaaaaatgacaaataggagctaattaaagagcttctgcacagcaaaagaaacagagtaaacagacaacctacagaatgggagaaaatattcacaaacta

SEQ ID NO: 128995 - DNA, 201 bp, Homo sapiens
atttctacggagcatattttatttaaatttattgaacttgaagcaattttcgttcttttcagccttcaccttcagcctataccagaagttcccagacatamaagagctttgtgttcttacataagtgctactaacctaaagccacatttcaaaagcggtttgcctataagaaattagggaagtcatcacagtgtgttatta

SEQ ID NO: 128996 - DNA, 201 bp, Homo sapiens
ctataaaaccactggaagaaaacctagcaagtaccattctgggcattggccttatcaaagaatgtatgaccaagtccccaaaacaattacaacaaaaagaaaaaaaatgacaaataggagctaattaaagagcttctgcacagcaaaagaaacagagtaaacagacaacctacagaatgggagaaaatattcacaaactat

SEQ ID NO: 128997 - DNA, 201 bp, Homo sapiens
tataaaaccactggaagaaaacctagcaagtaccattctgggcattggccttatcaaagaatgtatgaccaagtccccaaaacaattacaacaaaaagaaaaaaaatgacaaataggagctaattaaagagcttctgcacagcaaaagaaacagagtaaacagacaacctacagaatgggagaaaatattcacaaactatg

SEQ ID NO: 128998 - DNA, 201 bp, Homo sapiens
ataaaaccactggaagaaaacctagcaagtaccattctgggcattggccttatcaaagaatgtatgaccaagtccccaaaacaattacaacaaaaagaaaaaaaatgacaaataggagctaattaaagagcttctgcacagcaaaagaaacagagtaaacagacaacctacagaatgggagaaaatattcacaaactatgc

SEQ ID NO: 128999 - DNA, 201 bp, Homo sapiens
atgttctctttacaagtggttttggacggtgttttaaccttccttttccccagccccaaatatgctgaacaacatcaggaaactacagtgatttaatactyttttttttgaaatggagttttgctctcgttgcccaggctggagtgcagtggtgcgatctcggctcagtgcaaccactgcctccggggttcaagtgattct

SEQ ID NO: 129000 - DNA, 201 bp, Homo sapiens; identical to SEQ ID NO: 21867

SEQ ID NO: 129001 - DNA, 201 bp, Homo sapiens; identical to SEQ ID NO: 21868

SEQ ID NO: 129002 - DNA, 201 bp, Homo sapiens
tcaccaaggggatggtgcactcatcaccaaggggatggtgctaaaccattcatgagaaatccaccccagtgatctagtcacctccaccatccaatcacctycactgggccccacctccaatatagggattacaattccacgtgagatttaggcagggatgaatatacaaactatcacacagccactatcgataggaagcat

SEQ ID NO: 129003 - DNA, 201 bp, Homo sapiens
ccaaagtgggaggcctgtaatcatgcctgggattataggcgtgagccaccacgcccagccgggaatgcttttataactaatttgtacttataaaaataatmcatctgacatagcatatacagaatgtgttagttacaaaaaagacatttgtgttagatagatgtattatatagaattgaatagaattgttgataatacttg

SEQ ID NO: 129004 - DNA, 201 bp, Homo sapiens
atgaatgaggattagtcatataggtgtacaattaaggtaaaattttgccattcatttttgtcatgcatagtctattggccaatgttagaagaaaaattttycaatgagctatagtatagtaaaaaggattcacatatgtatggcaactttagcccttttttttttttttgaatcaaagtttcactcttgttgcccagctgg

SEQ ID NO: 129005 - DNA, 201 bp, Homo sapiens; identical to SEQ ID NO: 21873

SEQ ID NO: 129006 - DNA, 201 bp, Homo sapiens; identical to SEQ ID NO: 21874

SEQ ID NO: 129007 - DNA, 201 bp, Homo sapiens
acatgagtaaagaagggctgcttcagaccattattaactggtgacttgatgtttttcttttggcttgctgatggcgatccatgtccctatttcagaccacrcttttcccatcagtgatactcttacactaataaacatatcccaagggcaaacaggtacactaaaatgagcttattcctatctttcaagaccatgatgaaa

SEQ ID NO: 129008 - DNA, 201 bp, Homo sapiens
catcttctacaccaaatactattccatgccatggaagtgctatgcaataactctcccaggtagcaccttataccgcttaaaagcctttaaaatctccaatytgaaggtgtcacagtaaagaaatgtaaacacttaggaaaacaaaaatgtaattacctgatgaagtcatctatgtccatggaacgggcccgtttgtcacta

SEQ ID NO: 129009 - DNA, 201 bp, Homo sapiens
gggtttctccattttgggtcagggtggtctcaaactcccaacctcaggtgatccgcccgcctcagcctcccaaggtgctgtgattacaggcgtgagccacygtgcccggcctgatttaatactttttaatggtatcatagctactttatgacatttttcttattactgttacgcaaattctgaatgaaacttttctaaaaa

SEQ ID NO: 129010 - DNA, 201 bp, Homo sapiens
atttatataaatttttgacatctaagtttggggtgaacattatttttatgttaagttggaccatatgaaattgtcatttttttaggtcaaatggttgaatktagactaaatgggaaaaaatggcagtgtatcaacacgaactccctaaccaaattcagaaatgtaactaaccactgtgaattacctttgtataagtaaaat

SEQ ID NO: 129011 - DNA, 201 bp, Homo sapiens
cgctggcctgttagtcaggaactacagcgttaattgaaattgagtgatctgctaaggttaatctgacttttctggttttctaaggttatcagtgacagggsttaggcttggactgctaagattattctctgccacaggagataacctggtatgaaattggactggtgtgttttcttacatgtgtcttcctatttttctgat

SEQ ID NO: 129012 - DNA, 201 bp, Homo sapiens
acaggggttaggcttggactgctaagattattctctgccacaggagataacctggtatgaaattggactggtgtgttttcttacatgtgtcttcctatttytctgattcaattcctttccctttttaaaacccactgactcttaaaaaaacctacaatctttctgtcgtgtagctagtttggttttttttttcttttagct

SEQ ID NO: 129013 - DNA, 201 bp, Homo sapiens
ctggggaactggagcagttcagcatggagagcccataaatcagcctggtgatgggtccccctggcttttctgaagggcctggatttttagaaggtgagggrccagtggctggccctcaggattcccacaccctcaaccaccagaacttgacccaccactgctcctgctgtggctcaaggctgaacatcatcctcataggag

SEQ ID NO: 129014 - DNA, 201 bp, Homo sapiens
tcccacctgtctccagagtagctgggactacaggtgtgcaccaccacacctggctaatttttgtattttttgtagagatggggtttcaccatgttgcccargctggtctcagactcctgggctcaaatgatccgcccaccttgacctcccaaagtgctaagattacaggcatgagccactgcacccagccgagttactgta

SEQ ID NO: 129015 - DNA, 201 bp, Homo sapiens
aatggcagccaggaacctgacatgcttagcatagaaatcagactatcaagaactatgacagtaaaggaggaattctctgttattttggaaccgtataccgstttttacagcccagtcaagatgtaggaaattgcttcttacttcggagaaaggcaccagcgagcagtgttacagagcttgattagaatgatccctggtaag

SEQ ID NO: 129016 - DNA, 201 bp, Homo sapiens
gagcttgattagaatgatccctggtaagaagtgctatgttactacaagttcaccaaacctaaaattgtgggaggaaagtattcttgtttcttagttaagtrttggtgtaaagagttccttttaacatctgaaatcaagaggcaattgaagatttcaaaggacccatcaggaattttggagttcagggcaggcaaagaaaat

SEQ ID NO: 129017 - DNA, 201 bp, Homo sapiens
tgggattacagacacccaccaccacacctggataattttttgtatttttagtagagttagagttccaccatgttggccagggtggtctcaaactcctaatytcaagtgatctgcccacctcagcctcccacagtgctgggattacaggcctgagccaccacatctggcttataaaactttaaaagaaaatgtaagagactg

SEQ ID NO: 129018 - DNA, 201 bp, Homo sapiens
aggcacttattgcttccaaaagtaccacagaaagccaggaatctgtattcattgcctagccacttgattcttatgacaaagattttgaaactctggggaarggctatgtgtcaacttgttttatgtgtcatgattgttaaaatgctagagaaaacagcaaagagccagttaaatctgtgtctgctcaaataagacaagggg

SEQ ID NO: 129019 - DNA, 201 bp, Homo sapiens
ttagatttctgtgtgtgtgtgttacatttaaaggtgataaaactataaagaaaagccaaaatatgattatctcaaatatctgggtagttacttttagtacttttttttttttttttttgagacagaattttgctcttattgtccaggctggagtgcaatggcgcgatcttggctcactgcaacctctgcctcccgggttca

SEQ ID NO: 129020 - DNA, 201 bp, Homo sapiens
ctgcagccttgacctcctaggctcaagcaatcctcctacctcagcctcccaagttgctgggcctgtaggtggacaccaccatgccctgttgatttttaaattttttttatagagttgaggtctcggtatgttgccaacctagtctcaaactcctgggctcaagccatcctcctgcttctgcctcccaaagtgctgggatca

SEQ ID NO: 129021 - DNA, 201 bp, Homo sapiens
atttttgtttcaaaatacaactctttttaaaacaggtagtattgcaaagttgttgaatctgcggttctttgtgttcatctcaacaagcatttgtggttttkttgttgttgttttgcttttttacattgtgccaaatactatgctggacaaaatacaaagatgaatgatgacatggctttcagcctgtaggaacttgatatc

SEQ ID NO: 129022 - DNA, 201 bp, Homo sapiens
gggagcaggagcaagagagagggagatgccacacacttttaaacagccagagaacagaactcactgtcatgaggacagcactcatcaccaaggggatggtrcactcatcaccaaggggatggtgctaaaccattcatgagaaatccaccccagtgatctagtcacctccaccatccaatcacctccactgggccccacctc

SEQ ID NO: 129023 - DNA, 201 bp, Homo sapiens
tggccctttaaggaagtttccaactcccaatctaaaccattcatttttttcccttagatttttgtctgatattaaaatttgggaaaaatttaaagtaatayagggaaaaacaacttccaactcccaatctaaaccattcatttttttccctcagatttttgtctgctattaaaatttgggaaaaatttaaagtaatatagg

SEQ ID NO: 129024 - DNA, 201 bp, Homo sapiens
aaacacagcacaaaaccaggcattaagagatgcatgggaaatagcatttaaatggtaaatatggtaaagattgttttatggtttttgggtttttttttttmatgatcatatttttaatgttactttaaaatagattagtggaatgtgattcaatttagtaaaaaaaaaaaaaaaaaatcagctttattaaaacatctgaga

SEQ ID NO: 129025 - DNA, 201 bp, Homo sapiens
tctaaatacaagcttgattgcagatttcattttaccactgtggaaaatttaacttcttcttattagtctgttaattgggttttttaaagtatattttggarcaaaaatttttttgtgaaattatagcaatgtttcagtttgagtttaaaattctgggcagatgataatttgtcagatgttacagaagaatgtgttgggctc

SEQ ID NO: 129026 - DNA, 201 bp, Homo sapiens
ataaagatgttttatgtctattgacattttagagaatactatcttaagtatgtttgattatatttaacagaattgtaatttggtttctgtttcacaaagakgcttattggattatcgaatttttgtccttgtaggaatctattcggtggttagaagatgaaaaggccctcttagagatgactgaagaagtagattatgatg

SEQ ID NO: 129027 - DNA, 201 bp, Homo sapiens
aaagtttaattcttggattcagccatctgctttaattttaacacatctgttttgtaacctaaaataattttaaggtgtttgtttatttgtttgtttgtttkgagattacgattcttaagaatagatacaagttttaaaccttggataaaactaatttttattcttctggttcagttgtagaacaaatacaggttaagttgt

SEQ ID NO: 129028 - DNA, 201 bp, Homo sapiens
ctaatttttttgtatttttagtagagatggggtttcaccatgttggccaggctggtcttgaactcctgagctcgtggtccacccacctcagcctcccaaartgctgggattacaggcttgagccactgcgcccggccagcctcagagttcttaatacagcattatcagccctaatagccctagtctgccaattgaaattgg

SEQ ID NO: 129029 - DNA, 201 bp, Homo sapiens
aggactacaggtatgcacaaccatgcctagctaatttttgtattgtttgtagagatggggtcttgctatgttgactaggctggtcttgaactcctggcctyaagcaattctccctctttggcctcccaaagtactgggattacaggtgtgagccaccatacctggtcaaatttattcaatttaaagtttttggcagaccag

SEQ ID NO: 129030 - DNA, 201 bp, Homo sapiens
atatccacattgggaaattctctgctgaagatttgcatatttgaggagcaaagagtgggatttggaatatagggagggttgaagctaagtttttactctctgtatatatttgattagtgtacatttttaaaaatgagaaggcatgtaaaatttatattttgccgggtgtggtggctcacgcctttaatcccagcacactgg

SEQ ID NO: 129031 - DNA, 201 bp, Homo sapiens
tatccacattgggaaattctctgctgaagatttgcatatttgaggagcaaagagtgggatttggaatatagggagggttgaagctaagtttttactctctgtatatatttgattagtgtacatttttaaaaatgagaaggcatgtaaaatttatattttgccgggtgtggtggctcacgcctttaatcccagcacactggg

SEQ ID NO: 129032 - DNA, 201 bp, Homo sapiens
ctgaggcaggagatcacttgaacctgggaggcggaggtcacagtgagccgagattgcaccactgcactccaacctgggcaacagagcgagacttcatctcaaaaaaaaaaaaaaaaattatattttacacacatattttaggaggatttctttgcagtttaaagttttaagacgtggagcggtttatatatacatatatat

SEQ ID NO: 129033 - DNA, 201 bp, Homo sapiens
ttacccaccatgcctggcatcacaacttctttttttttttggtccagagataaagtctcactgtcacccaggctggtgggcagaggcataatctcggcccrctgcaacctccacctcccaggttcaagtgattctcccacatcagcctcccgagtagctgggactacaggcatgcaccaccactcccggctaatttttata

SEQ ID NO: 129034 - DNA, 201 bp, Homo sapiens
atcctccccgctcagcctcccaagtagctgggactacagatgcacaccacatccggtcgatttttatattttttgtagagacatgtttcgccacgtttccyaggctggtctcatacttgtgggctcaagtgatccgcccaccttggcctcccaaaattctgggattacagacttgagccaccatgcccagccatttgtatg

SEQ ID NO: 129035 - DNA, 201 bp, Homo sapiens
tttgttctgtactttcttcagttttgccttttacaaaacaaaacaaagacagcagttatataaaatgttctacttgtagatctgttttccatctttttttktttttgtttttttgaggctgagttttgctcttgtcgcccaggctggaatgcagtggcatgatctcggctcactgcaacctccgcctcccagttcaagcga

SEQ ID NO: 129036 - DNA, 201 bp, Homo sapiens
aaattctgggattacagacttgagccaccatgcccagccatttgtatgtcttttttggagaaagatctgttcaaatcctttgttcactttataatttggtatgttttctctttttttttgagacagcgtctcactctgtcacccaggctggaatgcagtggcatgatcataactcattgcagccttacctcccaggcccaa

SEQ ID NO: 129037 - DNA, 201 bp, Homo sapiens
acagcagttatataaaatgttctacttgtagatctgttttccatctttttttttttttgtttttttgaggctgagttttgctcttgtcgcccaggctggartgcagtggcatgatctcggctcactgcaacctccgcctcccagttcaagcgattctcctgcctcagcctcctgagtagctgggattacaggcgtgtgcca

SEQ ID NO: 129038 - DNA, 201 bp, Homo sapiens
tgttacccaggctggtcagactcctgggctcaagtgatcctcccgtctcagcctctcagaagtgctgggatgacaggtatgatccaccgtgcccagtcaayatttatttttttattgttgaggtataaaacttctggatactactgccatatctgatacatgctttatagatattttttctcattctgagggttgtctttt

SEQ ID NO: 129039 - DNA, 201 bp, Homo sapiens
tgttttccatctttttttttttttgtttttttgaggctgagttttgctcttgtcgcccaggctggaatgcagtggcatgatctcggctcactgcaacctcygcctcccagttcaagcgattctcctgcctcagcctcctgagtagctgggattacaggcgtgtgccaccacgttcagctaattttgtatttttagtagaga

SEQ ID NO: 129040 - DNA, 201 bp, Homo sapiens
cctcagcctcctgagtagctgggattacaggcgtgtgccaccacgttcagctaattttgtatttttagtagagacggggtttcaccatgttggtcaggccrgtctcgaactcctgacctcaagtgatccacccacctcagcctcccaaagtgttgggattacaggcatgagccaccacgcctggcctccatcatacttttt

SEQ ID NO: 129041 - DNA, 201 bp, Homo sapiens
ctgtcattggtttgggaaatagagcattattggccccccaaaaggttccccatgtgctccttcctgttcacaaatcctgaataacatgccttattcatctrtctctaccctgatgtaacccatggattaacttctgtggaatacttttcttgtttttttttttcctctttttaaaaataattttactatgaatctatttct

SEQ ID NO: 129042 - DNA, 201 bp, Homo sapiens
tatagaaaagtacctaaagtataagtgattaattaaatggataatggatacttataaagtgaaaactcctgtcattggtttgggaaatagagcattattgkccccccaaaaggttccccatgtgctccttcctgttcacaaatcctgaataacatgccttattcatctatctctaccctgatgtaacccatggattaactt

SEQ ID NO: 129043 - DNA, 201 bp, Homo sapiens
tattgttcagcaactataatgctatattaactgtctattatgtcaattataggttattagattgcttgaaaagaactataagattatatattcacaataattttttttttttttaagaagacaagaactgtaggctgggcgtggtggttcacgcctgtaatccctgcactttgggaggccaaggtgggtggatcacttgag

SEQ ID NO: 129044 - DNA, 201 bp, Homo sapiens
tattttttaatcttttattaaaatgtaaaatacttatgcatatagaaaagtacctaaagtataagtgattaattaaatggataatggatacttataaagtraaaactcctgtcattggtttgggaaatagagcattattggccccccaaaaggttccccatgtgctccttcctgttcacaaatcctgaataacatgcctta

SEQ ID NO: 129045 - DNA, 201 bp, Homo sapiens
tgtctgtgaataaagatgttttatgtctattgacattttagagaatactatcttaagtatgtttgattatatttaacagaattgtaatttggtttctgttkcacaaagaggcttattggattatcgaatttttgtccttgtaggaatctattcggtggttagaagatgaaaaggccctcttagagatgactgaagaagtag

SEQ ID NO: 129046 - DNA, 201 bp, Homo sapiens
atgtcaattataggttattagattgcttgaaaagaactataagattatatattcacaataattttttttttttttaagaagacaagaactgtaggctgggygtggtggttcacgcctgtaatccctgcactttgggaggccaaggtgggtggatcacttgaggtcaggagttcgagaccagcctggccaacatggtgaaac

SEQ ID NO: 129047 - DNA, 201 bp, Homo sapiens
cggatgctaataatttaagaaaattacacacctgtaatcccagcactttgggaggccagggtggatggattgcttgagccctggagttagagaccagcctrggcaacatggcaaaaccccatctctatttaaaaacaaaaagaaaagtgtcatatgtgcccttttggaacaaggtatcctataaagaccatcatttcccac

SEQ ID NO: 129048 - DNA, 201 bp, Homo sapiens
tctttttaaaatatagactatgggtggtgacttttcaggaaagaaccaagattgttctaaaggaatttatgcattagcaggtaactgtcctttttccatawaatttggaatattcttctgtggtattattcaggtaactttgaaataaggctttaaaatattgttcagcaactataatgctatattaactgtctattatgt

SEQ ID NO: 129049 - DNA, 201 bp, Homo sapiens
tacaatatttaccagcatcgttggtctctgtccactacatgacagtagcaccacaccagttgggataaccaaaaatgtctctagacattaccaaatgcccsctgggggccaaaaatcatatccagttgagagccactgttattgaaagatagcttatcttcacagctgcatgtaatttgtctgacaatttactaacctatt

SEQ ID NO: 129050 - DNA, 201 bp, Homo sapiens
tgtaaaccattattctggaactttttatgcttcaaataaaaacgtgtttgacacttgctaaattcatattgtgttcagctatgtagtttttcctttccttktgggtgctcattccccatattttaagaagaaaatcaagaaattatccacattaacgcttattttccataatttggtatatgagatatgctccctatagag

SEQ ID NO: 129051 - DNA, 201 bp, Homo sapiens
gctgagtgagaggactgcttgaggccaggagttcaagaccagcctggacaatttaatgagaccctttctctacaaaaaatttaaaaatcatccagatgtgktggtatacacctgtaagtctagctactaggcaggctgaggtgggaggattgcttgagcacaggaattctgggctgtagtggactgtcatagcatcactgc

SEQ ID NO: 129052 - DNA, 201 bp, Homo sapiens
tgtatttgtattctgtctgttggttagtggagacaccatatatctggtttctcaaatagaaatcttattgataatgccagcttccctcattccttgaggaygtttgctcctggcccacccacactctcagcaaaatgaccttgcttgtcatttcaccaccaagaaatataaacaaccagtaaagaactacaagtcagccac

SEQ ID NO: 129053 - DNA, 201 bp, Homo sapiens
ggttattagattgcttgaaaagaactataagattatatattcacaataattttttttttttttaagaagacaagaactgtaggctgggcgtggtggttcaygcctgtaatccctgcactttgggaggccaaggtgggtggatcacttgaggtcaggagttcgagaccagcctggccaacatggtgaaactccatctctact

SEQ ID NO: 129054 - DNA, 201 bp, Homo sapiens
gagaccagcctggccaacatggtgaaactccatctctactaaaaatacaaaaaaaaacttagccaggcgtggtggcgggcgcctgtaatcccagctactcrggaggctgaggcagaattgtttgatcatttgaacccaggaagcagaggttgcagtgagccaagatcatgccactacacttcagcctgggcaacagaccaa

SEQ ID NO: 129055 - DNA, 201 bp, Homo sapiens
ttttgaaatttgaggggagtacagcagtacatagtataatttaatatctgcctcgtgcggtggctcacgcctgtaatcctagcactttgggaggcccaggygggcggatcacaaggtcaggagatcgagattatcctggctaacatggtgaaaccccgtctctactaaaaatacaaaaaattagccaggcatggtggtggg

SEQ ID NO: 129056 - DNA, 201 bp, Homo sapiens
cttatgggcagactggaagtggaaaaactcatgtaagtaatttattaaagttacattctggtacgaagctacagtttcttttccttatagcttaattctgygaactaaattcttaagagttattcctgagtaatgtctgttctttattttctttttaaaatatagactatgggtggtgacttttcaggaaagaaccaagat

SEQ ID NO: 129057 - DNA, 201 bp, Homo sapiens
acatagtataatttaatatctgcctcgtgcggtggctcacgcctgtaatcctagcactttgggaggcccaggcgggcggatcacaaggtcaggagatcgarattatcctggctaacatggtgaaaccccgtctctactaaaaatacaaaaaattagccaggcatggtggtgggtgcctgtagtcccagctactcgggaggc

SEQ ID NO: 129058 - DNA, 201 bp, Homo sapiens
tgtgaccattatttattatggaaatattgcttgaaattatgctttaagtagtttaagtaattttagcatatgatatttaaaattcttaaatcaattcttcratattgttatttaaaatttttaacaaagatttgtttagaatcttgctattaagttttatttattaataaaatactttgtattactcagcattactattat

SEQ ID NO: 129059 - DNA, 201 bp, Homo sapiens
gagattatcctggctaacatggtgaaaccccgtctctactaaaaatacaaaaaattagccaggcatggtggtgggtgcctgtagtcccagctactcgggargctgaggcaggagaatggcctgaacccgggaggcagagcttgcagtgagccgagatcacgccactgcactccagcctgggcaacagagtgagactccgtc

SEQ ID NO: 129060 - DNA, 201 bp, Homo sapiens
tttcctgcctcagccccctgggtagctgggaccataggcgtgtaccaccatacccggctaatttttgtatttttagtagaggcagggtttcactatgttgkctaggctggtctcgaactcctgacctcaggtgatccacctgcctcggcctcccaaagtgctaggattacaggcgtgagccaccccgcctggccctttctg

SEQ ID NO: 129061 - DNA, 201 bp, Homo sapiens
actggggaagagcctcctataaaaccattagatcttgtgagaactcactatcacgagaacagcctggaggaagttgcccccatgattcagttacctccacstggtctctcccttgacacttggagattatggaaattataatttaagatgagatttgagtggggacagaaagcctaaccatatcagacacataattgtttc

SEQ ID NO: 129062 - DNA, 201 bp, Homo sapiens
cacataattgtttcaattttatttccaaatctctaggaataaagatttttaaccttccttgatactcataccaatgttttgtgaccttaagagtcagtaatttttttttttttaacagccaaaaataattcattcctcctttatactaaatctgccttattttttttaggccaatactttgaggtggtgggtaggtggcat

SEQ ID NO: 129063 - DNA, 201 bp, Homo sapiens
acataattgtttcaattttatttccaaatctctaggaataaagatttttaaccttccttgatactcataccaatgttttgtgaccttaagagtcagtaatttttttttttttaacagccaaaaataattcattcctcctttatactaaatctgccttattttttttaggccaatactttgaggtggtgggtaggtggcatt

SEQ ID NO: 129064 - DNA, 201 bp, Homo sapiens
aagcttaaaaacaagccaggcgcggtgtctcacgcctgtaatccgaggccgaggtgggcggatcacttaaggtcaggagttcaagaccagcctggccaacrtggtaaaacctgtgtctactaactacaaaaattagctgagcatggtggcacacgcctgtagtcccagctactcaggaggctgagggatgaaaatcgcttg

SEQ ID NO: 129065 - DNA, 201 bp, Homo sapiens
aagtctagctactaggcaggctgaggtgggaggattgcttgagcacaggaattctgggctgtagtggactgtcatagcatcactgcactctagcctaggtracagagcgagaccttgtctcttaaaataaatgagtaaataagtcaggggtcagcaaactacagcctgtgggccagccatctatttttacaaataaagttt

SEQ ID NO: 129066 - DNA, 201 bp, Homo sapiens
ctaggattacaggagtgagccaccacacccagccgaagtttttttttgttttttgttttgttttgttttgttttttaatcatcatctgaacatggcctggratcagagaagctctgacttgctataggacgaaaatatgaatatattgtatatagttgtccctcagttatacatggaggattggttccaggactgcctgaa

SEQ ID NO: 129067 - DNA, 201 bp, Homo sapiens
aaaggaatttggacccccttgtatgtaaattatgtatcaaggatttagtcattttaggcatacatgtattctctcttggtcatccttttaagtcctcaaaragtaaacactctaaatacaagcttgattgcagatttcattttaccactgtggaaaatttaacttcttcttattagtctgttaattgggttttttaaagta

SEQ ID NO: 129068 - DNA, 201 bp, Homo sapiens
actgggattacagcataagccactgcacccagccagacaattagagatattttagaggagagtacaagggaaaactttcagagtggaaggaatggttgtcycaaggaaaaaaaatttataggatatatgagaaatagacagtggcctctatcctgaagcagagatacttaatctttgggtaatggaagaggttagagtgat

SEQ ID NO: 129069 - DNA, 201 bp, Homo sapiens
tgaatgaggattagtcatataggtgtacaattaaggtaaaattttgccattcatttttgtcatgcatagtctattggccaatgttagaagaaaaatttttmaatgagctatagtatagtaaaaaggattcacatatgtatggcaactttagcccttttttttttttttgaatcaaagtttcactcttgttgcccagctgga

SEQ ID NO: 129070 - DNA, 201 bp, Homo sapiens
ttggtgcgtgtgtacatattattattgctatattgtcttaacaaagtagattaaaatggaacagcatctaagacacgctctagagatcggagaagttttttttgtttgtttgtttgtttgtttgtttttttgaggtggaatcttgctctgtcacccaggctggagtgcaatggcacgatctcagcttactgcaacctccgc

SEQ ID NO: 129071 - DNA, 201 bp, Homo sapiens
tggtgcgtgtgtacatattattattgctatattgtcttaacaaagtagattaaaatggaacagcatctaagacacgctctagagatcggagaagttttttttgtttgtttgtttgtttgtttgtttttttgaggtggaatcttgctctgtcacccaggctggagtgcaatggcacgatctcagcttactgcaacctccgcc

SEQ ID NO: 129072 - DNA, 201 bp, Homo sapiens
ggtgcgtgtgtacatattattattgctatattgtcttaacaaagtagattaaaatggaacagcatctaagacacgctctagagatcggagaagttttttttgtttgtttgtttgtttgtttgtttttttgaggtggaatcttgctctgtcacccaggctggagtgcaatggcacgatctcagcttactgcaacctccgcct

SEQ ID NO: 129073 - DNA, 201 bp, Homo sapiens
gtgcgtgtgtacatattattattgctatattgtcttaacaaagtagattaaaatggaacagcatctaagacacgctctagagatcggagaagttttttttgtttgtttgtttgtttgtttgtttttttgaggtggaatcttgctctgtcacccaggctggagtgcaatggcacgatctcagcttactgcaacctccgcctc

SEQ ID NO: 129074 - DNA, 201 bp, Homo sapiens
tgcgtgtgtacatattattattgctatattgtcttaacaaagtagattaaaatggaacagcatctaagacacgctctagagatcggagaagttttttttgkttgtttgtttgtttgtttgtttttttgaggtggaatcttgctctgtcacccaggctggagtgcaatggcacgatctcagcttactgcaacctccgcctcc

SEQ ID NO: 129075 - DNA, 201 bp, Homo sapiens
gagccagtagtaaataaaatggaaaatttaaaaaattttttaaatcataacaagtttttttctttgaatactgaatctacatactgttctcatttaatttrcacaataattatatttgatataatataatatgaattatataaagttacctaagcagatttcctaaaactaaacaaccacttaagtgtttctacagatttc

SEQ ID NO: 129076 - DNA, 201 bp, Homo sapiens
aaagtgattctcctgcctcagcctcccgagtagctgggattacaggcgcacaccaccatgcccagctaattttttatatttttagtagagacggggtttcmccatgatggccaagctggtttcgaactcctgacctcaagtgatccgcccgcctcagcctcccagagggctaggattacaggagtgagccaccacacccag

SEQ ID NO: 129077 - DNA, 201 bp, Homo sapiens
agcttgattgcagatttcattttaccactgtggaaaatttaacttcttcttattagtctgttaattgggttttttaaagtatattttggagcaaaaatttktttgtgaaattatagcaatgtttcagtttgagtttaaaattctgggcagatgataatttgtcagatgttacagaagaatgtgttgggctccttgattctt

SEQ ID NO: 129078 - DNA, 201 bp, Homo sapiens
aactatatgttttttgttgttgatgaagtaaaattgtgaattgtccattgaaatttctataaaaactggtataaatatattctgtagtatatttaagaaadtagttaagagttaagtcctttacaacactaatttgatagtcatgaaagacattttctttacatcatctaaagatactatcttcatatcttttttaacaaa

SEQ ID NO: 129079 - DNA, 201 bp, Homo sapiens
ctcagtgtctcatctgtatttaaaagatgaaaactagctaaatcgatgtttttgctgctgttgtttttaatgaaaataatgtggtttgaacatgtaaattsaagtttttaatgtatcaagatgtccttaatcacattgtagaacatccggtcaaacatctgcaaatgcacattcatctcggagccatgcagtgtttcagat

SEQ ID NO: 129080 - DNA, 201 bp, Homo sapiens
agacgggtggatcacctgagtttgcgagttcgataccagcctgaccaatatggagaaaccctgtctctactaaaaatacagaattagctgggcatggtggygcatgcctgtaatcccagctacttgggaggctgaggcaggagaattgcttgaacccagcaggcggaggttgcagtgagccaagattgtgccattgcacac

SEQ ID NO: 129081 - DNA, 201 bp, Homo sapiens
atggcgcgatctcggctcactataacccctgcctcctgggttcaagctattttcctgcctcagcctcccaagtaactgggattgcaggcgtgtgccatcaygcctggctaattttttgtatttttagaagagacagggtttcaccatgttggcccggctgatcttgaactcctgacctcaaagtgatccacttgcctcagc

SEQ ID NO: 129082 - DNA, 201 bp, Homo sapiens
catgtatttatttttcttcactgaagcaaagatggcttaaatttgcatgtatgtgctgttcagtcatttgtggcttttttctttttaaaaatcatgtatcktgatatttaccaacagatattaaaagttgagatgtgaactgttttccctttaatttcgtcctaacaaaaagttgagccttaagtggggtaaaaatgtttc

SEQ ID NO: 129083 - DNA, 201 bp, Homo sapiens
taagggaggaggggtaatctggggcaccttattaaagacctggaaacagaggtaaggtaaggatcttggaattaatttctaggacacttggaaactactayaggacttaatctcctaagagcagtaataggagttagtgattagtgatagattagagggagcatagtactgaaaatgagaggtagcatggataagattgca

SEQ ID NO: 129084 - DNA, 201 bp, Homo sapiens
ggctggccctcaggattcccacaccctcaaccaccagaacttgacccaccactgctcctgctgtggctcaaggctgaacatcatcctcataggagactccytcccaggtttctctaaggagattgcagcaaccctggctggagtgcctggctttgaggtgtcagtagcagggttggagttggggctagggctagaagatga

SEQ ID NO: 129085 - DNA, 201 bp, Homo sapiens
ttacctgcaatgggaatttgcttaagctataactaagtactttgccttcttagtactgagctgtagtgtgttagccaggaccctctcagaattcttggaayggaatgagaaggaaaagcagtacacaaagaatatgacgtcatctctttaagggatgaggtgttttatttcttgaaatgcagctgctcttttttacttttt

SEQ ID NO: 129086 - DNA, 201 bp, Homo sapiens
tgtcagtagcagggttggagttggggctagggctagaagatgagctgcgcatggagctattgggcctggaagggctatacatgctgagagacccagtgccytgctacccgatcctgctctggagtattcatcaccatccctcttcttggccctgtcccccattactgtccatttcctcccttaccccagctagtagagacg

SEQ ID NO: 129087 - DNA, 201 bp, Homo sapiens
cgaaccactgaattgagctaagaaacagtttctcagaaaaacgtggaatggctttcaaaatgttaggccaggttattacatcttttccttgagtagaaaascaaaggttggaaagactaaaataaggcattctgtgtttttttcttttggagtgccatgttaagaaattaactttttacagttatcctactgcctgtcact

SEQ ID NO: 129088 - DNA, 201 bp, Homo sapiens
aaatgcagctgctcttttttactttttctttgctcttacttttggcctattttttctgtcctggcatttgccttctctttttcacccttaggattctaagwgccatttcagtattcagaatctcttaactacagtttgcaatttaggacttaaaaagaggtaagcaagggataaataggcacagcacagaggcagtgaaat

SEQ ID NO: 129089 - DNA, 201 bp, Homo sapiens
caactgcctggaggtcagaacctgttggaaagttggggatataaacgggaacctgggaggcagggcttgtccggattcctagagatgggcattgccagctyctcctcaccaccttttcacctctcaatggaggacagtgccacagtgggtattatttttaattaaatattttaataaaaaattgagaaaactccttgcagg

SEQ ID NO: 129090 - DNA, 201 bp, Homo sapiens
aacgaaccactgaattgagctaagaaacagtttctcagaaaaacgtggaatggctttcaaaatgttaggccaggttattacatcttttccttgagtagaamagcaaaggttggaaagactaaaataaggcattctgtgtttttttcttttggagtgccatgttaagaaattaactttttacagttatcctactgcctgtca

SEQ ID NO: 129091 - DNA, 201 bp, Homo sapiens
ttggaagtaaaaatcattgttcataaaaacttgtgttacatgtaaatgtgagtgacaattattatattgatactacattacaaatatattagaaatatgcyggattaaattgtatgaatctggttctatttaagtgttataactcagtgtctcatctgtatttaaaagatgaaaactagctaaatcgatgtttttgctgct

SEQ ID NO: 129092 - DNA, 201 bp, Homo sapiens
ttaaaaagtcctttgaaacttttcaacttcagtgttgagaattcttattccaattattattttaatctctgaaataattcttaaactctgggtgactcatwtttatagaactgatattttaattgccacaggatctcgctgtgtcacccatgctggagtgcagtggcatgatcacagctaactgtagcttcaatctcctga

SEQ ID NO: 129093 - DNA, 201 bp, Homo sapiens
ccatgtgagcagctggaggctgggaagtccagcaggaggaaacagggagtctcatttaactattgggatgttaaggagttaccagactgtgattttattayagagggagtctcattatccacatcatgccaggaaatcactaatggagtaatcccttatcaagagaagagtaatagaaattcagcatataatccgcgcgcg

SEQ ID NO: 129094 - DNA, 201 bp, Homo sapiens
acctgagcccaggagtttaaggctgcagtgagtcatgattgagccactgtactccagcttggtgacagagcaacatcgtgtctccaaaaaaaaaaaaaatattttgataatttcatataaaatttaatttagcagtaatttttctcctaactgaaatgaactctgaataataaatccaggattggtaggattttttttttt

SEQ ID NO: 129095 - DNA, 201 bp, Homo sapiens
tgcctcacattaataattttatcagtagccagtttctaaattttgcttttttacctcatgatggtttaggtgtgggatttgatggaggcaatgataaagaytgggaagccaatgcctgcaaaatccagcttattaagaagaaaggaaaagttaaggcactggatgaagaagttcacagtaacgtacttaatttgatttttg

SEQ ID NO: 129096 - DNA, 201 bp, Homo sapiens
tgttgccttttgatatcaattttggcagaaatggaggatggacggagagagatcagagagaaagtgggtggactaattgggagatcgctgcagtagtccasccgaggagctgatgggagcttgaatttgtctggtggtggacatagaaactaagaatatttggaagttaaaatttcaggacttggtaatggatagaatgag

SEQ ID NO: 129097 - DNA, 201 bp, Homo sapiens
atgctagtaacagagtgatttacccttggtgggtaaatttctttaagggaatgatgtttgaactgagagttaaggagagattaggagttaattaggttaasaggtagagggaggaacattcattctttgcaaatggctcagcctgtgagagtttaggatggctttgagtgtggccagaatagagagagtgagaggaagctt

SEQ ID NO: 129098 - DNA, 201 bp, Homo sapiens
ttttctctaggttttgtagtggcattcagtggaatttatagcattaagttactctattgtgatggaaatatgtcattttgtgtatttataaaaagttgttygcagctgggtgcagtggtgtgtgcctatagttccagctcctcggaagctggggcaggaggatcacttgagaccaggaatttgaggccacagtgccctaga

SEQ ID NO: 129099 - DNA, 201 bp, Homo sapiens
ctggtctcaaactcctgacctcatgatccgcccacctcggcctcccaaagtgctgggattacaggcctgagccaccacacctggttgcatttatttttttwaaatgctgagctctctttttatgtgtttttaaattcacttttttgttttgtttttgagacaaagtcatgctctgtcacccaggctggagtgcaatggcac

SEQ ID NO: 129100 - DNA, 201 bp, Homo sapiens
attttttgaaacatatattctagacagattcctagataattgtaccatcactacttcttgctaggatatttaggcctgatcatgaagtcctaagtgaggcrccctaagatattatggtaagagagatatttttaatctgaaaacagggtgactaaggagaaggtgctacactttcatatattggcattctgtgcacaattg

SEQ ID NO: 129101 - DNA, 201 bp, Homo sapiens
tttttttttttgagacgaagtctcgctctgttgctcaggctgtagtgcagtggcgtgatctcggctcactgcaacctcggcctcccgggttcaagcgagtstcttgcctcagcctcctgagtagctgggattacaggcacgtgccaccacacccagcaaatttttctatttttagtagagacggggtttcaggctgttgct

SEQ ID NO: 129102 - DNA, 201 bp, Homo sapiens
tacctcttttagaatttatcgttattcacaatggaatcatcaccaactacaaagacttgaaaaagtttttggtaagtaaggtgacctcaaaagaccccagyctttgagaatacttctaacgagagcactggggtcggttgttgggatgtgcaacaaacaccatatgtgtgtcatcaattaatttcttggacaattccaagg

SEQ ID NO: 129103 - DNA, 201 bp, Homo sapiens
taataacaatcagatttactacacaggaatttaaagaagtctgtccgtgaggcttcatatggattatgcagtgcaatttttgcacattcgtaagctatagmcctgcctttgcccaccagtgatgttgtgtatgtgtgtgattttctttcctaggggcggcctgtggtaatttgtgataaggaggatactgagaccattaag

SEQ ID NO: 129104 - DNA, 201 bp, Homo sapiens
ttttttggccggacgcagtggctcacacctgtaatcccagcactttgggaggccgaggcaggttgatcatgaggtcaagagatcgagaccatcctggccarcatggtgaaaccccgtctttactaaaaatacaaaaattagctgggagtggtggcgtgcgcctgtagtcccaactacttgggaggctgaggcaggagaatc

SEQ ID NO: 129105 - DNA, 201 bp, Homo sapiens
tcaagcatctgcttcagttatggagttattttattccaagtatattccattagtaagaaagcttacacttgtgaagtgcatgctgatttgggggtagagawtctatgcttatacagctactgtgtgtgctcttagagcaattactgaagagtggcggaaagttgatattaggcttttgtcattaccttacttaagaactgt

SEQ ID NO: 129106 - DNA, 201 bp, Homo sapiens
cttctgttttcaaataagctagattgtatcctcctttagtggactctagctgatgcagtcacagtggtgggaactagttcagattcagtttttttcacacttttttttttttcttttgagatggagtctcgctctgtctcccaggctggagtgcagcagtgcgatctcggctcactgcaacctccgcctcctgggttcaag

SEQ ID NO: 129107 - DNA, 201 bp, Homo sapiens
cacctgagcccaggagtttaaggctgcagtgagtcatgattgagccactgtactccagcttggtgacagagcaacatcgtgtctccaaaaaaaaaaaaaawattttgataatttcatataaaatttaatttagcagtaatttttctcctaactgaaatgaactctgaataataaatccaggattggtaggatttttttttt

SEQ ID NO: 129108 - DNA, 201 bp, Homo sapiens
gggaagaagaaagatgtaaacacgttagtggtggcttagatctattactgaatgagccctgtattcagaaatagaaaatttgattaaacgcttcatctaaygctaagacaatttgggggcagaaattatatactctgttagaattctctaatgtaagattttttgttgttttgtggatgccaagactactgtagtaaacaa

SEQ ID NO: 129109 - DNA, 201 bp, Homo sapiens
gcagtaggatataaataactcccacatgcttaacgttccagtgatggaacactaggcataaatgatttaagtatagcctacttaatatgcttttcaaaatkttaattttctctaggttttgtagtggcattcagtggaatttatagcattaagttactctattgtgatggaaatatgtcattttgtgtatttataaaaagt

SEQ ID NO: 129110 - DNA, 201 bp, Homo sapiens
tgtgcctatagttccagctcctcggaagctggggcaggaggatcacttgagaccaggaatttgaggccacagtgccctagaatcatgcctctgaatagctrctacactccagcctgggcaacaaaccaagaccccatctttaaccaaaaaaaaaaaaaaaaaaaaaaaagttgccccaactaaaataataaactattaatt

SEQ ID NO: 129111 - DNA, 201 bp, Homo sapiens
aaaaaaaaaggaatgtatacatagatagttgtctaaagagactgatagtaaaatgttagccatgcttatctcaagtggtaggattttgatttttttttttwaaatattttaatctgggttgtttttattttctaacgtgtcatttttgtaatcagaaaaagcaaaaactatacattgaatccaaagaagtccgatgaaaga

SEQ ID NO: 129112 - DNA, 201 bp, Homo sapiens
agtgggaggattgcttcagctcaggagactagcctgggcaacatagcgagactctctctacagaaaaataaaaaaattagttgagtgtggtgtaagcagckgtaatcccagctgcttggaaggctgatgtggaagaatcacctgagcccaggagtttaaggctgcagtgagtcatgattgagccactgtactccagcttgg

SEQ ID NO: 129113 - DNA, 201 bp, Homo sapiens
gtatctatatcctgaataactgactacactctaatcattcttaactcatttatgccagaggttgcaaaatttttttgtgaaaaatcatcagaccttggtgmtgaccttgagcagtaggatataaataactcccacatgcttaacgttccagtgatggaacactaggcataaatgatttaagtatagcctacttaatatgct

SEQ ID NO: 129114 - DNA, 201 bp, Homo sapiens
agcttcaggtgaaaatacacagtccttgttcattgccatgtcatagaccacaagtagaatgagtagaaatttagagactggagagctctggggtttgggtwtctgtgttaggttcaggaatgttctgggtgatggggcaggacttttactcaacttgtagagtattagtatactgtgagaggtaatcattaatggcatatg

SEQ ID NO: 129115 - DNA, 201 bp, Homo sapiens
gcacattactgcaaagaaaggtagtctgcttttttttttaaatcagattttattctttaaattgttcttttagaagctgaaattcagtatcaaaaatgtgtattgtcagtgcagaagcataggtgtatgagggtcttttattccaataaaagaccaatatttgcccacgtagtttccttagaaagagacagtttatgtgct

SEQ ID NO: 129116 - DNA, 201 bp, Homo sapiens
aagtcagttcctcaactcctttgtttttaaaattctctccttccttagcttccttgacagcacatcttattctcttcctaagatgctaagattacttcttytctgtttgctttggaggctcctttcttctacttacagctcaaatattaatgttcttcaagattctttttttttttgaggtgagtcttgctctgtcaccca

SEQ ID NO: 129117 - DNA, 201 bp, Homo sapiens
acagcctgggcaacatggtgagacctggtctttacaaaaatttttttggccggacgcagtggctcacacctgtaatcccagcactttgggaggccgaggcrggttgatcatgaggtcaagagatcgagaccatcctggccaacatggtgaaaccccgtctttactaaaaatacaaaaattagctgggagtggtggcgtgcg

SEQ ID NO: 129118 - DNA, 201 bp, Homo sapiens
ggcacattactgcaaagaaaggtagtctgcttttttttttaaatcagattttattctttaaattgttcttttagaagctgaaattcagtatcaaaaatgtgtattgtcagtgcagaagcataggtgtatgagggtcttttattccaataaaagaccaatatttgcccacgtagtttccttagaaagagacagtttatgtgc

SEQ ID NO: 129119 - DNA, 201 bp, Homo sapiens; identical to SEQ ID NO: 21946

SEQ ID NO: 129120 - DNA, 201 bp, Homo sapiens
atgttgcctgggctggtctcaaactcctggcctcaagtgatcctcctgccttggcctttcaaagtgctgggattacaggcaagccactgattccagcctcwtctatcttaaataaattacacataaacataactttctggcaactttatgttctaccctagctccttccctcaactatgtcagaggttcctaagaccatcc

SEQ ID NO: 129121 - DNA, 201 bp, Homo sapiens
gggaatggggacggcaaagactgagaggagagtgggtttatgttactctacagagcacctttctgggcaccagaggggaaataaacgtaactgagataatrtttttcccagacaggtttattgagacataattagatataataaaattcaccattcctagtgtataactctaagtttgacaaacctctacaacatagtcat

SEQ ID NO: 129122 - DNA, 201 bp, Homo sapiens; identical to SEQ ID NO: 21948

SEQ ID NO: 129123 - DNA, 201 bp, Homo sapiens
ggttttatagtataactaactaagataaaaaagaaggtggactggctgggcgtggtggctgacacctgtaatcccagcactttgggaggccaaggtgggtrgattacttgaggtcaggagtccgagacgagcctagccaacatggtgaaaccctctctactaaaaatagaaaaaaattagctgggcgtggtggctcgcggc

SEQ ID NO: 129124 - DNA, 201 bp, Homo sapiens
aaaaaaaaaaggaatgtatacatagatagttgtctaaagagactgatagtaaaatgttagccatgcttatctcaagtggtaggattttgattttttttttttaaatattttaatctgggttgtttttattttctaacgtgtcatttttgtaatcagaaaaagcaaaaactatacattgaatccaaagaagtccgatgaaag

SEQ ID NO: 129125 - DNA, 201 bp, Homo sapiens
ggtacaggccactacccatgcctggctaatttttgtatttttttgtagagacggagttttaccatgttgcctaggccagtctcgaactcttgggctcaaaygatctgcctgctttggcctcccaaagtgctggggttacaggcataaaaactcttgagtgagatttttatttcttgggtatttcgatattgctaacactat

SEQ ID NO: 129126 - DNA, 201 bp, Homo sapiens
tgatattttcattttatgatattcacatatttagtaaattttgtgtacaagaataccaggcagagtgttttacccatggaaacaggtttcagattactttrtttttactgttagagtctcaagtttagaaatgctaacacttaaatcagtttttttctcactatacttgaagattgttaatattttgatatcttcctagct

SEQ ID NO: 129127 - DNA, 201 bp, Homo sapiens
cttttgttgtctaagggagtgggtaataggtaaaattctcttatccttgaagctgtggcttgtagctatttagtcaataagatctttctacgtttgctccratgtattaaaaaaatacccatactgattgatagcacagaggaatagaaacactggtcttttgttatttgctgccaatatattgttattttatttgtttgg

SEQ ID NO: 129128 - DNA, 201 bp, Homo sapiens
aaggtctgtggaaaacactgtaggcagaggtacacaaacaggcttggtctagtgcagtaacagcaagaaggccagtctggctggtgtggcctgagtgagargggatgtgctaggtcagagtaagcaggagacaggtcttatgggacttgaaggccaaagtaagtagttcggatttgattataaattatttgggaagctagt

SEQ ID NO: 129129 - DNA, 201 bp, Homo sapiens
gccaatgcctgcaaaatccagcttattaagaagaaaggaaaagttaaggcactggatgaagaagttcacagtaacgtacttaatttgatttttgtcccctytccccttctcttccttttcccctccccattctcctctaagttactccctccccccatattttgggaccaattttaatgataatggtctgtaacattgaag

SEQ ID NO: 129130 - DNA, 201 bp, Homo sapiens
gattcttttttcttatttttattatttatttttgagatagggtctcactctgtcaccccagctggagtgtagtggtgcggtcatagctcactacagtctcraactctgggctcaggcaatcctccctccgtagcctcctcagtagctaggactatagctgtgtgccaccatgcccagctaatttttaaaaagtttttgtag

SEQ ID NO: 129131 - DNA, 201 bp, Homo sapiens
ttgcctcagattcttttttcttatttttattatttatttttgagatagggtctcactctgtcaccccagctggagtgtagtggtgcggtcatagctcactrcagtctcgaactctgggctcaggcaatcctccctccgtagcctcctcagtagctaggactatagctgtgtgccaccatgcccagctaatttttaaaaagt

SEQ ID NO: 129132 - DNA, 201 bp, Homo sapiens
cttggcagtaggattgtgagttttgaaatacatacaattctgtatcctaagaaactaattgtcttttagttcaagctgtcatcaataaaatttatagtacrttttgagcctgtgtgtcagggattatacagaactgaatgcgttacatttgtctcatttaattgtcattataatcttgtaagtgtcatgtgcatttaacag

SEQ ID NO: 129133 - DNA, 201 bp, Homo sapiens
taatggctagcgagaacatctttggaaattctcaaattacctttcttactacactgtttgcagaatgaatgtagaaatgatcctgttagctttctgaatgwtctgtggttgaatgtgtttttgcttaaataaagcttttggtatttgtttaaattacacttcttgagaagtggaaattttaggatcatctttgctttgttt

SEQ ID NO: 129134 - DNA, 201 bp, Homo sapiens
gaggaacattcattctttgcaaatggctcagcctgtgagagtttaggatggctttgagtgtggccagaatagagagagtgagaggaagcttggggggagatgaagctggagaaggaggtatagggattacggtaaggcactttgttgtctctctgagagccaaagggaaactgtcaaatggtttgttgagtgaaggagaaa

SEQ ID NO: 129135 - DNA, 201 bp, Homo sapiens
atgttacataattctttatgaattagtaaaaatgaacaccttttgtgttcaaagagctggattttcaatgacagagaaggaagagagatcctgacaagccrtattactttaaagttttataaatttattaagtggatgttttgtattttatttaaaacaagtaatattgttgaaagtgtggtcaatttgtttttgctccta

SEQ ID NO: 129136 - DNA, 201 bp, Homo sapiens
attaatttatacatacttttgatttaaaaaaccggttaatattaaggaattacttgtcttttacctggaaaataaatattatattaaaaaaacatataatgtagcacttttacctgccacgcactctttgatagttgctacttcactgtacactttttgtctgttcttattggcttattgcatggaaataaggtgatctac

SEQ ID NO: 129137 - DNA, 201 bp, Homo sapiens
ggcccacatttgtattaaagtattgttttagaaaagatttgtgtgctgtgtattgtcttttaatgacctggttaaaatacttaattgatagttatctgtasgtgtttaatctttctcaaagatcagtgacccataggtgaagagtgcaaagtttgatttacaattgggttattcgtttattcatattacagatacttcatg

SEQ ID NO: 129138 - DNA, 201 bp, Homo sapiens
taaaaggaaggaaagttattctttctaataattctagcatatcttggcaaaagctgatatttaaagataaactggcattgcagatgacttgacgaatacasatttattttaatgttacataattctttatgaattagtaaaaatgaacaccttttgtgttcaaagagctggattttcaatgacagagaaggaagagagatc

SEQ ID NO: 129139 - DNA, 201 bp, Homo sapiens
tcaaagatcagtgacccataggtgaagagtgcaaagtttgatttacaattgggttattcgtttattcatattacagatacttcatgaaggaacagcagtarcaacaaaaaccccggactcattcttctgaattaaatgggtgcagattggtctggagactcttctgctgccctctagtgtttatatcatgagtagccattg

SEQ ID NO: 129140 - DNA, 201 bp, Homo sapiens
aacttcagttcatttatgcagaaggaaatatttgagcagccagagtctgtcgtgaacacaatgagaggaagagtcaactttgatgactatactggtaattrcatatgaattattttattatttcagtgtctctgacagtaggaggtgccattaacaacctgaaagttcattgcccttaatagccttgtagaacaactacag

SEQ ID NO: 129141 - DNA, 201 bp, Homo sapiens
tgtctcattcacttgttgtaactgcacatttcaagtatgaagttaattaaaagtgacttttactgttatttttttccacagagtaaaatatgttcacccartcttttaggcagtcatgtctattgcatgaacttttgttatattttatttaccaagattatattaaaggaaacttttagttgtgtacaaattcttttattt

SEQ ID NO: 129142 - DNA, 201 bp, Homo sapiens
taatttttgtgggtatatagtaggtgtgtaaacttactgggtacatgagatgtcttgatacagacgtacaatgtgttcctaagtcttttttttttttttttgagatggagtctcgctctgttgcccaggctggagtgcagtggcatgatctcagctcactgcaacctctgcctcctgggttcaagcgaatatcctgcctct

SEQ ID NO: 129143 - DNA, 201 bp, Homo sapiens
gcatgagccaccacatctggacaaatcagctacttttcaagataaaggaacattggcctatgccgatttcccagtagccccatactttcatagcattgctyggttcttaaatacctatttgattttggaggcactccatagttgcagtttctattgtgagacgtgtgtacactcaccagagaccaaagaaattgcagtcat

SEQ ID NO: 129144 - DNA, 201 bp, Homo sapiens
tcatattacagatacttcatgaaggaacagcagtagcaacaaaaaccccggactcattcttctgaattaaatgggtgcagattggtctggagactcttctrctgccctctagtgtttatatcatgagtagccattgaaagttggaagctgcacattgctgtgccgctaccactcttaccttagcaatatccttaagcagca

SEQ ID NO: 129145 - DNA, 201 bp, Homo sapiens
agcctacatcatgccactccactccagcctgggtgacagagcaagactccgtctcaaaaaaaaaaaagcttgtctcattcacttgttgtaactgcacattkcaagtatgaagttaattaaaagtgacttttactgttatttttttccacagagtaaaatatgttcacccaatcttttaggcagtcatgtctattgcatgaa

SEQ ID NO: 129146 - DNA, 201 bp, Homo sapiens
agttttagtagagacagggtttcaccatgttggtaaggctggtcttggactcctgaccttgtgtcccacccgcctctgcctcccgaagtgctgggattacrggcatgagccaccacatctggacaaatcagctacttttcaagataaaggaacattggcctatgccgatttcccagtagccccatactttcatagcattgc

SEQ ID NO: 129147 - DNA, 201 bp, Homo sapiens
agcaggaactgtgctatttttttatttttggcttttatttctcatataactattcaagttgaataattttgagaaactgattgatttattgattccccccsaccctccatttaaaattctacttacttcattcaggtttaatgtcatgaaaatgaaaattaatccaaaatcagtgtgtctaaaaactatgcatatatgcac

SEQ ID NO: 129148 - DNA, 201 bp, Homo sapiens
ttaaaattctacttacttcattcaggtttaatgtcatgaaaatgaaaattaatccaaaatcagtgtgtctaaaaactatgcatatatgcacacatccataygcaccacacgtggacatgtacacagtacacacgatggaggattagttattcccttgcttcttgctcatccgagtgttcttctcaaccaataacttagcac

SEQ ID NO: 129149 - DNA, 201 bp, Homo sapiens
gtgttagaagatacttgcaggtatttgaaatgatggctttatacttggcactctgccctttgcagagatgactaaaataagagagttgccttcaagaaatygctgcctgatcagaggaaagaaaatgaatgcacatgcaacagcttcaggtgaaaatacacagtccttgttcattgccatgtcatagaccacaagtagaat

SEQ ID NO: 129150 - DNA, 201 bp, Homo sapiens
tgcttgaacccgggaggcggaggttacggtgagccgagatggcaccactgcactccagcctggcgacagagcgagactccgtctcaaaaaaaaaaaaaaaaggaatgtatacatagatagttgtctaaagagactgatagtaaaatgttagccatgcttatctcaagtggtaggattttgattttttttttttaaatattt

SEQ ID NO: 129151 - DNA, 201 bp, Homo sapiens
atagtgctgacctgcatgagtgctttcttagggctgttcaattgaactttctccagtgttggaagacagtgtatctgggctattcagtatagtagccactktccacatgtggttgttgagctagtatgactgaggaactgaattttaaattttatttaattttaattaaattgaaatagccacatacagctaatggctatt

SEQ ID NO: 129152 - DNA, 201 bp, Homo sapiens; identical to SEQ ID NO: 21941

SEQ ID NO: 129153 - DNA, 201 bp, Homo sapiens; identical to SEQ ID NO: 21942
  misc_feature (1)...(201): n = A,T,C or G

SEQ ID NO: 129154 - DNA, 201 bp, Homo sapiens
tcttgacaaattaagtagaggtgtcataattctgaaatacaagaattaaaaggatattagctttgcaaaaagaccctactttatcctgacttaaaggaagmgtaagaaaacccaagttgaagaaaggagagtttcttggtttataaattttgtctctaacagtgggtgccacatatgatataccgtgattagagagtgata

SEQ ID NO: 129155 - DNA, 201 bp, Homo sapiens
ttttgagacagagtctcactgtgtcgcccagcctggagtgcagtggcgcaatctcggcccacttcaccctctgccccacctcctgggctcaagtgattctyctgcctcagcctcctgagtagctgggacaggcacgcgtcaccatgcctggctaggaattttgtatttttaatggagacggggtttcaccatgttggccag

SEQ ID NO: 129156 - DNA, 201 bp, Homo sapiens
atcaagatacagaacaatttcatcactcaataaggtccctcaacctgccctctgtcatcaacccttgtctcattcccagcccctggcaaacactaatatgwtatttttctataatgttactttttcttggatgtcatcttacatttatttttcagtttggcatctttgctgttaaatatgaatgggaaaagttactttgtt

SEQ ID NO: 129157 - DNA, 201 bp, Homo sapiens; identical to SEQ ID NO: 21943

SEQ ID NO: 129158 - DNA, 201 bp, Homo sapiens
tttggcctggaactgcttctttggggagagttgaaaccgttgtttcaggttattttggattttaatgtgtgagtttctcttttttagggcataataatttrtttgagaaaattgcaatgtattgatcatggtgatcagcatgtatgttatggctttcctgttgggtatcaacaatgtgccatttttgtatactgaaatatt

SEQ ID NO: 129159 - DNA, 201 bp, Homo sapiens
aaggtgacctcaaaagaccccagtctttgagaatacttctaacgagagcactggggtcggttgttgggatgtgcaacaaacaccatatgtgtgtcatcaaktaatttcttggacaattccaagggcacggtggtttattggatttttctttgctaacagtggaacaattgtgttttttaatatgaaaaggaaatgattagc

SEQ ID NO: 129160 - DNA, 201 bp, Homo sapiens
tgggattacaggtaactgccaccacgcctggccaatttttgtatttttagtagagactgggtgtcaccttgttggccagtctggtctcgaactcctgaccwcgtgatccacccgtcttggcctcccaaagtgctgggattacaggcgtaagccaccgcgcccagccaaaagttgattattgatcctaatccctgggcccag

SEQ ID NO: 129161 - DNA, 201 bp, Homo sapiens
ggaatcgttttcagcaatggaaagagatggaaggagatccggcgtttctccctcatgacgctgcggaattttgggatggggaagaggagcattgaggaccrtgttcaagaggaagcccgctgccttgtggaggagttgagaaaaaccaagggtgggtgaacatactctctatcactgacctttctggactgctctcctctc

SEQ ID NO: 129162 - DNA, 201 bp, Homo sapiens
aggttgcaccagtgtccaggagacagttaacctcctggccctcaatggtcaagcatacccggggttctgtgagggtgatggcatgggctggggcttgcccyaggcaccctcagtcctgctgctggatcatctggttagtggcttctgactcagaggaccttcatcccctggggcagtggcccttccagtggattcccttga

SEQ ID NO: 129163 - DNA, 201 bp, Homo sapiens
gcatattgtatctatacctttattaaatgcttttaatttaataaattattgttttctcttagatatgcaataattttcccactatcattgattatttcccrggaacccataacaaattacttaaaaaccttgcttttatggaaagtgatattttggagaaagtaaaagaacaccaagaatcgatggacatcaacaaccctc

SEQ ID NO: 129164 - DNA, 201 bp, Homo sapiens
tttccccactcagtatggtactagtagtaggtctgtcatatagctttttttatgttgaggtatgttccttctatctcaagtgtttttttttcttttttttwattatactttaagatttagggtacatgtgcacattgtgcaggttagttacatatgtatacatgtgccatgctggtgcgctgcacccaaatgtccaacgat

SEQ ID NO: 129165 - DNA, 201 bp, Homo sapiens
ataaggggcatggacgagggggcagcttacttctacttggacaatcttttttaaagtgtccttgtagactgcactggaagcaagccctattagacatatamttttcccaacttttcccttttccagagcctccaatgtccacttgcctggtatgcttcctcaatgcctcccttagtctctccagaaaggcagtaggatttt

SEQ ID NO: 129166 - DNA, 201 bp, Homo sapiens
ctataaactctgttaaggggttaaggattagggtgattcttataatcccatagccacctaattttaggagtactgctgtggagactattggcccagcaatygggacctctacatgggcttttgggagttctaggtggattccatagagaggtgcttttactataaatgctatgatgcatgctaatcataaaagactgttgg

SEQ ID NO: 129167 - DNA, 201 bp, Homo sapiens
ctatcacaagaacagcatgggaacaccctgcccccatgattaaattatgtcccattgagtccctcccatgacatgtgggaattatgggagccaaagtccamgatgagatttgagtggggacacagtctaaacatatcagtgtatatttaccacattttccttatacagtctactgttgatgggcacttaagttgattccat

SEQ ID NO: 129168 - DNA, 201 bp, Homo sapiens
cattgctcacactgggagctgtagactggagctcttcctattcggccaccttggaacctcccagtatggccattttctcaatatttattattcctatccawgagcatggaatattttttccatttctttgtgtcctcttttattttgttgagcagtggttggtagttctccttgaagaggtccttcacatctcttgtatgt

SEQ ID NO: 129169 - DNA, 201 bp, Homo sapiens
gcaggaagagacaacataagttggcctgggattgcatgttggttttattattaaaaggccattttgaacagcaagtgtattgttaaagataatttttctcrttctcaaaacttcaggttcaaatgctggagtagggaaaatggaaactcttcttattgaaggataaatggtaatcctagaaatgtagtgaggctgcctgaa

SEQ ID NO: 129170 - DNA, 201 bp, Homo sapiens
ctctctcaccgctcctattcaatatttttttctagtactatactttacagtttctatgttggtaagtatacaatgtgagtaattttgaatttactgtcatsaaatatgctgttaaataatttgtcagataattgcatcaaatcattcctaggaaaagcaaaaccaacagtctgaattcactattgaaaacttggtaatcac

SEQ ID NO: 129171 - DNA, 201 bp, Homo sapiens
tggtaattattattttccactgccaactctactcacctatgaagttttacaatgaatcagtttatcagcttggataccaaattacctcatttttaaattcwgttttccaaatgaagtgaaagactgaaaatcagatttatctgtgaatgatacacacacactcaacagacttccagctgttcaatgccttgctattcattc

SEQ ID NO: 129172 - DNA, 201 bp, Homo sapiens
atgacataattctgtgaaatacacaaatgtctatttataaaataatttatttaactagattttaattattagtaataactgtaatttttattccttaagtrtaatttggctctgtttcattttgcttatctctttccaatcatatttatgaaattttggcttagaaatttatggtaattattattttccactgccaactct

SEQ ID NO: 129173 - DNA, 201 bp, Homo sapiens
ccctgtctttagtctggtggccacattggtcacttttttttttgagacggagtctcgctctgtcgcccaggccggactgcggactgcagtggcgcaacctyggctcgctgcaagctccgcttcctgggttcatgccattctcctgcctcagcctcccgagtagctgggactacaggcgcccgccaccgcgcccggctaatt

SEQ ID NO: 129174 - DNA, 201 bp, Homo sapiens
acaaaaacaagcaatgggaaaaagattccctatttaataaatggtgttggacaaactgtctagccatatgcagaaaacagaaactggatcccttcctttcrtcttataaaaaaattaactcaagatggattgaagacttaaacataaaacctaaaactataaaaaccctagagaaaaacccaggtaataccattcaggaca

SEQ ID NO: 129175 - DNA, 201 bp, Homo sapiens
gtcaccagagaatacttgacaagtggacatggtggaaatggccctatcacacccctagggagcatgaaccaaatggcatgtgcttttatttaattggactrtgtttgtatggtcagcctcactgacttgtctagggtttcttttaggcccatgcttgccattctggccagtaatgacattctacagtttttattgcttagg

SEQ ID NO: 129176 - DNA, 201 bp, Homo sapiens
atttgcagttctctgatggccaatgatgatgaacattttttcatgtgtcttttggctgcataaatgtcttcttttgagaagtgtctgttcatatccttcasccacactttgatggggttttttttcttgtaaatttgtttgatttctttgtagattcttgatattaggcctttgtcagatgagtagattgcaaaaattttc

SEQ ID NO: 129177 - DNA, 201 bp, Homo sapiens
ggttggttccaagtctttgctattgtgaataatgccgcaataaacatacgtgtgcatgtgtctttatagcagcatgatttatagtcctttgggtatatacycagtaatgggatggctgggtcaaatggtatttccagttctagatccctgaggaatcgccacactgacttccacaatggttgaactagtttacagtcccac

SEQ ID NO: 129178 - DNA, 201 bp, Homo sapiens
tgtcttctgctagcttttgaatatatttgctcttgcttctctagttcttttaattgtgatgttagggtgtcaaatttagacctttcctgctttctcctgtkggtatttagtgctataaatttccatctacacactgctttaaatgtgtcccagaaattctggtgtgttgtgtctttgttctcattgatttcaaagaacatc

SEQ ID NO: 129179 - DNA, 201 bp, Homo sapiens
gactgcagtggcgcaaccttggctcgctgcaagctccgcttcctgggttcatgccattctcctgcctcagcctcccgagtagctgggactacaggcgcccrccaccgcgcccggctaattttttgtatttttagtagagacggggtttcaccttgttagccaggatggtctcgatctgctgacctcatgatccacccgcct

SEQ ID NO: 129180 - DNA, 201 bp, Homo sapiens
tctctgcgtcctcaccagcgttggctgtcttttgtctttttgatgatagcaattctaactggagtgagctgatatctcattgtggctttgatttgaatttycttgctgatataatcataagcattttccatatacctattggccacttgtatgtctcttttgggagacgcctgttcagtttatttacccatattttaattg

SEQ ID NO: 129181 - DNA, 201 bp, Homo sapiens
tttaacagaaaatgtctttatgtcttctcatttgtgttttgagaatgaaagaggaaatagaagaagtggatctagagatcttctgcttatatattttttttgccaaaaaatatgctgtgtgagtcagctaactgcagagtctgacaaatggaatttttaagcaagcatggaataagggggtaggaaataaagtttgggcca

SEQ ID NO: 129182 - DNA, 201 bp, Homo sapiens
attgtatgcatgaatatccagtaagcatcatagaaaatgtaaaattaaattgttaaataattagaatacatagaagaaattgtttagataaatataatctrtctgaacaataaggatgtcaggataggaaaagctctgttctgcagcttccagtgagatcagcacaggaggaacttaaatttaaaagaaaataaaaaacat

SEQ ID NO: 129183 - DNA, 201 bp, Homo sapiens
aagctatttggatcttatcccataggacagacagggaagccatttaaagttttaaagtgagggggtaacatgtttagacatgtgattctgaaaatacttarcgggaaaaaaatctttggctgcatactgagccagaaatacaaagggaaatgccgaatgtgagcctcctcccctaagcccttctcagttcaacccactgga

SEQ ID NO: 129184 - DNA, 201 bp, Homo sapiens
caacacagaccaacaagtattgaaatccctttgacttaggcatatgggtgaaatctaactgccactcctctccaggatagtgacctattctttgttccccmcaaaggggccctatgatggaccaagggattattcttttggcacacctcagaggctttgactacctgtcggattgtccagaggagatttggccctgtaaat

SEQ ID NO: 129185 - DNA, 201 bp, Homo sapiens
gcctcttgactgttttatttgccttcttgaccttccctgaggattgtggccttcaggtgctgtgaaggtgatattgtatccctagtgccctggaaattccmtaagttattatggctttaaaagccagaccattgtcactctgtaagctttggggaagcccaaatctaggaattatttcatgaattaggactttaatcactt

SEQ ID NO: 129186 - DNA, 201 bp, Homo sapiens
aggagataaaatttgacctatgtcctgactgtggtaatagaaaagttcatcttgttcaaaaggagaagcatgatataaaacttgaaacctagtgtgttggrgactgatgatgagtggctatgcctagagttgagagtaggggaggtgaagagtgtaaaatgtgatacggatcatcagactggaaacagaatgtgagggtcc

SEQ ID NO: 129187 - DNA, 201 bp, Homo sapiens
atattgtttagggcttctgtgtttacattcacaaggatttagtttgtaattttctttctcagaattttcaagatttttgatatcaagattaggccagccttataaaactaagtgagaaatgtttcctaatgtgagtctgtttttactgcctccccgtctccacttttcttcttgtgatcacttagttgtatctttgaaatg

SEQ ID NO: 129188 - DNA, 201 bp, Homo sapiens
ggacagagccctcctgacttattcactgcctacaaggcctcatcactttagtaatgttgcactgggtattatgtttcaacatatgaaatggggggaggaayattcagaccatagcacatttttcaatggaagcatgaacatgatgttgaggaatcccagggaaacgaacattttcttgctcagtgagatgagaaagagagt

SEQ ID NO: 129189 - DNA, 201 bp, Homo sapiens
tgagagtcttgtagagataattaggagctagtggaaggggaggggtgattgtatgaggtatccaaggaagcaggagggatagataggcaaagaataaatargaaggtaaagatggtgctctggaagatgagatcattttatccaggccgagtaaaaggtaggagtaaattgctgtcagaaggaaggaagacagaaaaaagg

SEQ ID NO: 129190 - DNA, 201 bp, Homo sapiens
tgacaaaatccctcagcatttgcttgtctgtaaaggatgttatttctcctttgcctatgaagcttaatttagctggatatgaaattctgggttgaaaattyttttctttaagaatgttgaatattggcccccactctcctctggcttgtcgagcttctccagagagatatgctgttagtctgacaggcttcccttggtggt

SEQ ID NO: 129191 - DNA, 201 bp, Homo sapiens
gctccattattttccagaaacgtttcgattataaagatcagcaatttcttaacttgatggaaaaattgaatgaaaacatcaggattgtaagcaccccctgratccaggtaaggccaagttttttgcttcctgagaaaccacttacagtctttttttctgggaaatccaaaattctatattgaccaagccctgaagtacatt

SEQ ID NO: 129192 - DNA, 201 bp, Homo sapiens
gatgaacaaggtaccgcagttggaagtgcagaaatcacttgtcttctgcctcaatcatgctgggagctgcagaccagagctgttcctatttggccatcttgccactaaatctctagttcttttaaatgtcatgttaggatgctgattttagatctttcatgctttctcttgtggacatttagcggtatcaatttccctcta

SEQ ID NO: 129193 - DNA, 201 bp, Homo sapiens
gggatctccctcctagtttcgtttctcttcctgttaggaatcgttttcagcaatggaaagagatggaaggagatccggcgtttctccctcatgacgctgcrgaattttgggatggggaagaggagcattgaggaccgtgttcaagaggaagcccgctgccttgtggaggagttgagaaaaaccaagggtgggtgaacatac

SEQ ID NO: 129194 - DNA, 201 bp, Homo sapiens
tttctagtttatttgcgtagaggtgtttatagtaatctctgatggtagtttgtatttctgtgggatcagtggtgatatcccctttatcattttttattgtrtctatttgattcttctctattttctcctttattatttttgctagcagtctatcaattttgttgatcttttcaaaaaaccagctcctggattcattaactt

SEQ ID NO: 129195 - DNA, 201 bp, Homo sapiens
gcccaaagagaagtgtccagagacgtggatgatgtgacaagaaatgttgtagaaccccacccccacctcaaatgataactgtacatttctcctttccaccrtcccgtggcaaccaacattctactttatgtctctatgaaatcgagtatgctgggtacctcatagaagtggaatcattacatatttgcccttttgtgactg

SEQ ID NO: 129196 - DNA, 201 bp, Homo sapiens
cctcttttttttatttcctttggaatgtactgtctcattccattcctttactttcagtctatgtgtgtttttttaagtgaagtttttttttttttttttttaggcaacagattaataggtcttgtttcttcatctagtcagtttgtcttttgattggaaattttagtccatttacattcagtgttattattaagtaaggac

SEQ ID NO: 129197 - DNA, 201 bp, Homo sapiens
cttctggctatcccccttacttctctacctctactagctaccattctgttctctatttctgtgagattaactttcttagctaccatataagaataagaacrtgcgttatttatctttccatgccaggcttatttcacttaacataatgtcttctaatctcaaccatgttgttgtgaatgatagaattttgggcttttctta

SEQ ID NO: 129198 - DNA, 201 bp, Homo sapiens
tgaatctggatgcccctgtattgggtgcatataatttaggatagttagctcttcttgttacattgtgtctggattttgttccttctggtgcgttcgtggtyttgttgacttcagaaatgaagctgtggacctttgtggtgagtgttagagcttttaaaggtgttgcagaccaaaaaagtgagtagcagcaagatttattgt

SEQ ID NO: 129199 - DNA, 201 bp, Homo sapiens
aataattcatgggctttttcctaattctccttactccttctagaacactggtcaacagatgtttatgactacagtccccatgatctgagtcgaggtcccartggggatccatactggggatggcttgctgaccagtagggaatttgtccctttcttcagctgtcattctatcatttacttgactaagatactaggtctctc

SEQ ID NO: 129200 - DNA, 201 bp, Homo sapiens
catgtttatatataaaattcagaaatatttgagcctgtgtgactgaataaaagcatacaaatacaatgaaaatatgaatctaagtcaggcttagtaaatgracaaaacagtgacttcatttgctgttaactgtatctccttttctagctctcaaaaatctatggccctgtgttcactctgtattttggcctggaacgcatg

SEQ ID NO: 129201 - DNA, 201 bp, Homo sapiens
ggtgtgggactttcagacataacaagaaaggcatgtgaaaagagcaaagtctcccaattacaactgaggaggtgggagaaatacctggttacaggctgtcycaggatttctcagatggtaacggaccttgaggaccgtcatccaggacaggagattaacactgagaaggccacaccagtgtccaggaggaagtcaatttcc

SEQ ID NO: 129202 - DNA, 201 bp, Homo sapiens
gaattggggtgtcgcagggactgctgcatttccttactgaggcttgagtttttaaacgtttaacaatatcctgtaatccttcatgagcttcaggccttaarggatattgcctttgataaggaaaagtggtggggtcttttagcctgatttggactgggtgggcattttttgctcttccaaattgtccttccagtgcccaga

SEQ ID NO: 129203 - DNA, 201 bp, Homo sapiens
catccttgaggtccagaacagtgaactattctgcttcctctggtatttgacagagcagggtttaggggttgggtacaactggatatagaggaattactgcytcattgatgagtataagatcttgcactagtctccacagactgtttggtttttgtactcctagaattggggtgtcgcagggactgctgcatttccttactg

SEQ ID NO: 129204 - DNA, 201 bp, Homo sapiens
cctggataatattctgaagagtgttttccaacttggttccattctccccatcactttcaggtacaccaatcagatgtagatttggtcttttcacatagtcmaatatttcttagaggctttgttcatttctttttactcttttttctctaaacttcccttctagcttcatttcattcatttgatcttcagtctctgataccc

SEQ ID NO: 129205 - DNA, 201 bp, Homo sapiens
tggtctttacaatttgacacttttttacagtggctcataccagttgttcctttccatgtttagcacctcctgcaggagctcttgtaaggcaggcctggtgktgacaaaattcttcagcattagctcgtctgtaaaggattttatttctccttcgtttatgaagcttaatttggctggatatgaaattctgggttgaaaact

SEQ ID NO: 129206 - DNA, 201 bp, Homo sapiens
ttaaataagtcctctactatattagccatgtgttttattcagaatagccgtgaaaattgaacttctctgaagaaataatttatgcctgttgtaaaggaagyagctgtgggtttaggaccagcaaaagcagataagcggtagataagaagttatagacttcaattattagatccacaaactaatgttttaattaagctatag

SEQ ID NO: 129207 - DNA, 201 bp, Homo sapiens
attaaataagtcctctactatattagccatgtgttttattcagaatagccgtgaaaattgaacttctctgaagaaataatttatgcctgttgtaaaggaarcagctgtgggtttaggaccagcaaaagcagataagcggtagataagaagttatagacttcaattattagatccacaaactaatgttttaattaagctata

SEQ ID NO: 129208 - DNA, 201 bp, Homo sapiens
cctatgattcaccgaacagttcttgcatattctgtctgtgccagttatagagacagtgtttgtcactctcacagttacacatgaggagtaacttctccctrtgtttgttattttcaggaaaacggatttgtgtgggagagggcctggcccgcatggagctgtttttattcctgaccttcattttacagaactttaacctga

SEQ ID NO: 129209 - DNA, 201 bp, Homo sapiens
ttgcatattctgtctgtgccagttatagagacagtgtttgtcactctcacagttacacatgaggagtaacttctccctatgtttgttattttcaggaaaayggatttgtgtgggagagggcctggcccgcatggagctgtttttattcctgaccttcattttacagaactttaacctgaaatctctgattgacccaaagga

SEQ ID NO: 129210 - DNA, 201 bp, Homo sapiens
ctgatgggtgttttacttccaattatgtggtcaattttagaataagtgtgaagtggtgctgagaagaatgtatattctgttgatttagggtggagagttcyttagatatctattatgcccgcttggtccagagcttagttcaagtcctggagatccttgttaaatttctgtctcattgatctgtctaatattgacagtggg

SEQ ID NO: 129211 - DNA, 201 bp, Homo sapiens
aaatctatggccctgtgttcactctgtattttggcctggaacgcatggtggtgctgcatggatatgaagtggtgaaggaagccctgattgatcttggagasgagttttctggaagaggccatttcccactggctgaaagagctaacagaggatttggtaggtgtgcaagtgcctgtttcagcatctgtcttggggatgggg

SEQ ID NO: 129212 - DNA, 201 bp, Homo sapiens
tgccagtattttgttgaggattttcgcatggatgttcatcacggatattggcctgaaattttctttttttttgttttatgtctgccaagttttggtatcargatgattcttcccttataaaatgagttaggaaagagtctgtctttttctactgtttggagtactttcagaaggaatggtaccagctcctctttgtacctc

SEQ ID NO: 129213 - DNA, 201 bp, Homo sapiens
gagtttcaccatgttggccaggctggtctcaaactcctgaccctgtgatccacccacctcagcctcccaaagtgctggaattataggcgtgagccacgtcrcccggcctacatttattgatttgcatgtgttgaacgagccttgcatcccagggatgaagccaacttgatcgtggtggataagctttttgaagtgctgctg

SEQ ID NO: 129214 - DNA, 201 bp, Homo sapiens
cttgtcttgtgccagttttcaaagggaatgcttccatttttgcccattcagtataattttggctgtggtttgtcataaatacctcttactattttgagatwcattccatcaaaatctagtttattgagagtttttagcatgaaggggagttgaattttgtcaaaggccttttctgcatctattcagatagtcatgtggttt

SEQ ID NO: 129215 - DNA, 201 bp, Homo sapiens
atattatgttaaatagaagtggtgagagagggcatccttgtcttgtgccagttttcaaagggaatgcttccatttttgcccattcagtataattttggctstggtttgtcataaatacctcttactattttgagatacattccatcaaaatctagtttattgagagtttttagcatgaaggggagttgaattttgtcaaag

SEQ ID NO: 129216 - DNA, 201 bp, Homo sapiens
tttttcttcacatccttaccagcatatgttattgctcatctcttggatataagccactttaactggggtgagatgatatcttattacagtttttatttgcrcttctcagatgatcagtgatattgagcactttttcatatgtctgttttccatttgtatgtcttctgttgggaaacgtctattcaaatcttttgcccactt

SEQ ID NO: 129217 - DNA, 201 bp, Homo sapiens
tacgtaatcaagcatgggcaatggcgggcgcccctcccccagccttgctgccaccttgcagtttgatctcagactgctgtgctagcaattagtgagactcygtgggcgtaggaccctccgagccaggtgcgggatataatctcgtggtgcaccgttttttaagcccatcggaaaagcgcagtattcgggtgggagtgaccc

SEQ ID NO: 129218 - DNA, 201 bp, Homo sapiens
aggagaggcgctctgctttttagagtttccagtttttctgttctgttttttccccatctttgtggttttatctacttttggtctttgatgatggtgatgtrcagatgggtttttggtgtggatgtcctttctgtttgttagttttccttctaacagacaggaccctcagctgcaggtctgttggaataacctgccgtgtga

SEQ ID NO: 129219 - DNA, 201 bp, Homo sapiens
tctagtcagttgggtgacaggggagtatattttcttaaggcctcctgtagccactcgaggaaagcagaaggattttcttcctttccctgagttatggtggrcatcattgaataattcatgggctttttcctaattctccttactccttctagaacactggtcaacagatgtttatgactacagtccccatgatctgagtcg

SEQ ID NO: 129220 - DNA, 201 bp, Homo sapiens
ttatgtaatggcctttgtctgttttgttctttgttggtttaaagtctgttttatcaaagggtaggattgcaacccctgatttttttttttttttttttttttgctgtctatttgcttggtagatcttcctccatccctttattttgagcctatttgtgtctctgcatgtgagatgcatctcctgaatacagcacactgatg

SEQ ID NO: 129221 - DNA, 201 bp, Homo sapiens
cttccatagctcagagtaatttgatcgtctgaagccttcttctctcagctcatcaaagtcattctccatccagctttgttccgttgctggtgaggaactaygttcctttggaggaggagaggcgctctgctttttagagtttccagtttttctgttctgttttttccccatctttgtggttttatctacttttggtctttg

SEQ ID NO: 129222 - DNA, 201 bp, Homo sapiens
atataagactttcctgtccagtagaattttctgcaaagatgctcgattgatttgtgtcctatttaaagaatatttgtcagcacaagattccaaagactgasttttaactttcccataatttttttgttttagctcttatatttacatcaatgacatgtttcaaattaatttttatttgtagtatggagtaataatggtcgt

SEQ ID NO: 129223 - DNA, 201 bp, Homo sapiens
ttttctagtttatttgcatagaggtgtttgtagtattctctgatggtagtttgtatttctgtgggatcggtggtgatatcccctttatcgttttttattgygtctatttgattcttctctctctttttctttattagtcttgctagtggtctatcaattttgttgatcctttcaaaaaaaccagctcctggattcattaat

SEQ ID NO: 129224 - DNA, 201 bp, Homo sapiens
tattagctgtgggacactgaaaatgaatttgtcattctcttagctcagtttgtttgtttaaaatagagcaaatagacctgctgaatatgttggtgtgaggrttaattgtaatctgtgtagcaattgtctgaccattgccttgaacatcataggccatctgagtggcaagtataataatcatcatcatgtttatatataaaa

SEQ ID NO: 129225 - DNA, 201 bp, Homo sapiens
attttagaataagcacgatgtggtgctgagaagaatgtatattctgttgatttggggtggcgagttctgtagatgtctatcaggtccacttggtccagagstgagttcaagatctggatatctttgttaaccttttgtctcattgatctgtttaacattgacagtaggatgttaaagtctgccattattattgtgtgggag

SEQ ID NO: 129226 - DNA, 201 bp, Homo sapiens
tttgtccacattttcctccccaggtatcttagatgtctttcacgatttctgtggatttttcttcttgaatttaagcttacaaagttgatctttatgtactktgctatttccaagtggctgaagcatgctaattgcctctaatctgccatcttggaaaatatggtattctttattctttagcaatgtttaatagtttttagt

SEQ ID NO: 129227 - DNA, 201 bp, Homo sapiens
aagtgttttatatctaatgtttactcatattttaaaattgtttccaatcatttagcttcaccctgtgatcccactttcatcctgggctgtgctccctgcartgtgatctgctccattattttccagaaacgtttcgattataaagatcagcaatttcttaacttgatggaaaaattgaatgaaaacatcaggattgtaagc

SEQ ID NO: 129228 - DNA, 201 bp, Homo sapiens
agcttagaaaactgtgtgaagctgatgttaccaagggagaggactgtctttgtctacacatgttgagagaatctagtctatttcagtggtgttaactacasaatgtttaacatgacacaggtcacttggagactctaaaagcataattaatttattgctggcctagggacttgttagaaagtaatatgtttttgtatattg

SEQ ID NO: 129229 - DNA, 201 bp, Homo sapiens
ttctgttgggaaacgtctattcaaatcttttgcccactttaaaactaaattattagatttgttcctagagagttgtttgagctccttatatagtctggttkttaatcccctgttagaggggtagttttcaattattttcttcctatctgtgggttatcttttcactttattgattgtgtcctttgctgtgctgaaactttt

SEQ ID NO: 129230 - DNA, 201 bp, Homo sapiens
tttttttgtgtgtctctgccaggctttggtatcagtatgatactggcctcacaaaatgattagagagaattccctctttttctattgattggaatagtttyagaaggaatggcaccagttcctctttgtacctctggtggaattcagctgtgaatccctctggttctggactttttttggttggtatgctattaattattg

SEQ ID NO: 129231 - DNA, 201 bp, Homo sapiens
aagtcaaattgtctctgtttacagatgacatgattgtatatttagaaaaccccattgtctcatccccaaaactgttcatgctaataagcaaattcagcaaygtctcaggatacaaattcaatgtgcaaaaatcacaagcattcctatacaccaataatagacaagcagacagtcaaataatgagtgaactcccattcacaa

SEQ ID NO: 129232 - DNA, 201 bp, Homo sapiens
tagggcctataggtgtgaatttggaagctctttaaatataaagtttaatatttcaaaataataagagctatttatgaaaaacccatagccaatatcatatwtaatgggcaaaatctggaagtattccctttgaaaaccagagcaagacaaagatgccctctctcaccactcctattcaacatagctttggaagttctcacc

SEQ ID NO: 129233 - DNA, 201 bp, Homo sapiens
atatggagcagagagggcccccttgcaccatgatctatgcacaggcacaggaagagtggggtggctcagggtgctgatccaggtgagaaatgctctaaatrcttagcagtctgcctgggtgtggagcacagagggtccttctggaccattatctataccaaggaagagtggggtggctaggactgctggtccaggcaagta

SEQ ID NO: 129234 - DNA, 201 bp, Homo sapiens
gcttgatgaaaaggacagattcagaaggttgcacccaagtacgcaagtactcagtacttcaaatgtgattgtgggcattttatttatttatttatttattwttttcatcagcagattttattaagaagaagaaacaggaaattcaaaagcaagttcattttaaattagctggtcagaagagtacaaagagaaaaaaaaaga

SEQ ID NO: 129235 - DNA, 201 bp, Homo sapiens
tgtgggcattttagcaagattattgtcactggccttaagctcatgcctcttattacttcgtctatctgtctggaaatggtactgctcttctttggaatggygtttcatcatctgtacatcaaaagatttaactgcatgattaccactgtttcttaaaccttcgtgacttctttacagctcagttcacctatgtctcttgtt

SEQ ID NO: 129236 - DNA, 201 bp, Homo sapiens
aacgctcccaactccaaagagttggggattgttagagagccctttcccagaaagcctgacacccctgtctttagtctggtggccacattggtcactttttkttttgagacggagtctcgctctgtcgcccaggccggactgcggactgcagtggcgcaaccttggctcgctgcaagctccgcttcctgggttcatgccatt

SEQ ID NO: 129237 - DNA, 201 bp, Homo sapiens
ttctataggattgttagtttgatgttttaaacttagatcattaatccatttcgagttaatttttgtatatggtgcaaggaagtgttccagttttattctgygtatggctagccagttatcctagttcaatttactgaatagagagtcctttcctgattgattatttttgtcaactttgttgaagatcagatggctataggt

SEQ ID NO: 129238 - DNA, 201 bp, Homo sapiens
ttttcaacttctttgcctttggtttgaatgtccttccatagctcagagtaatttgatcgtctgaagccttcttctctcagctcatcaaagtcattctccayccagctttgttccgttgctggtgaggaactacgttcctttggaggaggagaggcgctctgctttttagagtttccagtttttctgttctgttttttcccc

SEQ ID NO: 129239 - DNA, 201 bp, Homo sapiens
gcatctcatactattcctgattggttagtgtaaaaattatactcttcccctaagaaggtgcagagtcctcctttctcagcagtgaggaggtctagtcctcrgtggttttggagagtcactgttgccaaagagtctatttgggattgtagagtaaggatagattttgttatttcttgtaaactgtctgagaaattctttgag

SEQ ID NO: 129240 - DNA, 201 bp, Homo sapiens
tcctacctctggaatcttgagaccaatttttgtcttggcagctttacaattgccttctatcacatggtttctgtattcatccagacactctagttgccatstcaaacctgctcttttccaatttaaaccaagacatattattagtaaaattaaaaataatataacctaaagttatattttcaaggggaaaaatcaatgaga

SEQ ID NO: 129241 - DNA, 201 bp, Homo sapiens
ttctattgtccctttctcagaaaaatattggagaatgtgcttaattcaaatgcctgaagcctagttatagaaagtcctgagctccagcaatcagacctcayataggacaatgagagtgtcagggaggctgccttgcaccaggcctagaaaacaactacttcagaatgaacctggtggataattcagaagtgagatgagaca

SEQ ID NO: 129242 - DNA, 201 bp, Homo sapiens
tttctttgtacttggtatgttgaaacataattagtttttatcattctgatgaccttaatctatcaactttgctaaatttactaatcactattcataatttrtctctagattcattggaatttctgtgaacagtacactgtatctgtgttaatattgttttatttcttactttccaattcttgtgggcttaatttctcttta

SEQ ID NO: 129243 - DNA, 201 bp, Homo sapiens
gaaccaaggtctatgactctagcacaccttagcagctgaagcccacagactgagttgtggctgtgaatctgtttctgagggtgaggtgcaggaaaatgccrtggcctgcctctgatgtagaaggggtgctctttagatttgagcccagcaagtagaatatggctactatcattaataagataggatatactaccttattaa

SEQ ID NO: 129244 - DNA, 201 bp, Homo sapiens
gtttggttttttgtccttgtgatagtttgctgagaatgatggtttccagcttcatccatgtccctacaaaggacatgaactcatcattttttatggctgtrtagtattccatggtgtatatgtgccatattttcttaatccagtctatcattgttggatatttgggttgattccaagtcgttgctattgtgagtagtgctg

SEQ ID NO: 129245 - DNA, 201 bp, Homo sapiens
gtacccctgaattgctagaacaaatgttccatttctctccttttccatcagttcttacttgtgtcttgtcagctaaagtccaggaagagattgaacgtgtygttggcagaaaccggagcccctgcatgcaggacaggggccacatgccctacacagatgctgtggtgcacgaggtccagagatacatcgacctcatcccca

SEQ ID NO: 129246 - DNA, 201 bp, Homo sapiens
cttgttgttttcttttgttttcttagcctttatttattagatttacttattatttatttattaataatttataaatattacaaattataataatgcaaatrtataatagtaaaaaatatattataaatacgttaccataaatttatattatataacatatataaaagtatattattattgatatattataaatttataatt

SEQ ID NO: 129247 - DNA, 201 bp, Homo sapiens
tcctccatccttttattttgagcctatgtgtgtctctgcacgtgagatgggtttcctgaatacagcacactgatgggtcttgactctttatccaatttgcragtctgtgtcttttaattggagcatttagtccatttacatttaaagttaatattgttatgtgtgaatttgatcctgtcattatgatgttagctggttatt

SEQ ID NO: 129248 - DNA, 201 bp, Homo sapiens
actggttgttttgtgggcttctcttccttctttcatttcttcctgccttcctttattgataataattttctctgcatatatgtgtacagatttttcttaawgcctagcttaaggcacagttacacatttgtgcatctgtagcagtcctctctttaagttacacatacttccagcactataatttaaatttattatgatgtt

SEQ ID NO: 129249 - DNA, 201 bp, Homo sapiens
acattcccaatagaagggttggttgttagaaagcccttccccagataaccttacacctgagtcttcagtctggtggccacgctaatcatttttaactggcygacaggtgcctggtattttcctccagttctaaggaaggataggacagaacagctagtgaaagtggtccaatattaccgctttggatgtccctttgttgtc

SEQ ID NO: 129250 - DNA, 201 bp, Homo sapiens
gtcggactgttgtatggtaattaagatttaaatccctgttagggaatctgctgggttaagggaattatcagaggttggagttacattacctttttctaacmttatagccccatacgttaagatttttgagttagtgagctacctttttgcttttttttatttttttttgactaagaataactctgaactggtgaggtgtgc

SEQ ID NO: 129251 - DNA, 201 bp, Homo sapiens
tcctggtgggtttctggtctcgctggcttcaggagtgaagttgcagacctttgcggtgagtgttatagctcataaaggtagtgtggacccaaagagtgagyagcagcaagatttattgtgaagagcaaaagaacaaagcttccacagcatggaaggggacccaagagggttgccgctgctggctcaggtgggcagctttta

SEQ ID NO: 129252 - DNA, 201 bp, Homo sapiens
tgttgccttctgctagcatttgaatgtgtttgctcttgcttttctagttcttttaattgtgatgttagggtgtctattttggatctttcctgccttctctkgtgggcatttagtgccataaatttccctctacacactgttttgaatgcatcccagagattctggtatgttgtgtctttgttctcgttggtttcaaagaac

SEQ ID NO: 129253 - DNA, 201 bp, Homo sapiens
gttcctcctatgtctggtcggactgttgtatggtaattaagatttaaatccctgttagggaatctgctgggttaagggaattatcagaggttggagttacrttacctttttctaacattatagccccatacgttaagatttttgagttagtgagctacctttttgcttttttttatttttttttgactaagaataactctg

SEQ ID NO: 129254 - DNA, 201 bp, Homo sapiens
tcttggctgagtgcaaagagttcgcacttttgaggagaccaattattaggcaatttttctaaatctgcttccacaagagtctctgtatcaattactgaatrtccattgaggttttttcctcagtcacctgggaggaaccatctatcatcctgtcctgaagggagttcctcctatgtctggtcggactgttgtatggtaatt

SEQ ID NO: 129255 - DNA, 201 bp, Homo sapiens
ccaacccaaatgcccatcaatgacacactggataaagaaaatgtggcacatatacactgtggactactatgcagccattaaaaagaatgagttcatgtccwttgcagggacatggatgaagctggaaaccaccatcctcagcaaactaacagaggaacagaaaaccaaacactgcatgttctcacttataagtgggagttg

SEQ ID NO: 129256 - DNA, 201 bp, Homo sapiens
tcctgtgggaaggcttaaagctgaagcttgtactagggcctgctttaaggttttgaaggctgtttctgcccctggttcccattctactagatgagtatttkccctctgggtttccttgattagagtacagaggggcctggctatctcactgtatccggggatccatagttggcaaaagtcggtgattccaaggaatgccca

SEQ ID NO: 129257 - DNA, 201 bp, Homo sapiens
atagcagtaaagacatttaagctacatcaaaggagtcagagaggatgaaaagaagagaaggcagggctattaaaggagataatgagccacaggagcaggayattggctctaaataaaggatattaaaacctttgccaaataaccatggatgggatcagggggacattaagaatgtagcaggatactctgcagtgatgcaga

SEQ ID NO: 129258 - DNA, 201 bp, Homo sapiens
gggcttaatctcttggaggggtttgttccataccaagtgtccttccataggtatttctaatgggaggttccacctggcagcaattttggcctcagcacctscctgatggtttccttctgccttttctccttcacctttctgatgtctttggaagtgtaagactgccaccaccttgggtttttgcactgagtgcaataactc

SEQ ID NO: 129259 - DNA, 201 bp, Homo sapiens
ttctgtcattaaccacgctgaggggagagaaaactatgcccctgtgaaagttcccattctgtttcagtcagggaatactggggcttaatctcttggagggrtttgttccataccaagtgtccttccataggtatttctaatgggaggttccacctggcagcaattttggcctcagcacctgcctgatggtttccttctgcc

SEQ ID NO: 129260 - DNA, 201 bp, Homo sapiens
gtgagccaccatgcccagctctcattgtggttttaacttgtatttaatgaccagtgattttgaacttcttttaatatactgttacccatttgtatatcttstttggagaaatgttattcaagtccatttcctatttaaattaagttgcctttatttttctttttaagctattagaattgtttatgttttcaaaacattaaa

SEQ ID NO: 129261 - DNA, 201 bp, Homo sapiens
aatgtattcacaatgttgtgcaaccatcagctttctctggtttcaaaatgtttttatcacgccacaaaaacgtattatattcgctaaataatcactccatkcccccactccatcatgtaataacctctaatcttttttctgtctctatgggtttgcgtgttatggatatataaagaattcatagcatatgcaaccttttat

SEQ ID NO: 129262 - DNA, 201 bp, Homo sapiens
gagcagcaggagtggacaggcactaaagcccaagcttgatgaaaaggacagattcagaaggttgcacccaagtacgcaagtactcagtacttcaaatgtgrttgtgggcattttatttatttatttatttatttttttcatcagcagattttattaagaagaagaaacaggaaattcaaaagcaagttcattttaaattag

SEQ ID NO: 129263 - DNA, 201 bp, Homo sapiens
ggatggaaaacagactagcagagcttctcgggcagagcttggcccatccacatggctgcccagtgtcagcttcctctttcttgcctgggatctccctcctrgtttcgtttctcttcctgttaggaatcgttttcagcaatggaaagagatggaaggagatccggcgtttctccctcatgacgctgcggaattttgggatgg

SEQ ID NO: 129264 - DNA, 201 bp, Homo sapiens
attttcagaagaagctgctagaatgttcaaaatggtagatttggaaagtgtgagaatgaagagaataccattgcaaattgcagactctcacacacacaagcacagctgcacaaatacacagttatatatatgcgtaaatctgttagcataacttaatgtttaaacgtgttattttgatgtaaaattaattcctgttttttt

SEQ ID NO: 129265 - DNA, 201 bp, Homo sapiens
ataggcaaaagtcccttcattgtcaccaaaatgtgtccagaattggttccttccggtgggttcttggtctcactgacttcaagaatgaagctgcggacccwcatggtgagtgttacagttcttaaagatggtgtgtctggagtttgttccttcagatgttcagatgtggccagagtttcttccttctggtgggttcatggt

SEQ ID NO: 129266 - DNA, 201 bp, Homo sapiens
gttagttcttgaagctgggtatttgtcttaaggtagacacaagagtgctgataaatttctcaagcatgagtgtttgaataagtgaagtttcaaatttgggkcttctgtatattagctgtgggacactgaaaatgaatttgtcattctcttagctcagtttgtttgtttaaaatagagcaaatagacctgctgaatatgttg

SEQ ID NO: 129267 - DNA, 201 bp, Homo sapiens
ttagaaagtaatatgtttttgtatattgatgatctcttgtactcagtattcaaaactttccccttattgttgtcaattctgcatcacatcaacaccccagycctaattcaaactaagtattcctcatccattgcttccactctctgaacttccaaattttgagaactccagtctctgagtcttggcatatgccttaccctt

SEQ ID NO: 129268 - DNA, 201 bp, Homo sapiens
agaccatgcgtatgtcccgaggcggctgctccggtctcttgcggtgtggaaagggaacgacctacgagggcggtgtccgagagcctgccttggccttctgrccaggtcatatcgctcccggtcagtccgcaggccctctccttggaaccctggccccaccaccccaaccttgatggcgaactgagtgactgaccagcctcc

SEQ ID NO: 129269 - DNA, 201 bp, Homo sapiens
tctacccgtcctacccagacgaggtccgtggggtttttgctgtgcggagtggaaagtacaaggctcacttcttcacccagggtaacccctccccgtggatscctccccccgacctgctgacccctccccggagccctagatccctggcccctcctctcgcccttgccctgtgcacagaattggccccctccccaggctctg

SEQ ID NO: 129270 - DNA, 201 bp, Homo sapiens
tgtctgtctcagggactctgtgacttgtcccgcagggccgccctcctgaccggccggctcccggttcggatgggcatgtaccctggcgtcctggtgcccarctcccgggggggcctgcccctggaggaggtgaccgtggccgaagtcctggctgcccgaggctacctcacaggaatggccggcaagtggcaccttggggtg

SEQ ID NO: 129271 - DNA, 201 bp, Homo sapiens
ctgtctcagggactctgtgacttgtcccgcagggccgccctcctgaccggccggctcccggttcggatgggcatgtaccctggcgtcctggtgcccagctyccgggggggcctgcccctggaggaggtgaccgtggccgaagtcctggctgcccgaggctacctcacaggaatggccggcaagtggcaccttggggtgggg

SEQ ID NO: 129272 - DNA, 201 bp, Homo sapiens
ctggaggaggtgaccgtggccgaagtcctggctgcccgaggctacctcacaggaatggccggcaagtggcaccttggggtggggcctgagggggccttccygcccccccatcagggcttccatcgatttctaggcatcccgtactcccacgaccaggtaggaaccacccgggccctcagccaccctcccacctcccaaagt

SEQ ID NO: 129273 - DNA, 201 bp, Homo sapiens
ggctacctcacaggaatggccggcaagtggcaccttggggtggggcctgagggggccttcctgcccccccatcagggcttccatcgatttctaggcatccygtactcccacgaccaggtaggaaccacccgggccctcagccaccctcccacctcccaaagtcccccagcccttgatgctcccgcagccccacctgccagc

SEQ ID NO: 129274 - DNA, 201 bp, Homo sapiens
aggaatggccggcaagtggcaccttggggtggggcctgagggggccttcctgcccccccatcagggcttccatcgatttctaggcatcccgtactcccackaccaggtaggaaccacccgggccctcagccaccctcccacctcccaaagtcccccagcccttgatgctcccgcagccccacctgccagcccagccctcac

SEQ ID NO: 129275 - DNA, 201 bp, Homo sapiens
tggccggcaagtggcaccttggggtggggcctgagggggccttcctgcccccccatcagggcttccatcgatttctaggcatcccgtactcccacgaccasgtaggaaccacccgggccctcagccaccctcccacctcccaaagtcccccagcccttgatgctcccgcagccccacctgccagcccagccctcacggcag

SEQ ID NO: 129276 - DNA, 201 bp, Homo sapiens
ggccctcagccaccctcccacctcccaaagtcccccagcccttgatgctcccgcagccccacctgccagcccagccctcacggcagctgcccgcctcaggrcccctgccagaacctgacctgcttcccgccggccactccttgcgacggtggctgtgaccagggcctggtccccatcccactgttggccaacctgtccgtg

SEQ ID NO: 129277 - DNA, 201 bp, Homo sapiens
cctcagccaccctcccacctcccaaagtcccccagcccttgatgctcccgcagccccacctgccagcccagccctcacggcagctgcccgcctcagggccsctgccagaacctgacctgcttcccgccggccactccttgcgacggtggctgtgaccagggcctggtccccatcccactgttggccaacctgtccgtggag

SEQ ID NO: 129278 - DNA, 201 bp, Homo sapiens
cctgcttcccgccggccactccttgcgacggtggctgtgaccagggcctggtccccatcccactgttggccaacctgtccgtggaggcgcagcccccctgdctgcccggactagaggcccgctacatggctttcgcccatgacctcatggccgacgcccagcgccaggatcgccccttcttcctgtactatgcctctcacg

SEQ ID NO: 129279 - DNA, 201 bp, Homo sapiens; identical to SEQ ID NO: 21970

SEQ ID NO: 129280 - DNA, 201 bp, Homo sapiens
taatagagacaagatttcaccatgttggccaggctggtctcaaactcctgacctcaggtgatccacccgcctcagcctcccaaagtgctgggattacaggkgtgaaccaccacacctggccaacaatatttgttttaattagccaggcgtggtagcatttgtcctagcaatttgggaggttgaggtgggagaatcacttca

SEQ ID NO: 129281 - DNA, 201 bp, Homo sapiens
cccccctggctgcccggactagaggcccgctacatggctttcgcccatgacctcatggccgacgcccagcgccaggatcgccccttcttcctgtactatgyctctcacgtaagtgatcttggcccaaccccctggctgcccgtgacccctacccagtgctaactccagtctttgcccccagcacacccactaccctcagtt

SEQ ID NO: 129282 - DNA, 201 bp, Homo sapiens
tgcgacggtggctgtgaccagggcctggtccccatcccactgttggccaacctgtccgtggaggcgcagcccccctggctgcccggactagaggcccgctrcatggctttcgcccatgacctcatggccgacgcccagcgccaggatcgccccttcttcctgtactatgcctctcacgtaagtgatcttggcccaaccccc

SEQ ID NO: 129283 - DNA, 201 bp, Homo sapiens
cgcctcctgtgtcccagacctgagaccatgcgtatgtcccgaggcggctgctccggtctcttgcggtgtggaaagggaacgacctacgagggcggtgtccragagcctgccttggccttctggccaggtcatatcgctcccggtcagtccgcaggccctctccttggaaccctggccccaccaccccaaccttgatggcga

SEQ ID NO: 129284 - DNA, 201 bp, Homo sapiens
gtgccaggagatgctggccacgttgcaggggcccaaggtgtagtcaggagacacagtgcacagagagctggtcttggtaggcctgggaggtgccgggctcrtgctgggcacctccgggcaagctttgtgacttagaggtgtggggccactggtcaccctcggtggctcagaggctgtggctccatggctcatgagcgcctc

SEQ ID NO: 129285 - DNA, 201 bp, Homo sapiens
ccttgatgctcccgcagccccacctgccagcccagccctcacggcagctgcccgcctcagggcccctgccagaacctgacctgcttcccgccggccactcsttgcgacggtggctgtgaccagggcctggtccccatcccactgttggccaacctgtccgtggaggcgcagcccccctggctgcccggactagaggcccgc

SEQ ID NO: 129286 - DNA, 201 bp, Homo sapiens
gctcatgagcgcctcctgtgtcccagacctgagaccatgcgtatgtcccgaggcggctgctccggtctcttgcggtgtggaaagggaacgacctacgaggdcggtgtccgagagcctgccttggccttctggccaggtcatatcgctcccggtcagtccgcaggccctctccttggaaccctggccccaccaccccaacct

SEQ ID NO: 129287 - DNA, 201 bp, Homo sapiens
cctcggtggctcagaggctgtggctccatggctcatgagcgcctcctgtgtcccagacctgagaccatgcgtatgtcccgaggcggctgctccggtctctygcggtgtggaaagggaacgacctacgagggcggtgtccgagagcctgccttggccttctggccaggtcatatcgctcccggtcagtccgcaggccctctc

SEQ ID NO: 129288 - DNA, 201 bp, Homo sapiens
atcccactgttggccaacctgtccgtggaggcgcagcccccctggctgcccggactagaggcccgctacatggctttcgcccatgacctcatggccgacgyccagcgccaggatcgccccttcttcctgtactatgcctctcacgtaagtgatcttggcccaaccccctggctgcccgtgacccctacccagtgctaactc

SEQ ID NO: 129289 - DNA, 201 bp, Homo sapiens
cccttcttcctgtactatgcctctcacgtaagtgatcttggcccaaccccctggctgcccgtgacccctacccagtgctaactccagtctttgcccccagyacacccactaccctcagttcagtgggcagagctttgcagagcgttcaggccgcgggccatttggggactccctgatggagctggatgcagctgtggggac

SEQ ID NO: 129290 - DNA, 201 bp, Homo sapiens
acacacaatctgtcaggggctgccagtcacagacccattaacctgtaacacagggtaggcctgttgggattgggctttctgaggactgaccaggcaacaarcattgggatgacaaaagccccttatggatgggcctgaggagagcaaaaaccacctggcgaccatcaaacatcaaacaggccctccgaggcaaaactcctt

SEQ ID NO: 129291 - DNA, 201 bp, Homo sapiens
tactatgcctctcacgtaagtgatcttggcccaaccccctggctgcccgtgacccctacccagtgctaactccagtctttgcccccagcacacccactacmctcagttcagtgggcagagctttgcagagcgttcaggccgcgggccatttggggactccctgatggagctggatgcagctgtggggaccctgatgacagc

SEQ ID NO: 129292 - DNA, 201 bp, Homo sapiens
tggggactccctgatggagctggatgcagctgtggggaccctgatgacagccataggggacctggggctgcttgaagagacgctggtcatcttcactgcakacaatgggtatgccagcagggcagctgggtgctccggccctgtcacgggccagggccctggaggccttgcagttcagctgcttgccaagaacatagtggg

SEQ ID NO: 129293 - DNA, 201 bp, Homo sapiens
tgtgacttagaggtgtggggccactggtcaccctcggtggctcagaggctgtggctccatggctcatgagcgcctcctgtgtcccagacctgagaccatgygtatgtcccgaggcggctgctccggtctcttgcggtgtggaaagggaacgacctacgagggcggtgtccgagagcctgccttggccttctggccaggtca

SEQ ID NO: 129294 - DNA, 201 bp, Homo sapiens
ggactctgtgacttgtcccgcagggccgccctcctgaccggccggctcccggttcggatgggcatgtaccctggcgtcctggtgcccagctcccggggggdcctgcccctggaggaggtgaccgtggccgaagtcctggctgcccgaggctacctcacaggaatggccggcaagtggcaccttggggtggggcctgagggg

SEQ ID NO: 129295 - DNA, 201 bp, Homo sapiens
gtgacttagaggtgtggggccactggtcaccctcggtggctcagaggctgtggctccatggctcatgagcgcctcctgtgtcccagacctgagaccatgcrtatgtcccgaggcggctgctccggtctcttgcggtgtggaaagggaacgacctacgagggcggtgtccgagagcctgccttggccttctggccaggtcat

SEQ ID NO: 129296 - DNA, 201 bp, Homo sapiens
cccagtgctaactccagtctttgcccccagcacacccactaccctcagttcagtgggcagagctttgcagagcgttcaggccgcgggccatttggggactmcctgatggagctggatgcagctgtggggaccctgatgacagccataggggacctggggctgcttgaagagacgctggtcatcttcactgcagacaatggg

SEQ ID NO: 129297 - DNA, 201 bp, Homo sapiens
ccctggcgtcctggtgcccagctcccgggggggcctgcccctggaggaggtgaccgtggccgaagtcctggctgcccgaggctacctcacaggaatggccrgcaagtggcaccttggggtggggcctgagggggccttcctgcccccccatcagggcttccatcgatttctaggcatcccgtactcccacgaccaggtagg

SEQ ID NO: 129298 - DNA, 201 bp, Homo sapiens
cccggtcagtccgcaggccctctccttggaaccctggccccaccaccccaaccttgatggcgaactgagtgactgaccagcctcctgcccccaggcgtgayccacgagctggccagctccctggacctgctgcctaccctggcagccctggctggggccccactgcccaatgtcaccttggatggctttgacctcagcccc

SEQ ID NO: 129299 - DNA, 201 bp, Homo sapiens
tggacctgctgcctaccctggcagccctggctggggccccactgcccaatgtcaccttggatggctttgacctcagccccctgctgctgggcacaggcaasgtagggccggtgacccctgatcccagatccttggcccctgtcctggccttcccctggggtgagtgtgggcagtgcctgagagtctgtgcctcagtgcctc

SEQ ID NO: 129300 - DNA, 201 bp, Homo sapiens
ggaggaggtgaccgtggccgaagtcctggctgcccgaggctacctcacaggaatggccggcaagtggcaccttggggtggggcctgagggggccttcctgyccccccatcagggcttccatcgatttctaggcatcccgtactcccacgaccaggtaggaaccacccgggccctcagccaccctcccacctcccaaagtcc

SEQ ID NO: 129301 - DNA, 201 bp, Homo sapiens
gcacgtccagggcctcccaccagggctggcagccccaggtatgtgcagtgcttggggcctgtcccgccccgtgacccctgactctgcccccagagccctcrgcagtctctcttcttctacccgtcctacccagacgaggtccgtggggtttttgctgtgcggagtggaaagtacaaggctcacttcttcacccagggtaac

SEQ ID NO: 129302 - DNA, 201 bp, Homo sapiens
tgcacgtccagggcctcccaccagggctggcagccccaggtatgtgcagtgcttggggcctgtcccgccccgtgacccctgactctgcccccagagccctyggcagtctctcttcttctacccgtcctacccagacgaggtccgtggggtttttgctgtgcggagtggaaagtacaaggctcacttcttcacccagggtaa

SEQ ID NO: 129303 - DNA, 201 bp, Homo sapiens
actctgcccccagagccctcggcagtctctcttcttctacccgtcctacccagacgaggtccgtggggtttttgctgtgcggagtggaaagtacaaggctyacttcttcacccagggtaacccctccccgtggatgcctccccccgacctgctgacccctccccggagccctagatccctggcccctcctctcgcccttgc

SEQ ID NO: 129304 - DNA, 201 bp, Homo sapiens
tttctgtctgtctcagggactctgtgacttgtcccgcagggccgccctcctgaccggccggctcccggttcggatgggcatgtaccctggcgtcctggtgsccagctcccgggggggcctgcccctggaggaggtgaccgtggccgaagtcctggctgcccgaggctacctcacaggaatggccggcaagtggcaccttgg

SEQ ID NO: 129305 - DNA, 201 bp, Homo sapiens
ggctgcccgtgacccctacccagtgctaactccagtctttgcccccagcacacccactaccctcagttcagtgggcagagctttgcagagcgttcaggccrcgggccatttggggactccctgatggagctggatgcagctgtggggaccctgatgacagccataggggacctggggctgcttgaagagacgctggtcatc

SEQ ID NO: 129306 - DNA, 201 bp, Homo sapiens
caggtatgtgcagtgcttggggcctgtcccgccccgtgacccctgactctgcccccagagccctcggcagtctctcttcttctacccgtcctacccagacraggtccgtggggtttttgctgtgcggagtggaaagtacaaggctcacttcttcacccagggtaacccctccccgtggatgcctccccccgacctgctgac

SEQ ID NO: 129307 - DNA, 201 bp, Homo sapiens
acagaattggccccctccccaggctctgcccacagtgataccactgcagaccctgcctgccacgcctccagctctctgactgctcatgagcccccgctgcyctatgacctgtccaaggaccctggtgagaactacaacctgctggggggtgtggccggggccaccccagaggtgctgcaagccctgaaacagcttcagctg

SEQ ID NO: 129308 - DNA, 201 bp, Homo sapiens
agagtgcagtggtaccatctccgctcactgcaacctccgcctcccgggttccagggattctcctgcctcagcctccctagtagctggaactacaggtgtgkgctgccatgcccagctaatttttttttatttaatagagacaagatttcaccatgttggccaggctggtctcaaactcctgacctcaggtgatccacccgc

SEQ ID NO: 129309 - DNA, 201 bp, Homo sapiens
ctagagtgcagtggtaccatctccgctcactgcaacctccgcctcccgggttccagggattctcctgcctcagcctccctagtagctggaactacaggtgkgtgctgccatgcccagctaatttttttttatttaatagagacaagatttcaccatgttggccaggctggtctcaaactcctgacctcaggtgatccaccc

SEQ ID NO: 129310 - DNA, 201 bp, Homo sapiens
tgccctgtgcacagaattggccccctccccaggctctgcccacagtgataccactgcagaccctgcctgccacgcctccagctctctgactgctcatgagmccccgctgctctatgacctgtccaaggaccctggtgagaactacaacctgctggggggtgtggccggggccaccccagaggtgctgcaagccctgaaaca

SEQ ID NO: 129311 - DNA, 201 bp, Homo sapiens; identical to SEQ ID NO: 21997

SEQ ID NO: 129312 - DNA, 201 bp, Homo sapiens
ggctagagtgcagtggtaccatctccgctcactgcaacctccgcctcccgggttccagggattctcctgcctcagcctccctagtagctggaactacaggkgtgtgctgccatgcccagctaatttttttttatttaatagagacaagatttcaccatgttggccaggctggtctcaaactcctgacctcaggtgatccac

SEQ ID NO: 129313 - DNA, 201 bp, Homo sapiens
ctgtgcacagaattggccccctccccaggctctgcccacagtgataccactgcagaccctgcctgccacgcctccagctctctgactgctcatgagccccygctgctctatgacctgtccaaggaccctggtgagaactacaacctgctggggggtgtggccggggccaccccagaggtgctgcaagccctgaaacagctt

SEQ ID NO: 129314 - DNA, 201 bp, Homo sapiens
atgctcccgcagccccacctgccagcccagccctcacggcagctgcccgcctcagggcccctgccagaacctgacctgcttcccgccggccactccttgcracggtggctgtgaccagggcctggtccccatcccactgttggccaacctgtccgtggaggcgcagcccccctggctgcccggactagaggcccgctacat

SEQ ID NO: 129315 - DNA, 201 bp, Homo sapiens
gatttgtttttgttttttttttttttttttttttttttttttttttttttttgagacggagtctcgctctgtcgcccaggctagagtgcagtggtaccatytccgctcactgcaacctccgcctcccgggttccagggattctcctgcctcagcctccctagtagctggaactacaggtgtgtgctgccatgcccagctaa

SEQ ID NO: 129316 - DNA, 201 bp, Homo sapiens; identical to SEQ ID NO: 22001

SEQ ID NO: 129317 - DNA, 201 bp, Homo sapiens
cacgcacacaacagacacaccctaaacaccagacacacacacacacctcaaccaccgcaaacacacatacgccacacctctaacaccacacacacccaacaccacacacatacgtgcctcaaacactacacacacctcaaccaccatacacctcaaccacacacacccctcaaacaccaaacacacccctcaaccacacac

SEQ ID NO: 129318 - DNA, 201 bp, Homo sapiens; identical to SEQ ID NO: 22002

SEQ ID NO: 129319 - DNA, 201 bp, Homo sapiens
acacgcacacaacagacacaccctaaacaccagacacacacacacacctcaaccaccgcaaacacacatacgccacacctctaacaccacacacacccaacaccacacacatacgtgcctcaaacactacacacacctcaaccaccatacacctcaaccacacacacccctcaaacaccaaacacacccctcaaccacaca

SEQ ID NO: 129320 - DNA, 201 bp, Homo sapiens
gcccaaggtgtagtcaggagacacagtgcacagagagctggtcttggtaggcctgggaggtgccgggctcgtgctgggcacctccgggcaagctttgtgasttagaggtgtggggccactggtcaccctcggtggctcagaggctgtggctccatggctcatgagcgcctcctgtgtcccagacctgagaccatgcgtatg

SEQ ID NO: 129321 - DNA, 201 bp, Homo sapiens
cctcacggcagctgcccgcctcagggcccctgccagaacctgacctgcttcccgccggccactccttgcgacggtggctgtgaccagggcctggtccccakcccactgttggccaacctgtccgtggaggcgcagcccccctggctgcccggactagaggcccgctacatggctttcgcccatgacctcatggccgacgcc

SEQ ID NO: 129322 - DNA, 201 bp, Homo sapiens
aagccaggttagtaagaaaaaaggcatacagatttattcatgcacacagggagaaccagagtgatgaccccaacctcccaatggggttcggaagcttatayaccatcttgaggttacagaaagaacatgggctcaaagtatggccacagtttatggtggaaaatcaggtgaccagtggcaagaccggttacaggagggaga

SEQ ID NO: 129323 - DNA, 201 bp, Homo sapiens
ctgctgacccctccccggagccctagatccctggcccctcctctcgcccttgccctgtgcacagaattggccccctccccaggctctgcccacagtgataycactgcagaccctgcctgccacgcctccagctctctgactgctcatgagcccccgctgctctatgacctgtccaaggaccctggtgagaactacaacctg

SEQ ID NO: 129324 - DNA, 201 bp, Homo sapiens
ggtgtcaaagcttttgctagtcgtgaaggaagagcccgcagtccatggggctgcacggttttccctgccatttgctcattcaccgggtgcccataacgctycgcgctcaggtctcttacaggagggcccgagtctcccagtaccggaggtctgggggcgcacgagccgctcctcctctggagaagctccggaccgagagga

SEQ ID NO: 129325 - DNA, 201 bp, Homo sapiens
ctgacccctccccggagccctagatccctggcccctcctctcgcccttgccctgtgcacagaattggccccctccccaggctctgcccacagtgataccaytgcagaccctgcctgccacgcctccagctctctgactgctcatgagcccccgctgctctatgacctgtccaaggaccctggtgagaactacaacctgctg

SEQ ID NO: 129326 - DNA, 201 bp, Homo sapiens
tgccagcagggcagctgggtgctccggccctgtcacgggccagggccctggaggccttgcagttcagctgcttgccaagaacatagtgggtgagggggtgycaggagatgctggccacgttgcaggggcccaaggtgtagtcaggagacacagtgcacagagagctggtcttggtaggcctgggaggtgccgggctcgtgc

SEQ ID NO: 129327 - DNA, 201 bp, Homo sapiens
ggtgctccggccctgtcacgggccagggccctggaggccttgcagttcagctgcttgccaagaacatagtgggtgagggggtgccaggagatgctggccaygttgcaggggcccaaggtgtagtcaggagacacagtgcacagagagctggtcttggtaggcctgggaggtgccgggctcgtgctgggcacctccgggcaa

SEQ ID NO: 129328 - DNA, 201 bp, Homo sapiens
  misc_feature (1)...(201): n = A,T,C or G
tgactgaccagcctcctgcccccaggcgtgacccacgagctggccagctccctggacctgctgcctaccctggcagccctggctggggccccactgcccantgtcaccttggatggctttgacctcagccccctgctgctgggcacaggcaaggtagggccggtgacccctgatcccagatccttggcccctgtcctggcc

SEQ ID NO: 129329 - DNA, 201 bp, Homo sapiens
ggcgccacctctcaggttcctgggtgggcaagaagcggtgcacgtccagggcctcccaccagggctggcagccccaggtatgtgcagtgcttggggcctgycccgccccgtgacccctgactctgcccccagagccctcggcagtctctcttcttctacccgtcctacccagacgaggtccgtggggtttttgctgtgcgg

SEQ ID NO: 129330 - DNA, 201 bp, Homo sapiens
agccccacctgccagcccagccctcacggcagctgcccgcctcagggcccctgccagaacctgacctgcttcccgccggccactccttgcgacggtggctrtgaccagggcctggtccccatcccactgttggccaacctgtccgtggaggcgcagcccccctggctgcccggactagaggcccgctacatggctttcgcc

SEQ ID NO: 129331 - DNA, 201 bp, Homo sapiens; identical to SEQ ID NO: 22008

SEQ ID NO: 129332 - DNA, 201 bp, Homo sapiens
gaggaggtgaccgtggccgaagtcctggctgcccgaggctacctcacaggaatggccggcaagtggcaccttggggtggggcctgagggggccttcctgcycccccatcagggcttccatcgatttctaggcatcccgtactcccacgaccaggtaggaaccacccgggccctcagccaccctcccacctcccaaagtccc

SEQ ID NO: 129333 - DNA, 201 bp, Homo sapiens
tgcctcctgcactgagtggcatccaagtggcgccacctctcaggttcctgggtgggcaagaagcggtgcacgtccagggcctcccaccagggctggcagcyccaggtatgtgcagtgcttggggcctgtcccgccccgtgacccctgactctgcccccagagccctcggcagtctctcttcttctacccgtcctacccaga

SEQ ID NO: 129334 - DNA, 201 bp, Homo sapiens
caagggtcacaggtcacggggcggggccgaggcggaagcgcccgcagcccggtaccggctcctcctgggctccctctagcgccttccccccggcccgactscgctggtcagcgccaagtgacttacgcccccgaccctgagcccggaccgctaggcgaggaggatcagatctccgctcgagaatctgaaggtgccctggtc

SEQ ID NO: 129335 - DNA, 201 bp, Homo sapiens
ctgcccgtgacccctacccagtgctaactccagtctttgcccccagcacacccactaccctcagttcagtgggcagagctttgcagagcgttcaggccgcrggccatttggggactccctgatggagctggatgcagctgtggggaccctgatgacagccataggggacctggggctgcttgaagagacgctggtcatctt

SEQ ID NO: 129336 - DNA, 201 bp, Homo sapiens
tcatgagcgcctcctgtgtcccagacctgagaccatgcgtatgtcccgaggcggctgctccggtctcttgcggtgtggaaagggaacgacctacgagggcrgtgtccgagagcctgccttggccttctggccaggtcatatcgctcccggtcagtccgcaggccctctccttggaaccctggccccaccaccccaaccttg

SEQ ID NO: 129337 - DNA, 201 bp, Homo sapiens
tggctgcccgtgacccctacccagtgctaactccagtctttgcccccagcacacccactaccctcagttcagtgggcagagctttgcagagcgttcaggcygcgggccatttggggactccctgatggagctggatgcagctgtggggaccctgatgacagccataggggacctggggctgcttgaagagacgctggtcat

SEQ ID NO: 129338 - DNA, 201 bp, Homo sapiens
cagtctttgcccccagcacacccactaccctcagttcagtgggcagagctttgcagagcgttcaggccgcgggccatttggggactccctgatggagctgsatgcagctgtggggaccctgatgacagccataggggacctggggctgcttgaagagacgctggtcatcttcactgcagacaatgggtatgccagcagggc

SEQ ID NO: 129339 - DNA, 201 bp, Homo sapiens
ccgccccgtgacccctgactctgcccccagagccctcggcagtctctcttcttctacccgtcctacccagacgaggtccgtggggtttttgctgtgcggastggaaagtacaaggctcacttcttcacccagggtaacccctccccgtggatgcctccccccgacctgctgacccctccccggagccctagatccctggcc

SEQ ID NO: 129340 - DNA, 201 bp, Homo sapiens
tttcaccatgttggccaggctggtctcaaactcctgacctcaggtgatccacccgcctcagcctcccaaagtgctgggattacaggtgtgaaccaccacamctggccaacaatatttgttttaattagccaggcgtggtagcatttgtcctagcaatttgggaggttgaggtgggagaatcacttcagcccactaggtcga

SEQ ID NO: 129341 - DNA, 201 bp, Homo sapiens
gacctgggctgctatgggcaccccagctctaccactcccaacctggaccagctggcggcgggagggctgcggttcacagacttctacgtgcctgtgtctcygtgcacaccctctaggtaaagagggggccgcgcctcttccccgccccgaccctccatccctttcctcccaatggattgcaggggggcgggaaaaacgtct

SEQ ID NO: 129342 - DNA, 201 bp, Homo sapiens
aagctttgtgacttagaggtgtggggccactggtcaccctcggtggctcagaggctgtggctccatggctcatgagcgcctcctgtgtcccagacctgagmccatgcgtatgtcccgaggcggctgctccggtctcttgcggtgtggaaagggaacgacctacgagggcggtgtccgagagcctgccttggccttctggcc

SEQ ID NO: 129343 - DNA, 201 bp, Homo sapiens
cgacctacgagggcggtgtccgagagcctgccttggccttctggccaggtcatatcgctcccggtcagtccgcaggccctctccttggaaccctggccccrccaccccaaccttgatggcgaactgagtgactgaccagcctcctgcccccaggcgtgacccacgagctggccagctccctggacctgctgcctaccctgg

SEQ ID NO: 129344 - DNA, 201 bp, Homo sapiens
ctccggtctcttgcggtgtggaaagggaacgacctacgagggcggtgtccgagagcctgccttggccttctggccaggtcatatcgctcccggtcagtccrcaggccctctccttggaaccctggccccaccaccccaaccttgatggcgaactgagtgactgaccagcctcctgcccccaggcgtgacccacgagctggc

SEQ ID NO: 129345 - DNA, 201 bp, Homo sapiens
tcgcccatgacctcatggccgacgcccagcgccaggatcgccccttcttcctgtactatgcctctcacgtaagtgatcttggcccaaccccctggctgccygtgacccctacccagtgctaactccagtctttgcccccagcacacccactaccctcagttcagtgggcagagctttgcagagcgttcaggccgcgggcca

SEQ ID NO: 129346 - DNA, 201 bp, Homo sapiens; identical to SEQ ID NO: 22019

SEQ ID NO: 129347 - DNA, 201 bp, Homo sapiens
tgtgcagtgcttggggcctgtcccgccccgtgacccctgactctgcccccagagccctcggcagtctctcttcttctacccgtcctacccagacgaggtcygtggggtttttgctgtgcggagtggaaagtacaaggctcacttcttcacccagggtaacccctccccgtggatgcctccccccgacctgctgacccctcc

SEQ ID NO: 129348 - DNA, 201 bp, Homo sapiens
ctgtgaccagggcctggtccccatcccactgttggccaacctgtccgtggaggcgcagcccccctggctgcccggactagaggcccgctacatggctttcrcccatgacctcatggccgacgcccagcgccaggatcgccccttcttcctgtactatgcctctcacgtaagtgatcttggcccaaccccctggctgcccgt

SEQ ID NO: 129349 - DNA, 201 bp, Homo sapiens
tcccgccggccactccttgcgacggtggctgtgaccagggcctggtccccatcccactgttggccaacctgtccgtggaggcgcagcccccctggctgccyggactagaggcccgctacatggctttcgcccatgacctcatggccgacgcccagcgccaggatcgccccttcttcctgtactatgcctctcacgtaagtg

SEQ ID NO: 129350 - DNA, 201 bp, Homo sapiens
tggctcagaggctgtggctccatggctcatgagcgcctcctgtgtcccagacctgagaccatgcgtatgtcccgaggcggctgctccggtctcttgcggtktggaaagggaacgacctacgagggcggtgtccgagagcctgccttggccttctggccaggtcatatcgctcccggtcagtccgcaggccctctccttgga

SEQ ID NO: 129351 - DNA, 201 bp, Homo sapiens
gttgttggcaggaagctgttctgtggcctgatcagagcccctggcccccagccccctagtcaggctcagaagctcccccagataaggctgagagctccaggtgagtgacagctggctcccaacactggtgtccccggttttggggtcctttgggcttaaaggagctgtggcaggaccacacgaggcggagtgggcccctcc

SEQ ID NO: 129352 - DNA, 201 bp, Homo sapiens
ttgttggcaggaagctgttctgtggcctgatcagagcccctggcccccagccccctagtcaggctcagaagctcccccagataaggctgagagctccaggtgagtgacagctggctcccaacactggtgtccccggttttggggtcctttgggcttaaaggagctgtggcaggaccacacgaggcggagtgggcccctccc

SEQ ID NO: 129353 - DNA, 201 bp, Homo sapiens
tgttggcaggaagctgttctgtggcctgatcagagcccctggcccccagccccctagtcaggctcagaagctcccccagataaggctgagagctccaggtgagtgacagctggctcccaacactggtgtccccggttttggggtcctttgggcttaaaggagctgtggcaggaccacacgaggcggagtgggcccctccct

SEQ ID NO: 129354 - DNA, 201 bp, Homo sapiens
tatttcttggttgtattcctagctgcttggaaggctgagatgggaggactgcttgagcctgcagtgagctatgattgtggcactgcactccagcctggacracatggcgaaacaccatctttaaaaataaaatccaatctgacaatgtttgtctttaattgaaatgactatttgcatttaatgcatttattgaaatggttg

SEQ ID NO: 129355 - DNA, 201 bp, Homo sapiens
agtccaagaagcatccatcttatcagcgccaactgcgccccactcagaccgtgtccatgtcagcgctgacgtgtgccggacctcactgtgcagctgacacrggggcagggctttgaaaagggtccccaggtgtctggtcagacgctcgtagacagtggggcttgagtgggtcttgcagatctcattcctacctgccttcag

SEQ ID NO: 129356 - DNA, 201 bp, Homo sapiens
ttttccaactttgttctttttccagattgttttggctattcaaagtcatcccgtgagattctgtatgaatttggggatgggtttttcaatgtttgcaaaawtgctgttcagattttggtagggattgcattgaatttatagatcactttgggtaatactgtcttcttaacaatattaagtcttcaatccatgaacacagat

SEQ ID NO: 129357 - DNA, 201 bp, Homo sapiens
tgtattcctagctgcttggaaggctgagatgggaggactgcttgagcctgcagtgagctatgattgtggcactgcactccagcctggacaacatggcgaarcaccatctttaaaaataaaatccaatctgacaatgtttgtctttaattgaaatgactatttgcatttaatgcatttattgaaatggttgaatttatgtct

SEQ ID NO: 129358 - DNA, 201 bp, Homo sapiens
cttttgtaatccacccaggcttccaccttctctgtggctagaaacaggaccgtccagaagtcacctgtaactgccctatcttgcaagttctgattttggcaaaaaaaaaaaaaaaagccttgacaaggttggattcacttctttccctggattgtgtgtcatccaagtacgtgagacatctggtagtgcatttcagagaga

SEQ ID NO: 129359 - DNA, 201 bp, Homo sapiens
ttacaagaagaataaggaagatcttaagacctagaaggaaaactgattgcagaccaggcttggtggctcagtgcctgtaatcccagcactttgggaggccraggagggcagattgcttgagctcagcagttcgaggccaacctgggcaacatagtgaatccctgtctctacagaaaaaaaaaaaaaaaaaacccaccccaa

SEQ ID NO: 129360 - DNA, 201 bp, Homo sapiens
cctgtaatcccagcactttgggaggccaaggagggcagattgcttgagctcagcagttcgaggccaacctgggcaacatagtgaatccctgtctctacagaaaaaaaaaaaaaaaaaacccaccccaaaatcaaaactgaaggtagtgtcagtgtatatatggagtcccttgtgctgaaagtcaaagcagcttcattttgg

SEQ ID NO: 129361 - DNA, 201 bp, Homo sapiens
agattccccttgttgaaggcttgactttatggctgtggccaagtccccttagaccctcatcatcactggtgctccctctccagcctgaagctgctcgtcaygaccagttggcgatgcatttgtcgatgtgcgtggaacaggtgtggttggcaggttttccccaaggactgttccgacaagtccccacagctcccgtgtgtg

SEQ ID NO: 129362 - DNA, 201 bp, Homo sapiens
gaggagcatgacttgggatgctggggggcaggggggcctgtcctcaccagccctgtcatctctgagcttttctctgaggagtgtgacttgggatgggggcrggggggcctgtcctcaccagccctgtcatctctgagtttttctctgaggagtgtgacttgggatgggggcgggggggcctgtcctcaccagccttgtcat

SEQ ID NO: 129363 - DNA, 201 bp, Homo sapiens
cggttccccttgacgacattcagcatgcatgtgagtgttcagtggaatgccgtcttcccttgcgctgtaaatctgagagttgcaagggccgccaggggackgcctcacctcagctccttctgaagctgagtgtgagtgaaggtcgccagcagcagtgggtcgtgctgggtgtgaggctgctggcagaatgggagtgggagt

SEQ ID NO: 129364 - DNA, 201 bp, Homo sapiens
aacctttactacctggcccttgcagcccagtgactagatgcatgtatctcataatttgccataacctgatcttattcccctgccactttcggatattttcwttataattttactgcttcatataatatttttcttccattctctcacccagtacttaaggcattaaagtaatatgaactgaactgttaaacatttcttctg

SEQ ID NO: 129365 - DNA, 201 bp, Homo sapiens
tgccaccatgcttaacatctgtcatattttaaaattttattttttttttgagatggagtctggctctgtcgcccaggctggagtgaagtggcacgatctcrgctcactgcaaccttcacctccgggttcacgccattctcctgcctcagcctcccgtgtagctggaactacagacgcccaccaccacgcccggctaatttt

SEQ ID NO: 129366 - DNA, 201 bp, Homo sapiens
cacgatctcggctcactgcaaccttcacctccgggttcacgccattctcctgcctcagcctcccgtgtagctggaactacagacgcccaccaccacgcccrgctaattttttatattttttagtagagacgggatttcaccgtgttagccaggatggtctcgatctcctgacctcgtgatccgcccgcctcggcctcccaa

SEQ ID NO: 129367 - DNA, 201 bp, Homo sapiens
tttttatattttttagtagagacgggatttcaccgtgttagccaggatggtctcgatctcctgacctcgtgatccgcccgcctcggcctcccaaagtgctggattacaggcgtgagccaccgcgccaggccaattttttttttttttttctgagacagagtctgtctcgctctgtcgcccaggctggagtacagtgatgcg

SEQ ID NO: 129368 - DNA, 201 bp, Homo sapiens
ttcttttgatatgatgctaagtttggtttgctagtattttgcatccatgttgataaggaacattggtttgtagttttcttttcttgtagtgtcctcattcrgctttggtatcagaggtaattctgtcctcacagaatgaattagaaagtattctctcttagttttttggaagagtttgagaaggattagtgttaactcttc

SEQ ID NO: 129369 - DNA, 201 bp, Homo sapiens
gggggtcccagtgtggacacaagcatggggcagtatgtggcagaggagagtggagcttgcttggaggtgctcctttgctgtgaccccacatcgctgtcctsaggtgcagctgtcggaggctgctgagtcacgacagtgaatgggcagagacagaggagtcagcagcagaagagtgagttcgggtgaaagttgagtttgttt

SEQ ID NO: 129370 - DNA, 201 bp, Homo sapiens
cagtagaaatttcaggaagtgtttgaaactgtttctctggatcatagtgtggcctagtccttccctcaagtcatagaaggctgggcactgccagagccgtycaagcagttgaaactccaaagaggatgcccatgaggcgcaaatggaaagacagccgagtggagtctgtgagggaggcattggcacaagggggtgtggttg

SEQ ID NO: 129371 - DNA, 201 bp, Homo sapiens
gcgtaaaacttgccacttagagccctgcctgcaccgtcgtcacggcccagcctgcaggtgagcttcctcgcgcccccgcctgacctgagtgcccctccctsagtcagacacagtgtcgtcgccctgcaggaagccagggggcccgtctgctgctcgtggccaggctgggccttggggtgcccgaccccctccagagcaagc

SEQ ID NO: 129372 - DNA, 201 bp, Homo sapiens; identical to SEQ ID NO: 22158

SEQ ID NO: 129373 - DNA, 201 bp, Homo sapiens
ccagaccctctggaaactcaccttggcgttttactctgcagcccagcgcagctctgtttgaggcctgctgcagtgaccgcatccagccctttgatgatgakgaggacgaggacatctgggaggacagtgacactcgctgtgctgcccgggtgatggccagacccaggtgcggggcctgcccatccccacaaagcctctgcc

SEQ ID NO: 129374 - DNA, 201 bp, Homo sapiens
ggggcggcggcctcaggactgcactgggggcatccaaatcctgactgagagttggaggcagcttgcaggctggcagaggcccaggctcccttgagcccccaagagccatccctggggagagagtggagagggaggctctccctgtgaggaggttggaggctggccggcccctccagcaagctgaaccccatccgtccccag

SEQ ID NO: 129375 - DNA, 201 bp, Homo sapiens
gggcggcggcctcaggactgcactgggggcatccaaatcctgactgagagttggaggcagcttgcaggctggcagaggcccaggctcccttgagcccccaagagccatccctggggagagagtggagagggaggctctccctgtgaggaggttggaggctggccggcccctccagcaagctgaaccccatccgtccccagg

SEQ ID NO: 129376 - DNA, 201 bp, Homo sapiens
gcttcagagagttgctcaaagaatggcccagagcgtggaggccaggatgggaaggcgagcttggaagcacacagagatgcacctggggcaggtgccccacyggcccccgggaagaaggaagccccccctgtggagggtgactcagaaggtggtgctgggcgccaggggctgggagtgtgggtatcggggacaggacatggt

SEQ ID NO: 129377 - DNA, 201 bp, Homo sapiens
ttgggaggccaaggagggcagattgcttgagctcagcagttcgaggccaacctgggcaacatagtgaatccctgtctctacagaaaaaaaaaaaaaaaaamcccaccccaaaatcaaaactgaaggtagtgtcagtgtatatatggagtcccttgtgctgaaagtcaaagcagcttcattttggggcctcaagagctccag

SEQ ID NO: 129378 - DNA, 201 bp, Homo sapiens
cagggtttcaccatattagccaggacggtctcgatctcctgacctcgtgatccgcccaccttggcctcccaaagtgctgggattataggcgtgagccaccrcgcccagccaatttttatatttttagtagaaatggggtttcaccatgttggccaggttggtctcaaactcctgacctcaagtgatctgcccacattggcc

SEQ ID NO: 129379 - DNA, 201 bp, Homo sapiens
tgaggcaggagaatcacttgaacctgggaggcggaggttgcagtgagccaagatcgtgccactgcactccagcctgggctacagagtgagactccgtctcaaaaaaaaaaaaaaaaaaaaaaaaaatgtaaacattagctggtcatggtatttcttggttgtattcctagctgcttggaaggctgagatgggaggactgct

SEQ ID NO: 129380 - DNA, 201 bp, Homo sapiens
gctaatttttgtatttttagtaaggacggggtttcactgtgttggccaggctggtcttgaactcctgacctcaggtgatccgcctgcagatattttttaargacagtgattaatagtacacagacaaaaatgactaagcacacaagcaaataagccactctgagttaaaaccagtacagttcaggtgtggtggctcatgcc

SEQ ID NO: 129381 - DNA, 201 bp, Homo sapiens
gaggcaggagaatcacttgaacctgggaggcggaggttgcagtgagccaagatcgtgccactgcactccagcctgggctacagagtgagactccgtctcaaaaaaaaaaaaaaaaaaaaaaaaaatgtaaacattagctggtcatggtatttcttggttgtattcctagctgcttggaaggctgagatgggaggactgctt

SEQ ID NO: 129382 - DNA, 201 bp, Homo sapiens
tggaggtgaacctggaggagggccgggggcatggatgctgggcaggggccgggcacttgccctggaggtgaacctggaggagggctgggggcgcggacgckgggcaggggccgggcatttgctctggaggtgaacctggaggagggctgggggcatggatgctgggcaggggccgggcacttgccctggaggtgaacctgg

SEQ ID NO: 129383 - DNA, 201 bp, Homo sapiens
ctggaggagggctgggggcatggatgctgggcaggggccgggcacttgccctggaggtgaacctggaggagggctgggggtgcggacgctgggcaggggcmgggcatttgctctggaggtgaacctggaggagggctgggggcgcggacgctgggcaggggccgggcatttgctctggaggtgaacctggaggagggccgg

SEQ ID NO: 129384 - DNA, 201 bp, Homo sapiens; identical to SEQ ID NO: 22157

SEQ ID NO: 129385 - DNA, 201 bp, Homo sapiens; identical to SEQ ID NO: 22159

SEQ ID NO: 129386 - DNA, 201 bp, Homo sapiens; identical to SEQ ID NO: 22162

SEQ ID NO: 129387 - DNA, 201 bp, Homo sapiens; identical to SEQ ID NO: 22163

SEQ ID NO: 129388 - DNA, 201 bp, Homo sapiens
gctgagccgcctgggatctgggtaccctggtggtcggggaggggcacagacttttaagtctggcaggcgagcgggcatctgtggggctcacgcagacctcrcctgctgctccccttccacgggaggcctatgattccgagacgcctcagaagcaggatagtaggatggggggcggcggcctcaggactgcactgggggcat

SEQ ID NO: 129389 - DNA, 201 bp, Homo sapiens
gagtgcctttggaggcgtcgcaggagaggttgatttgcagggaggagaagccacagcttgtcccataggtagcagagtgtggagtgaatgtgttctaagayggccattcccacacccccacttgagaagcaccgggcaggtgccaaaacacattttcaggactgcccctcccagatctgcaaatgctcatctctgcctctg

SEQ ID NO: 129390 - DNA, 201 bp, Homo sapiens
ggaggaacgctgaagccatcccccttgctcttgcagtgccccgtttgacaggatcgcagagatcaacttcaacatcgacgctgacgaggacagtgtgagcwagccgggctgtgtggggtgcggccacccttttcccaggcagctcaggccatgcccatggctcggtctgtcatgggcctgtgcggtggggctgggagaggc

SEQ ID NO: 129391 - DNA, 201 bp, Homo sapiens
tttttagtagaaatggggtttcaccatgttggccaggttggtctcaaactcctgacctcaagtgatctgcccacattggcctcccaaagtgctgggattayaggcatgagccaccgtgcctggccccatttactttaaataggtctttaaattcttgtagcagtgttttgtagttttcagtgtacaaatcttttatctcct

SEQ ID NO: 129392 - DNA, 201 bp, Homo sapiens
ttcacattcgaatgaaccccaggttcagagcccatgttaacttggggcctgtttccagagggaggggtctccagaggagtcacctggtgggtctagagagkgggccagcagcagcaggagtgtcctgagaaccctggcgccttgccttgagcctgagcaggttgagggttttgctggggtcctccacggggaggaaggagc

SEQ ID NO: 129393 - DNA, 201 bp, Homo sapiens
gtgtagacaagatgagtttggagctgggtgtggtggctcacgcctgtaatcccagcactttgggaggccaaggcaggcagatcacttgaagtcaggagttygagaccagcctggccatcatggtaaaaccccgtctctaccaaaaatacaaaagttagccgagcatggtggtgcatgcctgtaatcccagctacacaggag

SEQ ID NO: 129394 - DNA, 201 bp, Homo sapiens
gaggcgcttgatgatgagcaggatctgagtgctgcctggaggaggtttgaggtcatcaatggacaggcagcttgtcccagtacttggaacttggggcagcagagctgcctagctgggcacaacctgggccaccccacaaagggcaggagtgagaggggccaaagatggtgctcccaggccgcctggacctttttgtccagc

SEQ ID NO: 129395 - DNA, 201 bp, Homo sapiens
aggcgcttgatgatgagcaggatctgagtgctgcctggaggaggtttgaggtcatcaatggacaggcagcttgtcccagtacttggaacttggggcagcagagctgcctagctgggcacaacctgggccaccccacaaagggcaggagtgagaggggccaaagatggtgctcccaggccgcctggacctttttgtccagct

SEQ ID NO: 129396 - DNA, 201 bp, Homo sapiens
gatgattcagattgaagcagagaccaacagacacccacaggcaggaggcagaagtgctcagtggctatttgaagaagctccgtaatagagagatgaccctsaggaaaacgcttaaaactccttcctagctacccagagactggacttgtgaggagttaggacgccacctttaggaagggtttccctcagctttgtggtgta

SEQ ID NO: 129397 - DNA, 201 bp, Homo sapiens
ggcgcttgatgatgagcaggatctgagtgctgcctggaggaggtttgaggtcatcaatggacaggcagcttgtcccagtacttggaacttggggcagcagagctgcctagctgggcacaacctgggccaccccacaaagggcaggagtgagaggggccaaagatggtgctcccaggccgcctggacctttttgtccagctg

SEQ ID NO: 129398 - DNA, 201 bp, Homo sapiens
gcgcttgatgatgagcaggatctgagtgctgcctggaggaggtttgaggtcatcaatggacaggcagcttgtcccagtacttggaacttggggcagcagagctgcctagctgggcacaacctgggccaccccacaaagggcaggagtgagaggggccaaagatggtgctcccaggccgcctggacctttttgtccagctgg

SEQ ID NO: 129399 - DNA, 201 bp, Homo sapiens
cgcttgatgatgagcaggatctgagtgctgcctggaggaggtttgaggtcatcaatggacaggcagcttgtcccagtacttggaacttggggcagcagagctgcctagctgggcacaacctgggccaccccacaaagggcaggagtgagaggggccaaagatggtgctcccaggccgcctggacctttttgtccagctggt

SEQ ID NO: 129400 - DNA, 201 bp, Homo sapiens
gggaggccgaggtgggtggatcatgagatcaggagttcgagaccagcctgaccaacatgatgaaacccgtctctactgaaaatacaaaaattagctgggcrtagtggtgtgtacctgtaatcccagctactcaggaggctgaggcaggagaatcgcttgaatccaggagatggaggttgcagtgagccgagatcgtgtcac

SEQ ID NO: 129401 - DNA, 201 bp, Homo sapiens
ggaaaggtcatacgctgtcagcagcagcgtactacacggcatcgagcctcggctgaaggacttccaccagctcctgctcaacccgcccaaggtaaatggcygtggcgactgctgagtgcctttggaggcgtcgcaggagaggttgatttgcagggaggagaagccacagcttgtcccataggtagcagagtgtggagtgaa

SEQ ID NO: 129402 - DNA, 201 bp, Homo sapiens
cgtctcaccctccccagacacaacccgacccctgctgcatagcaccctcctgacctatagctcagttcctctcactcgccaccttggtaagatccacctgycccactagcgagctctgtgggggccaagattctgttttgtcagctggaggtttcagtgaagagaaggtaggtgcagtaggctgagtgtgggggatcagaa

SEQ ID NO: 129403 - DNA, 201 bp, Homo sapiens
atcagaaaagaccgcggtccatcggaggaggcattcccgtcagtgtccccaaagtgtgttcatgggacacttgttagcttggtgttctgagattgtggccrcagagggacccccactgggcatcctcagtgaggcatcgtgccaagggctctggccttagaccggtactgctggccccatcttggacatctcacccgctga

SEQ ID NO: 129404 - DNA, 201 bp, Homo sapiens
cccccagcccagtagcctggacatagcagacacttatttctgtaggctgagttgagctgaatttgcagcgagcccagccttcacttctccactgttacctyggatccgccgtctgagcagcccactgcgtctgtgatgggtgctgtgcccccccatggcctcacgcttagctgtctacaccttgttggcactggtcatcag

SEQ ID NO: 129405 - DNA, 201 bp, Homo sapiens
aatactttaggctttgcaggttgtaaggtctctgttgcaacggctcaactctgaagttgtagcatgaaagcagctacagaaaatagtaaacaaatggatgkggctacattccaagaaggcttcatttatacagagcagcacctgtgcttcgcgactctgctatccttgcctagtggcactgccaggttaaacaccgcctcc

SEQ ID NO: 129406 - DNA, 201 bp, Homo sapiens
gaactgaaagaaagacagcgtctccaccaagggaaacactgggaggaagggaactttgccataacagttcctgggccactgaccatccactccacatccaytgtccatctcctgtcatggcttcttcctcttcttcggttgacttcctgtggtaaattacactctgttaaaacagcttcctgagatggagttcgtgggtgg

SEQ ID NO: 129407 - DNA, 201 bp, Homo sapiens
agtttaaaagagtttccttctgttctctacacttgctctcctccgtgtgccttgttttctgcttggtcagcaccacgcttctttcataagtggggccctaratcctgcacagagtttgggatctgcatggggcttactcaccacagcttagaggccactagttgacttttctctttgtcccattatttttcccagaaaaga

SEQ ID NO: 129408 - DNA, 201 bp, Homo sapiens
tctgatgtagcaagctcctggctcacgtgtgtcacctgttttctctcctctctgagggcatttaggttcttttctaagccctattgtttctcaatttcccrgtaatgtggaattattccatgggtcaggacaggggatccccaaagagcatcattgagccaagagagtttcatagtcagagcttgggcgaatttagtaata

SEQ ID NO: 129409 - DNA, 201 bp, Homo sapiens
atagaaggctgggcactgccagagccgttcaagcagttgaaactccaaagaggatgcccatgaggcgcaaatggaaagacagccgagtggagtctgtgagrgaggcattggcacaagggggtgtggttggcccgccaggtgcccaggagatcctatagggtgtgtcccaaaagggccacatcagtgtcctctgggcacttc

SEQ ID NO: 129410 - DNA, 201 bp, Homo sapiens
tttcataagtggggccctagatcctgcacagagtttgggatctgcatggggcttactcaccacagcttagaggccactagttgacttttctctttgtcccrttatttttcccagaaaagaatccttctagctctcccctgtggggaatggacctgtcagtatcaggagctgagttgggaagagggctgggggcaccccagt

SEQ ID NO: 129411 - DNA, 201 bp, Homo sapiens
gctctcccctgtggggaatggacctgtcagtatcaggagctgagttgggaagagggctgggggcaccccagtttcttttttttttttttttttaccaagtyccctatttctggatggtgtctggtcaccctgtggctgtgcctggtgtccctggccccaggagccataaggaagggacatgtcccactgccctggcctgta

SEQ ID NO: 129412 - DNA, 201 bp, Homo sapiens
ttcaggagactgaagagggaggatcacttgagtctgggaggtcagggctgcagagccgagatcacgccactgtgtgtacttcagccagggcaacagagcargatccttgctcaaaaaaaaaatacatattctaaaaaaaaaaatcatgtcatttgggaacaaagataattttacttttgcctttaccatttggatgccttt

SEQ ID NO: 129413 - DNA, 201 bp, Homo sapiens
aggagactgaagagggaggatcacttgagtctgggaggtcagggctgcagagccgagatcacgccactgtgtgtacttcagccagggcaacagagcaagayccttgctcaaaaaaaaaatacatattctaaaaaaaaaaatcatgtcatttgggaacaaagataattttacttttgcctttaccatttggatgccttttat

SEQ ID NO: 129414 - DNA, 201 bp, Homo sapiens
aaaaaaaaaaatcatgtcatttgggaacaaagataattttacttttgcctttaccatttggatgccttttatttctttttcttgcctaattgctctggctrggactgctaagagaagaccgaatagcagtggtgagagtgggcatccttgcctcgctcctgatcttagagaagctttcagtctttcagcattgaatatgtt

SEQ ID NO: 129415 - DNA, 201 bp, Homo sapiens; identical to SEQ ID NO: 22154

SEQ ID NO: 129416 - DNA, 201 bp, Homo sapiens
tcgccaacgcggtggtgcagaacctggagcggggccctgtgcagacgcacatcagcgaggtcatccgaggtgagcccccaacccggtcatccttctgctgrtcgcgggcaccgggaccccgaaggagctgccgcctgagactaagctctgcccggcagcaggtgctgactgcactgacagtgagagacccatggccacctc

SEQ ID NO: 129417 - DNA, 201 bp, Homo sapiens
caacgcggtggtgcagaacctggagcggggccctgtgcagacgcacatcagcgaggtcatccgaggtgagcccccaacccggtcatccttctgctggtcgygggcaccgggaccccgaaggagctgccgcctgagactaagctctgcccggcagcaggtgctgactgcactgacagtgagagacccatggccacctctgtc

SEQ ID NO: 129418 - DNA, 201 bp, Homo sapiens
tctggtgtttggtgaggaccgcggaggctggggctgtgcgtgcgcagcagtcagggcctgcaaagtccacacagacgtggccgccagccagccctgcccaktccagggatgggtggaggggtgcgtgccgccttcagaccctgactcacgctgtccccctgccccgccccccagctgttccagaagtgctgcctggtgcag

SEQ ID NO: 129419 - DNA, 201 bp, Homo sapiens
gaacctggagcggggccctgtgcagacgcacatcagcgaggtcatccgaggtgagcccccaacccggtcatccttctgctggtcgcgggcaccgggacccygaaggagctgccgcctgagactaagctctgcccggcagcaggtgctgactgcactgacagtgagagacccatggccacctctgtcctctcacttcacaca

SEQ ID NO: 129420 - DNA, 201 bp, Homo sapiens
ggcagtcacagcagccccagccatggtggccaccctggggacagtgacaaaggacgggtgagcaggttgagtgtgggggtagggggtgtggacagggcccrcagcccgcacggttccaaccccaccccattcctgcaggaagacagatgccccgccagaaggagctgccttaaatggcccagtgtgatgctgctgccgccc

SEQ ID NO: 129421 - DNA, 201 bp, Homo sapiens
atgaggacgaggacatctgggaggacagtgacactcgctgtgctgcccgggtgatggccagacccaggtgcggggcctgcccatccccacaaagcctctgmcgaggaggttcagcccccagaacacctgtcagacgccctgtggttcgttagctggcttgcagagcagccacacctgtcctgccagctctggggcccaatg

SEQ ID NO: 129422 - DNA, 201 bp, Homo sapiens
gccaggccagggtcttctccacactgcctcccccatggccccgtgacccttcagaggctggctgaggcggcggtggtgcccacgcgtttacgtggaggccrgatgggagaagtgtggggccttctttcgtggacagaacatcgtgttctctgttgtgagtggttaagacaagaagacagggcctggatgtcccagacagtc

SEQ ID NO: 129423 - DNA, 201 bp, Homo sapiens
gccaggctgggccttggggtgcccgaccccctccagagcaagccccttagatgcccggcagggtcctctctaccctcccatcccctgggaggtttccccasactgtgtccagtgtgaggctgaagttgagatcatagcacaggaggctctggggtccttgaagaatgaggcgcttgatgatgagcaggatctgagtgctgc

SEQ ID NO: 129424 - DNA, 201 bp, Homo sapiens
ctgtgtggtactggggctccgggcatctcccccagccaagctgcaagctcagcaccaggctggctctccccgccctgttgaccagcaggccccgtctgtgytcacagctcctccccttgtttggccaccctgtcttcagggcatctgcagcaagtggggggcacagcacgggaaacggggccaaggccgtttcccgatgcc

SEQ ID NO: 129425 - DNA, 201 bp, Homo sapiens
tgcagaacctggagcggggccctgtgcagacgcacatcagcgaggtcatccgaggtgagcccccaacccggtcatccttctgctggtcgcgggcaccgggrccccgaaggagctgccgcctgagactaagctctgcccggcagcaggtgctgactgcactgacagtgagagacccatggccacctctgtcctctcacttca

SEQ ID NO: 129426 - DNA, 201 bp, Homo sapiens
aatgaggcgcttgatgatgagcaggatctgagtgctgcctggaggaggtttgaggtcatcaatggacaggcagcttgtcccagtacttggaacttggggcagcagagctgcctagctgggcacaacctgggccaccccacaaagggcaggagtgagaggggccaaagatggtgctcccaggccgcctggacctttttgtcc

SEQ ID NO: 129427 - DNA, 201 bp, Homo sapiens
cccaacccggtcatccttctgctggtcgcgggcaccgggaccccgaaggagctgccgcctgagactaagctctgcccggcagcaggtgctgactgcactgrcagtgagagacccatggccacctctgtcctctcacttcacacatcacatctctcctcgtgggggcctgggtctcatgtgtcagttctattgggcggactt

SEQ ID NO: 129428 - DNA, 201 bp, Homo sapiens
cgcgggcaccgggaccccgaaggagctgccgcctgagactaagctctgcccggcagcaggtgctgactgcactgacagtgagagacccatggccacctctrtcctctcacttcacacatcacatctctcctcgtgggggcctgggtctcatgtgtcagttctattgggcggacttctgtggagaccctgccaggcgtcagc

SEQ ID NO: 129429 - DNA, 201 bp, Homo sapiens
gtggtctcaaactcctgacctcatgtgatctgtctgccttggcctcccaaagttctgggattacaggcataagccagcacacccggcctgatttagaaatkatatgaaaatgaaggggtccatgaatactcaaggtgtgattgaagaattccaattcattccatgtgtcaaagatcttgttttaagatgttggtgttttta

SEQ ID NO: 129430 - DNA, 201 bp, Homo sapiens
agggttgcccgtgttttcccaaatacagaattctaaaccagagaatagcaccttacatagtagagagattgcttctcttttggtaggcggtggccaggaargaacgccaggtagcattaagccttggcccccaagtatgtcttgttccctgtctctttgctttcagtgggttccttgggccttcttgtttatgatggagaa

SEQ ID NO: 129431 - DNA, 201 bp, Homo sapiens
aggctggtctcaaactcctgacctcaggtgatccacctgccttggcttcccaaaatgccgggattacagcatgagccaccacccccagccagggattaagtttttttttttttttttccttttttgagacgaagtcttgctctcatcccctaggctggagtgcaatggcgctatctcggctcactgcaacctctccctccc

SEQ ID NO: 129432 - DNA, 201 bp, Homo sapiens
ctccaggtggctgaggagaggaaggggcaggcggtgctggcaagtagtgccagtgagcagccctggctgtgggtggcgggctcctctgcggagagcatgasgctgctcccctgagaacgaagggcactgccctagtgggtcctgttggcagacgcagcccccgtcttctgcctggctctggggctctgctggaatctccct

SEQ ID NO: 129433 - DNA, 201 bp, Homo sapiens
caagcaagcatctgcctgaaggtctttagtacctttctcttctgcctgtaccagtcaccagatcacgtgtggagacgctgggtagctgcactgctctaggrtttctttttgggaaagttaaaagggctctttctggaagaagcgggtgcactgagttgctggtgaggttggacagggtcctggtgtccccggtctccatct

SEQ ID NO: 129434 - DNA, 201 bp, Homo sapiens
agagacctactttccttttccctcttcttcttttttttttttttttttttttgagatggagtctctctctgtcgccaggctggagtgcagtggcgggaccytggctcactgcaatctccgactccctggttcaagcgattttcctgcctcagcctcccgagtagctgagattacaggcatgcgccaccatgcccagctaat

SEQ ID NO: 129435 - DNA, 201 bp, Homo sapiens
agggcagccggagccaaggccctgagaaagcctgtgagtaggagcagtgcaggcggcacccagccttgcccagtttaaggcctgaggccagctggcccccstccttgggggcagtgggaggaggtggccggggcctcgcatgctgctacgtctctggtgacattggggtttgatacagcaatgggactggagcagccacgt

SEQ ID NO: 129436 - DNA, 201 bp, Homo sapiens
gtggcgggaccttggctcactgcaatctccgactccctggttcaagcgattttcctgcctcagcctcccgagtagctgagattacaggcatgcgccaccaygcccagctaatttttttttgtatttttagtagagacggggtttcaccgtgttggccaggatggtctcaaactcctgacctcgtgatccacccgccttggc

SEQ ID NO: 129437 - DNA, 201 bp, Homo sapiens
gtcatatccaaaaaagtcattgccaaatcagtatcatgaagcttttcctctatgcttccttcaaaaagttgtatgttttctctcttatgtttaggtctttratccattttgaattaatttttgtatctggtgtaaagtaagggtccagcttcattcttttgcatggggttatccagttttcccagcacttgttgaaaagac

SEQ ID NO: 129438 - DNA, 201 bp, Homo sapiens
gcaggcagatcacctgaggtcaggagtttgtgaccagcctggccaatgtggcgaaaccccatctctacaaaaaatacaaaaattagccaggcatggtggcrgcgcctgtaatcccagctacttgggaggctgaggcaggagaatcacttgaacctgggaggcggaggttgcagtgagccaagatcacaccactgcactcca

SEQ ID NO: 129439 - DNA, 201 bp, Homo sapiens
ctgtcctcatctggaagaagctacatgggaggtgagagatggcagctgtcctcgttcagccacctctgtcccccaggggagtatctaggtggccagaaccwcctctgggcttcagcccatgctggttaagtctgggctcccttggggagtgtctgaatgtgcccctcacagtctcacgtttgtgtggtggacgatatgcac

SEQ ID NO: 129440 - DNA, 201 bp, Homo sapiens
aataattcatgagaaagacagaatcataaaggaacttctcacatacttagaactgaagaatcataaaaatactacttagcaaaatgtgtagaatgtagttmaagttgattgtatacagggaaatgtagcctttaaagacagactggaaagaaaggctgcaattaatgagttgagcttccaactgaaggacaaaagaagcca

SEQ ID NO: 129441 - DNA, 201 bp, Homo sapiens
tctaactggtgctagggccagtgagtcctgtgttgtgtcacttgccctgcctccatattctcggatgtcgcaagcaagcatctgcctgaaggtctttagtrcctttctcttctgcctgtaccagtcaccagatcacgtgtggagacgctgggtagctgcactgctctagggtttctttttgggaaagttaaaagggctctt

SEQ ID NO: 129442 - DNA, 201 bp, Homo sapiens
cggcagcaggtgctgactgcactgacagtgagagacccatggccacctctgtcctctcacttcacacatcacatctctcctcgtgggggcctgggtctcaygtgtcagttctattgggcggacttctgtggagaccctgccaggcgtcagcgtgtggcacaagagacagtccctcccggggtagttggtgactccggagct

SEQ ID NO: 129443 - DNA, 201 bp, Homo sapiens
aggatggcgaccagaaggcagcgagtgccatggatgcggtgagcaggggtcccggccgggaggcccccccgctgcccacagtggccaggacagaggaggckgtcggcaggtgtgtggggcgtggcgggggcgggcctgccgggtgcatagggcgtggcttccaggctctgtccccaggtctcagctcccctgagaggaggt

SEQ ID NO: 129444 - DNA, 201 bp, Homo sapiens
ccacgctgcccgtgaggagaggacagaagccagcggatccgagagcagggtggagcctccgcatgagaacgggaaccggagcctggagactccccagccgkccgccagcctccctgacaacacaatggtgacccacgtgagtccaagaagcatccatcttatcagcgccaactgcgccccactcagaccgtgtccatgtca

SEQ ID NO: 129445 - DNA, 201 bp, Homo sapiens
ttagaagagacggggttaccatgttggccaggctggtcttgaactcttgagctcaggcaatctgcctgcctcggcctcccaaagtgctaggatagtgctargattacagaagacactttttttgaggctagtcaaagtgcagcagtgtttacacctaattggtcacaagcagttaagatttctttcttccttcttcagtct

SEQ ID NO: 129446 - DNA, 201 bp, Homo sapiens
cccacctcagcatcacacgggcctcacctcagcaccacacgggccccacctcagcaccacacgggccccacctcagcatcacacgggcctcacctcagcaycacacgggccccacctcagcaccacacgggccccacctcagcatcacacgggccccacctcagcaccacacgggccccacctcagcatcacacgggcccc

SEQ ID NO: 129447 - DNA, 201 bp, Homo sapiens
actgggattaagttttgttttgttttgttttggagacagaatctcacgccgtcacccaggctggagtgcaatggtgcgatttagactcactgcagcctctkcctcccaggttcaagcgattcttgtgcctcagcctcccgagtagctgggattacagacacgcactgccatcacgtccggctaatttttgtatttttagta

SEQ ID NO: 129448 - DNA, 201 bp, Homo sapiens
tgaccatccactccacatccattgtccatctcctgtcatggcttcttcctcttcttcggttgacttcctgtggtaaattacactctgttaaaacagcttcytgagatggagttcgtgggtggtgatgtttagggcatcgggcctgcgtgtttgagaccctctgattagaagttcagactgggcattaccccctgggctttg

SEQ ID NO: 129449 - DNA, 201 bp, Homo sapiens
tttcttttttttttttttttttaccaagttccctatttctggatggtgtctggtcaccctgtggctgtgcctggtgtccctggccccaggagccataaggragggacatgtcccactgccctggcctgtaagttctcagcccaccctgcccttactggccgccaaatcagtgtccaggcctctctggagttctgtggcctg

SEQ ID NO: 129450 - DNA, 201 bp, Homo sapiens
ctctggagttctgtggcctgaattctcatctctagttgatgccccttctgtgggctcctgaaactcagccttccctgtgccaagtcagtcttcacgtggcyggctgcttcagtcctccaggctggttcgtcgtttctgcctctccattcttgtctttttaattctttgtgttatttgagatggagtttgagagggaatatg

SEQ ID NO: 129451 - DNA, 201 bp, Homo sapiens
agaagggagagggtccttttctcgggcttcatctttagggcgctcagcagtatgagccccgaaccgcaccctcctctggtgtttggtgaggaccgcggagrctggggctgtgcgtgcgcagcagtcagggcctgcaaagtccacacagacgtggccgccagccagccctgcccagtccagggatgggtggaggggtgcgtg

SEQ ID NO: 129452 - DNA, 201 bp, Homo sapiens
gaggctctggagccagacccgctcctcacagcgctggagtcgtgagtgctggtgggccgtggtgctggtgggcctccctttctgggtcatggggacgtctrtgagccttgctctgagcaccaggatatgttgccacctcctctgattcacattcgaatgaaccccaggttcagagcccatgttaacttggggcctgtttcc

SEQ ID NO: 129453 - DNA, 201 bp, Homo sapiens
gcttcgtggaggagacgctgacggagacgaaccgcaggaacactgtggacctggtgaggaggcttggggctgccccctcggtgcacgcacggtgctgggaygccgtcagacgctcctgcctttgccctgaggcagaggccaagggaggcacaagggccgcacgcctgcctgctcctcttgactatgcggtgcccctgcata

SEQ ID NO: 129454 - DNA, 201 bp, Homo sapiens
cccacgcctgaccactgtgtctctcccccagcaggcgccatgtggacggcagtgtttgatgagccagcgaactcaacgcccacagccccaggagtggtgarggacgtgggttccagtgtgtgggcagctggcacctcagctccagaggagaaaggctgggccaagttcactgacttccaacctttctgctggtaacaaatg

SEQ ID NO: 129455 - DNA, 201 bp, Homo sapiens
ccgccctgcctgatgttggcgtctgtaggaagcaaggaggccgccctgcctgagaactggagcccacccatgcatgtgggtgttgtgggctgatggcctgkcctgggtcccaaaggcagacctgagagctaatctggctgctttcttttctccctaaaatactcctgtgagtgtttgctttccctcagtcttcccacagca

SEQ ID NO: 129456 - DNA, 201 bp, Homo sapiens
ctttgttctccatcagcccacagggctgatcagacagacaggagaggccacgttggcgtctgtaggaaacaaggaggccgccctgcctgatgttggcgtcygtaggaagcaaggaggccgccctgcctgagaactggagcccacccatgcatgtgggtgttgtgggctgatggcctggcctgggtcccaaaggcagacctg

SEQ ID NO: 129457 - DNA, 201 bp, Homo sapiens
gttggcaggaagctgttctgtggcctgatcagagcccctggcccccagccccctagtcaggctcagaagctcccccagataaggctgagagctccaggtgagtgacagctggctcccaacactggtgtccccggttttggggtcctttgggcttaaaggagctgtggcaggaccacacgaggcggagtgggcccctccctg

SEQ ID NO: 129458 - DNA, 201 bp, Homo sapiens
agcccctggcccccagccccctagtcaggctcagaagctcccccagataaggctgagagctccaggtgagtgacagctggctcccaacactggtgtccccrgttttggggtcctttgggcttaaaggagctgtggcaggaccacacgaggcggagtgggcccctccctgagcctctgcgtcctcctgtgagaccagggcat

SEQ ID NO: 129459 - DNA, 201 bp, Homo sapiens
tgggagttcctcagaatgggcttccacccaacagacttggaactcagatgcccactggggtttcggtaggggcagaagtgcccaccaccctgcccacaggkgctgcacctcaatctcactgtggccccaggcccctccggatacgcggctatgctgcctctttctcatccggcaaagcccctgcttcaggccctcagacgg

SEQ ID NO: 129460 - DNA, 201 bp, Homo sapiens
catctgcctgaaggtctttagtacctttctcttctgcctgtaccagtcaccagatcacgtgtggagacgctgggtagctgcactgctctagggtttctttytgggaaagttaaaagggctctttctggaagaagcgggtgcactgagttgctggtgaggttggacagggtcctggtgtccccggtctccatctgctttcct

SEQ ID NO: 129461 - DNA, 201 bp, Homo sapiens
agagatgcacctggggcaggtgccccaccggcccccgggaagaaggaagccccccctgtggagggtgactcagaaggtggtgctgggcgccaggggctggsagtgtgggtatcggggacaggacatggtaccccggcctgggtgttgtggaggcttcatttggagctgaggcatttggggctcactgtggcccggagcctg

SEQ ID NO: 129462 - DNA, 201 bp, Homo sapiens
aaggtctttagtacctttctcttctgcctgtaccagtcaccagatcacgtgtggagacgctgggtagctgcactgctctagggtttctttttgggaaagtyaaaagggctctttctggaagaagcgggtgcactgagttgctggtgaggttggacagggtcctggtgtccccggtctccatctgctttcctcatccacagg

SEQ ID NO: 129463 - DNA, 201 bp, Homo sapiens
gtggcgcgatctcggctcactgcaggctccgccccccaggttcacgccattctccttcctcagcctcccaagtagctgggactacaggtgcctgctacctygcgtggctaattttttgtatttttagtagagacagggtttcaccatattagccaggacggtctcgatctcctgacctcgtgatccgcccaccttggcctc

SEQ ID NO: 129464 - DNA, 201 bp, Homo sapiens
cattctccttcctcagcctcccaagtagctgggactacaggtgcctgctacctcgcgtggctaattttttgtatttttagtagagacagggtttcaccatrttagccaggacggtctcgatctcctgacctcgtgatccgcccaccttggcctcccaaagtgctgggattataggcgtgagccaccacgcccagccaattt

SEQ ID NO: 129465 - DNA, 201 bp, Homo sapiens
aaacaaacctttacccacttctcctaaacaacccctaaaaaactgctctgaaaagcagggaatatcattgtgcaaagtaagttgtttttttccacggggcygtctgcgtaaaacttgccacttagagccctgcctgcaccgtcgtcacggcccagcctgcaggtgagcttcctcgcgcccccgcctgacctgagtgcccct

SEQ ID NO: 129466 - DNA, 201 bp, Homo sapiens
cttgatgatgagcaggatctgagtgctgcctggaggaggtttgaggtcatcaatggacaggcagcttgtcccagtacttggaacttggggcagcagagctrcctagctgggcacaacctgggccaccccacaaagggcaggagtgagaggggccaaagatggtgctcccaggccgcctggacctttttgtccagctggtcc

SEQ ID NO: 129467 - DNA, 201 bp, Homo sapiens
gcaaggggcccttctactgggcggacagctgcaaatgctacttggggaggggacacagggagccgacaggaagcggtcccgtccccaccaggcacctgctstggcccccgcccagcctggctttgccctcttgtgggtccgctgtccgttcctgatcttccccaggaactcgggccctccgtcagcactcgcacacaggga

SEQ ID NO: 129468 - DNA, 201 bp, Homo sapiens
caggctactttgatttctcagaaatacactgcagttctctgtatggcagtcttaagcatctttcactagatttattcttaggtatttgatatctttgtatyattttgagtggtgtctttttttttttttttttttttttttgagacggagtcttgctctgtcgtccaggctggagtgcagtggcgcaatcttggctcactg

SEQ ID NO: 129469 - DNA, 201 bp, Homo sapiens
ctcctgacctgatgatctgcctgccttggcctcccaaagtgctaggattacaggcctgagccattgtgcctggccaaaagtcccacatcttaaaaaaaaaraaaaagtatttgaacatcacagtggtattgaacaacaacgaaagtctagcatctgccagagaagcagcaggacttgtgccctgtgtgcccagcagggctg

SEQ ID NO: 129470 - DNA, 201 bp, Homo sapiens
tctccttcctcagcctcccaagtagctgggactacaggtgcctgctacctcgcgtggctaattttttgtatttttagtagagacagggtttcaccatattrgccaggacggtctcgatctcctgacctcgtgatccgcccaccttggcctcccaaagtgctgggattataggcgtgagccaccacgcccagccaattttta

SEQ ID NO: 129471 - DNA, 201 bp, Homo sapiens
aggcgggaggatcacaaggtcaagagttccagaccagcctggccagcatggtgaaaccctgtctctactaaaaacacaaaaagtagctcagcgtggtggcrcgcacctgtaatcccagctactcacgaggctgaggtaggagaattgcttgaccccagaaggcggaggttgcagtgagctgagcttgagcgctccagcctg

SEQ ID NO: 129472 - DNA, 201 bp, Homo sapiens
aaaactacaaagcaccaaagagtgttcttaaaataaacgaaaaacacagatcaactttatctgagcagcagtaagaatgatggctgacttcttaagtgccrcaatggaaaccagaagccagtggagtaatattttcattgtgctgaaagtaaaacaattcctgacttctaactttatatcaggaaaaattatctttcaaaa

SEQ ID NO: 129473 - DNA, 201 bp, Homo sapiens
atgatgatgaggacgaggacatctgggaggacagtgacactcgctgtgctgcccgggtgatggccagacccaggtgcggggcctgcccatccccacaaagyctctgccgaggaggttcagcccccagaacacctgtcagacgccctgtggttcgttagctggcttgcagagcagccacacctgtcctgccagctctggggc

SEQ ID NO: 129474 - DNA, 201 bp, Homo sapiens
atggcccagagcgtggaggccaggatgggaaggcgagcttggaagcacacagagatgcacctggggcaggtgccccaccggcccccgggaagaaggaagcsccccctgtggagggtgactcagaaggtggtgctgggcgccaggggctgggagtgtgggtatcggggacaggacatggtaccccggcctgggtgttgtgga

SEQ ID NO: 129475 - DNA, 201 bp, Homo sapiens
gcctcggctgaaggacttccaccagctcctgctcaacccgcccaaggtaaatggccgtggcgactgctgagtgcctttggaggcgtcgcaggagaggttgrtttgcagggaggagaagccacagcttgtcccataggtagcagagtgtggagtgaatgtgttctaagacggccattcccacacccccacttgagaagcacc

SEQ ID NO: 129476 - DNA, 201 bp, Homo sapiens
atgttaccgttttctctagttaggcaactggaatattgatattttaatcttcataaacccaggaaagctgagccacttctgaggcccaagcttaaccctgyatgtgatagaggggactgtgtaaaaatcaggaaaacagagataagccagctgtttctcttagattattgtgattattattattattattttcagacagtg

SEQ ID NO: 129477 - DNA, 201 bp, Homo sapiens
gtttaaataaatatctcagaagacttgcttgaaaacaccacagggggtaggcgcagtggctcacgcttgtaatcccagcactttgggaggccaaggcgggyggatcacctgaggtcaggtgatcgagaccagcctggccaacatggcaaaatcctgtctctactaaaaatacaaaaaggaggctgaggcaggagaatcgct

SEQ ID NO: 129478 - DNA, 201 bp, Homo sapiens
aaaaaaataaaaataaataaaaataaaagtcgacacaggaacagtgaaagagacagggatagcagtgaaggttttaaaagtgggacagagcaggacctctmactggtgctagggccagtgagtcctgtgttgtgtcacttgccctgcctccatattctcggatgtcgcaagcaagcatctgcctgaaggtctttagtacct

SEQ ID NO: 129479 - DNA, 201 bp, Homo sapiens
cccttgctcttgcagtgccccgtttgacaggatcgcagagatcaacttcaacatcgacgctgacgaggacagtgtgagcaagccgggctgtgtggggtgcsgccacccttttcccaggcagctcaggccatgcccatggctcggtctgtcatgggcctgtgcggtggggctgggagaggcccctctgtggagctcggaaca

SEQ ID NO: 129480 - DNA, 201 bp, Homo sapiens
ttgggaggctgaggcaggtggctcgcttgagcccaggtgttcaagaccagcctgggcaacatggcaagatgtggtctctataaaaaatttttttaggattwaaaaaaaaaaacagtcagcttgggtaacatggcaaaaccttgtctctacaaaaaaagtacaaaaattagctgggtgtggtggcgcatgcctgtagtccca

SEQ ID NO: 129481 - DNA, 201 bp, Homo sapiens
cctcacccaagccctggtgacgctgcgtgcaggactgcaggatcgggtggagtgtagggtgtgcgacgtggctccacgttctggggctgctgtgcaagggrcccttctactgggcggacagctgcaaatgctacttggggaggggacacagggagccgacaggaagcggtcccgtccccaccaggcacctgctctggcccc

SEQ ID NO: 129482 - DNA, 201 bp, Homo sapiens
tccctgcggactgccgtggccgctgggagagcttcgtggaggagacgctgacggagacgaaccgcaggaacactgtggacctggtgaggaggcttggggcygccccctcggtgcacgcacggtgctgggacgccgtcagacgctcctgcctttgccctgaggcagaggccaagggaggcacaagggccgcacgcctgcctg

SEQ ID NO: 129483 - DNA, 201 bp, Homo sapiens
gtttacccaggacttgttctttaagtacacctggaataactttttgcacttccaagtggaactatgcatagccgctattctctcccacgctgcccgtgagsagaggacagaagccagcggatccgagagcagggtggagcctccgcatgagaacgggaaccggagcctggagactccccagccggccgccagcctccctga

SEQ ID NO: 129484 - DNA, 201 bp, Homo sapiens
cagggctccctgcggactgccgtggccgctgggagagcttcgtggaggagacgctgacggagacgaaccgcaggaacactgtggacctggtgaggaggctyggggctgccccctcggtgcacgcacggtgctgggacgccgtcagacgctcctgcctttgccctgaggcagaggccaagggaggcacaagggccgcacgcc

SEQ ID NO: 129485 - DNA, 201 bp, Homo sapiens
gaggagtgtgacttgggatgggggcaggggggcctgtcctcaccagccttgtcatctctgagcttttctctgaggagcatgacttgggatgctggggggcrggggggcctgtcctcaccagccctgtcatctctgagcttttctctgaggagtgtgacttgggatgggggcaggggggcctgtcctcaccagccctgtcat

SEQ ID NO: 129486 - DNA, 201 bp, Homo sapiens
cggcccccgggaagaaggaagccccccctgtggagggtgactcagaaggtggtgctgggcgccaggggctgggagtgtgggtatcggggacaggacatggyaccccggcctgggtgttgtggaggcttcatttggagctgaggcatttggggctcactgtggcccggagcctgaatccccagctatttcccagccgtcctg

SEQ ID NO: 129487 - DNA, 201 bp, Homo sapiens; identical to SEQ ID NO: 22155

SEQ ID NO: 129488 - DNA, 201 bp, Homo sapiens
ctgggagaggcccctctgtggagctcggaacagtcgctttccttgcccctccccgtcctcccctccagcccggggctcccacatcccgaactaagcccctstgggagctctatggggagagcggctcctgtctcccccagaccctctggaaactcaccttggcgttttactctgcagcccagcgcagctctgtttgaggcc

SEQ ID NO: 129489 - DNA, 201 bp, Homo sapiens
gtttctgagaatgttaggctaggttagactaccttctactcccccaccctccaccccagaaaaacagccacaattgttagatgaaaaaacataaataaaagaactgacaaaaaagcaggaaacttttggatcaaaatctaactgaaaataacgcagaaaggtaatttaaacaccatagaatggggtctgcttttgtcctga

SEQ ID NO: 129490 - DNA, 201 bp, Homo sapiens
ctgtctgcgtaaaacttgccacttagagccctgcctgcaccgtcgtcacggcccagcctgcaggtgagcttcctcgcgcccccgcctgacctgagtgcccytccctgagtcagacacagtgtcgtcgccctgcaggaagccagggggcccgtctgctgctcgtggccaggctgggccttggggtgcccgaccccctccaga

SEQ ID NO: 129491 - DNA, 201 bp, Homo sapiens
tgcctgggcctccctcctggagcagccccatcttcctgtcaacctctgaggggctcccggggcaggggcgctgcctcccctttgcctgcagcaccccaggsctgcccacgcctgaccactgtgtctctcccccagcaggcgccatgtggacggcagtgtttgatgagccagcgaactcaacgcccacagccccaggagtgg

SEQ ID NO: 129492 - DNA, 201 bp, Homo sapiens
ggtctttatggtttttggtttcccaccaggcggtaaaatcagaacgaaggaagctcacaacagtaagaggttgaggttccagtgttagttacttctactcrcaacccatttacccagagtttagtcacatgatgatagctggctgtaaggagggttggaaaagttaggctgaaggagggtggccatgtacccagctgacct

SEQ ID NO: 129493 - DNA, 201 bp, Homo sapiens
gagggcccccaccatcctgagctctgggaatcttgtgtgttcatgctgcagatggacttccaggacttgggtctagtgttgctgagggtggatctgcagargtgagagaaatgacccctttggacttgggtctagtgttgctgaaggtggatttgcaagggtgagagacgtgacccctttgccctcgtttgcagctctgcg

SEQ ID NO: 129494 - DNA, 201 bp, Homo sapiens
tcaggagaccggcctgttcctgagtttgagtaggtccccatggctggcaggccagagccccgtgctgtgtatgtaacacaataaacaagcttcttcttccmaccctgtcctggccctgctgagcagcagcagaaagtaccaaaccgagcagtacacacaaagggactcttcagtgctctgggattgaaagtggttagcgtt

SEQ ID NO: 129495 - DNA, 201 bp, Homo sapiens
ttcaggagaccggcctgttcctgagtttgagtaggtccccatggctggcaggccagagccccgtgctgtgtatgtaacacaataaacaagcttcttcttcscaccctgtcctggccctgctgagcagcagcagaaagtaccaaaccgagcagtacacacaaagggactcttcagtgctctgggattgaaagtggttagcgt

SEQ ID NO: 129496 - DNA, 201 bp, Homo sapiens
tcccagactcggacgccgcagacctgtgggagcagcgcggaatgccccgccccttttcccgaggacacccaatgagggcgagaggtcacttccggggcggsttcgctaacggaaagggcggggcatccctctcgaggagcggccttgttcctcaagcggccgctgggggcgccagagcaggaccggagcgcgggccaagct

SEQ ID NO: 129497 - DNA, 201 bp, Homo sapiens
cctggcacccccacatctccaggtccagcgtggtaccccccatctccaggtccagcctggcaccccacccccatctccaggtccagccaggccctcagagkcaccctcatcccaagtccacgtgcccactgcttaccctgccccatgcttcagggtggagtgggcgcaggcacgccaggccttctttagctctggaaagaa

SEQ ID NO: 129498 - DNA, 201 bp, Homo sapiens
  misc_feature (1)...(201): n = A,T,C or G
tctgagccatgctgggccttccctcaggtgatggcactgggcatagtgcctatgtgctcctaccagatggagaggatgttcaacaccactcggatcccggncaaggacacaggtaactgagccccctcgctgctacctgtgggccatctggctggctcgctgccctcctgcctgctcatcaccaagcgtccccagtgtctc

SEQ ID NO: 129499 - DNA, 201 bp, Homo sapiens
gcctccagggcaggaccttggagggaggaacaacgagcagaaggccctggcgactgggctgagcccccaagtgaaactgaggttcaggagaccggcctgtycctgagtttgagtaggtccccatggctggcaggccagagccccgtgctgtgtatgtaacacaataaacaagcttcttcttcccaccctgtcctggccctg

SEQ ID NO: 129500 - DNA, 201 bp, Homo sapiens
agtgggcaggggaggttggattcaggagatgtttccaaatataaggttctgtgcaaagagtggccttaagggcttgagaataatggggctgggtgaggagrgagaggtgggaagaggattaagatagaggcagcccttgccatctggccccacggtgatgataactggctggacagtacctagagtctgtgcgccccttgt

SEQ ID NO: 129501 - DNA, 201 bp, Homo sapiens
ccacagatctctgtgggtccagcgttcctggtcgccgctctagcctggggcagaagcagaaatgcaggaggcacgcgtttaaatcaggacgccctcaatgkgaggtgcgcaggccgaggagggggctgcggcaagctgcgagtcttcactttcttcggctcttgggtttgactctgtaattggttctaggcctggaggaga

SEQ ID NO: 129502 - DNA, 201 bp, Homo sapiens
gtcagacatgagtgtgcccagggaggttcttccccttggtgtctcccctgagacagttcacagccacccgaggctggcctcaagaggaccccctgcagccyttgcccctctccaataggtgtggcccctaccagaccccgcagacccgggcacttctcagcatggccatcttctccacgggcgtctgggtgacgggcatct

SEQ ID NO: 129503 - DNA, 201 bp, Homo sapiens
tataaatgtgaactgcttttaatcctctttaccactggcaattgaaaagaatgttcaccaagtcaataattgcattatcaagagccagaggtgcatttatyggttccagtaaagataccacacctagcacagctgtgtgatcggggacacgacttggctaagtttgtgcagggcatcatcatttacttgaatccaccaaga

SEQ ID NO: 129504 - DNA, 201 bp, Homo sapiens
cagccattggcagtcacggggcagccctcccctatgacaaccattgtcttagccctacatccgctcatttgatgcagtcagacatgagtgtgcccagggargttcttccccttggtgtctcccctgagacagttcacagccacccgaggctggcctcaagaggaccccctgcagcctttgcccctctccaataggtgtggc

SEQ ID NO: 129505 - DNA, 201 bp, Homo sapiens
tcaaacgatcctcctacttcggcttcccaaagtgcagggattaaaagcgtgacccactgcccccagccagaatcagttttcttttttttttttttttttttgagactgagtctgactctgtcgctcaggctggagtgcagtggctcgcggcaacaaggcctgggttcaagggattgtcacgcctcagcctcccgtgtagct

SEQ ID NO: 129506 - DNA, 201 bp, Homo sapiens
agcaagactccatttcaaaagaaaaaaagaaatgattgccggacaagtcacacagtgataggagcaggggtgcagtagtctggcctgaggggtagataggmgaggggtgggaaagaatagcagagccagtgtatcctattctttgggcttcaggtacctaaaacagatccaggacctgcccccaactggcctccctgagat

SEQ ID NO: 129507 - DNA, 201 bp, Homo sapiens
acctctacctgtttgggtgccagtaagcctcccctgggaaggtgcctgcgttttggtagtcttctggggacatcagctcaccccgtcctgagatagcagtraacagagtttccaacaagctagctttcaattaacatcaaaattcagcattaaagttcttttatctcatttgttctgggttaaaatagtgagatgaggaac

SEQ ID NO: 129508 - DNA, 201 bp, Homo sapiens
ctggagatgcagttccagaggatcctggacgacccctccccacctcagcctggggaggagaagctggcagccctcactgcaggaggaaggtattggcctcygggaagggactgtccccaccctgagttcagggctccgtgaggagaggagcgtggccctgcctgccaccctggaactggaggctggaggcacaactagggg

SEQ ID NO: 129509 - DNA, 201 bp, Homo sapiens
tagggtttgggttatagaatagggttaaaagccgggcatggtggcaggcacctgtaatcccagctagtcggaaggctgacgcaggagaagcccttgaaccygggaggttatgggaagctaagatcacaccactgcactccagcctgggcaacagagcaagattccatctcaatttaaaaaaaaagtgagagaaaaagagag

SEQ ID NO: 129510 - DNA, 201 bp, Homo sapiens
gctgtccttccaggaacttacacacaacttgcccatagcagaggttttaaactgctttttagtggtagaacccctttatcaaagcaaaagaagtagaatayaagcacataaaatagcttataaaaaggcagctcgggccgggtgcagtggctcacgcctgtaatcccagcactttgggaggccgaggcaggtggatcacaa

SEQ ID NO: 129511 - DNA, 201 bp, Homo sapiens
gtttcgctatgttggccagggtggtctcaaactcctgacctcaagtgatctgcccgcctcggcctcccaaaatgctgggagtacaggcgtgagccaccacrcccggaccagttactttttaaagtggctctaggtccctttagggaaggattggaggaatatttcttggtatatgctcagatgctggtattgtaagatcct

SEQ ID NO: 129512 - DNA, 201 bp, Homo sapiens
gtctcgtccattgtcctcctctggctttccttgtcgctagaaaacatcatctctcagtcactcccttgaaggtcattttccatgcatctccagctgcattyaggacgcttttgtctttggtgttctgaagtttcaatgtggtctatctaggtgtgggtttattttgtatttttttctgcatgaggttctcaattatataaa

SEQ ID NO: 129513 - DNA, 201 bp, Homo sapiens
tcttttttttttttttttttttgagactgagtctgactctgtcgctcaggctggagtgcagtggctcgcggcaacaaggcctgggttcaagggattgtcaygcctcagcctcccgtgtagctgggattacaggcacaagccaccaaacccggctaatttttgtatttttagtagcgacggggtttcgctatgttggccagg

SEQ ID NO: 129514 - DNA, 201 bp, Homo sapiens
caggcacgccaggccttctttagctctggaaagaataaggctgccttggaggccatcgagcgtgccgctttcttcgtggccctggatgaggaatcctactsctatgaccccgaagatgaggccagcctcagcctctatggcaaggccctgctacatggcaactgctacaacaggtacggcagccccagccccacaggttac

SEQ ID NO: 129515 - DNA, 201 bp, Homo sapiens
aagggatgaaacggtaaccactgctttataagtctttgagggcgaaatacctctgcaattacacctggaatgcagcattgtttctgacttactatcttggraaggtttcagtagggtgaggagtttcaaaggtttctactttgcgcttccttacatatggtaccaaaggcctgggatcaatgtatacgctccgccctctgc

SEQ ID NO: 129516 - DNA, 201 bp, Homo sapiens
ctcaaacgatcctcctacttcggcttcccaaagtgcagggattaaaagcgtgacccactgcccccagccagaatcagttttcttttttttttttttttttttgagactgagtctgactctgtcgctcaggctggagtgcagtggctcgcggcaacaaggcctgggttcaagggattgtcacgcctcagcctcccgtgtagc

SEQ ID NO: 129517 - DNA, 201 bp, Homo sapiens
gctcaaacgatcctcctacttcggcttcccaaagtgcagggattaaaagcgtgacccactgcccccagccagaatcagttttcttttttttttttttttttttgagactgagtctgactctgtcgctcaggctggagtgcagtggctcgcggcaacaaggcctgggttcaagggattgtcacgcctcagcctcccgtgtag

SEQ ID NO: 129518 - DNA, 201 bp, Homo sapiens
gaaagaataaggctgccttggaggccatcgagcgtgccgctttcttcgtggccctggatgaggaatcctactcctatgaccccgaagatgaggccagcctyagcctctatggcaaggccctgctacatggcaactgctacaacaggtacggcagccccagccccacaggttacagcttaaggttaaaagttagggttatgg

SEQ ID NO: 129519 - DNA, 201 bp, Homo sapiens
ggctcaaacgatcctcctacttcggcttcccaaagtgcagggattaaaagcgtgacccactgcccccagccagaatcagttttcttttttttttttttttttttgagactgagtctgactctgtcgctcaggctggagtgcagtggctcgcggcaacaaggcctgggttcaagggattgtcacgcctcagcctcccgtgta

SEQ ID NO: 129520 - DNA, 201 bp, Homo sapiens
acctgggacccacccatcccaaatacctccctgctgaagcatgaccgtggtttccggggtactgaagcatgactgtggggctggtttccagggtactgggyagtgcactgggtgcttctgaagtctacttatccaagagagtgcagctgtctcccacagaaaccttcacatgggctagcttgtcagaaggctagagaaccc

SEQ ID NO: 129521 - DNA, 201 bp, Homo sapiens
cgttacgcagcagccacgctacctcctcaccgtttatcaggatcaagtatcccctcctttgtggcctgctggtccaccagtatgaggagctgagagtaacytggtggtctttgcagattcaggctcagcagaggtatccttcctgcaaccagcaggagtgccctcgtggaagcgttcctacctgggaaacaggctctaatc

SEQ ID NO: 129522 - DNA, 201 bp, Homo sapiens
tccagagatgcctccctcaggggtaaggagtgaaactggaagggcacaggtgccaccagggagggctgggcccagctcccaaggctgaggttcctgagctrggcagatacaggacagcagccattggcagtcacggggcagccctcccctatgacaaccattgtcttagccctacatccgctcatttgatgcagtcagaca

SEQ ID NO: 129523 - DNA, 201 bp, Homo sapiens
cccactcaaagctggcagttttcccgttacccaataaaggggtcagagaggtatcctctagcgcggtgcatgctgactccaaaacacagaggtgcctcaaygctgtgcctctttcttccttgtaaggatgcaggatgcaataacttgtccctggcttgccctcaaacgctgcacccctgagaatgtcactgatatggcagg

SEQ ID NO: 129524 - DNA, 201 bp, Homo sapiens
ccctccccagtcccctggctgcagcttagaataataaatactaggacttggggaggaggagagtgatgggggtatgaagacgaccctgaggtggggatgcygcccggagcaccagcgatcccagaacaggcagcagctgacacatcggtgaccttttccctacatttggctatttttagctctaaagccaccatcctcacg

SEQ ID NO: 129525 - DNA, 201 bp, Homo sapiens
tgcagtgtctagggctggggcccgttcctgcaactcttgtgggaagaacaagtacaatatcagcttggctttcagatcttcaaggtttgatttatgccttyttcacccttcttgttgccctcaggtagcagatgatggctatggagtttcctacatgattgcaggcgagaacacgatcttcttccacatctccagcaagtt

SEQ ID NO: 129526 - DNA, 201 bp, Homo sapiens
tgagatgggcaacctcaggtgagggcaggcaggacaaggctaatggtaatggtgtccgcccttccagtagttgctgagggctggtgtcagggcctggcctrttagggtggctctgatcctcctctagtcactcctgctcaggacccatgctcccatacccctgtaggaagttactagagtctaccccatcgccagtcgtct

SEQ ID NO: 129527 - DNA, 201 bp, Homo sapiens
aaatgattgccggacaagtcacacagtgataggagcaggggtgcagtagtctggcctgaggggtagataggcgaggggtgggaaagaatagcagagccagkgtatcctattctttgggcttcaggtacctaaaacagatccaggacctgcccccaactggcctccctgagatgaacctgctggagatgtacagcctgaagg

SEQ ID NO: 129528 - DNA, 201 bp, Homo sapiens; identical to SEQ ID NO: 22232

SEQ ID NO: 129529 - DNA, 201 bp, Homo sapiens
agcagagggagggctgggcagctcacacaagccttatgtggcatgatgcacaggggaccacggggtggtggccagggagctcctgcaccctcagcagaacygtgtctggctcagagtaggtcgcagacaccacgtgttggacaggtgctttgggtatgtggcctctgaccagctgtggcctccattgcaggtgctctcgga

SEQ ID NO: 129530 - DNA, 201 bp, Homo sapiens; identical to SEQ ID NO: 22234

SEQ ID NO: 129531 - DNA, 201 bp, Homo sapiens; identical to SEQ ID NO: 22235

SEQ ID NO: 129532 - DNA, 201 bp, Homo sapiens
catccaggaaggtaggagaaggcatctgagtctcctaacccaagatggaagagccagagggctctggagtgagcagaacctcaccccattcccccagggamcatcttgctgctctcagagccagaaaatgctgacagcctcatgctggtggacttcgagtacagcagttataactataggtgaggctggaaagatggcttc

SEQ ID NO: 129533 - DNA, 201 bp, Homo sapiens
gctgtggagacagaatgtacaaattctacgtgtaagcactgggaatgatggtgagaagtagctaatcccaacccttgggttcctggacctgtgtctttctkcttggatccacatgaagtatctactgggggcagagcaccatatattagactctgattcagtgtatatatcccaactcctcaggatactgtcctagaacca

SEQ ID NO: 129534 - DNA, 201 bp, Homo sapiens
tggagacagaatgtacaaattctacgtgtaagcactgggaatgatggtgagaagtagctaatcccaacccttgggttcctggacctgtgtctttctgcttsgatccacatgaagtatctactgggggcagagcaccatatattagactctgattcagtgtatatatcccaactcctcaggatactgtcctagaaccaggac

SEQ ID NO: 129535 - DNA, 201 bp, Homo sapiens
aaagaaagaaagaaagaaagaaagaaggaaaagaaagaaagaaagaaagaaggaaaagaaagaaagaaagaaagaaggaaaagaaagaaaagaaagaaagrgaaaagtgaattagaaggaaagatcagaatcaatggaataaaaaatatatacacagttgagggtaatcaatgaaaccaaaagctggttctttaaaaaact

SEQ ID NO: 129536 - DNA, 201 bp, Homo sapiens
tgctctagggatggtatctcagcaggggctcagcactgatcgctttcagcaggagtaatcatgagacaagccttgagaaagaaggcctgtgctggtggacrctaacctgtgctccttctgcatgacgccgccactcacagtccactgttcaagcacaggggtagccaggggcacagctgactgacatcccatccatcctgc

SEQ ID NO: 129537 - DNA, 201 bp, Homo sapiens
gagagatgcacatattgtgtggccactcctgtaggtccatcttcccctcttgctcttttcaggtccctgaccagccagcaggacgtcacaacccagaagtycatatgcgtccctccctcaggccactactctgtccactgcctccatacaaagtggatatccacacgaactgctggaagctcagccccatggaggatttcc

SEQ ID NO: 129538 - DNA, 201 bp, Homo sapiens
agatgcagttccagaggatcctggacgacccctccccacctcagcctggggaggagaagctggcagccctcactgcaggaggaaggtattggcctctgggragggactgtccccaccctgagttcagggctccgtgaggagaggagcgtggccctgcctgccaccctggaactggaggctggaggcacaactaggggaggg

SEQ ID NO: 129539 - DNA, 201 bp, Homo sapiens
ttagggtcaccttgaatgggactgtagtgtacctatggttcattttcagttcatatcaacacatcaaactgacctatatacgaaccagaccagaatgcttrtctgctaagggagaaatatcagtgcaaagcagatgtggggccacactgccacctcttcctgtaaataactgttacccactagacacgcttgggtccaagc

SEQ ID NO: 129540 - DNA, 201 bp, Homo sapiens
gggagaaatatcagtgcaaagcagatgtggggccacactgccacctcttcctgtaaataactgttacccactagacacgcttgggtccaagcccaaggctwcctttttcattgtaccatcaattgctactgagcctctgacctactgacttggaggatctgacaacacctcgcttgggcagaccctgtcgcatggtcgctg

SEQ ID NO: 129541 - DNA, 201 bp, Homo sapiens
ccgttgttgggtgtgtcctttgtcccactgccctcctacacgcagggcttgggccatctcatgatggagcacggcctgttttcctggcttgctcccctgargctccctggagtgctgggccagctttcccgcccacaccccacctgggcctgtggtcctgggactgagcaggagcaacatcctctttgtggtgttggtgtc

SEQ ID NO: 129542 - DNA, 201 bp, Homo sapiens
agccagaaaatgctgacagcctcatgctggtggacttcgagtacagcagttataactataggtgaggctggaaagatggcttcccatagatctgttcccayagggctcttgaaaacaggccagctgcccagggcatttggggactgaatgtccaccttattctcccaggggctttgacattgggaaccatttttgtgagtg

SEQ ID NO: 129543 - DNA, 201 bp, Homo sapiens
caccagcaggtgctcggtctctacctgggtctggtagtgtgcctgatactgctctcacttggcgagtagttctctgctgcagaaggcatggtcttgtccargaactctaggacagtgtactgcaactcttccgttggagtttgccagagatgccatatagggtccttcctaccccaaataagccccccggtaacccattgg

SEQ ID NO: 129544 - DNA, 201 bp, Homo sapiens
atgagctgggtgcagtggcacacacctgtgatcctagcactttgggggccaaggcaggtggatcacttgagtgcaggagctcaagaccagcctgggcaacrgagcgagaccccttcataaaagtagttaggattgtgattagtggttgggtagggctagtggctagggttaaaagctagggtttgggttatagaatagggt

SEQ ID NO: 129545 - DNA, 201 bp, Homo sapiens
ggggtcggggaagagggcccggcaagggagccctcgcgccggagctgcagctgcagccgccgccccgccgccccgccggctcccacggggcagagacgcarctcctctccggtcttcccgtacgctaccgcgcccgggcagttcctcgcccgcgcacgcgccgctccgccaactgattggcctccggcgcctcggattggc

SEQ ID NO: 129546 - DNA, 201 bp, Homo sapiens
ggcaagggagccctcgcgccggagctgcagctgcagccgccgccccgccgccccgccggctcccacggggcagagacgcagctcctctccggtcttcccgkacgctaccgcgcccgggcagttcctcgcccgcgcacgcgccgctccgccaactgattggcctccggcgcctcggattggcccaggccgtccaacagcagc

SEQ ID NO: 129547 - DNA, 201 bp, Homo sapiens
tgaacctgctggagatgtacagcctgaaggatgagatgggcaacctcaggtgagggcaggcaggacaaggctaatggtaatggtgtccgcccttccagtakttgctgagggctggtgtcagggcctggcctgttagggtggctctgatcctcctctagtcactcctgctcaggacccatgctcccatacccctgtaggaag

SEQ ID NO: 129548 - DNA, 201 bp, Homo sapiens
gagcccccaagtgaaactgaggttcaggagaccggcctgttcctgagtttgagtaggtccccatggctggcaggccagagccccgtgctgtgtatgtaacmcaataaacaagcttcttcttcccaccctgtcctggccctgctgagcagcagcagaaagtaccaaaccgagcagtacacacaaagggactcttcagtgctc

SEQ ID NO: 129549 - DNA, 201 bp, Homo sapiens; identical to SEQ ID NO: 22213

SEQ ID NO: 129550 - DNA, 201 bp, Homo sapiens
  misc_feature (1)...(201): n = A,T,C or G
cctccaggcatccatgtccaccatagaatttggttacttggtaagtgaccctggggatgggaatgctagctggggggctggggagcagcagcagccacacncttccaggaggcctggggagtcccgggtggctgtgggcagcctgaggtggatgtagaatgctggtcccacgtcttctcaccactgtgtggggtgggtttc

SEQ ID NO: 129551 - DNA, 201 bp, Homo sapiens; identical to SEQ ID NO: 22237

SEQ ID NO: 129552 - DNA, 201 bp, Homo sapiens
ttcaccccggcagcatgtgcaggatgtactggaagagggagacagaacacctcaggcccccgaatagattggtccttgggtcagcaagactcaggtgacayccagacagaggcccccaccccgcgggctctgttcctctgtaggaccttgtgctcatcaagaatacagacgtgcaggcagcccgcctgggaaacatcatcc

SEQ ID NO: 129553 - DNA, 201 bp, Homo sapiens
ggagctcctgcaccctcagcagaaccgtgtctggctcagagtaggtcgcagacaccacgtgttggacaggtgctttgggtatgtggcctctgaccagctgyggcctccattgcaggtgctctcggaaccctggcgtctctccaccagccagatcccccaatcccagatccgcatgttcgacccagagcagcaccccaatca

SEQ ID NO: 129554 - DNA, 201 bp, Homo sapiens
ggagcagcagcagccacactcttccaggaggcctggggagtcccgggtggctgtgggcagcctgaggtggatgtagaatgctggtcccacgtcttctcacyactgtgtggggtgggtttccttccctaggactatgcccagtctcggttccagttctacttccagcagaaggggcagctgaccagtgtccactcctcatcc

SEQ ID NO: 129555 - DNA, 201 bp, Homo sapiens
ctgaggtggggatgccgcccggagcaccagcgatcccagaacaggcagcagctgacacatcggtgaccttttccctacatttggctatttttagctctaawgccaccatcctcacgagactctggggccccccaggctcccagacctttgagcaaccttcaccgcacagaaacccagccgcgccctgcaattcccaccgcg

SEQ ID NO: 129556 - DNA, 201 bp, Homo sapiens
  misc_feature (1)...(201): n = A,T,C or G
acctcccgccttccggctccataagggcgcctgtttctgcccacagaatggcatcctcaggggcgtgtaccctggcagccccaccagctggctggtcgtcntcatggcaacagtgggttcctccttctgcaacgtggacatctccttggggctggtcagttgcatccagagatgcctccctcaggggtaaggagtgaaact

SEQ ID NO: 129557 - DNA, 201 bp, Homo sapiens
cagcaacttgaccaggatctgggctgtgagcagcagccagtggaggggttcaggcacctgggttgagactctttggactcctttggggttctgagctagasgggagaggcagacagggcactggtgcctggtgtgtggtttgtcctggaggggctgggatggctctgagggtctcagggagttgctggttggtttccattt

SEQ ID NO: 129558 - DNA, 201 bp, Homo sapiens
gaacgtgtcttgctttgtgtccctctgcagagccggacagcagaatggaggccaggctgctgcttttagagctcaggaagtcagtctgcctctgccccatrtaactggcccttctgagtctctgggtctcccagccacctgggctgtatggcatgcctcttctctcctttcccacggtccaaagcacacttgacttgccag

SEQ ID NO: 129559 - DNA, 201 bp, Homo sapiens
tggagatgcagttccagaggatcctggacgacccctccccacctcagcctggggaggagaagctggcagccctcactgcaggaggaaggtattggcctctrggaagggactgtccccaccctgagttcagggctccgtgaggagaggagcgtggccctgcctgccaccctggaactggaggctggaggcacaactagggga

SEQ ID NO: 129560 - DNA, 201 bp, Homo sapiens
cagagcaagattccatctcaatttaaaaaaaaagtgagagaaaaagagagagagaatagggttagtaattagggttaaaggttggggttgcaggtcaggcwcctctggacattcccagctttggttcttcatgtgtctactcttcctgcaggtggtttgacaaatccttcactctcatttccttcaagaatggccagttgg

SEQ ID NO: 129561 - DNA, 201 bp, Homo sapiens; identical to SEQ ID NO: 22242

SEQ ID NO: 129562 - DNA, 201 bp, Homo sapiens
gatctcttccagaaggctgctaagaagcaccagaatatgtaccgcctggccatgaccggggcagggatcgacaggcacctcttctgcctttacttggtctmcaagtacctaggagtcagctctcctttccttgctgaggtcagcaccgttgttgggtgtgtcctttgtcccactgccctcctacacgcagggcttgggcca

SEQ ID NO: 129563 - DNA, 201 bp, Homo sapiens
aaagctgagcccggcctctgggggctgattctccctcagactgtcttttgcgtaccctcctcctgaagatgtcttggccggctgtgccctttctccaccarctaaacgtcatgcctcctagacatgacccagagtcctgcttggagagccctaccctcagctgacccttcccatgtcttggcagtgccaggcggtcatcga

SEQ ID NO: 129564 - DNA, 201 bp, Homo sapiens
  misc_feature (1)...(201): n = A,T,C or G
aactaaacgtcatgcctcctagacatgacccagagtcctgcttggagagccctaccctcagctgacccttcccatgtcttggcagtgccaggcggtcatcnagagttcctaccaggtggccaaggcgttggcagacgacgtggagttgtactgcttccagttcctgccctttggcaaaggcctcatcaagaagtgccggac

SEQ ID NO: 129565 - DNA, 201 bp, Homo sapiens
cagaaggccctggcgactgggctgagcccccaagtgaaactgaggttcaggagaccggcctgttcctgagtttgagtaggtccccatggctggcaggccaragccccgtgctgtgtatgtaacacaataaacaagcttcttcttcccaccctgtcctggccctgctgagcagcagcagaaagtaccaaaccgagcagtaca

SEQ ID NO: 129566 - DNA, 201 bp, Homo sapiens
cacggagaccgggcactgcctgggcaaaccgaaccctgcgctcgcacctcctacacggctgcagtgggacattccaaaacaggtgggttggaagctcccaragcaggtgtgagaccacaaagcagcaggtgggtacagccccgacgaggcctgagcctcctcctcccctgctggcctcactgcctggcccagccctcggga

SEQ ID NO: 129567 - DNA, 201 bp, Homo sapiens
aacaggtgggttggaagctcccagagcaggtgtgagaccacaaagcagcaggtgggtacagccccgacgaggcctgagcctcctcctcccctgctggcctyactgcctggcccagccctcgggaaggcacagggcacgtctcaggatacctgtagagtccaaactggcttcagggaggacagagaccacccaccgcccctg

SEQ ID NO: 129568 - DNA, 201 bp, Homo sapiens
ctccctcaacctcaggacgtccccagcaccgcacctgccagtcccagactcggacgccgcagacctgtgggagcagcgcggaatgccccgccccttttccsgaggacacccaatgagggcgagaggtcacttccggggcgggttcgctaacggaaagggcggggcatccctctcgaggagcggccttgttcctcaagcggc

SEQ ID NO: 129569 - DNA, 201 bp, Homo sapiens
cagtcccagactcggacgccgcagacctgtgggagcagcgcggaatgccccgccccttttcccgaggacacccaatgagggcgagaggtcacttccggggmgggttcgctaacggaaagggcggggcatccctctcgaggagcggccttgttcctcaagcggccgctgggggcgccagagcaggaccggagcgcgggccaa

SEQ ID NO: 129570 - DNA, 201 bp, Homo sapiens
gcagatacaggacagcagccattggcagtcacggggcagccctcccctatgacaaccattgtcttagccctacatccgctcatttgatgcagtcagacatragtgtgcccagggaggttcttccccttggtgtctcccctgagacagttcacagccacccgaggctggcctcaagaggaccccctgcagcctttgcccctc

SEQ ID NO: 129571 - DNA, 201 bp, Homo sapiens
agggcgccgtcttcctcaccacgtaccgggtcatcttcacggggatgcccacggaccccctgggtgagcctgcagactctctggccctgtcgccccctctsccccaggtctttgggatggatgggctttccctgcctccctctcccttttctcgggggttctgggtgcccgtgggaaacgggcctttgtctgctccttccc

SEQ ID NO: 129572 - DNA, 201 bp, Homo sapiens
gggcccagcctgacgccatctcacgcctgctggaggtgcgtgtgatcccagagcagggtctggcctggcacccccctcctctcgctcagacaccagggtcrtgcgtgtgtgtgtacactcgtacatgcacgtaagtccggttacccctgggggttggtgtggccctgccgtctccccaccatgtgaactgcctactggcct

SEQ ID NO: 129573 - DNA, 201 bp, Homo sapiens
tgagtgctgcctgggaggggagaggtcctgacggtctctcgctctacctgcaggactgcacttctctggacgagcatggcattgcggcggctctgctgccwctggtcacagccttctgccgggtgagtgctggcatggctgaggtctccttcccagcccccccttcctggtggctgaggtctccttcccagccccccttcc

SEQ ID NO: 129574 - DNA, 201 bp, Homo sapiens
agtgctgggattacaggcgtgagccactgcgcctggccagctctgacctttttacaaggatacactgggccctggttggcgtccaaagcaggctggtgccscgtcctcactgtgagctgggcgcctgcagtgtggcagccgtcagaggacacagggcgtgttgggctggcattgtgcttggcctgtagtgaccacttggtg

SEQ ID NO: 129575 - DNA, 201 bp, Homo sapiens
aagtgctgggattacaggcgtgagccactgcgcctggccagctctgacctttttacaaggatacactgggccctggttggcgtccaaagcaggctggtgcyccgtcctcactgtgagctgggcgcctgcagtgtggcagccgtcagaggacacagggcgtgttgggctggcattgtgcttggcctgtagtgaccacttggt

SEQ ID NO: 129576 - DNA, 201 bp, Homo sapiens
gggagtggggaaggccagggccagattctgcagcgcttcccagagaaggactgggaggacaacccattcccccagggcatcgagctggtgagttgggggcrtgctgagacggtgctggcaggtggggagggcaggtgggcacagccctgcccttgtccctgactgaggggcctccacagtgcccggccccccgctgggcta

SEQ ID NO: 129577 - DNA, 201 bp, Homo sapiens
aacccccccagctgggagcaccggggccagccgccccctgaggaccaggaggacgagatctcaggtggaggggtgggggtggagtcctgggtggtctctgratgctgacattggccagggaggatcagggcaggcggagtggccctgtgatgaccacgtgtgcccggcctgtgcagtgtcggaggagctggagcccagcac

SEQ ID NO: 129578 - DNA, 201 bp, Homo sapiens
tgcctgcaggtgaggcctcttatcctgctagtgacatggctcatggcgcatgagcgggaacaggcgggcagaccctggtctgtgagtgagagtggagagayggtgcaagagactcctgtgccagtgggcaggggtcctcggtctgcagggaacagggtggagagaaccattgttgggggcaggtgccggggcctggggtct

SEQ ID NO: 129579 - DNA, 201 bp, Homo sapiens
ccagctcacaggtgcagcatctgcgtccttgtgtctggcctggtgaacttgtacttgtggagttgtcgggcccactggaggttttagtctttattggtcgscaaagccccagagtctggcacaccccacctgaaaggcatttgggtctcctggacacctgctgccctccctgccagggccccgagtgggtcttctctgtgc

SEQ ID NO: 129580 - DNA, 201 bp, Homo sapiens
acgtggctgctccagtcccattgctgtatcaaaccccaatgtcaccagagacgtagcagcatgcgaggccccggccacctcctcccactgcccccaaggasgggggccagctggcctcaggccttaaactgggcaaggctgggtgccgcctgcactgctcctactcacaggctttctcagggccttggctccggctgccct

SEQ ID NO: 129581 - DNA, 201 bp, Homo sapiens
tctctgctcatgtctatccaagtgtgtgtcttatggcaccgtcagtcatgagcatctgtctttttctttagagagggagttctcgcttgctaggaccacayagtcctcatccccactgtgcaggttggctgtcaatgttgtcttgacccacagagggagctgtctgcaccgaggcacctatgaggggcatggaggaggcct

SEQ ID NO: 129582 - DNA, 201 bp, Homo sapiens
gtctttgggtccttgtcctttccttggggcgccggccctcaagtccgtgtcttgggtgtgccttgcaaacccaggcctcagctcacagccactgagatttygagtttacacaagcgcttgccttcgtgtgacacagatacaggcctttgcctggggcctgcttctctctctgtcatggctgcgaggggaaggggagcctgg

SEQ ID NO: 129583 - DNA, 201 bp, Homo sapiens
aggtgctcaggaagccatctgggcatccttcggtggtcgtcctggaccaagtctccatccttcccgtctagctgctgcccctctaggtcctgctggctgtrgggctggtgttctaacagggagctgccaaaccccatcttctgggacctgtactggggacttgtctgtctctgaagcagctgggatagggaagagtttggg

SEQ ID NO: 129584 - DNA, 201 bp, Homo sapiens
ggcagtgtgtggggatggctgtgtggtcaggcaggggctggatcttgagcctggaggtgggattgagcttgccttcccagttaccctgttttttgtcagtscagttgtcactgtccccaccaaggacctggagttctctcttttttgtgtttcttctgctggacacccccctacacttcctgaagcctctttagcatcttc

SEQ ID NO: 129585 - DNA, 201 bp, Homo sapiens
ccttggccagctgcgggcggctgtggctctagtggctccaggggcgcggacccgcggctcgccagcccgcctctgaccttggtgctgcgtctgaagccccyggcggtcttggcggggtgcaaagagggggtggagttcgggtttggtgcatggagaagcggtgtttgatttgaaactgggaggatttgaggaggaagcgtc

SEQ ID NO: 129586 - DNA, 201 bp, Homo sapiens
gggctggtgattcccccttggatgggtggggctgggcacaaagtgtgagaactgtcttcccccagacattgtccagatgcacatcgagaccctggaggccrtgcagcgggagagccggaggctgccgcccatccagaaggtttgcgggggccgttggggctgcgggggcccaaggcccgggctgcatcctgagctcctgct

SEQ ID NO: 129587 - DNA, 201 bp, Homo sapiens
caggaggacgagatctcaggtggaggggtgggggtggagtcctgggtggtctctggatgctgacattggccagggaggatcagggcaggcggagtggcccygtgatgaccacgtgtgcccggcctgtgcagtgtcggaggagctggagcccagcacgctgaccccgtcctcagccctgaagccctccgaccgcatgaccat

SEQ ID NO: 129588 - DNA, 201 bp, Homo sapiens
tttatgttgaaaggtggaggggcagccaagaaggcaggtgctggggaggcaggcagaaagggcttgaggggacagagtggatgggtgggagaaatttagcrgggcaggacgggaaatgaggggctcagttcccggcgaagcccttctgtttgctgatgtggcagctgctgagggggtgggaagaggtcggggcctggacat

SEQ ID NO: 129589 - DNA, 201 bp, Homo sapiens
caagaccctgaggctctggtgtggggatgctccctggagtctggagggtgtgaggcgcccttcactgtctcctttctgggcgtcgtcttcttgggcctgcrgccccccatcaaaggcttctttgtggccccctggccagtgctctgggcttaggtcagttctggggacagggtgcctggtcttacctcctgggctgggaca

SEQ ID NO: 129590 - DNA, 201 bp, Homo sapiens
tacctgtggtctccccctgccaggcaccctgtgctgggcacagggacatccctgccaggcctagagggccttgtgtttttaaggcagtcaaatcttgcagmctggttcagtgccagctccaagggctattgggtagctgcaagggtcaattatgcattcctgtgagtcaggtttttccaacccaggcccttgactctgccc

SEQ ID NO: 129591 - DNA, 201 bp, Homo sapiens
cagccagtcccacctcgggtctgtcagtacaccagggtctgcctggggacacagagctctgggctgactctgggctggctctggccaaactactgagcccygatcctttttttgctgcagaggacgatctctttgggggctggtgaccggcaggtcatccagactccactggccgactcgctgcccgtcagccgctgcagc

SEQ ID NO: 129592 - DNA, 201 bp, Homo sapiens
ttgttttcgagcagcccaagctgctgcggccgcgcctgctgccgggtgaggagtgtgtgctggacggcctgcgcgtctacctgctgccggatgggcgtgargagggcgcggggggcagtgctgggggaccagcattgctcccagctgagggcgccgtcttcctcaccacgtaccgggtcatcttcacggggatgcccacgg

SEQ ID NO: 129593 - DNA, 201 bp, Homo sapiens
acgcacagtgtgctgagcatggtgaggggcaccatgggcaagcgggagccttgggggcctttgggatgtggctacctggcagcacggggagcctagagccrgggccagcgtgcagctgcctgctccattctgtgctggcaggtcctggacccggagctggagttggctgacctcgccttccctccgcccacgacatccacc

SEQ ID NO: 129594 - DNA, 201 bp, Homo sapiens
cagtgggctgcatgtcaacagcgcccggcggctggaggttgtgcgcaactgcatctcctacgtgtttgaggggaaaatgcttgaggccaagaaggtgaggrctgtgcaggctccagccgggccagggcagcgggtttcagaggagacccaggctgcacttcacccttgtgagtgctgacgctgccccagggcctcctctgc

SEQ ID NO: 129595 - DNA, 201 bp, Homo sapiens
gcccctttgctgtggtgctccctcccctctgtgggctgccctgcagacccagctgcactagcgcccctggacgtcccgtctctgcctcctcggctcagcawgctcccgtgtgttgctctggccctgcctccctgcactgtggctgggcagaaaacaggtgactgtggggcccatcttatgtggtcccatgtcttaggctcc

SEQ ID NO: 129596 - DNA, 201 bp, Homo sapiens
cagccaccttcacgcctctgcctcctctcagctacccagggctgctgatcgtgccccagagtgtccaggacaacgccctgcagcgcgtgtcccgctgctaycgccagaaccgcttccccgtggtctgctggcgcagcgggcggtccaaggcggtgctgctgcgctctggaggcctgcatggcaaaggtgtcgtcggcctct

SEQ ID NO: 129597 - DNA, 201 bp, Homo sapiens
tcccagccccccttcctggtggccgaggtctccttcccagccgcccttcctggctgcatccagctgaccttctcccctggctcctgcagaagctgagcccrggggtgacgcagtttgcatacagctgtgtgcaggagcacgtggtgtggagcacgccacagttctgggaggccatgttctatggggatgtgcagactcaca

SEQ ID NO: 129598 - DNA, 201 bp, Homo sapiens
tcagaacattaaaaatggactcaacgtaaaataatcttctggacccttctaggacgacatggccgtgaccggtagtgctagaaaccagtcttcgagccccyagtgccacaccatgtccccccacctgcatacctgtggtctccccctgccaggcaccctgtgctgggcacagggacatccctgccaggcctagagggcctt

SEQ ID NO: 129599 - DNA, 201 bp, Homo sapiens
ccctcccactcagccactgaggacaaggtggggcccaggcttctgggagggggagctggcacaaaaggaagtcctggggttgatgtgtttgagcgttaggygaagtggttccccccatcccccaaacggaaaaatgtcagtatttgctaagctgtagagacctgatgccgtgatgtggcctgttccgcctccacccattac

SEQ ID NO: 129600 - DNA, 201 bp, Homo sapiens
ctggaaaacccacaggtcagagtaaggggagaaaggaccctgccctccctgttccacgtctgtggggggagaggacaaatgccaggcacagggtaggcggygagaacaaggcactcaatgtgtagctggggcagagactcggcctctggggagctgagcgggttccctccacccccaaccgtggtggaaagacaagctcgc

SEQ ID NO: 129601 - DNA, 201 bp, Homo sapiens
aggtggtgttgggacacctgggcgagatgtgagggtgggctcacttgagccactgaaaccagccaggtcttccctcaggccggacagatggcgcctgaccraagttcctggcacctggaaaacccacaggtcagagtaaggggagaaaggaccctgccctccctgttccacgtctgtggggggagaggacaaatgccaggc

SEQ ID NO: 129602 - DNA, 201 bp, Homo sapiens
caggccccgagcgtggcccaggatgggcgtggggtcaggggtccgagtgtgtgtattctgtccccgcagctgccatactggagcggtgcagtgggctgcaygtcaacagcgcccggcggctggaggttgtgcgcaactgcatctcctacgtgtttgaggggaaaatgcttgaggccaagaaggtgagggctgtgcaggctc

SEQ ID NO: 129603 - DNA, 201 bp, Homo sapiens
ggagctgtggctgatctggtgccagatgagggcccagtgggtgggaatgtttccaccctgggatcctcaagcctcctggtgggtggggggcgggttgggtkctctgaccccctgttcttgtcctcagggagtggggaaggccagggccagattctgcagcgcttcccagagaaggactgggaggacaacccattcccccag

SEQ ID NO: 129604 - DNA, 201 bp, Homo sapiens
catttgttaccagcagaaaggttggaagtcagtgaacttggcccagcctttctcctctggagctgaggtgccagctgcccacacactggaacccacgtccytcaccactcctggggctgtgggcgttgagttcgctggctcatcaaacactgccgtccacatggcgcctgctgggggagagacacagtggtcaggcgtggg

SEQ ID NO: 129605 - DNA, 201 bp, Homo sapiens
aggccctggaaatgatgagtttctttcattagtgactgagcagcaggtgtgtgaactctctaggcacagacacaacaggcacttctgagtgggtagaggaycctctctgttctgtcaggctaggacttcagggcgggatgcagggtctcttgggttggggattaggattggcggatagcttgtcttggcctggatctggac

SEQ ID NO: 129606 - DNA, 201 bp, Homo sapiens
cgctgagcgctggaaggacacctgggaccgggtgaaggctgcacagcgcctcgagggccggccagacggccgtgtgagtgagggccagtgtgagcgtccayggtgggcgtgttgctgggagaaagtggagtctgtccagccctgacccaagtcccaacctcctgttcccagggcacccctagctccctccttgtgtccacc

SEQ ID NO: 129607 - DNA, 201 bp, Homo sapiens
cttccctccgcccacgacatccacctcctccctgaagatgcaggtgggggtcgttgctgctcctgcatggggaccccaggcacttaggctgcccccactcrggtctgctgccactgacacacagggccccacccccaggctggccccggctccagtagcagaagcaggagcctgggagcaaagcagctgccagcagttagg

SEQ ID NO: 129608 - DNA, 201 bp, Homo sapiens
cgggagcgtgccgggctgggcgacctggagagcgccagcaacagcctggtcaccaacaggtgaggcagggactgggggttgggcccagtggaggcggggcygtggtgggcagggcccatgcccacagtttcttctctggcccagcatggctggcagtgtggccgagagctatgacacggagagcggcttcgaggatgcaga

SEQ ID NO: 129609 - DNA, 201 bp, Homo sapiens
gagcccagcccagcctccttcctgcgctcactggaggactcagagtggctgatccaggtctctgcactgccccgtccctctgcccgccttggtgctgggcyctccccttgggtagagccaagtggacgggtctaggtttgcttgtctgacagtgtggagcgctggaaggaggaggtgacagccacttcccacccaggctct

SEQ ID NO: 129610 - DNA, 201 bp, Homo sapiens
tgtgtacctgcaggaggggcccgtgggctccaccctgagcctcagcctggacagcgaccagagtagtggctcaaccacatccggctcccgtcaggctgccygccgcagcaccagcaccctgtacagccagttccagacagcagagagtgagaacaggtatgagggcacctcccactgccacatggacacctctgagctggt

SEQ ID NO: 129611 - DNA, 201 bp, Homo sapiens
ttggatgctccctcttgcgtcctcgtgccaccattgcccccaacagtcctggcctgcttacctggccctcgcacctgtgctctgggcctgtgtcgttcagyctctctgtccactcctttgatggtgtgtgcctgtctctggatgttgatgtcagcttgtttgtctgctccctgccctgtgcctgggtgtgttggagtgtct

SEQ ID NO: 129612 - DNA, 201 bp, Homo sapiens
tgcgggcggatgagaaccacccccagcgtgtcctgcgtcacgtccaggaactggcagagcagctctacaagaacgtacgagggtagcaggacgggagggcrtcgtaccgccttgatccctgggcccctgccccacacctgccgtctccccacaggagaacccgtacccagccgtggcgatgcacaaggtacagaggcccgg

SEQ ID NO: 129613 - DNA, 201 bp, Homo sapiens
ctgtgtcatgttgtcactcactcatgatggtggggactgttctcccatctcctggtccttgccccaggtggggaggtcagaggctgttactcccttcaccyggagagactgaggcccaggaggccacgtgtccccagggtctccaagcaaggagctgcctgtgtgtgttggagcctccaggcctggtggtgcagatgctgg

SEQ ID NO: 129614 - DNA, 201 bp, Homo sapiens
tctgcccacacacctggccggccaccgcgagtcaccaaggacaagggtccttccctcaggtatggatctgggtcccaggcagggcagctgggcctcagccrtgttcccgctccaaccctcctaggcccctgtgctcatctttgtccctcctcctctcacctttgctgactctcgtgggcctcagaaccctgtcccggaacc

SEQ ID NO: 129615 - DNA, 201 bp, Homo sapiens
agctgtgaaggccgagaggaggaccaccgtgccctcagggccccccatgagtgcgtaatgagggaggggaaggcaggccccgagcgtggcccaggatgggygtggggtcaggggtccgagtgtgtgtattctgtccccgcagctgccatactggagcggtgcagtgggctgcatgtcaacagcgcccggcggctggaggtt

SEQ ID NO: 129616 - DNA, 201 bp, Homo sapiens; identical to SEQ ID NO: 22305

SEQ ID NO: 129617 - DNA, 201 bp, Homo sapiens
  misc_feature (1)...(201): n = A,T,C or G
actacgaccaccgtgtggacacagagtgcaagggtgtcatcgacttggcggaggtggaggctgtggcacctggcacgcccactatgggtgcccctaagacngtggacgagaaggccttctttgacgtgagccttggccggggcttgggagaggggaggggctctgcggtgtgggggctgcggagtcagtaacccgcccttc

SEQ ID NO: 129618 - DNA, 201 bp, Homo sapiens
ccccacagcacacgctggcctgggccagccctccaggcgtcagagcctggcactgatgatggggtgctgccagcagatgacagaacgcgaggtctgtgttygcctgcccgcccgcccgcctttcaggcctgccgtctgcgtggggctggccgcagggacattggtgcaggagggagtgctctttgaggggctttcaggaca

SEQ ID NO: 129619 - DNA, 201 bp, Homo sapiens
cctggctgcatccagctgaccttctcccctggctcctgcagaagctgagcccgggggtgacgcagtttgcatacagctgtgtgcaggagcacgtggtgtgragcacgccacagttctgggaggccatgttctatggggatgtgcagactcacatccgggccctctacctggagcccacggaggacctggcccccgcccagg

SEQ ID NO: 129620 - DNA, 201 bp, Homo sapiens
tgctcaggtctgatgggcaggggaggttgggggggatggctgtggaagctgcaggggccctgcgcatggcctgctgctgcggccgagggagccatgtgcaygttggggttgggtgggtggcgtagcaggaaggtgctgtccttccttcttttctcttttcctatagctgggttccccacaagcagcagagccggccagggc

SEQ ID NO: 129621 - DNA, 201 bp, Homo sapiens
ctgggagccggaaggggtccaaggccttgggtcagaactgctcaggtctgatgggcaggggaggttgggggggatggctgtggaagctgcaggggccctgygcatggcctgctgctgcggccgagggagccatgtgcacgttggggttgggtgggtggcgtagcaggaaggtgctgtccttccttcttttctcttttccta

SEQ ID NO: 129622 - DNA, 201 bp, Homo sapiens
ccagtcacacacgcgttaggcctttccgttgtgtctctttcctgtgttttccttttgtcttttcgtgctctagtctggatatttccttttgaataaacttsccattaattcttcccccaggagctgcagaggctggagacagagttgggccaacccgctgagcgctggaaggacacctgggaccgggtgaaggctgcacag

SEQ ID NO: 129623 - DNA, 201 bp, Homo sapiens
ttttccaacccaggcccttgactctgccctgagcttgcagctggatacaaagtgcaaaaaagcttggctccttctgtattctttaaaaacaaaacaacaamaaaaaaaaactgtaaaaacagcctccatgtccacgcccttcctggcccatcaggtcctggtggcatctcagggtcctgccccccccacccccacccccac

SEQ ID NO: 129624 - DNA, 201 bp, Homo sapiens
ttttttcttctggcaggttttgggacttttctctttgtttttcagcagtttttctgtcccattttggggtgtgtgtgtgtgtgtgtgtgtgtgtgtgtgtktgtgtgttttgagacagaatctcactttgccgcccaggctggagggcagtggtgtgatctcggctcactgcaacttccgccccctgagtttaagtgattc

SEQ ID NO: 129625 - DNA, 201 bp, Homo sapiens
tttttttcttctggcaggttttgggacttttctctttgtttttcagcagtttttctgtcccattttggggtgtgtgtgtgtgtgtgtgtgtgtgtgtgtgtttgtgtgttttgagacagaatctcactttgccgcccaggctggagggcagtggtgtgatctcggctcactgcaacttccgccccctgagtttaagtgatt

SEQ ID NO: 129626 - DNA, 201 bp, Homo sapiens
ctttttttcttctggcaggttttgggacttttctctttgtttttcagcagtttttctgtcccattttggggtgtgtgtgtgtgtgtgtgtgtgtgtgtgtgtttgtgtgttttgagacagaatctcactttgccgcccaggctggagggcagtggtgtgatctcggctcactgcaacttccgccccctgagtttaagtgat

SEQ ID NO: 129627 - DNA, 201 bp, Homo sapiens
tctttttttcttctggcaggttttgggacttttctctttgtttttcagcagtttttctgtcccattttggggtgtgtgtgtgtgtgtgtgtgtgtgtgtgkgtttgtgtgttttgagacagaatctcactttgccgcccaggctggagggcagtggtgtgatctcggctcactgcaacttccgccccctgagtttaagtga

SEQ ID NO: 129628 - DNA, 201 bp, Homo sapiens
gccctgctggggtcctgccaaccacccctgccctgggagctcagccccctccctggaggccgggcccagccagccccaggtaagtggtgccctggcccccyttgggtgcttacctggcatctccttcacaggtaagtggggcagtgtccggaccagtggacgcagcagtggccttggcaccgatgtgggctcccggctagc

SEQ ID NO: 129629 - DNA, 201 bp, Homo sapiens
atcttttagcattcctctagaatttgggttcagctcatagttttgtttttttttttttgaggcagagtctcactttgtctcccaggctggagtgcagtggygcactctcggctcactgcagcctccacttcccatgttcaagcaattctcctgcctcagcctcccgagtagctgggattacaggtgcccgccaccatgccc

SEQ ID NO: 129630 - DNA, 201 bp, Homo sapiens
agcggctgcaggcgagtttctagaaccagagtctatataaagagagaactaacgccacgctcctgtgcctgccttccccactccccggctgcctgctctcrgcctacccagagggtcccatctgcccctatccaggcccacctggcgggaggttggcatctttctcgtgagcctctcctggtgcctgggtccacccagctc

SEQ ID NO: 129631 - DNA, 201 bp, Homo sapiens
tttttggaagtccagtatcttttagcattcctctagaatttgggttcagctcatagttttgtttttttttttttgaggcagagtctcactttgtctcccargctggagtgcagtggcgcactctcggctcactgcagcctccacttcccatgttcaagcaattctcctgcctcagcctcccgagtagctgggattacaggt

SEQ ID NO: 129632 - DNA, 201 bp, Homo sapiens
gcgtgcttggtgtgccaggccccgcacagccctttgtgtacatgatctcacctcttcctcccagcagcccaccggggttgccctggtgttgcccccatctrtagagaagttaggcgcggataagctgactgcctggcctgagccggctcagagaggctgggactggcactcaggctgtcagatcccagctgcagactggca

SEQ ID NO: 129633 - DNA, 201 bp, Homo sapiens
agcctggcaaatatggtgaaaccccgtctctactaaaatataaaaatgagctgagcatggtggcgggtgcctgtaatcccagctactcaggaggctgaggyaggagaatcgcttcaacccgggaggtggaggctgcactgagctgagatcgcgccactgcactgcagcctgggcgacatgagtgagactctgcctcaaaaa

SEQ ID NO: 129634 - DNA, 201 bp, Homo sapiens
ccccaccaaggacctggagttctctcttttttgtgtttcttctgctggacacccccctacacttcctgaagcctctttagcatcttcttcgtctccagccyctcctcagtgccctcttactcagcacacactcctctctgctcatgtctatccaagtgtgtgtcttatggcaccgtcagtcatgagcatctgtctttttct

SEQ ID NO: 129635 - DNA, 201 bp, Homo sapiens
ccctgaaggggcgagctgcccgccgctgcctcgcccaggagctgcacctgcatgtgcagcagaaccgtgcggtcctggaccaccagcagtttgactttgtygtccgtatgatgaactgctgcctgcaggtgaggcctcttatcctgctagtgacatggctcatggcgcatgagcgggaacaggcgggcagaccctggtctg

SEQ ID NO: 129636 - DNA, 201 bp, Homo sapiens
agcagatgacagaacgcgaggtctgtgttcgcctgcccgcccgcccgcctttcaggcctgccgtctgcgtggggctggccgcagggacattggtgcaggarggagtgctctttgaggggctttcaggacagaagccccagtgttgtccttaggtggccccctcagccccatgttcagaggtggaggtggcaaggaaacctt

SEQ ID NO: 129637 - DNA, 201 bp, Homo sapiens
cagcacgctgaccccgtcctcagccctgaagccctccgaccgcatgaccatgagcagcctggtggaaagggcttgctgtcgcgactaccagcgcctcggtytgggcaccctgagcagcagcctgagccgggccaagtctgagcccttccgcatttctccggtcaaccgcatgtatgccatctgccgcaggtgagggccggc

SEQ ID NO: 129638 - DNA, 201 bp, Homo sapiens
ggttctgggtgcccgtgggaaacgggcctttgtctgctccttccccacccacttgggattccccataactgtggtaccctgagattctgggaccccccccscttaccttccttgcttctgactctgcctggcctgtcctaagttggggagcaggtggtggtccgctccttcccggtggctgcgctgaccaaggagaagcgc

SEQ ID NO: 129639 - DNA, 201 bp, Homo sapiens
ccgggccaagtctgagcccttccgcatttctccggtcaaccgcatgtatgccatctgccgcaggtgagggccggccagggctggcccgggtggtggacacrtgactgggtgtcttccctgcccgctgtgggcctgggccacggcttctggtcatgtaaggaatgtggagggggagactccgggcagagggacgggccacag

SEQ ID NO: 129640 - DNA, 201 bp, Homo sapiens
tctttcttgtatgaaccatttttaggccagtctccagcagtggccctgttgttacgcttgcatgtctggggccctcactgtggctcttgagttgatgtccrctgtttgatgtgcggtctttgggtccttgtcctttccttggggcgccggccctcaagtccgtgtcttgggtgtgccttgcaaacccaggcctcagctcac

SEQ ID NO: 129641 - DNA, 201 bp, Homo sapiens
cctgccttacagggaagttgtgaggcttaaatgagtcatttatttcagtgacttagcatggggcacagggtttgggggagtacgggagtcatggtttgtgwtggaggtgacccacaaagcacagacagcagtccctttttctctctagcgatgctcattgtcttaaagttgacgcggtctcattggtgctaacagagtcac

SEQ ID NO: 129642 - DNA, 201 bp, Homo sapiens
tgacctcgtgatccacctgcctcggcctcccaaagtgctgggattacaggcgtgagccaccgtgcctggcctagttatctaagcatcttagagcttctggytccttgtgcagaaagtggaaatgctgattcctgccttacagggaagttgtgaggcttaaatgagtcatttatttcagtgacttagcatggggcacagggt

SEQ ID NO: 129643 - DNA, 201 bp, Homo sapiens
ggggagcctagagccggggccagcgtgcagctgcctgctccattctgtgctggcaggtcctggacccggagctggagttggctgacctcgccttccctccrcccacgacatccacctcctccctgaagatgcaggtgggggtcgttgctgctcctgcatggggaccccaggcacttaggctgcccccactcaggtctgctg

SEQ ID NO: 129644 - DNA, 201 bp, Homo sapiens
tcccgggttcacaccattctcctgcctcagcctctcgagtagctgggactacaggtgcccaccaccacgcccagctaattttttgtatttttagtagagayggggttttaccgtgttagccaggatggtctcgatctcctgacctcgtgatccacctgcctcggcctcccaaagtgctgggattacaggcgtgagccaccg

SEQ ID NO: 129645 - DNA, 201 bp, Homo sapiens
gggttgacattgaggcctctcttacccctcactgtgccatccctggtgggcctggactgaacaaggcagagatgcctgggagggagaaaggagactgcgaytgggtggtggctgggttggtgtgtaaggcctgaggcagtgtcctgcgcgtggtgctaccttttggggccatcccggagtctctgtgggactgagcaggca

SEQ ID NO: 129646 - DNA, 201 bp, Homo sapiens
atatccttggggacaaagcccagctcaaggtgactggggtgcggggggtggggggtgagggtgggggctcggcagggggcttggggcctcatgtgtctcaygggacttgtccggattcttttcagggtgtgcggtcagaccccctgcagcagtgggagctggtgcccattgaggtattcgaggcacggcaggtgaaggcta

SEQ ID NO: 129647 - DNA, 201 bp, Homo sapiens
ctggcatctccttcacaggtaagtggggcagtgtccggaccagtggacgcagcagtggccttggcaccgatgtgggctcccggctagctggcagagacgcrctggccccaccccaggccaacgggggccctcccgacccgggcttcctgcgtccgcagcgagcagccctctatatccttggggacaaagcccagctcaagg

SEQ ID NO: 129648 - DNA, 201 bp, Homo sapiens
tttttccaacccaggcccttgactctgccctgagcttgcagctggatacaaagtgcaaaaaagcttggctccttctgtattctttaaaaacaaaacaacamaaaaaaaaaactgtaaaaacagcctccatgtccacgcccttcctggcccatcaggtcctggtggcatctcagggtcctgccccccccacccccaccccca

SEQ ID NO: 129649 - DNA, 201 bp, Homo sapiens
gcagggccaggcgcccagagaccctctgtggaccccaggcatctcccagccctttgggctgccagtcctccctgtgccttcaggccacgtcgtctggaccrtaaacctcagcctgggactcagatctgcctgtgtcctggactgagctgctctccgtccttttggactgggctcaggctctgagcccaccctctcccctct

SEQ ID NO: 129650 - DNA, 201 bp, Homo sapiens
ctgcgctctggaggcctgcatggcaaaggtgtcgtcggcctcttcaaggcccagaacgcaccttctccaggtacctcctgcgtcctgccctgtgcctgccytgccctatctcaccctcccctccctcagctccgtgtcctcccccaggccagtcccaggcggactcgagtagcctggagcaggagaagtacctgcaggctg

SEQ ID NO: 129651 - DNA, 201 bp, Homo sapiens
aaggacaagggtccttccctcaggtatggatctgggtcccaggcagggcagctgggcctcagccgtgttcccgctccaaccctcctaggcccctgtgctcrtctttgtccctcctcctctcacctttgctgactctcgtgggcctcagaaccctgtcccggaacctggtcaagaacgccaagaagaccatcgggcggcagc

SEQ ID NO: 129652 - DNA, 201 bp, Homo sapiens
tggctcctcttgccctgcttggggcgtgagcctggaggcgggtggggtcgccagccaccttcacgcctctgcctcctctcagctacccagggctgctgatygtgccccagagtgtccaggacaacgccctgcagcgcgtgtcccgctgctaccgccagaaccgcttccccgtggtctgctggcgcagcgggcggtccaagg

SEQ ID NO: 129653 - DNA, 201 bp, Homo sapiens
tctctgctgtgccctcagttcccagccccagagccagggtcaccacgctgtccaaccccatggcggcctcggcctccagacggaccgcaccccgaggtacsgtaccgagcctgcgcaggcccgcctccccttacttggtgctggcggcctctagtgtgcactgagttattgcgggcactaatgtctccctccacacctgac

SEQ ID NO: 129654 - DNA, 201 bp, Homo sapiens
tctggagggggtcgggcaccccaaggcccagcctggccacgagcagcagacgggccccctggcttcctgcagggcgacgacactgtgtctgactcagggargggcactcaggtcaggcgggggcgcgaggaagctcacctgcaggctgggccgtgacgacggtgcaggcagggctctaagtggcaagttttacgcagacag

SEQ ID NO: 129655 - DNA, 201 bp, Homo sapiens
ccactcctggggctgtgggcgttgagttcgctggctcatcaaacactgccgtccacatggcgcctgctgggggagagacacagtggtcaggcgtgggcagscctggggtgctgcaggcaaaggggaggcagcgcccctgccccgggagcccctcagaggttgacaggaagatggggctgctccaggagggaggcccaggca

SEQ ID NO: 129656 - DNA, 201 bp, Homo sapiens
gaaggtttgcgggggccgttggggctgcgggggcccaaggcccgggctgcatcctgagctcctgctcttgttttcgagcagcccaagctgctgcggccgcrcctgctgccgggtgaggagtgtgtgctggacggcctgcgcgtctacctgctgccggatgggcgtgaggagggcgcggggggcagtgctgggggaccagca

SEQ ID NO: 129657 - DNA, 201 bp, Homo sapiens
agacattgtccagatgcacatcgagaccctggaggccgtgcagcgggagagccggaggctgccgcccatccagaaggtttgcgggggccgttggggctgcsggggcccaaggcccgggctgcatcctgagctcctgctcttgttttcgagcagcccaagctgctgcggccgcgcctgctgccgggtgaggagtgtgtgctg

SEQ ID NO: 129658 - DNA, 201 bp, Homo sapiens
ctccctctctcctcaggtctcagccaattcctcagcaccttccaacaccaagaacaatttttaatttaaaatcgcacagccaggcagggagggtcttttgkgctgttgggctctgttgtcttgggggaatgacacctgctgtgtgcacttggacacagcccagggtgccacctgcacccaccttccccttccccgtcccct

SEQ ID NO: 129659 - DNA, 201 bp, Homo sapiens
ggcagcgttgttgatccagggctctgcctgcgtctacagtaagaaggtgggccctgcttgacgctggtcttggcattttggtggccagtgggaccacagtsggctctccttctggggcaggtgcagtggtcgtcccgtctgtgacctacctccctctctcctcaggtctcagccaattcctcagcaccttccaacaccaag

SEQ ID NO: 129660 - DNA, 201 bp, Homo sapiens
aggttgcagtgagctgagattgcgcccctgcattccagcttgggtgacagagtgagactccgtctcaaacaaaacaaaacaaaacaaaacagaaggttccragttgggaccatagagcagaggagggcaggcagctggagagggaggctggccagcatggaggcctccctctggctccgtttaggattttgggtttttcct

SEQ ID NO: 129661 - DNA, 201 bp, Homo sapiens
acgcctggccccgtggcaggcacccacctccaccctgcagggtgcatccctctgctacaaggccttcccaacagcggttgccagctgtccccgggagccaygctgtccccaacagggcacgctgagcagcgctgaaggccgagccctgtctgcctctctctgacagctgcggccctcacccacctgcgagtagaaagcagc

SEQ ID NO: 129662 - DNA, 201 bp, Homo sapiens
aggggtgggtggtgggggttggagatagagtgagctggtcacaggtcccacttgcctggcaggctgacaggtaggcggcccaaagcagcaagtagatgacrgggtggcgcagtgggctcagcagcagggctcccagggccactagtgcacccagcaggctcagcagctccaggccctgggccgtgtccagccccagtctcg

SEQ ID NO: 129663 - DNA, 201 bp, Homo sapiens
aacccctgggagggcagggggctggacaagtgacacgcacaggtggccgtcttcttgcggctgccgtggccaggctcagcagccaggtgctggtcgtccarcagcgcagtggtaagcaccagcgtcatcaggttgaagaagttgtagttgccggtgatgataatcaggacctgcagcagcacctgggggcggcccgctctc

SEQ ID NO: 129664 - DNA, 201 bp, Homo sapiens
tccgtggcgccccgtacctgctctgggctctggatgacattgaatccaggaatagactccagcttatccaaggtgcctcctgtgtgccccagaccacgtcygctgatcattggcacctggtggtcagggatgctgagtaccctgcacagtacccctcccccacctctgtgcatcccttcaccttccctggctaggagtgca

SEQ ID NO: 129665 - DNA, 201 bp, Homo sapiens
caggcttgtacatgaactcgatctcctgccaggcaggccgaggtcagctgggcccgctgacctgggccccaccaccctgcccgccctgggagggctcaccrtccagtggtggccgtcgtaactgccctccagcaccacctcaggccgtccaccaagcccagtcatgcggcggaagaggccgtaggagttggccagctgtag

SEQ ID NO: 129666 - DNA, 201 bp, Homo sapiens
cagcgtctttgccagctcccgggcctgctcctggttggggaagacggcggcccctccgaacttaacgtccaccaccagagcggacagcccctccacgagtytcttactgagaatggaggctttgggggaggcagaggaggttggagacaatggagaacctggagcttcttgggagagttcggggatgccgactttggggtc

SEQ ID NO: 129667 - DNA, 201 bp, Homo sapiens
ggcccgatgcccctgggtgggggcgaggacgaggatgcagaggaggcagtagagcttcctgaggcctcggcccccaaggccgctctggagcccaaggagtycaggagcccgcagcaggtgggacccacatggaggcctgcagaacctgagctgtgaactggcaaccctggctctggggccgagtcaccttgcacaaggagg

SEQ ID NO: 129668 - DNA, 201 bp, Homo sapiens
ataccagggacaaccggtgagcccacagcatagctagagctgcccgtctcgggaggtgctgggcagagaccaaagatgggtggggctgccctggaagaagygagtgcagactgggccttggattccccctgtctttgtgttgtttcttgcagctggatcagatctgcatttcttttgacgaaggcaagaccacaatgaact

SEQ ID NO: 129669 - DNA, 201 bp, Homo sapiens
gccagcacagccgtcagggtgaggtcctggccagccggaaggatttcaggatgaacacgtgcgttccccaccccagaggggccttcatgttggagccagarggcatgtcccccatggaaccagcgggcgtttcccccatgccagggacccagaagggtgagggcttggatgcggggggcttggtgggaaggaagggagggt

SEQ ID NO: 129670 - DNA, 201 bp, Homo sapiens
acagtaagaaggtgggccctgcttgacgctggtcttggcattttggtggccagtgggaccacagtcggctctccttctggggcaggtgcagtggtcgtccygtctgtgacctacctccctctctcctcaggtctcagccaattcctcagcaccttccaacaccaagaacaatttttaatttaaaatcgcacagccaggcag

SEQ ID NO: 129671 - DNA, 201 bp, Homo sapiens
acacgtgcgttccccaccccagaggggccttcatgttggagccagagggcatgtcccccatggaaccagcgggcgtttcccccatgccagggacccagaakggtgagggcttggatgcggggggcttggtgggaaggaagggagggtcttctggttggactcttgtggggtgccctgtgcttgccacctctggtcttggga

SEQ ID NO: 129672 - DNA, 201 bp, Homo sapiens
agggaggaagtagccatcagggtccctttggtgccgtctggtctcggcactccttggagctgatcactctcttgctccctgcctaggcccctctccagaasgcccgatgcccctgggtgggggcgaggacgaggatgcagaggaggcagtagagcttcctgaggcctcggcccccaaggccgctctggagcccaaggagtc

SEQ ID NO: 129673 - DNA, 201 bp, Homo sapiens
cccgccgcctccgctcccctacaccccgtccccctcaccgagcgtggtgaccaggtcccttaagtctggcgggcctgcgccgtccatgcagagcagcgcckcctccacctccagggcgtggcccacgcagcgacccaggggcttgtccatggcggtcagcgctgccgcgacccgaagccctaggctggctcccacgccaac

SEQ ID NO: 129674 - DNA, 201 bp, Homo sapiens
taaagctgagggaggaagtagccatcagggtccctttggtgccgtctggtctcggcactccttggagctgatcactctcttgctccctgcctaggcccctstccagaaggcccgatgcccctgggtgggggcgaggacgaggatgcagaggaggcagtagagcttcctgaggcctcggcccccaaggccgctctggagccc

SEQ ID NO: 129675 - DNA, 201 bp, Homo sapiens
cagcagctcccagaccagggaggccacacccagccacacagtgggcagcgtcagtgtcttcagccactgagaaaactggtggaaggtgaaagctggtggasgaggggggtgtgaggactggtccgcccctgccctctggcccccccaggtcggcactcactggttctggagtggatggtgcgctgctgccagtcaacctcc

SEQ ID NO: 129676 - DNA, 201 bp, Homo sapiens
atcttgttcttttgaaccagtcaacctatggcccctccaagctttttcttggtggaagatcttcatgctttctgcccccacttgggaatcttcttttttgkttttatttatttatttatatattttgagacggagtctcactctgagacggaagtgcagtggcgcgatctgagctcactgcaagctccgcctcctgggttc

SEQ ID NO: 129677 - DNA, 201 bp, Homo sapiens; identical to SEQ ID NO: 22359

SEQ ID NO: 129678 - DNA, 201 bp, Homo sapiens
ggccaatggggttgccagctccggggtcccccaggaggcagagaatgaggtgagtttctttggcatgtggtccccgcccactgtgtgtttgcctgggctcygcccccacgagctctgtctccctccagttcctgtcgctggatgacttccctgactcccggactaacgtggatctcaagaatgatcagacgcccagtgtga

SEQ ID NO: 129679 - DNA, 201 bp, Homo sapiens
gccattttcctgcctcagcttcccgagtagctgggactacaggcacctgccaccacacccggctaatgttttgtatttttagtagagacggggttttaccrtgttagccaggatggtctcgatctcctgacctggtgatccgcccgtgtcggtgtcccaaagtgctgggattacaggcatgagccaccgcgcccagccaaa

SEQ ID NO: 129680 - DNA, 201 bp, Homo sapiens
tcctcatgcctcctgggaaagcagcaccaggcacacagccaagcacaaaagacgcctttattggtgcccagatctaaagggcaggatgggctggtgtgaaratgacgtggaagatgacagtgcttcccctcttcccctgggagtcagcctcttcccctctggcacggggcctagggttgggggctctagactcagaccccc

SEQ ID NO: 129681 - DNA, 201 bp, Homo sapiens
ggctgacctcccagtcggggtcaggaacgcccaaccctccccacgcaccgatctgtgcgccctgcgcgctcccattcaccacagcggccacgaagcccctsatgtccgcttcgctcaggcggcctccgtctcgcttcatgcggatcagctccgggagctgcttgggctctggcgaagggtcgggaagtccctggctccctt

SEQ ID NO: 129682 - DNA, 201 bp, Homo sapiens
gagggtggctgtgcatcccctactcctttgggagggacggctgtgcaccccctacttctccagcgccttcttgtgctctgtgcccaggagactccagaccyctggcagagcctggacccctttgactccttggagtctaagcccttcaagaaaggtaattgggtggaaggtacctccactcaggtacccctggctgggttt

SEQ ID NO: 129683 - DNA, 201 bp, Homo sapiens
ccgctcccgcccaagcactgacaaggtttcgcggcaaaggagctttattgctgcggcggcagaacgagctctgcgaagggcgagggggcggcgaatggcgygcggtcggagagtacgagcgcctcctgcagggcgcggctctgcgggccgctgagcgcggggccgtcccggtgcacgcggagccagggggtccctgcagag

SEQ ID NO: 129684 - DNA, 201 bp, Homo sapiens
ggctacctcctcccctcccagccccggcgtccgcacctcgcggcggggccgcgcgtcagtggaccaagcacgagaggaagcgccgacctccagctccctgsgctctgccccgccggctcagggaaagcgggcgccacacgctcacaggcagggcgcaggcgtccccggagctgcgcatgcgcacacgggcgcagccgctga

SEQ ID NO: 129685 - DNA, 201 bp, Homo sapiens
cggcccaggcccagtgactcatgagtaaccttgaccagtgttctcattagtgaccctaatgatccaccagtgatcttttagtgattctggccagggtctcsatcatcaacctggattaatgactgatccgtggcgccccgtacctgctctgggctctggatgacattgaatccaggaatagactccagcttatccaaggtg

SEQ ID NO: 129686 - DNA, 201 bp, Homo sapiens
tgtcagcacctagaaagtccacaaccaccaccctcacggtggggcctctgttctgtggaggagaaggacaggaagtgagtgacgggctctgtcctgcaggycccgtggcggcaggagctgggacagggcagggccaggacaggaggaggggctggggtgatgctggcgggagcacacgggcggaggagcagcagggctgca

SEQ ID NO: 129687 - DNA, 201 bp, Homo sapiens; identical to SEQ ID NO: 22360

SEQ ID NO: 129688 - DNA, 201 bp, Homo sapiens
tcggcccaggcccagtgactcatgagtaaccttgaccagtgttctcattagtgaccctaatgatccaccagtgatcttttagtgattctggccagggtctscatcatcaacctggattaatgactgatccgtggcgccccgtacctgctctgggctctggatgacattgaatccaggaatagactccagcttatccaaggt

SEQ ID NO: 129689 - DNA, 201 bp, Homo sapiens
  misc_feature (1)...(201): n = A,T,C or G
caggaggaggggctggggtgatgctggcgggagcacacgggcggaggagcagcagggctgcaggccgtcggcagagtgggtgccaagcacgaggggcctcnccaccaaggaccgtgtgatgaggcacactgtgggaaccacagtgctgtcagggtcacacgttgagaaggccacgctcgcggctgcgtggaccatagaggg

SEQ ID NO: 129690 - DNA, 201 bp, Homo sapiens
agctgcccagctcacagctaccccttcccagacgcagtgccgatgtccctgagctacgaggagctggttcgaaggaatgtggtaggcctgggttagagggrgacggggaggggagggggacaggtgagcggtgcccaggcccctgcttgggaggcagtagctcctgctgatcctcccctaggagctcttcatcgccacctc

SEQ ID NO: 129691 - DNA, 201 bp, Homo sapiens
ggagccctcacaaggcctttgtctgcagacatggaggtcctgtactggacacacgtgaaggagcagttggaaactctccggaagctgcagaggagggaggyaagtcccagctggtcagctgtgatctaggaccccgtggtggccctgatgggaggtgacagtgcccctcacagatgctttctctggacaggtggctgagca

SEQ ID NO: 129692 - DNA, 201 bp, Homo sapiens
cccctttgactccttggagtctaagcccttcaagaaaggtaattgggtggaaggtacctccactcaggtacccctggctgggtttcctggggcatgaggtrggggggtgggagtgggctttgcaccctgatcccccagcggctctaagacagtccctgtttgcccccaggtaggccttactctgtgcccccctgtgtggag

SEQ ID NO: 129693 - DNA, 201 bp, Homo sapiens; identical to SEQ ID NO: 22364

SEQ ID NO: 129694 - DNA, 201 bp, Homo sapiens
gggccagaccgggatccacgccctgcgccgccagcatccgctcgaagcggccaagggccgagccgtcgtccagcgccgcggccacccgggcagcgccctgrgcctgagtccccgcgtgtccgctgagccagagcagggcgccccctgcgggcggggacgggtcttaggcgcggccgggtcggggcggccccagcgggaagc

SEQ ID NO: 129695 - DNA, 201 bp, Homo sapiens
tgcagactgggccttggattccccctgtctttgtgttgtttcttgcagctggatcagatctgcatttcttttgacgaaggcaagaccacaatgaacttcaytgaggcagcgttgttgatccagggctctgcctgcgtctacagtaagaaggtgggccctgcttgacgctggtcttggcattttggtggccagtgggaccac

SEQ ID NO: 129696 - DNA, 201 bp, Homo sapiens
ggccacacccagccacacagtgggcagcgtcagtgtcttcagccactgagaaaactggtggaaggtgaaagctggtggaggaggggggtgtgaggactggyccgcccctgccctctggcccccccaggtcggcactcactggttctggagtggatggtgcgctgctgccagtcaacctccaggccaaagtagtgcacagtg

SEQ ID NO: 129697 - DNA, 201 bp, Homo sapiens
tgttaacgtttcttcactctagttggtagatggcatggatatttgtcatattctattcatttttcctagttttgaagaagagtaccccgtgaccactgtttgtgttttctgtttgttttttgagatggagttttgctctgtcccccaggctggagtgcagtggtgcgatcttggctcactgcaagctccgcctcccgggtt

SEQ ID NO: 129698 - DNA, 201 bp, Homo sapiens
gttaacgtttcttcactctagttggtagatggcatggatatttgtcatattctattcatttttcctagttttgaagaagagtaccccgtgaccactgtttgtgttttctgtttgttttttgagatggagttttgctctgtcccccaggctggagtgcagtggtgcgatcttggctcactgcaagctccgcctcccgggttc

SEQ ID NO: 129699 - DNA, 201 bp, Homo sapiens
ccgccgcctccgctcccctacaccccgtccccctcaccgagcgtggtgaccaggtcccttaagtctggcgggcctgcgccgtccatgcagagcagcgcctyctccacctccagggcgtggcccacgcagcgacccaggggcttgtccatggcggtcagcgctgccgcgacccgaagccctaggctggctcccacgccaacc

SEQ ID NO: 129700 - DNA, 201 bp, Homo sapiens
gcctctggcgccttgtggagggagccgctgtgctgccctggttgtttgtagacagtgtgccctgggggccttccacttccaaaacaggtttttgttatagraagtagggggaaacacagagacctgtctctgccccgaaataccagggacaaccggtgagcccacagcatagctagagctgcccgtctcgggaggtgctgg

SEQ ID NO: 129701 - DNA, 201 bp, Homo sapiens
aggttcccttttcttctctgtgtcggggatcttcctgctggagtctgtcagcctctggcgccttgtggagggagccgctgtgctgccctggttgtttgtaracagtgtgccctgggggccttccacttccaaaacaggtttttgttataggaagtagggggaaacacagagacctgtctctgccccgaaataccagggaca

SEQ ID NO: 129702 - DNA, 201 bp, Homo sapiens
gcacacagccaagcacaaaagacgcctttattggtgcccagatctaaagggcaggatgggctggtgtgaagatgacgtggaagatgacagtgcttcccctyttcccctgggagtcagcctcttcccctctggcacggggcctagggttgggggctctagactcagacccccacagcccagggcaggggaagggtcttgagc

SEQ ID NO: 129703 - DNA, 201 bp, Homo sapiens
aggtggccgtcttcttgcggctgccgtggccaggctcagcagccaggtgctggtcgtccagcagcgcagtggtaagcaccagcgtcatcaggttgaagaarttgtagttgccggtgatgataatcaggacctgcagcagcacctgggggcggcccgctctcagtgctcccggagactgacgcctggccccgtggcaggcac

SEQ ID NO: 129704 - DNA, 201 bp, Homo sapiens; identical to SEQ ID NO: 22372

SEQ ID NO: 129705 - DNA, 201 bp, Homo sapiens
cacaggtggccgtcttcttgcggctgccgtggccaggctcagcagccaggtgctggtcgtccagcagcgcagtggtaagcaccagcgtcatcaggttgaaraagttgtagttgccggtgatgataatcaggacctgcagcagcacctgggggcggcccgctctcagtgctcccggagactgacgcctggccccgtggcagg

SEQ ID NO: 129706 - DNA, 201 bp, Homo sapiens
ggatccttccgctcccgcccaagcactgacaaggtttcgcggcaaaggagctttattgctgcggcggcagaacgagctctgcgaagggcgagggggcggcraatggcgcgcggtcggagagtacgagcgcctcctgcagggcgcggctctgcgggccgctgagcgcggggccgtcccggtgcacgcggagccagggggtcc

SEQ ID NO: 129707 - DNA, 201 bp, Homo sapiens
ccctgcagagcgaggggctgttagaggccgcgcggccggagctgggcgggggtgcggggccagcagggcgggggcggcgctcaccacggcgcagcctctgwcccacgtcgaccagcagctctgcgcccacccccaggcggagcggctccccagcgcggctgcgcccggccccgagctcgtgcagcaccagcgccagcggca

SEQ ID NO: 129708 - DNA, 201 bp, Homo sapiens
tccgcagccctggatccttccgctcccgcccaagcactgacaaggtttcgcggcaaaggagctttattgctgcggcggcagaacgagctctgcgaagggcragggggcggcgaatggcgcgcggtcggagagtacgagcgcctcctgcagggcgcggctctgcgggccgctgagcgcggggccgtcccggtgcacgcggag

SEQ ID NO: 129709 - DNA, 201 bp, Homo sapiens; identical to SEQ ID NO: 22362

SEQ ID NO: 129710 - DNA, 201 bp, Homo sapiens
tagtggggcaccgtcgcacccccagggacccaaagtctctcgggctgacctcccagtcggggtcaggaacgcccaaccctccccacgcaccgatctgtgcrccctgcgcgctcccattcaccacagcggccacgaagcccctgatgtccgcttcgctcaggcggcctccgtctcgcttcatgcggatcagctccgggagct

SEQ ID NO: 129711 - DNA, 201 bp, Homo sapiens
tggctctgctctccattttagcctcattttgggctgttttgtatcttgttcttttgaaccagtcaacctatggcccctccaagctttttcttggtggaagrtcttcatgctttctgcccccacttgggaatcttcttttttgtttttatttatttatttatatattttgagacggagtctcactctgagacggaagtgcag

SEQ ID NO: 129712 - DNA, 201 bp, Homo sapiens
tctggaggaggtaagggcggcgggggagtgacgcggggtgggccggcgggtggggctgcggggcgggggctccgggcccggggctgtgggcgccccaccgyctccacgcctatggctatctggcgctctggccgcgcaggtcctcgggctccctgcttcttttcaaactccatctctgcctccccaaatcatcccttgttg

SEQ ID NO: 129713 - DNA, 201 bp, Homo sapiens
tagagtgggagtcctgtgggggtgttggaggggagaacccctgggagggcagggggctggacaagtgacacgcacaggtggccgtcttcttgcggctgccrtggccaggctcagcagccaggtgctggtcgtccagcagcgcagtggtaagcaccagcgtcatcaggttgaagaagttgtagttgccggtgatgataatca

SEQ ID NO: 129714 - DNA, 201 bp, Homo sapiens
ccagctgtaggtgctccacggcaccaaacaggcggtgggccccggtccagaggcgcccgtgggtcccgggctccacgtaggagtacggcacctggagacargtgggaggttctcagggctgccctgcccccagcccatcccccagccctgcagcgctacccaccaggctaatcaggaacaaggccacggtcgcagtgccca

SEQ ID NO: 129715 - DNA, 201 bp, Homo sapiens
agccaggtgagaagagagctccccggtgggactggcagggcagccaaagaggggaccagggaggcagcacccagtggacagggctccaaggggctgctctyagctgccagcctcatgccccttctgtggcccatgggagtgaggcctcgccccggggaagcagccacagcccccggtgagcctcagcccatcttggttcac

SEQ ID NO: 129716 - DNA, 201 bp, Homo sapiens
acagtacccgccctgcccctcccctccccaccccgctccaccccagcccactccacaccccccaagcccgctccgcacctggctccttgccctgcagcagrcgcaagaccaggcttgtgaaccacgggctgtgcgtgtgtgggcccagggctgcaaaccacatctgccagtccaggcgtggctggtggggcaccacaaccg

SEQ ID NO: 129717 - DNA, 201 bp, Homo sapiens
cactggccccggaagtcagccttgcagcgagcccggcctctgtgatccagcaggtggaagtcgccctggcccacagctgcctggcgcagggcttctgttcrcttttgctgctgcagcctctccttctcagccctcagggccagccaggccccaccgagtccagccccgaacaggcctgtgatcagcagccgggttcgaagc

SEQ ID NO: 129718 - DNA, 201 bp, Homo sapiens
tctccagctcgtctgggcagatgtcagggcagtgagtgaagccaaagtacatcagcacccactggccccggaagtcagccttgcagcgagcccggcctctrtgatccagcaggtggaagtcgccctggcccacagctgcctggcgcagggcttctgttcgcttttgctgctgcagcctctccttctcagccctcagggcca

SEQ ID NO: 129719 - DNA, 201 bp, Homo sapiens
cggattcgaggactggctgcctgcccatcatgctcttgctcctgctggcctgtggtgttcccagcctgtggccctttgcacttgctctcttaaagaccccytcatgcgactctgggctcccaccctctctctagtgttcccctctgtgatccaggatttgagtgtggtcggctctgccccaggctgtcactgcacttgttg

SEQ ID NO: 129720 - DNA, 201 bp, Homo sapiens
ctgtttgtgttttctgtttgttttttgagatggagttttgctctgtcccccaggctggagtgcagtggtgcgatcttggctcactgcaagctccgcctccygggttcacgccattctcctccctcagcctcccaagtagctgggactacaggcgcccgccaccatgcctggctaattttttgtatttttagtagagacggg

SEQ ID NO: 129721 - DNA, 201 bp, Homo sapiens
tcatcaacctggattaatgactgatccgtggcgccccgtacctgctctgggctctggatgacattgaatccaggaatagactccagcttatccaaggtgcytcctgtgtgccccagaccacgtccgctgatcattggcacctggtggtcagggatgctgagtaccctgcacagtacccctcccccacctctgtgcatccct

SEQ ID NO: 129722 - DNA, 201 bp, Homo sapiens
agaggaacatttgctaagaaataaaatgaaccaagcagagcatagagcacaggagcacgacgaggatggtgcaaggcacccgccaaatcctctgggctccrtgactaaagctgagggaggaagtagccatcagggtccctttggtgccgtctggtctcggcactccttggagctgatcactctcttgctccctgcctaggc

SEQ ID NO: 129723 - DNA, 201 bp, Homo sapiens
gccctctgactgccctcctgggtctcctctctgggcagatgtggatggctgcatttaaagaggaacatttgctaagaaataaaatgaaccaagcagagcayagagcacaggagcacgacgaggatggtgcaaggcacccgccaaatcctctgggctccatgactaaagctgagggaggaagtagccatcagggtccctttg

SEQ ID NO: 129724 - DNA, 201 bp, Homo sapiens
gtgccctgtgcttgccacctctggtcttgggagctccctgtctctgggtgcctgctctagtctagacaggttggctggtgctcatcccacccatctgctgygccttgattacaagttaacatggtctcagtgccagagacctggtgcctggctcagggccctgctgtctccccccagcccaaggcctggagtctgctggtc

SEQ ID NO: 129725 - DNA, 201 bp, Homo sapiens
accgggcagggaccatcttggagaggggctgggctgaccttgtctgatccctgtctctcccagacaccgggaggactgaggagcagccaatggaagtttcygtgtgcaggagccctgtcccagcactcggcttctcccaggagccaggtgagaagagagctccccggtgggactggcagggcagccaaagaggggaccagg

SEQ ID NO: 129726 - DNA, 201 bp, Homo sapiens
cttccacttccaaaacaggtttttgttataggaagtagggggaaacacagagacctgtctctgccccgaaataccagggacaaccggtgagcccacagcakagctagagctgcccgtctcgggaggtgctgggcagagaccaaagatgggtggggctgccctggaagaagcgagtgcagactgggccttggattccccctg

SEQ ID NO: 129727 - DNA, 201 bp, Homo sapiens
gcccccacagtacccgccctgcccctcccctccccaccccgctccaccccagcccactccacaccccccaagcccgctccgcacctggctccttgccctgmagcaggcgcaagaccaggcttgtgaaccacgggctgtgcgtgtgtgggcccagggctgcaaaccacatctgccagtccaggcgtggctggtggggcacca

SEQ ID NO: 129728 - DNA, 201 bp, Homo sapiens
tgcagcctctccttctcagccctcagggccagccaggccccaccgagtccagccccgaacaggcctgtgatcagcagccgggttcgaagcccagggccctrgggctggccctgcccacctgtctctgcagggccctgccttgacaaaagccaggacctcagatgcagggcctggcctcccagggtcccagggaggacccga

SEQ ID NO: 129729 - DNA, 201 bp, Homo sapiens
ccttgccctgcagcaggcgcaagaccaggcttgtgaaccacgggctgtgcgtgtgtgggcccagggctgcaaaccacatctgccagtccaggcgtggctgrtggggcaccacaaccgggggcggccggctcaggttcccaggcttgtacatgaactcgatctcctgccaggcaggccgaggtcagctgggcccgctgacct

SEQ ID NO: 129730 - DNA, 201 bp, Homo sapiens
tcgtcccgctcggggtccacagtgatgaagacaggctgcactggaggcaaaccaggctctgcttccagctgccgcaccacctgcaccagcttctccagctygtctgggcagatgtcagggcagtgagtgaagccaaagtacatcagcacccactggccccggaagtcagccttgcagcgagcccggcctctgtgatccagc

SEQ ID NO: 129731 - DNA, 201 bp, Homo sapiens; identical to SEQ ID NO: 22367

SEQ ID NO: 129732 - DNA, 201 bp, Homo sapiens
ggcccgctttgctgctaacttctccctctgttctctcctgttccccttcttcctcccacaggggtttgtcccaagggcactccctaatacacatcctgcakgttaaactcttgtctcagagtctgcttcctgtagataccaaactgtaagaacatcttattgacttaaatataaccaaaattggagaaacttaggaaacaa

SEQ ID NO: 129733 - DNA, 201 bp, Homo sapiens
atataaactttggcagtgttattgagcagaccttttacacacttagagtatgcctgtatttactcaaatgtttgaaatacagggcacactggtaaatgccyactcccacccagctacatgcatatatatatgaatagcccatttcaattcttcggatctaatgtaatcaccactcaggggtcacagcaggccccacttaca

SEQ ID NO: 129734 - DNA, 201 bp, Homo sapiens
tgccatgtgcaatgatgttggaacttgctcgtgccttagacaagaaactcctttccttaaaggtatctgttttctgcttattgattcctaggataaagtamattaacagtaactcagagtgaattctagaatccttggaggaatgagaaggccatttagaaatggagacttttggtacatttttattatgaacattaattg

SEQ ID NO: 129735 - DNA, 201 bp, Homo sapiens
tctttctcaaatatcatcagcaccctcaatcccactgctaaacgacatttggtcctcgcctgccactatgactccaagtatttttcccactggaacaacasagtgtttgtaggagccactgattcagccgtgccatgtgcaatgatgttggaacttgctcgtgccttagacaagaaactcctttccttaaaggtatctgtt

SEQ ID NO: 129736 - DNA, 201 bp, Homo sapiens
ataaagtacattaacagtaactcagagtgaattctagaatccttggaggaatgagaaggccatttagaaatggagacttttggtacatttttattatgaayattaattgtaagattgcatgattgggaatatcaaccatgggcaataaacctaagatacgtgacaatgcattcattaattggcacctgatttatcagcctt

SEQ ID NO: 129737 - DNA, 201 bp, Homo sapiens
gatgaccatattccatttttaagaagaggtaatgtgtgtgtgtgtgtgtgtttgtgtgtgtgtgcgtgcacagcctgattttggagtacaacggtgggatrtgagaaagtacacagatgatgatgaattatcagctgtctttatgtggtacagagctccctctgcttgaagaatgaccctttctagtttactcactggagt

SEQ ID NO: 129738 - DNA, 201 bp, Homo sapiens
ctcattatttcagataattactttgaccatccttttcaatttgagagtatgatgtgaggcaaggcaactatttgtgagaaaaaagagaaaaggcaaagatycactgtcatacttttgcttgtgggttccagtccaggctttctatggggggtgggggggtgtctcagtctccccgtctgtaaaatgggattagtggattaa

SEQ ID NO: 129739 - DNA, 201 bp, Homo sapiens
aattgcaataatattgctatgaattcattaagtgtgtattccaattttaatttgaaaggcactacttaaaatttcagaatcacagttaacaaatgaaagcyatttctttagatctaaattttttgtttttttgttttgatcagcacatcatgcagcgaattcagaggcttcaggctgactgggtcttggaaatagacacct

SEQ ID NO: 129740 - DNA, 201 bp, Homo sapiens
ctccctgacgctcaccccatctgtgaactgatagcttattcccagcacccccgcttattcctatccattgccctatcactgaccttcgccctataaaagtmcaaatggtcacattctgtgtcctctgtgaccctaacacacctcctgttggcatttgctctccctcctgttatccattggcagctcctaatgggccagggg

SEQ ID NO: 129741 - DNA, 201 bp, Homo sapiens
atgaacttatgccaataacttgcaccttcattcaattttaacccattgtgcccctcctattggtatttacatttcaaaccatatctctagttgtataagaraaagcagtgagctgaggtggcgccactgcactccagcctgggcgacagcgagactccatctcaaaaaaaaaaaaaaaaaaaaagaaaaagttgtgtctca

SEQ ID NO: 129742 - DNA, 201 bp, Homo sapiens; identical to SEQ ID NO: 22449

SEQ ID NO: 129743 - DNA, 201 bp, Homo sapiens
tggtaaatgcccactcccacccagctacatgcatatatatatgaatagcccatttcaattcttcggatctaatgtaatcaccactcaggggtcacagcagrccccacttacacatggagaccacaggccacagggaacctggtggtagtgagggaagtctgtaacataagaataactttattttaaggaaaacaacttccc

SEQ ID NO: 129744 - DNA, 201 bp, Homo sapiens
taaaggtaatagggtaaaaaaaagcaaataggctctttattacccagccactcaggaaatgcactatttcaaggttgacccaggcagcaagagaggagctktattggggaatgtgacagtggtttagttctgaaactggagccagtagaaagttctgaagggggtccgatgatcagaactgtctgtgggtttaataaaggt

SEQ ID NO: 129745 - DNA, 201 bp, Homo sapiens
atctcattaaatcattcttccttaggtgcgaatgactgatggcttttgagggctttatatgctctttaaaaatattagtttcgataaactaaaaagtctgscttctattgaagtcttctaattataaagttgacatgtgctcattttagaaaacttggaaaatacagaaaaatacactaaaaagaaaactaatgtcaccca

SEQ ID NO: 129746 - DNA, 201 bp, Homo sapiens
gacaaggcaggggctgtaacagagcctcattcctctgagaacacctgcaccaatagaaaattgtctaagtgtcttttaactgagataaacctacaataaaytggggtttgcatttaccattgggctcaactttgtttttgcctgagttactttccccctgctgagctcgctctttctttccagctttttcctcttactcat

SEQ ID NO: 129747 - DNA, 201 bp, Homo sapiens
ttattcctttagtacaggcccattcctttagtacaacattgtcaactagctattaaacagaatctcattaaatcattcttccttaggtgcgaatgactgakggcttttgagggctttatatgctctttaaaaatattagtttcgataaactaaaaagtctggcttctattgaagtcttctaattataaagttgacatgtgc

SEQ ID NO: 129748 - DNA, 201 bp, Homo sapiens
caactttgtttttgcctgagttactttccccctgctgagctcgctctttctttccagctttttcctcttactcattcatctcatctccacctaaatttgtrtatctattgagttctgagaataagacccctcaaacattgaatgcatgctatttaggttgggaaagtcaaatgcttttccacacagggctttaatgaatag

SEQ ID NO: 129749 - DNA, 201 bp, Homo sapiens
atattagtttcgataaactaaaaagtctggcttctattgaagtcttctaattataaagttgacatgtgctcattttagaaaacttggaaaatacagaaaartacactaaaaagaaaactaatgtcacccataaccccactattcagagataatggctattaaccattttggtgtttttatttctatctctctctctctctc

SEQ ID NO: 129750 - DNA, 201 bp, Homo sapiens
aggcctggcctgtctgctggatttaccctttagtcatccattaagcattttttggtgctatttgccaattaggtttcatctgcagtatctcttgtagttaragatgcttgggggagggggcatttattttgttcctgttttttcttaaatgtcttaagagctctttcaagcctctagaaaccagctatttaaacacaagtg

SEQ ID NO: 129751 - DNA, 201 bp, Homo sapiens
aaaatattcttacagcattttactgcaatatggtcagttctattttattggttcttaaaaaatgctggtcataacccactaaactgatttcaagacccatygattttaccactgttgtggagggtagaacaagctgggccagaccttgaatgcctctttgcctccctgatgtcagtcttcctaagcaatctgaaacctcac

SEQ ID NO: 129752 - DNA, 201 bp, Homo sapiens
cccatgaagaagaacgtggaatgacacacaaaaaatcctctccttctcttcactgagaatacccttctggtcagaaattgggaagagaacattacagactrgaatatggagccacaccaaatgtatctttgcgatacatctaaatggaagggaataaatgagatggaaactgaacaaaccactctgaaaagatcatttgta

SEQ ID NO: 129753 - DNA, 201 bp, Homo sapiens
gtcaagctcttttggctggaaagccgcttgcaggaaatcactccatggaggtgcagagataaggccccagacattttggcccagtatgggacaactttgaycgtctttttcagcttcaggactcccatggagttgggtgaggttgttgggcccgctttgctgctaacttctccctctgttctctcctgttccccttcttcc

SEQ ID NO: 129754 - DNA, 201 bp, Homo sapiens
tctatgaaacaaaaccagaatgctgcaataacagaacaattggtcaataaggaggagcttttggaaattaaaatttctattttcaaaataaataaatcaayaaaacagttggatcctaaagtagaagaagtatctttttttagaagaggaatgacaaaaaggagacgattatgacttttggagaataattgtaacaattcc

SEQ ID NO: 129755 - DNA, 201 bp, Homo sapiens
agatctcattatttcagataattactttgaccatccttttcaatttgagagtatgatgtgaggcaaggcaactatttgtgagaaaaaagagaaaaggcaamgattcactgtcatacttttgcttgtgggttccagtccaggctttctatggggggtgggggggtgtctcagtctccccgtctgtaaaatgggattagtgga

SEQ ID NO: 129756 - DNA, 201 bp, Homo sapiens
gcaggcatcagggaaagatgaaaatgagattgatctttattgtagaatccaggccagggggctgctttgaaggcaagaatttcatgctagaaattccttaytagccacacaaacttcttggagcaagatagacttgtattacttctaacagtgggaaaaacactgccatcataactcacacttttgccatgagtaaagaat

SEQ ID NO: 129757 - DNA, 201 bp, Homo sapiens
caaacccttaatagattaaccaaccttgtgaatatgttcctatttcaaagaagcctattttttcctatgatgaatatattgaattttcattcatgaatttwttcatactatgtctttaggatcacacactctgaaaatatttatctaatatgtgttaggatgtatgctaaatatttatccacacattattttacttagata

SEQ ID NO: 129758 - DNA, 201 bp, Homo sapiens
ttactgttagaatgaacccatatttactgatagcctactgtgagcaaagcacagtactacaaattgtggagagttatgaatgctgatttcaaaaaaggttrtaaacatttcttttgatgatgtgataagacagcatgtaaatttgcaatagaaaagttaaggtactgcatgcacaatgctatttaggacaaagtccaccca

SEQ ID NO: 129759 - DNA, 201 bp, Homo sapiens; identical to SEQ ID NO: 22436

SEQ ID NO: 129760 - DNA, 201 bp, Homo sapiens
ctctctctgcgcgcgcacgcgtgtgtgtgtgtgtgtgtgtgtgtgttattgttgttgttgcattctaatggaagcaacgacggagactctcaggcagtgaygtggaagttagttgggggctgggtgttggtagggacagaaagacaaaatgtcattttggagccttaccatctagttggtaagtatcatgagatgcatttt

SEQ ID NO: 129761 - DNA, 201 bp, Homo sapiens
atctcctcattcaccaaatagtcaaccaagaaaaatcaaatgactgagagtacatgtctgttctgaattaagtggtacatgttaatgtcaatagtttatgwgtgaaatctctatttggggtacaacattacacagtccttcactcttgaccattcaatagcacaccccgaggctcccaattaagttttcttgaatcctaaa

SEQ ID NO: 129762 - DNA, 201 bp, Homo sapiens
ctgggcatccaggggggtcagtccgagtgcctcagcctggccagaggagaaggtgaggggctgtttctgcgtagttgtacttgagcggctctggtccgatkcgaggacccctggccgggtcagccctacctaggcagagcgggaggcggggcagggccacggtccccagcccaggcaccggcgccccacccggcgcccgga

SEQ ID NO: 129763 - DNA, 201 bp, Homo sapiens
caaaactctcagacatgaatagggttagcaaatctgtacaccaggaaaggagttatttacatcctgtcttctcctacagctccagaggagggcagaacagygtatttccaggcaagccctctctttaaaaactcatagccaaggctgggaagacagagtgagtgggtgggccttctggcagcttccttaccttcaaatctt

SEQ ID NO: 129764 - DNA, 201 bp, Homo sapiens
tagccatgtagagtcattggtgtcttgacaagagcagtttcagtacacggtggagataaaacccaactgggctaagtttaagaagtgggattggagacagygtgaatagacaactccttcaaggggttttgctataaatgggattacaaaattgggcagtagatggtggagatagtgaggtcaaatattttaagatgagaa

SEQ ID NO: 129765 - DNA, 201 bp, Homo sapiens
attgcaataatattgctatgaattcattaagtgtgtattccaattttaatttgaaaggcactacttaaaatttcagaatcacagttaacaaatgaaagccrtttctttagatctaaattttttgtttttttgttttgatcagcacatcatgcagcgaattcagaggcttcaggctgactgggtcttggaaatagacacctt

SEQ ID NO: 129766 - DNA, 201 bp, Homo sapiens
tattttgaagttttaagcaattaattgaaaacatgtcagagtcttaaacatgttatgaaaggatagctagttaaatgatttcattcaatcctcagaattaycaccagccagccattttgaattcatcggctcttcggcaaattgcagaaggcaccagtatctctgaaatgtggcaaaatgacttacagccattgctgatag

SEQ ID NO: 129767 - DNA, 201 bp, Homo sapiens
tttttgccatgaaagtttgacaaaggcagaaaggggcaagggagttgagggtgtatgctagtgagtgattggcatgattgactggaatttaagccaaatayagagtgaagtgaggacattatgggggtgaaggaccatgaaaaggtgaaacattcagtagattaggggttccagtgggattgaaggactttggagtttaga

SEQ ID NO: 129768 - DNA, 201 bp, Homo sapiens; identical to SEQ ID NO: 22433

SEQ ID NO: 129769 - DNA, 201 bp, Homo sapiens
gactttggagtttagagtaccaggaccaatctgaaagacaggggttattgtcagacggaggaaagtgtaaaatcagttagaatcctagtcactctttttasttccattcaaatactgtctttttcataaagccctccttgacacccccaggattttgcttctcattctatccaatttctagaggactttaatgttacattt

SEQ ID NO: 129770 - DNA, 201 bp, Homo sapiens
accctttctagtttactcactggagtaatgcacattgttacaagttggttctttcttaataggtgttccagttctgcatctgataccgtctcctttccctraagtctggcacaccatggatgacaatgaagaaaatttggatgaatcaaccattgacaatctaaacaaaatcctacaagtctttgtgttggaatatcttca

SEQ ID NO: 129771 - DNA, 201 bp, Homo sapiens
tatgatggctctttagagagccccccgtacccgtgtaggtcagcactggatgtgggacactcccaggaggtgcagctgaggcaattcctaaagtgactgayggctcttccagcagctgaggcaacacaccctcctgtatgggaagtgggtggtgtatcacacgattcatcacagcactttcattgtttcaaaattctgtga

SEQ ID NO: 129772 - DNA, 201 bp, Homo sapiens
ccattcctgggcccacactccatccctaatccctcccccgacccctgcatcttctcctgactctgactctcttcccatatttgatcttctttctgtccccrcgtcttcactaaccccagcttggaacctcatgctacccttgagacttcactagccccggtgccttcatccctccctgacgctcaccccatctgtgaactg

SEQ ID NO: 129773 - DNA, 201 bp, Homo sapiens
tgggatatgagaaagtacacagatgatgatgaattatcagctgtctttatgtggtacagagctccctctgcttgaagaatgaccctttctagtttactcaytggagtaatgcacattgttacaagttggttctttcttaataggtgttccagttctgcatctgataccgtctcctttccctgaagtctggcacaccatgga

SEQ ID NO: 129774 - DNA, 201 bp, Homo sapiens
tttgatcttctttctgtccccacgtcttcactaaccccagcttggaacctcatgctacccttgagacttcactagccccggtgccttcatccctccctgaygctcaccccatctgtgaactgatagcttattcccagcacccccgcttattcctatccattgccctatcactgaccttcgccctataaaagtacaaatggt

SEQ ID NO: 129775 - DNA, 201 bp, Homo sapiens
aaaatcctctccttctcttcactgagaatacccttctggtcagaaattgggaagagaacattacagactagaatatggagccacaccaaatgtatctttgygatacatctaaatggaagggaataaatgagatggaaactgaacaaaccactctgaaaagatcatttgtaggtgtgtgtaggcagggggtatttatgggtg

SEQ ID NO: 129776 - DNA, 201 bp, Homo sapiens
ctgatgggggtgctgataggcacaggaaatgtgtctcgccggcggctgctgagccgggaggcgagggcgcatcgcggcgccaccccccactcgggaccctsgagggcaacggggccggcgctccggggccgctagggtgcggggtgcgcctgggggtgtgcccacagcccccccgctgcttcatccaaggatgctgctgaa

SEQ ID NO: 129777 - DNA, 201 bp, Homo sapiens
gtcagagtcttaaacatgttatgaaaggatagctagttaaatgatttcattcaatcctcagaattaccaccagccagccattttgaattcatcggctcttyggcaaattgcagaaggcaccagtatctctgaaatgtggcaaaatgacttacagccattgctgatagagcgatacccgggatcccctggaagctatgctgc

SEQ ID NO: 129778 - DNA, 201 bp, Homo sapiens
catattttccttactttgatggtagccttgagaaactgagtttggctttctttcaaggattttgtgcacttttattatgtcctgtaccagaatgaacttaygccaataacttgcaccttcattcaattttaacccattgtgcccctcctattggtatttacatttcaaaccatatctctagttgtataagagaaagcagtg

SEQ ID NO: 129779 - DNA, 201 bp, Homo sapiens
actttagagatcagctagtttgagcttcttatttgatacacaaggaaatggagatccagagacacaatgttatatagctcctgtacaaggaatttttcttmgatactacttgatcaataaatagttactgtccaagtgccttcctttgagagttttatcattacagattaaggataaaatggctaaacagagtggattaga

SEQ ID NO: 129780 - DNA, 201 bp, Homo sapiens
gcgaaagcctacacattgaacagtgagatctatagtttctctcccatcttcagcaccagaaagccatcagataggaaactggaggattcttcttcagaccrtgtgaaccaccccgcagaaaaatcccagatggtgacattcagtaatcctcagtgaaaacactggctgggcaccagattgccttgcagtgaagccaaccaa

SEQ ID NO: 129781 - DNA, 201 bp, Homo sapiens
agtctgtctaaggaatatgtggatgtagagattcccaccccacaccaggcaggtaagtgagtgcccccttgtgcctttgccacagatgagaaaatatttttctggagaaattgaaccagggaggttatggaattgagaatagcaagtatacaggagggtgacagtggggcaccccatggaaatcggggagattaggcgaaa

SEQ ID NO: 129782 - DNA, 201 bp, Homo sapiens
gatgtatagcaacccaaagtgtgatctatattctaaattgcctttcggcactcctggagggtccagccctttgctgctttggtattggggaaggcagctgytttagagtccctgccacagccacgcactccctgcttacgggtatttgaatgatagtagtggtcgtttggggagttcccctagagacttctggtggggact

SEQ ID NO: 129783 - DNA, 201 bp, Homo sapiens
cccctagagacttctggtggggacttgtagactaagtctgaaagccaaaaacaaaacaagggatattggtgaactaattagattatgcagccaatttgatsgtttataaagacgatttatcttagctgctaagataaacaaaaaatagttacactgaacaaaaaagttgcggggctgggtgcggtggctcatgcctgtatt

SEQ ID NO: 129784 - DNA, 201 bp, Homo sapiens
tgcttttaagtagagggctgcttgcattttagaaaagacagatgttgtcttgttcagttcctaactattcccccactgaattttttatatcagtggcatcsgacacacagaaggagttcagtaactgctgattgagctgactttgcagacagacagaggtgttaatctgagaattgcccgggagacattcatatagaatag

SEQ ID NO: 129785 - DNA, 201 bp, Homo sapiens
cagtgatgtggaagttagttgggggctgggtgttggtagggacagaaagacaaaatgtcattttggagccttaccatctagttggtaagtatcatgagatscattttacagatatggactctttcctagtcacagctaataagcgagggagctgagatttcaccctaagctgttgtggttaaagcccgcacggctctgctt

SEQ ID NO: 129786 - DNA, 201 bp, Homo sapiens
tcgtgatgagatgaaagagagctataaccagaaggaaactttagagatcagctagtttgagcttcttatttgatacacaaggaaatggagatccagagacmcaatgttatatagctcctgtacaaggaatttttcttagatactacttgatcaataaatagttactgtccaagtgccttcctttgagagttttatcattac

SEQ ID NO: 129787 - DNA, 201 bp, Homo sapiens
gtaaagctactgctgtgttccaaggggctgaggtggagagaaaaggttgttaggtggttgagccagtagggtggcataggatacccctcaaatgctcctayacatgaacattggccccaggctcctggcaagacatccagcagcaataatttatgacagttttatagagagctgggatgaaaggactgtcttgtgtcatgg

SEQ ID NO: 129788 - DNA, 201 bp, Homo sapiens
ttccagaaacaaacccttaatagattaaccaaccttgtgaatatgttcctatttcaaagaagcctattttttcctatgatgaatatattgaattttcattyatgaattttttcatactatgtctttaggatcacacactctgaaaatatttatctaatatgtgttaggatgtatgctaaatatttatccacacattatttt

SEQ ID NO: 129789 - DNA, 201 bp, Homo sapiens; identical to SEQ ID NO: 22435

SEQ ID NO: 129790 - DNA, 201 bp, Homo sapiens
ttttactgcaatatggtcagttctattttattggttcttaaaaaatgctggtcataacccactaaactgatttcaagacccattgattttaccactgttgyggagggtagaacaagctgggccagaccttgaatgcctctttgcctccctgatgtcagtcttcctaagcaatctgaaacctcacctctgaatatctgtttt

SEQ ID NO: 129791 - DNA, 201 bp, Homo sapiens
atctcagagtatagatgagtgtaaataattaggcaataagcattctttgaagtccagtttcacaccagtcccatggagtcgatcacatggaatgaaaatasttgcatgactatttaagcgtatccagctaacactggtcctgaaaggaactataaaataggcctctcctaatttctgttttgccttccaaataattcaata

SEQ ID NO: 129792 - DNA, 201 bp, Homo sapiens
tgattcaggatgaccatattccatttttaagaagaggtaatgtgtgtgtgtgtgtgtgtttgtgtgtgtgtgcgtgcacagcctgattttggagtacaacrgtgggatatgagaaagtacacagatgatgatgaattatcagctgtctttatgtggtacagagctccctctgcttgaagaatgaccctttctagtttactc

SEQ ID NO: 129793 - DNA, 201 bp, Homo sapiens
atcactgttccattgagaaactgaatgttttcaaatcattaaaagcaaatgacaatcagccatcacatttcccagtttctagcttcctccccttattctgyagaccttcataaagtcttgcagcctgggtgatgaatcggtccacactaaaatatgtgccttcctactttttatggtgttcgactattttaatcatatgat

SEQ ID NO: 129794 - DNA, 201 bp, Homo sapiens
ttttcagagggaatggaagaaggtggtttatatgggtgaagactgtgggaggtgtgatgacttttgaagaggaagtggtgtggaataaattttgccatagkttcacttgctttggtatcttcctttctttatggcacatctatctttttgcccaattaatagaaaatcatgctatttttcatcatcacagtatttttttgc

SEQ ID NO: 129795 - DNA, 201 bp, Homo sapiens
cttttggggccatgccttggagaagatgactccttcagagccgctgtgaatattgtagatctcattatttcagataattactttgaccatccttttcaatytgagagtatgatgtgaggcaaggcaactatttgtgagaaaaaagagaaaaggcaaagattcactgtcatacttttgcttgtgggttccagtccaggcttt

SEQ ID NO: 129796 - DNA, 201 bp, Homo sapiens; identical to SEQ ID NO: 22439

SEQ ID NO: 129797 - DNA, 201 bp, Homo sapiens
agtcacagctaataagcgagggagctgagatttcaccctaagctgttgtggttaaagcccgcacggctctgcttttaagtagagggctgcttgcattttaraaaagacagatgttgtcttgttcagttcctaactattcccccactgaattttttatatcagtggcatccgacacacagaaggagttcagtaactgctgat

SEQ ID NO: 129798 - DNA, 201 bp, Homo sapiens
gtgtggtaaagaaagcattgattttgaaatccatttccttcgttttgaaataaagatgtttctctttcagtggctttgaatatgtaaaagcagatcaactstagtttatggtggcattcagaggccatgatttgattatgtatttgaaacctggaaacaatttttccatagtaacaatattataaattgttaaactcccag

SEQ ID NO: 129799 - DNA, 201 bp, Homo sapiens
gcaaagtgaagcgatataaactttggcagtgttattgagcagaccttttacacacttagagtatgcctgtatttactcaaatgtttgaaatacagggcacrctggtaaatgcccactcccacccagctacatgcatatatatatgaatagcccatttcaattcttcggatctaatgtaatcaccactcaggggtcacagca

SEQ ID NO: 129800 - DNA, 201 bp, Homo sapiens
gccttagcactggccacagtcctggctaaaatagaaaatctaagagacagcaggataaagatacaaactcccttctataggagagaaggaattttttctcygctgtatcaaaaggtagtaactgtggagtggtacggacaccattgctcagcaacgttttcttcatgatggttaaacgcgaaagctgtgttttgtcctgcg

SEQ ID NO: 129801 - DNA, 201 bp, Homo sapiens
ataggatgttaatttttaatttcatataaacatgatgaagcctggtcccacatttctatttctaaaatgagaggcaggccttttatttgtttatttaccctttttttttttttttttttttttggtattttgaatgttgtgcaagttccagaagagggcttttgtttcctggaaagtagatccagtcagctgatagccagc

SEQ ID NO: 129802 - DNA, 201 bp, Homo sapiens
aaggtcgtggcccacctgactgtgcagcccagaggtaggtgccaggaggttgtggactgaattgattttctcagatcggttatcaggaaacacagaattcygcagctgacattagtgttactcttcgttataaagcgttggctgttctctctgcattttgtgcaccgtcattgtgcttgtgcccccagggtgtctgcatag

SEQ ID NO: 129803 - DNA, 201 bp, Homo sapiens
ggagttcgagaccagcttggccaactcggtgaaacctcatctctaaaaatacaaaaaattagctgggcgtagtggcgggtgcctgtagtcccagctactckggaggctgaggcaggagaattgcttgaacctgggagacggaggttgcagtgaaccgagatcacgccagtgcactccagcctgggcgacagagcgagactc

SEQ ID NO: 129804 - DNA, 201 bp, Homo sapiens
cgatgttctcattgatactttgtttttgtttttctttttaaataaatgggcacagaaaattacatttaaacttgccttctgtagaagtatagtaacaactmccatgtgaacaatggttaatgtgtgcaggggccatattgtaagagctttatatatatacacacacattaatttcaacaacttctgtccattttagagaag

SEQ ID NO: 129805 - DNA, 201 bp, Homo sapiens
cacctggagttgccccccttcacctggagctgccctcccttcacctggagctgcccccccttcacctggagctgtccccccttcacctggagttgtccccyccttcacctggagttgtcccgcctttctagactgaactaaattcatcttacatatattgattgatgtctcgtgcctccctaaaatgtataaaaccaagca

SEQ ID NO: 129806 - DNA, 201 bp, Homo sapiens
acttataggtttcccagaactttctacaatctgtctccatgctcatcatgccaacttacttcatagagggcgtgccagagccccttgcttgttgggagaakggtcctgcagctgcggagggcaggtgacccagtggtccactcattggcatgtggcacacagctaggaccacgccgccacatctgccagggtccctctcca

SEQ ID NO: 129807 - DNA, 201 bp, Homo sapiens
aaagcgtggattttgacttgcccatctgcctatgtcagagatggagcccagggattctaagaaacggtagtggcagggctccccatgtctgggcacagacrcagattcacagccttcttggggtcccccaagctgctggcctagagctgtgttgtgaggcaagctggctgaaggcgagtcatgtccgagatgggtgggcac

SEQ ID NO: 129808 - DNA, 201 bp, Homo sapiens
ggagttgccccccttcacctggagctgccctcccttcacctggagctgcccccccttcacctggagctgtccccccttcacctggagttgtcccccccttyacctggagttgtcccgcctttctagactgaactaaattcatcttacatatattgattgatgtctcgtgcctccctaaaatgtataaaaccaagcactttg

SEQ ID NO: 129809 - DNA, 201 bp, Homo sapiens
tatgtcagagatggagcccagggattctaagaaacggtagtggcagggctccccatgtctgggcacagacacagattcacagccttcttggggtcccccargctgctggcctagagctgtgttgtgaggcaagctggctgaaggcgagtcatgtccgagatgggtgggcacaatgcgcatggttttgtggctctttttgga

SEQ ID NO: 129810 - DNA, 201 bp, Homo sapiens
cttcacctggagctgccctcccttcacctggagctgcccccccttcacctggagctgtccccccttcacctggagttgtcccccccttcacctggagttgycccgcctttctagactgaactaaattcatcttacatatattgattgatgtctcgtgcctccctaaaatgtataaaaccaagcactttgagaggccgaggt

SEQ ID NO: 129811 - DNA, 201 bp, Homo sapiens
cggcactgagggcccctcactcacccggggaccaggagggacacggcactgagggcccctcactcacccggggaccaggagggacacggcactgagggccyctcactcacccggggaccaggagggacacggcactgagggcccctcactcacccggggctcaggtgaggcatagcactgagggcttctcagtccaccaca

SEQ ID NO: 129812 - DNA, 201 bp, Homo sapiens
gagaagcttcgcgtaggccccagggtcccgagccccgagtctcgagcgcagaatcaggggtgccaatgctctcctccgcgcccccgagcgctcgccttggycatgcgggccgccccaccgggatgagggcgctcaggccggacgctggggccccgggttctcgccccgccccgccctcggggattcagaggggccgggagg

SEQ ID NO: 129813 - DNA, 201 bp, Homo sapiens
ttgcattgctgcagataaagaaacttgaatcacggctcagtaccacagagtgcgtggatgccgggggcgaatctcacgccaacaacaccaagtggaaaaargatgcatgcaccatttgtgaatgcaaagtgagtatggggggctctatcttcatgtcctaaggtatacgcaagtccgagagtcccatgtgaccactcaggt

SEQ ID NO: 129814 - DNA, 201 bp, Homo sapiens
tgcggctgtcagggtgacggagggaagtcctaccgctgaccattacatgcgtcctggcagcgagccccacctgtgagccaggtgtggggagcacccctgcsctgctggggtttgtgagctggggctgtgttggttaaggagtgatggagtctagggggagagatgggaggaggtgaaaggcgtgcaaggggggtgggtggg

SEQ ID NO: 129815 - DNA, 201 bp, Homo sapiens
gtttgtgagctggggctgtgttggttaaggagtgatggagtctagggggagagatgggaggaggtgaaaggcgtgcaaggggggtgggtggggcaggaccygggtgcaggggcagagaggcctaggtgggaatgaggtcagattgccggaaggcacctggggccaaatcactgagggtcctaagttggagtggagcacttt

SEQ ID NO: 129816 - DNA, 201 bp, Homo sapiens; identical to SEQ ID NO: 22494

SEQ ID NO: 129817 - DNA, 201 bp, Homo sapiens
agagcatcaggggcggtgcacacccaggaaaccttgaaatgagacccagctcagagcatcaggggcggtgcacacccaggaaaccttgaaatgagacccgrcgtgacctgccaaggttatatttccctcctcctcctttcccctcaccacagtgttgggagacagggggaacatctcagcaacagcacctcagccttcagc

SEQ ID NO: 129818 - DNA, 201 bp, Homo sapiens
gaatcgagtgatctctcaggagtacagagatcttccccgctcctactcagggtctggagctgagaagctaatgctggcctctggtctttagtgaccaacaygtgagctctctcgtacttcccaacgcccaggtttactaattattttaatagtgatagttccatatgcttttggggttcagaagaaaatgtgatttattta

SEQ ID NO: 129819 - DNA, 201 bp, Homo sapiens
ttggggttcagaagaaaatgtgatttatttaaaagtaccttttttgagggaattcaatttaagagaagaccaactttaccatgtttgatgcttaaatagcygatcaggacattttatatgttagtggtatctctctatgtgggccagtagctccccaggatcaaggctggatggttgaattgttaaactctgcctgcttcc

SEQ ID NO: 129820 - DNA, 201 bp, Homo sapiens
caatttaagagaagaccaactttaccatgtttgatgcttaaatagccgatcaggacattttatatgttagtggtatctctctatgtgggccagtagctccycaggatcaaggctggatggttgaattgttaaactctgcctgcttccagaccacctgcatgtgacttagcacacatatgttagtgggtggctgcatgcttc

SEQ ID NO: 129821 - DNA, 201 bp, Homo sapiens
gccgatcaggacattttatatgttagtggtatctctctatgtgggccagtagctccccaggatcaaggctggatggttgaattgttaaactctgcctgctkccagaccacctgcatgtgacttagcacacatatgttagtgggtggctgcatgcttcttttgatgctaaagtaatacaactggttgatagatatttttcta

SEQ ID NO: 129822 - DNA, 201 bp, Homo sapiens
ttgaattgttaaactctgcctgcttccagaccacctgcatgtgacttagcacacatatgttagtgggtggctgcatgcttcttttgatgctaaagtaatayaactggttgatagatatttttctaaattcataacactagtaatttttgttttctttgttttaaagtttattttgaaaaataggcattaaggggggcatgg

SEQ ID NO: 129823 - DNA, 201 bp, Homo sapiens
gttgatacaccttgcagacagctttgaatccttccctaaggtcagttttggatgtaatctgggagtattcatcgttttacgccatctgccatggatttctmcattgcttaattgactgtaaaatgagttattcttgtgaagtgggactttgttggaaaacattcaaacaatacggaagtgcaaaagataaattattagaga

SEQ ID NO: 129824 - DNA, 201 bp, Homo sapiens
tctgtcgagaatctgcacgcacagcagtgcaactgcgttacatggatttactttttttgtggctgttacttttataaaaatggaatcataccagacaataytattctgtaagttatgtttttcatccagtgataataaccactatcatcatacacagctataccagatggcattttttaagcatttgcaaatattagttta

SEQ ID NO: 129825 - DNA, 201 bp, Homo sapiens
aacctttgaaaactagtatgtgactacatgagtgccacgtgtctggaaagtgctttctcttgttaggaagtcagagtaattgagctcttctattgttagawcttgccttcctcctctgtgttttttcatatgtcaaggaaatagttgtaaaaagaaagcatatccttctctatgactctgaatccaggggcagctccagct

SEQ ID NO: 129826 - DNA, 201 bp, Homo sapiens
tcgttgtagacattgctcctaatggtcagacgtctgccaagactgtggtcattttcttggtcgcgtttttaccccaggctgttttttacatgtcctgtttygaatgctttctctccggaagctcttcctcagttcactgtgacgcctcaggacagagtcgttattgagggccagaccgtggatttccagtgtgaagccaag

SEQ ID NO: 129827 - DNA, 201 bp, Homo sapiens
aacttgccttcctcctctgtgttttttcatatgtcaaggaaatagttgtaaaaagaaagcatatccttctctatgactctgaatccaggggcagctccagsttcaagcgtggcttgatccagggtcgacatgctgtgatattctatcgttttctccccagcgtgggtgacttggcttgcttctctgttgttctgactcagt

SEQ ID NO: 129828 - DNA, 201 bp, Homo sapiens
agcacggtggtgggaatgtcttccattggggcgtgtggtcagctgccgccagtctaataaggacattggagattctgtaaaagttcttcagaaatattccyctcaaatgttgtttattttaaggcattattttcagtgaaataacatcttttaatacaagagccaagctgttactctgaagtgcccaatgaatgaatgttc

SEQ ID NO: 129829 - DNA, 201 bp, Homo sapiens
aaatatttgcaaactatttatctgataaggggttagcatctaaaacatgtaaggaactcatacagctcagtaaaacaaacaaaaaacaaacaagcttgctraaatgggcaaaggacttgaatagacatttttcttttttattttattattattatactttaagttttagggtacatgtgcacaatgtgcaggttagttaca

SEQ ID NO: 129830 - DNA, 201 bp, Homo sapiens
ctgactgtgagctcccagcatccctgagtgggcctgatggagggcaggggattttgttcttctgaagttttttgatgtaattgactcgttctcctggattstctacatctgccttccagtcaccccagtgtttgccagcattcccagcgacacaacagtggaggtgggcgccaatgtgcagctcccgtgcagctcccaggg

SEQ ID NO: 129831 - DNA, 201 bp, Homo sapiens
caaccccagcgtgttctggacagggctgagctgggactggattccacaggaccaaggcactgggaagcgcagaggtgtctgcacaccccccgcggcttccygtccatgcatggccgtccctcatggacatcatggcaggaaactctgagaagctctgtcattgcggaagagacttggggttcctgcctttgactccctcac

SEQ ID NO: 129832 - DNA, 201 bp, Homo sapiens
atctgctggacactgaggtgtctccacagacatcttgtctgctgggctggccacacagggaggcctcagtccacacctcccacatgctgttgcatatagcrtaagatcttccatgcttcacattataactacttcctgtcttcttcttaggtataacatgatttcaaaagctaaagtctgtaattttcatgctgtctgaaa

SEQ ID NO: 129833 - DNA, 201 bp, Homo sapiens
aaccaaaacattctttgaaaatttcaactcattcctttggcttatgactaaatgatttggcaaaaacaaatagtttaaaagtcattagtgtatttgttcaygttgctgattccaaagcagtttttctgcatcttatgtgaaatgcaatatctgtgattttctctattgacttaattaattatttgtttttagtgtcttccg

SEQ ID NO: 129834 - DNA, 201 bp, Homo sapiens
aagtgaaagaagcttttttgtaagggtgtgttgggctgtgtcagcgtctgtcaaaagattgcgtatgttgaagaaaaatgaaatcaactttggatttattrgggttcatgtcattgggtgagatggttagagctgttttcatcactaaaaataaaagttggttggaattagtttatagtatttggtaaagtatcaactagg

SEQ ID NO: 129835 - DNA, 201 bp, Homo sapiens; identical to SEQ ID NO: 22488

SEQ ID NO: 129836 - DNA, 201 bp, Homo sapiens
gctgtgttgtgaggcaagctggctgaaggcgagtcatgtccgagatgggtgggcacaatgcgcatggttttgtggctctttttggaattgtgatactttgrtgtggaaattttcatcctccatcaggcttggcaagtgttttctgtgcaggaccagtcctctgtgagctgcgcagtctctactgggaccactcagctcggc

SEQ ID NO: 129837 - DNA, 201 bp, Homo sapiens
aatgcgcatggttttgtggctctttttggaattgtgatactttggtgtggaaattttcatcctccatcaggcttggcaagtgttttctgtgcaggaccagkcctctgtgagctgcgcagtctctactgggaccactcagctcggccacacagcgccagcgcagccccagatggtgcggagtgagcgagtgtgggcgtgttc

SEQ ID NO: 129838 - DNA, 201 bp, Homo sapiens
accatgacccgtgtttctgtgaattccctcccgggagcacagggctggccacactggtccccatggaaggagagtgctcagcggagatggtcccatcctcsacctgcatccctgcactgccctgtgaatctctgtgtccttttcttcctcgccacacacaccccaggcatctgctcttgttcctgcctcagctgggaggtc

SEQ ID NO: 129839 - DNA, 201 bp, Homo sapiens; identical to SEQ ID NO: 22514

SEQ ID NO: 129840 - DNA, 201 bp, Homo sapiens
acaacttagaggagagacaggcaggcgcccaagtccgatcaaggcatccttcacaggggaaatatccagggtgcccggggaggagagggctctttgcctcrttcactgttcctccttatgactgtgaacacatgaagctgaatttcttcaattgtggtgacattattttggagaaaacctttctttcccttgtagttctag

SEQ ID NO: 129841 - DNA, 201 bp, Homo sapiens
ccatgacccgtgtttctgtgaattccctcccgggagcacagggctggccacactggtccccatggaaggagagtgctcagcggagatggtcccatcctccmcctgcatccctgcactgccctgtgaatctctgtgtccttttcttcctcgccacacacaccccaggcatctgctcttgttcctgcctcagctgggaggtca

SEQ ID NO: 129842 - DNA, 201 bp, Homo sapiens
ctgatccgtggtcacgggtcactggctcactggacacagcgatgttgtcagagagtttgaggccaagcggtgcaggggggagaccactctgggattgtgcrtcctgaggacccacggtgctcatgtttccgaaagtgtgtgttgattcaagtgagcgtggacagggcgtgggtagatttgggaggaggtctgtctctacag

SEQ ID NO: 129843 - DNA, 201 bp, Homo sapiens
catgacccgtgtttctgtgaattccctcccgggagcacagggctggccacactggtccccatggaaggagagtgctcagcggagatggtcccatcctccamctgcatccctgcactgccctgtgaatctctgtgtccttttcttcctcgccacacacaccccaggcatctgctcttgttcctgcctcagctgggaggtcac

SEQ ID NO: 129844 - DNA, 201 bp, Homo sapiens
ttgaggccaagcggtgcaggggggagaccactctgggattgtgcatcctgaggacccacggtgctcatgtttccgaaagtgtgtgttgattcaagtgagcrtggacagggcgtgggtagatttgggaggaggtctgtctctacagagaaggacagtgcagctcattgcagaaacacatggacgtatccagggaacacccag

SEQ ID NO: 129845 - DNA, 201 bp, Homo sapiens
gcctgagggcagcccgagccccgccctcgggcagggagctgttggggaggggataagcgagtccaccagacctcagtgagagacttgggcaaagggctgtrtgtccagggagggtggcttgtgcctgaccctggcgaactgcaccccttccccggatcggctctacagcccagagctattgaaaacatgcattcctggtga

SEQ ID NO: 129846 - DNA, 201 bp, Homo sapiens
ggggcttgaaataccccctttccttccctcggtcagtacctcctcatccttctgggctttgcttgggggactccacccctgcctgcctgcactgaagcctygctgagcagctcacagccactgtgccgtggtggtgcctgggtcttacatcggtccccagctgccatgggctgtgaaaggccaaggaccccagaaaaccac

SEQ ID NO: 129847 - DNA, 201 bp, Homo sapiens
aaggtccccctctcctgtttgctcactttactaaagttgctcaaacactacaaccccagattgagattctgtgatagatttacagagctgcatcaagagarcacgctgtgtcctggctgctgtctgctcggagcagtctctaacctcacatccctgaggggccccaggcggaggaggccacgccagctgccccacctctct

SEQ ID NO: 129848 - DNA, 201 bp, Homo sapiens
gtgacctgccaaggttatatttccctcctcctcctttcccctcaccacagtgttgggagacagggggaacatctcagcaacagcacctcagccttcagcayacgctcagatgcatctgggacaaatgacttcagagagtttgttctggaaatgcagaagaccatcacagacctcagaacacaggtgaggtgcctggcggcc

SEQ ID NO: 129849 - DNA, 201 bp, Homo sapiens
ggaccgactggccagatgccacatacctgactatgaccatctgggtcttgcatgtgcctgtggtcctgtactgaccttcagctgtgggcacaggttgggtrccctgggcacgtggctgacactgtccccctcacagcctcctcacctgagagctgtgcacctgctcacgggggaaagggtgattctggtcgtgaggccagt

SEQ ID NO: 129850 - DNA, 201 bp, Homo sapiens
ggaaggaggcaatcctggaggagcccttgctgacagccccaagttgggtcgagggccttggttttggttgccgggcagaatggcagcactgagcagagccrtctccgctgcacacacacacacactcgtacccgtgcttgtgtccgccccactgcaggcactcacttgtacacacctgtgtgtggttgtgtttttcttctc

SEQ ID NO: 129851 - DNA, 201 bp, Homo sapiens
ctgctcggagctgatgcgctgtttctgctcccagcgcactggagagacagcacacgtctcaacccagatgcaagggtgctgggatgcggaggtcagctgcstgtccaggaagtggaagtggaccgtgagcttctcagtttttgccatagctgtcccaaagtttaatagcacacaattattgctcgctctcttaaaacttcc

SEQ ID NO: 129852 - DNA, 201 bp, Homo sapiens
ctcccaaagaatgagatgtgggaagagtttatctcgccagcttggcactgggagaactgaccacatctccttcgctttccaggcctggatggatctgagcrcagcctgggagcttctccatttgcaaatcctaacaaatggctcccctcccccaaccctaggtcagataacttctgcttcttagtcttatttctaatactg

SEQ ID NO: 129853 - DNA, 201 bp, Homo sapiens
cattatgttgtagaaagtagccgtagaaatattaatagcaatgattatattttggggtactatgaattttatcttcagtaatttgtttcattcttcctttyttccccctaaactctggttagccgtcctcgttctccaaatgatttgctggccttgttccggtatccgagggatccttacacagttgaacaggcacgggcg

SEQ ID NO: 129854 - DNA, 201 bp, Homo sapiens
gaggtgtttgggctacattcaggagaagcagggtcaggccgcctcttgtctgacactggggctggcagtgtgacgtagggagtgtagcataattttaaggyactccagagtgcagattgtcatctggccatcggggagggacccccagaaacagcagactctgatctccgaggcagagtgcctgagcctccatctgtgggt

SEQ ID NO: 129855 - DNA, 201 bp, Homo sapiens
ctggaaatgcagaagaccatcacagacctcagaacacaggtgaggtgcctggcggcctgtgtccccccactccaagattccacagcagcacagccctgccygaaccttctgcatataacgttttattcccaggcaactgttcaactgcccacacaggacccagaccctggagccttgggggtgtcatttctgcacgctggg

SEQ ID NO: 129856 - DNA, 201 bp, Homo sapiens; identical to SEQ ID NO: 22490

SEQ ID NO: 129857 - DNA, 201 bp, Homo sapiens; identical to SEQ ID NO: 22512

SEQ ID NO: 129858 - DNA, 201 bp, Homo sapiens
ctaccaggaggacaagccgaccaagaaaacaagaccacggaaaatacccaggtatggtggtctctgaggtcaaatgatgtgcagaggggccctcgcaccgygggcgtcgggcagtaggaccggcatcctgctgtgggcctgtggcgaggatggttcctggcagggacgtcccagggcactgggggccaggccgcagcctgc

SEQ ID NO: 129859 - DNA, 201 bp, Homo sapiens
acaccatgacccgtgtttctgtgaattccctcccgggagcacagggctggccacactggtccccatggaaggagagtgctcagcggagatggtcccatccyccacctgcatccctgcactgccctgtgaatctctgtgtccttttcttcctcgccacacacaccccaggcatctgctcttgttcctgcctcagctgggagg

SEQ ID NO: 129860 - DNA, 201 bp, Homo sapiens
cacactgaggtgacgaggcagagatggaagcctaggcctgcccttggtgtggttccctcatggctgctgaggggagccttagagaaggccgctccctgtgygggcctggagctccggagcagccaccagggacgggagcctgggagccgtcagccctcgaggaaggcctgggagccgtcagccctcgggtggccctcggat

SEQ ID NO: 129861 - DNA, 201 bp, Homo sapiens
tgtgcgggcctggagctccggagcagccaccagggacgggagcctgggagccgtcagccctcgaggaaggcctgggagccgtcagccctcgggtggccctyggatggccctcggaagccatgtggagtcacgggcacgcaggaggcaggagaggccattctccccttgcccagggtggagggtgaagggcggggcagctgt

SEQ ID NO: 129862 - DNA, 201 bp, Homo sapiens
cccgaggactggccaagccatgcaaaggtggggtcacctgtgtcctggcctcttcgtggtgcagtgccacaggttcctcccagatcccagagggaggccarccagcagcttgcaggcactgtttgttaaaatacagatagagaggtctggcgcacacctgcaatcccagcactttcggagcccgaggcaggaggagcgctt

SEQ ID NO: 129863 - DNA, 201 bp, Homo sapiens
tctctgcagcacctagtacatcccagcatagacacaatcaacagttatcagtgactgagaattcctggctatcacatttccattcaaaggaaagcccaagratatagtactgctgaatcaaagcccttaatcaaacaacgttccacatgtttagcacaagacatttagcatctttccaaattcagaatgctgtgggcctgt

SEQ ID NO: 129864 - DNA, 201 bp, Homo sapiens
tttatctttctgatgaattacatttttgatcagtaacacttctatctctatcagtgctttttgcttcaaggtaaatttgttgtaagataaatacagcagcytctacttgattcgtattggcaggtgtgtcttttcccaccatttttctccgagcctttccatgtgcatatatttgagatgtttaatataaataacatagag

SEQ ID NO: 129865 - DNA, 201 bp, Homo sapiens
gcccgacaggcattggatatttgtcctaatgctctctgtcccctttcccccaaccccccgacaggccctggtgtttgatgttccactccctgtgtccatgkgttctcactgttcaactcccacttatgaatgagaacatgcggtgtttggttttctgtccctgtgttagtttgctgaggatgatggtttccagctttttcc

SEQ ID NO: 129866 - DNA, 201 bp, Homo sapiens
ttctccgagcctttccatgtgcatatatttgagatgtttaatataaataacatagagctagaaatttaaaaaaaaaatcctaagtttttcttaaagttaakccatttaaatatgtttattgtagttaacaatatgagatttataaattctagctcttattctgaactgtttgtccaaacttttctatgtttcttgctttag

SEQ ID NO: 129867 - DNA, 201 bp, Homo sapiens
tatggctagccagttttcccagcaccatgtattaaatagggaatcctttccccattgcttgtttttgtcaggtttgtcaaagatcagatggttgtagatgkgtggtgttatttctgagggctctgttctgttctattgtctatatctctgtttcggtagcactatcgtgttgttttggttcctgtagccttgtagtatagt

SEQ ID NO: 129868 - DNA, 201 bp, Homo sapiens
tgcgcctacctccgaaacaaagtgctgggacagaccacggctcccaggggtcgccgagtttgcaggctgcttcctggaggccctggggcggggcgggggcscgagttcctctcctcctccgcagagagaccaaggctttctttccagagcccgtgaatggtcagcccaggccggacgactcgggggcatctcactcaacag

SEQ ID NO: 129869 - DNA, 201 bp, Homo sapiens
atgtccaggaatttaccgctttcttccagattttctagttcatttgtgtagaagtgtttgtagtattctttgatggtagtttgtatttctttgggatcagrggtgatatcccctttatcattttttatcctatttgattcttctctctttctttattagtctggctagcagtctatctaatccatttgtcaaaccgattaa

SEQ ID NO: 129870 - DNA, 201 bp, Homo sapiens
ataccagatggcattttttaagcatttgcaaatattagtttagggtgaggattgagaggaatcgttgtaagtcggcctggtgtccacgagctgcagtgtgkcctcatccgtgccccgtgtgcattgcagctggcggtgtggttgaacggtctttgtgtgctttccagggtgatgctgagaacacacccatccttcatcttc

SEQ ID NO: 129871 - DNA, 201 bp, Homo sapiens
ttgcaaaggtccatatttgcccttcactttcgtgctctgccacagctttcttgggtggggatgatgtacaagacagactgaacaccccattacttcgttaratagtgtgtccacagggcccaggtgggacacggcactgagggcccctcactcacccggggaccaggagggacacggcactgagggcccctcactcacccg

SEQ ID NO: 129872 - DNA, 201 bp, Homo sapiens; identical to SEQ ID NO: 22482

SEQ ID NO: 129873 - DNA, 201 bp, Homo sapiens; identical to SEQ ID NO: 22506

SEQ ID NO: 129874 - DNA, 201 bp, Homo sapiens
agaaagaaagaactgtttttatatttgctgtattttttaccatgtgcagctttgttaggtagatttcagttttctctttattttttaggttgtatggctckacactcaacatcgacctgtttccggcgctcgtggtggaggacctggtgcctggcagccggctgggccccaccctgatgtgtcttctcagcacacagttca

SEQ ID NO: 129875 - DNA, 201 bp, Homo sapiens
aaaatacccaggtatggtggtctctgaggtcaaatgatgtgcagaggggccctcgcaccgcgggcgtcgggcagtaggaccggcatcctgctgtgggcctrtggcgaggatggttcctggcagggacgtcccagggcactgggggccaggccgcagcctgcgtcctgctgtgctgcccactcagagcatcaggggcggtgc

SEQ ID NO: 129876 - DNA, 201 bp, Homo sapiens
tccactgtgcccaggcaaccccagcgtgttctggacagggctgagctgggactggattccacaggaccaaggcactgggaagcgcagaggtgtctgcacaycccccgcggcttcctgtccatgcatggccgtccctcatggacatcatggcaggaaactctgagaagctctgtcattgcggaagagacttggggttcctgc

SEQ ID NO: 129877 - DNA, 201 bp, Homo sapiens
caccatgacccgtgtttctgtgaattccctcccgggagcacagggctggccacactggtccccatggaaggagagtgctcagcggagatggtcccatcctycacctgcatccctgcactgccctgtgaatctctgtgtccttttcttcctcgccacacacaccccaggcatctgctcttgttcctgcctcagctgggaggt

SEQ ID NO: 129878 - DNA, 201 bp, Homo sapiens
aggaggttgtggactgaattgattttctcagatcggttatcaggaaacacagaattctgcagctgacattagtgttactcttcgttataaagcgttggctsttctctctgcattttgtgcaccgtcattgtgcttgtgcccccagggtgtctgcatagtagctcattcaatctctgtccctttagcgggtgaaaacatttg

SEQ ID NO: 129879 - DNA, 201 bp, Homo sapiens
ctcttcctcagttcactgtgacgcctcaggacagagtcgttattgagggccagaccgtggatttccagtgtgaagccaagggcaacccgccgcccgtcatygcctggaccaagggaggtaagacccaggccggccctttgcctgctccctccgcggccacagacgcaggaagcacacatttccactgtgcccaggcaaccc

SEQ ID NO: 129880 - DNA, 201 bp, Homo sapiens
tgtggcctctgcaagagcgaaggcccctggcccagcccccgtgttgcaggcgccctgtgctaactccagtgttagcatgagtggcccccagagctgagtartccaggttgccacagaccctgagcttgtcatggggaccatggggagtggggcagagatgtcgtgcggggaggatagggctggatttccttgcgtcacttt

SEQ ID NO: 129881 - DNA, 201 bp, Homo sapiens
ggggctcccctctgcctgttgtcagtaggctgttgatgaccggcccgccgggttggctctgtgtttcttgggtttgcccttggcgtccctgacctagcagracgctgggtgcctgtatagagaatgcgggggtgggattcctgaacggctccccagatcccagcactcagccacgctcctgctctttcagaggaggaagct

SEQ ID NO: 129882 - DNA, 201 bp, Homo sapiens
ggaggagccttcgggagcatctgtcttttgttctacagttaaatcagaaggagaggcttgaccagtgactgttacctgatttgacctttgtccacatgagmtaacaaaactcttatcagacataattgacattttaaaagggcacatacttaaagtaggcttgctgagttttgacatccgcctccaaggtgcaagtaatcc

SEQ ID NO: 129883 - DNA, 201 bp, Homo sapiens
caataaggaagggttttcatcgttatttcatttctttgctgtttttattaagctcagtaggaaaatgtgggtagcactcacacaccatgacccgtgtttckgtgaattccctcccgggagcacagggctggccacactggtccccatggaaggagagtgctcagcggagatggtcccatcctccacctgcatccctgcact

SEQ ID NO: 129884 - DNA, 201 bp, Homo sapiens
ccctacagtggcctttcagtgtactagtgaaaggaagagttgcatgtcccttactttaaatcaaaagctataaatgattaagcttagtgaggaaggcatgycaaaagctgagataagtcaaaagctaggtctcttgcatcagttagtttatggaggaagttttagtggtttgggaagaagagcaaaccagccacaacattc

SEQ ID NO: 129885 - DNA, 201 bp, Homo sapiens
gaagaccatcacagacctcagaacacaggtgaggtgcctggcggcctgtgtccccccactccaagattccacagcagcacagccctgcccgaaccttctgsatataacgttttattcccaggcaactgttcaactgcccacacaggacccagaccctggagccttgggggtgtcatttctgcacgctgggtcgggccgggc

SEQ ID NO: 129886 - DNA, 201 bp, Homo sapiens
gctgctttcagtcagcagccaggtttcaggcaggagggccaggtgtctgtcacgagagggcaggtcccagtcaggagggggacgtcctagtcaggaggtgrcaggcttcagtcgggaggcagcaggtccctgtcaggagagggtaggtccctgacaggaggcggcaggtttcagttaggacagggcaggtccccttcagga

SEQ ID NO: 129887 - DNA, 201 bp, Homo sapiens
ccagccaaaagaagaaaactctctgaaggctcaggtgttttataaaatttttttagcaataaaatattttttaaagtatgtatattttttagatgtaatgytactgcatagttaatcagctatattatagtgaaaatagaacttttgtatgtactgggagaccaaaacattcatgtgaataacttttttgcaatttttaac

SEQ ID NO: 129888 - DNA, 201 bp, Homo sapiens
tagcgtgaaaggaagtggcactcttttggacgttgagggaacagcatgaagcctcagtggaccgagatgtgcagtgacaggtgtcaggaaatgccctgctyggcagcctgtggagaccgatggtgtgcactcgtgtggaggtgtggtgactgtctcttacacggggcgtttaaagtgaggttggaacagtgtcagcctgga

SEQ ID NO: 129889 - DNA, 201 bp, Homo sapiens
aggttcatatttcagtccttttacttcaagagctctaaaaaaaatgtcttatagtgcagctctattggtaatcgattcctttagcttttggatgtttaaamagtgctttccttaccttgccttaatttttgaatgatattttcctgagtaatattctgagttggtgattttctctgacactgctttttttttttttttttt

SEQ ID NO: 129890 - DNA, 201 bp, Homo sapiens; identical to SEQ ID NO: 22498

SEQ ID NO: 129891 - DNA, 201 bp, Homo sapiens
ttcagtccttttacttcaagagctctaaaaaaaatgtcttatagtgcagctctattggtaatcgattcctttagcttttggatgtttaaaaagtgctttcyttaccttgccttaatttttgaatgatattttcctgagtaatattctgagttggtgattttctctgacactgctttttttttttttttttttgtcatttga

SEQ ID NO: 129892 - DNA, 201 bp, Homo sapiens
tgagctgaagaggctgtgtgggatggctcgtgtacctaggcacctggaacacctgaactgtggtgtgtgtgttatttgtctctgtgtgtgagttttgttcktgtcgtgcagaggtgagatgaaggtcaagtccatgaaggtcaagatgggaacctgcagcctcccgtggctgcgtggttgtggggagggggcagagccagg

SEQ ID NO: 129893 - DNA, 201 bp, Homo sapiens
cccagccgacaccgctttaaaaatgtcctctcacattgtttcccatgaggaatctactgacacccatatcgtgtcagtacaacgtctgtgtgtttctggcygcttttaagattttctccttatccctggtgtggagcaattggattatgatatgccttggtgtggttttctctgtgttttttgtgcttgggtttttaaatt

SEQ ID NO: 129894 - DNA, 201 bp, Homo sapiens
ctttagactctggtgagcctaaggaatgtgactattccagcccctgtgagtccctcccagcggtgggggacagaagagagcaggcacccagagcaggagcygcccggagcaggagggagtcctctgggaaaaggtgtggacgcttctggtggccctagtgtgctgtcctcagccacagaccagatgctgccagggtcctcc

SEQ ID NO: 129895 - DNA, 201 bp, Homo sapiens
ggccccgtgtgtgtgtgaccctgtgatccctactccatttgggtggctcttttctggctgtgggcagtttgtgcagctcagggctcagctcagtgctggaygctctgcaggcccctgggccttttctctccctatcccgggagggctcaggcgtcccatctctgtcctgccaggtctgctgcctggcctccccgggctctc

SEQ ID NO: 129896 - DNA, 201 bp, Homo sapiens
ttcccacacggggagcaggtggtgtgagaaggtgtggagcaagcccccttccgagtaactcaggtgggaggcatggccgcagggccccaggctggctcgcycgtctaaggagccatgactgcgccagtgcagccagcccctggcccctggcgtctcagctcggctgctgtgcccggtgtttgcctttgcagggaccttgcg

SEQ ID NO: 129897 - DNA, 201 bp, Homo sapiens
gtgctggacgctctgcaggcccctgggccttttctctccctatcccgggagggctcaggcgtcccatctctgtcctgccaggtctgctgcctggcctcccygggctctcagcgttgtcttctctcttaggcaatgagctggggccgttttctgctggctacatctgttttccatcacacggatcagtgctttgttggctga

SEQ ID NO: 129898 - DNA, 201 bp, Homo sapiens
tggacgctctgcaggcccctgggccttttctctccctatcccgggagggctcaggcgtcccatctctgtcctgccaggtctgctgcctggcctccccgggytctcagcgttgtcttctctcttaggcaatgagctggggccgttttctgctggctacatctgttttccatcacacggatcagtgctttgttggctgatgcc

SEQ ID NO: 129899 - DNA, 201 bp, Homo sapiens
ctgcaggcccctgggccttttctctccctatcccgggagggctcaggcgtcccatctctgtcctgccaggtctgctgcctggcctccccgggctctcagcrttgtcttctctcttaggcaatgagctggggccgttttctgctggctacatctgttttccatcacacggatcagtgctttgttggctgatgcccagtaact

SEQ ID NO: 129900 - DNA, 201 bp, Homo sapiens
cagattcccgcctaaacttgctggacgatgggaccctgatgatccagaacacacaggagacagaccagggtatctaccagtgcatggcaaagaacgtggcyggagaggtgaagacgcaagaggtgaccctcaggtacttcgggtctccaggtatgtggcgggcatttcacaccggggttccatccagaattgtcgtccctc

SEQ ID NO: 129901 - DNA, 201 bp, Homo sapiens
gcggtgcacacccaggaaaccttgaaatgagacccagctcagagcatcaggggcggtgcacacccaggaaaccttgaaatgagacccggcgtgacctgccraggttatatttccctcctcctcctttcccctcaccacagtgttgggagacagggggaacatctcagcaacagcacctcagccttcagcacacgctcagat

SEQ ID NO: 129902 - DNA, 201 bp, Homo sapiens
gaaatatttttcaaaattggtttgttataaaatctctttcaacagatttttgcataacaaccggattacacatttagttccagggacatttaatcacttgraatctatgaagagattgtgagtataaaaccttttgtgttttctttgctgcaaagccttctttctctctgttatctattcacctggttctttttcaagtat

SEQ ID NO: 129903 - DNA, 201 bp, Homo sapiens
gaatggccacactgacttccacaagggttgaactagtttacagtcccaccaacagtgtaaaagtgttcctatttctccacatcctctccagcacctgttgyttcctgactttttaatgattgccattctaactggtgggagatggtatctcattgtggttttgatttgcatttctctgatggccagtgatgatgaacattt

SEQ ID NO: 129904 - DNA, 201 bp, Homo sapiens
aaagtctgagatgtgaccaactctacatgttttgtcaaaagaacctactataaaaaggatattttctgtgtaagtctctattaaatattgctttctgaccaaaaaaaaaaaaaaacggaaattcagacttactttaaataaaatataaggctgatgttggtagagatggaaaaattttgacttagcacggattgaaactct

SEQ ID NO: 129905 - DNA, 201 bp, Homo sapiens
aaaaattttgacttagcacggattgaaactcttagattaatatttttctgtggggacaaaaataagactataacaactttcaggcaggaagatttcttcaytgagaattgttgtgggaaagaaacatggctttggagacaaaatgcgacagtgtctgtgtttcagcagtggaaaacaaaggctgcagtttatctgaagtcc

SEQ ID NO: 129906 - DNA, 201 bp, Homo sapiens
agtctcttagtaactatttggtataaatatttcttgattccattttatgattcatttcctcagtggaggtcattaaagcacagcctgatttgaggcttttwtttatttatttatttattttgagacggagtctctctctgtctcccaggctggagtgcagtggcactgcaagctccacctcctgggttcacgccattctcc

SEQ ID NO: 129907 - DNA, 201 bp, Homo sapiens
atagagtgggtgctggtggagagtgggtgctggtggagagtgggtgctggtggagagggtgctagtggagagggtgctggtggagagtgggtgctggtggrgtgggtgttcgtagagtgggtcctggtggagagtgggtgctagtggagagtgggtgctggtggaaagtggatgctggtggaacgggtgctcatctaacat

SEQ ID NO: 129908 - DNA, 201 bp, Homo sapiens
cattggagattctgtaaaagttcttcagaaatattcccctcaaatgttgtttattttaaggcattattttcagtgaaataacatcttttaatacaagagcyaagctgttactctgaagtgcccaatgaatgaatgttctttgcattgctgcagataaagaaacttgaatcacggctcagtaccacagagtgcgtggatgcc

SEQ ID NO: 129909 - DNA, 201 bp, Homo sapiens
cactgcaggaggacggggtgggagcacggagccccagggaagagccaaggaaggcttgttgaagtgctctttcaatctttaaaatttgggggaagtttttcccccccgttaggattatttgtggaactatttattatgattgttaaaataataattctgtttgtcaagctgttgagtcatatgtaggtgcataatgcaggg

SEQ ID NO: 129910 - DNA, 201 bp, Homo sapiens
tgttgattgggacccatgctgaccgctaagcttgtccctggccttcatgtgggtcacttgctctagaatcactcagtccttgctgggtcaggctgacctctgtgtgttcctgcacctcctccgtggcaagattgagcaggacagtgcttcttctgagtgtggagtggacttaagtgagggttcaaggcagtcccatgatgc

SEQ ID NO: 129911 - DNA, 201 bp, Homo sapiens
gttgattgggacccatgctgaccgctaagcttgtccctggccttcatgtgggtcacttgctctagaatcactcagtccttgctgggtcaggctgacctctgtgtgttcctgcacctcctccgtggcaagattgagcaggacagtgcttcttctgagtgtggagtggacttaagtgagggttcaaggcagtcccatgatgcc

SEQ ID NO: 129912 - DNA, 201 bp, Homo sapiens
cacacatgcagacacaaaccacacacacgcacatacacgcacacaccacacactcaccacacacacatgcacacaccatccacaaacacaccatttatagacacacacacacacacacacacacacacacacatgcatgcacatacacggctgtttattttggtaaggtgaaaggatctccctgtgtgatggttttgtaat

SEQ ID NO: 129913 - DNA, 201 bp, Homo sapiens
acacatgcagacacaaaccacacacacgcacatacacgcacacaccacacactcaccacacacacatgcacacaccatccacaaacacaccatttatagacacacacacacacacacacacacacacacacatgcatgcacatacacggctgtttattttggtaaggtgaaaggatctccctgtgtgatggttttgtaata

SEQ ID NO: 129914 - DNA, 201 bp, Homo sapiens
gcctgtggcgaggatggttcctggcagggacgtcccagggcactgggggccaggccgcagcctgcgtcctgctgtgctgcccactcagagcatcaggggckgtgcacacccaggaaaccttgaaatgagacccagctcagagcatcaggggcggtgcacacccaggaaaccttgaaatgagacccggcgtgacctgccaag

SEQ ID NO: 129915 - DNA, 201 bp, Homo sapiens
acacatgaacaataaactatatacatttagctatatatagtttattgttcatatgtttattttaaaaagattggaagggtatacattatgatgttacgtgyggttatccctgaatagttggaaaaggtgtggcttaaattttcttccttatgttttcttggcttttctaaatttgttataataaatgcgtttgtgtgtgtg

SEQ ID NO: 129916 - DNA, 201 bp, Homo sapiens
ccacagtttgttccacgggcagccagtgaagacttcatagttggcaggatgtgcttaatttccccgaggtcagagccttcagagctgacattctgctttgygcttccattttagactgtaggaccagggggcagttcaatgccttttcctatcatttccgaggcagacggtctcttgagttcagctaccaggaggacaagc

SEQ ID NO: 129917 - DNA, 201 bp, Homo sapiens
cacaacagtggaggtgggcgccaatgtgcagctcccgtgcagctcccagggcgagcccgagccagccatcacctggaacaaggtaggcggtctggtgcccragccagccaccacccagatacaaggtagacgggctggcacccacaccacccactacctggagcaaggtaggcggaccagtgcccacgccccagcctcccc

SEQ ID NO: 129918 - DNA, 201 bp, Homo sapiens
gcaaagaagtaaatattttctttgttaagtaaaattctaaataatgtaaaatagtgatagaaagaaagaactgtttttatatttgctgtattttttaccaygtgcagctttgttaggtagatttcagttttctctttattttttaggttgtatggctcgacactcaacatcgacctgtttccggcgctcgtggtggaggac

SEQ ID NO: 129919 - DNA, 201 bp, Homo sapiens
ggccgaggcaggtggatcacctgaggttaggagttcgagactagcctggccaacgtggtgaaacccgtctctacaaaaatacaaaaattagccgggcgtgrtggcgggcacctgtaatcccagctacatgggaggctgaggcaggagaattgcttgaacccaagaggcagaggttgcagtgagctgagatcgtgccattgt

SEQ ID NO: 129920 - DNA, 201 bp, Homo sapiens
cgggagggctcaggcgtcccatctctgtcctgccaggtctgctgcctggcctccccgggctctcagcgttgtcttctctcttaggcaatgagctggggccrttttctgctggctacatctgttttccatcacacggatcagtgctttgttggctgatgcccagtaacttgaaaacagttgcttcatatattttgtcagttt

SEQ ID NO: 129921 - DNA, 201 bp, Homo sapiens
cacttttcctcctccacgtagggaaaagtacaaaggagaaactatttctgctccttttccggtcttacatggcagggggtgtgacgacgtttctgccaggmtggggccccttccccactctctcctgggcagcacaggggtgccctggctgggcaacgcgtcactgcggcccttcccggtgggagggagggagagcatgct

SEQ ID NO: 129922 - DNA, 201 bp, Homo sapiens
tttcatcatttgcttcgttgatgcctacaacaagtgctgtgtggggtctgcactaggtctgggaagccagcctgctcctggcttggccagcctgggcagcmcagagcaggtgcaggccaggccgctgagcaggtgtggcccagccgtgccctggggtgtgaggaagagacggccatcctggagggacggaggtcccatcaa

SEQ ID NO: 129923 - DNA, 201 bp, Homo sapiens
cttagtcagggccattcggctttagttggtgtcctgaacaatggcagaacctcagtgccttaaaacagtgtgagttcctgccccactcacacaaaaccccrtgcaaatgttcttggctgggcagctcttcactggaggctcagctctaagccttgggatagctgcgtgttttgtgcctgagctctgtgggatgtgtcaggc

SEQ ID NO: 129924 - DNA, 201 bp, Homo sapiens
ttctgcacgctgggtcgggccgggccatgtgccactggtgtccctgggtttcccagcagatgggggtcaccaggcaggggcaatctgtgtcacggccgtgkgactgccagccaggtgaccttgctggagggaacacaggattaggatgctgtaggagagttcagacatgaagtcctgttcttaagcctcttattcaggaat

SEQ ID NO: 129925 - DNA, 201 bp, Homo sapiens
gcttggctcttcgtcatctccagcactcaatcctctccctggttctcccagctggccatccaccccgctctgactccccgagtccccatgtcctcctggcsccctgtgtagtgcttttccctctgttctctgccactgtcaacccctctgtctgagttacgggtgcagggacgttcaggtgtcaccatggtgtctgctggg

SEQ ID NO: 129926 - DNA, 201 bp, Homo sapiens
ttcttaagcctcttattcaggaataactctgaatcatctctcccagggcgtggtaaggaggcacttccaggtcagccctccacaactgatccagcctctcygggtgtgaagaaagtcctggtgtctgtggtatgaccacagggattttcagacggggctcttctctggcgctctgtggaaatgagttctgtcctctccttc

SEQ ID NO: 129927 - DNA, 201 bp, Homo sapiens
ctcttattcaggaataactctgaatcatctctcccagggcgtggtaaggaggcacttccaggtcagccctccacaactgatccagcctctctgggtgtgargaaagtcctggtgtctgtggtatgaccacagggattttcagacggggctcttctctggcgctctgtggaaatgagttctgtcctctccttcctatcccag

SEQ ID NO: 129928 - DNA, 201 bp, Homo sapiens; identical to SEQ ID NO: 22499

SEQ ID NO: 129929 - DNA, 201 bp, Homo sapiens
ccaaggtcattcagggcaggccttgtgcacaggtgaccctggacagcatagcagaggcagagggggaccagccaccccacctgtgtcggcaaataccaacrccctgtgccctcccatgttgctgattctgtccacaatgctggacttccttccaccctcaggatgaacgggcagctccctgggtggcagcgctgggtctga

SEQ ID NO: 129930 - DNA, 201 bp, Homo sapiens
gtcattcagggcaggccttgtgcacaggtgaccctggacagcatagcagaggcagagggggaccagccaccccacctgtgtcggcaaataccaacaccctrtgccctcccatgttgctgattctgtccacaatgctggacttccttccaccctcaggatgaacgggcagctccctgggtggcagcgctgggtctgagaaat

SEQ ID NO: 129931 - DNA, 201 bp, Homo sapiens
attgcatcatccagctttcttttacaacatatttttaaaatatttttatgcaagttacacatgttcatgttagaaaaatttaaaaataaacaggaacaaartgaaacaaattactcacattgctgtcattcaggagaaacattagctgggctttgttctcagatgcacacacacagaagcattcaggcgtgtgtagtacgt

SEQ ID NO: 129932 - DNA, 201 bp, Homo sapiens
gattgtttttacggcacatttctagagaaatctttttttaaaaaaaatttcagtagatttttggggaacaggtggtgtttggttacatgaataagttcttyagtggtgaatcctgagatttgggtgcacccatcacccgagtggtgtacactgtatccaacgtgtagacttttatccctcacccccctcccccaccctgct

SEQ ID NO: 129933 - DNA, 201 bp, Homo sapiens
cggcacatttctagagaaatctttttttaaaaaaaatttcagtagatttttggggaacaggtggtgtttggttacatgaataagttcttcagtggtgaatyctgagatttgggtgcacccatcacccgagtggtgtacactgtatccaacgtgtagacttttatccctcacccccctcccccaccctgctgtaggaacatt

SEQ ID NO: 129934 - DNA, 201 bp, Homo sapiens
ttggggaacaggtggtgtttggttacatgaataagttcttcagtggtgaatcctgagatttgggtgcacccatcacccgagtggtgtacactgtatccaaygtgtagacttttatccctcacccccctcccccaccctgctgtaggaacattctgggaggttttgatctgcaccagggatggtggttggcctacggtgggc

SEQ ID NO: 129935 - DNA, 201 bp, Homo sapiens
ggtgcacacccaggaaaccttgaaatgagacccggcgtgacctgccaaggttatatttccctcctcctcctttcccctcaccacagtgttgggagacaggrggaacatctcagcaacagcacctcagccttcagcacacgctcagatgcatctgggacaaatgacttcagagagtttgttctggaaatgcagaagaccatc

SEQ ID NO: 129936 - DNA, 201 bp, Homo sapiens; identical to SEQ ID NO: 22487

SEQ ID NO: 129937 - DNA, 201 bp, Homo sapiens
gaggctattccctgcgtcctggaggaagcctcggtgacaggggacactgtgccggggttgggggggtggcacctggcagggggagaggatgggcaggaccscaattcccgttgcctggaagccaagatagatcttcactccactcaagcctcctctgctccttctgccttcaggtatttgcgatactccaggatcccacaa

SEQ ID NO: 129938 - DNA, 201 bp, Homo sapiens
tttagctgagggccaggcaggtcctgactaacgtaatttgatctcattaatggtattagtgggcgtgttatgtcttactccgttcaggcgtctctgaggarccataggcggggcagcctgtaaacacagcagcagttaccaattcacccctgcagctctggaggctggaagtccaagatcaagcaccagccaattgggtgt

SEQ ID NO: 129939 - DNA, 201 bp, Homo sapiens
ctcaagctgtcaagctctgttctcccaaagaatgagatgtgggaagagtttatctcgccagcttggcactgggagaactgaccacatctccttcgctttcsaggcctggatggatctgagcgcagcctgggagcttctccatttgcaaatcctaacaaatggctcccctcccccaaccctaggtcagataacttctgcttc

SEQ ID NO: 129940 - DNA, 201 bp, Homo sapiens
gacagaccagggtatctaccagtgcatggcaaagaacgtggccggagaggtgaagacgcaagaggtgaccctcaggtacttcgggtctccaggtatgtggygggcatttcacaccggggttccatccagaattgtcgtccctcactatctgccttctcctttccttgcaccccaaaataagaatgaacattgaagtctgaa

SEQ ID NO: 129941 - DNA, 201 bp, Homo sapiens
gaaagcccgcaggtccctagtgtggtcccaggccagttgacttaggctgttcagaattattcagaagacaaagcacccttgattcccaggtggggacactstcctgatgcatggccgggctgctcgacagcccctcccctccacacaggcacctggaggccctgctgcccatccacggggcagagctttgtcctgcagcct

SEQ ID NO: 129942 - DNA, 201 bp, Homo sapiens
ggccgcagcctgcgtcctgctgtgctgcccactcagagcatcaggggcggtgcacacccaggaaaccttgaaatgagacccagctcagagcatcaggggckgtgcacacccaggaaaccttgaaatgagacccggcgtgacctgccaaggttatatttccctcctcctcctttcccctcaccacagtgttgggagacaggg

SEQ ID NO: 129943 - DNA, 201 bp, Homo sapiens
tcacgcggtgtcaaggacctcagtgagcacctctaggcctccctcgcccttatccagtcactagggtggacatctgtgcctagtgttcagttgtatttatkgaatcatttgataattttatgtattgttcatacaatgtaggaagtctagtgagtgagctatctattgatatctgaatttgaaatgactaggaaaaaaatt

SEQ ID NO: 129944 - DNA, 201 bp, Homo sapiens
gacaggccctggtgtttgatgttccactccctgtgtccatgggttctcactgttcaactcccacttatgaatgagaacatgcggtgtttggttttctgtcyctgtgttagtttgctgaggatgatggtttccagctttttccatgttcctgcaaaggacatgaactcattcttttttatggctgcatagtattccatggtg

SEQ ID NO: 129945 - DNA, 201 bp, Homo sapiens
gtccacctttttcagcatgatgtgtgcataggtgagacactgctgctgcacaggttggggaccacacacttatggctgacaggagatcaaagaagatgttytaattgacatgagtaagtgggtggcttgctgaagttattcacagccatcatcagacagccttacctgtggctgagcatgctttatgaaggcttattagaa

SEQ ID NO: 129946 - DNA, 201 bp, Homo sapiens
tagaagaccctgactttctcatgtaaaaacatcattttcagcagcagctggttactcatggttctgtacacacacacacacacacacacacacacacacasacaagcacggaggagaatgtaacagtagctgtccctgtgggatgaaagaactgctttataatttttcagttttccaaattgttttcattgagcataactt

SEQ ID NO: 129947 - DNA, 201 bp, Homo sapiens; identical to SEQ ID NO: 22518

SEQ ID NO: 129948 - DNA, 201 bp, Homo sapiens
aagaccatcacagacctcagaacacaggtgaggtgcctggcggcctgtgtccccccactccaagattccacagcagcacagccctgcccgaaccttctgcrtataacgttttattcccaggcaactgttcaactgcccacacaggacccagaccctggagccttgggggtgtcatttctgcacgctgggtcgggccgggcc

SEQ ID NO: 129949 - DNA, 201 bp, Homo sapiens
ggggaggttagagaagcctcctttgctgggaagttcctcagagttctgtgtctagcagtctttttcaactggttattgagaaaataaagctccaaagaaartgatttgggtgaatatgttcccagttcttctgaggatcacagccagctagaatctggatgctgggataacccatgcattgcacgcaatggattctgcgtt

SEQ ID NO: 129950 - DNA, 201 bp, Homo sapiens
agaccctgtctcaaagaagagagaacaaaagaaggaacaggacagtcttgtgcagaatagcacaagacagtgaacagtttagcagtccttaaccaatcttmtttaggggagaaaatatcttgcctttcagactagatcaactctaaagttgttatatttaattatactattaggaagtcagaaagaacacgccacgtggag

SEQ ID NO: 129951 - DNA, 201 bp, Homo sapiens
gagcatggtgggaggtctaactgctgtgagcaggttgtgaaatgatccccttaacctagaccagtgccatccacagaaatgtgatgagaactacttatgtmatttaacattttctggtcactttgtgaaaaaactagaaataaacagttaattttaaaaatgttttattgaactctgcatgccaaacttgtacatgtttca

SEQ ID NO: 129952 - DNA, 201 bp, Homo sapiens
ctgtttgtgggctccgctgtgggggcagagggagctttaggtctctgtcttgaagatactctttccagccagtcagacaaatgctagaccagaaggagccrgccgcccttcaagggagacaggaaagctagcatggggtctgaggtgtatgctgcacgtgcctcttctcttctcatagaatttctactccagtggcttcct

SEQ ID NO: 129953 - DNA, 201 bp, Homo sapiens
aactcagctggctctcggcgattgactcacagggggtctggtgggcagggggttggactccactgacctgtggtgtgacacggtggagactgttcttgagrgggatgggaaggctgcctaactgagggctgaggaaaaatgcacctgcgtggtggagctggcagcaggtgcagggcatgtgccagccttgagctggggtcc

SEQ ID NO: 129954 - DNA, 201 bp, Homo sapiens
agatcatctggctgcgaaacaagtgagttggggccaaacagaaatgcccctgtgcatctctcggagttacactcagacacccaaaccacacctcactcccyaccaaggcccacgtccacttttcctcctccacgtagggaaaagtacaaaggagaaactatttctgctccttttccggtcttacatggcagggggtgtgac

SEQ ID NO: 129955 - DNA, 201 bp, Homo sapiens
gttaattttaaaaatgttttattgaactctgcatgccaaacttgtacatgtttcagcatgcactcaatataaaattttatcgaagatatatttatgttctrtttgtttgtaggaagtccttgaggtccagtgtgagttttgcacttttactcaacactggctacctctcaggtgttcagacacagggcacaggggcctgtg

SEQ ID NO: 129956 - DNA, 201 bp, Homo sapiens
actacaggcgctcgccaccaagcccggctaatttttagtagagacggggtttcactgtgttagccagtatggtcttgatctcctgacctcgtgatccgccygcctcggcctcccaaagtgctgggattacaggcgtgagccaccgcacccggccaatttgaggcttttagaaaagcaacaagcaaaactcaatctgtttca

SEQ ID NO: 129957 - DNA, 201 bp, Homo sapiens
gccagtggggagaggcggcccccagggctctcctgtcagaggcaggtgccccttctactcctccccagcctgcagtcacccgcaggagtctggaatgggtyttccaggtggggattttgctttggactggaggcaggaagacctctgagccgcagatttcctgggtgcctcctgtcagatccacctgcttcttttcgcagg

SEQ ID NO: 129958 - DNA, 201 bp, Homo sapiens
tcacagacctcagaacacaggtgaggtgcctggcggcctgtgtccccccactccaagattccacagcagcacagccctgcccgaaccttctgcatataacrttttattcccaggcaactgttcaactgcccacacaggacccagaccctggagccttgggggtgtcatttctgcacgctgggtcgggccgggccatgtgcc

SEQ ID NO: 129959 - DNA, 201 bp, Homo sapiens
tcaatttgtcagtactttgatttacttcccagtcttctttgtaaatagctttctgtcctatgcttttagtattatctcagttccttcttttctgagtctayattaattggagagaaaaaatggcttttttttaccctcgttgatcttgatcaatatatattcctcaacattttcattgacaagaattttaaaataatttac

SEQ ID NO: 129960 - DNA, 201 bp, Homo sapiens
tctgtcctatgcttttagtattatctcagttccttcttttctgagtctatattaattggagagaaaaaatggcttttttttaccctcgttgatcttgatcratatatattcctcaacattttcattgacaagaattttaaaataatttactggatgattacttgagagttgtgttaacctgacatcttgtcttgggaagct

SEQ ID NO: 129961 - DNA, 201 bp, Homo sapiens
tgaccatcaatgacgttggccctgcagacgcaggtcgctatgagtgtgtggcccggaacaccattgggtcggcctcggtgagcatggtgctcagtgtgaayggtaagatgccacatgcccacatctacccacatggtatccacaaagaaagcccgcaggtccctagtgtggtcccaggccagttgacttaggctgttcaga

SEQ ID NO: 129962 - DNA, 201 bp, Homo sapiens
ttataattttctctttaattgagagtgttgataaaacaggaaaaaaaaaccatttcttttgttttcagattcatttgtattaaataaatgtaatcactgaratttttttaaagctgatatatatttgactgcttatattcttttctacacattttaagaaatatttttcaaaattggtttgttataaaatctctttcaaca

SEQ ID NO: 129963 - DNA, 201 bp, Homo sapiens
atgattggcagctgtatagttcccttccgacagagctaagtccggtgaaaagagaatgcgtgactcagtgcacaagcagaagtttggggaattgtcttaayggaccagatggtctgtgtggcacgccagttttcaagacgtccatgagtggacaggaggccttgccactgggtctggagcgcatgactaccttccggggcc

SEQ ID NO: 129964 - DNA, 201 bp, Homo sapiens
catctagcgtttgtgcctgtcatgtatgtttatttgccagctctgtctttatcccaggttctgacagttcgcaccgtgtggcttgtctgtgtcttgtttgrtctctgcctcacagtcagctgttcttaccagacccatagtcacaccgggccccgcactgggaggagctcacagagcagccagcccagcgccctgcctgct

SEQ ID NO: 129965 - DNA, 201 bp, Homo sapiens
gactgccccaccatcggtgagggactgggggctggaggacatggcagccagcccatcctggaccctgcggctgtctgtctctgagcagggaagacactggytatgctttgctctccttgccctgagaggcggggaggcgggcggatcttccctgggatctttcaggctcccctgccctgtgcagaggctgctgggaggcag

SEQ ID NO: 129966 - DNA, 201 bp, Homo sapiens
accttctgcatataacgttttattcccaggcaactgttcaactgcccacacaggacccagaccctggagccttgggggtgtcatttctgcacgctgggtcrggccgggccatgtgccactggtgtccctgggtttcccagcagatgggggtcaccaggcaggggcaatctgtgtcacggccgtgggactgccagccaggtg

SEQ ID NO: 129967 - DNA, 201 bp, Homo sapiens
caccaagtggaaaaaagatgcatgcaccatttgtgaatgcaaagtgagtatggggggctctatcttcatgtcctaaggtatacgcaagtccgagagtcccrtgtgaccactcaggtgggtggcccagatgtcagggccaggcccctccccgcctacctgtgctggcctccatccctccttcactcctatggaagcaccagg

SEQ ID NO: 129968 - DNA, 201 bp, Homo sapiens
aagggaccttctcctcgtgtcctctcacattgtggacaggacaagaccgctgtcggggttctttcataagggcagtcatcccaccctgggggcaccaccgycatagcctcctcacctcccagaggccccacctcccaacaccatcccttggggattaggtcttagcacaaatttgacggggtgcgaacgctcagtctgcag

SEQ ID NO: 129969 - DNA, 201 bp, Homo sapiens
tcttcatgtcctaaggtatacgcaagtccgagagtcccatgtgaccactcaggtgggtggcccagatgtcagggccaggcccctccccgcctacctgtgcyggcctccatccctccttcactcctatggaagcaccaggcaagcccagctctctgtgcacagaggacgtgctaggaggcccagaacctcagcatggtccaa

SEQ ID NO: 129970 - DNA, 201 bp, Homo sapiens
cctgaaattttcattccataattgagataattttcgttctcgaaccgaacgatatagtgtataactttgaatttgttggcaaattggcaaactcttatttwtttttgtttgtttgtttgtttgttttggtgagacagagtttcgctcttgttgcccaggctggagtgcaatggtgctaccttggctcactgcaacctccac

SEQ ID NO: 129971 - DNA, 201 bp, Homo sapiens
gctgtggcaggaatactcatgccatggaaacccatgaatggggtagatcagctcctccctgcagagctggtgggtaaacactgacctgcccaccactggcyctgtcccatctccagtcagagctgggggtgttacagaggtcactggagtccctgcaaagggagactggtggcaggtggagggtgccctggtgccggcaat

SEQ ID NO: 129972 - DNA, 201 bp, Homo sapiens
tgaaattttcattccataattgagataattttcgttctcgaaccgaacgatatagtgtataactttgaatttgttggcaaattggcaaactcttatttatktttgtttgtttgtttgtttgttttggtgagacagagtttcgctcttgttgcccaggctggagtgcaatggtgctaccttggctcactgcaacctccacct

SEQ ID NO: 129973 - DNA, 201 bp, Homo sapiens
catcacagacctcagaacacaggtgaggtgcctggcggcctgtgtccccccactccaagattccacagcagcacagccctgcccgaaccttctgcatatarcgttttattcccaggcaactgttcaactgcccacacaggacccagaccctggagccttgggggtgtcatttctgcacgctgggtcgggccgggccatgtg

SEQ ID NO: 129974 - DNA, 201 bp, Homo sapiens
aggagcatgtacagcatggcttgatggtcgacctcaacggaacaagtcagtgccaaagccttttcttcctcctccatggcctgagtaacggggttgaacaygcctcagttaagtcacattcctagggaagagttccagcattttctttcccactgtgcttatgaactgtgaaattatttccttaaactgtgattcctcttg

SEQ ID NO: 129975 - DNA, 201 bp, Homo sapiens
cttcctagaaggacacgaatctcatgatggggcttgttctcaggacctcatctaaagtgcgtggcctccaaagcctcccctcctgataacaccaccgcgtsggggtgacagcgggaggaccgatgggagccgccttgccggcctcctggggccgggcaggtgcggagtgggagcgcagtcaggagcgcatcttgttcaatg

SEQ ID NO: 129976 - DNA, 201 bp, Homo sapiens
cccagccccgctgtggcttccgttagaggtcctttcctcaccctgtcttctgtggggccgtgcacagtgtccattcagcaaacaccacacaccctgccctygtcagatcaagcacccgcactctggggccctctctgactctgcagccatagctactcccgggcctcctcctgagcctttcactgcagcgagcgccgtggt

SEQ ID NO: 129977 - DNA, 201 bp, Homo sapiens; identical to SEQ ID NO: 22501

SEQ ID NO: 129978 - DNA, 201 bp, Homo sapiens
accctgtcttctgtggggccgtgcacagtgtccattcagcaaacaccacacaccctgcccttgtcagatcaagcacccgcactctggggccctctctgacyctgcagccatagctactcccgggcctcctcctgagcctttcactgcagcgagcgccgtggtcacctgctggtgcctggcctcctcctcaccgaacagcag

SEQ ID NO: 129979 - DNA, 201 bp, Homo sapiens
ttctggggaccaggagctggatgtttaagtggttttactcagatgtaaaccatgcctcctcccctgcctgtggctgggccgtccgccataccctgagcctkactgcggtgctgccctttagccaaggagccccggctcttcctgtttacttagcgcaattctaaagttgtgtatgaatttgtaagagctttggaaagttgc

SEQ ID NO: 129980 - DNA, 201 bp, Homo sapiens
tctgcctctgtaaaggaggattgagaatcacttgggcttcttatgacttttgtcattctagtcaggaagaggcttcctgcgaagggcggaggctgactggrttcttggtgtttgggtgggattgagcaaagcccttcagtccatccacagggggcctcaggggcaaactccaggcccagaccaaagaggagctgctggaac

SEQ ID NO: 129981 - DNA, 201 bp, Homo sapiens
acctggagctgccctcccttcacctggagctgcccccccttcacctggagctgtccccccttcacctggagttgtcccccccttcacctggagttgtcccscctttctagactgaactaaattcatcttacatatattgattgatgtctcgtgcctccctaaaatgtataaaaccaagcactttgagaggccgaggtgcgt

SEQ ID NO: 129982 - DNA, 201 bp, Homo sapiens
aggcttcctgcgaagggcggaggctgactgggttcttggtgtttgggtgggattgagcaaagcccttcagtccatccacagggggcctcaggggcaaactycaggcccagaccaaagaggagctgctggaacatgaaagggcgaacctcttttaaatccaggagctttgtcggctaaagcgtcctgctgggttgtaagaag

SEQ ID NO: 129983 - DNA, 201 bp, Homo sapiens
ggcaaagctgcctcccattgtattcaaagccaccctctgctcaccgagacatgcatatctgactgcatcccttggaaaagatcatcagaaactcaagacaktgcagccatttgtctcttatctacctgtgacctggaagctccctcccctcttggagttgcccccccttcacctggagctgcccccccttcacctggagtt

SEQ ID NO: 129984 - DNA, 201 bp, Homo sapiens
gtaagtggaagagtctggtgaattctaccagggaggattaacctcttgaaatgccttcaatgagagcaattttaatgctgagaaaagagccctgggccgactctaattgcatttctagttctgccacttacagactgactgactttagacaaattacctgatctttcttagtttctaaattccgatttgtccaggaaaggg

SEQ ID NO: 129985 - DNA, 201 bp, Homo sapiens
aactatttattatgattgttaaaataataattctgtttgtcaagctgttgagtcatatgtaggtgcataatgcagggatcaaatgcctccccacagtcttrttctgcccagacatgtgcaaagcttattttaaaaattgtaaagtggggagcacttacatgtggcacttaaatttaagtactttttaattggagagtttag

SEQ ID NO: 129986 - DNA, 201 bp, Homo sapiens
cagcctgccaaagtgctgggattacaggcatcagccactgtgcccggcccaccaccctggttttatagatacgtacactgaggctcagagaggcccaggcwtctgtccaggaagccacagccagtcaggtggcacaggtggactctaccccaggcctgcctgttgccttgtctttggccaacactccaccacctgccgtca

SEQ ID NO: 129987 - DNA, 201 bp, Homo sapiens
gggatgccaggcctctcctcctttgggcaggagactgcagtggtcccgggtgtgagtgggagcctggggcctctccgccctatgcgggatgtgcagatgcrtctgctgggacagtcctgcaggtgctagtgtcagtgtttgccttccatagaacagatgatgctcatgtttgttggcacaacagagtcaaagactttatta

SEQ ID NO: 129988 - DNA, 201 bp, Homo sapiens
tctttacattcaatgcaattcttgttacaattccagtagcattcttcacagaaacagaattaaagcaatcctataaaatttgcatggaaccacaaatgacyccaaacagccaaagcaatcttaagaaaggagaacaaaatatgaggcattacacttcctgatttcaaattatattacaaagttataataattaaaacatta

SEQ ID NO: 129989 - DNA, 201 bp, Homo sapiens
gtcctgcccggcccacatcagtgctctgggaggggaactcagggctgggaatcgagtgatctctcaggagtacagagatcttccccgctcctactcagggyctggagctgagaagctaatgctggcctctggtctttagtgaccaacatgtgagctctctcgtacttcccaacgcccaggtttactaattattttaatagt

SEQ ID NO: 129990 - DNA, 201 bp, Homo sapiens
ccatctattcttctatctatccattaatttactcattcatccatctgcccatttattagttcatccatctgtccattcatccataaccactcatccatctrtttatccagtcatccacccacccattaatacattcattcatctattcattcattagtttatccatctttccattcatccataaccacacatccatttatt

SEQ ID NO: 129991 - DNA, 201 bp, Homo sapiens
ggactgagcacaacggtgtaagagcagggtcatggggactgtgggactgtctgggccgcctatccactgttgaccctggagggcaagtggcccggggtctstcaccccaggcccttgtctgtgcgctcgaatggagcacgggccacagggcccacctttcctggcacgtctgtccacccggaccaccctcccaccatgact

SEQ ID NO: 129992 - DNA, 201 bp, Homo sapiens
gcacctctaggcctccctcgcccttatccagtcactagggtggacatctgtgcctagtgttcagttgtatttattgaatcatttgataattttatgtattkttcatacaatgtaggaagtctagtgagtgagctatctattgatatctgaatttgaaatgactaggaaaaaaatttgggcaaaaatctggatctaagaaaa

SEQ ID NO: 129993 - DNA, 201 bp, Homo sapiens
aacattttctggtcactttgtgaaaaaactagaaataaacagttaattttaaaaatgttttattgaactctgcatgccaaacttgtacatgtttcagcatrcactcaatataaaattttatcgaagatatatttatgttctgtttgtttgtaggaagtccttgaggtccagtgtgagttttgcacttttactcaacactgg

SEQ ID NO: 129994 - DNA, 201 bp, Homo sapiens
accagtgatgatgagcttttttttcatatgtttgttggccacataaatttcttttgagaagtgtctgttcatatccttaacccacttttagatggggttgttttttttttttgtaaatttgtttaagttccttgtagattctggatattagacctttgtcagatggagagattgcaaaaattttctcccattctataggtt

SEQ ID NO: 129995 - DNA, 201 bp, Homo sapiens
tggaaaacagtggaataagcccatccgtgactcagtttggatcgacctttgagctccctcagctgcaagtgtgaagggagctctggaatggcaggagcccrcgccctgtgctgctcggtcggcggtttggccttgctgttgggtctcctgcagagcgcctcccctctggaggccttacttagttcagctgtgtagaaatgg

SEQ ID NO: 129996 - DNA, 201 bp, Homo sapiens
ttgtagggaccagtggagtgagctagctgtttgcatgatgcatgactatgctacctgaggtgcggggagtacgtgcatgatgacggaaaaacagggatggrcgagtcatttgccctccgccccgccttccacccagccagccctccacccacccctcaggacgtatccctggtttccttacggcggcaccaggccctgggc

SEQ ID NO: 129997 - DNA, 201 bp, Homo sapiens
ggaaaacagtggaataagcccatccgtgactcagtttggatcgacctttgagctccctcagctgcaagtgtgaagggagctctggaatggcaggagcccgygccctgtgctgctcggtcggcggtttggccttgctgttgggtctcctgcagagcgcctcccctctggaggccttacttagttcagctgtgtagaaatggt

SEQ ID NO: 129998 - DNA, 201 bp, Homo sapiens
cccatccgtgactcagtttggatcgacctttgagctccctcagctgcaagtgtgaagggagctctggaatggcaggagcccgcgccctgtgctgctcggtyggcggtttggccttgctgttgggtctcctgcagagcgcctcccctctggaggccttacttagttcagctgtgtagaaatggttggtttttgaatacagaa

SEQ ID NO: 129999 - DNA, 201 bp, Homo sapiens; identical to SEQ ID NO: 22500

SEQ ID NO: 130000 - DNA, 201 bp, Homo sapiens
caggtcacctggaacctctgcagaccgtcctggctgccacccctaagtgctctctggcccctgtgccactgttcctgaggcttcctttttttttttttttyccccatggtttcagctagaaagttctaagctttgataacttaagtgccagttgctaatgaatgaggcatgcaggaaagatggctttcatttagaagccgt

SEQ ID NO: 130001 - DNA, 201 bp, Homo sapiens
gctttccagcttccacgctgttgccgctgcctcctctgtggcttgcgtgtgggttcccacggggaatgaggagccagaataagtggggctcactccatcckctgctctggaggagcagcttggtttctggatcagatgtggtcagagttgatttttgctctaagctgtgatgcgtggctcggccttccgggacagcctttc

SEQ ID NO: 130002 - DNA, 201 bp, Homo sapiens
ggatcgacctttgagctccctcagctgcaagtgtgaagggagctctggaatggcaggagcccgcgccctgtgctgctcggtcggcggtttggccttgctgytgggtctcctgcagagcgcctcccctctggaggccttacttagttcagctgtgtagaaatggttggtttttgaatacagaatcattctgtacccaacaca

SEQ ID NO: 130003 - DNA, 201 bp, Homo sapiens
aggtcacctggaacctctgcagaccgtcctggctgccacccctaagtgctctctggcccctgtgccactgttcctgaggcttccttttttttttttttttycccatggtttcagctagaaagttctaagctttgataacttaagtgccagttgctaatgaatgaggcatgcaggaaagatggctttcatttagaagccgta

SEQ ID NO: 130004 - DNA, 201 bp, Homo sapiens
aatgcctgctactagtgtttatgagttcgcctgtgtgtgcaaatgcttttcctatatctcctcacacgcacacttaaaaatatacatagtgtgtatttgcrttatatcttcagcattcccgaagaacaatgacttccaaactttaccttgcttagaatcacctggaaatcttatttgaacccacgttactgggaaccactc

SEQ ID NO: 130005 - DNA, 201 bp, Homo sapiens
ttagaggggagcatggcggtgcagggggagggtgcgtgtgaggagactgttggtggacagtgggtatcactgaggaaagcgaacccgggtgcgagggcacrgcgtggaatgatggccaggagggccaggtgggcagaggggggccgccttccccttctcctccaggagaacttgacccacagcacaggggcggcgctggga

SEQ ID NO: 130006 - DNA, 201 bp, Homo sapiens
ctcactatctgccttctcctttccttgcaccccaaaataagaatgaacattgaagtctgaagttgaagctccagtaccagggttggctcagaaagctttckaagcgcagggtcgtagatgatccatgagcggtgctgtggtccccagttagcccctcatctggggacacactcatagtccacacagccggggcagtccatg

SEQ ID NO: 130007 - DNA, 201 bp, Homo sapiens
tctctgtgtcgattctggcgtactctctggtctctcatgggctattcggatcctctctccacccccgaaatatgaataaataactgccttaacagtggacrtttaactttactgaaaatgcctgtttggaaccattagggtaaaacccatatgtgagaaagcctattttcccagttagcgtgctgaattcacttttgtggt

SEQ ID NO: 130008 - DNA, 201 bp, Homo sapiens
cacacatgcatgcacatgtgcagtaaggtggttgatacaccttgcagacagctttgaatccttccctaaggtcagttttggatgtaatctgggagtattcrtcgttttacgccatctgccatggatttctacattgcttaattgactgtaaaatgagttattcttgtgaagtgggactttgttggaaaacattcaaacaat

SEQ ID NO: 130009 - DNA, 201 bp, Homo sapiens; identical to SEQ ID NO: 22526

SEQ ID NO: 130010 - DNA, 201 bp, Homo sapiens
tccgcagtcttatccccatgccagcgtatacccaagcctccaacctggaggctcagccacatgcccagtctctatgcagggtcctgactcaggaggttttyaagaacctttattcaaccagagtccatctcttctgtggtctagctctactcttgggtcccacattgttttaactgcttctgtttcagtttctccaccaga

SEQ ID NO: 130011 - DNA, 201 bp, Homo sapiens; identical to SEQ ID NO: 22529

SEQ ID NO: 130012 - DNA, 201 bp, Homo sapiens
ccagctgctagaactagggccctaatccctcctgtcatttttcttgctggagacttgagtattctcccaagcccagccacagggaccacagagaccttgtratctgacattcttccaagggctgcagccatctcagcatcatttccggtcactattctctacctccccttcctttgtgtgataaccctcatccttgtctat

SEQ ID NO: 130013 - DNA, 201 bp, Homo sapiens
taaacattgaaagcaaaatacctaatctttcagtgttaatacctttcaaatttcaattattatttgaaggatttcctattgcagtatgtcctatttatacrtaagtgctttgtgaagggtaggtacttactgaattttgtggaaagagtgagtaggttaatgagaataaatttgtgaatttgtgttacaaaaatgaaaata

SEQ ID NO: 130014 - DNA, 201 bp, Homo sapiens
cgcacactgactaaatacatactacagtttaggcaccgtgccaggcataaagaaggatcaggtactgcctttggcaaggcaagatattttcccagtttggyccctttcaaatacagttgttccctaattcatcctgattttaaagtagtgaatcttgtccaatattgaacttggcttctgaacattaagcattcatccatc

SEQ ID NO: 130015 - DNA, 201 bp, Homo sapiens; identical to SEQ ID NO: 22530

SEQ ID NO: 130016 - DNA, 201 bp, Homo sapiens; identical to SEQ ID NO: 22531

SEQ ID NO: 130017 - DNA, 201 bp, Homo sapiens; identical to SEQ ID NO: 22532

SEQ ID NO: 130018 - DNA, 201 bp, Homo sapiens; identical to SEQ ID NO: 22533

SEQ ID NO: 130019 - DNA, 201 bp, Homo sapiens
catgcagccagttggccatgcggagctctctagctcacatctgaggtcccccttggaggtgcagacagcctcattttcacttctcatgaatgtcagattcytttctaagcatttgctcattagtatgagtaaagctcattgcctgctgcttgggtaagaattttctctctggggctggactctgagtctgcatccataatg

SEQ ID NO: 130020 - DNA, 201 bp, Homo sapiens; identical to SEQ ID NO: 22534

SEQ ID NO: 130021 - DNA, 201 bp, Homo sapiens
acataaacaaatcaagcaaatgattttatgggaaggagaaagatgaacaagtaggtcaccacagaaatcctgcaggtaagtgacaagagtgaagtactgtyagggcagaaggtgaatggtcaatatatcagtgctaattattttcatattttctaacatttctagataaactttagcttcacaagtctgtaaagtaatatt

SEQ ID NO: 130022 - DNA, 201 bp, Homo sapiens
aatggtcaatatatcagtgctaattattttcatattttctaacatttctagataaactttagcttcacaagtctgtaaagtaatattctccagattctagwtggtcagtgttgtagaggtaataatttctaatacttaatatggtttatttgaagtagacaaattacattgatttcaaggtagcctatttaaaactggtca

SEQ ID NO: 130023 - DNA, 201 bp, Homo sapiens
aaaatagctctctggtcaaaaaaaaaaaaaaaaaaaaccctctgcccttcactcaacaaagacatagcctttcctcctctgggccaggtactggcccccartctccatcagactctgtgcatccttctgtaggaatgatcgagattgtgaaagacgccacgacaattgccaaaattcagcaaagcacagtgggcaacacgg

SEQ ID NO: 130024 - DNA, 201 bp, Homo sapiens
ttattttacaggtatgctaattttaagattgttttcaattatctgaaaacaattctatattacatcaaaaacatgctttctcctactggctctattcccastctcttctttcaagtgatgaattgtgatcaaatattacatcatagagagttttcacttggggaatttggctgcagactattagatatgcaatctaatgag

SEQ ID NO: 130025 - DNA, 201 bp, Homo sapiens
ctgcgccaagacatgcttattttacaggtatgctaattttaagattgttttcaattatctgaaaacaattctatattacatcaaaaacatgctttctcctrctggctctattcccactctcttctttcaagtgatgaattgtgatcaaatattacatcatagagagttttcacttggggaatttggctgcagactattaga

SEQ ID NO: 130026 - DNA, 201 bp, Homo sapiens
ttttacccaaatattgaaaatcattctccaactaggactttgtccttgttgtttatagtgatgttttgcaagagaatttgtgtctccaccatgtatattcsttattcattgtgtgtggggaacatgtgactgcttccttacagattgaaaaatgtaaagtaatggcctccaagaaaaaaccactatggcttgagtttaaat

SEQ ID NO: 130027 - DNA, 201 bp, Homo sapiens
ctccatttccttttccctgattcaacgacatagagtacagtcctacaaatgccaatgtgttcttcctttaggctgtgaaatttgaaccataccatgatagygcccttgccagatttctgctgaagcgtggtttaagagtaagtacttccattttgataatagcgtgaaattttaagttgccaagaattaactggtagacct

SEQ ID NO: 130028 - DNA, 201 bp, Homo sapiens
tgcactgttaggtctaataatcagtgaccttctctgttttgccaaaataattcctaaagactggctagccaatgcattgatttttattaaaaaaacaaaayaacaaaataaaattctctgcctttgactggaatgatttttatccattgtctccttcctctagcagacagaggcaacattactatttaggaaaagtaagtg

SEQ ID NO: 130029 - DNA, 201 bp, Homo sapiens
catacacaaagattagatatttccaaatctttacctttttcttcacatctctgaatatgcacatacagttttcaagtttacagtcttataaaatgatgaayttttgagaggctattttaattttttggcatttcttcatctatatatctcagagtgatatatagagatacattcattcttccctatctggggtcctacatc

SEQ ID NO: 130030 - DNA, 201 bp, Homo sapiens; identical to SEQ ID NO: 22535

SEQ ID NO: 130031 - DNA, 201 bp, Homo sapiens
aattattttactttccataatgcttttaagattcattcatgttattgtatgtatcagtaatttgtttctttttatgacttagtagtagtcccttgtatggmtataccacagtttgttttccattcattttttgagtaaatgtttaacagtggggtagttgggtcagatggtgtgtgtgtgtaattttacaagataccattt

SEQ ID NO: 130032 - DNA, 201 bp, Homo sapiens; identical to SEQ ID NO: 22536

SEQ ID NO: 130033 - DNA, 201 bp, Homo sapiens
atgtttctaaaggattgtggtttcttataatgtcaaactaggttccctcctaagttccacaccctacagaccattttcctcccaagtttcacattgcaagrtttgaagaggaggcagattggagagttttacgttacatggttacatggaagggaggggctgtctgggttttggttagcctgggaggctttgcgaatatca

SEQ ID NO: 130034 - DNA, 201 bp, Homo sapiens; identical to SEQ ID NO: 22538

SEQ ID NO: 130035 - DNA, 201 bp, Homo sapiens
tacttgaaacattacatttggctttgttttcatccattaaatatattcagtagttttttcactagttgagatatttgtataacactaaagaattttagaawaattaaagaatcttcagttttctagctctccataacagaaacaacatgaaaaaaacttggatgagctctgttgcaaaccccaaggctaacaggaattatt

SEQ ID NO: 130036 - DNA, 201 bp, Homo sapiens
gttggcaagtgatgcatggagaggaagtgaaccctttgattaaattactgttgccctttgactcttgtttcttcctcatgccattgtgattcactgaatcktcacctaaaatataagcagagcaatgagaaagttggcaattcatagatataatgctaatgaaatcaggcacaactaacttgctctctgaaaatggtttcc

SEQ ID NO: 130037 - DNA, 201 bp, Homo sapiens
aggctactgtgtggcaacctttgttcttggaataggcgacagacacaatgacaatattatgatcaccgagacaggtgagtttatttagtgcagaataaacytttattgtggtaaaatatatataacataacatttactattttaactctaattaactgtaagtgttcagttcagtggcattacatatgttcaccttgttgt

SEQ ID NO: 130038 - DNA, 201 bp, Homo sapiens
cagggacttgacacatttcagtcctgtttttctttaaagttaaaaatcacatgttttgacaacttcctggaacagagaaatggttccaaaaaaaaagaaarccctggaagaatttcaccatttaaaggggggaaaacactcatgtcttctctcctgtcagcggggttcatctgtttgtctgtttgcttcggacaaacagag

SEQ ID NO: 130039 - DNA, 201 bp, Homo sapiens; identical to SEQ ID NO: 22546

SEQ ID NO: 130040 - DNA, 201 bp, Homo sapiens
tgctgacagtaaggctccatcctcaacacaggatattttctgaagcattaatttttgtttcaatagttgatccttgtttggaatataatgtgttacaatgyagtggtacttagtattaaaatcaaaatacctttttattcatctttcaattttaatacttttagcatttcaaccattatttgaagggttacttactgcagt

SEQ ID NO: 130041 - DNA, 201 bp, Homo sapiens
acagttctttgggacagttggtttcacttactaagtataacttcatattttaagagagggaatattggttttaaaagttaagccaagatttgaacataagwttggatcaaatgaaatttgtctttcttatcttcttatcaagctctcctttttggtatacatcaaatgctccactatttcttaaggaaataatgtagtttt

SEQ ID NO: 130042 - DNA, 201 bp, Homo sapiens
aaacattaattttttgtttcaataattgattcgtttagaatataatgtattacaatgtagtgatactaaacattgaaagcaaaatacctaatctttcagtkttaatacctttcaaatttcaattattatttgaaggatttcctattgcagtatgtcctatttatacgtaagtgctttgtgaagggtaggtacttactgaat

SEQ ID NO: 130043 - DNA, 201 bp, Homo sapiens; identical to SEQ ID NO: 22542

SEQ ID NO: 130044 - DNA, 201 bp, Homo sapiens
tatcaatgtatcttacagttctcttctttgttagttattctataatgtagcaaaagaccaaaatgaatgttttaagccacaagagacagttctttgggacrgttggtttcacttactaagtataacttcatattttaagagagggaatattggttttaaaagttaagccaagatttgaacataagtttggatcaaatgaaa

SEQ ID NO: 130045 - DNA, 201 bp, Homo sapiens
ttccaaagtggttataccatttaaattccagcaatgtatacgatgagttctagttgtttcacatcctagcaagcacttgttatcatcagttttttttttgttttttttttttttttgagacggagtctcgctctgttgcccaggccggactgcggactgcagtggcgcaatctcggctcactgcaagctccgcttcccggg

SEQ ID NO: 130046 - DNA, 201 bp, Homo sapiens
ctctgttgcccaggccggactgcggactgcagtggcgcaatctcggctcactgcaagctccgcttcccgggttcacgccattctcctgcctcagcctcccragtagctgggactacaggcgcccgccaccgcgcccggctaattttttgtatttttagtagagacggggtttcaccttgttagccaggatggtctcgatct

SEQ ID NO: 130047 - DNA, 201 bp, Homo sapiens
agagtacagtggcatgatctcagctcactgcagcctccacctcccaggttcaagcaattctcctgcctcagcctccagagtagctgggactacacgtccgygccaccatgcctggctaatttttgtatttttagtagagacagggtttcaccatgttggccaggatggtctctatctctcgaccttgtgatccgcctgcct

SEQ ID NO: 130048 - DNA, 201 bp, Homo sapiens
ccacagctttaacatacatatatgcagaatttccaaagtttacagcatgacaaagatggacagcagagtttttcatcatttgactatgaccttgtggtaatttttttttcttttacatactgctaagccttccaaaaagattttctgtttcttggttttatgttttcttttagaattgaagttcttcaagatcagggacca

SEQ ID NO: 130049 - DNA, 201 bp, Homo sapiens
aggcgcctgccaccacatccagctaatttttcatatttttagtagagacggggtttcaccgtgttaaccaggatggtctcaatctcctgacctcgtgatcyggctgcctcagcctcccaaagtgctgggactacaggcgtgagccagcgtgcccagccccgaatgtgttgttttttaaaattttaaaactagtaaatgttg

SEQ ID NO: 130050 - DNA, 201 bp, Homo sapiens
cgtgttaaccaggatggtctcaatctcctgacctcgtgatctggctgcctcagcctcccaaagtgctgggactacaggcgtgagccagcgtgcccagcccygaatgtgttgttttttaaaattttaaaactagtaaatgttgtttattaaaatcaagagccagcaaaatattgaaaataccaaaagacataaaaattcatt

SEQ ID NO: 130051 - DNA, 201 bp, Homo sapiens
aatcactggctcaaagaaaaatcccctactgaagaaaaggtgagctcatgctttttcccagtctaatggctccttacaagttgtcatttatatagcagtastggcttcaagttttcagagaatctgccagtgtcttgcctcctgacatattagtgaagttttttacttgtgaaataatggaggttttaagtaccctcccgt

SEQ ID NO: 130052 - DNA, 201 bp, Homo sapiens
ggtttttgtctttagttctttgtatgtgagaatcacatttattgatttgcgtatgttgaaccaaccttacatcctggggatgaaacctacttgatcatggkggattagctttttgatgtgctgctggatttggtttgcaagtatttgaagatttttgtattgatgttcaccaaggatattggcctgaagttttcttttttg

SEQ ID NO: 130053 - DNA, 201 bp, Homo sapiens
aatgattgggggtcttaacagaaggtcactggagtccagaaatcctgccttccatcctgtagctcctccattattaagtagagacagatcaaatgaatttwaattaattaattaaacaatgttaaaattacctaaatgttcctattgggagagtacagccttgggtgactcttctaagatactgccctaatatagcagtga

SEQ ID NO: 130054 - DNA, 201 bp, Homo sapiens
aacttcctggaacagagaaatggttccaaaaaaaaagaaaaccctggaagaatttcaccatttaaaggggggaaaacactcatgtcttctctcctgtcagyggggttcatctgtttgtctgtttgcttcggacaaacagagcagcaatgaactgcaacttaaagatcagacatacgcaaggaatttggcctcattgacgac

SEQ ID NO: 130055 - DNA, 201 bp, Homo sapiens
tgcattaccttctacaattggtccaggtaggggatgttggtgttatcaatggaagccttctcaaaaggaattgatttgcatatgcacaggcactccattcrgttgtcatcaaatgccctttgttcagagcttcatcatcggcaaaagtagatatgatgaagctgcctcaaaaagtagtaaactgttccatgtacattttta

SEQ ID NO: 130056 - DNA, 201 bp, Homo sapiens
tatatgcttttataataatctgaacaatgtttgttagtgttgctgcttttaaaattatgaactatttcaaacttacagaaaagcacagagaacaatgaaayacctatgcactcacaagatttaattgtgttttttacattttatcagttcttcctcatcagtaatggagctgtactaagtcaatattctctaacatcagcc

SEQ ID NO: 130057 - DNA, 201 bp, Homo sapiens
tcctttttgccagtaatttttcctagaatgactgcacatctgtcctgttgctgacaacattcccatagaccccctggtgcccatatcaccccgtcagatcycagcagtacttctctttttttgctgttgttgctatttttaagtttcaaaatatgctttcacaaaaaggtttgcagtatagggaggccaaggagaggtttc

SEQ ID NO: 130058 - DNA, 201 bp, Homo sapiens; identical to SEQ ID NO: 22525

SEQ ID NO: 130059 - DNA, 201 bp, Homo sapiens; identical to SEQ ID NO: 22527

SEQ ID NO: 130060 - DNA, 201 bp, Homo sapiens
catctctacaaaaaataaaaaaaaatagccgggcatggtggcacgtgccatagtccccactacttggaaggctgtggtgggaggatcacttgagctcaggrgtttgatactgcagtgagctgtgtttgtgccactgcattccaacctgggctacagagcgagaccctgtttcaaaagaaatgaaaaagaaatctatctaat

SEQ ID NO: 130061 - DNA, 201 bp, Homo sapiens; identical to SEQ ID NO: 22528

SEQ ID NO: 130062 - DNA, 201 bp, Homo sapiens
tgtccttacatcaataccacacattcttgattatgtttaaataacaaagcacttcatatacgtgtgcttatacaggcaacagtatacttccattaaccccygcatcctttgcattatttttattatgatttcaacttctatatatgttataaatggcacaataagttactatttttgccctaaacagttaaaaaatagact

SEQ ID NO: 130063 - DNA, 201 bp, Homo sapiens
tcccaaagtgctgggattacaggcgtgagccaccgcgcccggcctatcatcagtctttttaaacttagccattcaaatgagtatgaagtggtatctcactrttgtttttatttgcatttccataataaggttgagtgtctttctatgtgctcattttccattagagtacattcttctgaaaattttctattcaaatatttc

SEQ ID NO: 130064 - DNA, 201 bp, Homo sapiens
acgtgttaagcatacatgttaaatgcctgtgaatctgtgcacgttgagccttaagcacacatacagcataacaaggtggttgaaaggatgggctttgtagyggagaaacttgagtttgaatgctggacctgcgacttaataaccacatatatgattattattcatcctttcataacatcagtttcttcatctgtaaagtgg

SEQ ID NO: 130065 - DNA, 201 bp, Homo sapiens
attctccaactaggactttgtccttgttgtttatagtgatgttttgcaagagaatttgtgtctccaccatgtatattcgttattcattgtgtgtggggaayatgtgactgcttccttacagattgaaaaatgtaaagtaatggcctccaagaaaaaaccactatggcttgagtttaaatgtgccgatcctacagccctatc

SEQ ID NO: 130066 - DNA, 201 bp, Homo sapiens
tatctgaataaattagaatcaacagaaattctttatgtgagtgaaatagccttcgagaaaagcaggacagttatttcctttaacgcctctccttgggtacrgcagggataggtgaattcctgcatcactgcttaacaagtatttactgagcaccagtggattggtgttataataacttggcctcaggttaatttccctcct

SEQ ID NO: 130067 - DNA, 201 bp, Homo sapiens
attttagcatctgtttttgcattttactttccaacttgtggatcctatttacagcattctatttattaatttttataaaaacctagtttattaaaaactasttacagtaatatttgattttttaaagacaattaggtcatttgtaaataataagttttccttcacttttctgattttattttatttatttatttatttatt

SEQ ID NO: 130068 - DNA, 201 bp, Homo sapiens
ttaacagaaggtcactggagtccagaaatcctgccttccatcctgtagctcctccattattaagtagagacagatcaaatgaattttaattaattaattawacaatgttaaaattacctaaatgttcctattgggagagtacagccttgggtgactcttctaagatactgccctaatatagcagtgacagccagaatgctg

SEQ ID NO: 130069 - DNA, 201 bp, Homo sapiens; identical to SEQ ID NO: 22537

SEQ ID NO: 130070 - DNA, 201 bp, Homo sapiens
attgttggccagaagggaagtctgggatcaaagtgctttggatgttgggttaacaatgcagctcctggactgcaacttctcagatgaaaatgtaagagccrttgcagttcagaaactggagagcttggaggacgatgatgttctgcattaccttctacaattggtccaggtaggggatgttggtgttatcaatggaagcct

SEQ ID NO: 130071 - DNA, 201 bp, Homo sapiens
tgcttctagctaaatattcgagaagatgacagtacagcccttctcctggtaaacagagctagtctgagaatcacttttcaagtacttacagataaaaatcytaattcaaactcatcaaatgcatggccaagtaccagacacactcctcttttggatttaccagaaagtgtgctctcatgcactgttaggtctaataatcag

SEQ ID NO: 130072 - DNA, 201 bp, Homo sapiens; identical to SEQ ID NO: 22540

SEQ ID NO: 130073 - DNA, 201 bp, Homo sapiens
ctttcttgtgacaaatccctgtgtccctccgctcccaggtcgcatagggcatggagctggagaactataaacagcccgtggtgctgagagaggacaactgycgaaggcgccggaggatgaagccgcgcagtgctgcggccagcctgtcctccatggagctcatccccatcgagttcgtgctgcccaccagccagcgcaaat

SEQ ID NO: 130074 - DNA, 201 bp, Homo sapiens; identical to SEQ ID NO: 22543

SEQ ID NO: 130075 - DNA, 201 bp, Homo sapiens
tataagatcgtttggtatcactgaggcagaagttattgctgtgtatttatatgctgcctaaatttggacatgttttatttcaagttagtgtcaatatcaaygtatcttacagttctcttctttgttagttattctataatgtagcaaaagaccaaaatgaatgttttaagccacaagagacagttctttgggacagttggt

SEQ ID NO: 130076 - DNA, 201 bp, Homo sapiens
tggtgttgaagctttggggtatgatccagcaggtggcacttaggcttattggtcggttggtagactcttgcttggttgtgtggctcccccatgttaactcmcagttgcagccatgttctctctcaatgctctgaaagtgtgggtttctctcccccttgagtgctgtctgtagatcatgacttggcactcctcggatgccca

SEQ ID NO: 130077 - DNA, 201 bp, Homo sapiens; identical to SEQ ID NO: 22544

SEQ ID NO: 130078 - DNA, 201 bp, Homo sapiens; identical to SEQ ID NO: 22545

SEQ ID NO: 130079 - DNA, 201 bp, Homo sapiens
acatttccatcagtgctttggatttcattagttcttggcaaacattatttacacttacataaagtttattgattccagtatgatgttcaaaagctgactcrttgctcttcagaaattacagaaatgtctaccctcaatctcttgggaaagaaactgaattaaaaaggtagagtaagaaataagctgaaacttgtctgtatc

SEQ ID NO: 130080 - DNA, 201 bp, Homo sapiens
taatatatgtagaggaagcatatagtgtggactctaataataacagcaataccatctacttagcccttactgtgtgccagccccatcctagatgtttagcrcgtattatttcatgtagctctggcaataaacccgcaaagaaggtattattgctcccattttacagataaggtaactgaagcttaaaaaggttgagtaatt

SEQ ID NO: 130081 - DNA, 201 bp, Homo sapiens; identical to SEQ ID NO: 22571

SEQ ID NO: 130082 - DNA, 201 bp, Homo sapiens; identical to SEQ ID NO: 22572

SEQ ID NO: 130083 - DNA, 201 bp, Homo sapiens
caaagcatttttattatgcttttttcctgtttgttttaataaacttaatatacaaagaaaactgtaaatattagagaacacctatatttccatcgccctgrattagcagctgttaattacagtacagtatttatgaccagtgtttttttccccctttaaccacatgttcctttcattcttcctgctgataggtgtggtatg

SEQ ID NO: 130084 - DNA, 201 bp, Homo sapiens
tcctactctttctccttgagtagatagtcagatgtcttttgaaaatgtgttttcggtgtggaatattaacccaatctttgataactcttccagaaccttcrgctcgcgtgcttctgagctgctgtggatggcctcggctctctggactgtccttccgagtaggatgtcactgagatccctcaaatggagcctcctgctgct

SEQ ID NO: 130085 - DNA, 201 bp, Homo sapiens
gaagggaataatgagggatgtgatagaaaataagtgctgggggaactacttgagataaggggtcagggaaggactctcctaagtgacactgtgctgagatstgaggcatgagaaggagccagcctttccaacaaccagctttttggttggaggggcagagtaagtgcaggctctgcaagagaggaaaatagttgacatatt

SEQ ID NO: 130086 - DNA, 201 bp, Homo sapiens
caaagttgtggaaccttgtagttagaagggaccttcgacgtttgttagaataacactatctttggtttctcatttgccttctggagtgatacttacatatkttattattcaaaataatttgaaagtatctaccatggcacttctaagcttttcttgtctccagaacagaacatccccagatccttcagccacatgtcatgc

SEQ ID NO: 130087 - DNA, 201 bp, Homo sapiens
aggatatgttttaaccttggtcttgatgtaagaagctaaaatagatttttggttattggtttctatttgcttacagttaaatgaagtagattcaagtcagrattttttgttttactctggagattctgttctcctactctttctccttgagtagatagtcagatgtcttttgaaaatgtgttttcggtgtggaatattaac

SEQ ID NO: 130088 - DNA, 201 bp, Homo sapiens
gggcgctgaatttgtgctcttagtatgcatgtgtcgatgcctgataaaagcacaaattactgaacgcgtatcagtctggagaacagaatcgtttattactracagataagagactatgacttttttcccctcatagactaaaatgttcgttcaaatgaatggccattggataactccagacctgaaaataaacactgttgt

SEQ ID NO: 130089 - DNA, 201 bp, Homo sapiens
tagacactggacatatagcagtgaataagtggggtcaggttttccctctctccaatcttatattcttttgaagggaatagacaataaacaaatagaaatasatttttaaaagtctagacagggttaaatgctgagaaggtgttaggtttaagtcccagctgaggtccaacaaggtgttaggtttgagtcccagttgaggtc

SEQ ID NO: 130090 - DNA, 201 bp, Homo sapiens
ttataatttctttcttgacagtgatgtgtggcatttaagaagtcagtaataaaataatagtgtacttccctgttggggcttttcatattgttttctattcrtcaatattgttgattcttctctccgtccctcccctgggacatgggatttagaacagtgtcggggtccttgtagcccactgctcagctgtcctaaggaggc

SEQ ID NO: 130091 - DNA, 201 bp, Homo sapiens
caagttttttagcttctcccaggaggcttaagcaaaagaagggcgctgaatttgtgctcttagtatgcatgtgtcgatgcctgataaaagcacaaattacygaacgcgtatcagtctggagaacagaatcgtttattactaacagataagagactatgacttttttcccctcatagactaaaatgttcgttcaaatgaatg

SEQ ID NO: 130092 - DNA, 201 bp, Homo sapiens; identical to SEQ ID NO: 22570

SEQ ID NO: 130093 - DNA, 201 bp, Homo sapiens
ataaagaggagatacattttatttatttgtttttatggtagatttattttttaacccatcattacccatctctttctgtccctatcatatctgcacctagsatagaattatatttaacagtaaactgttaatttaggtagagtaggataactactacaaaataatcaaaggatatgttttaaccttggtcttgatgtaaga

SEQ ID NO: 130094 - DNA, 201 bp, Homo sapiens
gcatgatttgcatggaaattggactaaacttccctttctttaaagttcctggtttagccactcgaatagctggcattacaggcatgcaccagtatgcctgsctaatttttgtgtttttagtagagatgaggtttcaccatgttgccaggctgctcttgaactcctgacctcaagcagtctgccagccttggcctcccaaag

SEQ ID NO: 130095 - DNA, 201 bp, Homo sapiens
tgaattaaatccttctttttttatagttataaagaggagatacattttatttatttgtttttatggtagatttattttttaacccatcattacccatctcyttctgtccctatcatatctgcacctaggatagaattatatttaacagtaaactgttaatttaggtagagtaggataactactacaaaataatcaaaggat

SEQ ID NO: 130096 - DNA, 201 bp, Homo sapiens
gcccgcgcgtgcagccaggggtttccggccgcggccctggcgcgtggtctgcgcgcgcccggccgtgcgtgcggatgcggggaggctgcgtgtgtgcgcarggagagaacgccggccaccttcccgcttccgagctgggtgcgcgccgagcacaggaggtgagtgagaagggcggccctgcagggtctccgaggcggttga

SEQ ID NO: 130097 - DNA, 201 bp, Homo sapiens
cctcctcttgtctcagctggagcttctgtgtaaaagcaagtgttttaggagtttccatcccatgattctgattgggtgtgtgatttctgaagaggttggartgggaaatgtgaaaacttaatactaaggacgggcctttgatttaaacagttgctatgcagactgagcattgagtttaaccaatgaggtaaaaggagggga

SEQ ID NO: 130098 - DNA, 201 bp, Homo sapiens
cttttgggaaatgtctttgtccctttcacaactatatcatgtccagaccaaagaagcttttaacaggatggatcatggttgctcgctatggggtaaactcscactgtgtggtagatagccacatggatggggtcaagcacgtgggatcaaacaggatactcttaatgaccttgcacaacagatacattcaaaagttacagt

SEQ ID NO: 130099 - DNA, 201 bp, Homo sapiens; identical to SEQ ID NO: 22573

SEQ ID NO: 130100 - DNA, 201 bp, Homo sapiens
ccttgagatcaggaacagagctgtcacttcacaatctgaatgttctgtgcctcctcttgtctcagctggagcttctgtgtaaaagcaagtgttttaggagyttccatcccatgattctgattgggtgtgtgatttctgaagaggttggaatgggaaatgtgaaaacttaatactaaggacgggcctttgatttaaacagtt

SEQ ID NO: 130101 - DNA, 201 bp, Homo sapiens
tttggtcttatcctctacccatgaattgtttctttgctttccacatagaaccctagctcaagctactccaactcaaaagcatagagaaattataaaattcwagaacagatgttagaatggaaaatgagtttaacttaaaagaataccagcagtctcatgtttaaagtctaacaactttgtgtttatttttgctttaatctt

SEQ ID NO: 130102 - DNA, 201 bp, Homo sapiens
taacaaagttgtggaaccttgtagttagaagggaccttcgacgtttgttagaataacactatctttggtttctcatttgccttctggagtgatacttacakatgttattattcaaaataatttgaaagtatctaccatggcacttctaagcttttcttgtctccagaacagaacatccccagatccttcagccacatgtca

SEQ ID NO: 130103 - DNA, 201 bp, Homo sapiens
agtccaggagttcgagaccagcttgggtaacatagcaagacccccatctctatatatttatatattttttaattaaaagattaaaagaataaaaaagaacrgaagccattgtggttgaaataggattgggagggagtagttgtagcagatgaaagaggggcttatataaacccatggagccagaagacttgacagatcttc

SEQ ID NO: 130104 - DNA, 201 bp, Homo sapiens
aagggtaggaattttgagtcttccttgtgaaaatgataaggctgtgatgctgccatactgtttatatcaaagttcaatggttgcaagaaattaaaactcaragcagctctggtcagaagagctccttagcataggaagcatagtgagcaggcagcacactccctgggatctagcagccaagaatgtgagatctggagtctt

SEQ ID NO: 130105 - DNA, 201 bp, Homo sapiens
aagaaagctagagtaggttatcggtttcccaccccatgtatttctgactctgaacacaggtaggtaggtaggatctcattgtctgttgcttctctttctgtgtctgttatctggaactatatttagctattttgtttccagagtttgttttcaagaatggagttaccactttctatgcaaaagcagaatggagtagctgag

SEQ ID NO: 130106 - DNA, 201 bp, Homo sapiens
aggtaatcaagatgatatgcaccatggtaaacaatttctttggaaatccaagatatttcttgaactcggggattcaggaactgaagtttgaccttatcttrttgtataaattactttaacattatggtacttttgtacctcatttggagattaaagagcttgaccaaacaagataggttagcatccagtcacctgtaatga

SEQ ID NO: 130107 - DNA, 201 bp, Homo sapiens
gatttaggaaaattataatgttatcctagcctattttagtgacactctaacatggttaagaaaattgactgtcagatttgatcattgttgtcgaagtgaayagccatcattctcagagtggctggagtcaaattctcacccagcagaagcaattttaatgactgaagaatccagttaccacaagaagcaatggaacctgaa

SEQ ID NO: 130108 - DNA, 201 bp, Homo sapiens
tgaattgttgatccaggtacggtgtacactggtgttacaacaaggtttttttttttttcttggttttgttttatacatgaggatatagaattatacacagkgcctgatataggttaatcattcagtaattgttagctgatattatatgctaataagtaaaaatgatattcctgctattgcctttataatgaatatctaaca

SEQ ID NO: 130109 - DNA, 201 bp, Homo sapiens
ggattcccaggttttttagtcatttagtcattcagtacatatgcattgagcaatgtaatcagggataagacacttggggtttcatggaaaagaaactttttatcatagtgctttgtatactatacaaactcataatgctgggggaggggctgaggattggggtgggcgtgaaggataagatatttgaggtttctgagtccc

SEQ ID NO: 130110 - DNA, 201 bp, Homo sapiens
tggattcccaggttttttagtcatttagtcattcagtacatatgcattgagcaatgtaatcagggataagacacttggggtttcatggaaaagaaactttttatcatagtgctttgtatactatacaaactcataatgctgggggaggggctgaggattggggtgggcgtgaaggataagatatttgaggtttctgagtcc

SEQ ID NO: 130111 - DNA, 201 bp, Homo sapiens
atacctgtgtgcctacagaaaggttggaggggggcaagggagtgaggatcttaattggcacccaaggcagaatgtttgctctgaggagaaggattgagtggcactacttaagagatgcagcaaggcagtgcagggagagcctaaaagcagctgaggctctcaatgtcacccagacactgatggacagtcattgatatttga

SEQ ID NO: 130112 - DNA, 201 bp, Homo sapiens
catacctgtgtgcctacagaaaggttggaggggggcaagggagtgaggatcttaattggcacccaaggcagaatgtttgctctgaggagaaggattgagtggcactacttaagagatgcagcaaggcagtgcagggagagcctaaaagcagctgaggctctcaatgtcacccagacactgatggacagtcattgatatttg

SEQ ID NO: 130113 - DNA, 201 bp, Homo sapiens
tcatacctgtgtgcctacagaaaggttggaggggggcaagggagtgaggatcttaattggcacccaaggcagaatgtttgctctgaggagaaggattgagtggcactacttaagagatgcagcaaggcagtgcagggagagcctaaaagcagctgaggctctcaatgtcacccagacactgatggacagtcattgatattt

SEQ ID NO: 130114 - DNA, 201 bp, Homo sapiens
aaacaccgagtactttgtacatagtaggcactgaatgagggaacaaggaacacagaaccatttagtcactacacacacacacacacacacacacacacacaaccatcctgtcctatattattaaatacaggagatagaagtgtgagggagaaagagggtcatcttcattcagtaatatgcttgtattttctcagatataga

SEQ ID NO: 130115 - DNA, 201 bp, Homo sapiens
aaaacaccgagtactttgtacatagtaggcactgaatgagggaacaaggaacacagaaccatttagtcactacacacacacacacacacacacacacacacaaccatcctgtcctatattattaaatacaggagatagaagtgtgagggagaaagagggtcatcttcattcagtaatatgcttgtattttctcagatatag

SEQ ID NO: 130116 - DNA, 201 bp, Homo sapiens
ctttccactgcatgattgctcttttgtttcatttcgataaggcagtcagcacaccaagagtttaagctttttaaagccaaggacttcttagaacctccccmccttaatgcctaccccatgctgaatatgttccagggtaacaaaagtgtacattgaattgactttggagcaaaagaatctgttagctgtgctgactatggc

SEQ ID NO: 130117 - DNA, 201 bp, Homo sapiens
atgctgctgtaaagacacatgcacacgtatgtttattgcggcattattcacaatagcaaagacttggaaccaacccaaatgtccatcaatgatagactgtrttaagcaaatgtggcatatatacaccatggaatactatgctgccataaaaaaggatgagttcatgtcctttgtagggacatggatgaagctggaaaccat

SEQ ID NO: 130118 - DNA, 201 bp, Homo sapiens
agttgtgtctttgaagttgtctggtgtgatatgatggatgtttaatacatgctgtggatatttttaaaatagggagcaatcataaaatcataacatagagsaacttttgaacaacaacatttaaggtctaaaaaaaaaccctacatagcattttttttcttcctttactttatagctgtgtctgtagtctgatgctgatga

SEQ ID NO: 130119 - DNA, 201 bp, Homo sapiens
gagaacatagatataagacatcataagtgctgataatagacttgggggtttcttgatttctgtttggagtaattggtagaaggtgaagctgttacctaagrgacagtagaaaagaaagagccggctctggaaggaagttaacaaattcgattttagacttattaagtttgaggtattagcactggtctaatgtagatgtcc

SEQ ID NO: 130120 - DNA, 201 bp, Homo sapiens
ctcataggcaacttcagcaaagtctcagtatacaaaatcaatgtgcaaaaatcacaagcattcttatacaccaataacagacaaacagccaaatcatgagwgaactcccattcacaattgcttcaaagagaataaaatacctaggaatccaacttacaagggatgtgaaggacctcttcaaggagaactacaaaccactgc

SEQ ID NO: 130121 - DNA, 201 bp, Homo sapiens
attttaaaatatgtcattttctatttacacaagcaggtgcagtcactgctgaaactatagcttttccacacaattaggtatctcattttcctcttgctaarataagataccctttcaaaccttgtttgcatagttatgcaacactgccggtgatgctgagttcctttcccttctgctatattttgctgcagctttccagga

SEQ ID NO: 130122 - DNA, 201 bp, Homo sapiens
tttttcttcctttactttatagctgtgtctgtagtctgatgctgatgaattttctttttaaactagagatttagactcattggtagtgaaactgttacatrttatgtgatttttataccatgaaaaatttctcgatttcatgagatctttcatttccctatgtgtgtgtgtgtgtgtgtgtgcgtgcgtgtgcatgcgcgc

SEQ ID NO: 130123 - DNA, 201 bp, Homo sapiens
ccttaaaagcagggataaagatactaagaggtcttcctgtcttttactaaggtctgaaatgccaccaattctagcaattgatttatctggatcccctaagmccttctattagagtgtgaatatccatgcaaaagagttatgggctcagattgaagtgtgtcatgtagaaattgatgaagaagcgataattatagcagattc

SEQ ID NO: 130124 - DNA, 201 bp, Homo sapiens
catcaatgcaaaaatcctcagtaaaatactggcaaaccgaatccagcagcacatcaaaaagtttatccaccatgatcaagtgatcttcatccctgggatgmaaggctggttcaacatacgcaaatcaataaacgtaatccagcatataaacagaaccaaaaacaaaaaccacatgattatctcaatggatgcagaaaaggc

SEQ ID NO: 130125 - DNA, 201 bp, Homo sapiens
aaaagaaaaagatgggagaagagcagggatctcctaacttagtttggtatgtgtggggaaggcattcttggcagaggatacataaagggtgggtctcactwtttgtccttgttttcagttcacatatgttcctaattaaaattaaataccattagtcagtatctaaatatccttaggttaggatgtagtattttccagggt

SEQ ID NO: 130126 - DNA, 201 bp, Homo sapiens
tcatgggtataaatatatcttcaaactcagttctgtaagaaataataataatcaaaaatctttttgaatagcttgatttcctgcagagaaccaggctggaraaaaatttggcttttgccatttttggagttctcatctccaagttcgtggcaagctaagtttttcacatctccaatttcatggcaagatgtgtgcaattta

SEQ ID NO: 130127 - DNA, 201 bp, Homo sapiens
ctttcctgctttctgttgtgggcatttagtgctataaatttccctctacacactgctttgaatgcgtcccagagattctggtatgttgtgtctttgttctygttggtttcaaagaacatctttatttctgtgaaaggcactgtttttttaagtcaccttctagtgcccagaggaattatctttgtgtttccttagttgata

SEQ ID NO: 130128 - DNA, 201 bp, Homo sapiens
gtcaccttctagtgcccagaggaattatctttgtgtttccttagttgataagtttgtctcaaggctgtgtggcttaggccatttctgatgaagctggtttsataaggagtttctttagtatatacactggaggagctcctggatgtgctctttagttctttaatcaatcctagggaattctaaatcgactgtgtagaaatt

SEQ ID NO: 130129 - DNA, 201 bp, Homo sapiens
acaacttctcttttggcactaaagatcataaagactttatcacaagacttcctgtgtatgggacattgaacaacattgtcttagtctgggttcctcaaatrtagagcctgaagcaaagacttgcttacaattggtttatttaggaatatcaccccaaggaacaggagtgaggggcactgggaatgaaagaggaaacaagga

SEQ ID NO: 130130 - DNA, 201 bp, Homo sapiens
atatgtgtttaagagtagcagagacaaagtgatttaggaaaattataatgttatcctagcctattttagtgacactctaacatggttaagaaaattgactktcagatttgatcattgttgtcgaagtgaacagccatcattctcagagtggctggagtcaaattctcacccagcagaagcaattttaatgactgaagaatc

SEQ ID NO: 130131 - DNA, 201 bp, Homo sapiens
ttcccttattctcatagaaaagactttatgtcacagaagggagctgctattagcataagcagtctggcattgtgtgggtgagtgtccatgtgcattatcargcaaggcttataaaccatgttaattccacacaactttctctactccatccagcttccaatccgtaccccacaacataaaaagtgacatcactcacttaag

SEQ ID NO: 130132 - DNA, 201 bp, Homo sapiens
tacaactatgctcattgcagcattattcacaagagccatgaggtcaaaacagcccaaatgtccatcaacagatgaataaagaaaatgtgatatatacatayaatggaacattatttagccttaaaaaaagaaatcttgttaaatgctgcaacatggataaatcttgaggacattatgctgagtgaaataagctagacataa

SEQ ID NO: 130133 - DNA, 201 bp, Homo sapiens
ggtatatctcccaatgctatccctcccccctcccccaaccccacaacagtccccagagtgtgatgttccccttcctatgtccatgtgttctcattgttcarttcccacctatgagtgagaatatgcggtgtttggttttgtgttcttgcgatagtttactgagaatgatgatttccaatttcatccatgtccctacaaacg

SEQ ID NO: 130134 - DNA, 201 bp, Homo sapiens
acattggtatccctaaagagtagagtaaaattcattttcatctaaaggaacccaatcctcttgtttcacatttagaaatcatcttatgtcattccctgttmctctcacagaaaattcagagtaaggaacacaggtggagaagaaatgggcaggcagctttgcagagatgttatcaagataacatttttcttcacattctgt

SEQ ID NO: 130135 - DNA, 201 bp, Homo sapiens
agtactgtgtagagaagacattccttagttggttgttggattttctataaatactttacacagctcaaagatatatctgattaaaacctctttaatccttyagtgaccacattaaaagctatactgagtgctttctttcaggaaacagaacaccagatcattgaagatttaattttaattcctaagattcagtttacttcc

SEQ ID NO: 130136 - DNA, 201 bp, Homo sapiens
ccatacctatccatttgaaaaattaagcatttttctgtttgtgtgtgtgtacgtatgttttaatttattgagtctgattacaatgcccacttctacatatraattttcagagcctcttgtaatagttccacagccctaaaattgggaaactatctgctatgaatatatagcagaaacatagtcattggaaatggtgggcac

SEQ ID NO: 130137 - DNA, 201 bp, Homo sapiens
caattattgagaagcttttgggaaacactgtttatctttcctcatagggtgtggaaaatctcttctgtgctagttttgggtgccaggcagctttgcattakttgtttttgcgtaagttggtctcatttgttcattttgtcaaaaaaatccttttaaatttctgatttatggtttcctaatttttcaatgctatatttcttt

SEQ ID NO: 130138 - DNA, 201 bp, Homo sapiens
gggagatttttgacaggcatctttgaaaagatgtctagggagacttggaactactggatgacattttgatgtcatggaaattgaacaagagtaaataaatrtattggcaatattagaaagactgttaaaagtcatttcttcagtgtaaatttttgtgaaggaagaataaatattgaccattaagttatatcactgtaatac

SEQ ID NO: 130139 - DNA, 201 bp, Homo sapiens
aagaaagagccggctctggaaggaagttaacaaattcgattttagacttattaagtttgaggtattagcactggtctaatgtagatgtccatttagatccwctggaaattttgtctagagctcaggagttgcctgggttcagaatagaaatctgggaacataagcctgaagatatttttaaagccatgaaagtaagcgagc

SEQ ID NO: 130140 - DNA, 201 bp, Homo sapiens
ataatgaaagtgccccaagttgtattgaaatgaccacaagcaccatacttaggtataacaggatttcacctgggactcactaatccagttgtttacagccrgactctgttctaattgattagcacctgtgtctcactagttgttaatgtttttattaacactcttgctagaatatgtatttacttgtcaagtagcaaaaat

SEQ ID NO: 130141 - DNA, 201 bp, Homo sapiens
cacacattttaatagcagcacaattcacaattgcaaaaatacggaacccacccaaatgtccatcattcaacgagtggataaaaaaaattgtggtatatatrtcatgcaatactactcggccatataaaataatttaataatggcattcacagcaacctggatggaattggagaccattattctaagtgaagtaactcagaa

SEQ ID NO: 130142 - DNA, 201 bp, Homo sapiens
tcttcaagaaactttgttgttggttttcttttttaagtagtaggctatatttatattatgttttatttatgatcacaagcatggtgtaagagtgcttttastgtggaagtttgactttaaaatggcctaccaagaaggaatatgcatcctcgttacatttggaactataaaaataaatacagtgttgttcacacaaacaaa

SEQ ID NO: 130143 - DNA, 201 bp, Homo sapiens
tgaggtgatggccagcatcaatattccaaggcatgtcaacaactatatgaattagggagcatcactttctaatctagattagtctcgagtttgataaattrtcctgattctctacaggagatttgggagggttgggggaaggaagtcaggtaagaaaacatgggagctgaactacaatctttcatactaaagagtgtccga

SEQ ID NO: 130144 - DNA, 201 bp, Homo sapiens
aaatatttgtgggtgataatagttgagaaaattggtagtgctgttacagctttattcttttaagtatctgcagtgttagatgtggtaaaacagaggacacraacaccattatctctaaaacggagataatgacaagtgtagcttccactcatatcatcaaaattagggcccaagacactctatccaactaacagaaattca

SEQ ID NO: 130145 - DNA, 201 bp, Homo sapiens
accttggcctcctaaagtgctggggttacagacgtgagccactgcacctggcctgccctgtatttatttatttatttatttatttatttatttatttattttttagtgggagcaaatgcaagttgagcattgaaaattcaaaatctgaagtgttccaaaattcaaaattttctgaggaccagctgggtgcaactctaatcc

SEQ ID NO: 130146 - DNA, 201 bp, Homo sapiens
caccttggcctcctaaagtgctggggttacagacgtgagccactgcacctggcctgccctgtatttatttatttatttatttatttatttatttatttattttttagtgggagcaaatgcaagttgagcattgaaaattcaaaatctgaagtgttccaaaattcaaaattttctgaggaccagctgggtgcaactctaatc

SEQ ID NO: 130147 - DNA, 201 bp, Homo sapiens
ccaccttggcctcctaaagtgctggggttacagacgtgagccactgcacctggcctgccctgtatttatttatttatttatttatttatttatttatttattttttagtgggagcaaatgcaagttgagcattgaaaattcaaaatctgaagtgttccaaaattcaaaattttctgaggaccagctgggtgcaactctaat

SEQ ID NO: 130148 - DNA, 201 bp, Homo sapiens
cccaccttggcctcctaaagtgctggggttacagacgtgagccactgcacctggcctgccctgtatttatttatttatttatttatttatttatttatttattttttagtgggagcaaatgcaagttgagcattgaaaattcaaaatctgaagtgttccaaaattcaaaattttctgaggaccagctgggtgcaactctaa

SEQ ID NO: 130149 - DNA, 201 bp, Homo sapiens
acccaccttggcctcctaaagtgctggggttacagacgtgagccactgcacctggcctgccctgtatttatttatttatttatttatttatttatttattwattttttagtgggagcaaatgcaagttgagcattgaaaattcaaaatctgaagtgttccaaaattcaaaattttctgaggaccagctgggtgcaactcta

SEQ ID NO: 130150 - DNA, 201 bp, Homo sapiens
tcctttggaaaaatgatcaaggttcttggaactcagccatgttaggaagtaaggtgactgaatggggaagcagtaaggagggggcgtgtattttttcatcygaagctgttctagtgttggaactttcaaggttccagcctcacttggaattttatgaaactcatacctcatattttattttttatgttttattttttgaga

SEQ ID NO: 130151 - DNA, 201 bp, Homo sapiens
tcaaggatctagaaccagaattaccatttgacccagcaatcccattactgtgtatatactcaaaggatcataaatcatgccactataaagacacatacacrtgtatgtttattgtggcactgttcacaatagcaaagacttggaaccaacccaaatggccatcaatgatagactggataaagaaaatgtggcacatataca

SEQ ID NO: 130152 - DNA, 201 bp, Homo sapiens
aagaaaaaagcaaacaaccccatcaaaaagtgggtgaaggatacgaacagacacttctcaaaagaagacatttatgcagccaacaaacttatgaaaaaaaagctcatcatcactggtcattagagaaatgcaaatcaaaaccacaatgagatactatctcatgccagttagaatggtgatcattaaagtcaggaaacaaca

SEQ ID NO: 130153 - DNA, 201 bp, Homo sapiens
ccctcacttgaacccaggaggcagaggttacagtgagccgagaccacgccactgcactcctgctggggaaacagagtgagactctgtctcaaaaaaaaaamaaagaaaattgacaaggagatagaagtgtcttggtgtcttgtgcaggggaaaatgtacttgccaaactggtttgtaatggccagactcaaggaacaaggt

SEQ ID NO: 130154 - DNA, 201 bp, Homo sapiens
tgcagtctcaaactcctgggttcaagtgattctcccacctcaactccccgagtagctgggactataggcatgcgccaccatgcctggctgatttaaaaaawttttttttgtaaagatagggtctcactatgttgtccaggttggtctcgaactccagatctcaagtgatcctcctatcttggcttgcaaaagtgctgaaat

SEQ ID NO: 130155 - DNA, 201 bp, Homo sapiens
gagatatcaaatgaattagatctatttgctctagaaaatattttaaaggagagatttagagtattggaaaggataccagatttatagttcgatgatctggsttccatagacagctaaactcttgcttttttgtatgaccttggatacgttccttagtttttcgcttctaaagtatggataaaatgagataatggatgtaaa

SEQ ID NO: 130156 - DNA, 201 bp, Homo sapiens
tcataggacagtagatctttgattttatggtaatgttttaaatggttgtatgtgtgattcttgatacagagaacagcttgtgacttttcccactttttcakcagcatttaaaaataaaactctctaaggtaatattcttctaacttaaagaatatcattgcatacctatatttaggcactaaggagtactgtactattatg

SEQ ID NO: 130157 - DNA, 201 bp, Homo sapiens
taataaatggggttgggataactggctagctatatgtagaaaaccgaaaatgcaccccttccttataccttatacaaaaattaactcgagatggattaaakacttcaacgtaagacctaaaaccataaaaaccctagaagaaaacctgggcaataccattcaggacataggcatgggcaaagacttcatgactaaaacacc

SEQ ID NO: 130158 - DNA, 201 bp, Homo sapiens
aatactaatgatagctgatgagctaaaaaaaaaaaaaaagaaaaaaatcacaaaaaaatctcacagtgttttaagaaaatttaccaatttgtgttaggctrcattcaaagtcgtcctgggctggtgggccacagattggacaagtttggctggaacaaaggtgaagaaataaattcagggaagagacattgagttctttcc

SEQ ID NO: 130159 - DNA, 201 bp, Homo sapiens
aaataatatataattatatgtatttcaatatgtaaatattcaagcaccaatacattagaagtcataatggagttgtcagatgtgtgtacacagatgtacarcagctgcaaatgaagactaacagttggattattttgataactccaacacagtaagtagcattgtcattgatgaagtgatttttttaagatagcaattcct

SEQ ID NO: 130160 - DNA, 201 bp, Homo sapiens
aaccagcacttttttaaaaaaataacgattattttatttattatttattattatttaaaacaattttttttttttttgagcagagtttcactcttgttacmcaggctggagtgcaatgctgcgatcttggctcactgcaacctctgcctcccaggttccagtgattctcctgcctcagcctcccgagtaactggaattaca

SEQ ID NO: 130161 - DNA, 201 bp, Homo sapiens
tgccctcagtacaagtttcctatcccttttttattgctcttggttgccttttgtattgtgtagagaaaaaggaatgcagcaaaaatgaggaagtcactgargagcttgtctttttctttcactttttactatgccataatttcccttactgtggtcatctattttttcaccaaatctccacctctgattctctgttcctaa

SEQ ID NO: 130162 - DNA, 201 bp, Homo sapiens
ccagggcttctaccataggtgcttggtagcctttctaccctgggccagaactggttccagattccagggtagggctggccttattggaaaaaaaataaaawttcatctgaaagagagcaggattcatcggtagcatgctggtggggatccagcagagtttctgatgtcaatttctgttggttgcctctgcttcatctcaga

SEQ ID NO: 130163 - DNA, 201 bp, Homo sapiens
cttgtctatcccttaaaccagtgtaaagtacagctgacccttgcacaacatgggggttagggatgccaactctctgtgcagtctaaaattagcataaaacktttgattccccaaaaatcttaactactaatagcctattgttgaccagaagccttactgattacataaacagtcaatcaacacatattttgtatgttatgt

SEQ ID NO: 130164 - DNA, 201 bp, Homo sapiens
ttcatttttcttctatggatctcaagtgcatagaatgtgaaacatcttctttctgtaactgcagaaaagacaggaactcactcataacaaaatttagccasattgctttggctgagtgccgcttgttttctcaacagattgatgagaaagtccgacattaggctgtttttatgttgccatccctcaggggaacatagatgt

SEQ ID NO: 130165 - DNA, 201 bp, Homo sapiens
tctagtattggttgaccctattctcatttgatttttgatgggaaaagtagaactagacaaaacatttttttaaaaatcacatttttttctaagactttttkctttttatttgaatgctttacattttaattgctcatttaaaccttttaaaatcttagccctagttttcctttatccatcagttttagcctttcatttcta

SEQ ID NO: 130166 - DNA, 201 bp, Homo sapiens
aaacaaatattacttttcatttttcttctatggatctcaagtgcatagaatgtgaaacatcttctttctgtaactgcagaaaagacaggaactcactcatmacaaaatttagccagattgctttggctgagtgccgcttgttttctcaacagattgatgagaaagtccgacattaggctgtttttatgttgccatccctca

SEQ ID NO: 130167 - DNA, 201 bp, Homo sapiens
cctgctgtcaacttcatgggtggcaggtcaccaaaaggtgtgtctatatcacatatgatatttggtctcatgagacacttcggaattagttatttatactrtttttatcaaggtttcatgcaaagtggataaccagttatagaagctttgctgatactgccgttcttttgagtggaggcattctatctaggcaactggtaa

SEQ ID NO: 130168 - DNA, 201 bp, Homo sapiens
gggagaaatttgtaatggcttctcttaacaccactcacacacatcaaaagcatcataatacacatttctatttggacatattctatttttaaattaataatcatgcgctatccttccttcccctaaaccagctggaaagcttagtagttatttacagggcacctcagtgaaattagcagtagactgaaacatgactgtgcc

SEQ ID NO: 130169 - DNA, 201 bp, Homo sapiens
tgggagaaatttgtaatggcttctcttaacaccactcacacacatcaaaagcatcataatacacatttctatttggacatattctatttttaaattaataatcatgcgctatccttccttcccctaaaccagctggaaagcttagtagttatttacagggcacctcagtgaaattagcagtagactgaaacatgactgtgc

SEQ ID NO: 130170 - DNA, 201 bp, Homo sapiens
atgggagaaatttgtaatggcttctcttaacaccactcacacacatcaaaagcatcataatacacatttctatttggacatattctatttttaaattaataatcatgcgctatccttccttcccctaaaccagctggaaagcttagtagttatttacagggcacctcagtgaaattagcagtagactgaaacatgactgtg

SEQ ID NO: 130171 - DNA, 201 bp, Homo sapiens
atctaattaatctaatttattggtatacattaaattgttcatagtattttcttattatccttttattttattgatataaagttggtaatgatgtcccttcytgtattcccaatcttggtaatctgagtcttctcccctttttttcttcatcaatctagctaaagtttggtcaactttggtgatcttttttaagaacctact

SEQ ID NO: 130172 - DNA, 201 bp, Homo sapiens
cagtggggggttaaagtctcccattattattgtctgggagtctaagtctctttgtaggtctctaaggacttgctttatgaatctgggtgctcctgtattgrgtgcatatatatttaggatagttcggtcttcttgttgaattgatacctttaccattatgtaatgaccttctttgtctcttttgatctttgttggtttaaa

SEQ ID NO: 130173 - DNA, 201 bp, Homo sapiens
ctgagttcaactcctggatatccttgttaactttgtgtctcgttgatctgtctaatgttgacagtggggggttaaagtctcccattattattgtctgggartctaagtctctttgtaggtctctaaggacttgctttatgaatctgggtgctcctgtattgggtgcatatatatttaggatagttcggtcttcttgttgaa

SEQ ID NO: 130174 - DNA, 201 bp, Homo sapiens
gaacaggttgaaggaggagagatggagggagatgttaaattggatttcacacgctcacaggacattcaggctgaagtttctagtaggcagttctaaatgcrgcttataagatagatgaggaactccttgccagaaaatattatttcatcatgttcctattagagggcgaggcatggtacaaatatattttgataggagagg

SEQ ID NO: 130175 - DNA, 201 bp, Homo sapiens
gagtgcccacagtgttttccctatagatgctttaaatgtctttttctttttggaatggaacacatgttattatataggcttacatatgaatagttaaaatwaggtaatttatcaagaagttttttaaaaaatatgtgaccgtatttagagatgcagtgtttgttttttaataggatgcaaatcaactgtctataatgtttt

SEQ ID NO: 130176 - DNA, 201 bp, Homo sapiens
gcagagctgagttcaactcctggatatccttgttaactttgtgtctcgttgatctgtctaatgttgacagtggggggttaaagtctcccattattattgtstgggagtctaagtctctttgtaggtctctaaggacttgctttatgaatctgggtgctcctgtattgggtgcatatatatttaggatagttcggtcttctt

SEQ ID NO: 130177 - DNA, 201 bp, Homo sapiens
ggtggtgatatcccctttatcattttttattgcatctatttgattcttctctctttttttctttattagtcttgctagcggtctatcaatattgttgatcytttcaaaaaaccagctcctggattcattgattttttgaagggttttttgtttctctatatctgtctccttcagttctgctctgatcttagttacttcttg

SEQ ID NO: 130178 - DNA, 201 bp, Homo sapiens
agtatccttatagagttccagcctgctgttagttctgatcttccgccatttcctttcccttcccctccaaacacacgtacatactcttccctccagctctrtaactctgcagctctgtagcccaattctaaaccccaaatatccatgtttttcatgcctttatgtctttatatagaatgtactctccacctggattgctac

SEQ ID NO: 130179 - DNA, 201 bp, Homo sapiens
ggtttagtcttgggagagtgtatgtgttgaggaatttatcaatttcttctagattttctagtttatttgtgtagaggtgtttatatattctctgatggtaktttgtatttctgtgggatcggtggtgatatcccctttatcattttttattgcatctatttgattcttctctctttttttctttattagtcttgctagcgg

SEQ ID NO: 130180 - DNA, 201 bp, Homo sapiens
tctttcccctcttaattttagtttaattgagagaatacatctgtggttcttagcttagtgcctggcctatagtaaatgctcaataaccgtcagcacttgtkaacatttttattatattcactaaaatatttcagttcatttgttttttacctctagtagaagctggtatgcttttgtttgaaataatgaaatctctcagta

SEQ ID NO: 130181 - DNA, 201 bp, Homo sapiens
ctctttttctattgattggaatagtttcagaaggaatggtaccagttcctccttgtacctctggtagaatttggctgtgaatccatctggtcctggactcyttttggttggtaagctattgattattgccacaatttcagctcctgttattggtctattcagcgattcaacttcttcctggtttagtcttgggagagtgta

SEQ ID NO: 130182 - DNA, 201 bp, Homo sapiens
ggaaggagttagttttcatgtgtgatgctttgggtatcagggatatgcatagcttcataaataactgggattttcattggtattttcctaccgcaggtgtrctattttgatattaatagtctcatcctttggatctcttacgtttggcagaatataagtaagaaatctgaataaaggtgaatgttcttacatgtgttcttg

SEQ ID NO: 130183 - DNA, 201 bp, Homo sapiens
gaacctctgctagggcagtgtggaagggaaatgtggcattagagctcccacacagagttcctactgggaccctgcctagtggagctgtgagaagagggctrccatcctccagatcccagaatggtagatccacccacagcttgaactgtgggcctggaaaagctgcagacactcaacaccagctcatgacagcagccagga

SEQ ID NO: 130184 - DNA, 201 bp, Homo sapiens
aaatgcagtctaaagtggtctaatattgttaccaagtaatccccaaaagtttttaaattggtacctagggatcaagaaactgcttcactctatttgctgtrctttcttatctttcaaaattttacccttccataaagacacctttcaaatgcttgatttctcttttgtcttttctgattcaccttctccctaccccaacat

SEQ ID NO: 130185 - DNA, 201 bp, Homo sapiens
ctgtaaacaaatattacttttcatttttcttctatggatctcaagtgcatagaatgtgaaacatcttctttctgtaactgcagaaaagacaggaactcacycataacaaaatttagccagattgctttggctgagtgccgcttgttttctcaacagattgatgagaaagtccgacattaggctgtttttatgttgccatcc

SEQ ID NO: 130186 - DNA, 201 bp, Homo sapiens
catttgggttggttccaagtctttgctattgtgaataatgccgcaataaacatacatgtgcatgtgtctttatagcagcatgatttatagttgtgtgggtrtatatccagtaatgggatggctgggtcaaatggtatttctagttctagatccctgaggaatcgccacactgacttccacaatggttgaactagtttacag

SEQ ID NO: 130187 - DNA, 201 bp, Homo sapiens
atagaatttcaggcgtcaaaaaagggaaaacgatttggggatggggatccttttggggttactcacatcacgctaaataaggcagttaccagctctcaggrcagaaagaccaggccttctccataccccaactacacatacaaggagccttaatctaatacaggttttgaaggcacttcttaaagtcatgtcagatgggag

SEQ ID NO: 130188 - DNA, 201 bp, Homo sapiens
cctgatgccccaataaattggtcagtcgtcccaaagtaaaagcttgaccccatgagtttctaaatcatttccaacgtgtattgtagtttaaaacaaaaaaytatgctatacttgaaggccattttagctgagttataaaatttgcttctataaatcttgccagagtaaaatgggccttggataatcatcaaaacaaataca

SEQ ID NO: 130189 - DNA, 201 bp, Homo sapiens
gtcgtcagggactgctcaacttcttttgattataaataataactcctgttaactttatattggcaattgtttaattctgtcaccctgaagatgtagtttcrattctgatctgttgctcttatctccaccctaacttaatcttctttaaagaatggtataatttacaacagtcagggtaacctttctggaggtaaggaggct

SEQ ID NO: 130190 - DNA, 201 bp, Homo sapiens
acgtcctcatttatccatttagttcattcagcaattatttactgaacacctactatttttccaaggcactatgctagccagtagggctatagtggtgaaakagagtttgctatctaatgggggaaacaagacatcacacattgtcatgcccaattataaattgtgctaagtggcaagaagaaaaagaaaaagatgggagaa

SEQ ID NO: 130191 - DNA, 201 bp, Homo sapiens
ataaaatgctcactctgtcgtatattgttatagcagcacaaatcgatgaagacaagcagatctaaggcagagatgcaaggcagatggggtctaagtttctratttagttttctttgaggcaaacctaactcctatgtttacagcagttttttgttttgttttgctttgcttaaggtagcttgtcaggtttctatgatttgc

SEQ ID NO: 130192 - DNA, 201 bp, Homo sapiens
attatgtgatttttataccatgaaaaatttctcgatttcatgagatctttcatttccctatgtgtgtgtgtgtgtgtgtgtgcgtgcgtgtgcatgcgcgygcatgcacgtaaatgcgtgttagtggttaacatgtctataagaaaagctatttgcctctctccctctggtagctggtcgaacgaaacttgtcactaatgg

SEQ ID NO: 130193 - DNA, 201 bp, Homo sapiens
gttacatattatgtgatttttataccatgaaaaatttctcgatttcatgagatctttcatttccctatgtgtgtgtgtgtgtgtgtgtgcgtgcgtgtgcrtgcgcgcgcatgcacgtaaatgcgtgttagtggttaacatgtctataagaaaagctatttgcctctctccctctggtagctggtcgaacgaaacttgtca

SEQ ID NO: 130194 - DNA, 201 bp, Homo sapiens
tgggatagggggtgggtaatatgaaagctttacaaaatgaaatgaggtcaaatatgacagatgtgatcaaatgtacttctaatctgtaaatccctgactakctacagttgtgctatttttaaatgtatactttgaagttatactgaatttatgacattctcagcattttcctatatctacaagcatttgggattactctgt

SEQ ID NO: 130195 - DNA, 201 bp, Homo sapiens
gaataacgtttagtcccatttacaaaattaattaaacatttaaactgtccttatacatttaatatatgtatttctttttaaaaacttaaattatcttattkaaaatgtcactggatagtaaataataacttcacatttaataaatcaaatctataaatacagtgatcctcaaattttctcaaatgttccaaatatataaaa

SEQ ID NO: 130196 - DNA, 201 bp, Homo sapiens
tctcacacacacacacacacacacacacacacacacacacacacacacacatattaaagatctgagagtatttgtttcggacaatcccttttagcagtagragggtggtgatgagggaagctttatttcaaaatgctaatactgtaaagttattttactcatctccttgactgtcttcatatactagaaactgactataac

SEQ ID NO: 130197 - DNA, 201 bp, Homo sapiens
ttattttgaggtacgtcccatcaatacctaatttattgagtgtttgtagcatgaagggctgttgaattttgtcaaaggccttttctgcatctattgagatmatcatgtggtttttgtctttggttctgtttatatgctggattccatttattgatttgcgtatgttgaaccagccttgcatcccagggatgaagcccactt

SEQ ID NO: 130198 - DNA, 201 bp, Homo sapiens
catgccttggcatcagggaatctccaggggaggaagcaagcaataaatagtttagtccgaggcagcatctgggcagaactggtctccacagtggtggcggraataagaggtacgggagcaagagagtatgaaatggtgcccaggagatggcctaggcaagcacaacaaataaaatcttaacttcatagcaaatgcatgtga

SEQ ID NO: 130199 - DNA, 201 bp, Homo sapiens
tttaaagtagttttttccaattctgtgaagaaagtcgttggtagcttgatggggatggcattgaatctataaattaccttgggcagtatggccattttcayaatattgattcttcctatccatgagcatggaatgttcttccatttgtttgtatcctcttttatttcgttgagcagtggtttatagttctccttgaagagg

SEQ ID NO: 130200 - DNA, 201 bp, Homo sapiens
atgtgggctcttttttggttccataggaactttaaagtagttttttccaattctgtgaagaaagtcgttggtagcttgatggggatggcattgaatctatraattaccttgggcagtatggccattttcacaatattgattcttcctatccatgagcatggaatgttcttccatttgtttgtatcctcttttatttcgttg

SEQ ID NO: 130201 - DNA, 201 bp, Homo sapiens
ttttaagaaaatttaccaatttgtgttaggctgcattcaaagtcgtcctgggctggtgggccacagattggacaagtttggctggaacaaaggtgaagaawtaaattcagggaagagacattgagttctttcccaaaccattttgaatgtttttggttccttttctttggatttgagatgttgagagcccctgtttcattt

SEQ ID NO: 130202 - DNA, 201 bp, Homo sapiens
agctttgttcttttggcttaggattgtcttggcaatgtgggctcttttttggttccataggaactttaaagtagttttttccaattctgtgaagaaagtcrttggtagcttgatggggatggcattgaatctataaattaccttgggcagtatggccattttcacaatattgattcttcctatccatgagcatggaatgtt

SEQ ID NO: 130203 - DNA, 201 bp, Homo sapiens
agcaactgcacttatgcatttagtttctctctctctctctctctctctctctcacacacacacacacacacacacacacacacacacacacacacacacayattaaagatctgagagtatttgtttcggacaatcccttttagcagtaggagggtggtgatgagggaagctttatttcaaaatgctaatactgtaaagtta

SEQ ID NO: 130204 - DNA, 201 bp, Homo sapiens
gccttgtagtatagtttgaagtcaggtagcgtgatgcctccagctttgttcttttggcttaggattgtcttggcaatgtgggctcttttttggttccatakgaactttaaagtagttttttccaattctgtgaagaaagtcgttggtagcttgatggggatggcattgaatctataaattaccttgggcagtatggccatt

SEQ ID NO: 130205 - DNA, 201 bp, Homo sapiens
atagtattccatttatggctgcatagtattccatggtgtatatgtgccacattttcttaatccagtctatcattgttggacatttgggttggttccaagtytttgctattgtgaatagtgctgcaataaacatacgtgtccatgtgtctttatagcagcatgatttataatcctttgggtatatacccagtaatgggatgg

SEQ ID NO: 130206 - DNA, 201 bp, Homo sapiens
ggccccaatgtgtgatgttccccttcccgtgtccaagtgttctcattattcaattcccacctatgagtgagaacatgcagtgtttggttttttgtccttgygctagtttgctgagaatgatggtttccagcttcattcatgtccctacaaaggacatgaactcatcctttttatggctgcatagtattccatttatggctg

SEQ ID NO: 130207 - DNA, 201 bp, Homo sapiens
ttccttttttttttttttttttttgagacggagtcttgatctgtcgcccaggctggagtgcagtggcgccatcttggcttactgcaagcaccacctcctgsgttcacgccattctcctgcctcagcctcctgagtagctgggaccacaggcacccgccaccacgcccagctaattttttgtagttttagtagagacggggt

SEQ ID NO: 130208 - DNA, 201 bp, Homo sapiens
ataatcccatttcttttccctttactctggtgtttaaagcttttatgccatcaaacacttcagaaaacccaccgtctttccttttttttttttttttttttgagacggagtcttgatctgtcgcccaggctggagtgcagtggcgccatcttggcttactgcaagcaccacctcctgggttcacgccattctcctgcctca

SEQ ID NO: 130209 - DNA, 201 bp, Homo sapiens
tgagattgtgccatcacactccagcctgggcaacaacagagtgacactctgtctcaaaaaaaaaagatcacatcattaaatcatgttttaatggctgtatsatgttttctctacaatataaatgtatctagatatggacaaaacatagttacatgaaaacaaaagcctttaagccccaaaccctgaaggtaagtcacaaat

SEQ ID NO: 130210 - DNA, 201 bp, Homo sapiens
tttcctgctttctgttgtgggcatttagtgctataaatttccctctacacactgctttgaatgcgtcccagagattctggtatgttgtgtctttgttctcrttgatttcaaagaacatctttatttctgccttcattttgttattggtatgttgtgtctttgttctcattggtttcaaagaacatctttatttctgccttc

SEQ ID NO: 130211 - DNA, 201 bp, Homo sapiens
ctccacaaaaagtacaaaaatttgctggatatggtggtgcatgcctgtagtcccagctgcttgggaggctgaggcaggaggaccacttgagtccagggggkttgcagtgagctgagattgtgccatcacactccagcctgggcaacaacagagtgacactctgtctcaaaaaaaaaagatcacatcattaaatcatgtttt

SEQ ID NO: 130212 - DNA, 201 bp, Homo sapiens
cctagcctattttagtgacactctaacatggttaagaaaattgactgtcagatttgatcattgttgtcgaagtgaacagccatcattctcagagtggctgragtcaaattctcacccagcagaagcaattttaatgactgaagaatccagttaccacaagaagcaatggaacctgaatgcactgctgacctcccgcgttct

SEQ ID NO: 130213 - DNA, 201 bp, Homo sapiens; identical to SEQ ID NO: 22608

SEQ ID NO: 130214 - DNA, 201 bp, Homo sapiens
ctgcccatgtgggtgggttgagggagtcttcagagtttgtagaagtagctctgggtttctgaaaaatgtgaaggtgatgtactgacctagttaataccccrtaatcctgggaggaaggaaggggctgtggctggagtatttatttcttgtcatgataggtcttgtcatgaatattaactatttactctttgaagtcacaag

SEQ ID NO: 130215 - DNA, 201 bp, Homo sapiens
cagagcccagcagagaagagaaagggagagaatgattctgaaggggcaaaaggagaatattcagcaaagaaagaagtttttttaattctttgtattgtctrtgtttggctattagcctatttgaatgtatccactgtctaactgtaaaagttttgagttttggttagtctttctactcaaatggccccataatggttacaa

SEQ ID NO: 130216 - DNA, 201 bp, Homo sapiens
gtgtatgtttgtgtgtgtgtgtgtgtgtgtgtgtgtgtgtgtgtgtgtattaagagacttattctaaggaattggcttatgtgattgcaggagctggcagwtcaaattctgtggggcaggccagcaggctggaaattcaagtgggatttctttgttacagtcttgagtaagaattccttcttccctaggaaaactcaattt

SEQ ID NO: 130217 - DNA, 201 bp, Homo sapiens
ctaagcttaactttgatatgaataatttaaacacacatgaatgtgccttcaaaccaaactatacaatgtgtaaaaaccccttcgttccacattggggtttygtattatgaaatataaaaaagaaaaaaaaaagaaatacgttatttggctcagaattatcaagaatctgctctgcaactaatattacttctcactacacat

SEQ ID NO: 130218 - DNA, 201 bp, Homo sapiens
tgttatcaagataacatttttcttcacattctgtagactctagagaaatggtttacaagagagctttaaaggtattgttttaacatacatatgagctgtayttatgtatgacacctattttactttttcatttttgttgttattgtcaaaacaaggccagtgtttttctacatcgactgaatttctggacccacttcccat

SEQ ID NO: 130219 - DNA, 201 bp, Homo sapiens
gagctgctaactagaataaccagtttagagaggaacataaatgacctgatggagctgaaaaatatagcacaagagcttcgtgaagcatagataagtatcartagctgaatcaatcaagcagaagaaaggatatcagagttttaagaccatcttgcttaaataatgcatgcagacaagattagagaaaaaacaatgaaaagg

SEQ ID NO: 130220 - DNA, 201 bp, Homo sapiens
tagaaaatggcagggctaaaattctaactgagatctaactgatcttccaaacctatgctcttacgattagagaacagtgactttaacagtgctgtgccctkaggtgatacagaagtgttaaagcaggcctgttcactctgatagctgaaaagtccactgggttgagatggacttggactcaagtgtctgtaaagccaagca

SEQ ID NO: 130221 - DNA, 201 bp, Homo sapiens
cagaggagcccccaacccacagccaagggaggcagtgagtgagcatgctacctagccggggaaactgagcattatccacagaactctgtcagccacggatyggaagatcccactcacctacccacgccacggggtctagggtcccaaccctggagctgcgcagattctcaacagcctctcagctgcaatctgcttaagcct

SEQ ID NO: 130222 - DNA, 201 bp, Homo sapiens
atggctttctgctactcacctatgtcttaggtttttttctttactcatctaacgttccagtgttcataatagctttcctttgtctagctatgttccagatrctgtgctgggtgttttattatgtaaacctactgaatagatgatagtagccccactaatgaaaaaggagggatggaggattcagcagcttgccccagatca

SEQ ID NO: 130223 - DNA, 201 bp, Homo sapiens
ccagaaaggtcagagggaaattgaataaatgtcaacactgtcaggtggggagactctcagcgtctcctgaggaatttaatttatattaatgagaagtgagmcctgcttagggccctctcagagactgctctggtgtcaaattttaatgatttaacttcatgaaaaggattcctaacaagttatccaacaagataacctcac

SEQ ID NO: 130224 - DNA, 201 bp, Homo sapiens
aagtccagaaaggtcagagggaaattgaataaatgtcaacactgtcaggtggggagactctcagcgtctcctgaggaatttaatttatattaatgagaagygagacctgcttagggccctctcagagactgctctggtgtcaaattttaatgatttaacttcatgaaaaggattcctaacaagttatccaacaagataacc

SEQ ID NO: 130225 - DNA, 201 bp, Homo sapiens
gctcctgatgtctctaactaggtggtcccccttcacttttcttagtcttctgccatgacccctccctgtacctctatagtggaagtggttcacattagttygtccttaaccttaattctaacataaatgaatgtggaataccgcaaagagaccaaaagagctagctgtatgctagcactggctctgacagctaacaagctt

SEQ ID NO: 130226 - DNA, 201 bp, Homo sapiens
agtattgtaagttaaggacctgggcaaataattcctcaaaaattatattaatttatttttaaaaggaagtttattcacttactcacggcaaaccaactttraagataaaaatgtgttgccttaaagactgaagacatgttcaagatggcaaaaagagtcttcctaccccttttaaaaagtaaatgcagaagccgttgtgag

SEQ ID NO: 130227 - DNA, 201 bp, Homo sapiens
gtgtgatctgttgtttttttctcttcccttctttccattattcccatccaacattatgttataatgaaagtaatatatgttcattgtagaaatccttaaaratacagaaaacttagagaaggaaaaaaatgtctcatgtaattccttcactccaaaagaacaactattgctagaggttctgtaatgatatacatcattatt

SEQ ID NO: 130228 - DNA, 201 bp, Homo sapiens
cacatcccttgtaagttggattcctaggtattttattctctttgatgcaattgtgaatgggagttcactcatgatttggttctctgtttgtctgttgttgktgtataagaaggcttgtgatttttgtacattgattttgtatcctgagaatttgctgaagttgcctatcagcttaaggagattttgggctgagacaatggg

SEQ ID NO: 130229 - DNA, 201 bp, Homo sapiens
tccatatgaactttaaaatagttttttccaattctgtgaagaaaggcattggtagcttgatggggatggcgttgaatctataaattaccttgggcagtatrgccattttcacgatattgattcttcctacccatgagcatggaatgttcttccatttgtttgtatcctcttttatttcgttgagcagtggtttgtagttct

SEQ ID NO: 130230 - DNA, 201 bp, Homo sapiens
ccacgcccggctaatattttttgtatttttagtggagatggggtttcactatgttagccaggctggtctcaaactcctaacctcgtgatccacccacctcrgcctcccaaagtgctgggattacaggcatgagccactgtgcctggccaggagactttttaatcaaatttcttgacattattttaatggtctgagattcat

SEQ ID NO: 130231 - DNA, 201 bp, Homo sapiens
agtaccatgctgttttggttactgtagccttgtagtatagtttgaagtcaggtagtgtgatgcctccagctttgttcttttggcttaggattgacttggcratgtgggctcttttttggttccatatgaactttaaaatagttttttccaattctgtgaagaaaggcattggtagcttgatggggatggcgttgaatctat

SEQ ID NO: 130232 - DNA, 201 bp, Homo sapiens
gggcaggccagcaggctggaaattcaagtgggatttctttgttacagtcttgagtaagaattccttcttccctaggaaaactcaatttttgctgttaatgyctccaactgatggataagactcacccatattatggaaagtaataacttttacttaaaatcatctgattgtgatattgatcacattctcaaaataccttaa

SEQ ID NO: 130233 - DNA, 201 bp, Homo sapiens
acctactgtgaatcttaattcaaattttacatgtctctttggggccttgttaattttctcattattatgtggttcctgacaaatgacagttttgagaatcyaaagttgcttaagttagttttttatgaggtattgccaattgctcattgtttttataattcttaatcacatttttatttttaatcttacattaaataaagc

SEQ ID NO: 130234 - DNA, 201 bp, Homo sapiens
catatggctagccagttttcccagcaccatttattaaatagggaatcctttccccattgcttgtttttctcaggtttgtcaaagatcagatagttgtagakaggtggcgttatttctgagggctctgttctgttccattgatctatatgtctgttttggtaccagtaccatgctgttttggttactgtagccttgtagtat

SEQ ID NO: 130235 - DNA, 201 bp, Homo sapiens
cattattatgtggttcctgacaaatgacagttttgagaatctaaagttgcttaagttagttttttatgaggtattgccaattgctcattgtttttataatkcttaatcacatttttatttttaatcttacattaaataaagcagctgccctttataatgtctgggtgtatttttacccatccattttctctgaggactgct

SEQ ID NO: 130236 - DNA, 201 bp, Homo sapiens
ggatccagtttcagctttctacatatggctagccagttttcccagcaccatttattaaatagggaatcctttccccattgcttgtttttctcaggtttgtsaaagatcagatagttgtagataggtggcgttatttctgagggctctgttctgttccattgatctatatgtctgttttggtaccagtaccatgctgttttg

SEQ ID NO: 130237 - DNA, 201 bp, Homo sapiens
catgccaccaagcctggctaatttttgtatttttgtagagagagggtttcaccatgttggctaggctggtcttgaactcctgacctcaagcaattcacccmcctcagcctcccagagttctagtagaattgtgatcctaattaatttaatacacgtcactatgagaaaatggacttgcatcatggattgaggatttggcct

SEQ ID NO: 130238 - DNA, 201 bp, Homo sapiens
atcctctccagcacctgttgtttcctgactttttaatgatcgccattgtaactggtgtgagatggtatctcactgtggttttgatttgcatttctctgatrgccagtgatggtgagcattttttcatgtgttttttggctgcataaatgtcttcttttgagaagtgtctgttcatgtccttcgcccactttttgatggggt

SEQ ID NO: 130239 - DNA, 201 bp, Homo sapiens
tcatttagacaggatggataacagggaaaagctagattatcaagtgcttggcagctgatataaataaatactaaataattcttatgccaattgctcttaarggcattatagtgtaattatttatttagaacatgaatttttatgccaaacagtactgtgttcgatttctggctctgttacttgctctctgagatgcctttg

SEQ ID NO: 130240 - DNA, 201 bp, Homo sapiens
ttgaactagtttacagtcccaccaacagcgtaaaagtgttcctatttctccacatcctctccagcacctgttgtttcctgactttttaatgatcgccattstaactggtgtgagatggtatctcactgtggttttgatttgcatttctctgatggccagtgatggtgagcattttttcatgtgttttttggctgcataaat

SEQ ID NO: 130241 - DNA, 201 bp, Homo sapiens
agacggacagctctttagacactaggaaacaacctttatgtagagagtaaaaaatattatttccataattggcccaaaagcagccatcaattaagaaagcrttcaagctcaacacctaaccacccaaaattctaatcgcaccactgaactccttacatcacattggactaatctattactttatagaagcagtaatgttaa

SEQ ID NO: 130242 - DNA, 201 bp, Homo sapiens
tgacaaccaaaaatgcccccacaaatacccagaacatcctcattcaggatcactgctttgtaggggtgccaatcttttggcttccctgggccacattggargaagaagaattgtcttgggccacatataaaatacattaatactaatgatagctgatgagctaaaaaaaaaaaaaaagaaaaaaatcacaaaaaaatctca

SEQ ID NO: 130243 - DNA, 201 bp, Homo sapiens
tgggtgtttgagcattggtgatttgttttccttgaagatgtcttatgtatctttattacttgaataaatatcatcatgtagttatttacctgaattgataatgctgtgcaaaggagctaaagtatcctctctaaaaatatttttttttcataattttggcctttcattcctttaaccatttcctctcaccaaaaattaaat

SEQ ID NO: 130244 - DNA, 201 bp, Homo sapiens
agaataacaatcttttataggttctgcctttggtgcaatgtatgtgtgtgtgtgtgtgtgtgtgtgtgtacaaatatttgtaggtatgtaaattggtctcrttttttgtacttaaaagatattattgcaaacatgactgggtatgggaatgttctctccagctaagaaaactctaggaagaatgtagttgcatagagctta

SEQ ID NO: 130245 - DNA, 201 bp, Homo sapiens
gaataacaatcttttataggttctgcctttggtgcaatgtatgtgtgtgtgtgtgtgtgtgtgtgtgtacaaatatttgtaggtatgtaaattggtctcawtttttgtacttaaaagatattattgcaaacatgactgggtatgggaatgttctctccagctaagaaaactctaggaagaatgtagttgcatagagcttag

SEQ ID NO: 130246 - DNA, 201 bp, Homo sapiens
catgctcttctaactaaatgtataaatgacactaattaagacagtaggggacaaacatttgaaataaaaaatatgagttgctcaggcagccagtatttctytgctttttggtttaggcagcctgaagtttgtacagacacataccatgtccacatactcagtgtaggtttttgtggttatggtattttgcctgtgtgcaca

SEQ ID NO: 130247 - DNA, 201 bp, Homo sapiens
cagaactatgagataataaatttgatttataaaatgctcactctgtcgtatattgttatagcagcacaaatcgatgaagacaagcagatctaaggcagagrtgcaaggcagatggggtctaagtttctgatttagttttctttgaggcaaacctaactcctatgtttacagcagttttttgttttgttttgctttgcttaa

SEQ ID NO: 130248 - DNA, 201 bp, Homo sapiens
gttaaggagttcgtggcttcattgagctatgatcacatcactgcaccttagcctggatgacacagcaagacctcatttgtaaatgaaaaaaaaaaaaaaaagagtcttcatgcagcatttggttagcttgcccttctatcttctaccatgtgaggactcagcaagaaggccctcactagaggctggtgccttgatcttgga

SEQ ID NO: 130249 - DNA, 201 bp, Homo sapiens
tgaggcagaagaatcacttgaggccaggagtttgagaccagcctggaaaacatagtaagaatccacttctaaaaacttaaaaaaaataaataaattagccmggcatggtggcatgtgcctgtagtcccagctactcaggaggctgaggcaggatgatcctttgagttaaggagttcgtggcttcattgagctatgatcaca

SEQ ID NO: 130250 - DNA, 201 bp, Homo sapiens
acttgaacccaggaggcaaaggttgtggtcagctgagatcacgccattacactccagcctgggcaacaagagtgaaactccatctcaaaaaaaaaaaaaaaggaagctctgcaaatgaggtttttccagtgagctcccagacaggtcagatggtgacagttttctggggatggagctcttcttcagagttccaaacctcct

SEQ ID NO: 130251 - DNA, 201 bp, Homo sapiens
ttgaacctgggaggcagaggttgcagtgagccaagattgtgccactgcactcctgcctgggtgacagggcaagactccgtctcaaaaaaaaaaaaaaaaaagatttttggatagtcttttgtttggctttcacatgactgcagtgttaaataattgccactgattgcttttaaccaataccctggggatagggctttccta

SEQ ID NO: 130252 - DNA, 201 bp, Homo sapiens
gttgtcccactgccttctgatgtccatggtttctgatgagaaatcagctgttagtctcatttgaaactttcttgtacattatgagggttttttttttttttctcttgctgctctcaagattctctttcagtctttggcttttaacagtttgattgtatgtcttggtgtggatttcttagagtttattctacttggaatttg

SEQ ID NO: 130253 - DNA, 201 bp, Homo sapiens
ccaaatagcatttcctattcagtctcatctgtcattttcctgatttcacaaccagcctccagatgtcaaaatatgaaggtgaatgtgaatgaaattgtttktctatcagagctccctaaatgaaatagaccaagattatcctgtacccctgatgccccaataaattggtcagtcgtcccaaagtaaaagcttgaccccatg

SEQ ID NO: 130254 - DNA, 201 bp, Homo sapiens
ggacagaactaagacatgaggaatccacccccatgacccacacatctccaaccaggccctacctccaacactggggattaaatttcaacatgagatttggrctggacaaatatccaaaccatgtcagtgaatatattttagagtttaaaagtctgtttctaagcttaactttgatatgaataatttaaacacacatgaatg

SEQ ID NO: 130255 - DNA, 201 bp, Homo sapiens
aagagggagcaggcacatcacatggcgagagcaggagcaaggctgggggagataccacacatttttaaatgaccagatctcatgaggtctcactcactatkgcaaggacagaactaagacatgaggaatccacccccatgacccacacatctccaaccaggccctacctccaacactggggattaaatttcaacatgagat

SEQ ID NO: 130256 - DNA, 201 bp, Homo sapiens
gaagatcccactcacctacccacgccacggggtctagggtcccaaccctggagctgcgcagattctcaacagcctctcagctgcaatctgcttaagcctgyggagctcccctgggggaggggcaaccagcaccacagctgtggctgcctgctgtgtaagccatgtgagctccttgggggaggggcagcagccagcactggg

SEQ ID NO: 130257 - DNA, 201 bp, Homo sapiens
caccccttcactgacctgacctaaggtattagaaatcattctgtcaatcacatgaacaattaaggcccactctctaaatccctaattgcttactttttttygggtaagaaaaccttttttaaaagctatgaagaaaaatataaatagatttatgtaagcaaaggcaaaggttatagatcaccctagaatagtagcagatca

SEQ ID NO: 130258 - DNA, 201 bp, Homo sapiens
catgcctagactattatgaatgcattaggtaggatgttcttgtgttgctataaagaaatacatgaggggggcaaggccaagatggccaactacaaacagtkgtgattggagactcccattgaaaagaaccataataaacatgtgaatccttcactggcaaccaagatatccaggttctctcatcagaaccaactagactct

SEQ ID NO: 130259 - DNA, 201 bp, Homo sapiens
ctgcaaagattttaactacggggcttgggaaataatctcaatgtgaagatacatgttacatcatgtcagttattattgttctattgttacttccaagattmaggacttggttctaagggagggacatttcttttaaatgttttgtttcatttttttcatgatggagagatgactgaattactgtattgtcagtttctggaa

SEQ ID NO: 130260 - DNA, 201 bp, Homo sapiens
aggtctgcagtatgattgccgtgtgttgagatgatgcttcctttcatcattcacctgctgcagttacccatgtttctcttttctggccctcattttatgasaacagctggtagcactctttaaaatgtccacttctgtaaaaagtgctacctggtagcacttctgatgtcataagcagagagcatgcccttttctataatt

SEQ ID NO: 130261 - DNA, 201 bp, Homo sapiens
gcactatgctaagtgcctgcaggtcttctcatttaatcattataacaattgtatgaggtagatttttattactcttccttttttataggtgaagaaacacrtttaggttaagtaaaactttcccaggtcacatagctggtagctgggatttgtatccagggctatatgtgaccctaaggtcagtgtgttcataaccgtcat

SEQ ID NO: 130262 - DNA, 201 bp, Homo sapiens
tattgcaaacatgactgggtatgggaatgttctctccagctaagaaaactctaggaagaatgtagttgcatagagcttagaagccctggcatttgcttcargcattgctatgggatgctttagtcttggcttgtccgttgttgctagaatcacgtgctgccctcactgctgctcttgtccagctgccactgttactcaatc

SEQ ID NO: 130263 - DNA, 201 bp, Homo sapiens
ttatgaaatattttgagcaatgaatatgacatctgattacctctctttgtaattcataatctcttggactaatctttggactcagtagatttctttcattrccattttatgtatttattatttttttgagacagaatcttgttctgtcgcctaggctggagtgcagtggtgcaatcacagctcactccagccttgacctcc

SEQ ID NO: 130264 - DNA, 201 bp, Homo sapiens
tgttctaaaatttatcacattttaaattatatctattaaataatttgatcactcattctgttaattttttaaatggatgagtaaagaaccacataaattgcttttatatttcactttaatgttcgacccagcagttgccctcagtacaagtttcctatcccttttttattgctcttggttgccttttgtattgtgtagaga

SEQ ID NO: 130265 - DNA, 201 bp, Homo sapiens
aaagaaagaaagaaggaaagaaggaaagagagaaagagagagagaaaaaaagaaagagagagagagagagaaaaagaaagagaaagaaagaaagagaaggwaagacggaaagaaaaggagagggagggagggaagggagagagggagggagggaaggaaggtagaaggaaggaaagatataatgtgtggaaaatgatggac

SEQ ID NO: 130266 - DNA, 201 bp, Homo sapiens
tgtgtggtatgtgtgtatgtttgtgtgtgtgtgtgtgtgtgtgtgtgtgtgtgtgtgtgtattaagagacttattctaaggaattggcttatgtgattgcrggagctggcagatcaaattctgtggggcaggccagcaggctggaaattcaagtgggatttctttgttacagtcttgagtaagaattccttcttccctagg

SEQ ID NO: 130267 - DNA, 201 bp, Homo sapiens
cagtgagctgtgatcatgcaatagcactccagcctgggtgacagagtgagaccttggaaagaaagaaagaaggaaagaaggaaagagagaaagagagagaraaaaaaagaaagagagagagagagagaaaaagaaagagaaagaaagaaagagaaggaaagacggaaagaaaaggagagggagggagggaagggagagagg

SEQ ID NO: 130268 - DNA, 201 bp, Homo sapiens
gaagtaaacaaccttgtacttgagtagaatttagcttctgctggatggtccctgtcctgaggtgctagtacacatattttaatctggcacagagcccacatacaatggaatggggccactttcataaatatttcaggatttctaaattatcttccctgaacaatgttgagggaaagcttagtagatgaataagattttaag

SEQ ID NO: 130269 - DNA, 201 bp, Homo sapiens
cagcactttgggaggcgtaggacgggggattgcttgagctcaggagttcaagaccatcctgggcaacatggcaaaaccccgtctctacaaaaattagctgsacacggtggcatgcacctgtagtcccagccactcagaaggctgaggtgagaggatcgcttgagccctggaggttgaggctgcagtgagctgtgatcatgc

SEQ ID NO: 130270 - DNA, 201 bp, Homo sapiens
aatatagcagaagtgatgggataatacttctgagactgggttatataaagactggcttctgactttggtttgctcctttgctctttgtctctggaatcacrtgctcagggggaaatcaactgccatgtcatgaagagatgatacttgggcagccagtggagagacctacatggtgaggaactgaggtttgccagaatccat

SEQ ID NO: 130271 - DNA, 201 bp, Homo sapiens
tcaagtgattcacccaccttagcctcccaaagtgctgggattacaggtgtgtgctattgcacctggcctaaccaagctgattttaatttcagttataattytttttttttttttttttttgagacggagtctcgctgtcgcccaggctggagtgcagtggcgcaatctcggctcactgcaggctccgccccctggggttca

SEQ ID NO: 130272 - DNA, 201 bp, Homo sapiens
ccaccctctaaccccttcacctccctctcaagcaggatctgtatttccagttttgcccaggacatctctgctttctcttattcttctttgcttttttttttgttttccagacacattggctttcttctgcctagcatttttgttactttcaatattcttctcattggaattcttattcatctcttctctcatccttaatgg

SEQ ID NO: 130273 - DNA, 201 bp, Homo sapiens
aaactactttaaatttcatgtggaatcaaagaagaccccatatagccaagacaatcctaagcaaaaagaacaacctggaggcatcatgctacctgacttcmaattatactacaagactacagtaacaaaaacagcatggtactgttaccaaaacagacatatagacctatggtacagaggagacctcagaaataacgccac

SEQ ID NO: 130274 - DNA, 201 bp, Homo sapiens
tcctaaagtgttatttcaactttggatagcaactgaaaacttttacatccgagaatccaagaaatgttattcgattcaaatatttgtgttaatattagatattttcttttctaaagaggtatttttttttctcaaactgttaagctaatcattgctttcttttccttagcaactcagacactaccacatcagagacttcat

SEQ ID NO: 130275 - DNA, 201 bp, Homo sapiens
ctcctaaagtgttatttcaactttggatagcaactgaaaacttttacatccgagaatccaagaaatgttattcgattcaaatatttgtgttaatattagatattttcttttctaaagaggtatttttttttctcaaactgttaagctaatcattgctttcttttccttagcaactcagacactaccacatcagagacttca

SEQ ID NO: 130276 - DNA, 201 bp, Homo sapiens
tatgttgtgtctttgttctcattggtttcaaagaacatctttatttctgccttcatttcgttatgcacccagtagtcattcaggagcaggttgttcagttyccatgtagttgaatggttttgagtgagtttcttaatcctgagttgtagtttgattgcactgtgatctgagagacagtttgttataatttctgttctttta

SEQ ID NO: 130277 - DNA, 201 bp, Homo sapiens
actcctaaagtgttatttcaactttggatagcaactgaaaacttttacatccgagaatccaagaaatgttattcgattcaaatatttgtgttaatattagatattttcttttctaaagaggtatttttttttctcaaactgttaagctaatcattgctttcttttccttagcaactcagacactaccacatcagagacttc

SEQ ID NO: 130278 - DNA, 201 bp, Homo sapiens
tactcctaaagtgttatttcaactttggatagcaactgaaaacttttacatccgagaatccaagaaatgttattcgattcaaatatttgtgttaatattagatattttcttttctaaagaggtatttttttttctcaaactgttaagctaatcattgctttcttttccttagcaactcagacactaccacatcagagactt

SEQ ID NO: 130279 - DNA, 201 bp, Homo sapiens
aagagggctggagggaactagctaggtccttttgtccctctttctctcctaccatgcgaggacacctagatggtgccatctatgagaacaggccttcgccrgagactgaacctgcgaatacctcgatgttgggcctcccagtttccagaactatgagataataaatttgatttataaaatgctcactctgtcgtatattgt

SEQ ID NO: 130280 - DNA, 201 bp, Homo sapiens
tctggtcctatcggctgtggcaaaggggccaggcttatatggcggaattttcctttcctgaccctggaagaggcagattctctaagagttaacgattgagraggaaataatgggatctctagagtagacactgtcaagagtggcagtcacatgactgccttccacaagaataggggaacctgggcaagagaggaggaatag

SEQ ID NO: 130281 - DNA, 201 bp, Homo sapiens
gatgttattttactttattttaaacaactttaactagtctaaaaatgatgtaaaggtaagtgattctcactttatcctataagagacagtcttgttcttayctgtttcattcatcaaaactttttgggttttagtcttcaaatttatcccatgtcctcagctgggttcagggatggggagaaaaggcaaaatgttcaagta

SEQ ID NO: 130282 - DNA, 201 bp, Homo sapiens
aacacagatgtacccactgcagatataaaagtatataaatgaaaagtttcccactcaccgttgttcccaggtcacccagttgtcctcctcagaggtcaccratgttattttactttattttaaacaactttaactagtctaaaaatgatgtaaaggtaagtgattctcactttatcctataagagacagtcttgttcttac

SEQ ID NO: 130283 - DNA, 201 bp, Homo sapiens
cgggcgcggtggctcacgcctgtaatcccagcactttgggaggcccaggcgggcagatcacaaggtcaggagattgagaccatcctggctaacacagtgawaccccgtctctactaaaaatacaaaaaattagccgggcgtggtaacaggcgtctgtaatcccagctactagggaggctgaggcaggagaatggtgtgaac

SEQ ID NO: 130284 - DNA, 201 bp, Homo sapiens
aaataaaaaaataaagtgtcttccacagttggagtatattctttcataccttctcctatgcctatatgataatgctaaatacactatatatatatgtgttrcttaattatgctcatatatatgtatatatatgttgtaggatatactgtacctgatattctgtgactttgatttttaacctcaacaatatattatggtatt

SEQ ID NO: 130285 - DNA, 201 bp, Homo sapiens
taatagaaaatgatttcaattgtcctctgtaatatttcattgaaataaatgttgtagagtggttttagctcttggcaaatcatgcaataataataataaaagagaagacggctgtgtgggaaagagtagttatttttaaatcttggtagacaaatgggacctgcccacttgtctattgagcacatctctgtaatttctcag

SEQ ID NO: 130286 - DNA, 201 bp, Homo sapiens
gcttgttttcccaacagttcaagcctaatatgtattactcagcagacagtcaataaattagaattggccggctaacaagttttctttttttttttttttttgagacagtctcgctctgtcgcccaggttggagtgcagtggtgcaatttcggctcactgcaagctccgcctcccgggttcacgccattctcctgcctcagc

SEQ ID NO: 130287 - DNA, 201 bp, Homo sapiens
ttaatagaaaatgatttcaattgtcctctgtaatatttcattgaaataaatgttgtagagtggttttagctcttggcaaatcatgcaataataataataaaagagaagacggctgtgtgggaaagagtagttatttttaaatcttggtagacaaatgggacctgcccacttgtctattgagcacatctctgtaatttctca

SEQ ID NO: 130288 - DNA, 201 bp, Homo sapiens
taattaatagaaaatgatttcaattgtcctctgtaatatttcattgaaataaatgttgtagagtggttttagctcttggcaaatcatgcaataataataataaaagagaagacggctgtgtgggaaagagtagttatttttaaatcttggtagacaaatgggacctgcccacttgtctattgagcacatctctgtaatttc

SEQ ID NO: 130289 - DNA, 201 bp, Homo sapiens
aatcaattctttgtctaggccaatgtctagaagaatatttcctaggtttttgttttccctttctttcttccttccttccttccttccttccttccttcctytcctttcctttcctttcctttcctttcctttcctttcctttcctttcctttccctccctccctctctctttctttctctctttcttctttttttgacaga

SEQ ID NO: 130290 - DNA, 201 bp, Homo sapiens
acaatcttttataggttctgcctttggtgcaatgtatgtgtgtgtgtgtgtgtgtgtgtgtgtacaaatatttgtaggtatgtaaattggtctcattttttgtacttaaaagatattattgcaaacatgactgggtatgggaatgttctctccagctaagaaaactctaggaagaatgtagttgcatagagcttagaagcc

SEQ ID NO: 130291 - DNA, 201 bp, Homo sapiens
aattttaaaatatgtcattttctatttacacaagcaggtgcagtcactgctgaaactatagcttttccacacaattaggtatctcattttcctcttgctawgataagataccctttcaaaccttgtttgcatagttatgcaacactgccggtgatgctgagttcctttcccttctgctatattttgctgcagctttccagg

SEQ ID NO: 130292 - DNA, 201 bp, Homo sapiens
gtgaaaaaacaaagtcttagattcaatggaatagaataacaatcttttataggttctgcctttggtgcaatgtatgtgtgtgtgtgtgtgtgtgtgtgtgtacaaatatttgtaggtatgtaaattggtctcattttttgtacttaaaagatattattgcaaacatgactgggtatgggaatgttctctccagctaagaaa

SEQ ID NO: 130293 - DNA, 201 bp, Homo sapiens
tgtgaaaaaacaaagtcttagattcaatggaatagaataacaatcttttataggttctgcctttggtgcaatgtatgtgtgtgtgtgtgtgtgtgtgtgtgtacaaatatttgtaggtatgtaaattggtctcattttttgtacttaaaagatattattgcaaacatgactgggtatgggaatgttctctccagctaagaa

SEQ ID NO: 130294 - DNA, 201 bp, Homo sapiens
atgtgaaaaaacaaagtcttagattcaatggaatagaataacaatcttttataggttctgcctttggtgcaatgtatgtgtgtgtgtgtgtgtgtgtgtgtgtacaaatatttgtaggtatgtaaattggtctcattttttgtacttaaaagatattattgcaaacatgactgggtatgggaatgttctctccagctaaga

SEQ ID NO: 130295 - DNA, 201 bp, Homo sapiens
aggaagtagaggtggcagattttgaaggcttggagcatgcttatgaagaacaaatatgagtacagtgcctcagtacagagaagtcctttttttttttttttgagagataagagtcttactctatagcccaagctggagtgcaatggcatgatctcagctcactgcaacctccgcctcccgggttcaagtgattctcctgcc

SEQ ID NO: 130296 - DNA, 201 bp, Homo sapiens
aatgtgaaaaaacaaagtcttagattcaatggaatagaataacaatcttttataggttctgcctttggtgcaatgtatgtgtgtgtgtgtgtgtgtgtgtgtgtacaaatatttgtaggtatgtaaattggtctcattttttgtacttaaaagatattattgcaaacatgactgggtatgggaatgttctctccagctaag

SEQ ID NO: 130297 - DNA, 201 bp, Homo sapiens
gttgtctgcagatgaattcaaaccactgaggaagtttatacaggttagtaaaaactagcaaaacaagaaatggtttttgaaaaaacaaaatttaaaaattytattatttttgtcctgactgttaattcgtttctaatgtatccagttttgatgccaaatatcagaaaacagagagctcaggcattctgggaaagtcaataa

SEQ ID NO: 130298 - DNA, 201 bp, Homo sapiens
gataaaagtccaacactttaatctaccatgtgttgtctgcagatgaattcaaaccactgaggaagtttatacaggttagtaaaaactagcaaaacaagaartggtttttgaaaaaacaaaatttaaaaattctattatttttgtcctgactgttaattcgtttctaatgtatccagttttgatgccaaatatcagaaaaca

SEQ ID NO: 130299 - DNA, 201 bp, Homo sapiens
gcttgattagaatcttagaatgtgggaactgcagtttacagacaatctagctaggtccttgtttgaaaatgaatgcagtgagaagactgctgtgttgatawgaaagctgataaatagtaaacctggaaccagaacccctaattcagatctctttccactgcatgattgctcttttgtttcatttcgataaggcagtcagca

SEQ ID NO: 130300 - DNA, 201 bp, Homo sapiens
gaagctcatgggagacaccccttgtcaacttgtagaaacacttggacaggttctgtcaagagcatgacgtttacgttattaatgtttatatgacatccatrggaaggtgaggtctgcaaacattcaggttaaggagttaggaatgatatgagaaaagaaaaaaaaatcaaccttgttcttgaaatgagaacagacttgacc

SEQ ID NO: 130301 - DNA, 201 bp, Homo sapiens
ccaattaagttaaaattagggaaatggagaggagaaaaattgagaaatgatacagggtgaagagttcaaaaaacaagccttttgggaaggagttatttggkgcttttgagaagagcatttgctgattgagtatatatatatttctagagaagaaatgcaataacattttcccatgctgcaggtgaggctttgtcataatgt

SEQ ID NO: 130302 - DNA, 201 bp, Homo sapiens
gtcttacataggagatgtacagaaagttttagtctccattcctaatcctaggcacacgcacacacacacacacacacacacacacacacacacacacaaamttctgaaaccctaatactgtcaaatccccagtgagtttcaattttcaatgacaactatggataaaaatggtcatatttaggagagtaggggggaaaaaag

SEQ ID NO: 130303 - DNA, 201 bp, Homo sapiens
tttttctcatctctttccataatgctttatgacatctggaacttgcttgttgcaaccataaatcttcacgtggatcatccttgtttatggactatttgggyataggacataaagataggacactgttccacagcagatttttttttcttgctgtttgagagacaccagccttcactaagcagttcattattttctaaggtt

SEQ ID NO: 130304 - DNA, 201 bp, Homo sapiens
gacagtggaatccctgtatggatttggaagttacaaagccaggactttatatctcaaagcatcctgccttaggttgggctgctataatgaaagaccatagrtgagtggcttaaacaacagacatttatttctcacagttttggaggctgggaagtccaagatcaaggtgctggcagatctggtgtctgatgaggttcctct

SEQ ID NO: 130305 - DNA, 201 bp, Homo sapiens
cagattcaatgctatttctatcaaactaccaatgacattgttcaaagaattagaaaaaaactattctaaaattcatgtggaaccaaaaaaaaaaaaaaaaagagtccgaatagccaaaacaatcctaagcaaaaaaaaaacaaagtcacaggcatcacattactcaatttcaaactatactacaaggctatagtagcaaaa

SEQ ID NO: 130306 - DNA, 201 bp, Homo sapiens
tgtataatactttctctaagtagtcaattctgccttctcagagacttttttaatgccaaacttgaagagctcttgcagaggagtcattcttttgtttttttgctctttctcattctttatggtcagttcttccactaatttattttatttcaaagcagggatccaagggaaggaggagtgaggaaaacctttttagctatg

SEQ ID NO: 130307 - DNA, 201 bp, Homo sapiens
cctctattggagagaatatgatagcatacaaagagtatcagtgctatgtttgaatatttatgtactcaccacagtttgtgttgaaacttaatccccagtgmacagtattatgaggtagggccttcaggagatgattaagtcaccagggcagagccctcaagaatgggactagtgaccttataagagggctggagggaacta

SEQ ID NO: 130308 - DNA, 201 bp, Homo sapiens
catacaaagagtatcagtgctatgtttgaatatttatgtactcaccacagtttgtgttgaaacttaatccccagtgcacagtattatgaggtagggccttyaggagatgattaagtcaccagggcagagccctcaagaatgggactagtgaccttataagagggctggagggaactagctaggtccttttgtccctctttc

SEQ ID NO: 130309 - DNA, 201 bp, Homo sapiens
tgtacacatcctcttcagatctgacagctttctgttgctttccagttatgcccagctcatagaaataattttgtttttgagggtaggtaccaggtgccatygaagcagcatcattgtctggtgtaaatacctgaggtttgttgtctcatgccaaggaaataagagtatgcggacacatgagaagtgggtttaggagcatag

SEQ ID NO: 130310 - DNA, 201 bp, Homo sapiens
tgaaaagagcccaattggcttcatgataattctttgtgatattatacttaatggggctttttatgaagattaaagataatgggccaggcacagtgtctcaygcctgtaatcccagcactttgggaggcgtaggacgggggattgcttgagctcaggagttcaagaccatcctgggcaacatggcaaaaccccgtctctaca

SEQ ID NO: 130311 - DNA, 201 bp, Homo sapiens
gcctagaaattttggatacattgaagaatccaatcttctgcaaagggtcggaagcagtgtgggtaatagttaaatattgtattggatagggacattaaaaygtttggctgttctctctctttttatctgaaacttccagaatcaaaaggtctagccaagaaaggaaatcattcctaattttggcaggttctgtaataggaa

SEQ ID NO: 130312 - DNA, 201 bp, Homo sapiens
aattttaaatactttatacattgaaacaaatcaagccactataataattaggagccccttgctctggtgcagggcataataatcgctagcaaatccttagytgatgacatcacagtaatctgagacagagaggtggggactgtagtggacacttaaagcaacattgctgtgtctccttggtaattcatgaatgacagttcc

SEQ ID NO: 130313 - DNA, 201 bp, Homo sapiens
aacagggcccctttcagattggcttgaagaacctacagatatattaattggagaagtgggagaagcaggtactgttaaatgtgtagcccctttttaaaaakatcaggtatagattatggaaggcaccagtgatcctttccatcatgatgtagaatatctttgcacattcagtttaataggatttctgctgggtgctaacag

SEQ ID NO: 130314 - DNA, 201 bp, Homo sapiens
gtgcagtcactgctgaaactatagcttttccacacaattaggtatctcattttcctcttgctaagataagataccctttcaaaccttgtttgcatagttaygcaacactgccggtgatgctgagttcctttcccttctgctatattttgctgcagctttccaggattcaaagtcccacttgcagtcctcggcaggaggggt

SEQ ID NO: 130315 - DNA, 201 bp, Homo sapiens
ttgttgtctcatgccaaggaaataagagtatgcggacacatgagaagtgggtttaggagcataggtttaataggcaaaagaaagagaaaggagaacagctstctctcctacgagagagaggctcccaagtgggacttccggtccaaagtgaagtacactggattttacagactgacctgaggaggtgatgtctgatgtacg

SEQ ID NO: 130316 - DNA, 201 bp, Homo sapiens
cctgctcaacgttttatgttcccaatttctaatcttcatagcaacgttacagaattacagatgtggagaaggagactcagagacattaagttaacatgctyaagattataagtattgccaagtagctagcagaaccaggattcgttaggtcagtttgcctcccaaatccatggctttctgctactcacctatgtcttaggt

SEQ ID NO: 130317 - DNA, 201 bp, Homo sapiens
gcataggtttaataggcaaaagaaagagaaaggagaacagctctctctcctacgagagagaggctcccaagtgggacttccggtccaaagtgaagtacacyggattttacagactgacctgaggaggtgatgtctgatgtacgtagggtccaaagattggttggacaggtgtgatatttacataacacacgaaggagctgg

SEQ ID NO: 130318 - DNA, 201 bp, Homo sapiens
aaaatgctggatgacatattaaatgaagggtcattctggaaaataaaatagacaaaatggctttactctcaaagataattgtgaagtaaaaaccaaaatawtagcttattcataactatttggaggcctttcttaagtccagaaaggtcagagggaaattgaataaatgtcaacactgtcaggtggggagactctcagcgt

SEQ ID NO: 130319 - DNA, 201 bp, Homo sapiens
cagctactcgggaggctgaggcaggagaatcacttgaacccaggaggcaaaggttgtggtcagctgagatcacgccattacactccagcctgggcaacaaragtgaaactccatctcaaaaaaaaaaaaaaaggaagctctgcaaatgaggtttttccagtgagctcccagacaggtcagatggtgacagttttctgggga

SEQ ID NO: 130320 - DNA, 201 bp, Homo sapiens
aatggatgaacagtgaaggttcttagccaggaataagaagaaaattgaagaaattgctttgtagtttagttagagcagaagcagcgtacagctctgaaccyaagtgccttagatggaagataagggcaaaaagaactgtatgcaagctctgtcttcacttctgatgagatgcaggaagaagttagctgcttaattctcttt

SEQ ID NO: 130321 - DNA, 201 bp, Homo sapiens
agttcgtggcttcattgagctatgatcacatcactgcaccttagcctggatgacacagcaagacctcatttgtaaatgaaaaaaaaaaaaaaaagagtcttcatgcagcatttggttagcttgcccttctatcttctaccatgtgaggactcagcaagaaggccctcactagaggctggtgccttgatcttggatttccca

SEQ ID NO: 130322 - DNA, 201 bp, Homo sapiens
aaaacaacagtaaacatgtaagcctctcattgtatctccattagtggaagaagactgtgatggaactgcaagtaactttcctagggactgctccactgtgkctagattttttaaaaatgttatgaggaaagcattattttttaaagaactcatatttttaacttttttctcgtttcaaattgcttttttgatctatggtga

SEQ ID NO: 130323 - DNA, 201 bp, Homo sapiens
agtgagactctgtctcaaaaaaaaaaaaaagaaaattgacaaggagatagaagtgtcttggtgtcttgtgcaggggaaaatgtacttgccaaactggtttktaatggccagactcaaggaacaaggtaatgggtggtgaacaagaacaattcacataggccatgccaattgttgagtttaaatcctggaggctattgctct

SEQ ID NO: 130324 - DNA, 201 bp, Homo sapiens
tcagacccaaaacctgtgctcttaaccactaggctcttctcataatcagaaagtgattgaggagaaggggaatttcagaaatcataaagtaatagaattarcaaggcttaccgggtgatttgctatggtcatggagtcattgtggactcccaagtccctggatttggataaatattgatgacattctgtgattcaggctgc

SEQ ID NO: 130325 - DNA, 201 bp, Homo sapiens
acaaatgaagttgagttttacagtgctattaactagctaaggtcatacaaatagtaactggagctaagatttgaaacccctgtccatctcattgcaagttyatattattttcattaatgatgccagaatggaattggtattaaatcatcttgcacattttacaagaatgtcatacaattccagtaaataagctgaatgaaa

SEQ ID NO: 130326 - DNA, 201 bp, Homo sapiens
gaactggcaagagaaaacaaaagagagcaagccgttaacctctctgcctcagtggctgttttataaaatgacatgacttcattatattcctgatatcagarcaactccctgccaccaccaccaccctacagcctccctgaagttttcagcaaccatgaagaaaagactgagcacaagctggcccatggaaacttgggaaac

SEQ ID NO: 130327 - DNA, 201 bp, Homo sapiens
tcctaccgcaggtgtactattttgatattaatagtctcatcctttggatctcttacgtttggcagaatataagtaagaaatctgaataaaggtgaatgttsttacatgtgttcttggtagaagtatatgtcactgtcagagtaatgagattgagggtgaggttgtatgttatgtatctctgatggagattttgaggggtag

SEQ ID NO: 130328 - DNA, 201 bp, Homo sapiens
aaacaggcattgagtcttatatgttcctctgtccctgggtctagattatttacacattactaagtcctcccgattactcatataattctccatcacccacyaggttcatcacttatatctttttggttcccaagttatacaaatgattcatctaagtctaaggtcttttgaactagatggcatcttatattctttcatatt

SEQ ID NO: 130329 - DNA, 201 bp, Homo sapiens
ctcacacctgtaatcccagcactttgggaggccaaggcgggcagatcacaaggtcaggagatcaagaccatcctggctaacacggtgaaaccccatctctrctaaaaatacaaaaaattagccgggcgtggtggcaggcacctgtagtcccagctacttgggaggctgaggcaggagaatggcgtgaacctgggaggtgga

SEQ ID NO: 130330 - DNA, 201 bp, Homo sapiens
catttatttctcatggttctggagactgggaagtctaaaatcaaagtgctggcttatttagttcctgctaagggcccttttcctagcttgcggatggttgytttatggctgtgtcctcacatggtggagagagaaatcacatgagagccagctctctggtggtgtcttcttataagggcactaaccttgtcatgagggccc

SEQ ID NO: 130331 - DNA, 201 bp, Homo sapiens; identical to SEQ ID NO: 22604

SEQ ID NO: 130332 - DNA, 201 bp, Homo sapiens
ttttacagactgtctcctattttccattttacagtttccaaatcagcaactgctatggtctaaacatgcctccccacctgaattcatatgttgaaacttartcacaaaagttagtactaaaagatagggcctttaggagacgattaaggattagtgaccttatgaaagaggttgaaaggagtgccctcgtgccttttgctc

SEQ ID NO: 130333 - DNA, 201 bp, Homo sapiens
aaaagttagtactaaaagatagggcctttaggagacgattaaggattagtgaccttatgaaagaggttgaaaggagtgccctcgtgccttttgctcttttwtgtcttcgccatgtaaggacacagcattcatccctcttcccccacttttttttgtttgtttgttcgtttattaatttgcccctctgccttttccaccatg

SEQ ID NO: 130334 - DNA, 201 bp, Homo sapiens
gtatttctgagaagtactgagggctggaagaatcagatgtccttgtctgtttgataaagcaagaggtcagtgcaattatggcagaaaattcatgaagatamcacaggcgcaagctggaaagtagtggttatggtggctttgtagattccagtgacctggaaagaaaaccatgggaacaaacaattgttgagcaacaactat

SEQ ID NO: 130335 - DNA, 201 bp, Homo sapiens
ctgtgttgcccaggctggtctcaaactcctgggctcaagtgatccacctcagcctcccaacgtgctgggattacaggcatgagccaccacaccagacgatwctctataccttaaagcagcaacaccagcagtccatgaggaggttttagccaatttaacttacccgctaatgatgctgttcccaaacagctttctataagg

SEQ ID NO: 130336 - DNA, 201 bp, Homo sapiens
caccagtcagggaagtacattcgtattgattgctgcaaatgcaaaggtgctttcagagcagagatccttgattttaagggactcccattaaggttgaaaasatgggacaagtccgtttttcctgccaagaaagacatggcttccatgaaatcttatttactatatttttgtatctaacaagttctctaggaagcctctcat

SEQ ID NO: 130337 - DNA, 201 bp, Homo sapiens
agtacattcgtattgattgctgcaaatgcaaaggtgctttcagagcagagatccttgattttaagggactcccattaaggttgaaaagatgggacaagtcygtttttcctgccaagaaagacatggcttccatgaaatcttatttactatatttttgtatctaacaagttctctaggaagcctctcatttttgaatcgtaa

SEQ ID NO: 130338 - DNA, 201 bp, Homo sapiens
ttgtttctgagttcacaacactaccagaatgcctggcatggcagaaagtgcttgttaaatgcctgctgaatgaatgaataacttcagccaccagcctagcragcagatgagttcagaggttatataaacaacattcataagctcagccagaatcttgtttgagccagagcagcagaagcccagaaagtcagggacaatgcc

SEQ ID NO: 130339 - DNA, 201 bp, Homo sapiens
ttcaaacctaaataccatgctaaggaacctagaaaataggaacagttatacctcaggcaattatgtaactacttgatgaaatttttttaaatgttctttcygggattaatctagagttactataagtctattacagtctcccataagtcatacttattttctgtgaagtccttgaaccctgggccttaactgtattcctaa

SEQ ID NO: 130340 - DNA, 201 bp, Homo sapiens
tacctgtacaaatacaaaataattggaaagctgttggatgctcttagatgttcaagttaggttaggcaatactaacagtatatacatggcatttgagccaractttgaaagatatgaaggattgactaaaaccaataagagaccagagtatttggttttctgttcctgtgttactttgctaaggataatggcctccagctg

SEQ ID NO: 130341 - DNA, 201 bp, Homo sapiens
tgaaggctgagtgagttctgtgggcatcccatgccttggcatcagggaatctccaggggaggaagcaagcaataaatagtttagtccgaggcagcatctgrgcagaactggtctccacagtggtggcggaaataagaggtacgggagcaagagagtatgaaatggtgcccaggagatggcctaggcaagcacaacaaataa

SEQ ID NO: 130342 - DNA, 201 bp, Homo sapiens
ttgccattgagccacaatttctgtcccagggaaataattatcctctttggaattgtcagtcagttgctcccacagagcttggctatgggctgtgagcaaaacccagctataccagcttgaagcctagaaattttggatacattgaagaatccaatcttctgcaaagggtcggaagcagtgtgggtaatagttaaatattgt

SEQ ID NO: 130343 - DNA, 201 bp, Homo sapiens
gtatgaaatggtgcccaggagatggcctaggcaagcacaacaaataaaatcttaacttcatagcaaatgcatgtgagcccatcttatggtcatttcttgcrtaacaaccatctataaaagctgagggccaggcacagtggctcatgcctgtactaccaacactttgggaggcttaagtgggagaattgcttgagcccagga

SEQ ID NO: 130344 - DNA, 201 bp, Homo sapiens
gcatgtggcggtgcatttgaagccttaagagtaataaagtctcaggacagtcctctccttgggctctgggactcctgataccttcacaaaatgttttttawttttcttctcaggggaagcagatggaatgaacaacttctgtctattatctgctatttttaggcaaggtaaaccatcatctgtgtgccccctttagagaag

SEQ ID NO: 130345 - DNA, 201 bp, Homo sapiens
ctatattgaacatgtagaatatcgagtgtattcacatgcatttatagaaaaatattgcatatagcagaagatgaaagaaaagatgttttgtttgatgtaayggctcaacaggacaggatcctaactcaaacctaaataatttatcttcacttttatcactaatgaatttaaatacctgggcccttcaacctgagtagcatg

SEQ ID NO: 130346 - DNA, 201 bp, Homo sapiens
atgttgaatgaaataacattattcaatgacctgctatatgtaaaaattagttaccttccacagataagaaactcacaagagtggttactttgggaatgagraattgaggaaggagacttactttttcactgagtactcttactatattgtctgaatttttaactttgtccatgtattttgtatttcttaaaatttataaaa

SEQ ID NO: 130347 - DNA, 201 bp, Homo sapiens; identical to SEQ ID NO: 22605

SEQ ID NO: 130348 - DNA, 201 bp, Homo sapiens
gatggaagagatgatggcatattgatatgctaatgaattattctaaagaatgagagaaactattgatgcaggggagagaaatataattacaagagcaaagstcttgaatagatgtgagagataggaacaaggagaaaggaaagcaagaggtttttggttttgtgggttgataaatcgatcatgggaaaacaccttagtttt

SEQ ID NO: 130349 - DNA, 201 bp, Homo sapiens
gtaatgcaggaaaatattcccatctcaagactcttacctttatcacatctgcagagtcccgtttgccatgtaaggtaatgtattcacaggtgttagggacyagggcgtggacatatttgagggggggccatgattctgcctaccacactgatgatgatgatgctaatgaagatgatgaggaaaattagctgctgttagtat

SEQ ID NO: 130350 - DNA, 201 bp, Homo sapiens
ctgctttctgttgtgggcatttagtgctataaatttccctctacacactgctttgaatgcgtcccagagattctggtatgttgtgtctttgttctcattgrtttcaaagaacatctttatttctgccttcattttgttattggtatgttgtgtctttgttctcattggtttcaaagaacatctttatttctgccttcattt

SEQ ID NO: 130351 - DNA, 201 bp, Homo sapiens
gtatttgataaggtaccacagcataatgattaaatacagaagctctggaaccagccttgcctgcgtttaaattctggctatcacttaccacatgatctcgrgcatgttattcagtaagctgccactcagttacctctatgaaatcaaacagtggtatatactttatggatctcttgtgagtattaaatgtgttatgacatg

SEQ ID NO: 130352 - DNA, 201 bp, Homo sapiens; identical to SEQ ID NO: 22609

SEQ ID NO: 130353 - DNA, 201 bp, Homo sapiens
atttcaataggattttggggaacagatggtgttttgttacatggtgatttccgagattttggtgtacccatcaccccagcagtgtacactgtacccaatgkgtattctcccccaatgactccactgcgtaaccaagattgagaactgttactttagagcaaaattttaaagggtaagactagtttagacatcatcacaaat

SEQ ID NO: 130354 - DNA, 201 bp, Homo sapiens
tgagatcacgccagtgcactccagcctggccaacagagtaagattctgtctcaaaaaaaaaaaaaaattgttattttttttttttttcaaatcagtggttracttcattacatttgcctggaaaatagactggtaacaagtgaaaaactacctgaagaagccagttcaacttagagtgaatccaaaagggcagtggggcca

SEQ ID NO: 130355 - DNA, 201 bp, Homo sapiens
ctgtagctaatctcaaattctgtttttaattatttttgagtttgggcatgaataaatattccctacatattcctttgttaaggatatggtttgtaatgccmtgtgtttgagggaattatgaggagagtaggcccatttatttgagagtgatattttctgtcacaggctcaagaaccctaagccatgggagcggaagtctgg

SEQ ID NO: 130356 - DNA, 201 bp, Homo sapiens
gcaactgcacttatgcatttagtttctctctctctctctctctctctctctcacacacacacacacacacacacacacacacacacacacacacacacatmttaaagatctgagagtatttgtttcggacaatcccttttagcagtaggagggtggtgatgagggaagctttatttcaaaatgctaatactgtaaagttat

SEQ ID NO: 130357 - DNA, 201 bp, Homo sapiens
agtgagatcctgtctcaaaaaaaaaaccaaaccaaaacaaaacaaaacaaaaaaaccctaaaacaaaaacaagaaactttctgagtaccaacatgatgctyaaaggaaatgctcattcgagcattttggattttggatttttggatttgggatgcccaacctgcataaactttaaagaatccttaaataaagttatatgct

SEQ ID NO: 130358 - DNA, 201 bp, Homo sapiens
ccatctaccaaggatagacggtatatttctttgaggcagctgaaacccagcaactgcacttatgcatttagtttctctctctctctctctctctctctctcacacacacacacacacacacacacacacacacacacacacacacacatattaaagatctgagagtatttgtttcggacaatcccttttagcagtaggagg

SEQ ID NO: 130359 - DNA, 201 bp, Homo sapiens
gattttggatttttggatttgggatgcccaacctgcataaactttaaagaatccttaaataaagttatatgctgctaaaactaactgcctccttgccacaytcctaataaggttctacatcttgcagaaatttttaaaagcctgatttagggtgtcagacctgggttcaaaatcttcgtcttctactcaaaagcaatctga

SEQ ID NO: 130360 - DNA, 201 bp, Homo sapiens
ttctcagaccagcaagggctttctgttcttacagtttggctagaaacctatacagccttccaatgagcacatgcttctgcaatgtggaaaatgcacttacrcgtagaaagtgaaccagatggtgcacatgagggaagaagagagctcagctggctgtttcttgtgttcctttgggtatcagagttgggagcctgcatattc

SEQ ID NO: 130361 - DNA, 201 bp, Homo sapiens
cccatctaccaaggatagacggtatatttctttgaggcagctgaaacccagcaactgcacttatgcatttagtttctctctctctctctctctctctctctcacacacacacacacacacacacacacacacacacacacacacacacatattaaagatctgagagtatttgtttcggacaatcccttttagcagtaggag

SEQ ID NO: 130362 - DNA, 201 bp, Homo sapiens
gaggaaaatcaaacaactatcaaaaagaccagtcaagtcattgtagaccatgacaaaagaccctcagtaggaaaggaaaaaatgcctaacaccaagaaacrtgaaagtaaaaagctctgaatttggtaaaagtgaagtaatttctataaatgagtcatattgtatctaggaaattaggaaaatttcagaaaagttttttta

SEQ ID NO: 130363 - DNA, 201 bp, Homo sapiens
tcccatctaccaaggatagacggtatatttctttgaggcagctgaaacccagcaactgcacttatgcatttagtttctctctctctctctctctctctctctcacacacacacacacacacacacacacacacacacacacacacacacatattaaagatctgagagtatttgtttcggacaatcccttttagcagtagga

SEQ ID NO: 130364 - DNA, 201 bp, Homo sapiens
tgaaagtgaattacaaagaaatcctctcttaaaagttgctcctttcatttggttttattctacagattgcttctttacctccttctttgtgtcaagaaccwtattaaactatgtgaattcctctctgttgcatctttaagagagagttgaggtctcacttcctcccagctatcctctccaccacccgccatctcctcagac

SEQ ID NO: 130365 - DNA, 201 bp, Homo sapiens
ctcccatctaccaaggatagacggtatatttctttgaggcagctgaaacccagcaactgcacttatgcatttagtttctctctctctctctctctctctctctcacacacacacacacacacacacacacacacacacacacacacacacatattaaagatctgagagtatttgtttcggacaatcccttttagcagtagg

SEQ ID NO: 130366 - DNA, 201 bp, Homo sapiens
agaaccatattaaactatgtgaattcctctctgttgcatctttaagagagagttgaggtctcacttcctcccagctatcctctccaccacccgccatctcytcagactgagacaagttcccttctctgctatcacccacacccatacatctgggctctcatagtactgtcatagcatttatcatgctgaattctaagtgtc

SEQ ID NO: 130367 - DNA, 201 bp, Homo sapiens
agttgaggtctcacttcctcccagctatcctctccaccacccgccatctcctcagactgagacaagttcccttctctgctatcacccacacccatacatcygggctctcatagtactgtcatagcatttatcatgctgaattctaagtgtctgtttggttttattttggcattagacagtaagtgccttgcgggtaaggac

SEQ ID NO: 130368 - DNA, 201 bp, Homo sapiens
ctaaacttcctggggaagaacacaggcactactttcaagagctcagagaacaaatgctggaggacaagagagggaattaggattcttgaatgctacttatrctatttacttctggtcttccacaacttcatgtaatttatcatctgcccttattgacttagaagcttacatgatagtatttggttcaatgacattgagtaa

SEQ ID NO: 130369 - DNA, 201 bp, Homo sapiens
tttgcaacctactcatctgacaaagggctaatatccagaatctacaatgaactcaaacaaatttacaagaaaaaaacaaacaaccccatcaaaaagtgggygaaggatatgaacagacacttctcaaaagaagacatttatgcagtgaaaacacacatgaaaaaatgctcatcatcactggccatcagagaaatgcaaatc

SEQ ID NO: 130370 - DNA, 201 bp, Homo sapiens
caatttcagcaaagtctcaggatacaaaatcaatgtgcaaaaatcacgagcattcttatactccaataatagacaaacagagagccaaatcatgagtgaaytcccattcacaattgcttcaaagagaataaaatacctaggaatccaacttacaagggacgtgaaggacctcttcaaggagaactacaaaccactgctcaa

SEQ ID NO: 130371 - DNA, 201 bp, Homo sapiens
tctgactcctctaattcattaagatatttccttctagagcttcctaacactgtgcctgggcatctcgacagctttgaaatttcagatcagttttttatagyggcatcctaaatgcttcaagattaaggcatgactctctggatagcaagaaaaaaaaatgtctctctcctttatcactccctcctcccttttgtttttctc

SEQ ID NO: 130372 - DNA, 201 bp, Homo sapiens
ctctaccagggtgtgtactcttcatacaaccatggacctgccttctgttaacaggattctgtattgggagagcaaacccttaaaagcagggataaagataytaagaggtcttcctgtcttttactaaggtctgaaatgccaccaattctagcaattgatttatctggatcccctaagaccttctattagagtgtgaatatc

SEQ ID NO: 130373 - DNA, 201 bp, Homo sapiens
gtatacattaaattgttcatagtattttcttattatccttttattttattgatataaagttggtaatgatgtcccttcctgtattcccaatcttggtaatytgagtcttctcccctttttttcttcatcaatctagctaaagtttggtcaactttggtgatcttttttaagaacctacttttgtttttgttgtatctctat

SEQ ID NO: 130374 - DNA, 201 bp, Homo sapiens
tagagatgcatttgatttttgtactcgagaatcagcttgtgagaagtattggcccctgtaaatagagataaactaagccaaatttgtctgtaggccttgcrttttaaaatcacacctgaaagtgttatgagcctgatataattgcatttgcaaataaaatgcaagaaggtctagggctcagagtacaattaaatgtattaa

SEQ ID NO: 130375 - DNA, 201 bp, Homo sapiens
cccttcctgtattcccaatcttggtaatctgagtcttctcccctttttttcttcatcaatctagctaaagtttggtcaactttggtgatcttttttaagarcctacttttgtttttgttgtatctctatttttgtatcatttatttatgctctaatctttattattttctttcttctttggggtttagtttgctcttattt

SEQ ID NO: 130376 - DNA, 201 bp, Homo sapiens
tatttttaaatgtatactttgaagttatactgaatttatgacattctcagcattttcctatatctacaagcatttgggattactctgttgtattctgtggrttggcgatcagtgcatcattgctggtgcccactggctctttattgggggaacccacccctgataattcttcgtgggttcttttctatttacctaagtgtc

SEQ ID NO: 130377 - DNA, 201 bp, Homo sapiens
acagagatcacttgctttaagggcaacaaaagatcacaagacaggaggttagggcgagatcacaaggtcagggcaaaactagaatcactaatgaacttccrtgtcccgctgtgtatgcattgtcattgataaacattttaccagagttcaagagcagagaactggtctgactagaatttgccaggctggaatttcctaatc

SEQ ID NO: 130378 - DNA, 201 bp, Homo sapiens
agggcgagatcacaaggtcagggcaaaactagaatcactaatgaacttccatgtcccgctgtgtatgcattgtcattgataaacattttaccagagttcargagcagagaactggtctgactagaatttgccaggctggaatttcctaatcctagcaagccttggggcactgcaggagactagggcatgtttcatccctat

SEQ ID NO: 130379 - DNA, 201 bp, Homo sapiens
taatactaatgatagctgatgagctaaaaaaaaaaaaaaagaaaaaaatcacaaaaaaatctcacagtgttttaagaaaatttaccaatttgtgttaggcygcattcaaagtcgtcctgggctggtgggccacagattggacaagtttggctggaacaaaggtgaagaaataaattcagggaagagacattgagttctttc

SEQ ID NO: 130380 - DNA, 201 bp, Homo sapiens
gagtatttttttttcctactcctctgtttgtgggcaactttctgtgtggaataggaccacgtatccacacaggaaaataacaaggtgggatttggagtggrgagaccattgggcttctttcctttgcctttgaaagtgccactttcttgtcatactgggcaatttccatgcaattcttaaaagttcattttaattttattc

SEQ ID NO: 130381 - DNA, 201 bp, Homo sapiens
ttcaccttgttagtcaggatggtctcgatctcctgacctcgtgatccacctgcctcagcctcccaaagtgctgggattataggcgtgagccaccgcgcccrgccccctaccttctttcctttatgccattaggagaatgtgccacttgtaattacttctcttaccatcccagtcattcattcatttaatatgtatcaagca

SEQ ID NO: 130382 - DNA, 201 bp, Homo sapiens
gagaaagagtgaaaaatacacaaagtgttaactggcaagtcaggagctcattaggcctaaccttgttcttaactcagactcttcatcataaacccattttratgaaaagaaattcggaaactaatttttccccacaacaaatagaaagttagtattggttttagctgggcaaatgtagtgatatttctcccttccttaatg

SEQ ID NO: 130383 - DNA, 201 bp, Homo sapiens
ctagatcctgttctagacagtgtggatttagcagtgaacagaattcctacactcaacgacctatattctaatggagggggcacattaaacaacaagtaaayatatagtctgtctgatggtgtcaagggctccagaataaaagatgagcggggcaaggaatgccaggacataagtaggttactattgtgcacagtgcaatca

SEQ ID NO: 130384 - DNA, 201 bp, Homo sapiens
catgtagagttctcactcataggacattaagcctggttttaaagcacccattccccatccttttctgccatcgtgcctacattggactaagtgtcagggaracccacatagatgaaaaagcttctgtcctacctgctagttgctcataaactagtgggaaggcaaataggtgactagatagagacactttgaagtggttga

SEQ ID NO: 130385 - DNA, 201 bp, Homo sapiens
aacaaaaggaagcagatggtaagggacccacgatgaagtaataaggcatccagctggcatcattgcacaggaaattgcagatttaggattagcacttagayagtggaatccctgtatggatttggaagttacaaagccaggactttatatctcaaagcatcctgccttaggttgggctgctataatgaaagaccatagatg

SEQ ID NO: 130386 - DNA, 201 bp, Homo sapiens
agttcattccttctattaggatcctaacacatcttttgggaagcaggatgaaaattctacttttcttttggatttgatattccacctaataaggggatttrgagagagctttagaaattaaataaaatagctagaagttattgaggatttactatgtgcaaggcactatgctaagtgcctgcaggtcttctcatttaatca

SEQ ID NO: 130387 - DNA, 201 bp, Homo sapiens
acagtgggatctaaaaatctaaacaaaaagaggttaaagggacagatctgatgtatttcagaggagcaagagtagaaaggtgatacattatcaaaaaggtyttcatgcacatgaagtgttctattccagacttaggggattagctgttcttcatctctgctaagggcaaaataaaaggaaattattttgagacagaagcat

SEQ ID NO: 130388 - DNA, 201 bp, Homo sapiens
tatatagtacctcatggcctatcaaagagaaaaatctccagagtaaagggagcacttgtgtaatagggtattcttctccatataggacagagataggtcakttatggtacttttgcaaagtgaacctgaaattacaagctaaattctgacttatatctaatgataggaaacaattcgcatttagatttcctttctggtatg

SEQ ID NO: 130389 - DNA, 201 bp, Homo sapiens
attctaagtgtctgtttggttttattttggcattagacagtaagtgccttgcgggtaaggactatattttattcatctttatttctccagaaaacaccgartactttgtacatagtaggcactgaatgagggaacaaggaacacagaaccatttagtcactacacacacacacacacacacacacacacacaaccatcctg

SEQ ID NO: 130390 - DNA, 201 bp, Homo sapiens
tatacctaatcattgaaatcagcttctagaattataaatatggaaactgcttgttgttatcaaacaagaaatggtcatgaccatttacaacagccgctgcyctacaactctgatttaccagtcactaaaacccctgtttataagtgtcacatttatatgcgcagaattgaacttctcattccagtttatactgccagtgag

SEQ ID NO: 130391 - DNA, 201 bp, Homo sapiens
catagtctttattttgtccctccaagtgagtttataagtgactgtgttctgtttggatggaaaatatcatctggaaataatttatgagtaactgcagaacytgccaatggcatgctttacaagggcttatttcattcacttccacgtatatcccataatttcctgattttctcaggttcttttgtgtaaataccaaattga

SEQ ID NO: 130392 - DNA, 201 bp, Homo sapiens
aattcccatctggatgctgattagattcctgctgacggctgggcacggtggctcacacctgtaatcccagcactttgggaggccaaggcgggcagatcacraggtcaggagatcaagaccatcctggctaacacggtgaaaccccatctctgctaaaaatacaaaaaattagccgggcgtggtggcaggcacctgtagtcc

SEQ ID NO: 130393 - DNA, 201 bp, Homo sapiens
gcccaaaaccttggttgatagatttgtaaaaagacctttatcttgagaatattgttgctttgtgaatttccacagtctccttgaaattcaaaagctgagcrtaactatttctttttctttgcatttcagccatagcaatcctaatagcccctaggacaatgagtgtctcaggctgaatggaagagggtcatatacatgcaa

SEQ ID NO: 130394 - DNA, 201 bp, Homo sapiens
aagttgaagaacattttaatttcaaaatagtattcatgagaatcagatgacacatctatactttaactctggtgaagtgtgaaaattaaatgaacactccrtcagattctgaaagttgaattatgacccccacctccctcactaaagagatattttttcatatttagggtggcatacctcatttgtggaaaaggtctttct

SEQ ID NO: 130395 - DNA, 201 bp, Homo sapiens
catctaactctgcctgttaatcacagaggaataaatcatggcatctgcagagtagagcctctaccagggtgtgtactcttcatacaaccatggacctgccytctgttaacaggattctgtattgggagagcaaacccttaaaagcagggataaagatactaagaggtcttcctgtcttttactaaggtctgaaatgccacc

SEQ ID NO: 130396 - DNA, 201 bp, Homo sapiens
ctggggaagagccaaagtatacctaaatctagaattaaactatatagcactagggtttaaaataatagaatttgtcatcaagttgactgcctcatattcakccagtgtcaaactcaatagttgatatgtttgcttatgcaaaaatatcagagaggaaaagaaaattttaatttgtaatggatctatttctcataaaatgtc

SEQ ID NO: 130397 - DNA, 201 bp, Homo sapiens
tcacaagcatggtgtaagagtgcttttactgtggaagtttgactttaaaatggcctaccaagaaggaatatgcatcctcgttacatttggaactataaaaataaatacagtgttgttcacacaaacaaataatttttgctggatagttgtttatcagtttcctggagccttgttttataaatactcataaacttggagaaa

SEQ ID NO: 130398 - DNA, 201 bp, Homo sapiens
cttgtgatttgaatcgtaattagtattaatttaatagtctcttcacagagttagactaatatgtcaggtgacacagtgtcttagcccagccacacacattratatgactctgatgatggcctgcctctcagtgaagtcagagcagggggtacaaggactcaggcaatagacaagagagaaaagaaagattaaagcttactg

SEQ ID NO: 130399 - DNA, 201 bp, Homo sapiens
atgtttggctattagcctatttgaatgtatccactgtctaactgtaaaagttttgagttttggttagtctttctactcaaatggccccataatggttacaatcaagtcttcaagaaactttgttgttggttttcttttttaagtagtaggctatatttatattatgttttatttatgatcacaagcatggtgtaagagtgc

SEQ ID NO: 130400 - DNA, 201 bp, Homo sapiens
ctatgccatggcattgattattagaagaaagactcgtaaaaacctctaggcaggtcagattttggcagacttaaagattatgcagacaagagtaggggtcrgggagtcttatctgagagctgccgggtactttatgtgtgtttcaggacagggctgaccacagtgttggctgtggaaggtgggggctggaaacctctgctg

SEQ ID NO: 130401 - DNA, 201 bp, Homo sapiens
gggaaagggagagggataaaggtggataagttataccacttgttctctaggcgtctatattccaatggaagagacaagtcaaagggaaatgataatgtattaggaattatggatagatatataatactgtaaattatatatttatgcttttgtattgtatttatttatattgatacctatatttatcttggtaaaattctg

SEQ ID NO: 130402 - DNA, 201 bp, Homo sapiens
gtaaaaacctctaggcaggtcagattttggcagacttaaagattatgcagacaagagtaggggtcagggagtcttatctgagagctgccgggtactttatstgtgtttcaggacagggctgaccacagtgttggctgtggaaggtgggggctggaaacctctgctgacagtgatcttatctttcccatgtgatagtttcat

SEQ ID NO: 130403 - DNA, 201 bp, Homo sapiens
ggggaaagggagagggataaaggtggataagttataccacttgttctctaggcgtctatattccaatggaagagacaagtcaaagggaaatgataatgtattaggaattatggatagatatataatactgtaaattatatatttatgcttttgtattgtatttatttatattgatacctatatttatcttggtaaaattct

SEQ ID NO: 130404 - DNA, 201 bp, Homo sapiens
cctgcctgatctgatgagctttgagaatcgagtgccagaatgggtaagaaaacacttcacgactcataaaacagaccagaagtgtaaggtttcattgtcawctttattgttatacaaaggggtactatgaagaatcatagtaatcttgggcgttaatttaatagaaagcccgggagcacagggtcaccaacagcccagatt

SEQ ID NO: 130405 - DNA, 201 bp, Homo sapiens
aaggaaaacaataattattagtccaacacaaaaacatgcccattttgctgaagtacatattgagttcagaagtggacacagattgtcctcataatgaccaytgtaatgtacctttattgcttcacaaggtgccatggctttggatggtgtggtgaggatggaagccctacccatatgttatttgcactggaccagaatctt

SEQ ID NO: 130406 - DNA, 201 bp, Homo sapiens
gggggaaagggagagggataaaggtggataagttataccacttgttctctaggcgtctatattccaatggaagagacaagtcaaagggaaatgataatgtattaggaattatggatagatatataatactgtaaattatatatttatgcttttgtattgtatttatttatattgatacctatatttatcttggtaaaattc

SEQ ID NO: 130407 - DNA, 201 bp, Homo sapiens
tcttcagcacattctatgtgcctgtactcttttattcattctacatgtaggaactcatttaatcctcacaaccaccctataaagaaggaaccattaatatktccatttttatagatgaagagactgaggttaagtaacttgctcaaggacacagtacttgaaaacggccgcgtgtggtttctactgcagacagtctgatcc

SEQ ID NO: 130408 - DNA, 201 bp, Homo sapiens
tgggggaaagggagagggataaaggtggataagttataccacttgttctctaggcgtctatattccaatggaagagacaagtcaaagggaaatgataatgtattaggaattatggatagatatataatactgtaaattatatatttatgcttttgtattgtatttatttatattgatacctatatttatcttggtaaaatt

SEQ ID NO: 130409 - DNA, 201 bp, Homo sapiens
tcctgaggcctgagttttacacaatttagagaaccctctttaggaaaaaaataaaaaataggtacaaaatgatttctttagaatgagaaaagaaatcacartaaattacaaattgtaaagagttaaccactaccactgaacctagaaaaataacatttgtattaattaattgcctgatatatgctatagtctgacatctgc

SEQ ID NO: 130410 - DNA, 201 bp, Homo sapiens
ttctgtgggttggcgatcagtgcatcattgctggtgcccactggctctttattgggggaacccacccctgataattcttcgtgggttcttttctatttacmtaagtgtcagccagtctgagaaataaagggaaagagtacaaagagagaaattttaaagctgggtgtccgggggagacatcacatgtcagcaggttccatg

SEQ ID NO: 130411 - DNA, 201 bp, Homo sapiens
tacatgaaaattgaaacaagaaaatacctgggagctgcctgataaaagtgtatttgtgagaaggtttatgaggtggtgatgtcaaataagaacttggatgyggaagcctctggtgagtcctggctccaccctttatttagctgtaacctcgatcaagttctgtaaatttgccttgtctttccaatggttgggttgctgtga

SEQ ID NO: 130412 - DNA, 201 bp, Homo sapiens
gtgggggaaagggagagggataaaggtggataagttataccacttgttctctaggcgtctatattccaatggaagagacaagtcaaagggaaatgataatgtattaggaattatggatagatatataatactgtaaattatatatttatgcttttgtattgtatttatttatattgatacctatatttatcttggtaaaat

SEQ ID NO: 130413 - DNA, 201 bp, Homo sapiens
aaaatgatttctttagaatgagaaaagaaatcacaataaattacaaattgtaaagagttaaccactaccactgaacctagaaaaataacatttgtattaawtaattgcctgatatatgctatagtctgacatctgctacagtttttcccacatctttggcagcatgttctttggttacttcttcatagaacagtgagtttg

SEQ ID NO: 130414 - DNA, 201 bp, Homo sapiens
ctattctggacataggctctggcaaagatttcttaatgaagacaccaaaagtaattgcaacaaaaagaaagattgacaaatgggacctaattaaattaaakaactctgcacagtgaaagaaactatccatagagtaaaccaacagcccacagaatgggagaaaatatttgcaaactatgcatctagcaaaggctaatatcc

SEQ ID NO: 130415 - DNA, 201 bp, Homo sapiens
agaaaataagttctatcccaaaacatgtaacaagagcaagcctggcctgatcaggggattgagcttctgatttgataaaagcttcctcaccccttcagttraaagtggtttccttcagatagcttcctggaaacttctgggctgtgcacattagtccctttcaattcaggcactgaaatgctagcaaaatgaaggtatgtt

SEQ ID NO: 130416 - DNA, 201 bp, Homo sapiens
aaagcctggaacctcctagagacttgttgaatggctttgacaaaaatgctgacaatgatatgaacaataaggtccaagatgaggtggtctcagatggagaygaggaacttgctgggaactggagcaaaggtgatttttattatgttttagcaaagagactggtggcattttgcctccgccctagagatttgtggaactttg

SEQ ID NO: 130417 - DNA, 201 bp, Homo sapiens
tcattggccttagaggcagccagattctagtctgaatactagctttccccccaacaggcctgggaagccttgctaacaagaactatacgtgaaaataatgkcaaactacatatatatttcactatacccaaacttgatgtatccttgacttaagttcctcttagatcccagccagaggccaatttagcatcagtgtatata

SEQ ID NO: 130418 - DNA, 201 bp, Homo sapiens
ataatagcttattcataactatttggaggcctttcttaagtccagaaaggtcagagggaaattgaataaatgtcaacactgtcaggtggggagactctcarcgtctcctgaggaatttaatttatattaatgagaagtgagacctgcttagggccctctcagagactgctctggtgtcaaattttaatgatttaacttcat

SEQ ID NO: 130419 - DNA, 201 bp, Homo sapiens
agatacattttttaatcctttagagtttgagggtaggttttgatcgaaataataagataaggaaaatgggccacatagctgaacaatgtttgataatttgrcaaaattatattttattgcaattacagggtaagatctagaaaagagaggtaagttattttttatgtacaaaaacatccatctgcaattagggaagccatc

SEQ ID NO: 130420 - DNA, 201 bp, Homo sapiens
aaaattatattttattgcaattacagggtaagatctagaaaagagaggtaagttattttttatgtacaaaaacatccatctgcaattagggaagccatcayacagaaagtgggatttgagtgatattttcacactctggcatgcttggtgctaccacatgaatatagtgtcagattgaatatgaattagatgactgataaa

SEQ ID NO: 130421 - DNA, 201 bp, Homo sapiens
tctaatggcggttctattagaatttaattacatcacttattatctcttcttgaagagaagcttttttggctccctggaaacttgcaaataagtttaatacsttttcctcacagagattttggaggggtcatcgtgatggtggtggatattccctaaaatatggagagatgaatagttttcaggcttactgttaaattttca

SEQ ID NO: 130422 - DNA, 201 bp, Homo sapiens
gtctcaccctgtcactcaggctggagtgcaatggcggcatctcagctcactgcaacctccacctcccggggctcaagcagtccacccacctcagcctcctsagtagctgggaccacaggtgcgtgccatcacgcctggctgtttttttgtatttttagtagagacatggtcttgccatgttgcccaggctggtcttgatct

SEQ ID NO: 130423 - DNA, 201 bp, Homo sapiens
cggggctcaagcagtccacccacctcagcctcctgagtagctgggaccacaggtgcgtgccatcacgcctggctgtttttttgtatttttagtagagacakggtcttgccatgttgcccaggctggtcttgatctcctcagctcaaatgatccgcccacctcagcctcccaaaatcctaggattatgggagtgagccactg

SEQ ID NO: 130424 - DNA, 201 bp, Homo sapiens
gataccctttcaaaccttgtttgcatagttatgcaacactgccggtgatgctgagttcctttcccttctgctatattttgctgcagctttccaggattcaragtcccacttgcagtcctcggcaggaggggtcaggtcagtgttcttaccatgcctgggatggtcaagaggaaatcattgtgttttcacagtgctttgcca

SEQ ID NO: 130425 - DNA, 201 bp, Homo sapiens
tctttacatacttacacttaactttctaaacttctgaggtataaaagatacaaccccatttgaggaaggcagttaaaaattcagttaactaaggttacttrtgaccagggatttcagattaagacctagagttgcagagacccagagcactttgtctcatcaccaactaaggaaactaccaaatatcaagtaattcagggc

SEQ ID NO: 130426 - DNA, 201 bp, Homo sapiens
aaaggttggcatgtatgggcaacaggagggaggccttgagcaaggaagggagtggtgtgacatgatattagacaaattagctaggggccaggtcatgcagsacttgccaccattgtttctcacctggactactgaaatagcccgggggctaaaatgacagtggttgggactggagtcaatgctgtgagaacaaactggaag

SEQ ID NO: 130427 - DNA, 201 bp, Homo sapiens
aagccattttatataagggacttggccatccgtggattttgctatctatagggggtctagaaccaatcaccagcagatcccaagggacaactgtgtagctwaacagccacactctaaatctctcatcaaattcagatattacagggaacaacaacaacaaaaaattcaactcaaaaagtctcaaacaagaaaggcatttat

SEQ ID NO: 130428 - DNA, 201 bp, Homo sapiens
gcatttctaggccctcctagaaatgaggagcccaccgcacacccccatccttcccacttccaactgggacttcacagaaactcagcaccaagcagaagccwaaagtgtgtatcagttgactgaaacttcaaacgattttgtttctctcctaatccttttaaatgtgatatgtgtttaagagtagcagagacaaagtgattt

SEQ ID NO: 130429 - DNA, 201 bp, Homo sapiens
cagtcttacataggagatgtacagaaagttttagtctccattcctaatcctaggcacacgcacacacacacacacacacacacacacacacacacacacamaattctgaaaccctaatactgtcaaatccccagtgagtttcaattttcaatgacaactatggataaaaatggtcatatttaggagagtaggggggaaaaa

SEQ ID NO: 130430 - DNA, 201 bp, Homo sapiens
gccatcactatggtcaccatggctccttctatccactttaccacgtctgaaatggcacttcactccttgggggtggggagctctcaaaagtgtctctccayagctcttgtctctgcaggcgggctccagagtgtcagccaagggcaggatattctgaagccagccagtgcccacagccatttgtgggtaccctgctcagaa

SEQ ID NO: 130431 - DNA, 201 bp, Homo sapiens
tggatgcccctctgcctttccccagcatcctatgtggacgtcttgggtcaccttttacaatacatggacatacctggctctcctatttgccttgccttccygtcacctctttgaagacaggaacttggttttgttcatctctatgccttgagcatttggcttagtgcctggtataagtaaatatttcagagcaaggttggg

SEQ ID NO: 130432 - DNA, 201 bp, Homo sapiens
tttgactgttaacacctcttacagctatagtgattactagtctagtcacagtcagtggctgacatttctatgactactgactcttttttttttttttttttgagatggagtcttgctctttcaccaggctggagtgcagtggtgtgatcttggctcactgcaacctccacctcccgggttcaagtgattcgcctgcctcag

SEQ ID NO: 130433 - DNA, 201 bp, Homo sapiens
tctaggacttattcttcctctcctatatgacttcagaatcagacaggtgagttttagtgcaatgatttaggcagttattgtcatttctgatagtaatgaasgatatgctctgtgttttaaactaaataataaaatgagtttttaaatcgtcacatagcttcactttgttccttggcttaaattcttgaactagggaagcac

SEQ ID NO: 130434 - DNA, 201 bp, Homo sapiens; identical to SEQ ID NO: 22606

SEQ ID NO: 130435 - DNA, 201 bp, Homo sapiens
cttttgaatggcccctcacacaccacaaagcttgggaattctagattcaaataatttttaggaaagaaggactcctaaatattacctatttgagttgtttsttttttcagaggcctggaaaggtaagatgccttgcccaagatcacaaagccagttagtggcagagctgagttaggaaccctgtaattcccagatactcag

SEQ ID NO: 130436 - DNA, 201 bp, Homo sapiens
aggctggttttgaacccctgacctcaggtgatccacccgtctcagcctcacaaagtgctagggtcacaggcgtgagccaccacgcccagcctatttattawtttttagaaacagagtcttgctctgtcacccatgctggaatgcagtggcgtgatcatagctcatcagagccttgaaatcctgggctcaagtaatcctccc

SEQ ID NO: 130437 - DNA, 201 bp, Homo sapiens; identical to SEQ ID NO: 22607

SEQ ID NO: 130438 - DNA, 201 bp, Homo sapiens
ctccatttttctaagcctaaatttctttatccaccaggagtttgagaccagcctgagcaacttagtgagaccttgtctctacaaaaaaaaaaaaaaaaaaattaaaaattaaaaaaaaaatctatccaggcatggtggtgggcacctgtggtcccagctactctggaggctgaggtaggaggatttcttgagcctgggagt

SEQ ID NO: 130439 - DNA, 201 bp, Homo sapiens
aaagtttgtcaagtaactttgtattcagaagtttgtgaagtatttagattgagtctttatcctagtatgtaggtaatgttaaagatgatttttaaaaaagycactgtgcaaaatttccttgcatatgaacagttaccttggcatggactcttttcttcccactgttacagggtagctaacttcctattctcagtaaagcta

SEQ ID NO: 130440 - DNA, 201 bp, Homo sapiens
gactacaggcataccccactatgcccagctgattattattttttattttttgtacagacagggtatatctttgttgcccagactagtcttgaactcctggyctcaagcaatcctcctgccttggcctcccaaagttccagcattacaggcatgagccagtgcacccagccatagcaacgttgtttttgttttgttttgttt

SEQ ID NO: 130441 - DNA, 201 bp, Homo sapiens
tgttaaattagtagcagtccaaactatcatactcccaaatatgtgttcctaccaaatcatattactggtaaaatagcattctgtggttaaaaaaaaaaaaagtcaaggaatccttacttaaatttctgtttctatcaaataccaatacaggcagaataaaaacttttcctaaagtatctgtcctttgctgaaaccagcttc

SEQ ID NO: 130442 - DNA, 201 bp, Homo sapiens
gttgagaaaattggtagtgctgttacagctttattcttttaagtatctgcagtgttagatgtggtaaaacagaggacacgaacaccattatctctaaaacrgagataatgacaagtgtagcttccactcatatcatcaaaattagggcccaagacactctatccaactaacagaaattcaattcaaactagcttatgcaaa

SEQ ID NO: 130443 - DNA, 201 bp, Homo sapiens
gttctcaaggggaaagggatgatgggcagttaaaaataactgctttaaggagccaaactgagccataacctgactactactatttttataacactaggccrttgaatccctaactcataactgaattgttgatccaggtacggtgtacactggtgttacaacaaggtttttttttttttcttggttttgttttatacatga

SEQ ID NO: 130444 - DNA, 201 bp, Homo sapiens
tttaaccattaccttacagcattcacccctacattccctaatagacattaagaattttttctgtagccaaaagcaaataggaaacatgagttttcagattsacaaccaattaagttaaaattagggaaatggagaggagaaaaattgagaaatgatacagggtgaagagttcaaaaaacaagccttttgggaaggagttat

SEQ ID NO: 130445 - DNA, 201 bp, Homo sapiens
gaaataattttgtttttgagggtaggtaccaggtgccattgaagcagcatcattgtctggtgtaaatacctgaggtttgttgtctcatgccaaggaaataagagtatgcggacacatgagaagtgggtttaggagcataggtttaataggcaaaagaaagagaaaggagaacagctctctctcctacgagagagaggctcc

SEQ ID NO: 130446 - DNA, 201 bp, Homo sapiens
gacatttccacattccaattttcacattaaaaatgacataatgaaagtgccccaagttgtattgaaatgaccacaagcaccatacttaggtataacaggakttcacctgggactcactaatccagttgtttacagccagactctgttctaattgattagcacctgtgtctcactagttgttaatgtttttattaacactct

SEQ ID NO: 130447 - DNA, 201 bp, Homo sapiens
tgtaacagtgggatctaaaaatctaaacaaaaagaggttaaagggacagatctgatgtatttcagaggagcaagagtagaaaggtgatacattatcaaaaaggtcttcatgcacatgaagtgttctattccagacttaggggattagctgttcttcatctctgctaagggcaaaataaaaggaaattattttgagacagaa

SEQ ID NO: 130448 - DNA, 201 bp, Homo sapiens
gagtacagtggtgcaatctctacttactgcaacctccaccttcccgggttcacgtgattcttgtgcctcagcctcccgagtagttgggactacaggtgtgygccaccatgcccagctaatttttgtatttttagtagagactgggtttttccattggccaggctggtcttggacttctggcctcaagtaattcgcccccca

SEQ ID NO: 130449 - DNA, 201 bp, Homo sapiens
tgttagagaagaaatgatttgggggttgcttttcattaaaagggaaaccttatcgaggacttccttaacctcactatctgcctaaataatttctttttaaytcctataatcaccatctccaccctgcaggccatcacacattggcccagttggagtgcatacagataattcagctcacacatgcactggcatatgcaaaca

SEQ ID NO: 130450 - DNA, 201 bp, Homo sapiens
atgtaacagtgggatctaaaaatctaaacaaaaagaggttaaagggacagatctgatgtatttcagaggagcaagagtagaaaggtgatacattatcaaaaaggtcttcatgcacatgaagtgttctattccagacttaggggattagctgttcttcatctctgctaagggcaaaataaaaggaaattattttgagacaga

SEQ ID NO: 130451 - DNA, 201 bp, Homo sapiens
tcactagctaccagtgccctcacattctctttcttctccatcctattaggattaggattggaaaagatctgtgatccactcataactaagtatgaatttamtacaaaccctccctaaagtgtttacattttaaggatctttcttttttttaattcattattattatactttaggttttagggtacaggtgcacaaggtgca

SEQ ID NO: 130452 - DNA, 201 bp, Homo sapiens
tatgtaacagtgggatctaaaaatctaaacaaaaagaggttaaagggacagatctgatgtatttcagaggagcaagagtagaaaggtgatacattatcaaaaaggtcttcatgcacatgaagtgttctattccagacttaggggattagctgttcttcatctctgctaagggcaaaataaaaggaaattattttgagacag

SEQ ID NO: 130453 - DNA, 201 bp, Homo sapiens
ttcttttttttaattcattattattatactttaggttttagggtacaggtgcacaaggtgcaggttagttacatatgtatacatgtgacatgctggtgcgstgcacccactaactcgtcatctagcattaggtatatctcccaatgctatccctcccccctcccccaaccccacaacagtccccagagtgtgatgttcccc

SEQ ID NO: 130454 - DNA, 201 bp, Homo sapiens
aacaattacatttggtaaataagttcttattaagtgtttcttttagttgttgtgcttttgtttattgagagaaattgaaatttttaaattttgcacctttrttgcaggctgccacaggtaatcaagatgatatgcaccatggtaaacaatttctttggaaatccaagatatttcttgaactcggggattcaggaactgaag

SEQ ID NO: 130455 - DNA, 201 bp, Homo sapiens
gtatgtaacagtgggatctaaaaatctaaacaaaaagaggttaaagggacagatctgatgtatttcagaggagcaagagtagaaaggtgatacattatcaaaaaggtcttcatgcacatgaagtgttctattccagacttaggggattagctgttcttcatctctgctaagggcaaaataaaaggaaattattttgagaca

SEQ ID NO: 130456 - DNA, 201 bp, Homo sapiens
agaaatagcaggggaagaagggcagtgagtacactggctccagagatgagggctggaatctggtgtcaaattctggctctgaaacttactaccttggatcktggacaagttacgcaaggtctctatgcattggttttctcatctgtaaaatggagataatattgtctacctcacagagctgttctcagctttaaataagct

SEQ ID NO: 130457 - DNA, 201 bp, Homo sapiens
ggcatggtggtgggcgcctgtaatcccagctgctcaggaggctgaggcaggaatccctcacttgaacccaggaggcagaggttacagtgagccgagaccaygccactgcactcctgctggggaaacagagtgagactctgtctcaaaaaaaaaaaaaagaaaattgacaaggagatagaagtgtcttggtgtcttgtgcag

SEQ ID NO: 130458 - DNA, 201 bp, Homo sapiens
gcactactgaattctactttagaggaattgatttactagaaaacaatgggcctctggaaactcagcactcccatatactctgcattgagttactagaagtycttttaatacagagtctctgtgtgggcacaactacaatgctacaatggctggagcaccatattgtgggtggccacgtgggggtggtcattttccctaatg

SEQ ID NO: 130459 - DNA, 201 bp, Homo sapiens
atagtgctttcagtgcattactgtaataaaaataatggtctagatgctaaaatgtaacacatctgctatgatatagctcatttgaggataatagaaaaatrtcgataaaaatattctttttgtcatcttcaacgtgcatgatctcagatttcaaaaaggatgcctgcctacatatctcttcttccagtacactctgcaatc

SEQ ID NO: 130460 - DNA, 201 bp, Homo sapiens
aatttaaatccagaaaagagaaaaagctcattactgacaagtttgctaatgataaaaaattagatggcagtaaataacattaggcaataacattaaagttmaaaaatgccatgttgaagttattagacttgtaagtacaatgatacatacaaatgaaggagaccgggtttaaagtgcagtaccaggaataaaacagagatt

SEQ ID NO: 130461 - DNA, 201 bp, Homo sapiens
ttgaccacctggaaaactttgtcctgttccttgccctaatgcctttgtgccctccctctccccagctgcacatgcacacttgcacgcgaatccttctcackcacaggagtcacccaccgatggaattttctctgggaaaaactggttgagctgcccttcctttgagctccctttgcttataatatcatggcactaacaacc

SEQ ID NO: 130462 - DNA, 201 bp, Homo sapiens
tctttttgtcatcttcaacgtgcatgatctcagatttcaaaaaggatgcctgcctacatatctcttcttccagtacactctgcaatctacttaaaaaaaawtttttttaagatagctgctagatgagtgccagttttatattcttttttttttctggcaactcctttgagaaacatatgtttctaacttaagttactgctt

SEQ ID NO: 130463 - DNA, 201 bp, Homo sapiens
caggcacccatctttgctgttctgcagcctttttgagtgacacctccaggcacaggagcgaaccagatgaatacggcctgaagtgaatccccagcaaaccrcagcagccctacagaagagggacctgaccattgaaagaaagacaacagaaagccacaacatctgcatcaacaacaacaaaaagtccccacaaaaacccca

SEQ ID NO: 130464 - DNA, 201 bp, Homo sapiens
tcaaaatcatggaaacagaaagttaaatgatgggtgccagaggctgagggaagggggaataggcagttgttgtttgatggggatagagtttcagttttggkagatgaaaaaattctaaagatctgttatacaaccatgtgaatatagttaacactaatgaactgtgcacttaaaaatgactaagagggtgaactatatatt

SEQ ID NO: 130465 - DNA, 201 bp, Homo sapiens
gaataagtctttaagagaagaatgcttgctcatcgactgggtattcatttggagaagattgtgttttccagtttcttagaagataatatttggagtattakctgaacaaaacataatgcacttctttttttttcttcttctttatgcttatcttgccaagtcatgaaagagccaatttgaaatatttcaactgatatttct

SEQ ID NO: 130466 - DNA, 201 bp, Homo sapiens
tttctgtgttccctcctatcttaatttctctccctaaaggctgtttagcacctaacataactcatgcattaaataaatatattaatttatctcgggattcwtgcgtatttttgcattactttgtaaaatgtgtttttctagtatttcatgtgtgttttgtttgcatattaaaattgcagtttcctttatggtaaaggcttg

SEQ ID NO: 130467 - DNA, 201 bp, Homo sapiens
gctttaagtgtgaaacacataatttgccattttggcgtgtgaattatgattgggtttgagctgtttacttttctgaaataatggcatgaaagaaaattaargaccaagaatagttccatttgccagtagaaaaccagacttttattctctatctgaaattgtgaaaggaagatctgtatgcaagaaagaattaggaactgt

SEQ ID NO: 130468 - DNA, 201 bp, Homo sapiens
aattgtgaaaggaagatctgtatgcaagaaagaattaggaactgtcaaaacattttttcccaagctatctgaaagtacttgatttttgcatagtgtcaaastattgagcttctatggtataaagcattgaaccagatgtgggggaacacaatagtgtgtaagatacagtccttatttccaccagttggaggagctaaagta

SEQ ID NO: 130469 - DNA, 201 bp, Homo sapiens
ctgctccagtgatgggtgcaccaaaatctcagaaatcaccactaaagaacttacttatataaccaaaaaccacctgttccccaaaaactactgaaataaawtttttaaaaaccaaatacactttaaagacaattttaaaaaattacaatagtaagaacatggaaacaatacaaaaatgtggaatgtagaaagtattgtctg

SEQ ID NO: 130470 - DNA, 201 bp, Homo sapiens
actcttagaggtctgtgattctatttgaagatcaccttactgggtccagtggatactaaaaatgacgatgacaaggacatgcttgtctggagggttggttycacagtgctttgagctttctctatagcacctgagggtaagtaaaaagtctaaggggagaatttctaatggagttctctctctctgactgttttatctgca

SEQ ID NO: 130471 - DNA, 201 bp, Homo sapiens
gagatggggtttcaccttggtcagccttgtctcaaactcctgacctcatgatccgcctgtctggacctcccaaagtgatgggattataggcgtgagccacygctcctggccaggatttttaagtgtagtagaaactagtataagcactaatgcttcagatttctcagacttgccttcatgttttggtttgggatatttggg

SEQ ID NO: 130472 - DNA, 201 bp, Homo sapiens
cagtagactgaaacatgactgtgccactgatatgtgcaagttcttcataaaacctcattaccagggcctggagataatgcagttgtagtaaaacaaaacartttgtcaaatgtgatctgaaatcctaaaggggattttccagcagctatattttgttaatgctggtgctgactgagttgatcagaatatgcaaactatatc

SEQ ID NO: 130473 - DNA, 201 bp, Homo sapiens
ttcatgtcagaataaatatttcagctctgaggctttttgtttaactggattcagtggttctcttgatttgcgttatttcttttaccaggaatcagtttacyaagctagctgttgtttggatgggctaattaaaacctgctcagtgtgtgtgcaggcagcctctaagccaaatattgccctacccagaacttggataaaaac

SEQ ID NO: 130474 - DNA, 201 bp, Homo sapiens
aattgatttatctggatcccctaagaccttctattagagtgtgaatatccatgcaaaagagttatgggctcagattgaagtgtgtcatgtagaaattgatkaagaagcgataattatagcagattcattgatagttttatgtatgtactaatttacttgatgttattaagaaattatgaagtttagagcattgctatagtc

SEQ ID NO: 130475 - DNA, 201 bp, Homo sapiens
tggcatttgtatttattagaacagatgagccttgtgacttacccctagctaatctgactctagtgtttgcttttttcattgtatgcccttctgaatgtacrtcccaccttaaaaagtgaggagtgcccacagttcccagcccttgagaaatcccatggaaaggagagatgtggcctgggtgttcctgagaacagtcctgct

SEQ ID NO: 130476 - DNA, 201 bp, Homo sapiens
gcttttttcattgtatgcccttctgaatgtacatcccaccttaaaaagtgaggagtgcccacagttcccagcccttgagaaatcccatggaaaggagagaygtggcctgggtgttcctgagaacagtcctgctgtcaacttcatgggtggcaggtcaccaaaaggtgtgtctatatcacatatgatatttggtctcatgag

SEQ ID NO: 130477 - DNA, 201 bp, Homo sapiens
tgctatatgctgcttccctcggagccacaactaactactaatcattcctaaaaagaccttgtttctgatacctctgtgcctttgcaagtgctgttctgggycacaattacttgtcccataaaactcagtttaaggtgttcttttggaagctttccatgtcacactgtggcaagggccttcccattctggggtggatgcccc

SEQ ID NO: 130478 - DNA, 201 bp, Homo sapiens
tgaggccaggagttcaaaaccagtctaggcaatatagtgagaacccatctctacaaaataaaaaataagaacctatcacctaccctctatccctatatttrttacattaattcagatcctcattaattccacctgttctcactgctcccaatttgtctatcttctgcattgcccctggaatcatcttttaaaatatgaatc

SEQ ID NO: 130479 - DNA, 201 bp, Homo sapiens
ccctaaaattctcctcctcacccagtcatattggtctacttgctattcttccctcacagcaagtgtttatttaaatgtcttcacacatgctgtttcttctrtctgaatgccttcccccagatttctacacggcttcctcccccacttacttcaggaccctgcgcataggtcaccttatctcaagcgcttgaatatgcctca

SEQ ID NO: 130480 - DNA, 201 bp, Homo sapiens
aatgcaagtgaaatcaccataagatactgttttgcccataccatagaattaattggaagtgctccttcctcttgtattttttggaaaagtttgtgaagaaytggttggcattaattcttcattgcatgtttgatagaattcactgatgaatccatctgggtcagggtttttctttatgggaagcttttgattactaattca

SEQ ID NO: 130481 - DNA, 201 bp, Homo sapiens
actacaggcacctgccaccatgaccagctaatttttttgtatttttagtagagatggggtttcactgtgttagccagaatggtctcgatctcctgacctcrtgatccgcctgccttggcctcccaaagtgctgggattacaggcatgagccactgtgcccagcctctccttcatttttgaagcacaattttgatggatgga

SEQ ID NO: 130482 - DNA, 201 bp, Homo sapiens
ttgtcaattgaccgagaaatgctagaaaaattgactgtatcctatgatgaagcaggtatgtttgtttttaaaacacacattttttttccttgcaaaaaaawttcattataaaccttgattaaacttggtaaaaggttaagggcaaactagattcaaagttatgtaacatggactaatagtaagtttcttctctgcagtttt

SEQ ID NO: 130483 - DNA, 201 bp, Homo sapiens
aatcacccaccactcaattttttcctgcttcagacataattttccactctcctgcactgttgttgagcagcaacagatcctcagaggtaggcttgcacatrgcttttaggggcaaatagtttggcatagaattaatctgtcaataagccctgtagcatgaaacagtagaaataaacacaagattgagagttagaggatcta

SEQ ID NO: 130484 - DNA, 201 bp, Homo sapiens
ttttcgtggcatacagtgtttgggaaggcagaggggaagtttttaaagtgatcttcagcagctttgaaaagtctagcaacatctatttgataaaacacccrctctgagctcagtttgcctttgctcatctctgcatgaggtgatgcaggacagtggatgtgggagggtaggctatgtgtatgcatgagtgaatgagtgtcg

SEQ ID NO: 130485 - DNA, 201 bp, Homo sapiens
cgctctgagctcagtttgcctttgctcatctctgcatgaggtgatgcaggacagtggatgtgggagggtaggctatgtgtatgcatgagtgaatgagtgtygctgtgtgttgcaaaaccaaaagttactacctcctcctccataacccatacgttaattatttcaatcaaagaaagaggataaaataagaaaaaacattac

SEQ ID NO: 130486 - DNA, 201 bp, Homo sapiens
aaatctgtacttcacatacacccattctgtttttcattttcagtatagtattcactaaattacatgagattcaacactttattccctttattataaaatakactttgtgttagatgactttgtccaactacaggctaatgtaagtgttccgagcatatataagttaggctaaactaagctatgatgttcagtaggttaggt

SEQ ID NO: 130487 - DNA, 201 bp, Homo sapiens
gttctaaaactatgctttgggtcttatgacaatggaacactcaaatagctataatatctgcaaggcttcctgtagctatggcttttctgctttttctattygttttcttctttctccttacacagccacataatttgtacctaatttctgaccaaaagaagaccatcactcagctttcatagcatctgctcatgaatattc

SEQ ID NO: 130488 - DNA, 201 bp, Homo sapiens
ttatttagggactttccaggttttctaagaacataaaaaatctagtaaaaggcatttgcaggaagttcttcactccaacaaatagagtgaatttctcagtrtatttctcaaacagctcctaagggaagaggtgacactaaggtttccttactttatatcttcaatcaggaccccatttcttagctcaaaagataccctctc

SEQ ID NO: 130489 - DNA, 201 bp, Homo sapiens
actaattgtaaaactcagctagtttttaaacacattaataagtattaactgttaaagaatttattagtctcttttcattcagttttatgaatgaaacatgraatctttggggattggcaaaatgatctgcccttccatttacaaggataaaaatagaaactgtacattgtcatccatgggaatcagatctcctgttcattg

SEQ ID NO: 130490 - DNA, 201 bp, Homo sapiens
acaaatctttagggcctagatatttttcacaaacaaggaaatcatttggattacatgtcagagcatttattgcttgaattagtcaatcgaatattaatctwttcaacaaacatttaatgaatgtctactccaggcattttgctagccccagggatatagatgtaaatatgacttgtttgggccctcaaatcagccccactt

SEQ ID NO: 130491 - DNA, 201 bp, Homo sapiens
caggatatcaatgtactatgaatgaacattaagttaataatacttttctgccaaattcattcctcatttcagcacttcttgaaattttaaaaaatcgttcmgtaagctcgagattgtatattttgaaatatgacttaaaatgcttataaatcatgtatgattggcatatcattgttactatatgtagaatataattcttca

SEQ ID NO: 130492 - DNA, 201 bp, Homo sapiens
tggaagagccctcattacgggtgagagggatgcttactttaacttcgaaggagggtataatttctcttaaaaaaggaaacattgtacttaacccgactacytagtgcatagtactggttgagtgagtgaactaggtttttgttgattgtagtagtggtggttttgttggttttgttgtgtttttctgctttttggttgaac

SEQ ID NO: 130493 - DNA, 201 bp, Homo sapiens
taaggaaaaacatcagttcttatgttgtaacacaacaacaaaaaactctagttgatgtaattcagaaataattgtggagtattatgatgaatgaaataatgtataaatgagacaaaatggtttaatgtccatttttagagatttgatataaaatttatggatgagcatctcttaagcttaataaccagataagcagctcct

SEQ ID NO: 130494 - DNA, 201 bp, Homo sapiens
atttttaataaagacggggtttcatcttgttggtcaggctggtcttgaacccctagggacctcaagtgatccacccgcctcagcctccccaaagtgctggrattatgtcaccacaccagaccagttcgccattttcttagcccagcatgcttcactactctatgttatcttcctggccattgaaagcactggagtctgctt

SEQ ID NO: 130495 - DNA, 201 bp, Homo sapiens
atagtgacatgatcacagctcactgtagccttgacttccgagactcaagcaatcctcccccttcaacctcctcagtaactgggactacaagtgcatgcctstgtacccagctagaataataataggaaatagtttattctctcctcatctttttttttttttaatagaaaggtgttaatctttacttggaattaagaattt

SEQ ID NO: 130496 - DNA, 201 bp, Homo sapiens
tgtctgcaaacatgatgaagttttaaaatgctttgttaataggtaagctttctgggtttgtggagtaccctgctagcctttcctctctttacttacagttkcatctaaacagaaaaaatactatttctcgtactattcaaaatatgctcaataacaaatgaaactttaatagatatggattattatgtgtttttcttctgt

SEQ ID NO: 130497 - DNA, 201 bp, Homo sapiens
gctttgttaataggtaagctttctgggtttgtggagtaccctgctagcctttcctctctttacttacagtttcatctaaacagaaaaaatactatttctcrtactattcaaaatatgctcaataacaaatgaaactttaatagatatggattattatgtgtttttcttctgtttcagtgtcagtgtatctgaatttgcatt

SEQ ID NO: 130498 - DNA, 201 bp, Homo sapiens
tgaccactttcactttctccttgaatgtcctgagttgatgtcaagattcatgcatatcataaaagcacaggtagaaatttttcttcatctttttattctakctaatgaaattaatttctaaaattctaatactgtttagtggaataattattacacttcagacattctgttgtaagaggaatgattgcatgttactttaat

SEQ ID NO: 130499 - DNA, 201 bp, Homo sapiens
ctgattttgatggttgttatctagttatagaggaaaattcccttgtttgtaggaaataaatgcctaagtgtttataggggactggacattatattggcaasttgctctcacattagaggaaaaaaaaatactttgtactctactgtacttagaagttttctgtaacttggagattgtcctcctctagaaagttaaaaagaa

SEQ ID NO: 130500 - DNA, 201 bp, Homo sapiens
agcagcctcatagaactattgtccagaataaattgtcaggaatgactgtgatatatgctcaataaatggtagttgttttggagatagaaaacttacttccyttctctaagaggattctaattcagtctggctggggagataataaacatatgtataaaatagtaactacaacataacctggatctttaggagtttaaggga

SEQ ID NO: 130501 - DNA, 201 bp, Homo sapiens
gtttaagtcattctgctactaaatgggagaaccagaatttaaaagtctgtctggttctcaagttcaatttctttctttattttatttatttattttttttracacagggttttacctgtcactcaggctggagtatagttgatctgagctcactgcaacgtctgcctcctgggctgaagcgatcctcccagctcagtcttt

SEQ ID NO: 130502 - DNA, 201 bp, Homo sapiens
cagaaattgatgtgagtgattggataaaaaatacagaatacacaagtggctatgaaagagaagatccagttattcaggtaaaatttctctagagcttagartgaagttaagttttgccgtttaattttgtaagcttttcagcactattggatgaaaacttacattaattaacaaagtaaagtgtttacccaaattattctt

SEQ ID NO: 130503 - DNA, 201 bp, Homo sapiens
ggcttgctgatttgctgagatgtatgagtgttggtgtcaattttattttaaacctttacctcttaaataagaaataattatattaacattaagtatgtaaraggtttttgaaaagtcatcatgaaaacttctttttcaacaggcggagtacgtccagcttgttactgaacttcgaatgacaagagccattcagcctcagat

SEQ ID NO: 130504 - DNA, 201 bp, Homo sapiens
aataagaaataattatattaacattaagtatgtaaaaggtttttgaaaagtcatcatgaaaacttctttttcaacaggcggagtacgtccagcttgttacwgaacttcgaatgacaagagccattcagcctcagatcaatgcttttttacagggctttcatatgttcattccaccctccctcatacagctttttgatgaat

SEQ ID NO: 130505 - DNA, 201 bp, Homo sapiens
ttcctgtaaattaccaagatgtggcatccattgatccagaatatgcgaaaaatttgcaatggattttagataatgatataagtgatctgggtctagaactractttttctgttgagactgatgtgtttggagcaatggaagaggtgcctttgaaacctgggggtgggagtattcttgtgacacaaaataataaagtgagta

SEQ ID NO: 130506 - DNA, 201 bp, Homo sapiens
tgcttccagtttttgcccattcagtatgatattggctgtgggtttgtcatagataactcttattattttgagatacatcccatcaatacctaatttattgrgagtttttagcatgaagggttgttgaattttgtcaaaggccttttctgcatctattgagataatcatgtggtttttgtctttggttctgtttatgtgctg

SEQ ID NO: 130507 - DNA, 201 bp, Homo sapiens
tcttttctttaagaatactgaatattggcccccattctcttctggtttgtagggtttctgcagagagatctgctgatagtctgatgggcttccctttgtgrgtaacccgacctttctctctggctgcccttaacattttttccttcatttcaaccttggtgaatctgacattttatatgtcttggggttgctcttctcgag

SEQ ID NO: 130508 - DNA, 201 bp, Homo sapiens
ggccttctttgtctcttttgatctttgttggtttaaagtctgttttatcagagactaggattgcaacccctgcctttttttgttttccatttgcttggtaratcatcctccatccttttattttgagcctatgtgtgtctctgcacgtgagatgggtttcctgaatacagcacactgatgggtcttgcctctttatccaat

SEQ ID NO: 130509 - DNA, 201 bp, Homo sapiens
gaaaactgaaattcagagtttttatctgcattcacacagttaataagtagtagaatcataagtggaacctgactcagtctaacatttgttcctctaaacarttggttcccaaatgcttgtctcaaggactagtgttggcccaaagaggtttcttatcagtcctttgtaaaataaaactaaattggttcaatttaaggatta

SEQ ID NO: 130510 - DNA, 201 bp, Homo sapiens
ttttatttctccttcgcttatgaagcttagtttggctggatatgaaattctgggttgaaaattcttttctttaagaatgttgaatattggcccccactctyttctggcttgtagggtttctgccgagagatccgctgttagtctgatgggcttccctttgagggtaacccgacctttctctctggctgcccttaacatttt

SEQ ID NO: 130511 - DNA, 201 bp, Homo sapiens
atggaaatgcagaaatcaccatcttttgcgtggctcacgctgggagctgtagaccggagctgttcctatttggccatcttggctcctcccccaaattttctttttttttttttttttttttttttgagagagagtctcactctgtcccccaggctggagtgcagtggctcgatctgcaacctccgccccctgggttcaagt

SEQ ID NO: 130512 - DNA, 201 bp, Homo sapiens
ttttttttttttttttttttgagagagagtctcactctgtcccccaggctggagtgcagtggctcgatctgcaacctccgccccctgggttcaagtgattytcctgcctcagcctcccaagtagttgggagtacaggtgcctgccaccacgtccagctaatttttgtatttttttttttttagtagagatgaggtttcacc

SEQ ID NO: 130513 - DNA, 201 bp, Homo sapiens
ctgcaacctccgccccctgggttcaagtgattctcctgcctcagcctcccaagtagttgggagtacaggtgcctgccaccacgtccagctaatttttgtatttttttttttttagtagagatgaggtttcaccatcgtggccaagctggtcttgaactcctgacctcaggtgatccacccgcctcggcctcccaaagtgct

SEQ ID NO: 130514 - DNA, 201 bp, Homo sapiens
taacattttgcttattttttttagtctttttactgtatagttagaaaaatagttggactcacactataaatctaattttaaagaataaataggctgggcamggtacttctcttgcagtttgttactgccaagtaagcagtatttttatgataatatggaaataatttaatatattgtttttgtggcttagagataactaaa

SEQ ID NO: 130515 - DNA, 201 bp, Homo sapiens
caagaaatactcagaggcttgaataacttaataaaaaggatgaaaaaataattatattttttatgtaagaaagttgataatttgacaattcagataggagraaaaaaaccacttccaatctgtattcctaaaaataatcactgataacatttttgttattcttctagaatttttaacacatatacaatttttacttttaaa

SEQ ID NO: 130516 - DNA, 201 bp, Homo sapiens
tctcctgacctcaagtgatccacctgccttggcttcccaaagtgctgggattacaggcgcgaatcactgtgtccggctgatttcttttttttctcttttcttttttttttgagatgaagtcttgctctattgcccaggctggagtgcagtggttgatctcagctcactgcaacttccaccttctgggttcaagcgattctc

SEQ ID NO: 130517 - DNA, 201 bp, Homo sapiens
agaatggcataattctggcaaagttttagaaaataatttgccagatatgtaggacagactgtaggcaatggtttggttagtagttgtaagataataaatakgataagtggtttttaatgtctttagggacacttgtcctttcagaagttaagctatgaactaatttttataaaattatacataactatatagagggatctt

SEQ ID NO: 130518 - DNA, 201 bp, Homo sapiens
taaaatagcaaaaaccgcaattacttttgcaccaacctaatactgtctctgctttttactttctattcctttttcccttcctggacaatttagtcaaaaarcatctgtattaggtatccactttgttgacccagagagggaggtgtttgttgcctgactagggtgaggagggtgtctacatgtgtagtggtggcctagtgt

SEQ ID NO: 130519 - DNA, 201 bp, Homo sapiens
caaggttatgaaaattaagaaaacattgaagaaatgtaccagagtgaaggagacaggacaggacaattaaaggcagttcatgaatcattttgcaataagargacattattagaaaattggcaagacttgaaatgggatctgatgtagtagtgttatcagagttaatttctgattttgatggttgttatctagttatagagg

SEQ ID NO: 130520 - DNA, 201 bp, Homo sapiens
cttgggattagcgttgaaccacaggcagctggtcaatatttacttcacacgatccttctacaagcacattcttggtatggctctattattatttctgcagrcatttatttatattgtttttttttcagtttgaggaaaactagataagcagtagtattttggatgagataatttttattttgattggagcccatctgtata

SEQ ID NO: 130521 - DNA, 201 bp, Homo sapiens
acacaaaataataaagtgagtatttcagtttttaccttaaccattgtttgtaacttggccctgatagtttgctagttactctaaattcttctggcacttgyagaaaaacttttactattacagtatcatagcagataaaacgtttaagttaataaaacaatcaaatgttaaattttgaattagaaaggattattttgataa

SEQ ID NO: 130522 - DNA, 201 bp, Homo sapiens
gggattctttcatattggattgttaaatgtttttttccctgtggatgtatacatatcagtgatttcaaatagacaatcctggtgcatattttcaaccattktgtgtgtgtgtgtaaatgcatatcataaaatgtatcatttaaacaatttttaagtgtacacttttgtggcattaagtgcattcacattaatgtgtgacta

SEQ ID NO: 130523 - DNA, 201 bp, Homo sapiens
atggtgatgttgagcatcttttcatgtgcttattgggcatttgtttatcttttttttggagaaatgtctttttcaattgtttgcccatttttaatcgggatttttttttttttctatgggaattctttgtatgttctggatatcaatttggtgtcatattcaataaatcgttgccaaatccagtattatgaaacttttccc

SEQ ID NO: 130524 - DNA, 201 bp, Homo sapiens
ttttaatcgggatttttttttttttctatgggaattctttgtatgttctggatatcaatttggtgtcatattcaataaatcgttgccaaatccagtattakgaaacttttcccttatattttcttctaagagttttatagtattagctcttagatttaggtcttcaatccattttgagttagtttttaagtaacttagtgt

SEQ ID NO: 130525 - DNA, 201 bp, Homo sapiens
ggggtaggtacttacctgttgttggcctgcatgcacctataagaggtggctggagacccctgctgggagatcttaacaagtcacaaggaatgggatcaggracttgcctaaagaagcagtctggctgctttttggtagagcacatgtgctgtgttgaaggggaccctaccttttctggaccgcctgtattctccaaagcca

SEQ ID NO: 130526 - DNA, 201 bp, Homo sapiens
tattagctcttagatttaggtcttcaatccattttgagttagtttttaagtaacttagtgtaaagtaagggtccaacttcattttcgttgtagtgaatatscggttttcccaacacacttcgttgaaaagactgtcttttcccctttgaatgttgttggcactctagttgaaaatcatttcattatgtatgtgaggggtta

SEQ ID NO: 130527 - DNA, 201 bp, Homo sapiens
tgcaagtatgtatttagtaacctatacattaaacgttcctttgtcatttttctaatttatccaaaaagcactacagcacctcattttaaaagcaatagaattttttttttgtatcagtttaatcatgatatgatacacgggcaaactttagaagaaatattaattttctttttgatgtgtatagaacttgagaagttgtaa

SEQ ID NO: 130528 - DNA, 201 bp, Homo sapiens
ggggaccctaccttttctggaccgcctgtattctccaaagccagcaggtgggagcagctgagttgactgaaccccagacatggcagtcaccccttgtcccyggagctcggtcccagtgagataccaaagcgctgtccttagaacccttagccagtgtatttctacacaacatgaacacttgaaatgttactgggcaacagt

SEQ ID NO: 130529 - DNA, 201 bp, Homo sapiens
tgatagtataaattgggcatatgcattttgagaaatttgattagaaatataagcttaaatgaagatatttgcaaaaattgctctttcatgtttttaaagtrtaatattaaagaattctaatagagaaaagaaatgccagtgtttaagctttccacatacttttgggatccagtaagtttgttcgaccttttgatatttttt

SEQ ID NO: 130530 - DNA, 201 bp, Homo sapiens
ttcactgagccattttttaaactatagatttagtaaaatgtggattattttaaaaagggttatgtttaacaattcttcgaactcagttttctgtagaattrgaataataatacctcccatacagaattgttattagcattttgtaaaatgaaaagcacagcacaaaagttagttgtattgggtagttttctataaaaatag

SEQ ID NO: 130531 - DNA, 201 bp, Homo sapiens
atactatagtgtacaaaaaaaagagattgaattcttggaaataaagtcaggagttgagttcttacatattcatacttagaaattttaaattctaccctctyattttacatgaaatgacactaatcctaaagagttaatggcaaaactggggccaaaacccaagcctcctaatttcaagtctaatgttcttcatactatatg

SEQ ID NO: 130532 - DNA, 201 bp, Homo sapiens
acagttaataagtagtagaatcataagtggaacctgactcagtctaacatttgttcctctaaacagttggttcccaaatgcttgtctcaaggactagtgtkggcccaaagaggtttcttatcagtcctttgtaaaataaaactaaattggttcaatttaaggattatccttgagtctacattttttgaattaaatgtttta

SEQ ID NO: 130533 - DNA, 201 bp, Homo sapiens
ggcctagttttgtgtggctacagtcctagctattctggaggctgaggtgggaggatcacttgagctctggaggttgaggctacagtgagccaagatgacaytactgccctctagcctgagtgacagagcaagatcctatcacttaaaaaagaaaaaaaaatgtgtatgaggtatatctatatttatgcttgcatctcctag

SEQ ID NO: 130534 - DNA, 201 bp, Homo sapiens
gttgccatcatactcttcatcaacctcattatcattaattctgttttttagtgataataattactacttattgagtgctttgtgtttcatgtatctgaacyatgttctttatgtttctcatttcctgtaacagcctcttgagatagctatttctctttatttagtgtggaaacagccttaatattaaaacatttgacattt

SEQ ID NO: 130535 - DNA, 201 bp, Homo sapiens
ctccagaccccatttgcctgggtatcaccagcggaggctgcagaacagcaaatattgctgcctgtaccttcttctggaagcttcgtcccagaggggcaccygcctgtatgaggtgtccagtcaggctacacgggagtcagggacccacttgaggaggtagtctgtctgttctcatagctcaaacactgtgctgggagaacc

SEQ ID NO: 130536 - DNA, 201 bp, Homo sapiens
ttatttgggcaggagtgtaccattcctccagggacagtcagtcacggcttcccttggctaggaaggggaaaacccctgaccccttgcgcttcccgggtgaracgacaccctgccctgctttggctcgccctccgtgggctgcacccactgtccaaccagtcccaatgagttgaaccagtcacctcagttggaaatgcagac

SEQ ID NO: 130537 - DNA, 201 bp, Homo sapiens
ggaatctgatggctttggggaatctgatgtgaagacacatctgattatatgtcttggggttgatctttttgtggagtgtattactggggttctctgcattwcctgaatttgaatgttggcctgtcctgataatctgggggagttctcctatatgatatcctgaagtatgttttccaacttggttccattctcctcgtctct

SEQ ID NO: 130538 - DNA, 201 bp, Homo sapiens
agaatgcttcattaattgtagcttctgattgcttccaaccaaactagcagcaaatccctatttgatcagaaggatgattttaggggaggcaagtgggagtrggctgcagtagagctaggcagctgcaggcattcatccctgtgatgggtttcgtggatacactttgagtatttgaaattatgtaggaacatggaactgcct

SEQ ID NO: 130539 - DNA, 201 bp, Homo sapiens
gaggtggctggagacccctgctgggagatcttaacaagtcacaaggaatgggatcagggacttgcctaaagaagcagtctggctgctttttggtagagcayatgtgctgtgttgaaggggaccctaccttttctggaccgcctgtattctccaaagccagcaggtgggagcagctgagttgactgaaccccagacatggca

SEQ ID NO: 130540 - DNA, 201 bp, Homo sapiens
ttctccaaagccagcaggtgggagcagctgagttgactgaaccccagacatggcagtcaccccttgtccccggagctcggtcccagtgagataccaaagcrctgtccttagaacccttagccagtgtatttctacacaacatgaacacttgaaatgttactgggcaacagtagtgggtgttcatagtaaaatttgtattgt

SEQ ID NO: 130541 - DNA, 201 bp, Homo sapiens
ctagaagtataaacacattggggcccggacaagcttgtgttttgggaatagccagaaagccagtgaaactagaattgagtgaatgaatgaactagggggakaatggaaagaagtgagatcagagagcaaggcagaggccagatcatttagggccttagagaccaggaaaggaatttggatgttactccagatgtcatgaga

SEQ ID NO: 130542 - DNA, 201 bp, Homo sapiens
gaggccagatcatttagggccttagagaccaggaaaggaatttggatgttactccagatgtcatgagaagtcattatagggttttgagcaagagagctgcyggatctgagttatttacatgtacatacacacacatgtatatctatgtgtatatacacatatatatatttttaaatcactctggctaagatgtggagaagc

SEQ ID NO: 130543 - DNA, 201 bp, Homo sapiens
atagagtcgtaatttgctgttgtagactaaatggaattagttatcacctcatttgtgtgaggcatatttgagagctctctaacttaataaagacatattcyaagtgaaggtgggatttcagttttcaaatgctttgcacagtcgcttgtttttcctaaaaatcttttctctccccaaatgtttacattcttttatcaggag

SEQ ID NO: 130544 - DNA, 201 bp, Homo sapiens
ggggcaaaaatggaaacagggacaccagatgttgcagtaatccagatgagaagtgatgatagcttggactggggtgctgaaatggaggtagtgagacaagrtaagattgagaatatttttttaaaggtagatctgatagtatcagctgaaatagggtgtgagagaagtcatggatgattgagtccctggaattttttcctc

SEQ ID NO: 130545 - DNA, 201 bp, Homo sapiens
gaaaacttctttttcaacaggcggagtacgtccagcttgttactgaacttcgaatgacaagagccattcagcctcagatcaatgcttttttacagggcttycatatgttcattccaccctccctcatacagctttttgatgaatatgaattggtaaggaaaaacatcagttcttatgttgtaacacaacaacaaaaaactc

SEQ ID NO: 130546 - DNA, 201 bp, Homo sapiens
tatgaattggtaaggaaaaacatcagttcttatgttgtaacacaacaacaaaaaactctagttgatgtaattcagaaataattgtggagtattatgatgamtgaaataatgtataaatgagacaaaatggtttaatgtccatttttagagatttgatataaaatttatggatgagcatctcttaagcttaataaccagata

SEQ ID NO: 130547 - DNA, 201 bp, Homo sapiens
catctttttggccttaatctacctttgttctttgaggttgctgacctttgactgaggtttttgtggggtctttttgttgatattgttgttgttttctgttsatttgtttttcttttagtaatctggccactttactgtatatagggctgctgtggtttgccaggggtcctctccagaccccagttgccttggtttctccca

SEQ ID NO: 130548 - DNA, 201 bp, Homo sapiens
tctgatggtagtttgtatttctgtagcattaatggtgatatcccctttatcattttttagtgcatctatttgattcttctctcttttttagtcttgctagyggtctatcaattttgttgatcctttcaaaaaaccagctcctggattcattaattttttgaagggttttttgtgtctctatttccttcagttctgctctga

SEQ ID NO: 130549 - DNA, 201 bp, Homo sapiens
attattgctaacaggcttcagatgtacctaatcacaagaaatacttatgcctgggtcgtgactgccctcagcattccttctgggtggcagatgcagttttkcagtttgccagcatcctgcatttatgagaacagttggctgtttactcatatagcctccagtggtatactgagttgatcatgaccttcacccttttggcct

SEQ ID NO: 130550 - DNA, 201 bp, Homo sapiens
atttagttttaatgtatgtatgattgaagaaataaaaggtaagaaaagagagaaaagtaaagaaaggtccaatgtggtttattacttatcttatttttttyctcattcttctaattatttgctgtgttcctttattaaaaactctggcttttcgacatctttgttgtcacttttacacatatccatttttttctttggtgt

SEQ ID NO: 130551 - DNA, 201 bp, Homo sapiens
tatttaaaatagtgtaggatgaagggattgtttaaccactgtaccacttataaactattaatctttatttgggattaaaaatatcctagcaggtttttttktttgtttgtttgtttgttttttttttttttttggagacagtatctcactctttcacccaggctggagtatagtgacatgatcacagctcactgtagcctt

SEQ ID NO: 130552 - DNA, 201 bp, Homo sapiens
ctgagggaggagaatctcttgaacccaggaggtggaggttgtagtgagctgaggttgtgccactgcactccagcctggtgacagggcgagactccgtctcaaaaaaaaaagagaggccgggcgcggtggctcacgcctgtaatcccagcactttgggaggccgaggcgggcggatcacgaggtcaggagatcgagaccatc

SEQ ID NO: 130553 - DNA, 201 bp, Homo sapiens
tgagggaggagaatctcttgaacccaggaggtggaggttgtagtgagctgaggttgtgccactgcactccagcctggtgacagggcgagactccgtctcaaaaaaaaaagagaggccgggcgcggtggctcacgcctgtaatcccagcactttgggaggccgaggcgggcggatcacgaggtcaggagatcgagaccatcc

SEQ ID NO: 130554 - DNA, 201 bp, Homo sapiens
ttttgaacttaaaatttatcataaacttttaattctatttaaaattttcaagttaaaaactgttactccttttctgaagattttctccctatatgtttccttttttttttttaaaaaagtctccttatctattctttttaagcatctagatttctcagaaagtaattagagaaggaattaaacacagagctaggggaggaa

SEQ ID NO: 130555 - DNA, 201 bp, Homo sapiens
actctagttgatgtaattcagaaataattgtggagtattatgatgaatgaaataatgtataaatgagacaaaatggtttaatgtccatttttagagatttratataaaatttatggatgagcatctcttaagcttaataaccagataagcagctccttaatgtgaagtgaggtgaggtggtgacaaactaaaatggaatat

SEQ ID NO: 130556 - DNA, 201 bp, Homo sapiens
tatggatgagcatctcttaagcttaataaccagataagcagctccttaatgtgaagtgaggtgaggtggtgacaaactaaaatggaatatattcctgtttsttctatatgggagatgttgaaggccagtcttcctatatacacagtattctacattatttctgaattttttatttgaccacatgatgtaaagggcgctgat

SEQ ID NO: 130557 - DNA, 201 bp, Homo sapiens
aatatattcctgtttcttctatatgggagatgttgaaggccagtcttcctatatacacagtattctacattatttctgaattttttatttgaccacatgaygtaaagggcgctgatactaacttcttaaacttctaaaaagaattaagaaggtttttcttattgtatagtattgtcttctccagtttcttatattgccata

SEQ ID NO: 130558 - DNA, 201 bp, Homo sapiens
ggctcaggtgatgctcccacctcaacctccccagtagctgggactagaggtgcatgccaccatacctggctaatttttgtattttttgttagagatggggytttgccatgttgcccaggctagtctcgaactcctgggctcaagcagtctgtctgcctctgcctcccaaagtgctgggattgcaggcgtgagccactgcac

SEQ ID NO: 130559 - DNA, 201 bp, Homo sapiens
gttagcatagatttgtctagtttttatgtaacaatagaagtgattttcagcatttaaaaatggaggactatttgagctattatattattagacctgactgmaatatggcttttcctgtactgtgcttggattaaattagccttttgaaattcaaaacagagcattagttatttgctggacctatatgtatgtaaaaaacaa

SEQ ID NO: 130560 - DNA, 201 bp, Homo sapiens
accacgcccggctaattttttgtattttcagtagagatggggttttgccatgttgcccaggctggtcttgaactcctgagctctggcaatccgctcatctyggcctcccaaagtgctgggattacaggcgtgcgccaatgcgcctggccaaatacatatttttgagggcgtaccatccattaggccatctgtgaggtgatc

SEQ ID NO: 130561 - DNA, 201 bp, Homo sapiens
cctgaccccagataccatcactgttgccagtctgctgcttggtggcatgagtaatcagagggacttggctttagaactttttgtgtgactttgtgtctttyataggggagggctatgctgcactgagaaaggaaacttttaaaaaatttggtacaaacgtctaaactagatgtgcatctgagttaaaggattcaggttaaa

SEQ ID NO: 130562 - DNA, 201 bp, Homo sapiens
tcttgaaaaaaaatcgtaacaattaatgtgatattcatgaagtgcttcaaatttcttgagagaatataatgttagtcatttttattcataattatgaatamtgaaagcatacttaatattattgaaagcttatcttcagcctagaagggaaaaggattaaactcatgaattgtaagacatgcgtaaagcctgtcccactcc

SEQ ID NO: 130563 - DNA, 201 bp, Homo sapiens
ttatcttcagcctagaagggaaaaggattaaactcatgaattgtaagacatgcgtaaagcctgtcccactcccttttagcaaacctatatcagagtcctgycagggaacagaatttctccagatggttcaaatatcgaaactttaacaaagggactatgacagaggtatgggcagtgttaagaataaacaatgtctagtga

SEQ ID NO: 130564 - DNA, 201 bp, Homo sapiens
aatttatcataaacttttaattctatttaaaattttcaagttaaaaactgttactccttttctgaagattttctccctatatgtttccttttttttttttwaaaaagtctccttatctattctttttaagcatctagatttctcagaaagtaattagagaaggaattaaacacagagctaggggaggaaagtagaatcatc

SEQ ID NO: 130565 - DNA, 201 bp, Homo sapiens
ttgatatttttttgactgtataacttgattatttatttatttatttattgagacgaagtctcactctgtcacccaggctggagcgcagtggtatgatctcrgctcactgcaacctctgcctcctgggttcgagcaattctcctgccttggcctcctcagtagctgggattacaggggtgcgccaccatgcccagataattt

SEQ ID NO: 130566 - DNA, 201 bp, Homo sapiens
ctcagcttggagtgtgaaaaatgggttgaaatggggcggtactagagtcaggacaactgagaggaggctgtggcattttggtttggggaagcatgcatgargaattatgtaaggcaagtggcagtgaagatggagaaaatggaatagcttttaagcttttgaggataatagaatttatagaacttggtaattgggaagatg

SEQ ID NO: 130567 - DNA, 201 bp, Homo sapiens
aaagaagttaatgaaaaatagaataacactgcataaagctaaaactgaagatctcaattgtgtatttaaagagtggatttgtcagcctaacagtgaacacktgccacttaatggtatgccgatcataaacaagcaaagatctatcataatgaagtgaaaattgaagggaactctgacttttcaacaggctggttgcagaaa

SEQ ID NO: 130568 - DNA, 201 bp, Homo sapiens
atgtaagccattcggggtttgaaggagaaaaaaatgacctaccttttttttttccaaacacctctagttaagttagcctttttttttttttttcaattttwgtgtgtgtatttttatgctaagaatacatttcagtgtgagtatacttaagataattggcatttttgaagtttataataacttcctgaatagttatttcaa

SEQ ID NO: 130569 - DNA, 201 bp, Homo sapiens
agtagttaggtgtaagtgtaagaaaatggttgcttattggtaacatgtaaatttggtcaggaataatggtgatgtcaaacaaccacagattgtgtctacaygggtggctgagatagtgatccctttactttctgatggttcaatgaaacaaattcatgttgagacttgggtgtcattgccaagataactcattttgtatat

SEQ ID NO: 130570 - DNA, 201 bp, Homo sapiens
aggagaaaaaaatgacctaccttttttttttccaaacacctctagttaagttagcctttttttttttttttcaatttttgtgtgtgtatttttatgctaaraatacatttcagtgtgagtatacttaagataattggcatttttgaagtttataataacttcctgaatagttatttcaaagaaagattacattgtaacaat

SEQ ID NO: 130571 - DNA, 201 bp, Homo sapiens
ctcacttgtgagtgagaacatgcagtgtttggttttctgtccttgtgatagtttgctgagaatgatggtttcccacttcatccatgtccctgcaaaggacrtgaactcaccattttttatggctgcatagtatttcatggtgtatatgtgccacatttccttaatccagtctatcattgatggacatttgggttggttcca

SEQ ID NO: 130572 - DNA, 201 bp, Homo sapiens
acctaccttttttttttccaaacacctctagttaagttagcctttttttttttttttcaatttttgtgtgtgtatttttatgctaagaatacatttcagtrtgagtatacttaagataattggcatttttgaagtttataataacttcctgaatagttatttcaaagaaagattacattgtaacaatgtgaaagaaacaca

SEQ ID NO: 130573 - DNA, 201 bp, Homo sapiens
tcccaccaacagtgtaaaagtgttcctctttctccacaacctctccagcatctgttgtttcctgactttttaatgatcgccattctaaatggtgtgagacrgtatcttattgtggttttgatttgcatttctctaatgaccagtgatgatgagcattttttcatgtgtctgttgggtgcataaatgtcttcttttgagaag

SEQ ID NO: 130574 - DNA, 201 bp, Homo sapiens
tgtcaattttgtcttttgttgccattgcttttggtgttttagacatgaagtccttgcccatgcctatgtcctgaatggtaatgcctaggttttcttctagkgtttttatggttttaggtctaacgtttaagtctttaatccatcttgaattgatttttgtataaggtgtaaggaagagatccagtttcagctttctacata

SEQ ID NO: 130575 - DNA, 201 bp, Homo sapiens
ctcataaaataagttagagaggattccctctttttctattgattggaatagtttcagaaggaatggtaccagctcctctttgtacctctggtagaatttgrctgtgaatccactggtcctggactttttttagttggtaggctattaattattgcctcaatttcagaacctcttattgatatattcagagattcaactgct

SEQ ID NO: 130576 - DNA, 201 bp, Homo sapiens
ggtattttattctctttgaagcaattgtgaatgggagttcactcatgatttggctctctgtttgtctgttgttggtgtataagaatgcttgtgatttttgyacattgattttgtatcctgagactttgctgaagttgcttatcagcttaaggagatttggggctgatacaatggggttttctaaatatacaatcatgtcat

SEQ ID NO: 130577 - DNA, 201 bp, Homo sapiens
tttttcatgttcctgtctccttcaattctgctctgatcttagttatttcttgtattctgctagcttttgaatttgtttgctcttgcttctctagttctttyaattgtgatgttagggtgttgattttagatctctcctgctttctcttgtgggcgtttagtgctaaaaatttccttctacacattgctttaaatgtgtccc

SEQ ID NO: 130578 - DNA, 201 bp, Homo sapiens
ggaagttctcctggataatatcctgaagagtgttttctaacttggttccattctccccgtcactctcaggcacaccaatcaaatgtatatttggtcttttyacatagtcccatatttcttggaggctttgttagtttcttttcattctttttttctctaatcttgtcttttcactttatttcattgatttgatcttcagtc

SEQ ID NO: 130579 - DNA, 201 bp, Homo sapiens
tgtattttattatttatgaatatagaaagtatcagatatagtatgcaatggtttatttttaattttaaaatttatttgaatcctttttgttggtggctgcyaccatagttagaaattaaagttattttcatagtattcttttttgtgattgaagaatgaattttctgaatagatcttcaaagagaaaacttcctaggtaaa

SEQ ID NO: 130580 - DNA, 201 bp, Homo sapiens
tgtatatgtaagccattcggggtttgaaggagaaaaaaatgacctaccttttttttttccaaacacctctagttaagttagcctttttttttttttttcawtttttgtgtgtgtatttttatgctaagaatacatttcagtgtgagtatacttaagataattggcatttttgaagtttataataacttcctgaatagttat

SEQ ID NO: 130581 - DNA, 201 bp, Homo sapiens
gtaagccattcggggtttgaaggagaaaaaaatgacctaccttttttttttccaaacacctctagttaagttagcctttttttttttttttcaatttttgkgtgtgtatttttatgctaagaatacatttcagtgtgagtatacttaagataattggcatttttgaagtttataataacttcctgaatagttatttcaaag

SEQ ID NO: 130582 - DNA, 201 bp, Homo sapiens
tttttgtgtgtgtatttttatgctaagaatacatttcagtgtgagtatacttaagataattggcatttttgaagtttataataacttcctgaatagttatytcaaagaaagattacattgtaacaatgtgaaagaaacacagaattaatttaacagactttcaaattcaggaatccatttaaaatatgctgtgtgtaggat

SEQ ID NO: 130583 - DNA, 201 bp, Homo sapiens
ggaaaattgcattttttttgactttggagaaaattgactttacaggatccaaattattccagaattgaattcctaaaaggcctaaatcttttttaaaaatygtaactatttttatattacctcctttttcctcatgataatgatttcttgatgactttccccttgtttagtcaagtatttattcgggtctttgttgtcact

SEQ ID NO: 130584 - DNA, 201 bp, Homo sapiens
ctgttttaggtattaaagaaagatttattttggtattaaagataagacatttatagtagtgagcaatcatgtttacttaatatattaaaaagcatctccarttaggattatcagtatattgtactttataatttggaaatctttttgctctgcaggtaggtcaatgatagtagccaaatttttaatatttgtatattattt

SEQ ID NO: 130585 - DNA, 201 bp, Homo sapiens
tcctcttttcctaattgaataccctttatatccttctcctgcctaattgccctggccagaacttccaacactatgttgaataggagtggtgagagagggcrtccctgtcttgtgccagttttcaaagggaatgcttccagtttttgcccattcagtatgatattggctgtgggtttgtcatagataactcttattattttg

SEQ ID NO: 130586 - DNA, 201 bp, Homo sapiens
caacagtttttctgtaattcaaagtaaactttaaagtgtcaagattcatggcctaaaaaataatttgtggtactacacttctctgaaaagttcacttttgraaccagttaaatataatagatattagaaaactagatgatttaaccatcttttagcttgtatttctgaaagatgtaaaaaaagtctgattttcattttgga

SEQ ID NO: 130587 - DNA, 201 bp, Homo sapiens
gatatcccctttatcattttttagtgcatctatttgattcttctctcttttttagtcttgctagcggtctatcaattttgttgatcctttcaaaaaaccasctcctggattcattaattttttgaagggttttttgtgtctctatttccttcagttctgctctgattttagttatttcttgccttctgctagcttttgaat

SEQ ID NO: 130588 - DNA, 201 bp, Homo sapiens
attgatgtcagtagagaatgagagaatgtactccttttatcagcacagggtatagtcatttttactttttttttttttgagacggagtctcgctctgtcgyccaggctggagtgcactggcgccatctcggctcactgtaagctgcgcctcctgggttcacgccattctcctgcctcagcctcccaagtagctgggactat

SEQ ID NO: 130589 - DNA, 201 bp, Homo sapiens
cctcctgggttcacgccattctcctgcctcagcctcccaagtagctgggactataggcacccgccaccatgcatggctaatttttgtatttttagtagagrcggggtttcaccttgttagccagggtggtctcgatctcctgaccttgtgatctgcccgcctcggcctcccaaaatgctgggattacatgtaggcgtgagc

SEQ ID NO: 130590 - DNA, 201 bp, Homo sapiens
cctaagattttatatatatgtttatataaattttttaatgtaagtttttataatttctgtttttacattccaatttttaaaccatccggaccttattttgrtttatgttgtcaagtatatttttctaaatggtttatacttcaacaccatctagtgaattactatattttccccatgatttggtcagtatgagtctttaag

SEQ ID NO: 130591 - DNA, 201 bp, Homo sapiens
tttaagatgcagaaatcagttattcaagttttttagtactaagttgtctcttaggtggctgctcctatagagtaaaacactagaattagtaatatgcaagmcttctccactttaaatagtacagtcattcttagcaatgctgaaaaagaggtgtgctatttattatttagttatgaagtgtggcaaatccacacttgaatg

SEQ ID NO: 130592 - DNA, 201 bp, Homo sapiens
agccagtctgcagtgcaaaggaagctagagaatgtatttgggggtggtcaatgtagactagactgtcttcatctaggaaaaggattctataacactgtgamtaggactaaaacacaccctatactagcagttctaaaactttttggtcttaggaccccttaaaacaaaagagtttttgtttatgtgggttatgtcaatgga

SEQ ID NO: 130593 - DNA, 201 bp, Homo sapiens
tattgtaaataaagatctaagaatgattatttgtagaaaaggcatttagcaagctagtaaatctgataattagatgactgatacactgctaacatattttrctcttattttttgagctagccttttaaagatcgctgtgaatggttctatgaacatttgcattcaggacagccagattcagatatggtgcacaggccagtg

SEQ ID NO: 130594 - DNA, 201 bp, Homo sapiens
ctatttcagctaagttctgtctttttgtaaatagttattgaaatgttcaaacattatccagtaactccttattgtaaataaagatctaagaatgattattygtagaaaaggcatttagcaagctagtaaatctgataattagatgactgatacactgctaacatattttactcttattttttgagctagccttttaaagat

SEQ ID NO: 130595 - DNA, 201 bp, Homo sapiens
agaataaatatattcaattacatgtctgatattaagttctgagacataaccaaatttatcaagtcttttgtgttgaaaatgtaggaatttaaaaaaatacrtttctctaggtagtcaaactatttcagctaagttctgtctttttgtaaatagttattgaaatgttcaaacattatccagtaactccttattgtaaataaa

SEQ ID NO: 130596 - DNA, 201 bp, Homo sapiens
cttttttttttggtttagaagccagtccagttcagtatatatttatcaagttcgctatattatatcacaaacttttgcctgtgtattctgattgatgtttyccccccacagaatgacttcacctcgtttcattgaatttgtctgcaaacatgatgaagttttaaaatgctttgttaataggtaagctttctgggtttgtgg

SEQ ID NO: 130597 - DNA, 201 bp, Homo sapiens
ttcacatagtcccatatttcttggaggctttgttagtttcttttcattctttttttctctaatcttgtcttttcactttatttcattgatttgatcttcartcattgacatcctttcttccacttgatcgaatcggctattggagcttatgtatgcttcatgaagttttcatactgtggttttcagctccatcaggtcatt

SEQ ID NO: 130598 - DNA, 201 bp, Homo sapiens
actgaatttgtctcaaggaagctgaagtaataggatttttatcagactatcaattcttataactagtttgtgactttaataataagtgtgtgtgtgtgtgtatatatatatatatatatattttttttttttttttgagatggaatctggctctgtcactcaggctggggtgcagtggtgtgatctcagctcactgcaacc

SEQ ID NO: 130599 - DNA, 201 bp, Homo sapiens
ctgaatttgtctcaaggaagctgaagtaataggatttttatcagactatcaattcttataactagtttgtgactttaataataagtgtgtgtgtgtgtgtrtatatatatatatatatattttttttttttttttgagatggaatctggctctgtcactcaggctggggtgcagtggtgtgatctcagctcactgcaacct

SEQ ID NO: 130600 - DNA, 201 bp, Homo sapiens
tgaatttgtctcaaggaagctgaagtaataggatttttatcagactatcaattcttataactagtttgtgactttaataataagtgtgtgtgtgtgtgtatatatatatatatatatattttttttttttttttgagatggaatctggctctgtcactcaggctggggtgcagtggtgtgatctcagctcactgcaacctc

SEQ ID NO: 130601 - DNA, 201 bp, Homo sapiens
gaatttgtctcaaggaagctgaagtaataggatttttatcagactatcaattcttataactagtttgtgactttaataataagtgtgtgtgtgtgtgtatatatatatatatatatattttttttttttttttgagatggaatctggctctgtcactcaggctggggtgcagtggtgtgatctcagctcactgcaacctct

SEQ ID NO: 130602 - DNA, 201 bp, Homo sapiens
agctgaagtaataggatttttatcagactatcaattcttataactagtttgtgactttaataataagtgtgtgtgtgtgtgtatatatatatatatatatwttttttttttttttttgagatggaatctggctctgtcactcaggctggggtgcagtggtgtgatctcagctcactgcaacctctgcctactgggttcaag

SEQ ID NO: 130603 - DNA, 201 bp, Homo sapiens
gctgaagtaataggatttttatcagactatcaattcttataactagtttgtgactttaataataagtgtgtgtgtgtgtgtatatatatatatatatatattttttttttttttttgagatggaatctggctctgtcactcaggctggggtgcagtggtgtgatctcagctcactgcaacctctgcctactgggttcaaga

SEQ ID NO: 130604 - DNA, 201 bp, Homo sapiens
ctgaagtaataggatttttatcagactatcaattcttataactagtttgtgactttaataataagtgtgtgtgtgtgtgtatatatatatatatatatattttttttttttttttgagatggaatctggctctgtcactcaggctggggtgcagtggtgtgatctcagctcactgcaacctctgcctactgggttcaagaa

SEQ ID NO: 130605 - DNA, 201 bp, Homo sapiens
tgaagtaataggatttttatcagactatcaattcttataactagtttgtgactttaataataagtgtgtgtgtgtgtgtatatatatatatatatatattttttttttttttttgagatggaatctggctctgtcactcaggctggggtgcagtggtgtgatctcagctcactgcaacctctgcctactgggttcaagaaa

SEQ ID NO: 130606 - DNA, 201 bp, Homo sapiens
tttgttaaatttctgtcttgatgatctgtctaatattgttagtgggctgttaaagcctctcactattattgtgtgggagtctcagtctctttgcagttctstaagcacttgttttttgaatttggtgctcctatgttggttgtatatatatttatgatagcacttcttgttgaattgaaccttttaccattatgtaatgcc

SEQ ID NO: 130607 - DNA, 201 bp, Homo sapiens
aaggagatatagccaggtcttctgtatatattctcttgctgttaataggaattgtttatgcattagtgtcttataagcaagattcaggcatacttttaatrttgccttggtttattaaagtaagctcaagaatttcatcagtaaaccaaaccagacgacttcccagatagaagagaaaattgctgtttttagggattcttt

SEQ ID NO: 130608 - DNA, 201 bp, Homo sapiens
aaaccaaaccagacgacttcccagatagaagagaaaattgctgtttttagggattctttcatattggattgttaaatgtttttttccctgtggatgtatamatatcagtgatttcaaatagacaatcctggtgcatattttcaaccattgtgtgtgtgtgtgtaaatgcatatcataaaatgtatcatttaaacaattttt

SEQ ID NO: 130609 - DNA, 201 bp, Homo sapiens
cctggtgtcagcaccgagaaatcaaagaccagtgaaacacagagtgaattattgtcaaaatgactaaagatttcactttccaatacatttctaccttttgkttttctttgatgctatttcattaggtttatccgttgtttcttttagcccaggcatttacaatagtagtatatagcatgagctcattatgtgtttgttgaa

SEQ ID NO: 130610 - DNA, 201 bp, Homo sapiens
ttttaaggctaaataatactcccttggctaaataataatccagccatctgttgatggacacttgggttgcttctaccatttggctattgtgaataatgctrctgtatgcgcagatacttctttgagtccgtgctttcagttcttttggatatatacccagaagtggaattgcctgatcatatgataattctgtattgtaat

SEQ ID NO: 130611 - DNA, 201 bp, Homo sapiens
tacttgtaattttctgtcttttgtttttttgattttttgccgatagtcatcttaatgagtgtgaagtggttttgattggcatttccctagtaaatggtgaygttgagcatcttttcatgtgcttattgggcatttgtttatcttttttttggagaaatgtctttttcaattgtttgcccatttttaatcgggatttttttt

SEQ ID NO: 130612 - DNA, 201 bp, Homo sapiens
cttgtaattttctgtcttttgtttttttgattttttgccgatagtcatcttaatgagtgtgaagtggttttgattggcatttccctagtaaatggtgatgytgagcatcttttcatgtgcttattgggcatttgtttatcttttttttggagaaatgtctttttcaattgtttgcccatttttaatcgggatttttttttt

SEQ ID NO: 130613 - DNA, 201 bp, Homo sapiens
tgttctggatatcaatttggtgtcatattcaataaatcgttgccaaatccagtattatgaaacttttcccttatattttcttctaagagttttatagtatyagctcttagatttaggtcttcaatccattttgagttagtttttaagtaacttagtgtaaagtaagggtccaacttcattttcgttgtagtgaatatccgg

SEQ ID NO: 130614 - DNA, 201 bp, Homo sapiens
tatcaatttggtgtcatattcaataaatcgttgccaaatccagtattatgaaacttttcccttatattttcttctaagagttttatagtattagctcttasatttaggtcttcaatccattttgagttagtttttaagtaacttagtgtaaagtaagggtccaacttcattttcgttgtagtgaatatccggttttcccaa

SEQ ID NO: 130615 - DNA, 201 bp, Homo sapiens
taagtaccctataataccatttaacctgttttcctacattagaaaacttattttttcttcttaaatatttgtcatattatatatacttccacagtaattakaaagcatttatgttttgatgtatctatgtttttaagtttaccttcatcacttattaagcaggtaccaagctaaggagcattcgaatatattatttcattt

SEQ ID NO: 130616 - DNA, 201 bp, Homo sapiens
tcctcccccagtaatggaattgatatgggctacaatgggaataaaactccaagaagccaggtgttcaaggtgagaaaagtatatggcattgttaggaagayagacgtaaaagagatgaatttgacaaagcatgcattcattaatcagaaagctcatgaacaggttgtaagtttggtttatacccatatcactttcaaaatt

SEQ ID NO: 130617 - DNA, 201 bp, Homo sapiens
cattttacaaattggctaggcatacttcagtttcctaaacttacaaagaagattcaaaaccaaattcttttttttttggtttagaagccagtccagttcartatatatttatcaagttcgctatattatatcacaaacttttgcctgtgtattctgattgatgttttccccccacagaatgacttcacctcgtttcattga

SEQ ID NO: 130618 - DNA, 201 bp, Homo sapiens; identical to SEQ ID NO: 22610

SEQ ID NO: 130619 - DNA, 201 bp, Homo sapiens
actgcaatgcagcagattttttcttctttttaaataccactttagggtttttcaatctgaatgcaaatttgggaggatgattttatgttaattatgagtartgttttcactgctaggcaaaacaatcagaaattttatagatttcctgtttaatggtggtatatttttcttttaaagcatcaacatgctcaagttacctga

SEQ ID NO: 130620 - DNA, 201 bp, Homo sapiens
aatgtggaggggtgtctccatggaagcttgctaactaatcacaaagcaacttacagtaatgaattggagttttgtagactaaaaagtgtcgtgttgtcatkgtcctagagttggatatattcctaccctaacttagaacttgaaatttatctgtcacaaatatctttctttcatgattacaatgtattaagatataaactc

SEQ ID NO: 130621 - DNA, 201 bp, Homo sapiens
atattgttagtgggctgttaaagcctctcactattattgtgtgggagtctcagtctctttgcagttctctaagcacttgttttttgaatttggtgctcctrtgttggttgtatatatatttatgatagcacttcttgttgaattgaaccttttaccattatgtaatgcccttgtctttttttaatctttgttggtttaaag

SEQ ID NO: 130622 - DNA, 201 bp, Homo sapiens
tagcttatggaaatgtggaggggtgtctccatggaagcttgctaactaatcacaaagcaacttacagtaatgaattggagttttgtagactaaaaagtgtygtgttgtcattgtcctagagttggatatattcctaccctaacttagaacttgaaatttatctgtcacaaatatctttctttcatgattacaatgtattaa

SEQ ID NO: 130623 - DNA, 201 bp, Homo sapiens
tggtttaaagtctcttttgtcagaatctagggttgcaactcctgcttttttctgttttccatttgcttggtaaaatttcctccatccctttatttagagcmtgtgtgtgtctttgcatgtgagatgggtctcttgaggacagcatactgatgggtcttggctcttcatccagcttgccattcttggtcttttaattggggc

SEQ ID NO: 130624 - DNA, 201 bp, Homo sapiens
ttgttgttagtggttctgggaagttgtagaagacattactcaagaggagagagttcttctcttacagtttgttacgggcaggtaagcagtatttttatgawaatatggaaataatttaatgtattctgcttttaatggcttagagataactaaaataaggaattattactctgaattgtcagtaacttaccaccctttcca

SEQ ID NO: 130625 - DNA, 201 bp, Homo sapiens
aatttcctccatccctttatttagagcctgtgtgtgtctttgcatgtgagatgggtctcttgaggacagcatactgatgggtcttggctcttcatccagcytgccattcttggtcttttaattggggcatttaacccatttacatttaatgttagtattgttatgtatgaatttgatcctgtcatgacgatgctagctggt

SEQ ID NO: 130626 - DNA, 201 bp, Homo sapiens
taggtttggtctctttacataaccccatatctcttggaggttttattcattcctttttgttcctttttctctattattgtctgcctgtcttattttggacdgtcttcaagctctgaggttctttcctctgcttggtctattctgctattgatacttgtgattgcattgtgaagttctcatgttgtgtttttcagctccatt

SEQ ID NO: 130627 - DNA, 201 bp, Homo sapiens
tgtgacacttctgtagctctgagagctgtgaagaattcatagctagcagtcatatagaacttgctggctcagtgcctttttttggtctttttttcccctgttttttttttttgtttggttttttttgtttgtttgtttttgaacagagcatcagattagtgccaaaaaaaaaaaaataaaggaagagggctaaaacagagt

SEQ ID NO: 130628 - DNA, 201 bp, Homo sapiens
atatagaacttgctggctcagtgcctttttttggtctttttttcccctgttttttttttttgtttggttttttttgtttgtttgtttttgaacagagcatsagattagtgccaaaaaaaaaaaaataaaggaagagggctaaaacagagtttcttccctgttagagtattaattcctagtaggtaggagctatatacctgc

SEQ ID NO: 130629 - DNA, 201 bp, Homo sapiens
acctgatagctaatgaagttacacaccttttatgattatagccatttgtgtactgttttcaaagtgtctatttaagtaatttgcccacttttctattgtgtttttttttctttttactgatttgtaggactctttatgaattcttttataagagtcttttatcagatatatgtattatgaatattttctactcaggtcttt

SEQ ID NO: 130630 - DNA, 201 bp, Homo sapiens
atgaatactttcatgattcagtttctaactattagtatgagttatataccttacacatagttccaacagatgaattcaattattttgttgtattaaaaaarttgattggggcttaaaatatttttcttaatatgtacattttattctggaattctcatttcatctgtttgtttttggtcagtttagtaaccagatgggata

SEQ ID NO: 130631 - DNA, 201 bp, Homo sapiens
gtattccatggtgtttatgtgccacattttcttaatccagtctatcattgttggacatttgggttggttccaagtctttgctattgtgaataatgccgcartaaacatatgtgtgcatgtgtctttatagcagcataatttatagtcctttgggtatatacccagtaatgggatggctgggtcaaatggtatttccagttc

SEQ ID NO: 130632 - DNA, 201 bp, Homo sapiens
gaagtccttgcccatgcctatgtcctgaatggtaatgcctaggttttcttctagtgtttttatggttttaggtctaacgtttaagtctttaatccatcttsaattgatttttgtataaggtgtaaggaagagatccagtttcagctttctacatatggctagccagttttcccagcaccatttattaaatagggaatcctt

SEQ ID NO: 130633 - DNA, 201 bp, Homo sapiens
aataagttttcaaatcaggatatgtgagtctgccacctttgttcttttttttctagactgtttaggctatttgaggttcaactttttttttcagtgacctraactatgctttatgttataaatcatatttttaagaaagtattttaaattttattcagatgtttgcaagtatgtatttagtaacctatacattaaacgttc

SEQ ID NO: 130634 - DNA, 201 bp, Homo sapiens
ctcaagcaatcctcctgcctctgcctctcgagtagccaggactacagacaggtgtacatcaccatgcctggataattttttaatttttgtttttattttaytattttattgtaagacagggtcttactatattgcccaggccagtctcaaacccctagcatcaagcaattctgcatcagccttccaaagtgctgagattat

SEQ ID NO: 130635 - DNA, 201 bp, Homo sapiens
agattgacaatttaaaaggaggcacctaagcaaaaagacatgtgaaagttaaaactttacaggtaaaaaaaaacacacactcaccaaataccggaaaaagytggtattactatattaatatcatataacacagacttaaaaattaaaagcattattagggataaaaagagttgtgcgtgaagatgaaagattgaatttacc

SEQ ID NO: 130636 - DNA, 201 bp, Homo sapiens
taggataccctgaccccagggctatatccctattcctgtgctgaagaagttaacagacagctccactagaagggggaaggaaagttcgtaaaaagaaaaarggcgaaaagatgctgaatagttacatcaactcctgacaataacatttgccaaaatgcctcatcctaaaaagtggttgacactcttttccacaatcttaga

SEQ ID NO: 130637 - DNA, 201 bp, Homo sapiens
tctgcattcagactttcccataaaatgtagtttgaattaataaatgcctactgtcttttcagtacttttatggtaatcttttcaaaagttttaatctagcttttttttttttttttctttttttgagacagggtcttgctccaacacccaggctgaagcgcagtggcatgattacggctccctgcaaattctgcctcccag

SEQ ID NO: 130638 - DNA, 201 bp, Homo sapiens
agggaagatatcttctactgtggaaaggtgagatcttgccttcagcctccactggggacagtgagaaggtttcagttgttcattttattattcatcttccktgtgtgtgtgtgtgtaattgcactcatgagtaggcagtacttaataacagtttgggtttgtttgtttgtttgtttgtttgaaagataagtgttcaaatga

SEQ ID NO: 130639 - DNA, 201 bp, Homo sapiens
ctaatccgcacttcgggaggccgaggcaggtgttttgcttgagctcaggagttcaagaccaacctgggtaacatggcaaaaccttgtctctacaaaaaaawatacaaaaattagccaggcatggtaacttgcacctgtagtcccagatacttgggaggctgaggcaggaggatggcttgagccagggaggtcaaagctgca

SEQ ID NO: 130640 - DNA, 201 bp, Homo sapiens
atgcttataatcccagcactttgggaggctgaagtgggcagatcgcttgagcccaggagttaaagaccagcctgggcaacatagtgagaccccccatctcaaaaaaaaaaaatgtgtacgagtgttttacaaagaaaaaggggctgccttatcgtaaaaagcgtgtagacattagttaattctccctctttgattctttca

SEQ ID NO: 130641 - DNA, 201 bp, Homo sapiens
agtctcgctctgccgcccaggctggagtgcagtggcgcgatctcagctcactgcaagctccacctcccaggttcacgccattctcttgcctcagcctcccragtagctgggactataggtgcccgccaccacgcctggctaattttttgtacttttagtagagacggggtttcactgtgttagccaggatggtcttgatct

SEQ ID NO: 130642 - DNA, 201 bp, Homo sapiens
aggatataggagatttaaacattatcaaccttcttaacctgacatttatagaacacttcaccaaaatataagagtgttttctttccctccctccctccctycctcccttccttccttccttccttccttccttccacgagtctcgctctgtagcccaggctggagtgcagtggcgcaatctcagctcactgcaacctccgc

SEQ ID NO: 130643 - DNA, 201 bp, Homo sapiens
aaaatacaaggggaagatatggcatacacatgttttccaaattcaatcatagaattactgccttttcccaccatccttcttttactttttttcgcaagatkcttattaacatacccaggaactttcctttttaaagaattcacagtcacccttataaacattcattcttgcttcttgtgaggcttgtttgttgacctgtgg

SEQ ID NO: 130644 - DNA, 201 bp, Homo sapiens
acagagattttcaagtttatttctttgtttttaaatttaattttcttttttttttattttaatagagatgggggtcttcttctgtcacccaggctggactrcagtggtgcaatcgtagctcactgaagatctcacctcctgggctcaagcaatcctcctgcctctgcctctcgagtagccaggactacagacaggtgtaca

SEQ ID NO: 130645 - DNA, 201 bp, Homo sapiens
atttaattttcttttttttttattttaatagagatgggggtcttcttctgtcacccaggctggactgcagtggtgcaatcgtagctcactgaagatctcamctcctgggctcaagcaatcctcctgcctctgcctctcgagtagccaggactacagacaggtgtacatcaccatgcctggataattttttaatttttgttt

SEQ ID NO: 130646 - DNA, 201 bp, Homo sapiens
aattcacagtcacccttataaacattcattcttgcttcttgtgaggcttgtttgttgacctgtggacatttactctacaggcgatggaagcttgcaaagaygctggcttggtgaaatccctgggagtgtccaattttaaccgcaggcagctggagctcatcctgaacaagccaggactcaaacacaagccagtcagcaacc

SEQ ID NO: 130647 - DNA, 201 bp, Homo sapiens
tgaaatgaaatgtgtgaataaaatgtgtacaagcggctaggcacggtggctgatgcttataatcccagcactttgggaggctgaagtgggcagatcgcttsagcccaggagttaaagaccagcctgggcaacatagtgagaccccccatctcaaaaaaaaaaaatgtgtacgagtgttttacaaagaaaaaggggctgcct

SEQ ID NO: 130648 - DNA, 201 bp, Homo sapiens
cccatcatcggacttggtacctactcagaacctaaatcggtaagcttattttttctctctttgcttgcttgtttgtttcttttaacatttgcctatagcayaatctgcaatttattttaagcagatctcattgacttactttttgtagtaatggaagcaacctcaatttgtaataatgaaaggactactatttactgaata

SEQ ID NO: 130649 - DNA, 201 bp, Homo sapiens
ggaggtgttcatgatcttgattgtaatgatgattttacaggtgtatgcacacattaaaattcctcaaaatgtacacttcaaaaatgtgtagtttattgtayatcagttataactcaccaaactagaaggcaaaaataatgcatgataaaaagttgcacatctacacatgctcagaaattttgccacataaagactcacact

SEQ ID NO: 130650 - DNA, 201 bp, Homo sapiens
aaataaaataaaatttatatggaagtacaaataacctataatagccacaacaactttttgaaaaagagcaatagccaagcacagtggctcatacctataatcccagcactttgagaggctgagtggggagaattacttgagcctaggagttcaagaccagcatggggaacactgagaccccgtctctacaaaaacatcaaa

SEQ ID NO: 130651 - DNA, 201 bp, Homo sapiens
taattgggaaatcaatatttgaagcttaagtacgacatgttttttggtgtttgtttgtttgtttgcttaaggtagggtcagccggggacagtggctcacayctgtagtcccagtactttgggaggctaaggctggcagatcacttgagtccaggagtttgagacaagcctgggcaacatggcaaaaccccatctctacaaa

SEQ ID NO: 130652 - DNA, 201 bp, Homo sapiens; identical to SEQ ID NO: 22630

SEQ ID NO: 130653 - DNA, 201 bp, Homo sapiens; identical to SEQ ID NO: 22619

SEQ ID NO: 130654 - DNA, 201 bp, Homo sapiens; identical to SEQ ID NO: 22620

SEQ ID NO: 130655 - DNA, 201 bp, Homo sapiens
tataggagatttaaacattatcaaccttcttaacctgacatttatagaacacttcaccaaaatataagagtgttttctttccctccctccctccctccctyccttccttccttccttccttccttccttccacgagtctcgctctgtagcccaggctggagtgcagtggcgcaatctcagctcactgcaacctccgcctct

SEQ ID NO: 130656 - DNA, 201 bp, Homo sapiens; identical to SEQ ID NO: 22621

SEQ ID NO: 130657 - DNA, 201 bp, Homo sapiens
aatgtccgctttgtagaattgctcatgtaagttccggggatcattaatgggtattgaccagtggtattgaatggtcatgtgtcaagcaacaaggctcatawgaaccctgacctatgtccatagcaccagggcaaagcatggtgggccgcatattctgaatgttaacatgcctgagggaaatacatccactacagggccttc

SEQ ID NO: 130658 - DNA, 201 bp, Homo sapiens
ggagatttaaacattatcaaccttcttaacctgacatttatagaacacttcaccaaaatataagagtgttttctttccctccctccctccctccctccctyccttccttccttccttccttccttccacgagtctcgctctgtagcccaggctggagtgcagtggcgcaatctcagctcactgcaacctccgcctctcggg

SEQ ID NO: 130659 - DNA, 201 bp, Homo sapiens
ccttccttccttccttccttccttccttccacgagtctcgctctgtagcccaggctggagtgcagtggcgcaatctcagctcactgcaacctccgcctctygggttcaatcgattctcctgcctcagcctcctgagtagctgggattagaggctcacgccaccatgcccagctaatttttgtatttttagtagacatgggg

SEQ ID NO: 130660 - DNA, 201 bp, Homo sapiens
cattatttattccatatgggtctatgtacttctacagtgtttcatttctttgcaaagagcgtatatttatgtactacttatataattaaaatctattaatwattaaatatattaaaagttaaaggatagaaagataaaataataaagagaagataggttatatacagataatccaaatgttaaaaataaaaggaagtgaaa

SEQ ID NO: 130661 - DNA, 201 bp, Homo sapiens
aaacccgggaggtggaggttgcagtgagccgagattgcgccactgcactccagcctgggcgacagagtgtgacttcgtctaacaacaacaacaacaacaamaaaaaatctaatgaaaatcaatgaaaaaaaatgagaaaaaacactaaggctcaacagaaaaaggagtaaaaggaatgaacagaaattcacgaaagacaaa

SEQ ID NO: 130662 - DNA, 201 bp, Homo sapiens
tcaactttccaccttcttaatggctctggtaaaagttgaggacaaatttgaaaattattgaagaggaccatttagacttcatgaatgctaattgcctttayttccctctataagtaatctatgacttacgttgtaacttccaagtgaagaaagaactagacaaaggggtaattcatttattccgctactactaaagactaa

SEQ ID NO: 130663 - DNA, 201 bp, Homo sapiens
cccgggaggtggaggttgcagtgagccgagattgcgccactgcactccagcctgggcgacagagtgtgacttcgtctaacaacaacaacaacaacaaaaamaaatctaatgaaaatcaatgaaaaaaaatgagaaaaaacactaaggctcaacagaaaaaggagtaaaaggaatgaacagaaattcacgaaagacaaattg

SEQ ID NO: 130664 - DNA, 201 bp, Homo sapiens
gattttttttaaatatgcttgacaaaattacataccacaacatgacatcctctatttcacaaaagttttgcagaatgttcataaagagaataattatcacmaaaattttggagggctttatctgaaggagatttttaattctttaatttttttttcaagtcacactcttttgacatatctatcaaagtagatttttaactg

SEQ ID NO: 130665 - DNA, 201 bp, Homo sapiens
actattaattagagaaacttaaattgaagtgtgatttttctattgcacatcaaattagcaaagtttttgtcttattaatatttttaaatataatgcccccrtgtaggcaagtgattaaatgctagtgagtgcaaattggttcagccttactaaaaaaacaatttgtcaatatgtatcaagggccttaaaaaatgttcacag

SEQ ID NO: 130666 - DNA, 201 bp, Homo sapiens
atcctgcatctttgcaaggtttgcaacctcactttgccattagattattccatatatttactggataagaggctgatcctccaagacttaaaggagaggaytagtgtttagcaaaaaagaagtctgagtaaggattcattttataggcgattcattcatttttatattgtgcacatttttgattccttatgtaatctcata

SEQ ID NO: 130667 - DNA, 201 bp, Homo sapiens
tgtaattagaataaaaaggtagaagagacataaaaaatgagagaaaggatttcaacatagcaaattaaaagttaaaaacaaagcaaattaaaagttttttwaaaaagcaaatttaggccaggcgtggtgaggctcatgcctgtaattgcagcactttgggaggctgaggtgggaggatcgcttgagttcaggagtttgaga

SEQ ID NO: 130668 - DNA, 201 bp, Homo sapiens
tgaggcatgagactagcttgaacccaggaggtggaggttgcagtgagccaagatgataccacagcactccagcctgggtgacagagtaagaccctgtctcaaaaaaaaaaaaaaatcatatttagagactcagaattttttaagtgtaagacagtagttcagaatcaaaagaccagcatttcatacagaaataagaattct

SEQ ID NO: 130669 - DNA, 201 bp, Homo sapiens
tagaagagaaaaactaaagtatttattctttttggtccggcttctttcactcagtataattattttgagattcatccatactatgtgttgtcatcaatgcyacatttcttttctttttttttttttttgagacagggtctgtctatgttgcccagtctggagtacagtggcatgatcatgactcactgcagccttcaactc

SEQ ID NO: 130670 - DNA, 201 bp, Homo sapiens; identical to SEQ ID NO: 22627

SEQ ID NO: 130671 - DNA, 201 bp, Homo sapiens
gaggcaggagaattgcctgaacccaggaggcagaggttgcagtgagccgagatcatgccattgcactccagcctgggcaacaagagcaaaactccatctcaaaaaaaaaaaaaaaaaaagaatatatttgctatatatgtgtgtatagatatacacacacatatacatatatatactcatatacacacacatgcatttttt

SEQ ID NO: 130672 - DNA, 201 bp, Homo sapiens; identical to SEQ ID NO: 22626

SEQ ID NO: 130673 - DNA, 201 bp, Homo sapiens; identical to SEQ ID NO: 22628

SEQ ID NO: 130674 - DNA, 201 bp, Homo sapiens
aagtttttttaaaaagcaaatttaggccaggcgtggtgaggctcatgcctgtaattgcagcactttgggaggctgaggtgggaggatcgcttgagttcagkagtttgagaccagcctgggcagcatggtgaaaccccatctctacaaaaattgaaaaattagccaggcatggcaaaacatgtctgtagtcccagctacttg

SEQ ID NO: 130675 - DNA, 201 bp, Homo sapiens
tgtgggggaattgttttggcaggtggcgcgatcatcctgaatacccatttcatgatgaatactgactgccgggagttcctgaacagatttttcactcccaygagtgccaagacggtgcaatgggtagtcccctagatgtgaaaatgaagagagagggttttaccatcctgagaagaaataatgatggaaacatgtttaatg

SEQ ID NO: 130676 - DNA, 201 bp, Homo sapiens
agagacataaaaaatgagagaaaggatttcaacatagcaaattaaaagttaaaaacaaagcaaattaaaagtttttttaaaaagcaaatttaggccaggcrtggtgaggctcatgcctgtaattgcagcactttgggaggctgaggtgggaggatcgcttgagttcaggagtttgagaccagcctgggcagcatggtgaaa

SEQ ID NO: 130677 - DNA, 201 bp, Homo sapiens
actcaccaaataccggaaaaagttggtattactatattaatatcatataacacagacttaaaaattaaaagcattattagggataaaaagagttgtgcgtraagatgaaagattgaatttaccaaaaagatatactaattttaagcacatatatatcaaataaagtatcttcaaaatatataaaacaaaaaattgacagaa

SEQ ID NO: 130678 - DNA, 201 bp, Homo sapiens
ttatcagagtggcatgacaataaagtatcacgctaggtcaggacatctagaacattgtgtaaccctagttatacaatgaggaaaaatgcaagcactaagcrtcaggaaattcacccggaaatggggaagactgccatcaaattaggtactctgtggtcaaggaggatctgtaagtctcttgtggtagatttgcataaaatt

SEQ ID NO: 130679 - DNA, 201 bp, Homo sapiens
ctgctgctgaacaccatcttccaatcacaacagcaaggaattgggaatgtgtcattttagctgtaaaggaatgtacatgcaaaatgtcctgattaatgatkattaaaggaaagaccatttctcttttccccaaacccaacctctttgtcacttcagacccctaagggagcctgtgcaacatcggtgaaggttgctattgac

SEQ ID NO: 130680 - DNA, 201 bp, Homo sapiens
attaaaatatcatcagcctatgcccaggaatgaaaaagaaagtaaaataaatatcaaacagaatttccacttagatgggattgcaataggaacaccaaagrgacccagagtagcaatcaaaacacacgtaacacatttttccactactctcttcatgttaaattttctctgtgtttttaaggcaagaaaaaaatcattgtc

SEQ ID NO: 130681 - DNA, 201 bp, Homo sapiens
caacaagagcaaaactccatctcaaaaaaaaaaaaaaaaaaagaatatatttgctatatatgtgtgtatagatatacacacacatatacatatatatactcatatacacacacatgcatttttttcttcttaatcattctctattaatgtttccagttcttcaaatcacctgaatattcatcttcatcttgaatctttaag

SEQ ID NO: 130682 - DNA, 201 bp, Homo sapiens; identical to SEQ ID NO: 22624

SEQ ID NO: 130683 - DNA, 201 bp, Homo sapiens
atataggaatgctcagtaaaagttagtttaattattatttgacaaaggagtttctatggccatgttttgcaaattttcaatcttttgatctctgtattcamtagtgatacttctactatgatgtgctccataaacttaagtagaaatttttctactttaagatgattccaaaagttgtgtctctatttcttccacttcagt

SEQ ID NO: 130684 - DNA, 201 bp, Homo sapiens
tgtccaattttaaccgcaggcagctggagctcatcctgaacaagccaggactcaaacacaagccagtcagcaaccaggtacagcctaatagcttccactakggtgtggggagtgggggcaggatttacatgacacaaagaagcctcagctgggagtcaggaaggctcatgattgctccacctaaatctcatcatgggaccc

SEQ ID NO: 130685 - DNA, 201 bp, Homo sapiens
tgggagtgtccaattttaaccgcaggcagctggagctcatcctgaacaagccaggactcaaacacaagccagtcagcaaccaggtacagcctaatagcttycactagggtgtggggagtgggggcaggatttacatgacacaaagaagcctcagctgggagtcaggaaggctcatgattgctccacctaaatctcatcatg

SEQ ID NO: 130686 - DNA, 201 bp, Homo sapiens
cagctgtgcaatttttgagtgaacttttttctgtgggggaattgttttggcaggtggcgcgatcatcctgaatacccatttcatgatgaatactgactgcmgggagttcctgaacagatttttcactcccatgagtgccaagacggtgcaatgggtagtcccctagatgtgaaaatgaagagagagggttttaccatcctg

SEQ ID NO: 130687 - DNA, 201 bp, Homo sapiens
aaattcactgccatcatcatcgtcataatcatccagcaaacttattttgctactcatcacctttctagatctcaaactctcaacacgcaggaggtctagtkagaggggcaagtaaaaatgctaatgagactgggtgtggtggctcacacctatagtcccagcactttgggaggccgagacagggcgactgcttcagcccag

SEQ ID NO: 130688 - DNA, 201 bp, Homo sapiens
gaaaccaggtgcagtgtctcacatctgtaattccagcactctgggaggctaagataggagaatcacttgatgctaggagttcgacaccagcctggacaacrtagcaagaccctatctctacaaaaaatttaaaaataagccatcatggtggcatgcacctgtagtactagctacttaggacgctgaggtgggaggatcact

SEQ ID NO: 130689 - DNA, 201 bp, Homo sapiens
ttctctattaatgtttccagttcttcaaatcacctgaatattcatcttcatcttgaatctttaagtgaacattcagaaaatgctaagatgattcatatagyttggacacttactttactgatcctactgtttttcatgggtcagaaagtacagtgactggattaatattgaatttctgaattaataaaacaacttcctaat

SEQ ID NO: 130690 - DNA, 201 bp, Homo sapiens
atacatatatatactcatatacacacacatgcatttttttcttcttaatcattctctattaatgtttccagttcttcaaatcacctgaatattcatcttcrtcttgaatctttaagtgaacattcagaaaatgctaagatgattcatatagtttggacacttactttactgatcctactgtttttcatgggtcagaaagta

SEQ ID NO: 130691 - DNA, 201 bp, Homo sapiens
tgggtgtagtggcagttgcctgtaattccagctactcaggaggctgaggcaggagaattgcctgaacccaggaggcagaggttgcagtgagccgagatcaygccattgcactccagcctgggcaacaagagcaaaactccatctcaaaaaaaaaaaaaaaaaaagaatatatttgctatatatgtgtgtatagatatacac

SEQ ID NO: 130692 - DNA, 201 bp, Homo sapiens
tggagaaaccccgtctctactaaaaatacaaaaattagctgggtgtagtggcagttgcctgtaattccagctactcaggaggctgaggcaggagaattgcytgaacccaggaggcagaggttgcagtgagccgagatcatgccattgcactccagcctgggcaacaagagcaaaactccatctcaaaaaaaaaaaaaaaaa

SEQ ID NO: 130693 - DNA, 201 bp, Homo sapiens
aagtcttgcccatttgaatttcaaatgtaactgagcatcctgtatgttgcctgaaaactctagggatttcctgtctaattaaccatctctgcaaagcatckctgtgggttatgctctttggataccactcattttgataacagtgcccacttcacttctgaagttagtactaccatgtagcctctattattttaaaattcc

SEQ ID NO: 130694 - DNA, 201 bp, Homo sapiens
gcataataaataatccaataaagaaggcaaaatggaataacaaaaataatcaatccaagacaaagcagaaaaaaaaagaaaaggggcaataaacagatgaraaaagtagcaaataaagggcaagatgggagatttaaactcactaatatcaataattgcagtatatataaatggtctaagcaccccaattaaaaggcatag

SEQ ID NO: 130695 - DNA, 201 bp, Homo sapiens
cttaggtcgggagttagagatcagcctggccaacatggagaaaccccgtctctactaaaaatacaaaaattagctgggtgtagtggcagttgcctgtaatyccagctactcaggaggctgaggcaggagaattgcctgaacccaggaggcagaggttgcagtgagccgagatcatgccattgcactccagcctgggcaaca

SEQ ID NO: 130696 - DNA, 201 bp, Homo sapiens
ttttgttttgttttgtttgtttttgcttctttgctattgagttgtagaagttccttttaattatatcttggatattaaccccttgtgagatatacggtttrcaaatattttcttctattccataagttgccttttaactctgttgagtgtttccttttctgtgcagaggctttttagcttgatgtagtaccaacaacctat

SEQ ID NO: 130697 - DNA, 201 bp, Homo sapiens
aaaacataaagagaaaatgttaaaacttccagagcataataaataatccaataaagaaggcaaaatggaataacaaaaataatcaatccaagacaaagcaraaaaaaaaagaaaaggggcaataaacagatgagaaaagtagcaaataaagggcaagatgggagatttaaactcactaatatcaataattgcagtatatat

SEQ ID NO: 130698 - DNA, 201 bp, Homo sapiens
ctatcccaatgtcatgatgctttttcccttatgtttccttctaggagctttacagtttctggtcttaaaaatctttaatccattttgagttgactttttgygtatggtgtaagatacaggtccaatttcactctgatgacagttccaatattaggatctatggttctgtttaggctctcagttgtttctaccagtcttcct

SEQ ID NO: 130699 - DNA, 201 bp, Homo sapiens
gcaggattcttctttgaaaaagatcatacctataattagaacaaatctccaagatcattttctttgatttcataaaatcctgcatctttgcaaggtttgcmacctcactttgccattagattattccatatatttactggataagaggctgatcctccaagacttaaaggagaggactagtgtttagcaaaaaagaagtct

SEQ ID NO: 130700 - DNA, 201 bp, Homo sapiens
gaagatagcagaaggaaaggtgcggagggaagatatcttctactgtggaaaggtgagatcttgccttcagcctccactggggacagtgagaaggtttcagktgttcattttattattcatcttccgtgtgtgtgtgtgtgtaattgcactcatgagtaggcagtacttaataacagtttgggtttgtttgtttgtttgttt

SEQ ID NO: 130701 - DNA, 201 bp, Homo sapiens
ggataactgataaagaacagaggtttattctcttacagttctggaggccgcaaagtccaagatcaagatgccggcaggttagggcccagtctctcacttcmaagggtgtaccttgattgctgcattctctggagaggagaaacactattactcacatgacagaagagggagcacccactctcacaagccctttttatggtg

SEQ ID NO: 130702 - DNA, 201 bp, Homo sapiens
acggggtttcactgtgttagccaggatggtcttgatctcctgaccttgtgatccaccctcctccgcctctcaaagtgctgagattataggcatgagccaaygcgcccggcctatagtcagagattctattaaaatgatatcatactaaaatgataagtatacagaaagagctataggatataggagatttaaacattatca

SEQ ID NO: 130703 - DNA, 201 bp, Homo sapiens
tggcaggtggcgcgatcatcctgaatacccatttcatgatgaatactgactgccgggagttcctgaacagatttttcactcccatgagtgccaagacggtrcaatgggtagtcccctagatgtgaaaatgaagagagagggttttaccatcctgagaagaaataatgatggaaacatgtttaatgtttgtgcagtgtaaat

SEQ ID NO: 130704 - DNA, 201 bp, Homo sapiens
ggcctgctgggtcatatggcccaagtggcagggatgcttgtggtaaagtctggagttctgctgagcccctccccattctgggcctaatgaaagctggtgtwttcatgtcacacagtaaatgggtaggaatagtactgcaagtatggaatatgctgcctctggagcctgagggcgccttttgggtactgtgcttccttctta

SEQ ID NO: 130705 - DNA, 201 bp, Homo sapiens
tagacatttgcagagatattcatacatctttggaaggctcccaccggtggccccactttctgatcccaagcttgaccttcaaaaatgttctattatttccrttatttcagatctttgacttttctctcactgaagaagaaatgaaggacattgaagccttgaataaaaatgtccgctttgtagaattgctcatgtaagttc

SEQ ID NO: 130706 - DNA, 201 bp, Homo sapiens
gtctacagaggacagccgtaattgagctcaacaactctggtgtttttgttgctaaagcactgctgtctctttgataaaaggagtgttctctgggccctgckgcaaaacatagatcatccgtggatttccagccttacatagtatatctactatagtgggctcccttctctgagcttcctgagccctcttttgaccatctgc

SEQ ID NO: 130707 - DNA, 201 bp, Homo sapiens
agctttaatcttgaaaggatcaaagaaaattttcaggtaagagaattgcttttggagatgtgaaaagatgggtatgtttgctatttttgcttttatagaaygtgttcagcttaataggaaacctgtaacactctcatattttattttataccagccccttgacccatgtagcccatatctaggtttaattttcattcaatt

SEQ ID NO: 130708 - DNA, 201 bp, Homo sapiens
ggagattctattaataaaatggattttattgaagaattttttttaacagtacaattgcattcaacaacgtggccttgattttgtgctctgctctccaatgyaaccacataggttgagtgccatccgtatttcacccagccaaaactcttgaaattttgccaacaacatgacattgtcattactgcatatagccctttgggg

SEQ ID NO: 130709 - DNA, 201 bp, Homo sapiens
atccacaccagtcgttctccacccttatccgacagctctttgacttcctctcccataagaatcttgtcctatatatttcagccactaattcccatgcctakcccttggaaattgcaataacaacttcctaataaatcctccatagcctcaatttcaaacatccccctctctttcctacactagcaattgttcctctctact

SEQ ID NO: 130710 - DNA, 201 bp, Homo sapiens
atgagaatgaaaatcacagccaattctcactctttagggaatagactcacccaataaccatgaattttgctgggtatgaaagcaaggagcaacaaaataawaaattatgctctcttagaatgaaggtaaaataaactgttagaaatattttaaaagaatggcaaagatcaataaagcataaagaataaagggaaaaataaa

SEQ ID NO: 130711 - DNA, 201 bp, Homo sapiens
aagagatcaactgcattactaatgtgtaggctcattgaagattaaaacacattttgatggactttttgaggactgaaaattttgctgttcaaaaattatargagtgttacaagtgacctttgcgatggaaagcatttggactttatagcatctagcaaatcgcaattttgtaccagagaaaatgccactctccttgaaatt

SEQ ID NO: 130712 - DNA, 201 bp, Homo sapiens
tcctgacaataacatttgccaaaatgcctcatcctaaaaagtggttgacactcttttccacaatcttagaaagagatcaactgcattactaatgtgtaggytcattgaagattaaaacacattttgatggactttttgaggactgaaaattttgctgttcaaaaattataggagtgttacaagtgacctttgcgatggaaa

SEQ ID NO: 130713 - DNA, 201 bp, Homo sapiens
agccacaatattagacaattacatcttcagagcttttttgctacatgatagaatgcaactcaaactttagcaaaaaataaaagataatttattggcttgcrtaactggaaagtccatgagtagatcagaaatggctagacacaggtactcaaatgatttataaagagatttagtcctctctctctctccctcctttctctc

SEQ ID NO: 130714 - DNA, 201 bp, Homo sapiens
ttttcaggtaagagaattgcttttggagatgtgaaaagatgggtatgtttgctatttttgcttttatagaatgtgttcagcttaataggaaacctgtaacrctctcatattttattttataccagccccttgacccatgtagcccatatctaggtttaattttcattcaatttgagacaattgctagtacttcagagattg

SEQ ID NO: 130715 - DNA, 201 bp, Homo sapiens
acagaaaatattaaactatataactttcagaaaaaaaacacagaattaaatttttgtgacctggggttagatacttaaagcacaatacaaagaaaatgacwaataaacattaccaaaattaaaatattttgttctatgaaagatacagttaagagaatgaaaagacaagctacagactgagaaaaaatatttgcaaactac

SEQ ID NO: 130716 - DNA, 201 bp, Homo sapiens
acttctttctattggtgtcactttaaaaaacggacttggggcctggtgcggtggctcacgcctgtaatcccagcactttgggaggccgaggcaggcgatcrcgaggtcgggagtttgagaccagcctgaccaacatggtgaaaccccgtctgtactaaaaatacaaaaattagctgggcttggtggcacatgcctgtaatc

SEQ ID NO: 130717 - DNA, 201 bp, Homo sapiens
cagactcaagcaatcattctgactcaacctcctgagtagctgggaccacaggcaggtgccaccatgcccagctaatttttgtattttttgtagagaagggrtttcatcatattgcccaggttggtcttgaactcctgggttcaagcgatccgcccgcctcagcctcccaaagtgctggaattataggcgtgagacactatg

SEQ ID NO: 130718 - DNA, 201 bp, Homo sapiens
gggagacacaacaaggggtgggggcccgcaggcggggcggggcgaagcaggtgatatcaagcccagagccccagcctctccccacagtctcaccatggccygcaccgtggtgctcatcaccggctgttcctcgggcatcggcctgcacttggccgtacgtctggcttcagatccatcccagagcttcaaaggtatagatag

SEQ ID NO: 130719 - DNA, 201 bp, Homo sapiens; identical to SEQ ID NO: 22632

SEQ ID NO: 130720 - DNA, 201 bp, Homo sapiens
ctgcacttggccgtacgtctggcttcagatccatcccagagcttcaaaggtatagataggcagggacagggagggagagaagggaggagcccttggaggcyagaagggaagtcagatcttcctcctctcccaaaacctccagtgtatgccacgttgagggacctgaaaacacagggccggctgtgggaggcggcccgggcc

SEQ ID NO: 130721 - DNA, 201 bp, Homo sapiens
gatcttcctcctctcccaaaacctccagtgtatgccacgttgagggacctgaaaacacagggccggctgtgggaggcggcccgggccctggcatgccctcmgggatccctggagacgttgcagctggacgtaagggactcaaaatccgtggccgctgcccgggaacgcgtgactgagggccgcgtggacgtgctgggtgag

SEQ ID NO: 130722 - DNA, 201 bp, Homo sapiens
gggacgcgtgttggtgaccgggagcgtgggaggattgatgggtgagtggtagggagtggcctcggcagctccagattctttgtgtgcggagctgagccttsaaggcaggttccgcggggagggtggaggggggtgccgtcagcttggaggggcaccgtctgcccggggatgaccccctggccgctgcgcctcaggaacctc

SEQ ID NO: 130723 - DNA, 201 bp, Homo sapiens
ggaggattgatgggtgagtggtagggagtggcctcggcagctccagattctttgtgtgcggagctgagccttgaaggcaggttccgcggggagggtggagkggggtgccgtcagcttggaggggcaccgtctgcccggggatgaccccctggccgctgcgcctcaggaacctcgtctccccacctaagggctgcctttcaa

SEQ ID NO: 130724 - DNA, 201 bp, Homo sapiens; identical to SEQ ID NO: 22634

SEQ ID NO: 130725 - DNA, 201 bp, Homo sapiens
gatggccctttggagtgggcagggacatgaccacagaaagcctgggaagtggaaacagacaggagcctgctggagctcttggagctttgtgtggggcactrggggaaggaggcaggcactccaccctgacctgcccctacctcggatgagggtcttctctgcctgttggatgatgtgctgcccctgctcttggaggaagag

SEQ ID NO: 130726 - DNA, 201 bp, Homo sapiens
cgaaggcttatgcgagagtctggcggttctgctgctgccctttggggtccagtgagtcaacacccccgttccccgaaccctcttaactctgacctagagaygccgagcaccctgtcctgcgggagccgctctggggcgatctccctggccctctctgcccggctcacattagctgtgtgccaggcacttgggctgggcgca

SEQ ID NO: 130727 - DNA, 201 bp, Homo sapiens; identical to SEQ ID NO: 122166

SEQ ID NO: 130728 - DNA, 201 bp, Homo sapiens; identical to SEQ ID NO: 122170

SEQ ID NO: 130729 - DNA, 201 bp, Homo sapiens
actgagggccgcgtggacgtgctgggtgagcctcctggaagcatatgggctcctaggagccttctccgccctgcgttgaaaccaacatgttcccaggcccmgggagcacgaggggacaggccgtgctgagggtgatgctgaggcgggctggtcgggcctcttgtctccgcagtgtgtaacgcaggcctgggcctgctgggg

SEQ ID NO: 130730 - DNA, 201 bp, Homo sapiens
ctacctctggatgagggtcttctctgcctgttggatgatgtgctgcccctgctcttggaggaagaggcctcccagccaccccctcctgccagtcgccctgmcctgctgacccagacagatctgctatccctacagcatccaggaaggccacagggagggggcccaggtggcatgggtttctgaggcctgggatctgctctc

SEQ ID NO: 130731 - DNA, 201 bp, Homo sapiens; identical to SEQ ID NO: 122168

SEQ ID NO: 130732 - DNA, 201 bp, Homo sapiens
tttaaaaaccctggagtagtccttgactccagtctctctcacctttcaaccaattcagcagcaaatactgacagctctacctttgctcatcaaagcatatycccaaatcaccctattccagactgcacactgtcatctctcccttcaattacagcagtagcctcctaactagttttcttgattccactcttgcccatcagc

SEQ ID NO: 130733 - DNA, 201 bp, Homo sapiens
ccaaaacctccagtgtatgccacgttgagggacctgaaaacacagggccggctgtgggaggcggcccgggccctggcatgccctccgggatccctggagasgttgcagctggacgtaagggactcaaaatccgtggccgctgcccgggaacgcgtgactgagggccgcgtggacgtgctgggtgagcctcctggaagcata

SEQ ID NO: 130734 - DNA, 201 bp, Homo sapiens
ctgagccttgaaggcaggttccgcggggagggtggaggggggtgccgtcagcttggaggggcaccgtctgcccggggatgaccccctggccgctgcgcctmaggaacctcgtctccccacctaagggctgcctttcaatgacgtttattgcgccagcaagttcgcgctcgaaggcttatgcgagagtctggcggttctgct

SEQ ID NO: 130735 - DNA, 201 bp, Homo sapiens; identical to SEQ ID NO: 22636

SEQ ID NO: 130736 - DNA, 201 bp, Homo sapiens; identical to SEQ ID NO: 22637

SEQ ID NO: 130737 - DNA, 201 bp, Homo sapiens; identical to SEQ ID NO: 22638

SEQ ID NO: 130738 - DNA, 201 bp, Homo sapiens
gggagcgtgggaggattgatgggtgagtggtagggagtggcctcggcagctccagattctttgtgtgcggagctgagccttgaaggcaggttccgcggggrgggtggaggggggtgccgtcagcttggaggggcaccgtctgcccggggatgaccccctggccgctgcgcctcaggaacctcgtctccccacctaagggct

SEQ ID NO: 130739 - DNA, 201 bp, Homo sapiens
cgctagattcgaatcctgacaccagggctcccttgtagcctcagatggatttgggagggctgctccggcaggaacccgcgtttcaaatgttctggttatcmccagcgccctttccgcctcacttcccagcgcagcggtgctgctcgcggtcgggggccgggacgtggttggggctgggactggggttggggctgggactgg

SEQ ID NO: 130740 - DNA, 201 bp, Homo sapiens
cctcgggcatcggcctgcacttggccgtacgtctggcttcagatccatcccagagcttcaaaggtatagataggcagggacagggagggagagaagggagragcccttggaggctagaagggaagtcagatcttcctcctctcccaaaacctccagtgtatgccacgttgagggacctgaaaacacagggccggctgtggg

SEQ ID NO: 130741 - DNA, 201 bp, Homo sapiens; identical to SEQ ID NO: 22639

SEQ ID NO: 130742 - DNA, 201 bp, Homo sapiens; identical to SEQ ID NO: 122169

SEQ ID NO: 130743 - DNA, 201 bp, Homo sapiens
ttttttgcagagaccgggtctcactctgttacctggcctggtcttgaactcctgggctccaacaatcccctttcctgggcctcccaaagtgctgggattasaggcatgagccaccgtgcccagcctcaaagcatattttaaaggatagaaataaacagccatatgaagagatacagacagggcggtctggaagggtccaga

SEQ ID NO: 130744 - DNA, 201 bp, Homo sapiens; identical to SEQ ID NO: 22641

SEQ ID NO: 130745 - DNA, 201 bp, Homo sapiens; identical to SEQ ID NO: 22642

SEQ ID NO: 130746 - DNA, 201 bp, Homo sapiens; identical to SEQ ID NO: 22643

SEQ ID NO: 130747 - DNA, 201 bp, Homo sapiens; identical to SEQ ID NO: 22644

SEQ ID NO: 130748 - DNA, 201 bp, Homo sapiens; identical to SEQ ID NO: 22645

SEQ ID NO: 130749 - DNA, 201 bp, Homo sapiens; identical to SEQ ID NO: 22646

SEQ ID NO: 130750 - DNA, 201 bp, Homo sapiens
ggccctcccctatcccaccctgagcaggactggagaactgggtctgggccgaggatatggtctttgtccccatggctgtgccctggagccctgagcaccarctgcagaggctgcaggtgacccggaagctgctggagatggaggagcaggccgccttcctcgtgggaagcgccacccctcgctacctgtacctggccagca

SEQ ID NO: 130751 - DNA, 201 bp, Homo sapiens
cctgggcctgtccttgagatcttagagccctcttagttccagtttcatggactgagtcctttccaggctccaggactcaggagggatggaagttaccaggsaaaatgacatctcctgtatctgaagcttctcccattcctgacttgatgaatttcacaatgttggcctggttctgcttcccaagcgctggttctttttcct

SEQ ID NO: 130752 - DNA, 201 bp, Homo sapiens
ctttcttctcccctgctaggatttggtggcctgggtgacagctggttttctgcatatcccacatgcagaggacattcctaacacagtgactgtggggaacrgcgtgggcttcttcctccgaccctataacttctttgacgaagacccctccttctactctgccgactccatctacttccgaggggaccaggatgctggggc

SEQ ID NO: 130753 - DNA, 201 bp, Homo sapiens; identical to SEQ ID NO: 22648

SEQ ID NO: 130754 - DNA, 201 bp, Homo sapiens
gggattctgtagcgccgagtcagttgtgtgactgcaattggggaagctgagctctgagcactcagttccctttcatcataatcaggcagcaggatggggtyaatggccatggaggcctgaccagtgcctccctaggtaccagctggctgtgacccagcggaaggaggaggagcccagtagcagcagcgttttcaatcagaa

SEQ ID NO: 130755 - DNA, 201 bp, Homo sapiens; identical to SEQ ID NO: 22650

SEQ ID NO: 130756 - DNA, 201 bp, Homo sapiens; identical to SEQ ID NO: 22651

SEQ ID NO: 130757 - DNA, 201 bp, Homo sapiens; identical to SEQ ID NO: 22653

SEQ ID NO: 130758 - DNA, 201 bp, Homo sapiens; identical to SEQ ID NO: 22652

SEQ ID NO: 130759 - DNA, 201 bp, Homo sapiens; identical to SEQ ID NO: 22654

SEQ ID NO: 130760 - DNA, 201 bp, Homo sapiens
cagacctcgtgatcctctttcttctcccctgctaggatttggtggcctgggtgacagctggttttctgcatatcccacatgcagaggacattcctaacacrgtgactgtggggaacggcgtgggcttcttcctccgaccctataacttctttgacgaagacccctccttctactctgccgactccatctacttccgagggg

SEQ ID NO: 130761 - DNA, 201 bp, Homo sapiens; identical to SEQ ID NO: 22656

SEQ ID NO: 130762 - DNA, 201 bp, Homo sapiens; identical to SEQ ID NO: 22657

SEQ ID NO: 130763 - DNA, 201 bp, Homo sapiens; identical to SEQ ID NO: 22658

SEQ ID NO: 130764 - DNA, 201 bp, Homo sapiens
gagtcagggaatgtttgggctgaaagggatccagtagtgcaatccgttgttttacagataaggaaacaaagcccaacaccatgaagggacttataaaaatmaggtagtgaagtagcagcagggcttaaataaaaacccatgtctgtaccaaccacagagtcacccatccaggttaaaataaccagagaaacagaagatatt

SEQ ID NO: 130765 - DNA, 201 bp, Homo sapiens
ccaacaggcatctttggacttttgagtactggctttaatttacaaaaattccactgagagcacctaagtttgccaggctccaacatttctgcaggggctgwtttctttgctgaaggatctgcacctgtgttctgttatggttgcctcttctgttgcaggtgcttgaatgtcattttgtggttgggattctgggctgtgcag

SEQ ID NO: 130766 - DNA, 201 bp, Homo sapiens
ccttgctgctcattttcctcatcaagttgttgctggagtcctgtcaggtatgggctgatctgactcccttccttctcccccaaaccccattccgtttctcyccctaatcaggacaaaatcccagcattccagccacatcctgtgtgtaatcagtactgttagcatttctgtgggttgaaagtcaagaatgagcaacttgaa

SEQ ID NO: 130767 - DNA, 201 bp, Homo sapiens
gctgaaggatctgcacctgtgttctgttatggttgcctcttctgttgcaggtgcttgaatgtcattttgtggttgggattctgggctgtgcagctgaatgbctgtctgtcacgaatctaccttgctgctcattttcctcatcaagttgttgctggagtcctgtcaggtatgggctgatctgactcccttccttctccccca

SEQ ID NO: 130768 - DNA, 201 bp, Homo sapiens
tgaatatgtgttttcttagatccaattaacaagggtaagacaagatttaagttaagcataagaaagattttgtgggaggcactggaatataagaccttaamaaaactgtggaatttctcccctggagatttgtaagaacggaacatagcagcattcaaagaagaatgttgagaacaagggagataatggtttcatggtaat

SEQ ID NO: 130769 - DNA, 201 bp, Homo sapiens
gcacctgtgttctgttatggttgcctcttctgttgcaggtgcttgaatgtcattttgtggttgggattctgggctgtgcagctgaatgtctgtctgtcacraatctaccttgctgctcattttcctcatcaagttgttgctggagtcctgtcaggtatgggctgatctgactcccttccttctcccccaaaccccattccg

SEQ ID NO: 130770 - DNA, 201 bp, Homo sapiens
cccaccaactacatgtccttggcaagtcatatcaattatctgagtttctgttttataatctacaaataggttatctctggcagcttaataataatcagggttaacatttattaaacagtgtgtgccagtccatgtgctatgtgcttttctgtgaggtagttactgctatttacagaaacagtagatgcagagaccaaggtg

SEQ ID NO: 130771 - DNA, 201 bp, Homo sapiens; identical to SEQ ID NO: 22665

SEQ ID NO: 130772 - DNA, 201 bp, Homo sapiens
ttctttgtccccaaataagtgcagttgcaggcatagaaaatctgacatctttgcaagaatcatcgtggatgtagactctgtcctgtgtctctggcctggtwtcggggaccaggagggcagacccttgcactgccaagaagcatgccaaagttaatcattggccctgctgagtacatggccgatcaggctgtttttgtgtgc

SEQ ID NO: 130773 - DNA, 201 bp, Homo sapiens
gaaaatacaggaaagcctatttcatatgggttaaagggtaggacagttgaatttcgtgaaaagtctgagttatataggctttgagcaaagagttttattartatgaagcagaagaggtaacataaagaaagatgtatggggccaggcatggtggctcacacctgtaatcccagcactttgggaggccgaggtgggcgaatc

SEQ ID NO: 130774 - DNA, 201 bp, Homo sapiens
tgttctgttatggttgcctcttctgttgcaggtgcttgaatgtcattttgtggttgggattctgggctgtgcagctgaatgtctgtctgtcacgaatctamcttgctgctcattttcctcatcaagttgttgctggagtcctgtcaggtatgggctgatctgactcccttccttctcccccaaaccccattccgtttctct

SEQ ID NO: 130775 - DNA, 201 bp, Homo sapiens
cagcaacacttccgtgcccctgataaagcagttccctgtaacctgtgagactggaccaggtaagcgtcccagcccctgcagacagaagctgagtggacctygtttacctgttatggatgaaactgaccttgaggggacatgaggagagccattcctttgtacttttgtcatgctcttcaattggcacaaattaattcactt

SEQ ID NO: 130776 - DNA, 201 bp, Homo sapiens
cttttgtcatgctcttcaattggcacaaattaattcacttctgcaatactttcctgaatagcacagtagtattggaaatctgcctattacagaacctggakggagtccagagaggcacgggcatccatgggcaaagggctcgtgagagtcaccgccctgcagcgctgtgtcctgagaaaggagggggcagaagcctgagct

SEQ ID NO: 130777 - DNA, 201 bp, Homo sapiens; identical to SEQ ID NO: 22674

SEQ ID NO: 130778 - DNA, 201 bp, Homo sapiens
cacaaattaattcacttctgcaatactttcctgaatagcacagtagtattggaaatctgcctattacagaacctggatggagtccagagaggcacgggcayccatgggcaaagggctcgtgagagtcaccgccctgcagcgctgtgtcctgagaaaggagggggcagaagcctgagcttctgggggtccttcccaatggcc

SEQ ID NO: 130779 - DNA, 201 bp, Homo sapiens; identical to SEQ ID NO: 22677

SEQ ID NO: 130780 - DNA, 201 bp, Homo sapiens
agaacttaaaacttgaatagctagagcaccaagatttttctttgtccccaaataagtgcagttgcaggcatagaaaatctgacatctttgcaagaatcatygtggatgtagactctgtcctgtgtctctggcctggtttcggggaccaggagggcagacccttgcactgccaagaagcatgccaaagttaatcattggccc

SEQ ID NO: 130781 - DNA, 201 bp, Homo sapiens; identical to SEQ ID NO: 22683

SEQ ID NO: 130782 - DNA, 201 bp, Homo sapiens
taataaataagtaaactaggccagttgtggttgctcatgcctgtaatcccagcactttgggaagccaaggtaggtagatcacctgaggtcaggagttcaaraccagcctggccaacattgcaaaatcctgtctttactaaaaatggaaaaattggtcaggcgtgatggcacacgcctgtagtctcagctacctgggaggct

SEQ ID NO: 130783 - DNA, 201 bp, Homo sapiens; identical to SEQ ID NO: 22686

SEQ ID NO: 130784 - DNA, 201 bp, Homo sapiens; identical to SEQ ID NO: 22688

SEQ ID NO: 130785 - DNA, 201 bp, Homo sapiens; identical to SEQ ID NO: 22690

SEQ ID NO: 130786 - DNA, 201 bp, Homo sapiens
atgtttgggctgaaagggatccagtagtgcaatccgttgttttacagataaggaaacaaagcccaacaccatgaagggacttataaaaataaggtagtgargtagcagcagggcttaaataaaaacccatgtctgtaccaaccacagagtcacccatccaggttaaaataaccagagaaacagaagatattcctactacag

SEQ ID NO: 130787 - DNA, 201 bp, Homo sapiens
cattcccattctggccactttctttctttctttcttttgtttgtttgtttgagatggagtctcgcactgttgcctggctggagtgcaatggtgcaatctcrgctcactgcaacctctgcctctccggttcaagtgattctcctgcctcagcctcccaagtagctgggattacaggtgcccgccaccatgcccagctaattt

SEQ ID NO: 130788 - DNA, 201 bp, Homo sapiens
cagactcatagcagagcaatcaccaccaagcctggaataactgcaagggctctgctgacatcttcctgaggtgccaaggaaatgaggatggaggaaggaakgaatgttctccatgactttgggatccagtcaacacattacctccaggtgaattaccaagactcccaggactggttcatcttggtgtccgtgatcgcagac

SEQ ID NO: 130789 - DNA, 201 bp, Homo sapiens
ggccactttctttctttctttcttttgtttgtttgtttgagatggagtctcgcactgttgcctggctggagtgcaatggtgcaatctcagctcactgcaayctctgcctctccggttcaagtgattctcctgcctcagcctcccaagtagctgggattacaggtgcccgccaccatgcccagctaattttttttgtatttt

SEQ ID NO: 130790 - DNA, 201 bp, Homo sapiens
gcagacctcaggaatgccttctacgtcctcttccccatctggttccatcttcaggaagctgtgggcattaaactcctttgggtagctgtgattggagactrgctcaacctcgtctttaagtggtaagaaccatatagagaggagatcagcaagaaaagaggctggcattcgctctcgcaatgtctgtccatcagaagttgc

SEQ ID NO: 130791 - DNA, 201 bp, Homo sapiens
aacctgggaggtggtgagccaagattgcgccattgcactccagcctgggcgacaaaatgagacaccatctgaaaaaaaaaaaaaaatatatatatatatayacacacacacacacacacacacacacacacacacacatataatactagaaaatgattgtttataggcaaaaaaaaaaaaaaagaagaagaagaagaaaag

SEQ ID NO: 130792 - DNA, 201 bp, Homo sapiens
cagacctcaggaatgccttctacgtcctcttccccatctggttccatcttcaggaagctgtgggcattaaactcctttgggtagctgtgattggagactgrctcaacctcgtctttaagtggtaagaaccatatagagaggagatcagcaagaaaagaggctggcattcgctctcgcaatgtctgtccatcagaagttgct

SEQ ID NO: 130793 - DNA, 201 bp, Homo sapiens
tctacgtcctcttccccatctggttccatcttcaggaagctgtgggcattaaactcctttgggtagctgtgattggagactggctcaacctcgtctttaastggtaagaaccatatagagaggagatcagcaagaaaagaggctggcattcgctctcgcaatgtctgtccatcagaagttgctttccccaggctattcagg

SEQ ID NO: 130794 - DNA, 201 bp, Homo sapiens
ctacgtcctcttccccatctggttccatcttcaggaagctgtgggcattaaactcctttgggtagctgtgattggagactggctcaacctcgtctttaagyggtaagaaccatatagagaggagatcagcaagaaaagaggctggcattcgctctcgcaatgtctgtccatcagaagttgctttccccaggctattcagga

SEQ ID NO: 130795 - DNA, 201 bp, Homo sapiens
ccttctcaggctacactcttcttgaaggtgtaggctttgggcaaaagcattcattcagtaaccccagaaacttgttctgtttttccataggattctctttrgacagcgtccatactggtgggttttggatactgactactacagcaacacttccgtgcccctgataaagcagttccctgtaacctgtgagactggaccagg

SEQ ID NO: 130796 - DNA, 201 bp, Homo sapiens
caggctacactcttcttgaaggtgtaggctttgggcaaaagcattcattcagtaaccccagaaacttgttctgtttttccataggattctctttggacagygtccatactggtgggttttggatactgactactacagcaacacttccgtgcccctgataaagcagttccctgtaacctgtgagactggaccaggtaagcg

SEQ ID NO: 130797 - DNA, 201 bp, Homo sapiens
aggctacactcttcttgaaggtgtaggctttgggcaaaagcattcattcagtaaccccagaaacttgttctgtttttccataggattctctttggacagcrtccatactggtgggttttggatactgactactacagcaacacttccgtgcccctgataaagcagttccctgtaacctgtgagactggaccaggtaagcgt

SEQ ID NO: 130798 - DNA, 201 bp, Homo sapiens
ttccataggattctctttggacagcgtccatactggtgggttttggatactgactactacagcaacacttccgtgcccctgataaagcagttccctgtaayctgtgagactggaccaggtaagcgtcccagcccctgcagacagaagctgagtggacctcgtttacctgttatggatgaaactgaccttgaggggacatga

SEQ ID NO: 130799 - DNA, 201 bp, Homo sapiens
taggattctctttggacagcgtccatactggtgggttttggatactgactactacagcaacacttccgtgcccctgataaagcagttccctgtaacctgtvagactggaccaggtaagcgtcccagcccctgcagacagaagctgagtggacctcgtttacctgttatggatgaaactgaccttgaggggacatgaggaga

SEQ ID NO: 130800 - DNA, 201 bp, Homo sapiens; identical to SEQ ID NO: 22710

SEQ ID NO: 130801 - DNA, 201 bp, Homo sapiens; identical to SEQ ID NO: 22659

SEQ ID NO: 130802 - DNA, 201 bp, Homo sapiens
atctctcacagtcatgctttcttccactcaggcattgctgttgcagaaactttcagccacatccacagcatctataatgccagcctcaagaaatattttcycattaccttcttcctgttcagcttcgccatcggattttatctgctgctcaagggactgggtgtagacctcctgtggactctggagaaagcccagaggtgg

SEQ ID NO: 130803 - DNA, 201 bp, Homo sapiens
tcatcttggtgtccgtgatcgcagacctcaggaatgccttctacgtcctcttccccatctggttccatcttcaggaagctgtgggcattaaactcctttgrgtagctgtgattggagactggctcaacctcgtctttaagtggtaagaaccatatagagaggagatcagcaagaaaagaggctggcattcgctctcgcaat

SEQ ID NO: 130804 - DNA, 201 bp, Homo sapiens; identical to SEQ ID NO: 22663

SEQ ID NO: 130805 - DNA, 201 bp, Homo sapiens
caaattattatctctgctccttaggtagagtagctaaggctcagaaagtaggccgggcgcggtggctcacgcctgtaatcctagcactttgggaggccaasgcaggtggatcacctgaggtcaggagtttgagaccagcctggccaacatggtgaaacctcgtcactaataaaaaaatacaaaaacttagccaggcatggt

SEQ ID NO: 130806 - DNA, 201 bp, Homo sapiens
gccaagggtaggaggattgcttgagcccaagagttcaaaaccagcctgggcaaaaacaatcaaacaaacaaacaaaacacatttaaaaaatttgctgtgtrtggtggtgtgcacctgtggtcccagctactcagggggctgaggtgggaggattgcttgagtccaggaggtcgaggctgcagtgagctatgatcatggcac

SEQ ID NO: 130807 - DNA, 201 bp, Homo sapiens
gctagagtgcagtggcgcagtctcggctcactgtaacctccacctcctgagttcaagcaattctcctgcctcagcctctcaaatagctgggattacaggcrtgagccaccccacctggctaattttgtaattttttttttagtagagatggggtttcacctgttgatcaggctggtctcaaactcctgacctcaagtgatc

SEQ ID NO: 130808 - DNA, 201 bp, Homo sapiens
gttcatcttggtgtccgtgatcgcagacctcaggaatgccttctacgtcctcttccccatctggttccatcttcaggaagctgtgggcattaaactccttygggtagctgtgattggagactggctcaacctcgtctttaagtggtaagaaccatatagagaggagatcagcaagaaaagaggctggcattcgctctcgca

SEQ ID NO: 130809 - DNA, 201 bp, Homo sapiens; identical to SEQ ID NO: 22666

SEQ ID NO: 130810 - DNA, 201 bp, Homo sapiens
agccattcctttgtacttttgtcatgctcttcaattggcacaaattaattcacttctgcaatactttcctgaatagcacagtagtattggaaatctgcctrttacagaacctggatggagtccagagaggcacgggcatccatgggcaaagggctcgtgagagtcaccgccctgcagcgctgtgtcctgagaaaggagggg

SEQ ID NO: 130811 - DNA, 201 bp, Homo sapiens
gggtttcaccatattggccaggctggtcttgaactcctgacctagtgatccatccgcctcagcctcccaaagtgctgggattgcaggcatgagccaccgcrcctggccttttttttttttttttgagacggagttttgctcttgttgcccaggctagagtgcagtggcgcagtctcggctcactgtaacctccacctcctg

SEQ ID NO: 130812 - DNA, 201 bp, Homo sapiens
gctagagtgcagtggtgcgatctcggctcactgcaagctccacctcctgggttcacgccattctcctgcctcagcctctccgagtagctgggactacaggmgcccgccaccatgcccggctaattttttgtatttttagcagagacggggtttcaccgtggtcttgatctcctgacctcgtgatccgcccgcctcggcctc

SEQ ID NO: 130813 - DNA, 201 bp, Homo sapiens; identical to SEQ ID NO: 22669

SEQ ID NO: 130814 - DNA, 201 bp, Homo sapiens; identical to SEQ ID NO: 22668

SEQ ID NO: 130815 - DNA, 201 bp, Homo sapiens; identical to SEQ ID NO: 22672

SEQ ID NO: 130816 - DNA, 201 bp, Homo sapiens
attctctttggacagcgtccatactggtgggttttggatactgactactacagcaacacttccgtgcccctgataaagcagttccctgtaacctgtgagaytggaccaggtaagcgtcccagcccctgcagacagaagctgagtggacctcgtttacctgttatggatgaaactgaccttgaggggacatgaggagagcca

SEQ ID NO: 130817 - DNA, 201 bp, Homo sapiens
cgaaataagtcctgcagttcaggagggaggtctgggcggcacatctcaggaccctctatctctcagggtagaggaattaagaatgggatgggaaccagacsggccatggtggctcacacctataatcccaacactttgggaggccaagggtaggaggattgcttgagcccaagagttcaaaaccagcctgggcaaaaacaa

SEQ ID NO: 130818 - DNA, 201 bp, Homo sapiens
tttggacagcgtccatactggtgggttttggatactgactactacagcaacacttccgtgcccctgataaagcagttccctgtaacctgtgagactggacyaggtaagcgtcccagcccctgcagacagaagctgagtggacctcgtttacctgttatggatgaaactgaccttgaggggacatgaggagagccattcctt

SEQ ID NO: 130819 - DNA, 201 bp, Homo sapiens
cctgggcaaaaacaatcaaacaaacaaacaaaacacatttaaaaaatttgctgtgtgtggtggtgtgcacctgtggtcccagctactcagggggctgaggygggaggattgcttgagtccaggaggtcgaggctgcagtgagctatgatcatggcactgcattgcagcctaggagacaaagcaagacactgtctctaaaaa

SEQ ID NO: 130820 - DNA, 201 bp, Homo sapiens
aacaaataaaaaaacggaaccggttgcaagcagggttaaatagcgtggtcagagtaggactcactgagaatatgagatctgagtcaagtcttcaaggatgkgaggaagtaagtttctggcagaagagctgtgaagggctgtctggccagagaagattgcaatgcaaaagccctgaggtgggaacgtgtttggtgtgtttaa

SEQ ID NO: 130821 - DNA, 201 bp, Homo sapiens
gtgaattaccaagactcccaggactggttcatcttggtgtccgtgatcgcagacctcaggaatgccttctacgtcctcttccccatctggttccatcttcmggaagctgtgggcattaaactcctttgggtagctgtgattggagactggctcaacctcgtctttaagtggtaagaaccatatagagaggagatcagcaag

SEQ ID NO: 130822 - DNA, 201 bp, Homo sapiens
ggggatggctgggtggctgggtagatgatgcactgtctcccagatgaggaccttttcacctttactccattctctttcctgccctttagggagcccctctsgccatgccatgggcacagcaggtgtatactacgtgatggtcacatctactctttccatctttcagggaaagataaagccgacctacagatttcggtaaga

SEQ ID NO: 130823 - DNA, 201 bp, Homo sapiens
gcagatcagtttgtaattgtacgcccagtatgctgattctttgtgtaatctccagactgtattaaactgcaagagcagggcccctctctggctttgctcaycattgtattcccagagccttgcacaatgcttggtgcataggagatggaaatttgttaaataaatgaattatggataacgaatggatggtaagatgggtgg

SEQ ID NO: 130824 - DNA, 201 bp, Homo sapiens; identical to SEQ ID NO: 22679

SEQ ID NO: 130825 - DNA, 201 bp, Homo sapiens
atggctgggtggctgggtagatgatgcactgtctcccagatgaggaccttttcacctttactccattctctttcctgccctttagggagcccctctggccwtgccatgggcacagcaggtgtatactacgtgatggtcacatctactctttccatctttcagggaaagataaagccgacctacagatttcggtaagaactc

SEQ ID NO: 130826 - DNA, 201 bp, Homo sapiens
ataaatgaattatggataacgaatggatggtaagatgggtggatggatggggggtgaacggatggatggggggtgaatggatggatgaatgggtagatggrtggatagggggatggctgggtggctgggtagatgatgcactgtctcccagatgaggaccttttcacctttactccattctctttcctgccctttagggag

SEQ ID NO: 130827 - DNA, 201 bp, Homo sapiens
tccaacatttctgcaggggctgttttctttgctgaaggatctgcacctgtgttctgttatggttgcctcttctgttgcaggtgcttgaatgtcattttgtkgttgggattctgggctgtgcagctgaatgtctgtctgtcacgaatctaccttgctgctcattttcctcatcaagttgttgctggagtcctgtcaggtatg

SEQ ID NO: 130828 - DNA, 201 bp, Homo sapiens
gccctttagggagcccctctggccatgccatgggcacagcaggtgtatactacgtgatggtcacatctactctttccatctttcagggaaagataaagccracctacagatttcggtaagaactcaccactggggtgtaggtggtggagggcaggaggcagctctctctgtagctgacacaccacgtattcttcctcacat

SEQ ID NO: 130829 - DNA, 201 bp, Homo sapiens
tttgtggttgggattctgggctgtgcagctgaatgtctgtctgtcacgaatctaccttgctgctcattttcctcatcaagttgttgctggagtcctgtcavgtatgggctgatctgactcccttccttctcccccaaaccccattccgtttctctccctaatcaggacaaaatcccagcattccagccacatcctgtgtgt

SEQ ID NO: 130830 - DNA, 201 bp, Homo sapiens
gatggcatgtcacccactcctccaaacccacctctagcaaaggtcccaaatccttcctatctctcacagtcatgctttcttccactcaggcattgctgttrcagaaactttcagccacatccacagcatctataatgccagcctcaagaaatattttctcattaccttcttcctgttcagcttcgccatcggattttatct

SEQ ID NO: 130831 - DNA, 201 bp, Homo sapiens
gaaagataaagccgacctacagatttcggtaagaactcaccactggggtgtaggtggtggagggcaggaggcagctctctctgtagctgacacaccacgtrttcttcctcacatccccctagcccgctcccacacctgggcagccgctgattaagagttgtggcactttggatagggataaacctcagagtcagggaatgt

SEQ ID NO: 130832 - DNA, 201 bp, Homo sapiens
tctctgtagctgacacaccacgtattcttcctcacatccccctagcccgctcccacacctgggcagccgctgattaagagttgtggcactttggatagggrtaaacctcagagtcagggaatgtttgggctgaaagggatccagtagtgcaatccgttgttttacagataaggaaacaaagcccaacaccatgaagggact

SEQ ID NO: 130833 - DNA, 201 bp, Homo sapiens; identical to SEQ ID NO: 22685

SEQ ID NO: 130834 - DNA, 201 bp, Homo sapiens; identical to SEQ ID NO: 22687

SEQ ID NO: 130835 - DNA, 201 bp, Homo sapiens
cattacctccaggtgaattaccaagactcccaggactggttcatcttggtgtccgtgatcgcagacctcaggaatgccttctacgtcctcttccccatctrgttccatcttcaggaagctgtgggcattaaactcctttgggtagctgtgattggagactggctcaacctcgtctttaagtggtaagaaccatatagagag

SEQ ID NO: 130836 - DNA, 201 bp, Homo sapiens; identical to SEQ ID NO: 22691

SEQ ID NO: 130837 - DNA, 201 bp, Homo sapiens
ccaagttgggacaagggaatcagaccctggggagagcgtaaccttgatcaaggcgactctctttagcccagggcaatgccaggagaaggctgagagcagaragccatctaccatcacactctcaacagctacgaaataagtcctgcagttcaggagggaggtctgggcggcacatctcaggaccctctatctctcagggta

SEQ ID NO: 130838 - DNA, 201 bp, Homo sapiens; identical to SEQ ID NO: 22692

SEQ ID NO: 130839 - DNA, 201 bp, Homo sapiens; identical to SEQ ID NO: 22693

SEQ ID NO: 130840 - DNA, 201 bp, Homo sapiens; identical to SEQ ID NO: 22695

SEQ ID NO: 130841 - DNA, 201 bp, Homo sapiens; identical to SEQ ID NO: 22694

SEQ ID NO: 130842 - DNA, 201 bp, Homo sapiens
attttagacaaacgtggtttttgagtccaaagatcagggctgggttgacctgaatactggatacagggcatataaaacaggggcaaggcacagactcatarcagagcaatcaccaccaagcctggaataactgcaagggctctgctgacatcttcctgaggtgccaaggaaatgaggatggaggaaggaatgaatgttctc

SEQ ID NO: 130843 - DNA, 201 bp, Homo sapiens
tgcacctgtgttctgttatggttgcctcttctgttgcaggtgcttgaatgtcattttgtggttgggattctgggctgtgcagctgaatgtctgtctgtcaygaatctaccttgctgctcattttcctcatcaagttgttgctggagtcctgtcaggtatgggctgatctgactcccttccttctcccccaaaccccattcc

SEQ ID NO: 130844 - DNA, 201 bp, Homo sapiens; identical to SEQ ID NO: 22707

SEQ ID NO: 130845 - DNA, 201 bp, Homo sapiens; identical to SEQ ID NO: 22709

SEQ ID NO: 130846 - DNA, 201 bp, Homo sapiens; identical to SEQ ID NO: 22711

SEQ ID NO: 130847 - DNA, 201 bp, Homo sapiens; identical to SEQ ID NO: 22712

SEQ ID NO: 130848 - DNA, 201 bp, Homo sapiens; identical to SEQ ID NO: 22654

SEQ ID NO: 130849 - DNA, 201 bp, Homo sapiens
tcagcctccttagtagctgggatgacaggcatacactaccacgcccagctttttttttttttttgaagacagagtctcactctgttgcccaggctggagcmcggtggtgcaatctcagttcaccgcaacctccacctcccaggttcaagcgattcttgtgtctcggcctccagagtagcacaccaccacacctggctaatt

SEQ ID NO: 130850 - DNA, 201 bp, Homo sapiens
tggagttggagcactttgcttcttcctaattctgagggtcagtaggggtggggagggcagggtcctgagccgaggtcggaagaagtctgtccagagtcttmagggtgggggtcgacctggggcttaggaaggagagggtagcaaagctggggttgctccccaggatagggccactcctcatcgggagggccatcccattcc

SEQ ID NO: 130851 - DNA, 201 bp, Homo sapiens; identical to SEQ ID NO: 22768

SEQ ID NO: 130852 - DNA, 201 bp, Homo sapiens
cctgcccaacccatggggtggagttttctcccttcctatccatcctagcgaatataaaccccgacttgatgtcagtaactggaaggagcagctgttagaaytctgatttcagctctcagcatccaccatgcatctcaagatagtcctggcgttcctggcactgtccctcattaccatctttgccctggcctatgttttgct

SEQ ID NO: 130853 - DNA, 201 bp, Homo sapiens
ttccatagtcctccagctcctccttcttcttgcaggatctggtggcttgggtcacagccagcttcctgcacattccccatgccgaggacatcccaaacacrgtgactctggggaacagagttggcttcttgctccgaccctataacttctttgatgaggacccctccatcttctcccctggcagtgtctactttgagaagg

SEQ ID NO: 130854 - DNA, 201 bp, Homo sapiens; identical to SEQ ID NO: 130751

SEQ ID NO: 130855 - DNA, 201 bp, Homo sapiens
tagtcctccagctcctccttcttcttgcaggatctggtggcttgggtcacagccagcttcctgcacattccccatgccgaggacatcccaaacacagtgaytctggggaacagagttggcttcttgctccgaccctataacttctttgatgaggacccctccatcttctcccctggcagtgtctactttgagaagggccag

SEQ ID NO: 130856 - DNA, 201 bp, Homo sapiens
cagcccctctgacttgctatgattgtgaaactagtttaaatgtaatggctgggcatgattgccttagcctcaagtgacactgggtgggtgaactggcccartggggctggagttggagcactttgcttcttcctaattctgagggtcagtaggggtggggagggcagggtcctgagccgaggtcggaagaagtctgtccag

SEQ ID NO: 130857 - DNA, 201 bp, Homo sapiens; identical to SEQ ID NO: 130752

SEQ ID NO: 130858 - DNA, 201 bp, Homo sapiens
ctggagttggagcactttgcttcttcctaattctgagggtcagtaggggtggggagggcagggtcctgagccgaggtcggaagaagtctgtccagagtctwcagggtgggggtcgacctggggcttaggaaggagagggtagcaaagctggggttgctccccaggatagggccactcctcatcgggagggccatcccattc

SEQ ID NO: 130859 - DNA, 201 bp, Homo sapiens; identical to SEQ ID NO: 130754

SEQ ID NO: 130860 - DNA, 201 bp, Homo sapiens; identical to SEQ ID NO: 22771

SEQ ID NO: 130861 - DNA, 201 bp, Homo sapiens; identical to SEQ ID NO: 22777

SEQ ID NO: 130862 - DNA, 201 bp, Homo sapiens
aagggctggacctgcacccgcagccggcactcctccatgttgatcgtgtgctccttttgttgcagcacctgctcagccactgggtggtgggaaacagggtyagtactgggaaccctccccacctccctcctgaggctccccatgagcttacctttggggtcatcaaaggtgatcagagcagagcccgcaagcagagggcag

SEQ ID NO: 130863 - DNA, 201 bp, Homo sapiens
agtgctaggattacaggcgtgagccaccgtgcctggcctctaaatgtcttttctaaacccagtcttatctctgaaggaacatgttccaaattaaaagccaytccttcccaactttcccaggtaggcaggacccagctgaggggctcagatcctaggctttctccttcaggacatggtttctgtcaggctctgcaagttcta

SEQ ID NO: 130864 - DNA, 201 bp, Homo sapiens
gtggaaagcgtagccaaggaacttgtgtttgggggctcctggagagcggcatttatgtggggaggggagacgaaattatcgccccttccccaaccattttwagttgtggccgccgcccagaagctgtgctggtgggggggaaaacaataaggtgcccatgcgcatgcgcacaaccacactaccgtccccacccaccccccc

SEQ ID NO: 130865 - DNA, 201 bp, Homo sapiens
ctgatccttcattgggcaagttcctggcaggcagacaggttacccagcccagcccctgttcttcacccctcctgcttacctcagccttctggatctccccrttcacatacggagagactctcagagggacttgctgcccacccagtggcactgtgaactggccgatttggcacagacgctgagccactgtggggagcaagg

SEQ ID NO: 130866 - DNA, 201 bp, Homo sapiens
aagaagatctctagcttgtccagcagctcctcctcactcagcctgaggctggcaggaaatccagtgaccaacaccctccggccactcaactggctggacayctagggggagacagcaaggggtggtcccagacacagctccacttccccatgcccaggtgcatggcatgctttgcatgccccaggattctgtcataccatc

SEQ ID NO: 130867 - DNA, 201 bp, Homo sapiens; identical to SEQ ID NO: 22780

SEQ ID NO: 130868 - DNA, 201 bp, Homo sapiens; identical to SEQ ID NO: 22782

SEQ ID NO: 130869 - DNA, 201 bp, Homo sapiens
cagtgaccaacaccctccggccactcaactggctggacacctagggggagacagcaaggggtggtcccagacacagctccacttccccatgcccaggtgcrtggcatgctttgcatgccccaggattctgtcataccatcacctggatggtggtgaccatgggcagctccaagggctggacctgcacccgcagccggcact

SEQ ID NO: 130870 - DNA, 201 bp, Homo sapiens
cggcccctgggcccggccagctgacgctgcgtctgcgggcctgcgggctcaacttcgcagacctcatggctaggcaggggctgtacgaccgtctcccgcckctgcctgtcactccgggcatggagggcgcgggtgttgtgatcgcagtgggcgagggagtcagcgaccgcaaggtgagcgggttgcgtagggcagggcagg

SEQ ID NO: 130871 - DNA, 201 bp, Homo sapiens
accatctctgagtgaagatgttttctgggctcccagtgctggctcaaacacacttctcccgaggtgaccacaccctgctgtaagcgctcagagaactttgyctgcactttggtatggccctgaccacacagtgccgtcttcttttggttgtgtgacttccttgctgctattatattattattattattattgttagctaac

SEQ ID NO: 130872 - DNA, 201 bp, Homo sapiens
ggcgggggggtggggaggatgagaaggggaggcccctagcctgactcagaggtgaagactgctaggccctgctgtccttggggtacgactgtcagggcctytacctccccgcccccgcgggtgggcttctggaagtggatctccaggacgtcatgcagctccgggccatccaagatatcaggaatgttgagcaccagtacc

SEQ ID NO: 130873 - DNA, 201 bp, Homo sapiens; identical to SEQ ID NO: 22787

SEQ ID NO: 130874 - DNA, 201 bp, Homo sapiens
tccgcctggtaaatacaggatatcctgtccagggcaagaatctgatgtaagagcctggattctgcggggagggcccttccctctctctccctcctcctccytcctggtgtctgggttggggaggggtcatggccctgatttggatggcctgagggttagcatgagccagggtaagtgagacttgttctgggtcaaatctgg

SEQ ID NO: 130875 - DNA, 201 bp, Homo sapiens; identical to SEQ ID NO: 22789

SEQ ID NO: 130876 - DNA, 201 bp, Homo sapiens
tctctgcagcatccacctccctggttcaagcagttctgcctcaggctcctgagtagctggaattacaggtgcccatctccacgcctggcttttttttttttctttttcttgagacagagtctggctgtcacccaggctggagtgcagtgacacgatctcggctcactgcaacctccacctcccggattcaagcaattcttc

SEQ ID NO: 130877 - DNA, 201 bp, Homo sapiens
actcagtaaaggtgagttgttattgttgttgatgatgatgttattattattattaccatgactattgctgcttctcctgctacttcatttggaagaaggtrgccttgtacctagggggaaatcagtaaatagcctgtgggtgaatgaatgagtgactgaatgatactcttctgttcttcaaggcaggagaccgggtgatgg

SEQ ID NO: 130878 - DNA, 201 bp, Homo sapiens
gcctaaatgtgtgaagtgcgatttctgcttttgtgtaccccaccaccccattaccacagctgcctttgtgtgtttgtgtcaataaaaagccaaaccctggrtcctgcttgttgcctctgagagtggagggaaggtgagctcctggaaggctagtgctgccagcagaagatctgggctgcttcctgccccctgcctctttcc

SEQ ID NO: 130879 - DNA, 201 bp, Homo sapiens
ttagtagaggcggtgtttcaccatgttggccaggctggtcttgaactcctgatctcaggtgatccagccgcctcagcctcccaaagtgctgggattatagscgtgagccaccacgcctggccaaattctacattcttgtttggggattattcttgaacaaccagcctgccttctttctgtcctacctccctgagcatctta

SEQ ID NO: 130880 - DNA, 201 bp, Homo sapiens
atatgagtgatagtaaattctacattcttttttttttttttttttttgagatggagtttcgctcttgtcgcccaggctggagtgcaatggcatgatctcgrtcagtgcaacctctgcctcctgggttcaagcgattctcctgcctcaccctcccgagtagctggaattacaggtgtctgccaccacgcccaactaattttt

SEQ ID NO: 130881 - DNA, 201 bp, Homo sapiens
gtgaggactttgcagggagggcttgggtaggactcatgaaggctggggtcccaaggggcagattcctggggaagaggagggctgcctgcatcacactggcycttgttggatgagggttggatagcactgggagccgcatctttccttcctccccaggtggctgatgccatgaaacagatgcaggagaagaagaatgtgggc

SEQ ID NO: 130882 - DNA, 201 bp, Homo sapiens
gaggactttgcagggagggcttgggtaggactcatgaaggctggggtcccaaggggcagattcctggggaagaggagggctgcctgcatcacactggctcytgttggatgagggttggatagcactgggagccgcatctttccttcctccccaggtggctgatgccatgaaacagatgcaggagaagaagaatgtgggcaa

SEQ ID NO: 130883 - DNA, 201 bp, Homo sapiens
agccgcatctttccttcctccccaggtggctgatgccatgaaacagatgcaggagaagaagaatgtgggcaaggtcctcctggttccagggccagagaagsagaactagggcaagtggctgtgagaccctagagaccagcgaagggagaagttgggaagctacgttctgttggccaccagacttgcatttcagcctctgtc

SEQ ID NO: 130884 - DNA, 201 bp, Homo sapiens
ggcctaaatgtgtgaagtgcgatttctgcttttgtgtaccccaccaccccattaccacagctgcctttgtgtgtttgtgtcaataaaaagccaaaccctgrgtcctgcttgttgcctctgagagtggagggaaggtgagctcctggaaggctagtgctgccagcagaagatctgggctgcttcctgccccctgcctctttc

SEQ ID NO: 130885 - DNA, 201 bp, Homo sapiens; identical to SEQ ID NO: 22792

SEQ ID NO: 130886 - DNA, 201 bp, Homo sapiens; identical to SEQ ID NO: 22778

SEQ ID NO: 130887 - DNA, 201 bp, Homo sapiens
tggatggtgaggtggagctggtcagtggtgtggtggcccgcctcctggctctgtacaaccagggccacatcaagccccacattgactcagtctggcccttygagaaggtgaatgtgaggactttgcagggagggcttgggtaggactcatgaaggctggggtcccaaggggcagattcctggggaagaggagggctgcctg

SEQ ID NO: 130888 - DNA, 201 bp, Homo sapiens
gcggggagtggaaggggggacccacctctgccttcctcctgcagaggacccccacttcagaaaccccagtgccaggggtttggactggaacggagaggtgyggcgccttgaactggttggccaagtctgcaggcctgtttctccttctcatttatcattaatcttggccacaaccctggacaccagagagctcaaaatgat

SEQ ID NO: 130889 - DNA, 201 bp, Homo sapiens
gtactccagcctgggcaacagagcgagaccctgactcaaacaaatgaacaaacaagcaaatacataaagattagagcaatttttttttttttgagacagartatcactctgttacccatcctggagtgcagtggcgcaacctcggctctctgcagcatccacctccctggttcaagcagttctgcctcaggctcctgagta

SEQ ID NO: 130890 - DNA, 201 bp, Homo sapiens
tctttttactgttctgggcagtgttttgcaatgtgtgacccctccgcactgttggtgaacatacagacctcctatatgggcacccaagcccaggccagtgkgagaaccttggcgggggggtggggaggatgagaaggggaggcccctagcctgactcagaggtgaagactgctaggccctgctgtccttggggtacgactg

SEQ ID NO: 130891 - DNA, 201 bp, Homo sapiens; identical to SEQ ID NO: 22781

SEQ ID NO: 130892 - DNA, 201 bp, Homo sapiens
aaacaacaccagatctcccaccttaccttgtctttgggggagtccccgagctcctttctcagctgctgcaggtcccacagcctcatcttgagtctggcctsctcctcctgaagggcgtggagggcctgttggggcagaaggaaacaacaagacttctacccgcccttccagagaatcaacaagcccaggggaaggggggcc

SEQ ID NO: 130893 - DNA, 201 bp, Homo sapiens; identical to SEQ ID NO: 22784

SEQ ID NO: 130894 - DNA, 201 bp, Homo sapiens
acatacagacctcctatatgggcacccaagcccaggccagtgtgagaaccttggcgggggggtggggaggatgagaaggggaggcccctagcctgactcaraggtgaagactgctaggccctgctgtccttggggtacgactgtcagggcctctacctccccgcccccgcgggtgggcttctggaagtggatctccaggac

SEQ ID NO: 130895 - DNA, 201 bp, Homo sapiens
tcactgagctaggattagggagggttattgccccaaccattgcaatgggaggtggagggacaggctcagcctcctcattgtctaaatgaggcctaaatgtktgaagtgcgatttctgcttttgtgtaccccaccaccccattaccacagctgcctttgtgtgtttgtgtcaataaaaagccaaaccctgggtcctgcttgt

SEQ ID NO: 130896 - DNA, 201 bp, Homo sapiens; identical to SEQ ID NO: 22786

SEQ ID NO: 130897 - DNA, 201 bp, Homo sapiens
ttagggagggttattgccccaaccattgcaatgggaggtggagggacaggctcagcctcctcattgtctaaatgaggcctaaatgtgtgaagtgcgatttytgcttttgtgtaccccaccaccccattaccacagctgcctttgtgtgtttgtgtcaataaaaagccaaaccctgggtcctgcttgttgcctctgagagtg

SEQ ID NO: 130898 - DNA, 201 bp, Homo sapiens
aagttccacaggggattatgatacacaactgaggttgagaacttcctgggagagataaagacatgtgatttttctgtttccagcgttacttaatgtacttrtttcctatatcactataggtgcgatggtcgggatttgacttcacttaggaatgtaagttgtgaggtagatatgtttaaaacccttcatggatcagcatta

SEQ ID NO: 130899 - DNA, 201 bp, Homo sapiens
ccgggcagtcatccagatctttagagtataatcttacacggcaagaatagttactccatgctgtcagctgctgggttacttcaacaccaacattctgaacmgtaccatttagatgtttgttttcaactggtatatttaatatcactaatatttctgtgtgtgagaagatatcggtcaggaaaaagtataccagtaacatgt

SEQ ID NO: 130900 - DNA, 201 bp, Homo sapiens
ggactaccaagccagaccctgtctcttaaaaaatttaaaaatgaaaaagataatgaacatatcagttacctccaagagtttcctcatgcctttttgtaatkccttcttcctgccccccacctcctcaggagactactgatctgcttttgtcactataaattagtttgcattttctagaattatctggtatttctgttgtat

SEQ ID NO: 130901 - DNA, 201 bp, Homo sapiens
ggtgctttgtaccgttacatttgattcattagaatctggtattaagtcagatcaagttataacagctataaagtaagttatgtttttaagatgtttgttaygttttatgatgttctattatataattaaagcttatgtggtatattattaattattgttactttttttaacctgtgtttttgtacttcatttttctgttta

SEQ ID NO: 130902 - DNA, 201 bp, Homo sapiens; identical to SEQ ID NO: 22812

SEQ ID NO: 130903 - DNA, 201 bp, Homo sapiens
aggctggagtgcagtggcgcaatctcggctcactgcaacctccatctccaggttcaagcgattctcttgcctcggcctcccaagtagctgggactacaggygtgcaccaccacacctggctaattttttatttttagtagagatggggtttcaacatgttggccaggctggtctcaaactcctgaactcaggtgatccacc

SEQ ID NO: 130904 - DNA, 201 bp, Homo sapiens
tctatttttaagacgagtttccactggaatgagcaagttaacttttttttttttgagatggggccttgctctgtcacccagactggagtgcagtacacaaycacagctaactccagccttgacccctgggatcaagtgatcctcccgactgtgagtcccaagtaggtgggcacatgctaccaggtccagctaatttttgaa

SEQ ID NO: 130905 - DNA, 201 bp, Homo sapiens
gcatgtgcaaagttaagaagttacagtgtagtgtgtttcaggaatctactcgaaagaggtgttaaggtaataaagtagaaccatatgttgaaggttattgttttttttttttttttttgactttcctttttatctttgtcttctctttatttcctagttgtttctagtcagaggaaggatagctttatacagaaataggat

SEQ ID NO: 130906 - DNA, 201 bp, Homo sapiens; identical to SEQ ID NO: 22808

SEQ ID NO: 130907 - DNA, 201 bp, Homo sapiens
ccctcactcaaatgtgggcactgtgaaagaaaaaacttttatttcttcagggttgaatccctagtacctgttatactgcttagcacagaataggcattcartaaatatttgttgactaaatgagtaaatctctattgagcatatgaattttttggcccatgcctctactttgttgaatctattcctagtacattttttcat

SEQ ID NO: 130908 - DNA, 201 bp, Homo sapiens
catgtgcaaagttaagaagttacagtgtagtgtgtttcaggaatctactcgaaagaggtgttaaggtaataaagtagaaccatatgttgaaggttattgttttttttttttttttttgactttcctttttatctttgtcttctctttatttcctagttgtttctagtcagaggaaggatagctttatacagaaataggatt

SEQ ID NO: 130909 - DNA, 201 bp, Homo sapiens
ttttgactttcctttttatctttgtcttctctttatttcctagttgtttctagtcagaggaaggatagctttatacagaaataggattttttttttttaawtttttttttttttttaaattgatcattcttgggtgtttctcacagagggggatttggcagggtcacaggacaatagtggagggaaggtcagcagataaac

SEQ ID NO: 130910 - DNA, 201 bp, Homo sapiens
ggatcactcgcagttaggagctggagaccagcccagccaacacagcgaaaccccgtctccaccaaaaaaatacgaaaaccagtcaggcgtggcggcgcgcrcctgcaatcgcaggcagtcggcaggctgaggcaggagaatcaggcagcagtaccgtccagcttcagctcggcatcagagggaaaccatggagagagggag

SEQ ID NO: 130911 - DNA, 201 bp, Homo sapiens
attcagaatttacattggtagacagaatgccagttcctggtaagttttgagaagtactggtggcatgttactcagggttaaacaaaatttcaagatgtcaratttacatttgcctcatgaaaccattacttaatactgatttcagctataggttgttgcaggtctgtgatactacacagtgtgactggttttgagtatctc

SEQ ID NO: 130912 - DNA, 201 bp, Homo sapiens
ctcgcagttaggagctggagaccagcccagccaacacagcgaaaccccgtctccaccaaaaaaatacgaaaaccagtcaggcgtggcggcgcgcgcctgcratcgcaggcagtcggcaggctgaggcaggagaatcaggcagcagtaccgtccagcttcagctcggcatcagagggaaaccatggagagagggagagggag

SEQ ID NO: 130913 - DNA, 201 bp, Homo sapiens
attacttaatactgatttcagctataggttgttgcaggtctgtgatactacacagtgtgactggttttgagtatctcattccttccatctactcaacataytaatccagcatcagcctctctgtacctcattcccattagtcacaggagacccattttattgtaggctttcatcattataacatctgtgttgaataaatag

SEQ ID NO: 130914 - DNA, 201 bp, Homo sapiens
tacgaaaaccagtcaggcgtggcggcgcgcgcctgcaatcgcaggcagtcggcaggctgaggcaggagaatcaggcagcagtaccgtccagcttcagctcrgcatcagagggaaaccatggagagagggagagggagaccgtgggtagaggtagaggtagaggtagaggtagaggtggagagagggagagagggcaggatt

SEQ ID NO: 130915 - DNA, 201 bp, Homo sapiens
cattataacatctgtgttgaataaatagaaacccaactagaatttctcaaatattccctgattttaaaaaaaaactaatatttcagagtcaagaatttgayactacaaaatcattgtatttattaacatatattaaatgtacatactttgttctgactttcaaacttaacaaaatgagtctaactgaatagataaatatgc

SEQ ID NO: 130916 - DNA, 201 bp, Homo sapiens
ccgtgggtagaggtagaggtagaggtagaggtagaggtggagagagggagagagggcaggattttttttaagtaagaattctttaccaatccttctttccycaacataaaatctcctatttgaagtggagtttgaggtagggactcgagaggcagtgcctcaagaaagccacacattgtacaatctgaaggttattgttac

SEQ ID NO: 130917 - DNA, 201 bp, Homo sapiens
caacataaaatctcctatttgaagtggagtttgaggtagggactcgagaggcagtgcctcaagaaagccacacattgtacaatctgaaggttattgttacrctaaggagtttggacttaaagccagcatttttccaattcagtattccatggaatagtgttccacaggacattgattattgtataccatgaaaaagtttat

SEQ ID NO: 130918 - DNA, 201 bp, Homo sapiens
agcttcaggtgagctagtgtgcttgattctcccttcattcttttccactttgctaatgggaactatagttctcattaggcttattataaaatattgctttwaaaagtggaatttcatataacttagatcaagaagtactggccaggtgtggtggctcatgtctgtaatcccagcactttgagaggccgaggcaggcagatc

SEQ ID NO: 130919 - DNA, 201 bp, Homo sapiens
taaaatattgctttaaaaagtggaatttcatataacttagatcaagaagtactggccaggtgtggtggctcatgtctgtaatcccagcactttgagaggcygaggcaggcagatcacttcaggtcaggagttcgagaccagcctggccaacatggtgaaaccctgtctctactaaaagtacaaaaattagccgggcatggt

SEQ ID NO: 130920 - DNA, 201 bp, Homo sapiens
ggctggagtgcagtggcgcaatctcggctcactgcaacctccatctccaggttcaagcgattctcttgcctcggcctcccaagtagctgggactacaggcrtgcaccaccacacctggctaattttttatttttagtagagatggggtttcaacatgttggccaggctggtctcaaactcctgaactcaggtgatccacct

SEQ ID NO: 130921 - DNA, 201 bp, Homo sapiens
ggagtgcagtggcgcaatctcggctcactgcaacctccatctccaggttcaagcgattctcttgcctcggcctcccaagtagctgggactacaggcgtgcmccaccacacctggctaattttttatttttagtagagatggggtttcaacatgttggccaggctggtctcaaactcctgaactcaggtgatccacctgcct

SEQ ID NO: 130922 - DNA, 201 bp, Homo sapiens
gcctatagcaatcattttgacaagcttttatgtttaaatttttagcatcgatagcagtgttgtccagtagaactctgcagtgaagggaatgttttatatckgatcatgtggctacttagcacttcagatgtggctagagtaactgaggaaccaaaattttaattttgtctaattttaaataatttaaatgcaagtagccat

SEQ ID NO: 130923 - DNA, 201 bp, Homo sapiens
gagccccatgcccagccatattttttttttttttgaatctggctctcaactctcctcaactctgttgtccagactagagtatgagtatagtggcgtgatcrtggctcactgtagcctagcctgaaactgctggcctcaagtgatcatcctgcctcagcctctagaatagctaggattacaggcacaccaccgcagctgagt

SEQ ID NO: 130924 - DNA, 201 bp, Homo sapiens
agtgagactttgtctccaaaagaaaagaaagaaagaaaagggaactgatttcaaagcactgtcattcagtcatttaggtagaaagcaaactaagttcacartaacaacacagttgtagtacttggtacttgatgtgtcacatttggttgagaacatttaatttatctactttgtttgcctgaggactaaacgttcagagtc

SEQ ID NO: 130925 - DNA, 201 bp, Homo sapiens
tcagcctccattcctggtctttattcttgagaatgggccctgtttcctgtttcattgtaggttgttttctggatgttgtgaatgatacattgtagagtgtytggattatgttatgtctctacaaagaagactgattttcttaatttatttttcttttcttctttttctgagacagagtctcgctctgttgcccaggctgga

SEQ ID NO: 130926 - DNA, 201 bp, Homo sapiens
ggtgtcatcttggctcactgcaacctcgcctgttggattcgagctattcttctgcctcagcctcccaagcagctgggactacaggcacatgccaccatgcycagctaatttttgtatttttagtagagacagggtttcaccgtatcggccaggctgatctcgaattcctgaccttgtgatctgcccgcctcagcctcccaa

SEQ ID NO: 130927 - DNA, 201 bp, Homo sapiens; identical to SEQ ID NO: 22815

SEQ ID NO: 130928 - DNA, 201 bp, Homo sapiens
taaaaagccaaccaagatatttaatatcaacagcaatttttgaaatgcaaatgaaattaagatatcagttttaactttcagatagtttaaaattctcagtstgtataagagaaaagatggacattttcatacactgttgatgggggtgtgaattgggacaaactttttagagggtgtttggtaaatgtctatggacctaga

SEQ ID NO: 130929 - DNA, 201 bp, Homo sapiens
gctgagacaagagaatcgcttgagcccaggaggcagaggttacagtgagccgagatcatgccattgcgcgccagcctgggtgacagagggaaaatgtctcaaaaaaaaagaagtactaagtagccaggcatggcatggtggctcatcctagcactttgggaggccaaggcaggaagattgcttgagccccaggagttcaag

SEQ ID NO: 130930 - DNA, 201 bp, Homo sapiens
ctgagacaagagaatcgcttgagcccaggaggcagaggttacagtgagccgagatcatgccattgcgcgccagcctgggtgacagagggaaaatgtctcaaaaaaaaagaagtactaagtagccaggcatggcatggtggctcatcctagcactttgggaggccaaggcaggaagattgcttgagccccaggagttcaaga

SEQ ID NO: 130931 - DNA, 201 bp, Homo sapiens
agagaatcgcttgagcccaggaggcagaggttacagtgagccgagatcatgccattgcgcgccagcctgggtgacagagggaaaatgtctcaaaaaaaaagaagtactaagtagccaggcatggcatggtggctcatcctagcactttgggaggccaaggcaggaagattgcttgagccccaggagttcaagaccagcctg

SEQ ID NO: 130932 - DNA, 201 bp, Homo sapiens
gtgaaaccctgtctctactaaaaaatacaaaaaattagccgggcgtggtggcgggcgcctgtagtcccagctactcgggaggctgaggcaggagaatggcrtgaacccgggaggcggagcttgcagtgagccgagatcgcgccactgcactccagcctgggcgacaaagtgagactccgtctcaaaaaaaaaaaaaaaaaa

SEQ ID NO: 130933 - DNA, 201 bp, Homo sapiens
ttgggacaaactttttagagggtgtttggtaaatgtctatggacctagacattgtaggattttatttggagaggataattagagtagatgaattcatgatytgtgctacactgcaacttattttttttcaccttattattttgaaaagtttttaatgtacaaagaagttgaaagaatgatacactaaaccctcatatatct

SEQ ID NO: 130934 - DNA, 201 bp, Homo sapiens
tattggacagcacagctctgtagactcaactgtaaggagtgttctttctttctttctttctttttttaagacagtctcactctgttgccaagctggaatgyaatggtgtgattatacatcactacagcctcaaactgtggggttcaaacgatcctatgtcctcagcctcctgagtagctgggaatccaggcacatgtcacc

SEQ ID NO: 130935 - DNA, 201 bp, Homo sapiens; identical to SEQ ID NO: 22813

SEQ ID NO: 130936 - DNA, 201 bp, Homo sapiens
ttttcattaactcaggcttctggcaaaggtatttaacaggtgaaaatattaagggttgttccttcatctccttggtatgtgaaagacagaataatcttacytggggtagggcattgggcctgtctacatgcttgtgtttggtttgtgcattttcagcaccagactatgatagaatgttgccgaaactgagttcatgtgaca

SEQ ID NO: 130937 - DNA, 201 bp, Homo sapiens
tcctggcctcaagcaatcctcctgtcctggcctcccatagcactggaattacaagcatgagccccatgcccagccatattttttttttttttgaatctggytctcaactctcctcaactctgttgtccagactagagtatgagtatagtggcgtgatcgtggctcactgtagcctagcctgaaactgctggcctcaagtga

SEQ ID NO: 130938 - DNA, 201 bp, Homo sapiens
cacagtggctcatacctgtaatcccagcactttgggaggccaaggcaggagaattgcttgaggccaggagttcaagaccagcctaaacaatatagtaagawctcatccatacaaaaactaaaattagccaagtgtagtggtgtgcacatgtagtcccaactactcaggaagctgagttggaggatcgcttgagcctaggtg

SEQ ID NO: 130939 - DNA, 201 bp, Homo sapiens
tcatcttgttttattcatctttcttgaatgttgtctagctcacatttacttcagtgtttaacatcagaaatgttttggtctttatttgcaagtttggtaattttttttttttaccagaaatgtgccataggatcttaactcttgtttatatcaattagcctgtggtaaatttggtttcattttatgtagtttatcttagag

SEQ ID NO: 130940 - DNA, 201 bp, Homo sapiens
agtgagctgtaattgtgccactgcattccagcctgggcaacagagcaagaccctgtctcaaaaaaaaaaaaagaaaagaaaaagaagatacaaggcacaawgaccaccccccacctcaaaaaaaaaatagatggtacatgggaattaacatttagggaagcagttaacttctgaacctccaaaagactttcctgttcagat

SEQ ID NO: 130941 - DNA, 201 bp, Homo sapiens
tggtgtgatctcggctcactgcaacctccgcctcccaggttcaagcgattctcctgcctcagcctcccgagtagctgggattacagctgcacgccaccatkcccagctaatttttgtatttttagtagagacggggtttcaccatgttggccaggatggtctcaatctgttgaccttgtgatctgcccgcctcagcctcca

SEQ ID NO: 130942 - DNA, 201 bp, Homo sapiens
agttaaagtatagcagacaatatcgttttaggttaaaaaaaaaaaagtcatgcctgtatacacgtctgtcaaacaaaagtagagttttttaaatacctcarctcccaaatcaccttctgtttgctcattgaaatgttcatatttatactcagttgattagtagtaaaagatgagacgtttagtattaagttactttatatg

SEQ ID NO: 130943 - DNA, 201 bp, Homo sapiens
aaggtagagagctccagaattgattccaatcaccaaggaagttttgattagtaagtactattaggaatcataagagaaagcaactgtaatctttcagtcgrtttatacaagccaagagaacaatgccactcaggcgtgtacacacaattttaggaaggcggactacaaatgtttcattataatccccaggtctgaaacgcc

SEQ ID NO: 130944 - DNA, 201 bp, Homo sapiens
aggcagaggttgcagtgagatgagatcgcaccactgcactccagcctgggcgacagagcgagactccatctcaaaaaaaaaaaaagccaatttcagtctcmaagcattttttttgaccagctagaagagcttgtttttttaggataagaaaatccctcttttaagaaaaaggaaattatcaaatgtagcaaaaatgttcaa

SEQ ID NO: 130945 - DNA, 201 bp, Homo sapiens
aaaaacctcgttaatgaaaagccttgtcgaatcccaagccacgttgtgattttgtgttcagaaatacttggctgtcctcctctgcccctaaaaagtcaacwgtaaaatcatgctaatcaattccgatgataagaatctttattgcaggccaaatcaattctgatgataagaatctttattgcaggccgggcgtggtggctc

SEQ ID NO: 130946 - DNA, 201 bp, Homo sapiens
gggccagtgacctgctataatcctctctggctcaccaaatctgtgattcctttagtcctctgaaggagtttggtttttagatttctttttccaaagctacmgtttatgatcatgcagattctgccccatcccaggactttttcttcgtttcacatattgactgggagaagcattgtagctctgagatttaactaacgtggg

SEQ ID NO: 130947 - DNA, 201 bp, Homo sapiens
caacatagcaagacctcatctctacaaaaaagattaaaaaaaaatgctaaccttttatacacacctgttagtataaaatataagatttctttaaatttggrttttagtaaaactcaaagtcagattacagatggccaaatcaagccagaggcaagatggctgaaaagtagagcttcagatatccagatatctgctggaatt

SEQ ID NO: 130948 - DNA, 201 bp, Homo sapiens
aagcattatgctaggagattttttttttttttttttttgagacagagtctcgctctgttgtccaggctgaagtgcagtggtgcagtctcggctcactgcawcctccgcctcccaggttcaagtgattcttctgcctcagcctcctgagtagctggaattacaggtgcgtgctaccacgcctggctaatttttgtattttta

SEQ ID NO: 130949 - DNA, 201 bp, Homo sapiens
ggaattacaggtgcgtgctaccacgcctggctaatttttgtatttttagtcgagacggggtttcaccatattggccaggctgacctcgaactcctgacctygtgatccacccaccttgccctcccaaagtgctgggattacaggcatgagccaccacacctggccgctaggagattcttaaaaccaattcgtgccaaactg

SEQ ID NO: 130950 - DNA, 201 bp, Homo sapiens
gccgggtgtggtggcccacgcctgtaatcccagctacttgggaggctgagtcaagagaatcactttaacccaggaggcggaggctgcagtgagccaagatsgtgccactgcactccagcctgggtaacagagtgactctgtctcaagaaaacaaaaaaggaaagggactacagaaagaagccagaagggacttctctaaaa

SEQ ID NO: 130951 - DNA, 201 bp, Homo sapiens
gtccaggctggtctcaaactcctgggctcaagcagtctgcctgcctcagcctcccaaagtgctgggattacagacataagccactatgcccggcctgatayttctttaagtctttttaaatctatacatttctcctccattacattcttttttttttttttttttttttttttttttttttttttgcagtctatctattga

SEQ ID NO: 130952 - DNA, 201 bp, Homo sapiens
aatacggtattcttacagagacttaatacattttttacttattgttttctattctaatttaggtgctcttgctgagaaagctttgtatcctgttattcccmgagattttcctttcaccataagagttacatctgaagtcctagagtcaaatggtatggtattgaaatacttctttcatagtagaaaagaccatattcccta

SEQ ID NO: 130953 - DNA, 201 bp, Homo sapiens
gtgctgggattacaggtgtgggccaccacgcctggcctgatttttttttaattttaagcaggcagttgtattggctgaacctgtattaaggcttcctcagygtactctcctacatagttcttaaaaacattgctttctcttcctgccttccttccccagcactcctagagcagtgctttacatatgtagtctatgtgatgt

SEQ ID NO: 130954 - DNA, 201 bp, Homo sapiens
ctgtcctggcctcccatagcactggaattacaagcatgagccccatgcccagccatattttttttttttttgaatctggctctcaactctcctcaactctrttgtccagactagagtatgagtatagtggcgtgatcgtggctcactgtagcctagcctgaaactgctggcctcaagtgatcatcctgcctcagcctctag

SEQ ID NO: 130955 - DNA, 201 bp, Homo sapiens
atgtgtaactacaacatcgtgtaactacttagaattttggtactggaaattaattcagatactactaagataatttctactgcaagaatcattccagacarccagagtccagagcactgcatgtattaagtgacctatttttttttttgaggtggactcttgctccatctccaggccggagtgcagtggtgcgattttggc

SEQ ID NO: 130956 - DNA, 201 bp, Homo sapiens
cctcgctatgttgcccaggctggtcttgaactctgacttcaggtgatctgcccactttagcctcccaaagtgctgggattacaggtgtgagccaccacgcycagcctctatatttattcttagtttgcatactgattttctttcctttctaacagtccacgatgtcttctcttattttttcatttctgtttagaaaacttc

SEQ ID NO: 130957 - DNA, 201 bp, Homo sapiens
gcctggtctcaatctcttgacctcgtgatccacctgccttgcccccgcaaagtgctgcaattacaagtgtgagcgaccgtgcccagccgtattaagtgacstttaacatcctttccaaacttgggcttctgttttatgcgttaataaattctgttgtgcttttctagagaaagcgattttggtattttcttctatagtaat

SEQ ID NO: 130958 - DNA, 201 bp, Homo sapiens
cgaccgtgcccagccgtattaagtgacctttaacatcctttccaaacttgggcttctgttttatgcgttaataaattctgttgtgcttttctagagaaagygattttggtattttcttctatagtaataattggggaatttttccttatgtatagccacataagaagtagagaatactattcaattcattgaatatgacta

SEQ ID NO: 130959 - DNA, 201 bp, Homo sapiens
tttatttttcctgaagcaatgtttgaattacctcgtacttcaaggtttgaggttactgcaagagagtgagaagcactgtcaccttagccatttgctaacaytgagaaactgatgtgattttgtcccttattcatttattcacccctcgtaagagtaagcgggagaaagaaaaaaagtaaggaaagggttctattatagttt

SEQ ID NO: 130960 - DNA, 201 bp, Homo sapiens
acttattacaaaaatataacgttattgttaataatttaaatgtaatggaaatttatggtgtaaatccccatacccatccagttcccacatcctaatccatktacacacttgaaatagctacttttaaccatttggtatgtatgttaaatttatatcatacgttttctgtatatttatgaatgtacttttttaaaaaacaaa

SEQ ID NO: 130961 - DNA, 201 bp, Homo sapiens
gtcttgggttctgtttctaatagcatatgttacggtattacagattttatgtccctagatattttgacttcataattgtctctttctgttagaggacttctttttttttttttttttaactgggaaattatcagagtatatactccttcaggatgaaattaatgtaacttacggctgttataagttcataatcatgcaata

SEQ ID NO: 130962 - DNA, 201 bp, Homo sapiens
atgttattaagtgaaaaaggcaaggtgcagaacagtaaatgcatacagtctgccgccacgagtaaagaaaacaaaagattatatttacatttatacttgtrcacagaaattttctaggaggatacactaatgttagctgccatggggaggtaaactgaggagttcaggctggaagaatttaccaaatagatgcttactttc

SEQ ID NO: 130963 - DNA, 201 bp, Homo sapiens
atataattgtttgacttttccatattaggctgatattaaattacctggaataccaataaaaattgtgatggaggctattcaacaagcttcaggtgagctastgtgcttgattctcccttcattcttttccactttgctaatgggaactatagttctcattaggcttattataaaatattgctttaaaaagtggaatttcat

SEQ ID NO: 130964 - DNA, 201 bp, Homo sapiens
atcaagtgatcctcccgactgtgagtcccaagtaggtgggcacatgctaccaggtccagctaatttttgaatttattttttgtagtaacaggctctccctrtgttgcccaggctggccttgaactcctgagctcaagtgatcctcccacctcagccccccagagtgctgggattacagatgtgacccactatgcccagcca

SEQ ID NO: 130965 - DNA, 201 bp, Homo sapiens
aattgttaagagaaatacagaagaacatatattctaaaagttttttttgttgagacggagtctcactctgttgccaggttggagtgtagtggcacgatctsggctcactgccacctccgcctttcgggttcaaacaattctcctgcctcaccctcctgagtagctgggattacaggtgcgcgccaccaggcccagctaatt

SEQ ID NO: 130966 - DNA, 201 bp, Homo sapiens
ttcattctttgattcacacatatttatttatagggtatattttcagttgaaaagtatactttttatagttctaaaaacgtgctagaattgtttcttttcgytttttactttttcctcatatgaaaacaatgttttatttgtcaatggatatacagatacttattattttaaccaggcttactatttatttttttgtagaga

SEQ ID NO: 130967 - DNA, 201 bp, Homo sapiens
taaaactacaaaaattagctggatgtagtggctcacgcctgtaatccccagcactttggaaggccaaggcaggcagatcacctaaagtcactttggcaaakaatataaacagttcacagaaaaggacatacatatggccttttaaaaatataaaaagatgccaggcacagtggctcacgtctaatcccagcactttgggag

SEQ ID NO: 130968 - DNA, 201 bp, Homo sapiens
aaagaattatatgaacttttttttattgctgcttcaggttgactacagacaaaaagctgctgcagcaggtagaattcccacaaactatctgagaagagagrttggtacttctgataaagaaattctaacaagtcgaataataggtaagatattaacatagaggcgttcatcttctctggtatgcctatgttagcatctctt

SEQ ID NO: 130969 - DNA, 201 bp, Homo sapiens
gggaggctgaggcaggagaatcggttgaacccaggaggcagaggttgcagtggcagagatcgtgccattgcactccagcctgggtgataagagtgaaactyttgtctcaaaaaaaaaaaaaaaaaaaaaaaaataatatatatatatatatatatatataaacatttttaattgaagagtaatatagaaataggccacaag

SEQ ID NO: 130970 - DNA, 201 bp, Homo sapiens
ggaggcagaggttgcagtggcagagatcgtgccattgcactccagcctgggtgataagagtgaaactcttgtctcaaaaaaaaaaaaaaaaaaaaaaaaataatatatatatatatatatatatataaacatttttaattgaagagtaatatagaaataggccacaagctgtagtttggtcacccctagactaggttatct

SEQ ID NO: 130971 - DNA, 201 bp, Homo sapiens
ggcagaggttgcagtggcagagatcgtgccattgcactccagcctgggtgataagagtgaaactcttgtctcaaaaaaaaaaaaaaaaaaaaaaaaataatatatatatatatatatatatataaacatttttaattgaagagtaatatagaaataggccacaagctgtagtttggtcacccctagactaggttatctcta

SEQ ID NO: 130972 - DNA, 201 bp, Homo sapiens
tgctcgtgcctccggctccggcccctgagcgatggtcctttccttctgccacggcgggatcgggcactcacccagttgcaagtgcgagcactatggagtascgcagggtctcgagctgtggccgtggacttaggcaacaggtaaggagtgacgtgcgttcactgtattgtcataaggtgtcttgtccagccagcttgagcg

SEQ ID NO: 130973 - DNA, 201 bp, Homo sapiens
tgcttacattttggaagtatgttgattctgaggaaagaaatcaaggtggatctatcactaagaagtaaaattgatccataatatttatgtcatgtcatggyatttgaaaatgttatattactaagagcttcgatggcagtcattttttttttctttttcctttaaatagtcatgttggaagcctctgcagagaacatttta

SEQ ID NO: 130974 - DNA, 201 bp, Homo sapiens
caaaagagtttcatgtgataatggagccaaaatgggtagaatgaagaaaggaagaggttaaaaagaatatatgaaaggtgaaattaattgaacaattaagragaaaagaacaggatactacatgtggtttcccctgggagggtgggagaaagaaatttgtgttctataccataaatagtaaacagattagcaatgataaat

SEQ ID NO: 130975 - DNA, 201 bp, Homo sapiens
aaatagcaatataaattttcaattctttctgaagtatttattaaagttttagctgattattattaaatatttcagttttgtttataatagaaactgcctcwtgtttccagatattattatgctaacatttattttctgcttaaatagacttgctatggagagactctatgcagtttttacagattacgagcatgacaaagt

SEQ ID NO: 130976 - DNA, 201 bp, Homo sapiens
gagattacaggcgtgagccaccatgcctggcctagaaaatatttttatatgatagaaatagctaacatttactgaatacttgcaacatgcgaggactgtgmtaagtgctttacctaccgtatttatctgattctcataggaaccctttgggaagaggccattatttttcccgtttatttatttatttagagacagattctc

SEQ ID NO: 130977 - DNA, 201 bp, Homo sapiens
cagaggttgcagtggcagagatcgtgccattgcactccagcctgggtgataagagtgaaactcttgtctcaaaaaaaaaaaaaaaaaaaaaaaaataatatatatatatatatatatatataaacatttttaattgaagagtaatatagaaataggccacaagctgtagtttggtcacccctagactaggttatctctaag

SEQ ID NO: 130978 - DNA, 201 bp, Homo sapiens
aaattgttctttccccttctgttgaacatgaaggtccttataggcaatatttaggagtttatattttgtcctaaaagcattgggagaaattctaaagtttkttttttttgttgttgttgttgttgttttgttttgttttgtttttgttacagagtctcactctgtcacccaggctggagtgcattggcacaatctcggctc

SEQ ID NO: 130979 - DNA, 201 bp, Homo sapiens
ggcattgggcctgtctacatgcttgtgtttggtttgtgcattttcagcaccagactatgatagaatgttgccgaaactgagttcatgtgacacaacatctktctctgtatcttcaggggtcactgacttggtttcatctcaaaacaccttttgatgaatcttgagctctttgacaagttttgctggtctgtttcaagacat

SEQ ID NO: 130980 - DNA, 201 bp, Homo sapiens
taaattttgatgaaatcagcttacctatttttttcttttgtcatttatgcttttgatgtcatatttaagactttgtgtggcccaagtctctgaagatttaytcctgtgttttgtttctaaaacttttattgttttagctcttacgtttgggtctaggatccattttgacttaatttatgaagattcattcttttttgcatc

SEQ ID NO: 130981 - DNA, 201 bp, Homo sapiens
ttctttccccttctgttgaacatgaaggtccttataggcaatatttaggagtttatattttgtcctaaaagcattgggagaaattctaaagtttttttttkttgttgttgttgttgttgttttgttttgttttgtttttgttacagagtctcactctgtcacccaggctggagtgcattggcacaatctcggctcactgta

SEQ ID NO: 130982 - DNA, 201 bp, Homo sapiens
gtagctgggactacaggcgtgcaccaccacacccagctaatttttgtatttttagtagagacggggtttcaccatgttggccaggatggtctcgatctctttttttttttttttttttgagatggagtctcactctgttgcccaggctggagtgcagcggcgcgatctcggttcactgcaacctccgcctcccaggttcac

SEQ ID NO: 130983 - DNA, 201 bp, Homo sapiens
agatggggttttgccatgttggccagactggtcttgaactcgtgacctcaagtgatccgctgcctcagcctctcaaagtgctggtataggcctgagccacygcacctggccaacagaaattttttattggtttgtttgtttgttttttgagatggaatctcgctctgtcgaccaggctggagtacagtggcgcgatctcgg

SEQ ID NO: 130984 - DNA, 201 bp, Homo sapiens
gttactcacctactttttctattagctttctagttttagctgtcgaatgtagaccattagtcgatctttgaatttattcctacacgttgtatgaaaggaaracctccatagtgagccaattatacattatttactaatactttatttttctcaatgacttgtgatgtcaccatatgatagtcaaagtttataaatgcatgt

SEQ ID NO: 130985 - DNA, 201 bp, Homo sapiens
gtttgttttttgagatggaatctcgctctgtcgaccaggctggagtacagtggcgcgatctcggctcactgcaagctccgcctcccaggttcacaccattmtcctgcctcagccacctgagtagctgggactacaggcacctgccaacatgcctggctaattttttgtatttttttagtagagacggggtttcaccgtgtt

SEQ ID NO: 130986 - DNA, 201 bp, Homo sapiens
aattatacattatttactaatactttatttttctcaatgacttgtgatgtcaccatatgatagtcaaagtttataaatgcatgttaaactatatccttttkcattgttacgtgaattttctgggccactgtcaaactattttaattattatgatttaggggtatattttaatatctgagaagcaagtcatcttccctgttt

SEQ ID NO: 130987 - DNA, 201 bp, Homo sapiens
actctggcacccaggctggagtgcaatggcgtgatctcagctcactgcaacctctgcctcctgggttgaagagattcttctgcctcagcctcctgattagytgggactacaggcaccggccactacacccggctaatttttgtctttttagtagcgacagagtttcaccatgttggtcagactagtctcaaactcttgacc

SEQ ID NO: 130988 - DNA, 201 bp, Homo sapiens
ggcaccggccactacacccggctaatttttgtctttttagtagcgacagagtttcaccatgttggtcagactagtctcaaactcttgacctcaggtgatcsgccctcctcagcctcccaaagtgctgagattacaggcgtgagccaccacgcctggcctgtttttcccttttaaagatgaggaagcttttgaggtttaatt

SEQ ID NO: 130989 - DNA, 201 bp, Homo sapiens
aataagcatacagttaatacctgctattatcattaagacacagaaatggccgggcatagtggctcacgcctgtaatcccagcactttgggaggccgaggcmggcagatcacgaggtcaggagatcgagaccatcctggctaacacagtgaaaccctgtctctactaaaaatacaaaaaaaaattagccgggcgtgttggcg

SEQ ID NO: 130990 - DNA, 201 bp, Homo sapiens
actcttgcttcttgggattaaaggtcaaagaggaaaggcatcacatctgtaggaaaagaagaattcaaaggactttcaactttacagctgctgttccctasacctagaatgctctctcatagcaggtggtcttcttctaacccaaggttcaaatgccacctcttctccaaagcttccccgaactgtttcggggaaagagaa

SEQ ID NO: 130991 - DNA, 201 bp, Homo sapiens
ctgctgttccctagacctagaatgctctctcatagcaggtggtcttcttctaacccaaggttcaaatgccacctcttctccaaagcttccccgaactgttycggggaaagagaaagtcccctttgcacagaaccgctattactatgtattttttaattttaaaagcattaaaagaaataatagactttttttttttaactt

SEQ ID NO: 130992 - DNA, 201 bp, Homo sapiens
tttaactgggaaattatcagagtatatactccttcaggatgaaattaatgtaacttacggctgttataagttcataatcatgcaatataaaaatggctcastgagtaaataattatcaagtgtcctaggcagagcaggccctagcaatacaacaatgaaagatgcagttcttgatctctgcataaaggagacagataatta

SEQ ID NO: 130993 - DNA, 201 bp, Homo sapiens
ggtttatggggattaaatgagtgaatcatttacatctgtgcctgccacaccgtaagtgttcaataaatgttaactgatgctattcttaatacctagtggartcataagatacagaacttaggtaatttagctctccagaaattattaagcaaaggatcttactgtataatatcaacctctggccaggcgcggtggctcacg

SEQ ID NO: 130994 - DNA, 201 bp, Homo sapiens
ataatatttatgtcatgtcatggtatttgaaaatgttatattactaagagcttcgatggcagtcattttttttttctttttcctttaaatagtcatgttgsaagcctctgcagagaacattttacagcaggacttttgccatgctatcaaagtgggagtgaaatatacccaacaaataattcagggcattcagcagttggt

SEQ ID NO: 130995 - DNA, 201 bp, Homo sapiens
tgcagtaatggtcacagcggtcagtaaaacaaaaccttccccttcccagtttatgcctttggtggtaagtatttgctgatttatctgaactgtaatatggwctgagtaaagtgtagaatgtataatatttttgtccagtgtctagtgagtggaaaatacaaacttgcacaacaaagaatttttcctagttttttgatactg

SEQ ID NO: 130996 - DNA, 201 bp, Homo sapiens
tgtataataattagaaaacagaaatattaaatgttgtcatgtatatgtaataactgaacctcaactttcttttaggtttccagagatgaagctgttaacaraataagattagatacggaggaacaactaaaaggtaaattttattttattttattttatttttttgctgagggcagctttaataaggcatggcctgactct

SEQ ID NO: 130997 - DNA, 201 bp, Homo sapiens
attagaatctggtattaagtcagatcaagttataacagctataaagtaagttatgtttttaagatgtttgttatgttttatgatgttctattatataattraagcttatgtggtatattattaattattgttactttttttaacctgtgtttttgtacttcatttttctgtttacatcatcatgatttcaaaggattttgt

SEQ ID NO: 130998 - DNA, 201 bp, Homo sapiens
ctcccaagtagctgggattataggcgtgcaccgccatgcccagctaatttttgtatttttagtagagatggggttttgccatgttggctaggctggtctckaattcctggcctcaagtgatctgcccgcttcggccaccaaaagtgctgggattataggcgtgagccactgcacccagcagaaccaaggaatctttgctgc

SEQ ID NO: 130999 - DNA, 201 bp, Homo sapiens
caaaaaagtaattgctactatttcattattaaaatatttagtcatttagtcatccaaatctttttttttttttttggagaccaggtctctctctgttgccsaggctggagtacagtggcatgatcttggctcagtgcaacttccgcctcccaggttcaagtgattctcttgactcagcctcctgagtagctgggattacag

SEQ ID NO: 131000 - DNA, 201 bp, Homo sapiens
tgagtagctgggattacaggcgtgcaccaccacacctggctaatttttgtgtttttagtagagacagggtttcaccatgtttgtcaggctggtctcaaacycctgacctcaggtgatccacctgcctcagcctcccgaagtgctgggattgcaggcatgggccaccactcccgggcagtcatccagatctttagagtataa

SEQ ID NO: 131001 - DNA, 201 bp, Homo sapiens
tttttgtgtttttagtagagacagggtttcaccatgtttgtcaggctggtctcaaactcctgacctcaggtgatccacctgcctcagcctcccgaagtgcygggattgcaggcatgggccaccactcccgggcagtcatccagatctttagagtataatcttacacggcaagaatagttactccatgctgtcagctgctgg

SEQ ID NO: 131002 - DNA, 201 bp, Homo sapiens
aatttatagcttcagctaatctcaaaactccttcatcttcaactgctaaaatggttgacagtttatagcaatcttcttttttttttttttttttttttggktgagatggagtcttactctgtcgcccaggctggagtgcagtggcgcaatctcggctcactgcaacctccatctccaggttcaagcgattctcttgcctcg

SEQ ID NO: 131003 - DNA, 201 bp, Homo sapiens
ttggttgagatggagtcttactctgtcgcccaggctggagtgcagtggcgcaatctcggctcactgcaacctccatctccaggttcaagcgattctcttgmctcggcctcccaagtagctgggactacaggcgtgcaccaccacacctggctaattttttatttttagtagagatggggtttcaacatgttggccaggctg

SEQ ID NO: 131004 - DNA, 201 bp, Homo sapiens
tttaaaagatttaatttttattttatgtgacttatagctcaataaaacttatttttaaaatatgtgcatgatttcttttttttttctgtttcattttttaygggaaatccctccttaaacttaaggagaatgtaaacctaaatacagatatcaaggtgtctttattcatttaccgctgcttacattttggaagtatgttga

SEQ ID NO: 131005 - DNA, 201 bp, Homo sapiens
aaaaatctctaaatgaaaaactaacaaaagcctaattgtttctccattcttttgttttgttttgtttttgagacagagtctctctctgtcgcccaggctgrtgtgcagtggcatgatctcagctcactgcaactttcgccttccagcgattctcatgcctcagcctcccaagtagctgggattacaggtgcacgccaccac

SEQ ID NO: 131006 - DNA, 201 bp, Homo sapiens; identical to SEQ ID NO: 22811

SEQ ID NO: 131007 - DNA, 201 bp, Homo sapiens
aaaatctctaaatgaaaaactaacaaaagcctaattgtttctccattcttttgttttgttttgtttttgagacagagtctctctctgtcgcccaggctggygtgcagtggcatgatctcagctcactgcaactttcgccttccagcgattctcatgcctcagcctcccaagtagctgggattacaggtgcacgccaccaca

SEQ ID NO: 131008 - DNA, 201 bp, Homo sapiens
cagaaattattaagcaaaggatcttactgtataatatcaacctctggccaggcgcggtggctcacgcctgtaatcccagcactttgggcggccgaggcagrcagatcacgaggtcaagagatcgagaccatcctggctaatacggtgaaaccctgtctctactaaaaatacaaaaagttagccgggcgtggtggcgggcac

SEQ ID NO: 131009 - DNA, 201 bp, Homo sapiens
tctgtagcaatactatgcaatagaactttttgtgataggctgggcttggtggctcacacctgtaatcccagcactttgggaggccaaggcgggtggatcayaaggtccaaagggtctaacatggtgaaactctgtctgtactaaaaatacaaaaaattagctgggcgtggtggcaggctgagactccatctcaaaaaataa

SEQ ID NO: 131010 - DNA, 201 bp, Homo sapiens
aaataattatcaagtgtcctaggcagagcaggccctagcaatacaacaatgaaagatgcagttcttgatctctgcataaaggagacagataattacttatratcagtgttattataaagacatagtcaaagtgctaagaatatgatagagaagagcagatttgattttgtgtggtcaggttgtcaaggagggctcctcaga

SEQ ID NO: 131011 - DNA, 201 bp, Homo sapiens
tactttgaagttatgtttaataaaccatacacatgagagaatagtacttaaaacttggcataaattaattgatagggtagaatagcttaacatctaaaccytaagctaaaaataaaataaaataaaaccataagcctttgaggctgacagatctttattcaggtcacagctgtatcagttactacctgtgtggtctcaggc

SEQ ID NO: 131012 - DNA, 201 bp, Homo sapiens
ccagcctggacaacagagtgagactttgtctccaaaagaaaagaaagaaagaaaagggaactgatttcaaagcactgtcattcagtcatttaggtagaaarcaaactaagttcacaataacaacacagttgtagtacttggtacttgatgtgtcacatttggttgagaacatttaatttatctactttgtttgcctgagga

SEQ ID NO: 131013 - DNA, 201 bp, Homo sapiens
ggaggtggaggttgtagtgagccgagattgcgccattgcactccagctcaggcaacaagagcaaaactccgtctcaaaaaaaaaaaaaaattgtttacttrtcaaattgaactaggtcaatttgaatatgtgtattgctctaatgtatggaagttcttagtataagagctgaaggatcatgactttcggttaatagatgtt

SEQ ID NO: 131014 - DNA, 201 bp, Homo sapiens
cactatggagtagcgcagggtctcgagctgtggccgtggacttaggcaacaggtaaggagtgacgtgcgttcactgtattgtcataaggtgtcttgtccarccagcttgagcgtattcatctcccagggtagaaacccggtatcccagctctatttaatctctccttaccctaaacctaaattccaaatttccctttccgg

SEQ ID NO: 131015 - DNA, 201 bp, Homo sapiens
aggtgtcttgtccagccagcttgagcgtattcatctcccagggtagaaacccggtatcccagctctatttaatctctccttaccctaaacctaaattccaratttccctttccgggtttggaatgtgtctcctcggaccctccttcccgcgctatgtcgttctctctgttggtgtgtgccgggcttctttgctccatccga

SEQ ID NO: 131016 - DNA, 201 bp, Homo sapiens
cacttgaacctgttaggcagaggttgtagtgagctgagaccgccactgcactccagcctgggcaatagagcaagactccatctcaaaaaaaaaaaaaaaartgctgttagcattgatattaaggccattaattgtaactgtcattgaatatgtttagtcctttctcactacatttcatcctatttggtaagaaagaaattt

SEQ ID NO: 131017 - DNA, 201 bp, Homo sapiens
taaacattttggtactgattgttttcctttccaagtacaactcagttaagcagaaaagatattaaagtctaatattaaaaattattcttttctgaagaagrtacaatctaatatatctttctgtgaccatttcttgtgttttggttactttgaagttatgtttaataaaccatacacatgagagaatagtacttaaaactt

SEQ ID NO: 131018 - DNA, 201 bp, Homo sapiens
tagctttctagttttagctgtcgaatgtagaccattagtcgatctttgaatttattcctacacgttgtatgaaaggaagacctccatagtgagccaattayacattatttactaatactttatttttctcaatgacttgtgatgtcaccatatgatagtcaaagtttataaatgcatgttaaactatatcctttttcattg

SEQ ID NO: 131019 - DNA, 201 bp, Homo sapiens
gctcacgcttgtaatcccagcgctttgggaggctgaggctggcagatcacctgaggtcaggagttcaagaccaacagggccaacatggttgaaaccccatstccactaaaaatacaagcaaattagctaggcgtgttggcgggtgcctataatcccagctataggggaggctgaggtgggaggattgcttgaacccaggaa

SEQ ID NO: 131020 - DNA, 201 bp, Homo sapiens
gaggtaggagaatcgtctgaacccaggagatggaggttgcagtgagccgagatcgtgccactgtactccagcctgggtgacagagtgagattccgtctccaaaaaaaaaaaaaaatcttttgtctgctaatccaccatcttaatcaactcagaatcagcctccattcctggtctttattcttgagaatgggccctgtttcc

SEQ ID NO: 131021 - DNA, 201 bp, Homo sapiens
ctgaggctggcagatcacctgaggtcaggagttcaagaccaacagggccaacatggttgaaaccccatctccactaaaaatacaagcaaattagctaggcrtgttggcgggtgcctataatcccagctataggggaggctgaggtgggaggattgcttgaacccaggaagcagaggctacagtgagccaagatcatgccac

SEQ ID NO: 131022 - DNA, 201 bp, Homo sapiens
aattttttacgtgtactttgaaaaaatttggaccccagttcatacaaaaagcaaaaaaatcattttgaatccaggtctcgcactctaactttgataagtarttgacattgaacaggttaattcaccattttcttgtgcaaagtgtggagagtggattccatcaagggtctgcaaacttttctataaaggaccagataatat

SEQ ID NO: 131023 - DNA, 201 bp, Homo sapiens
tcacgcctggcctgtaatcccagcacttgggaggccgaggtgggtggatcctgaagtcaggagaccaagactatcctggctaaaacggtgaaattccgtcyctactgaaaatgcaaaaattagctgggcgtgatggtgggcacctgtagtcccagctactcgggaagctgaggcaggagaatggcgtgaacccaggaggtg

SEQ ID NO: 131024 - DNA, 201 bp, Homo sapiens
ataaataaaaattaaaagataaaaacaaataatggtgaagactatatgtactttgcacctagcgtatgcttagaagaatgctagtatttgaagaacaggtrcttgttcttcccttcctcctctgcatgttcaccttgtatcttataggatatgaatttaaaatagatattatattaatagtaataggccaggcacagtgac

SEQ ID NO: 131025 - DNA, 201 bp, Homo sapiens
gctttcacagtttttcttccctgtgttttgggcccacttctgtctagttaaagatcctccactccccttcacagagatcacttaggtattcagaatttacmttggtagacagaatgccagttcctggtaagttttgagaagtactggtggcatgttactcagggttaaacaaaatttcaagatgtcaaatttacatttgcc

SEQ ID NO: 131026 - DNA, 201 bp, Homo sapiens
gtcctactaaaagtacaaaattagctgggcatggtggtgcatgcctgtaatcccagctacttgggaggctgaggcaggagaatcgcttgaacccagaagcrgaggttgcagtgagccgagattgcaccattgcacgccagcctgggcaacaagagcagaactctgtcttaaaaaaaaagaaaaaacaaaaaaaaaattctt

SEQ ID NO: 131027 - DNA, 201 bp, Homo sapiens
tttaaaaaaagggtctctgttccacaggctgaagtgcagtggtgcagtctcggcttactgcaacctccacctcctgggttcaagcaattcttgtgcctcarcctcatgagtagctgggattacaggcatgcgccaccacgccctgctgatttttctatttttagtagatacagggtctcaccatgttggccaggctagttt

SEQ ID NO: 131028 - DNA, 201 bp, Homo sapiens
agctgggattacaggcatgcgccaccacgccctgctgatttttctatttttagtagatacagggtctcaccatgttggccaggctagtttcaaactcctgwgctcaagtgagctgcctgccttggcctcccaaagtgctgggattacaggcatgagccactgcgcccggcctgaaattacagatttttatgggaagtcttc

SEQ ID NO: 131029 - DNA, 201 bp, Homo sapiens
tgcagtggtgcagtctcggctcactgcaacctccgcctcccaggttcaagtgattcttctgcctcagcctcctgagtagctggaattacaggtgcgtgctrccacgcctggctaatttttgtatttttagtcgagacggggtttcaccatattggccaggctgacctcgaactcctgacctcgtgatccacccaccttgcc

SEQ ID NO: 131030 - DNA, 201 bp, Homo sapiens
attcattgccctcatagtttcccttcagtatgactctgcaagtacagtcagccctccatgtccttgggttttgcatccatggattcaaccaaccatggatygaaaatattgggggaaaaattgcatctgtactgaatatgtacagactttttttcttgtcattccctacgcaatacggtataaaaactatttatgtagaat

SEQ ID NO: 131031 - DNA, 201 bp, Homo sapiens
ggccaggcacagtggctcattcctgtaattgcagcactttgggagcctgaggtgggtggatcacttgaggtcaggagtttgaggcctgcctggccaacatrgtgaaaccccgtctctactaaaaatacaaaaattagccgggtgtggtggcccacgcctgtaatcccagctacttgggaggctgagtcaagagaatcactt

SEQ ID NO: 131032 - DNA, 201 bp, Homo sapiens
caatacggtataaaaactatttatgtagaatttacattgtattaaggattatatgtaatctagagatgatttaaagtatatgagaggatatacgtaagttrtaaacaaatactatggtgttttacatcaaggatttgagcatccatggattttgatatctgcaagaggtcctagaaccaatcccccagggataccaagaga

SEQ ID NO: 131033 - DNA, 201 bp, Homo sapiens
tggcacgatctcggctcactgcaacctctacctcccgggttcaagtgattgggattacaggtgcccaccaccatgcctggctgatttttgtatttttagtyaagatggggtttctccatgttggtcaggctggtcttgaactcctgacctcgtgatccacccgcctcagcctcccaagtgctgggattgcaggcgtgaacc

SEQ ID NO: 131034 - DNA, 201 bp, Homo sapiens
tgcaacctctacctcccgggttcaagtgattgggattacaggtgcccaccaccatgcctggctgatttttgtatttttagtcaagatggggtttctccatkttggtcaggctggtcttgaactcctgacctcgtgatccacccgcctcagcctcccaagtgctgggattgcaggcgtgaaccactgtgcccggccagaaat

SEQ ID NO: 131035 - DNA, 201 bp, Homo sapiens
ggtttctccatgttggtcaggctggtcttgaactcctgacctcgtgatccacccgcctcagcctcccaagtgctgggattgcaggcgtgaaccactgtgcycggccagaaattgctattttatgtatatttatatacagtcttcagacacaaagtagcaaggaagcattttcttttggtctgctattggtcttaagtctct

SEQ ID NO: 131036 - DNA, 201 bp, Homo sapiens
aatatcacagccttagcctcaggaagttttttttgtgtcttgttttgttttgagtcaggacctctgttgcccaggctggagtacagttggcatgattatgsctcactgcagcctcaaactcctgagcccaagtgatcctcccaatttagcctcctaagtagctgggactacaggcacaaaccaccatacccagctaagttt

SEQ ID NO: 131037 - DNA, 201 bp, Homo sapiens
gccccactgtgttgacccagaattcaggttaattctctagtacatcacttttgccatgttgaggacattgtcttctgcaggtcagcccattgtttctttcttttttttttttttttgagacagagtcttgctctgtcacccaggctggagtgtagtggcacaatctcggctcactgcaaccttcacctcctgggttcaagc

SEQ ID NO: 131038 - DNA, 201 bp, Homo sapiens
aggtgatggagggcaagtcaaaagcataacgatgtcaagctttggtagaacctagcaaaccggaagacttcagggtgtttggaaaggaatgtgtaggggaragttgtctaaaatgctgtaacagctttctgtgttgctcttctcactgccttagaatttagagtcaaaataataatgatcttttcttcttttagatagcct

SEQ ID NO: 131039 - DNA, 201 bp, Homo sapiens
atctcataatacctctatttcacttctttttcttctctggtactttaggccttatgcttaaaaatgcttttgatactttgggctttttttaacataacagkttattcctatagatggggcaagtaaaatatttgggtttatgtatgaatctttaaaattatgtttataattataaagttattaaagcctggagtgcagtgg

SEQ ID NO: 131040 - DNA, 201 bp, Homo sapiens
cactgcagccttgacctgccaggctcaagtgatcctcccacctcagcctcccaagaagctaggactacaggtgcatgccagcacatccagctaattttttwaattttttgtagagatgggggtctcactatgttgcccaggctggtctcaaactcctgggcataagttatcctcctgcctcagcctgcaaaagtgctagga

SEQ ID NO: 131041 - DNA, 201 bp, Homo sapiens
taaaaagatgtctgtgaaataatatattagttttctactgcagctgcaacaaattgttatgaacttagtggcttaaaataacacaaataaatatattatcktcaagttctgtgggctgaaagtctgtcacaggtcttgtagactagagtcaaggtgtcggcatggctgcttttttctggacgctctaggaaagaattcttt

SEQ ID NO: 131042 - DNA, 201 bp, Homo sapiens
ttggtagataccaagtaaattactgcattttctgcttagctttaggtgtttttaaaatttccttttatattaccatctttttttttttttttttttttttggggagacagtcgtatcctgtcactcaggctgtgcaatgttggaatcacagctcactgcagcctcaacctcccaggctcaagggatcctcccacctcagcc

SEQ ID NO: 131043 - DNA, 201 bp, Homo sapiens
acagtactttcaaaaaaaattaaagtatttgaatattcctggtcccaaaattgactcttgacattttgacaattgtgtgtcatttatgaagttgtttcttrttgatggattgtttctgctgttaatgcacatcaactgacttcattgattcttttcctactcaggcctgtgacactcctctgcaccccctgggcaggcttg

SEQ ID NO: 131044 - DNA, 201 bp, Homo sapiens
tttcttcttatggcttttgttatttatatttctctggaaaattgttcattgcacccttgttttaaagcttattggcataatgttcctaccatagtcttaaratgattacaccagaataactgtagttgtaccccctgtttctcattcttacgattattcatttgggccttttatcttttttatcttgatcagtcttgtcag

SEQ ID NO: 131045 - DNA, 201 bp, Homo sapiens
taattttggtatgaagtatagtagtcgtcttatttagattcagtctctaggcaaaatcatgtatctaaaacccaaccacagagtagacaaagtttaatatraagttttgtccttgagtttttgtgtcttgtcctttggcaacagtatcacatatgttcatttatttaacaaatatttatggagcgtttctatgtaatagcc

SEQ ID NO: 131046 - DNA, 201 bp, Homo sapiens
agatgattacaccagaataactgtagttgtaccccctgtttctcattcttacgattattcatttgggccttttatcttttttatcttgatcagtcttgtcrgcagtttacccctttttaaattaattttttcaaaaattagggaatcatttctttcgcttttaaaaaatttcattaatttctgctttttatttccttctac

SEQ ID NO: 131047 - DNA, 201 bp, Homo sapiens
agctcggattccaagagccgcccgcgccctcgtttaccttcgctagtcgccctgcagccccgccctgtccggaggccccgccctccatgaatcagctgatyccgcggacccactgggttgccaagctcgcgccggatgcggagcgcggtgctgccggtggagcttcaggtgagcgagtgtgggtcccgggttggctattgg

SEQ ID NO: 131048 - DNA, 201 bp, Homo sapiens
taagccatgccagttgtcatttgttaccctagcaaacagcaaccatttcgataacaattgatacaattttctctgttcctcacttgtttgtggtaataacsttttaatgacccctttcctaaaatgtctaaggaccatactaatgggtactctaaataccttctctcatttctagaaatcctctctgaagacttactcacc

SEQ ID NO: 131049 - DNA, 201 bp, Homo sapiens
tgcaatctcctctatgtggcttcttacacttagtataatgtttttgttttttccatattgtggcatgtatagtatttgttcctttttatggctgaatagtrttccaaaactacattttgtttatccttttaccagttgatggacattgggttatttccaactttagactattgtaaataatgctgctataaacttttgaat

SEQ ID NO: 131050 - DNA, 201 bp, Homo sapiens
atctctatttgtgctaccaggaaaagtgaataagcctcaatttttttttttttttgagacggagtcttgctttgttgccctggctggagtgcagtggcacmatcttggctagctgcaacctccacctcccaggttcaagtgattctcgtgcctcagcctcccagctagctgggattacaggcctgtgtcaacgcacccagc

SEQ ID NO: 131051 - DNA, 201 bp, Homo sapiens
ttgatgtttaacatattaagaaactgtcgaacttttttccaaagtgtctgtaccattttacattcccatcagcaatgtctgaggatactaatttctccatrtcaaaaaatatttcttattttctgtcttttttcttatagccattccaatgggtatgaagtggtatctcctggttttaatttgcattccctagtgactaat

SEQ ID NO: 131052 - DNA, 201 bp, Homo sapiens
gattttgaaaagtaaagaacatacacacacacacacaccccaagtggaatagtaaaatctgcatatatgaggaaaaaaaggcaaaatctaagtatattatrcccattgcatttttggctttattttctgttctcccaccatctctccctagatgtggcacaatcacagaagtggacagtttttggcatatgtctgtttttc

SEQ ID NO: 131053 - DNA, 201 bp, Homo sapiens
ataagatgtgcaaggttcagaaagtccttgttctaacaggaatcaatttttatttttatttttttttaatttttaaatttttttttttttttgagatggaktcttactttgtcacccaggctggactgcagtggcgtgatctcagctcactgcaacctgcacctcccaggttcaagcgattctcctgcctcagcctcctga

SEQ ID NO: 131054 - DNA, 201 bp, Homo sapiens
gcccgcattttcccagctctgggtgcgatcgactgctcctgccggtccagcagcgcccgaggcggcccctgccttggccccaggttctcccacttgcccckgtctctccctccccagactgggcgccgctgcagtggtctcagctgcgtgaaattccttcaagccccctcttcccgcctccacccacgctgccttccagct

SEQ ID NO: 131055 - DNA, 201 bp, Homo sapiens
ctttttgtcattgtttctgtaacagcacaacatttaccccatcagacaaacttaaggtcatccagcagacttttgaggagatctctcagagtgtcctggcrtcactccacgaagacttcttgtggtccatggatgacttgtttcctgttttcttatatgtggtgctacgggccaggtaactgttttatgactttgttatta

SEQ ID NO: 131056 - DNA, 201 bp, Homo sapiens
atctttgaggttgctttaatactgtaatcatttgggttccttagttgagagcacatggcaacaggttaagtagtcttagaggaattcataatcataatcayatcataataaagtgatcggttttcagtttgtgttgtcatcatcatcattattttgttatagaaaatttgggcactacaactacagtccagctgttgcagg

SEQ ID NO: 131057 - DNA, 201 bp, Homo sapiens
gttctttccaccgtggtggcgcccaaaaccaagcaagcatttacattaattgatttctgttcctcttgaaataaagaggttgcttttcatatttgaggatygatactgtaatgacaggttgttaaatgtcctggtatttatccttgtgaacgttttaggaatggcttaaagataactacacctgaggagcagttcactctc

SEQ ID NO: 131058 - DNA, 201 bp, Homo sapiens; identical to SEQ ID NO: 22830

SEQ ID NO: 131059 - DNA, 201 bp, Homo sapiens
gtatttgcctataacctgtgcacatcctttcatatatgttaaatcatctctagattacttataacatctaataaaatataaatgctatataaatagttgtwatatggtatcgtttagggattagtgacaaaaaagtggtagaaacataatttttttatgaaatatttttggtctgaggttgttgaatctgcagatttggaa

SEQ ID NO: 131060 - DNA, 201 bp, Homo sapiens
tgaaatatttttggtctgaggttgttgaatctgcagatttggaactcacagatatggaggagctttttctccttttctgtttcctggaagttcatagtttrtatgaagtaggaattatttgtactttgaagatttagtagaattcatctgtaaaaataatctaggtttcatgggggcatttgctgtagggagtttttactg

SEQ ID NO: 131061 - DNA, 201 bp, Homo sapiens
gcctgatggaaagatgtattctggcatgttcaggaatggcttggaagatgggtaagaaaattgtgtaaaacatgacagtaaattcaagttcggtaaggtcrtaaattatgttattttgtatgcagagctgcttttcaaacaagtagtagatttttgttgttattttttagaaatgcacatgtatgagcatgaagagagcca

SEQ ID NO: 131062 - DNA, 201 bp, Homo sapiens
ttagcaccagccaaatataaataaaatctgggcactttatctaagatctttttttttttttgagacaggctggtcacccgggctggtgtgcagtggcacarccacggctcactacagcctcaacttcctgtgctcaaatgattctcctgcctcagccacctgagcagctgggactacaggtgtgcgcttccatgcctggct

SEQ ID NO: 131063 - DNA, 201 bp, Homo sapiens
cctacaaggtctttaaactgatctagctttagctgtgaaggtttgacctctcaaatatcccaatgagatacagctttcacctcaatatggcctcaattaayaaaaaaattttccaccagatcagcttagaattgttgagagtcagagttcagtttccctggatgtagctttcatatgctttatatttccttcctgaaacac

SEQ ID NO: 131064 - DNA, 201 bp, Homo sapiens
tgctgcatgctgaagtgtggcagtttttcaagaaaaagcatgactgtgatagttgagttgagagctcctcttgaaataaatgggttgcttttttttttttwaaacttgaaaggacaattgacagataaactgatttttcagatttggatattggcagatattttctcagaaatgagtaaatgaacctgtcatttcaaagag

SEQ ID NO: 131065 - DNA, 201 bp, Homo sapiens
cgcatctcggctcactgcaagctccgcctcccgggttcacgccattctcctgcctcatcctcccgagtagctgggtctacaggcgcccgccaccacacccrgctaatttttgtatttttttagtgaatacggggttttaccgtgttagccaggatggtcttgatctcctgacctcgtgatccgcctgcctcggcctcccaa

SEQ ID NO: 131066 - DNA, 201 bp, Homo sapiens
atctattccaggtatgtgtttggaaactgaagaactaatttacatttcaactaatgtacatgtgttttcttttctgctcaaggtattgcacatctattacmaatttcctggttatgggaggattccagcttcttgctaagcctgccatgtaagcaaacccacaccttccagttatcattctctccgccaaagatgacattt

SEQ ID NO: 131067 - DNA, 201 bp, Homo sapiens
accaaacactgcatgttctcactcataggtgggaactgaacaatgagaacacttggacacaagaagggaaacatcacacaccggggcctgtcgtggggtcrggggaggagggagggatagcattaggagatacacctaatgtaagtgacgagttaatgggtgcagcataccaacatggcacgtgtatacatatgtaacaaa

SEQ ID NO: 131068 - DNA, 201 bp, Homo sapiens
gatgtgcaaggttcagaaagtccttgttctaacaggaatcaatttttatttttatttttttttaatttttaaatttttttttttttttgagatggagtctyactttgtcacccaggctggactgcagtggcgtgatctcagctcactgcaacctgcacctcccaggttcaagcgattctcctgcctcagcctcctgagtag

SEQ ID NO: 131069 - DNA, 201 bp, Homo sapiens
acaaattaagatgagtcttttaggcatagaaaaagacataacatcaaaactggaaattagaaagtaagatatgtttgtcaatatgataattcaacagtccygaacagcaaataaaacagtgtaaacaaaatgaaaatacgtaacaaactgggtaaaaatatctgcaacatatgtgataaagtgttgctgcacttatatata

SEQ ID NO: 131070 - DNA, 201 bp, Homo sapiens
acaggaatcaatttttatttttatttttttttaatttttaaatttttttttttttttgagatggagtcttactttgtcacccaggctggactgcagtggcrtgatctcagctcactgcaacctgcacctcccaggttcaagcgattctcctgcctcagcctcctgagtagctgggattacaggtacgggccaccacgcctg

SEQ ID NO: 131071 - DNA, 201 bp, Homo sapiens
taaaaatatctgcaacatatgtgataaagtgttgctgcacttatatataaaggaacagttgtcaaaggataaaaattgtcaaaaggatatttatattttcrtcataaaagaagtagaaatggccagcaataaatgaaaagatgatcatttagcaaatacatttaaattaaaaaacaacagtacagtgtttttctcacctat

SEQ ID NO: 131072 - DNA, 201 bp, Homo sapiens
gtttatactgggggcgggtcacataggcaccctgtgcttggcagttgccaaattccacagtcccagcttacaggaaagcagatgttcaccataaatcacaytgttaatctaaggaaagcaaaacacctttgtcagtatatggaacttttacgaagcttaattcccaagtgccagccaagggtcaaccttataagcaggttc

SEQ ID NO: 131073 - DNA, 201 bp, Homo sapiens
tccctctccatttgcaatttttaagttaaaggttttgaagtgtttttttttttttctttttttgaaagagagtttcactctgtcatgcaggcaggagtgcratggtgcaatctcagctcactgcaacctccacctcccaagttcaagcaattctcatgccccaccctcccaagtagctgggattacaggcgcacggcacca

SEQ ID NO: 131074 - DNA, 201 bp, Homo sapiens; identical to SEQ ID NO: 22835

SEQ ID NO: 131075 - DNA, 201 bp, Homo sapiens; identical to SEQ ID NO: 22826

SEQ ID NO: 131076 - DNA, 201 bp, Homo sapiens
atgcttcaaaaataccattggtggcgtatgtttttgaaaatcttaagtttgtccaaatgatatgttttcttaccctctggactcccactccttcaccccaygtctggttggttttcagtttcccccaggctcttaagaaaggctgcacgggtgaaaacgaggacagtggttctgacccccacatacagtggagaagcagat

SEQ ID NO: 131077 - DNA, 201 bp, Homo sapiens
caaaggactggatactgtgatctttgaggttgctttaatactgtaatcatttgggttccttagttgagagcacatggcaacaggttaagtagtcttagagraattcataatcataatcacatcataataaagtgatcggttttcagtttgtgttgtcatcatcatcattattttgttatagaaaatttgggcactacaact

SEQ ID NO: 131078 - DNA, 201 bp, Homo sapiens
ttttaaaaagatgaattaatgtgaaatactgtgtgcttgaaccagatttctacaactgcttttgaaaatttaaaaagaaaatccaatttggttaaatctakaggggactaaaagtttgctgttaaaatttttagttaattcactaacccttttttttttcttttttcttttttttaaccttcagatggtgaggtctacagc

SEQ ID NO: 131079 - DNA, 201 bp, Homo sapiens
gaaagtccttgttctaacaggaatcaatttttatttttatttttttttaatttttaaatttttttttttttttgagatggagtcttactttgtcacccagrctggactgcagtggcgtgatctcagctcactgcaacctgcacctcccaggttcaagcgattctcctgcctcagcctcctgagtagctgggattacaggta

SEQ ID NO: 131080 - DNA, 201 bp, Homo sapiens
agtatctccaaaattgatacttaaagtaaaccatagtataatttttgcttgcttgaaattcgtgtatgtgtttcaagaaattaaatgtagaaagaagtaatttttttttctatatttgggataaataggaattgattttagtatttcattcatgaagttcataattgttaccttctactctatcagtagaagaaatggaaa

SEQ ID NO: 131081 - DNA, 201 bp, Homo sapiens
catatgctttatatttccttcctgaaacactcccactcccatcctcattctgggacaaaagtcattttatcatgaaaataaagccctctttgactatattsgttctctttcacctatccatctctgaaggattatttactctgtgttttgctaacactttctttctctattattcacttctcatgttatatcaatggccct

SEQ ID NO: 131082 - DNA, 201 bp, Homo sapiens
gtgcaagatgtaagtctacaaaaatagagaagactgcatattgcctttaaagggtcaaaatttaagtccgtaaaaataagagaaaataaacttatttatgrtagagtacactagcatacaagaagtcagagataaaatctatggcagaactcaaagcccaggaaaaaaaattcctcaccaatttatccccttgatcatttg

SEQ ID NO: 131083 - DNA, 201 bp, Homo sapiens
ttctaccctggaagtgctcccctccagggaggaagatgagtcagatatgcagctgtgatgctaaatgattcaatagagtcaaaaacaacacagaacacagraaaacgcattgtttaatctgactcaattacaagtgggcaaggtaggtgatggagggcaagtcaaaagcataacgatgtcaagctttggtagaacctagca

SEQ ID NO: 131084 - DNA, 201 bp, Homo sapiens
gaggcaggagaattgcttgaacctgggaggcggaggttgcaatgaaccgagagcgtgccattgcactccagcctgggtgacaagagcaaaactccgtctcaaaaaaaaaaaaaaaaaaatctgtaaatactgatataaaaagatgtctgtgaaataatatattagttttctactgcagctgcaacaaattgttatgaactt

SEQ ID NO: 131085 - DNA, 201 bp, Homo sapiens
atgagctttatgctggtcttcatttccacatgtcagttgctttctaaagggaattgaagaaaaattgagcaagtatccatttattcagaatgtaaatgttkgttctgaataattaaatgttctagtttgctaaaagttaccaaattctttaaataaattaccagtattcaaataattttaatatactaaagtatagttaca

SEQ ID NO: 131086 - DNA, 201 bp, Homo sapiens
cttgtactgtttaggtcttgatagactttctgtaaagaaggaatgatttggtgatggagtgttcccactgaccgatggactcaaagaagagaaggtaaaaycatttcttccttttctcttatcctcctaggaaaacatagcaaacagcttcacatatgtgtagcttctcttcagtttaattttcttgttgatggttgttaa

SEQ ID NO: 131087 - DNA, 201 bp, Homo sapiens
cagttaggatatggtcattactgtgcagctatgtgttttgtattctttaaaccgaaatcatcagatgtgtagaattctttagctagaacttgagcaaagcrttaaggattttactgatatctattataaacttgattcctaaaaatttaaatagcagttctacacttaaactcaacataaagtgaaatatgaattcctgtt

SEQ ID NO: 131088 - DNA, 201 bp, Homo sapiens
tgtgtaataaagaagaaatataaattgttcttgcttgactaatgatgcacagttctgtctgataaatcttcattaacccaaaactgtaggttcttcattgtttttttttttaatgtgacttaattttaaacatatagcagagaaatacaagagccagtcaatattactctattaataagaaaagcattaggacacaaataa

SEQ ID NO: 131089 - DNA, 201 bp, Homo sapiens
gccctggctggagtgtggtggcacgatctcagctcactgcaacctccacctcctgggtttaagcaattcttctgcctcagcctcccgagtagctgggactrcaggccagtgccagcactcctggctcttttttttttgtatttttagtagagacagggtttcaccatattggccaggctggtctcaaactcctgacctagt

SEQ ID NO: 131090 - DNA, 201 bp, Homo sapiens
ttattagaaattgttacgacattaacaaattagatattgggaagtttttaagtgagtaattggaatgattatctaaagtagtgagttaatataaatgtctstattcatagtagagtgaaggcaactggaattaatttaaaaattaccttccttctgtggttattttttactgtatcctaagtatactttttgctataaaga

SEQ ID NO: 131091 - DNA, 201 bp, Homo sapiens
aaatgtttatttttacacgacagcactttataatttgagaaaggctacgattcttgctgagaatactttgactttgtgtgcctgtgtgtttctttttaagrcttcaaccgttgtgtgtaaaatgtctggatggcaaagaagtaatccatctggaggcaggtggttaccattctcttgcacttactgcgaaatcccaggtag

SEQ ID NO: 131092 - DNA, 201 bp, Homo sapiens
tataaaatgcatataacccatatgatgcaaactttagaactcttttgaagggtcatgaaagcagtagtaaagtgagaggttttatttttggatgagatgcrtcagttgtaaaaatgtcatttctctcttaaatcattaatcagcacagtgaaaattcagtacagtccccaaaatattccagtgtaatatttacaatttgat

SEQ ID NO: 131093 - DNA, 201 bp, Homo sapiens
gttttggttttcataagaaaatttttaaaaacaggaagccacgtgttttcaagctaaatatccgttttttatgtgtttatatttcttagcttcaactgttsattaaatatgcatagtttctttgtttttttaagtaaaaaaatgaaaaagtgctttcttttaaaacatgtttctaggactctgctgttttctcagcgttac

SEQ ID NO: 131094 - DNA, 201 bp, Homo sapiens
ttgctcagagttaatataaattgacctcagatgagatttgccagtaaggaacacatatctcatatagatcagaattctccattccttggtaactagacagragaaaatcatagcacgtgaagattttgtagtggtattattcattagctgcattcttaattttatcctgttagaaacatcagttttctcagggaactaaaa

SEQ ID NO: 131095 - DNA, 201 bp, Homo sapiens
aagattttgtagtggtattattcattagctgcattcttaattttatcctgttagaaacatcagttttctcagggaactaaaatacttagttgataataaascttgctctcataactaatggaaatgtgtttttatgcttttcaacccccctagaggtataattgtataattatattttttattcttccttaggttcttatt

SEQ ID NO: 131096 - DNA, 201 bp, Homo sapiens
tctttgttggtcttcccagtctactttcctaattgcttggaaagaagtcctagaaatgaggaactttagacaggcaaaaagcaaataatatcctggtgccmtctctgaaattcagagcatcctcagtggtccaatgtttggattgccttctctgcactgaagggttgggcttttcaaagaggcaagtagagcagaagtcag

SEQ ID NO: 131097 - DNA, 201 bp, Homo sapiens
gtcactaatcagtggcttaagttagataattgacttcccttctcttggcttcagattacttatcttcaaaatgaccagagagttgcattagctcagtggtyctcaaatttggctcatctttaaaatcacctggagagtcttttttaacagaaaaagccatcctggaatctataaggttcctgtgaatgtgtttttaacaag

SEQ ID NO: 131098 - DNA, 201 bp, Homo sapiens
gccaaggggaagtttggaaagcatgggacaatattgctgtggccttgaccaccagtcggcgccagcacagagacaggtgagtgaacacctgctcaacatayagcagagcatgttaggaagatgaaacttaagaccagtaagtagtcaaggctcaccacatttaatttaaaagttaatgatttacttcgcttctgagtaaga

SEQ ID NO: 131099 - DNA, 201 bp, Homo sapiens
acatttgccatctgtggtagcaagagcaaaggtaatcctacagcttttctagcccctgggtcatagaaaataactcattgatgagccagtaaaggcactcragttgagcataatttgggagatgataggttacaggtataacttatttttccatctccatatgctatatctaaatttcaatttataaagcatttcagggaa

SEQ ID NO: 131100 - DNA, 201 bp, Homo sapiens
gtaatagaaattgcaaagcagtattttaatcttaagccaactatagttctggattgctaaaatttagtcttctctaaatgaaaaaaaatttaaaaataatraattatcatgttttcttctatattctagcagagtgatagcataatttacattaaatgtactataataagtctggttctttagaaaacaattttgtttact

SEQ ID NO: 131101 - DNA, 201 bp, Homo sapiens
tctaagcactgcttgtaatttacatcatcccctaaattttgatatattgtatggtcattttatacagttcaaaatatttttgacttttccctgtgtgtgtktttttttcttttacccatggattattttcatatactcttttagacatgcatgtgcccatattttgtttgagttttaaagagttggagactggtaaagagc

SEQ ID NO: 131102 - DNA, 201 bp, Homo sapiens
aagcatctctaactaccttatttaaaattgcaaactcctttcaagcccccttcactccttatcttctctctccaaagggcctatcaccatcgaatacactrtataatttactcactttgtctattgtctgtcctccttactataatgtaagattcagaagggtagggattttaggctatctcattcactgctgtagcatag

SEQ ID NO: 131103 - DNA, 201 bp, Homo sapiens
ctggtttgagtattttaactcatcatctttcagaaatgaaaaataaaaataatagaacttgatactagtttcttttttaaaactagattttgtttctgtgwttccagcttttactggtataattttccttttttgacttgaattcatctcataatacctctatttcacttctttttcttctctggtactttaggccttatg

SEQ ID NO: 131104 - DNA, 201 bp, Homo sapiens
ggagctagtgattgtgtttcatgtgagtatttacacgtatcttgctttcttgatgtgaaatacaacagacttttctttccctttttatagtccagaaataytgagtcgttcacagactcagacactagagagtttggaattcattccacagcatgttggtgccttctctgtggagaaatatgatgacatcaggaaatattt

SEQ ID NO: 131105 - DNA, 201 bp, Homo sapiens
ttggatgatgatgcacaagcacttatcattcatctaattgatcactcagctgctcacatcaggcttgcctggtggtttgattattatgcaagtttttttcytaatgtgataaaatatatgtaatgtcatatttatcattttaatcttaattgtacactaataagtgtacaatttagggggcatcaaatacattcgcaatgt

SEQ ID NO: 131106 - DNA, 201 bp, Homo sapiens
ttataaaatctatgagtctattaccgaaacgtgtgctgtaatttatagaggtacctttaatcttaatggcactttatcaactcaatcatgacaaatttgayttgggcaccaattgccatctacttcactaatttataaatttctgctctgtaagtatttattaaggtattaaataatgctttggtattttctttctaggaa

SEQ ID NO: 131107 - DNA, 201 bp, Homo sapiens
gaaacaaagtttaaaagagcttaaccagtgagcttattttctcatgtcagtattcttgaaccagactatacatttcctaataaatgcacatatcttccctstagccactattgagtccttacttatatagatgatgtgatgagttaacttgagtgtatacatgtatctgccatgtataataggtcaaagataaagtttgca

SEQ ID NO: 131108 - DNA, 201 bp, Homo sapiens
tggttgaactgttgcagactaacagttttgcaggtgggcgaaggatcagggaggaaattgagttgagggtgttggtgaataggatataggagtttcagaamccgactacacatctgtcgttgatggtctaaatatttgcatgtttgcaggtccagcgatggcacaatgcctagcagcagaaggtttgcacccactgtgcga

SEQ ID NO: 131109 - DNA, 201 bp, Homo sapiens; identical to SEQ ID NO: 22829

SEQ ID NO: 131110 - DNA, 201 bp, Homo sapiens
tatgtaaactgagtacctaatagcaggatcgtgatgatttctgagttcgttgggtttagtactacgttggatgctccactttgactggagctagtgattgygtttcatgtgagtatttacacgtatcttgctttcttgatgtgaaatacaacagacttttctttccctttttatagtccagaaatactgagtcgttcacag

SEQ ID NO: 131111 - DNA, 201 bp, Homo sapiens
ctcgggaggctgaggcaggagaatggcatgaacccgggaggtggagtttgcagtgagccgagattgcgccactgcacaccagcctgggcgaaagagtctcaaaaaaaaaaaaaaaagcgaccgagtgctggactctattccccattccccttcccccagtagctctggggcctgggaatttgtgtttctaacatgttccca

SEQ ID NO: 131112 - DNA, 201 bp, Homo sapiens
accaatagattacaaatgagcttctttgatctgggtggcctggagagattgttagaagtcatttgtttcctgccttgatttttcttggaatttggaagaawcactctaaagtttattgaaaaaacagcagatagaaagtgcaaaaacacttgtgaaaaatgagaaagaatagacctactcttccagttagtaaaatttata

SEQ ID NO: 131113 - DNA, 201 bp, Homo sapiens
acaattttgcacaaaagaaatgattaataaaaggttgatatgactttattagcaggaagctaggaaacctggcagtgccagctgatgagaagtggaaagcrgtgtttgacgaatgttggcgccaactgggctgtgagggcccaggccaaggggaagtttggaaagcatgggacaatattgctgtggccttgaccaccagtc

SEQ ID NO: 131114 - DNA, 201 bp, Homo sapiens
tcaccaggttggccaggctggtcacgaactcctgacctcagatgatccacccgccttggcctcccaaaacgctgggattacaggcgtgagccactgcaccyggcctaccattaacacttctattaaataaactgaaaagggggagaaactggggaaaatattggccacagatgacttagattattagtgtttatgttattt

SEQ ID NO: 131115 - DNA, 201 bp, Homo sapiens
tttttaattcatgaaaagaattcacagtttcctctaagacaaaattatagataatgtcctcatatcaactccatatgtaaagagcagagtaatattataasttctttaaaacttcccatctctacttttgactttttgaaactgaagctctaccttggattctgtattcaattttaatatgaaaaatgctccttttctccc

SEQ ID NO: 131116 - DNA, 201 bp, Homo sapiens
aggacaggtactattagccactggttatcattataagtagtatgctattgaaaaagtactgaatgactaggctcaggttcggggtccttctgtgctatccytgagactttggacaactctctttacctcagtaggcctagtgttcttcatctgaaaaatgggaatgttctctcccattggagaggaacaaataatgtatgt

SEQ ID NO: 131117 - DNA, 201 bp, Homo sapiens
aataagtcatagtctctgacctccaggagcttaaaatatattttgaatcagtgacttagtgcatatcctattagtaacaacattataactaataagtagckttctaggccagcctaccgaatatatccaatgccttaatttactgaattctcttactctgagtcaagatttgaaggctcattggctcccatactggtatca

SEQ ID NO: 131118 - DNA, 201 bp, Homo sapiens
actcagtgcatgataaataataactccccccatactgtctccccctgcctgcctggctctggtaacctctattctacttcctctctgtttgagtttgcctrttctaggtaccttatatgagtcgaatcacgtatttatttgtcgttctgtgtctggcttatttctttaagtatagtattttcaaggttcattcatgttgta

SEQ ID NO: 131119 - DNA, 201 bp, Homo sapiens
ctcccatactggtatcaggcaatgctttctgtgcagcagttaaggctgagaggcgtggggttccaagtggccttcttggtggttagttggccaaggcttcrgtgcaaggtgagttttcctcagccttccacagtggttgggaaggcttcagtggcaggatatccaggaagtagcagttgttgttggtgtatagattatttg

SEQ ID NO: 131120 - DNA, 201 bp, Homo sapiens
atattaccaattccaaaatgattaactaaatttttttttcctctgcctctagtgatttcctaaataaaaaccaagagctgttgcaagatttgtcagaagtraatgacgaaaacactcagttgatggaaatactgaatactttgtttttcttgccaatcagacgacttcataattacgcaaaagttttgctaaagcttgcta

SEQ ID NO: 131121 - DNA, 201 bp, Homo sapiens
gagggagggtagaatagcaaattatatagatgctttggggtttaaatatagagaaaggaagagagaaggaaagacaggtaaattaaaataagaaaaataaytagaattcaatgtcaggtttctggcctaggttaactatttaaacttttcaactaaaataccattaatgcttcttttttttgagacagagtctcactctgt

SEQ ID NO: 131122 - DNA, 201 bp, Homo sapiens
cagtcctggctttacattccccatgaatgatttcacagtctagatagacgatcaaataggctgatgaaaggaatgaagctctcgtgtgtgtctttggttaycatgggatgttaatagtgcattgggtctgtagcttgcctgcctgatttaatgggatatgtgaataaagacatggaatgttttttatacagtggtatctgg

SEQ ID NO: 131123 - DNA, 201 bp, Homo sapiens
tgttgttgttaagggcacttccagatcatggtattaaaatgatatccttggctcgtacaggacaacttatttctctgttagatgtaacagaaggatgtgtrtccagtggagtctaaaagtggcatcagtttattaagaagcaaggtttgctctttgtttaaagggccccctggggttttgttactttacatatcactgtga

SEQ ID NO: 131124 - DNA, 201 bp, Homo sapiens
taaataccacccttacttaagtatatgaggataaaactttaataacataagatccccacatttagttgcaatattcctttttagttatgtttcctcagcartcagttttcttcattgccctattggagtttcaggcagacgtatcttgttggaagatgtcaaacatattaaacaccattaaaacaaaatgagataggggcc

SEQ ID NO: 131125 - DNA, 201 bp, Homo sapiens
agttgcaaccccctctctcccaccattaaaccatcaggtctttatctcttcttcctatgtcacaaataatgaaaacctgttagtttatggtttacttcttkctatgcactgtctttgtgtgtgtgtacacaggtagtcaacaatttacaaactgtttccaatttgtcaatagcctcactgcccctgccctgtcctaccact

SEQ ID NO: 131126 - DNA, 201 bp, Homo sapiens
atgaggataaaactttaataacataagatccccacatttagttgcaatattcctttttagttatgtttcctcagcaatcagttttcttcattgccctattkgagtttcaggcagacgtatcttgttggaagatgtcaaacatattaaacaccattaaaacaaaatgagataggggccgggcgcggtggctcaaggtggctc

SEQ ID NO: 131127 - DNA, 201 bp, Homo sapiens
ttttcttcattgccctattggagtttcaggcagacgtatcttgttggaagatgtcaaacatattaaacaccattaaaacaaaatgagataggggccgggcrcggtggctcaaggtggctcatacctgtaatcccagcactttgggaggccgaggcaggtggatcacctgaggtcaggagttcgagaccagcctggccaaca

SEQ ID NO: 131128 - DNA, 201 bp, Homo sapiens
cttcattgccctattggagtttcaggcagacgtatcttgttggaagatgtcaaacatattaaacaccattaaaacaaaatgagataggggccgggcgcggwggctcaaggtggctcatacctgtaatcccagcactttgggaggccgaggcaggtggatcacctgaggtcaggagttcgagaccagcctggccaacatggt

SEQ ID NO: 131129 - DNA, 201 bp, Homo sapiens
catggaagctggctttttagagagaaacatggaagctgccagttctctttaaggccttgattcagaacttcattactgccacattctattacttaaaaaaraaagtctcaaggctagcctacatttgcggggagaggacacaggatccatctcttgatgtcaataatgatgtttgtatgcatggagggaggaagtgatgac

SEQ ID NO: 131130 - DNA, 201 bp, Homo sapiens
taatcccagctactcgggaggctgaggcaggagaatcatgtgaacccaggaggtggaggttgcagtgagctgagatcatgccattgcactctagcccaggygacagtgcaagactccatctcaaaaatgaaaaaaaaaaaaaaaaaaaaaatcatgaaagcatccatagactgtcccactggaagcaatgcaactccccag

SEQ ID NO: 131131 - DNA, 201 bp, Homo sapiens
ataatgatcgcgaggaagacatttactgggaatgtgtccttcgactaaataagcagccagatattgctctcctgggctttcttggggtgcagaggtaagtrtagtagttacaagcgcaaccaaatggttttaatttaaaatgcaaactgcattattggaaatttggcactttgatatctaattatatatatggcttgtaat

SEQ ID NO: 131132 - DNA, 201 bp, Homo sapiens
ccccagtgtactctccaaaatgaagtaaatgttcaaagtacataaaagaaaccaagttaagtataaaatagttaaaagttttgagacttctactaaaaaamgatagttgtttttgaatatagattcctggtcctttattcaaaacccttggggcaaggtgcattttggaattcagatttatgttttgttctttagagtaag

SEQ ID NO: 131133 - DNA, 201 bp, Homo sapiens
ttttgtcttctttttaatctcctttgagctctaattttgtgaagtgtttagatcccatataaatttagattttacaccaagctaagctacgaccagcaaaytcccttaaatgtgatttgtgtctgttttattttctctttacatgttaaaataattttgattgtttgacttgtattatatttgtctttaattccaggattc

SEQ ID NO: 131134 - DNA, 201 bp, Homo sapiens
aacttttaattttcagagctatagatttctggttaaggtattgtagacctgtaagatggttgtagctcatctttctaacagttgggacatctagactagaktgttgttgttgttgttgttgttaagggcacttccagatcatggtattaaaatgatatccttggctcgtacaggacaacttatttctctgttagatgtaac

SEQ ID NO: 131135 - DNA, 201 bp, Homo sapiens
tactcagttacccttatatttggctatatggaataaaattgtgtgatatgtttattctgagcaggtacaaaacttcagcaaacctattggtcccacatttycccccccatttatcatatgatttggagtgaccggttgacctttgagttaatgaataatttaaagcagtgaaaaattttttgcagtaaactacggtgtttt

SEQ ID NO: 131136 - DNA, 201 bp, Homo sapiens
atacactcaacacatttctctaccacatttaaaatttttatttatatcctgccttcttcccaaaaggatttaaagcagcttacaaaaatgtatagcagggygggataaaataaagaaacagactatacaacatgcatactgtgaagtcctcttcacttccaggtaccatcatatggaacccttatcctcccaccacaaaat

SEQ ID NO: 131137 - DNA, 201 bp, Homo sapiens
tagcattaggtatatctcctaatgctatccctccccgctccctccaccccacaacaggccccagtgtgtgatgttccccttactgtgtccatgtgttctcrtttttcaattcccacctatgagtgagaacatgcggtgtttgtttttttctccttgcgatagtttgctgagaacgatggtttccagtttcatccatgtccc

SEQ ID NO: 131138 - DNA, 201 bp, Homo sapiens
ggtacctttaatcttaatggcactttatcaactcaatcatgacaaatttgacttgggcaccaattgccatctacttcactaatttataaatttctgctctdtaagtatttattaaggtattaaataatgctttggtattttctttctaggaactaaaggaagacaaattctaggaaacaaggattaaatctggtcctggtg

SEQ ID NO: 131139 - DNA, 201 bp, Homo sapiens
tacctttaatcttaatggcactttatcaactcaatcatgacaaatttgacttgggcaccaattgccatctacttcactaatttataaatttctgctctgtaagtatttattaaggtattaaataatgctttggtattttctttctaggaactaaaggaagacaaattctaggaaacaaggattaaatctggtcctggtggt

SEQ ID NO: 131140 - DNA, 201 bp, Homo sapiens
ggaaggatttgagatagcaaaactttttcattttactttgatagaacagtacccaagcttgtgtttgcatctgttattaccaaagacctgcactctgacawcagtatcatttatttctgttgttgcagaaaatagttttcctccttgaccttcactctcttttttgcaggttttgccaaccacgaaagatgcttgttttgc

SEQ ID NO: 131141 - DNA, 201 bp, Homo sapiens
aaatgcttttgatactttgggctttttttaacataacagtttattcctatagatggggcaagtaaaatatttgggtttatgtatgaatctttaaaattatktttataattataaagttattaaagcctggagtgcagtggcaccattacagctcactgcagccttgacctgccaggctcaagtgatcctcccacctcagcc

SEQ ID NO: 131142 - DNA, 201 bp, Homo sapiens
aagagaacttctgtcgttttagattcttacatgcaaatagcgatggatattagcctttctttttattgattgcttgttgcataagggattatatttttatrtaattttttatgtgtgtatattttagcctcttttagaagaagcaattcctaatctccacagcccgcctaccacaagcacctcagccctaaacagcctggt

SEQ ID NO: 131143 - DNA, 201 bp, Homo sapiens
tatgttgcccaggctggtctcaaactcctgggcataagttatcctcctgcctcagcctgcaaaagtgctaggattgcaagtgtgagccactgtgcctggcsaaaattatttttaattgtgataaaatacacatcacataaaattaaccattataaccatatttaattgtatagtactgtgggctaattttagtaggagttt

SEQ ID NO: 131144 - DNA, 201 bp, Homo sapiens
gctggtctcaaactcctgggcataagttatcctcctgcctcagcctgcaaaagtgctaggattgcaagtgtgagccactgtgcctggcgaaaattattttyaattgtgataaaatacacatcacataaaattaaccattataaccatatttaattgtatagtactgtgggctaattttagtaggagtttcccttcttcctc

SEQ ID NO: 131145 - DNA, 201 bp, Homo sapiens
attccagaggttgaaagatacttcaggaactttaaacatttcacagtcaagtctaacaaatactaattcttattctagcctggagagattagtttagagtytatctaattgagtatctccaaaattgatacttaaagtaaaccatagtataatttttgcttgcttgaaattcgtgtatgtgtttcaagaaattaaatgtag

SEQ ID NO: 131146 - DNA, 201 bp, Homo sapiens
tcactttgtctattgtctgtcctccttactataatgtaagattcagaagggtagggattttaggctatctcattcactgctgtagcatagtacatactttrtaaatattttgatgatatttgatgagcatagtacatactttataaatgtttgttgaattaacaccctcatgtaggaatattggaaagtacattttactat

SEQ ID NO: 131147 - DNA, 201 bp, Homo sapiens
gtgcctggcgaaaattatttttaattgtgataaaatacacatcacataaaattaaccattataaccatatttaattgtatagtactgtgggctaattttastaggagtttcccttcttcctcaaagtcagttgattccatttgccagcccaagtgtgtacaagaaatgtacagggctcaaagcagtataactagacttgtt

SEQ ID NO: 131148 - DNA, 201 bp, Homo sapiens
gcgtgatacagatggtcagcttagtacagcctgtcagttcgaccttaagactttagcccttcagttaacctgggttaactgttgttagttaggtgtttctragaagtgaaaatgaatgaactctttatataaaattatgttgctaccacaaagatcttatatgtttatctaaaatctctaataataatgattatgcacagt

SEQ ID NO: 131149 - DNA, 201 bp, Homo sapiens
gctttcatatgctttatatttccttcctgaaacactcccactcccatcctcattctgggacaaaagtcattttatcatgaaaataaagccctctttgactrtattggttctctttcacctatccatctctgaaggattatttactctgtgttttgctaacactttctttctctattattcacttctcatgttatatcaatg

SEQ ID NO: 131150 - DNA, 201 bp, Homo sapiens
caggattttctcaaatgttaactagtccacccttacataaaactagttaggtggaatcctaggaagttagcaccacactaggatatagatgtatgttaaarctggtcctgagacattcacctttcaaatcccatcgaaatatgtgatttcattttgtttctaccctgaaaggctctagaaaaattataatgactccaaagt

SEQ ID NO: 131151 - DNA, 201 bp, Homo sapiens
tcaccatgttggccaggctggtctcgaactcctgacctcaggtgattcacttgcctcggcctcccaaagtgctgagattacaggagtgagccaccgccccyagccttcactgtcatttcttaattgggaaacctgaagtgaagattacagaaaattttcatcaaaaattcaactattttaattatgttttctcaagtatgt

SEQ ID NO: 131152 - DNA, 201 bp, Homo sapiens
attttactttgatagaacagtacccaagcttgtgtttgcatctgttattaccaaagacctgcactctgacaacagtatcatttatttctgttgttgcagaraatagttttcctccttgaccttcactctcttttttgcaggttttgccaaccacgaaagatgcttgttttgcctcagcagtagaatgtctgcagcagatca

SEQ ID NO: 131153 - DNA, 201 bp, Homo sapiens
actgtcatttcttaattgggaaacctgaagtgaagattacagaaaattttcatcaaaaattcaactattttaattatgttttctcaagtatgttaattaarttaccacgtaatagatattgcttggtagataccaagtaaattactgcattttctgcttagctttaggtgtttttaaaatttccttttatattaccatctt

SEQ ID NO: 131154 - DNA, 201 bp, Homo sapiens
ctggagctgcagctgccatcttggagcaggtagacagaaccatgctacaccctagggtgacagagcagtagccggaaggaacctattccctgaggacttcrtggagcaaggctgccctattagccctggattctctctgtctctgaactttcacacgaacaagatataaactactctgctaagccaaaattattctgggtt

SEQ ID NO: 131155 - DNA, 201 bp, Homo sapiens
aacaaagccaaggttttaaaaattctgtatttaagttttttttatttttaaaatagaagagatagggtctcactgtgttacccaggctggttaggaactcstgggctcaagggttctcctgtctcggcctcccaaagtgctggaattataggcatgcaccactgtgccaggccaaaaattctgtattttaatagaaaatac

SEQ ID NO: 131156 - DNA, 201 bp, Homo sapiens; identical to SEQ ID NO: 22827

SEQ ID NO: 131157 - DNA, 201 bp, Homo sapiens
attcacctaccacaatatatcattcagatagactcacagcttaatgttattctaatcctgtttttgcatcctgtgcatttcttttgttaattatcaaactrccaagattacatttctacctaaagattgtcccattattatgatagaactttttaaagttttttaaggcactcaagggggttcttaagaaataagattaga

SEQ ID NO: 131158 - DNA, 201 bp, Homo sapiens
gttctgcagcagagactgcaaggcccatgtgggttaatgacatgaaggggatatgggcagagtccccgaggtctacatgggctttcataaaagtgcctccrtgttctctgtttcagttctccacgcaccatgttttccctctggccacgctgtgggcagagccactgtctgaagaagctggtggtgtgtaagtgcgtcccc

SEQ ID NO: 131159 - DNA, 201 bp, Homo sapiens
gtaaaaaaactttgttttagaataagacgggaaatgaaaaaattttgtctatactaattacaagtaggcaaaagacagccactagataggggaactagaarggaacagggaaaagtgaaatcaattaaatctgttgggccatcagctgaatttgttcataagggattttgtttctttagtcccatatgcattgctctcttt

SEQ ID NO: 131160 - DNA, 201 bp, Homo sapiens
tataataggtcaaagataaagtttgcatgttttcatcatcaactcaattgctgccttatgagaaaaaaaacagtgcttatttcttcattaattaaaaaaamtcataaatctctggtcatatggaaaagaaaggatagtgggcttggctcagtattttttaaaacccgtagccaagtctttgtttcattgaatttttagcca

SEQ ID NO: 131161 - DNA, 201 bp, Homo sapiens
ctacagaaggtgacaaccttccagagaatcacagtggttctaagactccagtacttctctcctgtagtaaggtgaacaggaattggatcctaaggcccacrttcagtaacacataagaagtcttttgtttttgtttttatttgtatgtatggctaattattagtaagcatctctaactaccttatttaaaattgcaaactc

SEQ ID NO: 131162 - DNA, 201 bp, Homo sapiens
taattttgtgtgtgcatttaaaaataacatgcagagtagtaaaacatttttttttgtaagccttttcactttctgtagtaaagctaaaagtagaggtgaattttttttttttttactgttagatggattggttttagtttatgtaatgccattgagagattggtagcttctagtctctttgatgaagttctgtagcagtgt

SEQ ID NO: 131163 - DNA, 201 bp, Homo sapiens
gaaattctgaagagtctatcttaagagtgagaagcttgtgcaagaagcctgacctgtcctacctgttggtttgaccagtaacctgctgtttcgaagttatkatgatgctgattgcaagccctaaaattacaaatataatttttattactgtgtattggcagattcttgtagattttaggtgcttatttctttggaatttgt

SEQ ID NO: 131164 - DNA, 201 bp, Homo sapiens
attcaaacaaaagaaagtgagactttaacaaacttggactctaggcaagaagttaagtttttattttgagaataaattaaatgtaaagtttctggaaggcwatatatatatatatatatatatatttgagacagagtctccctccgtggcccaggctggagagcagtggcacaatctcagcccactgcaatctccgcctcc

SEQ ID NO: 131165 - DNA, 201 bp, Homo sapiens
cccagcgctggccggttgcctccgcaacccatgaaagagagcagaaacttctgtctcattgctggaaaaaggattctacatgtgtgcccagtgttaacacmtcacaccttacccaagtgctttcagcactccaatatttattccagagcactgacaagctgtgcccggaaatgccagaaatgggaattacagcttcaggca

SEQ ID NO: 131166 - DNA, 201 bp, Homo sapiens
ttgaaaatatctacatgcgaagtgagcctgttgctcaggtgtttgtccacggagaaagcctgcaggtatgtgctttctgggtcttgaatcttgctgcatasacattgccattgcctggtactccaggggctttaaatgtgattggaagtttgagacgcctatcacttggctttcatgtctaatctgctagaatatcattga

SEQ ID NO: 131167 - DNA, 201 bp, Homo sapiens
tcagagcagccctgggctgtcaggtgaggtggatgtcacggcgcctgattctcccacactaggatgcccagtcctcttctgcaccaaaagtcatctgtackgtgtgtgtgtgtgtgtgttctttcttaattgacaagcgtatctatatttatggcgtaacaacatgatgttttgatgtatgtaatatgtaaacattgtgga

SEQ ID NO: 131168 - DNA, 201 bp, Homo sapiens
tgccattgcactccagcctgggcaacaagagcgaaactccgtctcaaaaaaaaaaaaaaagaaaggaaaacctgaaccagggccttttaatcgcctttaaragaaaaaagaaatcacttttttggggggattattttagtttttttaaaccaggttcccaaataaaatccttagaacagataactaacaaaggagtctttt

SEQ ID NO: 131169 - DNA, 201 bp, Homo sapiens
taccacgatcagtctgttccccataggcagggccaggatggtgccaaggcccagaaccagtagggttccaggccaggagtaggtatggtcttatttcctaygggtatgggtgtgctttaagagtactcttgagaatttgcgaactgagaataaagaaaataactccaggccaggcacggtatggctcacgcctataatccc

SEQ ID NO: 131170 - DNA, 201 bp, Homo sapiens
gagtgataacgtgtaacaatatcatgccccccagaaggccagaattgtggtagttgccacagatctgcccagttgtgttctaattccctgaaatagcttckgcagaggtggggctgacttccatccccattgggagggaacagggcagtcacgggtggaaacaaaccgtagccctgtgctgccatcatgagggctgtgagt

SEQ ID NO: 131171 - DNA, 201 bp, Homo sapiens
cacaaagtacaggtaacacgtgactcacagccactgctcccatggaaaccgacttcgcttttcagagttctgggagggccttttttgtgagagggagagakgaaggtaagggagagaataacatgtttttgttaattctggcacacatttaaaaactaaggcaaagccattaaggaggcctcagtttctaagatcaatagt

SEQ ID NO: 131172 - DNA, 201 bp, Homo sapiens
gcagagcttcgcagcggcatcatcagaaacaacagcctgtgggaccggctgatcttccacaaagtacaggtaacacgtgactcacagccactgctcccatrgaaaccgacttcgcttttcagagttctgggagggccttttttgtgagagggagagatgaaggtaagggagagaataacatgtttttgttaattctggcac

SEQ ID NO: 131173 - DNA, 201 bp, Homo sapiens
cattaaggaggcctcagtttctaagatcaatagtattgcagccatctagggggaaaaggagtcagggtagtggagcctttctcattctccattttgttgcrtttttccggaacaagcgtgtcactcttgaggtaatttttcaagcatgagtgataacgtgtaacaatatcatgccccccagaaggccagaattgtggtagt

SEQ ID NO: 131174 - DNA, 201 bp, Homo sapiens
actcttgcaggtgtgtttgtcttcattgatatcctaaacttgctgaaggcaaagaaaaccttgtaagtattttatcctcaggctttctgattgtcaggaastaaggagagttggttatccccctggaatgttcagagtgttgcttctttttttgtggtgtgactcctttttcaaagaggcacgaaagtggaagtggctcac

SEQ ID NO: 131175 - DNA, 201 bp, Homo sapiens
tcatattctgtttatttccatagtcaccacgggaagatgggaagatcctgactttgggcagagcacctgagaggaccccaggatctaggtaccttctctgygtgcagtttctcaaacaagtggagcttcctctccatccatggccctcggaggaggaaagtgcctgcatagcttggggccagctctggctactgtgaaagg

SEQ ID NO: 131176 - DNA, 201 bp, Homo sapiens
ttgctgattctaggtacctcctagaagtgagatcatgtagtatttgtcctttgcttcatccatgtcatggcatgtatccaaatttccttctttttaaaggytggataatgttccattgtatagactacattttgatccgttcatctgttgttggaaatctgggtttgaatcctgggctcttaaagcattgtgcagctgggc

SEQ ID NO: 131177 - DNA, 201 bp, Homo sapiens; identical to SEQ ID NO: 22864

SEQ ID NO: 131178 - DNA, 201 bp, Homo sapiens
gccaacacggtgaaaccccgtctctactaaaaatacaaaaaaaaaattagccaggcgtggtggcgggtgcctgaagttccagctactccggaggctgaggygggagaatggcgtgaacccagaaggcggagcttgcagtgagccgagatcacaccactgcactccagcctgggcgacaaagtgagactctgtctcaaaaaa

SEQ ID NO: 131179 - DNA, 201 bp, Homo sapiens
ctgttttcagaaccggtcctggcagcaacactcactgatgcctgtccctgcccatgggtggagcagtggggtgactttgctgctggctgcccattggcctrtcctccaccctctgctctcctgagaagtcaagtgtggattttgtctgctagttacctttagcccagtgggcagcagcgtggggctcggcatgtgacttgt

SEQ ID NO: 131180 - DNA, 201 bp, Homo sapiens
cagtaaggactgtgacgaggacgcatttagccctgtgcgcagtcccgtagcacagcacctgacacacggcaagtgcttaagcacagtggctcctaacaaamtcataactaagcccatttccccaaacatcttccttcccctttcctatcctatcctatcctatccgcttgagccctatcgtttgttccagattaatgtgcg

SEQ ID NO: 131181 - DNA, 201 bp, Homo sapiens
tgtcagaattcattttgcacttactgctactctgttatccactattttgtgtatacatttatgttatgtcttttaattccaagcccaatataagattcctrtcccaatataagatgaaagtgtcccaaaattctccttcagccttcctagttaagtcttaccaaggctgtcatagtatgaggtgctctcagcccctgtatt

SEQ ID NO: 131182 - DNA, 201 bp, Homo sapiens
agaaggattatgggagctcagtcaaggagggctccctggaggtggcacctgagtagaatcttgaaggaaataggggcggggaggccaagggaatgcccacrttcacacctgtgtctgggagtggagcattttcatgtggtggagtggcaggaaagacagccttcctcatgcgtcacatgtgcctaaggagctgggacctga

SEQ ID NO: 131183 - DNA, 201 bp, Homo sapiens
taagaagtggaagtggggaccagaaatgcatggtaaagactttggctgctgtttttttaatacatcctatttcaaagaccagtcctaataccgtttatgtrgttttatgtaagagaagaggtaactggaaaatggcttctcagaacaatgaataaatattttggttctggttaattaaaactgccatagtttctttaatta

SEQ ID NO: 131184 - DNA, 201 bp, Homo sapiens
ccttcctagttaagtcttaccaaggctgtcatagtatgaggtgctctcagcccctgtatttggaacagcctcggggagagagggcaccttgtcctgaaacygtctctaccagtcctagtcatgggtccttgtacaggtcaactagctgaattagactttttctacagcaaatgtaatgctagctgggtaattatttcttag

SEQ ID NO: 131185 - DNA, 201 bp, Homo sapiens
ttttattctttggtgagaagaaattgcagaccataagcaaaagccgtttctcctcagtgttgaggtactatgtgctcagaaataaaatggaagtttactcrgagtcttttttttttaattttattattattatactttaagttttagggtgcatgtgcacaacgtgcaggtgtgttacatatgtgtacatgtgccatgctg

SEQ ID NO: 131186 - DNA, 201 bp, Homo sapiens
ctctgataactttataaggggatgggcagggagtggtttaagtgtagaagtattcagctggacttgaatatttcaataagtcagattaataaaatcagggyatctgctttgtttcttctttttacatccttaggaaattcaattggtgatctataagatcactttaatgaaaattaagtgggtttaagatttattatactt

SEQ ID NO: 131187 - DNA, 201 bp, Homo sapiens
gagttgctgtacctaacgagttttagaggtgtgcctagaaggcaggccacgctgaacaaaagctttctgagctgtaattgttaaacagtgaaccatggtgyacctttctcgtggtttctgcttctaagacagagaacatttgtacttcccttgtgtcatcttttgaatcttttctttttaaattttaaaataggcaaactg

SEQ ID NO: 131188 - DNA, 201 bp, Homo sapiens
aacacactttgtaaaccatggtcacaacacaagcataatgtgggaggtcattttatttttacaataaacactttgagcctctgcttcctcatgtgtaacayggactgtttacctcttctctcctactgtttgtctccaaaagttgctaatgggatcacgtaagaatagtaactatgaaatggttttcttcattgtaaagct

SEQ ID NO: 131189 - DNA, 201 bp, Homo sapiens
cgttcttatgtttttaatggttctttttaaaaggacaactttatcaacatataatactctgtataatttgctgatttaaagtgtgtaattcaaaggttttragtactttcacagttctccagccatcactacaatcaattttagaacattttcatgacctccaagagaaacccttacctattctttatcagctccccgacc

SEQ ID NO: 131190 - DNA, 201 bp, Homo sapiens
ggccacactggactcaaactcctgagctcaggagatctgcccacctcagcctcccaaagtgctgggaatacaagcgtgggccaccgcacctggcctacacrttcctactcgatgggcatttggggatgtatgtgtccattgctcctgggtgtataccgaggtgtggaattgctgtcctgtgctgaccatgtggggccgtta

SEQ ID NO: 131191 - DNA, 201 bp, Homo sapiens
gactctggccatcctagtaggtgtgaaaactttctcatgtcttgcctcattagattttcggacaagcaaacaccacgctgaagcgatggctcttggacttygcctccaagaggaaagaagcagagcttcgcagcggcatcatcagaaacaacagcctgtgggaccggctgatcttccacaaagtacaggtaacacgtgact

SEQ ID NO: 131192 - DNA, 201 bp, Homo sapiens; identical to SEQ ID NO: 22863

SEQ ID NO: 131193 - DNA, 201 bp, Homo sapiens
cagggcagtcacgggtggaaacaaaccgtagccctgtgctgccatcatgagggctgtgagttctccgtgtggcctccgtgtggtctgcagctatgggttarggaacggggtcccaagcaggcccccttggcggagaggccgccgacttccaggtgtgtaaccctcaccttctcccactctccctccctgaaagtcgagcct

SEQ ID NO: 131194 - DNA, 201 bp, Homo sapiens
ttttgatggggttgtttttttcttgtaaatttgtttcagttcattgtagattctggatattagccctttgtcagatgagtaggttgcaaaaattttctccygttctgtaggttgcctgttcgctctgatggtagtttcttttgctgtgcagaagctgtttagtttaattagatcccatttgtcaattttggcttttgttgc

SEQ ID NO: 131195 - DNA, 201 bp, Homo sapiens
tgatggggttgtttttttcttgtaaatttgtttcagttcattgtagattctggatattagccctttgtcagatgagtaggttgcaaaaattttctcccgtyctgtaggttgcctgttcgctctgatggtagtttcttttgctgtgcagaagctgtttagtttaattagatcccatttgtcaattttggcttttgttgccac

SEQ ID NO: 131196 - DNA, 201 bp, Homo sapiens
gaccgagtaagttccaagcagcgaagtcccaggactgagcactgacttggacgcaggggcttgggcttgaattgggctgtgccatgtgccatctgtatgamcctggacaatcctcccaatcttacagaacttcagtttactcatctgtaaagttagaatgcgtttacctctcagagtggctgataaggattataagagaaa

SEQ ID NO: 131197 - DNA, 201 bp, Homo sapiens
gtgtgtgttctttcttaattgacaagcgtatctatatttatggcgtaacaacatgatgttttgatgtatgtaatatgtaaacattgtggaatggctaaatsaagctaattaacatgtgtcttaccacccatacttttttttcccacgtggtgagaacacttggaatctaccctctgggcagttttcaagtatatgatacat

SEQ ID NO: 131198 - DNA, 201 bp, Homo sapiens
ttcttatgcattgacatttagcatttgatgtaaaatgactatctcagagttgctgccacaaacactggtaaaactgtccctactttctagcatgcttaatrtctaggtcttgctacatcttttttgatgtaactgttttgtggaaaatggttgtgtgtttggggaggcttttgagaaaagataaggttgtcttgtcattat

SEQ ID NO: 131199 - DNA, 201 bp, Homo sapiens
tcctcatcagtttgcttttgtgatgttcagataagacactggatatgaaagcctttccaaaacactaagtaaatgctaattgcatttttagttctatccaragtttgggtagacgggtaccaggattttggtttctgacagtccgtgcagttcagtttccatcaccctgcctcgctatgcctgtctctgcccaggtctatt

SEQ ID NO: 131200 - DNA, 201 bp, Homo sapiens
ggaacaggcacgtgctccagacaggccagctctgctgcctgctgcttccacacagctgtccaggaaaggctcccgtccctggccccccttctcctgctctmggggcaggtaatcatgcggattcatgaatacaaatgcacttcctccttctgggttttgtgtgaagggcagcttaggagctggtgtatttggggtgcgtct

SEQ ID NO: 131201 - DNA, 201 bp, Homo sapiens
aagttaaggaatttaacaggtggttcaaagcattgtatttcaaagctgatgtggatacattgtgaagtcaagtataatttttaagataaaattctagaaaytctcccggtccccctggcggcatagcattatttctctccacttgaggggtactagaaaaactcagaagctggaacgtgggaatacatcttcatttcacag

SEQ ID NO: 131202 - DNA, 201 bp, Homo sapiens
ttccccagtccacacggcaccccggaacaggcacgtgctccagacaggccagctctgctgcctgctgcttccacacagctgtccaggaaaggctcccgtcyctggccccccttctcctgctctcggggcaggtaatcatgcggattcatgaatacaaatgcacttcctccttctgggttttgtgtgaagggcagcttagga

SEQ ID NO: 131203 - DNA, 201 bp, Homo sapiens
gctaggaatgccttaaagggttgttttttttttttttaagaatgtatgaccgatctagaaatataaatgtgcgtgtattattcaatcatatttaccagctrtatagcatccaattgcaggcttttctcaggctctgattccttaaatgcaaccaagacttttgaactcgtctgtgaaggagagagtagtaatgagcctgtt

SEQ ID NO: 131204 - DNA, 201 bp, Homo sapiens
tgcacaagttggcttgcgactaattttttcagcaatattctaagtgcccttggagaaagaggatgatccttgagttgacctttgcctaggctccctgtaaycaactgtgtgactaattttaaaactgaccaagaaccaccttttttccttctttgacaattttggattttatgctgtaggaaaaaacaatgagcaccattc

SEQ ID NO: 131205 - DNA, 201 bp, Homo sapiens
ctcaggaaaagaggtgactcacccaaggttatagctggttagtggcagaaccaggaccagaagcaaggcctgcagcctcttgtgtaggctttcctagtgcrtgctgctgaccctcaaagctgtccttggccaactcaccacctgtgtgacacttacccccaggcagctgtagggaggaacacagatgttcggggaaggcac

SEQ ID NO: 131206 - DNA, 201 bp, Homo sapiens
cactgaggtcttccacatgacaggcacaattcagaggccagaacagggtcccatgttttttgcaggctgcgtccagtcctggggaacctcatagcctgtgrttatcttctagattccattcatgtctgcttttttttttttcttttggatggcgtctctgttgtccaggctggagcgcagtggtgccatcttggctcactg

SEQ ID NO: 131207 - DNA, 201 bp, Homo sapiens
cggtccccctggcggcatagcattatttctctccacttgaggggtactagaaaaactcagaagctggaacgtgggaatacatcttcatttcacagatgagraggacctgtctcaggaaaagaggtgactcacccaaggttatagctggttagtggcagaaccaggaccagaagcaaggcctgcagcctcttgtgtaggctt

SEQ ID NO: 131208 - DNA, 201 bp, Homo sapiens
agataagacactggatatgaaagcctttccaaaacactaagtaaatgctaattgcatttttagttctatccaaagtttgggtagacgggtaccaggatttyggtttctgacagtccgtgcagttcagtttccatcaccctgcctcgctatgcctgtctctgcccaggtctatttaaaggaatctcctgtgctggatcttta

SEQ ID NO: 131209 - DNA, 201 bp, Homo sapiens
gcaggaatgagagttttcaaacaaatgttaccaaaagaatgcactcgtggtacatctgacgcttagaacatatccctagcctgttggaagggactttgggrtttcaaatagaatagggctggagtaagaacttgacggaagaacacggctgcagaattcggggcaggacatgaagaaacaaccctcaagaggcgcgtctgg

SEQ ID NO: 131210 - DNA, 201 bp, Homo sapiens
gtaaggaaaccttaggatcctttcaggaagattcttagtgctcctgctctccctgccttccctagtgagaaaggcagggtgtggagaagatgaagaggccrcatgctcactggtgcttccactcctcacctgttctttggttttctctgtggtcgcttgctttcccctacccaagtcagtcacccttcagtgtttcccgca

SEQ ID NO: 131211 - DNA, 201 bp, Homo sapiens
tggggcttagaaatagatactgagcttgctttgcctttttaaaaaagaagttaaaagtttaaatttaaaagtagctctggaattctggtgcttaataattrcagatgctttgatatagctagcatcatcctgtggacacctagggcagggaaagaggaacttgattcacttcataaggtaccggtgaagagcctgtgcatc

SEQ ID NO: 131212 - DNA, 201 bp, Homo sapiens
agggatggggcagatgtgggactggactccaacttagaccaggcaaccttgggcaagttcaccaggattttctgaccttcagattcctcatatggaaaacmgaagtgacagtacctttcctccttcagtgttgctaagaggactgaagagttatgcaatgtctgcttggcccacaataagtatgcagcaatgttacttttt

SEQ ID NO: 131213 - DNA, 201 bp, Homo sapiens
gccctgctcccctgtgctgcctgccttagaaggatgtgatcatctggaggcaaatagcttgttgcttgaggccaggagttcaagaccagcctgggcaacasagcaagaccccatctctagaaaaaaaaaagtaaaaacaataaaataaaatctcaaaactggtggttccatataggtgcctgggctgattctctttatgaa

SEQ ID NO: 131214 - DNA, 201 bp, Homo sapiens
aatcccagctactcgggaggctgagacgggaattgcttgaacctgggaggcggaggttgcagtgacccgagattgcaccaccgcactccagcgggggcaasagagcgagactccatctcaaaaaaaaaaaaaaaaaaaagaatcaggtaatggagaggactggcatgaagggggcacaggactgtgaaaacctgagtgact

SEQ ID NO: 131215 - DNA, 201 bp, Homo sapiens
aggttgcagtgacccgagattgcaccaccgcactccagcgggggcaacagagcgagactccatctcaaaaaaaaaaaaaaaaaaaagaatcaggtaatggwgaggactggcatgaagggggcacaggactgtgaaaacctgagtgactctgtccttccctcatcctctatccctgaaccaggtcagacatagatggaatca

SEQ ID NO: 131216 - DNA, 201 bp, Homo sapiens
gtcagctttgtttctggagttggggcccaatgctgcttctgactttttcctctccattttaggttgcagaattgtcggagtgcataggctcagcactgatmcagaagggcttcaagactgccccagatcagttcattggcatctttgctcaaaatagacctgaggtatgaaccagtaggtacttgctatgcatgattttga

SEQ ID NO: 131217 - DNA, 201 bp, Homo sapiens
aaggaaataaaggccgtgttgatcagaaccaggtggtgcgtgaggtttgccaaagctgcatatgttctctcttcttacagagaacaggatgctaagaattstgtgtaagatgagtgcaagtaatgggtgggggcgatcggagggtggaagccgagtgaaggtttgagagaggctgcttccaggtgtttgtaggaaccttca

SEQ ID NO: 131218 - DNA, 201 bp, Homo sapiens
ctttccaacagctttgagccagaacctagggcaagcatttgccctacaaatcggccagagctgaggtaattcaggaagggaagtaggggcactggagatcyctcgcagaccctggtggggctctggtaactccctctgcatcctggagtttagggcttccagctaaaggttggggcagacacacacgtacacacatgcaca

SEQ ID NO: 131219 - DNA, 201 bp, Homo sapiens
tgtcattcttaaccttcaagtccattcaggaaggagtcttagagggtctgctgtggcctgttttataattgggggctcccaaatcctatctccactctacgaggggagatatttgagcagatatttgagcctctccaaaatgcctagcatttcaatcgagcagagattgatttttcttcttcccagattgcagatgtcagt

SEQ ID NO: 131220 - DNA, 201 bp, Homo sapiens
tgggcttgaattgggctgtgccatgtgccatctgtatgaccctggacaatcctcccaatcttacagaacttcagtttactcatctgtaaagttagaatgcrtttacctctcagagtggctgataaggattataagagaaaatgcatgaacacactttgtaaaccatggtcacaacacaagcataatgtgggaggtcatttt

SEQ ID NO: 131221 - DNA, 201 bp, Homo sapiens; identical to SEQ ID NO: 22855

SEQ ID NO: 131222 - DNA, 201 bp, Homo sapiens
tcccaggactgagcactgacttggacgcaggggcttgggcttgaattgggctgtgccatgtgccatctgtatgaccctggacaatcctcccaatcttacaraacttcagtttactcatctgtaaagttagaatgcgtttacctctcagagtggctgataaggattataagagaaaatgcatgaacacactttgtaaaccat

SEQ ID NO: 131223 - DNA, 201 bp, Homo sapiens
tgtaatatgtaaacattgtggaatggctaaatgaagctaattaacatgtgtcttaccacccatacttttttttcccacgtggtgagaacacttggaatctrccctctgggcagttttcaagtatatgatacattgttgttagctctagtcaccacgtggtgctatggagctcttgaaccagttcctcctgatggagacttt

SEQ ID NO: 131224 - DNA, 201 bp, Homo sapiens; identical to SEQ ID NO: 22856

SEQ ID NO: 131225 - DNA, 201 bp, Homo sapiens
atctttagcctccagcacctgaagatcttgcagtaatttgtttcacaagtggaactacaggtgagttttgagatagaattgcttctacatatggcagccaytggtctggactctcccctacctcttttggatgacttatcagctaacagtagacggaccaaaagcagaagagaaggaagtggttcaagtgctgtcttcttg

SEQ ID NO: 131226 - DNA, 201 bp, Homo sapiens
cactggaccattgaatgaacttactgaacagaccatttgaaatgagatttcaccagtcagccatgacttgggagttagtgagacttcattgcttgtgcacytccagtaaaggtgtgattgtgctctccttaataatgttgcatctcttggtgccccagttttatgaaggatacggacagacagagtgcactgccgggtgct

SEQ ID NO: 131227 - DNA, 201 bp, Homo sapiens; identical to SEQ ID NO: 22857

SEQ ID NO: 131228 - DNA, 201 bp, Homo sapiens
aatctttagcctccagcacctgaagatcttgcagtaatttgtttcacaagtggaactacaggtgagttttgagatagaattgcttctacatatggcagccrttggtctggactctcccctacctcttttggatgacttatcagctaacagtagacggaccaaaagcagaagagaaggaagtggttcaagtgctgtcttctt

SEQ ID NO: 131229 - DNA, 201 bp, Homo sapiens
ggcccaacagagcttcctagtaattgagtagggtctcgttatttgctggtcattttaaacaacaaatagttattgaatttgtactgtgtgctgtgctaggygttgggactaccaataggaataaatacaagtcctttttctcaaaaagtcatttctcaaaaggaaaaaggaggaggacaaacaaaaataattgagcatctg

SEQ ID NO: 131230 - DNA, 201 bp, Homo sapiens; identical to SEQ ID NO: 22858

SEQ ID NO: 131231 - DNA, 201 bp, Homo sapiens
gtggccgggcacacatgctctttcatgggcctcggaagcagccagccctcccacgccgtgattttgtacttctagtctccagaaccaggacagaccatacrtttcggttgttgaagccacttagtgtgtggtacttcgttccagcagcccttgaaaacaatagaccacagaacttgggaggtgcctgcagaggttctgggg

SEQ ID NO: 131232 - DNA, 201 bp, Homo sapiens
tgaagccatcacgtacatagtcaacaaaggtacgtctgtgatctttgcctggattattggcatagttattggttaggttcagtgactttacatttgcttayatttgatttgacaaagattttacatgtaaatatatatctacctttttattcaaagaatgtagtacttcaagtatccttgtgctggatatgacagagtgaa

SEQ ID NO: 131233 - DNA, 201 bp, Homo sapiens
tgttctccttattgattacatgatgacatcctgttttctctccctgacctttactgtttgtttagtgggtgattattgaacaaggatgctttgcttattcratggtgatcgttccactttatgatacccttggaaatgaagccatcacgtacatagtcaacaaaggtacgtctgtgatctttgcctggattattggcatag

SEQ ID NO: 131234 - DNA, 201 bp, Homo sapiens
tgttgtcgtgtgaggagtacagaaggtgaaatttacattggtgtgtttaaccagtttgggaacttgttctgagatctgttggaagaaatagaaactgatgrcccttaggtggtttgggcttgtacttccccttcactcatattcccattagccttgacaatgagagtcgagtgtttttgattaggtggatggacgagagca

SEQ ID NO: 131235 - DNA, 201 bp, Homo sapiens
gtgatccgccgaccttggcctcccaacatgctgggattacaggcatgtgccactgcacccggcccagttctctttagcttctccaggagattgatcaatcsgtgttaggcagatgtcaatgtggatttagccagaattagccacaacattttaatcaggccaaaatgtaacaagggcaggagtgaccgaaaaaagactcaa

SEQ ID NO: 131236 - DNA, 201 bp, Homo sapiens
tgtagtgggtttgactcactatcttttttttttttttttttaactgggaacactatgtaaccacattaaagaggtctatagcaggaggaataaaagactcmtaaagcctgctgactcactggctcatgactgatttcctacacattcagctggggttgtctgctttgcttgccctgtttcttgagcccaagcgacccacac

SEQ ID NO: 131237 - DNA, 201 bp, Homo sapiens
agattgcaccaccgcactccagcgggggcaacagagcgagactccatctcaaaaaaaaaaaaaaaaaaaagaatcaggtaatggagaggactggcatgaarggggcacaggactgtgaaaacctgagtgactctgtccttccctcatcctctatccctgaaccaggtcagacatagatggaatcagagcaggagttggtgt

SEQ ID NO: 131238 - DNA, 201 bp, Homo sapiens
agctgtgggttcattctcaggtaaggatttggaagaagcaaactaaaggcaacatatccaggctgtgggagccacgctcaatcaacagcatggtttacaaytcaaaagtcacactccaccagaggccttctcagtgtcatggcctgcatgaacaaaccacagacctccagctcacatgcacactgcaacaaggactggcat

SEQ ID NO: 131239 - DNA, 201 bp, Homo sapiens
gaggccttctcagtgtcatggcctgcatgaacaaaccacagacctccagctcacatgcacactgcaacaaggactggcatccttcatccatgtttagaggktgtatatggagcatattaccaagtaggatttccccgtgtggctggtggaatccctcatttccacgtaaccatacttcacacatgtacgcatgtaaaggcc

SEQ ID NO: 131240 - DNA, 201 bp, Homo sapiens
ccatgtttagagggtgtatatggagcatattaccaagtaggatttccccgtgtggctggtggaatccctcatttccacgtaaccatacttcacacatgtaygcatgtaaaggcccacttgcaaactaggagaaataatttttgcaggagaagagagcagctcgttgattcataagtttttatgaagactcacaccagactt

SEQ ID NO: 131241 - DNA, 201 bp, Homo sapiens
atattaccaagtaggatttccccgtgtggctggtggaatccctcatttccacgtaaccatacttcacacatgtacgcatgtaaaggcccacttgcaaactrggagaaataatttttgcaggagaagagagcagctcgttgattcataagtttttatgaagactcacaccagacttgtggaggtaaagcaagtgtgggccta

SEQ ID NO: 131242 - DNA, 201 bp, Homo sapiens
caagtaggatttccccgtgtggctggtggaatccctcatttccacgtaaccatacttcacacatgtacgcatgtaaaggcccacttgcaaactaggagaartaatttttgcaggagaagagagcagctcgttgattcataagtttttatgaagactcacaccagacttgtggaggtaaagcaagtgtgggcctatagggat

SEQ ID NO: 131243 - DNA, 201 bp, Homo sapiens
gtgggcaggaagggagctgtccaggaagggcagctggggttgagttggatggtggtgtcactcgccctcactgacaccagcctgatgggtctgaagaaggwctgtcacagtcagttgcaaggcagggcaatagatgaatgattttgaaccaggtgggaggtatcaggtgaacgctgagaggcagggacaagtattaggaac

SEQ ID NO: 131244 - DNA, 201 bp, Homo sapiens
atccttatggaaatctgggatgtttttaggcattaacttccatttattaccatatgtgattgcagattccgggtcagtgttccccatggcctgttattccrtggtcttgatagcaacataattgtgcaaatggtcaaatgaagatgggagcaaagatttccccttttaattctacccctagcaactttgctgacgttgtgc

SEQ ID NO: 131245 - DNA, 201 bp, Homo sapiens
gtaaaggtgtgattgtgctctccttaataatgttgcatctcttggtgccccagttttatgaaggatacggacagacagagtgcactgccgggtgctgcctraccatgcctggagactggaccgcaggtatggctgtaggaggctcctttttggaattttgttattcatactgggttattggtatgtctggaattgggttaa

SEQ ID NO: 131246 - DNA, 201 bp, Homo sapiens
tggcatgtaaatttctacgggcagtcctattttctggaacaatgtgtatttgtaggaatttggacattgtgacttcaaattttcttccctttcattgaggmgggtttgtggtcagctgattttttttctggtgatgagatgttttgcgaagtaccgtgtcagcctcctacccctacccccgtccctcttcagcaaatcctc

SEQ ID NO: 131247 - DNA, 201 bp, Homo sapiens
gaggcaggagaatcccttgagcctgggaggcagaggttgcagtgagccaagatcgtgccattgcactccagcctggggtatagagtgaggctctgtctccaaaaaaaaaaaaaaaaaaagtacatctaaatggtacgatgcccatgttggcctatttggaatgccattccttgtcccacagagccctgctcctcagaggca

SEQ ID NO: 131248 - DNA, 201 bp, Homo sapiens
atagagccgtggaggcctcagaaatgtcacctgagagacagggtgttgggatgtaacttaaagtaattttttaagaagtgggtataatgaaacagcaaaaygttgatcattactgaagctgaagttggagtcacgggtacataaaatatagttttattatacttctgtgtctacttttgaatagatttgaattttcataat

SEQ ID NO: 131249 - DNA, 201 bp, Homo sapiens
ccaacacggtgaaaccccgtctctactaaaaatacaaaaaaaaaattagccaggcgtggtggcgggtgcctgaagttccagctactccggaggctgaggtrggagaatggcgtgaacccagaaggcggagcttgcagtgagccgagatcacaccactgcactccagcctgggcgacaaagtgagactctgtctcaaaaaac

SEQ ID NO: 131250 - DNA, 201 bp, Homo sapiens
ccaggcgtggtggcgggtgcctgaagttccagctactccggaggctgaggtgggagaatggcgtgaacccagaaggcggagcttgcagtgagccgagatcrcaccactgcactccagcctgggcgacaaagtgagactctgtctcaaaaaacaaaacaaaaaaaaagcattgtgcatcgtggcttgtcattgtcagtgtca

SEQ ID NO: 131251 - DNA, 201 bp, Homo sapiens
atttggctggattcaaacccttagtattatagattagtatctaatgaaatgttcttgtacacatgctactaaatatataattttctgaagttttttttttwaagtgttctttcttagatttaataaactttcttggtgtaaagcagtctatagcatggctactgctgatgcttaaaatagacaaattaatcccctgtgtct

SEQ ID NO: 131252 - DNA, 201 bp, Homo sapiens
gctgagacgggaattgcttgaacctgggaggcggaggttgcagtgacccgagattgcaccaccgcactccagcgggggcaacagagcgagactccatctcaaaaaaaaaaaaaaaaaaaagaatcaggtaatggagaggactggcatgaagggggcacaggactgtgaaaacctgagtgactctgtccttccctcatcctc

SEQ ID NO: 131253 - DNA, 201 bp, Homo sapiens
gcacctggcacagagtagtagctaacacagatgttaattttgctgcgtcaaatgttttcactttgaatctctcttgagtattgttctccttattgattacmtgatgacatcctgttttctctccctgacctttactgtttgtttagtgggtgattattgaacaaggatgctttgcttattcgatggtgatcgttccacttt

SEQ ID NO: 131254 - DNA, 201 bp, Homo sapiens
atacctgcatgttccctctccgtttctgtgtgcagcattgcttgctggctgagatacaagcctgccgtctggtcagctttgtttctggagttggggcccartgctgcttctgactttttcctctccattttaggttgcagaattgtcggagtgcataggctcagcactgatccagaagggcttcaagactgccccagatca

SEQ ID NO: 131255 - DNA, 201 bp, Homo sapiens
ttgtggggagactgacctcaggaggaacctgagcttgtagagatgttgcggaatatactcatgaccaccgatttcactgtagtgggtttgactcactatcttttttttttttttttttaactgggaacactatgtaaccacattaaagaggtctatagcaggaggaataaaagactcctaaagcctgctgactcactggct

SEQ ID NO: 131256 - DNA, 201 bp, Homo sapiens
ttaatttatgaacattctcaaagttggtgtcaaggtcagggtttgtctgtgatagtaaatatccatcaggtggatcagcctaacatatggcacatgaaacagtgtgtgtgtgtgtgtgtgtgtgtgtgtgtgtgtgtgtgtgctttgccaccaccacagagcacatatacggtaagtcctcagttaatgtctttgatgggt

SEQ ID NO: 131257 - DNA, 201 bp, Homo sapiens
taatttatgaacattctcaaagttggtgtcaaggtcagggtttgtctgtgatagtaaatatccatcaggtggatcagcctaacatatggcacatgaaacagtgtgtgtgtgtgtgtgtgtgtgtgtgtgtgtgtgtgtgtgctttgccaccaccacagagcacatatacggtaagtcctcagttaatgtctttgatgggtt

SEQ ID NO: 131258 - DNA, 201 bp, Homo sapiens
tcatttttaaaattgtataaaactaaaatagaaaaaaatgtataaatagccctgccatataattgtctgtgacctgcagccattgggataagattaatttkctttgcagaaggaaccctgcggtcagttctcttaattctgatttcttgtgaataaaaccttgtgttttaccaaaaaatctatcaataaaggaatacctgc

SEQ ID NO: 131259 - DNA, 201 bp, Homo sapiens
ccactacagcaggttctctttaccactcatctgctgactcctggtctaaaccagtagggtgttaaagaggaatcacaaattaagtgcccttaagagttggrtattgccttttctcccctctgtccccctctcctgccccacttaaacaaaacagaaataaacaagcaaagaaaaaatcagaccaaaactgagggagaaaac

SEQ ID NO: 131260 - DNA, 201 bp, Homo sapiens
gacaagaatgtaaaggaatggatatgttaattagcttgatttagccattccacagtgcatagatgtttcactgccttctaacctgcccccctttctttttygatagggtagtggtggtgcacgaagatccgcactacttgacagcgacgagcccttggtgtatttctatgatgatgtcacaacattatacgaaggtttcca

SEQ ID NO: 131261 - DNA, 201 bp, Homo sapiens
gcactcaccaccttctggtacgccacgagacccaaacccctgaagccgccatgcgacctctccatgcagtcagtggaagtggcggtgagtggagggcccascctgcctcgtgcgttttctccgcatttccccagatgagctgagccctgttgaatgtgatagccatcaagatcaaatatttgtttataactgcactttgta

SEQ ID NO: 131262 - DNA, 201 bp, Homo sapiens
cacttgacagccaggaaaagccccggatcattagattgtgggtttaatgcctggactggccgagcagctacccaattagatggctggccggtggaattttkgagttctggagaggggtcctgcttccctggaacgaacgtgacatttttctctcccaacagaattcagcttagagaactatcaacacaggacaatgcaagc

SEQ ID NO: 131263 - DNA, 201 bp, Homo sapiens
agttagtgagacttcattgcttgtgcacttccagtaaaggtgtgattgtgctctccttaataatgttgcatctcttggtgccccagttttatgaaggatayggacagacagagtgcactgccgggtgctgcctgaccatgcctggagactggaccgcaggtatggctgtaggaggctcctttttggaattttgttattcat

SEQ ID NO: 131264 - DNA, 201 bp, Homo sapiens
gatgagccataactttcatcatattctcccagggggccacaagatggaaaaataaagaaccactattttagagcatttggatcaagctatgtaataactcrtttgtctgtgttaaaggcatttctcattgcaattgtggtaccagatgttgagacattatgttcctgggcccaaaagagaggatttgaagggtcgtttgag

SEQ ID NO: 131265 - DNA, 201 bp, Homo sapiens
caatattcaggttgcctccttttgtttaaacctttgggcagttggcaagatgcagcctacatgccagtcagttttactgtcctgcacatgatacccccacrcggtagaaccatagagccgtggaggcctcagaaatgtcacctgagagacagggtgttgggatgtaacttaaagtaattttttaagaagtgggtataatga

SEQ ID NO: 131266 - DNA, 201 bp, Homo sapiens
ccattgcactccagcctgggcaacaagagcgaaactccgtctcaaaaaaaaaaaaaaagaaaggaaaacctgaaccagggccttttaatcgcctttaagaraaaaaagaaatcacttttttggggggattattttagtttttttaaaccaggttcccaaataaaatccttagaacagataactaacaaaggagtcttttta

SEQ ID NO: 131267 - DNA, 201 bp, Homo sapiens
gagtgtctaaagtcccgcgactctcactgccctgtcttttattttcttgacctttgattagcgttgagagaaactggttaaatcttgcagtttctgccacmcatttcacaacttaacctgtgattgtcccaaagaaaacaattattggcttcttgctagcaaaaaaatcaaaggcttccggttgattgtttctttcttttt

SEQ ID NO: 131268 - DNA, 201 bp, Homo sapiens
caagtgacccatgcatgtagggttaggtatctatttataccatgcaggtagagttttcatagccacctctacttttgggtgaagtttaggctaactgaaartgtaccagcatgcatggtgtatgcagaaaaatgaacgtaattcagattatgtgatagttttctcttgttgccattatatataacccagggcttaccacaa

SEQ ID NO: 131269 - DNA, 201 bp, Homo sapiens
ctcagaggcacttttcctggagtgactctccccttcctcacctacactcactgtcattcagctgtagatgcaccagcgatcatgctagtggttaaaatatsgaaatactcccatcctggctagagaatagctgctacccaagtgcccccgcccttcatatggaaactaaagggttaatacatggggcagtagaggaacttt

SEQ ID NO: 131270 - DNA, 201 bp, Homo sapiens; identical to SEQ ID NO: 22866

SEQ ID NO: 131271 - DNA, 201 bp, Homo sapiens
tttcagactccaattgttacagctttgcttcccagcactcagcttgcaaccccttgcttgtgtagatataactaaggttgctaacacccttttttaaatayagcatttctgttcaaaaaatagcaacactgggccaggcgcagtggctcacacctgtcatcccaatactttgggaggcctaggcggaaggatcccttgagc

SEQ ID NO: 131272 - DNA, 201 bp, Homo sapiens; identical to SEQ ID NO: 22867

SEQ ID NO: 131273 - DNA, 201 bp, Homo sapiens
taaagggtctccctgtgagttcatcccctggcacccatccacttcctcctcagcgcggccctcctcagcctgccgccctactctgagacctagcttttccrcacttctttttggtgtctcctgttttgtttcatcacaccttaagccagaaacgatctcttccacttttggacagctctctcctcttggtaccagaggtta

SEQ ID NO: 131274 - DNA, 201 bp, Homo sapiens
tggatgccttacagtgtcctttggccccagaggactcagcagctcacattggagacctgctacctgtaaagactactgctgctactgtgggaggctaggcyctgccgccttatccatcattaggagttcttgcacatagcaaatatactcaggaagctaacagatgaagacgacttagagaaaggtgcacagcgatgtcaa

SEQ ID NO: 131275 - DNA, 201 bp, Homo sapiens
agaaaccctgtgatatccagcatacctcctttccagcctctgtccctcccaggcctcctgtatagggccctcaggtcatactgaacttcctgcagagccaygactacctctgctctctcccagccctgaggctttgtgcagttctattttgctttttagaaatggggtcttgctatgttgcccaggctggactcaaacttc

SEQ ID NO: 131276 - DNA, 201 bp, Homo sapiens
gatggcacagaggtgttcacctggcattctgcccccctagcccgagctccttgagaacagggtggttatcagtcatctcttttcacagcactgacagtgcytggcacacagtgagcgccccactaatgcatcctcagtgaaggagggagtacctctggtttctccacccctctttctattttagccacttcatttttgctt

SEQ ID NO: 131277 - DNA, 201 bp, Homo sapiens
cctatgaatggctttcatataaacaggtgagtttgtatgagacaggctctgtggactcctcttgcaagcaggggtgcttctgtatgtgcattcttggagcyggaaggtttctccagagtgtatgtgctggaccagctcagagccttgccgtaagcatggggcatccaaggagaaacttgacacaaaggtttggggagaaca

SEQ ID NO: 131278 - DNA, 201 bp, Homo sapiens
agtagggttccaggccaggagtaggtatggtcttatttcctacgggtatgggtgtgctttaagagtactcttgagaatttgcgaactgagaataaagaaartaactccaggccaggcacggtatggctcacgcctataatcccagcactttgggaggccgacgggggcagatcacctgaggtcaggagttcaagaccagcc

SEQ ID NO: 131279 - DNA, 201 bp, Homo sapiens
gcaggtctgaaaacacaatttgattttgtacaaatgatgtcgcttctcacaggcttcattaaacagagaacgtgtttgatgacagaaacgcataaaggacrgaaatgcgtgctgtaatatttacttatgtttaaaaatagccagatggaaccaactggtgccaaatgaaaaatgaccagcgtaggctgtgtttcttgacaa

SEQ ID NO: 131280 - DNA, 201 bp, Homo sapiens
gctccctttgaactaggcagaagtgaagcagatgccttgtatattcaaatggttggcatgtaaatttctacgggcagtcctattttctggaacaatgtgtrtttgtaggaatttggacattgtgacttcaaattttcttccctttcattgaggcgggtttgtggtcagctgattttttttctggtgatgagatgttttgcg

SEQ ID NO: 131281 - DNA, 201 bp, Homo sapiens
cctacggagtatctgcagtatctcgttatggttaagaacagggctttattaaaggccctaataagaagtggaagtggggaccagaaatgcatggtaaagaytttggctgctgtttttttaatacatcctatttcaaagaccagtcctaataccgtttatgtagttttatgtaagagaagaggtaactggaaaatggcttct

SEQ ID NO: 131282 - DNA, 201 bp, Homo sapiens
aatttatgaacattctcaaagttggtgtcaaggtcagggtttgtctgtgatagtaaatatccatcaggtggatcagcctaacatatggcacatgaaacagtgtgtgtgtgtgtgtgtgtgtgtgtgtgtgtgtgtgtgtgctttgccaccaccacagagcacatatacggtaagtcctcagttaatgtctttgatgggttc

SEQ ID NO: 131283 - DNA, 201 bp, Homo sapiens
atttatgaacattctcaaagttggtgtcaaggtcagggtttgtctgtgatagtaaatatccatcaggtggatcagcctaacatatggcacatgaaacagtgtgtgtgtgtgtgtgtgtgtgtgtgtgtgtgtgtgtgtgctttgccaccaccacagagcacatatacggtaagtcctcagttaatgtctttgatgggttct

SEQ ID NO: 131284 - DNA, 201 bp, Homo sapiens
tttatgaacattctcaaagttggtgtcaaggtcagggtttgtctgtgatagtaaatatccatcaggtggatcagcctaacatatggcacatgaaacagtgtgtgtgtgtgtgtgtgtgtgtgtgtgtgtgtgtgtgtgctttgccaccaccacagagcacatatacggtaagtcctcagttaatgtctttgatgggttctt

SEQ ID NO: 131285 - DNA, 201 bp, Homo sapiens
cccggcatcctatccttcatttcagtggtttaaaaaatatatgcccgttgtctcttattgggaagctgagcagaaagaaaacagtgtctgttttcagaacyggtcctggcagcaacactcactgatgcctgtccctgcccatgggtggagcagtggggtgactttgctgctggctgcccattggcctatcctccaccctct

SEQ ID NO: 131286 - DNA, 201 bp, Homo sapiens
actgaagccaactttggatttgtacattcaaatctttttttttttttcagtcatccaatgaatatgaccttttggtggctaggaatgccttaaagggttgttttttttttttttaagaatgtatgaccgatctagaaatataaatgtgcgtgtattattcaatcatatttaccagctatatagcatccaattgcaggcttt

SEQ ID NO: 131287 - DNA, 201 bp, Homo sapiens
ccatcatttacttaatcatccagccatgattaggttttttaccctagagatttttgatgcaataattttgaaatatttgcatattgtttatatgtaggcttttttttttttttttttttttttgagatggagtctcgcctgtcacccaggctggagtgcggtggggtgatctcagtgcactgcagactccgcctcctgggt

SEQ ID NO: 131288 - DNA, 201 bp, Homo sapiens
catcatttacttaatcatccagccatgattaggttttttaccctagagatttttgatgcaataattttgaaatatttgcatattgtttatatgtaggcttttttttttttttttttttttttgagatggagtctcgcctgtcacccaggctggagtgcggtggggtgatctcagtgcactgcagactccgcctcctgggtt

SEQ ID NO: 131289 - DNA, 201 bp, Homo sapiens
tactttcacagttctccagccatcactacaatcaattttagaacattttcatgacctccaagagaaacccttacctattctttatcagctccccgaccccytccacccttcagcatccgctcatctgtgtatttctctattctggacttttctgtggatggaatcatgccatatgtgctcctttgtgactggcgtctttca

SEQ ID NO: 131290 - DNA, 201 bp, Homo sapiens
atagccttggacaagttcctcagtctctctaagcctttgttttcctctctgtaaaatgggatcataactgacctctgtgggatgttattagaattaatcartagtgtgtattaaatacctttcagtgttgtactgggatccatcctggttggaaaccagccatcagcccattcataaccccctcccctctgatcaacagaa

SEQ ID NO: 131291 - DNA, 201 bp, Homo sapiens
gccagctctgctgcctgctgcttccacacagctgtccaggaaaggctcccgtccctggccccccttctcctgctctcggggcaggtaatcatgcggattcrtgaatacaaatgcacttcctccttctgggttttgtgtgaagggcagcttaggagctggtgtatttggggtgcgtctgtggaagggatcgttctctgcagc

SEQ ID NO: 131292 - DNA, 201 bp, Homo sapiens
cgaaggaaaaattaggaaataattgtaagaaaataaagtccaggctgggcgtggtggctcacgcctgtaatccccgcactttgggaggccgaggcaggtggatcacctgaggccaggagttcaagacaagcctggccaacatggagaaaccccacctctactaaaaatacaaaaattagccgggtgcctgtaatggtggca

SEQ ID NO: 131293 - DNA, 201 bp, Homo sapiens
ggcagccagaacttttgataaaaagggatttcatgtaatcgctgcctgtctgactgaatcaggatcaacagctttaaaggcagaaacctcagagagacttygtactgtgcttctggatgtgaccgacccagagaatgtcaagaggactgcccagtgggtgaagaaccaagttggggagaaaggtgagagacatggaagtgg

SEQ ID NO: 131294 - DNA, 201 bp, Homo sapiens; identical to SEQ ID NO: 22910

SEQ ID NO: 131295 - DNA, 201 bp, Homo sapiens
gtgggtgaagaaccaagttggggagaaaggtgagagacatggaagtgggtaggatgggacagggataggggatagggaggtaaccaaagctaaataaaacrtgctcaagttttaaatggcctttcgagaaaatgtttcctaaataccggctgtgtacttctctaatcttaggatagcttctgagtagttccaagtacaggc

SEQ ID NO: 131296 - DNA, 201 bp, Homo sapiens
atctgaaccttagagactgaagaagaaccagcatttctgggcaataatacttgagttaaggagagtgtagcaaaactctaggttagcattggcagtccctrggattcagactgtaggcctaaatgaccctcagtccagagctgtacctaatgaggacaatacattttaatgtgagtccattcttaacagcaaaatttcctc

SEQ ID NO: 131297 - DNA, 201 bp, Homo sapiens
gttcccatggctctgacccaggttgctgctcagagttggcatcgtggctaaaatattactagaggtcaaagatatgtgtgtgtttgtggttgatttagtcragtgatctagaggaatctgaaccttagagactgaagaagaaccagcatttctgggcaataatacttgagttaaggagagtgtagcaaaactctaggttag

SEQ ID NO: 131298 - DNA, 201 bp, Homo sapiens
cctattagccttttagttgctgttactaatttatttctcagtggtcaatgaaccaattggccatcaatcagctttgtgtataggtcatgttcccatggctstgacccaggttgctgctcagagttggcatcgtggctaaaatattactagaggtcaaagatatgtgtgtgtttgtggttgatttagtcgagtgatctagag

SEQ ID NO: 131299 - DNA, 201 bp, Homo sapiens
tacctcacaataatattgagatattttctgttcttttttttaaactgtgtcatttatttttaagaaacagaggaaggtgaataagagaagtgaaattaaayaatcctattttaacttttttactaggaaaacaaactcaggaagaaaaagaaaagcagaagtgatcaaggagagcgctcgagttgcaatattttcctttgg

SEQ ID NO: 131300 - DNA, 201 bp, Homo sapiens
ataagtggatccaggcagtttggatccaatatgggatccaacagcccacgttgttcagatgtcagctgtgcttattttctcaatcaaataatttgaaatawtagggttgtctgttttctagctctggtggaggcttggattttatgtgattctatttgttcttctctttgaattgtacatagtttttggagtacgtcctag

SEQ ID NO: 131301 - DNA, 201 bp, Homo sapiens
acaagaatcaagtaggttctccaaacatatttttatattcctctgacttaatttttatcaactgacttttttttttttttttttttttttttgtgacagartcttgcactgtcgccagggctggagtgcaatggcatgatctcggctcactacaacctccaccttctgggttcacgattctcctgcctgattctcctgccg

SEQ ID NO: 131302 - DNA, 201 bp, Homo sapiens
ttgtacattcgcctccaagctcagccctgatgttagcttttccaaagaacatgaacacaatgtttagaaattggtttctgagcccttggtatgttcattgytgttggagtgtcattgtttctagctcatcgggtagatctagaaagttacctatccatttttgtatttactgactcatattaaaaaccaggagttcatact

SEQ ID NO: 131303 - DNA, 201 bp, Homo sapiens
ctataccacaagaatcaagtaggttctccaaacatatttttatattcctctgacttaatttttatcaactgacttttttttttttttttttttttttttgkgacagagtcttgcactgtcgccagggctggagtgcaatggcatgatctcggctcactacaacctccaccttctgggttcacgattctcctgcctgattct

SEQ ID NO: 131304 - DNA, 201 bp, Homo sapiens
tactgaatttatttgttctaatagtttttatgtgtgtggagtctttaggtttttccaaatataagatcatatcatctgcaaacaaggataatttgacttcytcctttccaaattgggttggagctccattgtatgttatttgtttttgaggaatctccaaacaaatattgctgcttttaagatcctttctttatacttgac

SEQ ID NO: 131305 - DNA, 201 bp, Homo sapiens
gaggcagttggtacacctctgctaggagggagggaagctacatcctgaggaggctgtctgagtgaatctgtagtggaagtacacacgaactccatgcctcrctgtcccagtacccaaagcacagtctggctgccaaggattacctcctgccctcagggaagcaggaatcaagggcaaatgtaactaaccagaggaggagct

SEQ ID NO: 131306 - DNA, 201 bp, Homo sapiens
taaaaggtttaaacatgtaattttgcaagagttagttataccacttcccctcccataattatacatttataatgtatttgagaacgggaaatcttgctacrtggacattgatttgcaacaaattataactcttacacagaaaagagttggaaaaactataccaaattattaagccatggtaatctaaaaagttgactactt

SEQ ID NO: 131307 - DNA, 201 bp, Homo sapiens
tattatttctattggtaacaaaatcacaggcaatacaaatactactgcggtttgttgtttcttccgtaattgaagattgtgctaaacttcaattacagttyaggaaaaaaaaaaagatgggatctttttcccatccaaatgtagaaacccctgaattctatccacagactctctcaaagttctaatggcacccttttgtct

SEQ ID NO: 131308 - DNA, 201 bp, Homo sapiens; identical to SEQ ID NO: 22905

SEQ ID NO: 131309 - DNA, 201 bp, Homo sapiens; identical to SEQ ID NO: 22908

SEQ ID NO: 131310 - DNA, 201 bp, Homo sapiens
gggatcaagtgatcttcccacctcagcctcccaaagtgctgtaattacaggtgtgagccaccatgccaggcctcttttggcagttttataatttcaggtctatgtttaagtcttcaatccattttaagttgatttttttatatggtgtaagattcagtttcattcttcttcatgtggatatactgttttcccaataccatg

SEQ ID NO: 131311 - DNA, 201 bp, Homo sapiens; identical to SEQ ID NO: 22911

SEQ ID NO: 131312 - DNA, 201 bp, Homo sapiens
atttgaagggacttggctgttgtgatctaactttttagttcctgaagccatatcttcattagggggcaacccaagcccagtaagaccgtgcctcttgtagrctcatagaggtaccaccttgatggtcttggataagatccagaagaattatctggtttaccaggaaaagactcttgttctcttcccttactttctcccaaa

SEQ ID NO: 131313 - DNA, 201 bp, Homo sapiens
ctagaagaatctgctgccaacccaatcttgagagctgctggtctaaagaaagcattgcaatatcattttctgaggaatagatagtaaatcctcaaaatgarcctcaattataatggacaattcagaataaatccccttgtatccatcctcccctttgcaccctagacttccactctgctttccccttctaccaaagagtaa

SEQ ID NO: 131314 - DNA, 201 bp, Homo sapiens
tttgcaccctagacttccactctgctttccccttctaccaaagagtaaatgtacttttgtctctttttaggtctagacaaactgaaaggcaataaatcctrtgtgaacatggacctctctccggtggtagagtgcatggaccacgctctaacaagtctcttccctaagactcattatgccgctggaaaagatgccaaaatt

SEQ ID NO: 131315 - DNA, 201 bp, Homo sapiens
ctgacaggcagttactataaagcattgtgcatggtgtatgaaagacaaaactagttctcctttcttggtttcttttgaatctttgtgatatggtagagaamgtttgataaagtgttcttgtgcctgctgtcgactgataatgtgttcatctctttgcagttcttccttctctttcacacagtttagagttcagagagtttt

SEQ ID NO: 131316 - DNA, 201 bp, Homo sapiens
ccgggaggtggagcttgcagtgagctgagatcacgccactgcactccagcctgggcgacagagcgagactccgtctcaaaaaaaaaaaacaacaacaacaaaaaactcagaccttttcttctgctcaaagatcactgtggctgaaatatactgaagttttaaacacacttttggaacctatacatatgttctatgttctaa

SEQ ID NO: 131317 - DNA, 201 bp, Homo sapiens
cccgggaggtggagcttgcagtgagctgagatcacgccactgcactccagcctgggcgacagagcgagactccgtctcaaaaaaaaaaaacaacaacaacaaaaaactcagaccttttcttctgctcaaagatcactgtggctgaaatatactgaagttttaaacacacttttggaacctatacatatgttctatgttcta

SEQ ID NO: 131318 - DNA, 201 bp, Homo sapiens
ttctcaatcaaataatttgaaataatagggttgtctgttttctagctctggtggaggcttggattttatgtgattctatttgttcttctctttgaattgtrcatagtttttggagtacgtcctaggaaatttggattgacatgactgtcactactacagctacctcagaagtgagaataacttttttaacacttgaagtga

SEQ ID NO: 131319 - DNA, 201 bp, Homo sapiens
acccgggaggtggagcttgcagtgagctgagatcacgccactgcactccagcctgggcgacagagcgagactccgtctcaaaaaaaaaaaacaacaacaacaaaaaactcagaccttttcttctgctcaaagatcactgtggctgaaatatactgaagttttaaacacacttttggaacctatacatatgttctatgttct

SEQ ID NO: 131320 - DNA, 201 bp, Homo sapiens
aagagagagagagagggagggagggagggagggagggggagagagagagagagagagagagagagagagagagagagagagagagagagagagagagagaragaaagaaagaaagaaagaaagaaagaaagaaagaaagaaagaaagaaagaaagaaagaaagaaagaaaataaagtccaaagtctataaactcgcttggc

SEQ ID NO: 131321 - DNA, 201 bp, Homo sapiens
cccaggaggtggaggttgcaatgagccgagattgcaccactgcactccagcctgggcgacaacagcgaaattccatctgaaagaaagaaagaaagaaagaragagagagagagagggagggagggagggagggagggggagagagagagagagagagagagagagagagagagagagagagagagagagagagagagagag

SEQ ID NO: 131322 - DNA, 201 bp, Homo sapiens
aataatcacaatttgaaaactattaaaaccacgcaccaggcagtttacaaaatatttatttctttgttatattatttctgctgctgaatttggtcaagagrttgtactaatcataaaatgaatgttattgatcattttaaagtctcttctaaaagtagctaaatttatactgctgattccttttgaaacatgcgacctaca

SEQ ID NO: 131323 - DNA, 201 bp, Homo sapiens
gccatcttcccaacaaacaaccaaataagagttattgtttctttaactttctatttatccacactaatgcattaaaatatctcaaattcatcagtcctggrttataatgccttggtagttctaatttgaattttctttttcactttgaacactcaggacaccatcttcttgtattatacaagaaaggagtgtacctatcac

SEQ ID NO: 131324 - DNA, 201 bp, Homo sapiens
aactgtagctggagccaattaaacagagcttctgaatgtgtttcctcctctatacagtgaagataattttgtcgtaaggtgtaaataagataaatatttayagatcctaggaaacggcctacaacatgttaggcactcaatgaaccatagcagttattatcattcctccctgacttggtcaaccaggaacttgagaatcat

SEQ ID NO: 131325 - DNA, 201 bp, Homo sapiens; identical to SEQ ID NO: 22906

SEQ ID NO: 131326 - DNA, 201 bp, Homo sapiens
ctttatgttttcttctagtagtttttttttttttttaatagagatgaggtcacactatggtgcccaggatggtcttgaactccctgggatcaagtgatctwcccacctcagcctcccaaagtgctgtaattacaggtgtgagccaccatgccaggcctcttttggcagttttataatttcaggtctatgtttaagtcttca

SEQ ID NO: 131327 - DNA, 201 bp, Homo sapiens
gtttctaatagattttaagcccattctgcagtggaatttcatgaactagcaagaggtaagattttactgtgagggtctgtcttcctgatagacgagttcaytcctgagattaataccatcactccacatagctccagctggccgtggcaactcaatggcttgtgtcaattttgccatggctcccctctccctctcttccat

SEQ ID NO: 131328 - DNA, 201 bp, Homo sapiens; identical to SEQ ID NO: 22938

SEQ ID NO: 131329 - DNA, 201 bp, Homo sapiens
ttacgatggactgcgtagcgcctacgatccacgtgtacgagcaccatgagaacagatggcggtgcagagacccacaccagtgagtgcgccccatgctgccrcgcgggctgggctccttcagcgcccggccacgtgagagccactctcaccccgcctgtgttttcagttagcgttttctccagaagcatgataccaagcata

SEQ ID NO: 131330 - DNA, 201 bp, Homo sapiens
acctcttcatgcgtttgaaatgcacatgtttctcagtactctgcaccatctctgttcataccactgtgcatgtggctggccttctctcttgatgctgttayaagccgcccgttttcactgttagatgctgacttcttcatgtttgacccgtagtgactactgtgaagactggccagaggcacagaggatctcagcctcgct

SEQ ID NO: 131331 - DNA, 201 bp, Homo sapiens
ctggagtgcaatggcatgatctcggctcactgcaacttccacctcccagattcaggtgattcttctgcttcagcctcccaggtagctgggatttcaggcgyccaccaccacacccagctaatttttgtatttttagtagagatggggtttcactgtgttgaccaggctggtcttgaactccttacctcaagtaatacggcc

SEQ ID NO: 131332 - DNA, 201 bp, Homo sapiens
cttgttgatttctagtgcggtggagtagctttctgttacattctgcgcagatgacttgctggcttgctcactggcctcatcaccatgatttcaggctagarttcttgctgtggcctccatgtgggcctgtcctctgctcctctgcacggcggctgccctggagctctcccatgcccctactccctcctgccctttgttcat

SEQ ID NO: 131333 - DNA, 201 bp, Homo sapiens
atgcccctactccctcctgccctttgttcatctccagaacattcacgtgccaccttggggatggggagagggatgctgtggttccccctttgagttcttcyccctgaacttcaccctctatctcggtcccattgacctcccaagctcttctttcatggttcccactccttctcattccatagaaagatcagcagctgactt

SEQ ID NO: 131334 - DNA, 201 bp, Homo sapiens
ccctttgttcatctccagaacattcacgtgccaccttggggatggggagagggatgctgtggttccccctttgagttcttccccctgaacttcaccctctrtctcggtcccattgacctcccaagctcttctttcatggttcccactccttctcattccatagaaagatcagcagctgacttgagaaggaactttccttct

SEQ ID NO: 131335 - DNA, 201 bp, Homo sapiens
aaataacagttgctctacttctgaactccaaggcctactttttgctgcagataggaaggctcagcaggttaccctcatcttgttggtaagtggcaagttgyggtccctgcctcgccttctttacggttattgtacagtcacaaggggcgtggggggatagtgcagattttagcaaggctgctgtgagaagctactgcctct

SEQ ID NO: 131336 - DNA, 201 bp, Homo sapiens
acccctcatagccatccatacagctaacttggttattctcatgtgtgtcattcaaaagttctaaattctaaagccaggccagagcttttgtgacctggttygctttaagggcaacctcttcaaagaggttctacttaaagttccaggtcatgacatttttctgctggaatttggttgggcccttggagttttcttacagga

SEQ ID NO: 131337 - DNA, 201 bp, Homo sapiens
taagtaaaaaatatgtcctatggtttttcctagaaaatgttgtatggtatggtcagctgagtaataaccccccaaatatgtccacatcctaatccccaggmcttatgtagcaaaagggatttgtagatgtgattaagttaagggcttgagggtggagagaatatcctggattacctgggtgtgcctcatgtaatcacaaag

SEQ ID NO: 131338 - DNA, 201 bp, Homo sapiens
cacagggaggggaacatcacacaccagcgcctgtcagagccggggagcgaggggagggagagcatcaggacaaatagctaatgcatgcggggcttaaaacstaggtgacgggttggtaggtgcagcaaaccagcatgacacatggatacctatgtaacaaacctgcatattctgcacatgtatcccagaacttaaataaaa

SEQ ID NO: 131339 - DNA, 201 bp, Homo sapiens
agccggggagcgaggggagggagagcatcaggacaaatagctaatgcatgcggggcttaaaacctaggtgacgggttggtaggtgcagcaaaccagcatgrcacatggatacctatgtaacaaacctgcatattctgcacatgtatcccagaacttaaataaaaattaaaaaataaaacatgcactttaatcaagtacggt

SEQ ID NO: 131340 - DNA, 201 bp, Homo sapiens
aggacacactcaggaggccggcccatgatggcacatgaaggctgggagcacggtgctcaaggatcagctcatcagggaacttgaccaaatttagagcaagsccctttgatagtgtatagagatgtttgttctaagcagcaatagaaagcttctggaatctgttccattaagaggtgatagaaacaaaatatgagtcgtttt

SEQ ID NO: 131341 - DNA, 201 bp, Homo sapiens
aaaccttcagtgaacatttattgaatgagtgaatcaaaccattcattcccaaatgagagcagtttacatctgccttcccagcaaccctatgacagttccarttgacagacaaggaaatcaaggcccaggctgcagaagtgactgcctgaggctgcacacccagtaagcagcagaggctgtggcagaggactgcacagggca

SEQ ID NO: 131342 - DNA, 201 bp, Homo sapiens
agaatttttctatatgtctgcgtcatcttggtcccaacagaaaaacagatgacacactcaggtggtgataatctgaggagggcttaataagcaggctgttsacaaggcctgggccgtagataacgcacagggggtcgtgctgtaaacaaggctggcgacaacagcccaaagggtggggaggaaggagctgggtaaacaagt

SEQ ID NO: 131343 - DNA, 201 bp, Homo sapiens
gggctggggtgtagtggcgcagtctcggctgcagcctctgcctcccgggttcaaggaattctcctgcctcagcctccccagtagctgggattacaggcgtrcaccactatgcctggctaatttttttgtatttttagtagagatggggtttcaccatgttggccaggctggtttcaaactcctgacctcaactgatccacc

SEQ ID NO: 131344 - DNA, 201 bp, Homo sapiens; identical to SEQ ID NO: 22947

SEQ ID NO: 131345 - DNA, 201 bp, Homo sapiens
tcctttttagcattacacttctcttgccacagtagctactttatgcatcatggtaaatagaagcagaaaaatagccttgagcagcaaactctattccatayggacatttttagcaattttagtgaagatagccgaacttaaaaatagacttccgctttagtaattgacatttcttgaggcttcccatcaactcttaatgcc

SEQ ID NO: 131346 - DNA, 201 bp, Homo sapiens
gaatcaccattcttctgaggagccttttttcccttttaggattaacttcttggagaagatgtttccttgcaggtttctgaagtgctgccattagagaagcsatctgaagacttctgtggaataggagatctagcccagctttagaacagccgagaatcatgttcttggtcttttgctttcagagccaagtgacaggcaccc

SEQ ID NO: 131347 - DNA, 201 bp, Homo sapiens
accccagttttaatacattttcttcctttctacaaaatcaatgtatgttcatggtagaaaatcaaagagaaaataaaaatatctccattctcccatgcccsctccttcactagacaagtgtaaggaagacagaaagtagtcgaaccagcagggattttgtgaacacctttattgtcccagatcctgagatacaaagaaatg

SEQ ID NO: 131348 - DNA, 201 bp, Homo sapiens
aaaaaaaaaaaattaaaattagccagacatggtggggcacactgtagtcccagctactcagaaggctgaagcaggaaaattgcttgagcccaagagtttgyggctgcagtgagccatgatcatgccatggcactccagcctgggtgatagagcaagaccccatctgtctctctcgctcttttttttttttttttttttttg

SEQ ID NO: 131349 - DNA, 201 bp, Homo sapiens; identical to SEQ ID NO: 22940

SEQ ID NO: 131350 - DNA, 201 bp, Homo sapiens
cgaccgccctctacacccggtgtcccgcgaccggaagagagcaaggccgcgccgcggagcaccacgggatcgaggaagactccgcccgcacccggccgcamggaggtcaccgtggagcggaaaagggtagcgctgcgaacgtcgtaaaatgccgggccgggctgctttccggcaggcgttggagaggctgctttccggcgg

SEQ ID NO: 131351 - DNA, 201 bp, Homo sapiens
ccccgtttctttaaaaaaaaaaagcaaaaggcataaataccagtaaaatattacaaagtttgtgcagattcctgggctcaggtccagagaattcagattcrttgagatttggggcccaaatcctgcatttttagcaggtggattcaggccatgctataaataaccctgatctttagccaaaacctgcattttactatgaag

SEQ ID NO: 131352 - DNA, 201 bp, Homo sapiens
tatgttgcttaggctggtctggaactcttggcctcaagcaatcctcccacctcagcctcccacaatgctgggattacagataggagctaccgcacccggcytgcgaatttcaaatatgcagaaataagcaatttggccaatggcacatgttcagccaggaactgaagaattggggcataaggttgaatgctatgaaattgc

SEQ ID NO: 131353 - DNA, 201 bp, Homo sapiens
cagggcactctcacctgatgcctagttccagattccggactgtcacaggaaactacccttattagaactcatccaccctgccgctgtgagtgctgaggctyggccgagtctccgttcctcccttcgagttctccattcctcagttggtgaacgggctgtgtgcacccctcatagccatccatacagctaacttggttattc

SEQ ID NO: 131354 - DNA, 201 bp, Homo sapiens; identical to SEQ ID NO: 22944

SEQ ID NO: 131355 - DNA, 201 bp, Homo sapiens
aaaaacagatgacacactcaggtggtgataatctgaggagggcttaataagcaggctgttcacaaggcctgggccgtagataacgcacagggggtcgtgcwgtaaacaaggctggcgacaacagcccaaagggtggggaggaaggagctgggtaaacaagtccaccttgagaaaagcagtgcccttgggcaggtggccaca

SEQ ID NO: 131356 - DNA, 201 bp, Homo sapiens
ccgggcaccgcaggggcccactctgaccttgctcccgcgcctcattcctagttacagtctgcactgtagacatccagcctccagcacctccccccaccacatgagtccccatccagcaagtaaggtccacacttgactccctgcggtaactactcttcagcagtgaaaacaagcagcaagttttgccaggcaatagttatt

SEQ ID NO: 131357 - DNA, 201 bp, Homo sapiens
cgggcaccgcaggggcccactctgaccttgctcccgcgcctcattcctagttacagtctgcactgtagacatccagcctccagcacctccccccaccacatgagtccccatccagcaagtaaggtccacacttgactccctgcggtaactactcttcagcagtgaaaacaagcagcaagttttgccaggcaatagttattt

SEQ ID NO: 131358 - DNA, 201 bp, Homo sapiens
ctgaccttaggtgatccgcccgccttggcctcccgaagtgctgggatgacaggcgtgagccaccgcgcccgcccgtagttgttatttttacttaatttttsagaagttgaatctctagtctgtcacgtactccccacttccagcaggcagctctgtagcaaggcctctctgtcagctgcctgtctggtctctggggccctg

SEQ ID NO: 131359 - DNA, 201 bp, Homo sapiens
aatccaaaaaatgtatgcattaaaaattctaagaaaaacaatcatatgataatctctatggatggtgaaaaatccttcaataaaatttatttcttgccttaaaaaaaaaaaattgggcatggtggcttgtgcctgtaatctcagcactttgggaggccaaggcaggaggattgcttgaacccaggagtccaagatcagcct

SEQ ID NO: 131360 - DNA, 201 bp, Homo sapiens
gtggtgttgactgtgccttttgtaaacagtgttgaatggcattaactggaatgtggtagcctgactatttctttgacagtccaaaccaggttgcagagaakgtggcctccagaatcgccgagggcttcagcgacactgcgctcatcatggtaagtcgcttctgtgcagcatgtgggaggcccttgcgcctcctctcaccaa

SEQ ID NO: 131361 - DNA, 201 bp, Homo sapiens
ttatgaatttcctaaactttaggtcattccatcaagttttattatatgattcattgttggccagtgttttgcttcatagttagcatttgatatgagtaggtttcggtgcccggcagagagccctggcctgaggcagacactcaggaggaagcttttagatacacattgtaagatggcacctacacgctggcccgacatggt

SEQ ID NO: 131362 - DNA, 201 bp, Homo sapiens
aagtgctgggatgacaggcgtgagccaccgcgcccgcccgtagttgttatttttacttaatttttgagaagttgaatctctagtctgtcacgtactccccrcttccagcaggcagctctgtagcaaggcctctctgtcagctgcctgtctggtctctggggccctggcccagtccctgtgtgtgcaggacatgcccccaga

SEQ ID NO: 131363 - DNA, 201 bp, Homo sapiens
gtatttgtaagcctcctggatgtaaaaagtccttgtataattagctttggtttattttatttttagacagggtctcgctctcactcaggctgcagtgcagyggcaggatcatagctcactgcaaccttgaactcctgggctcaagtgatcctctactccatcctgatattactttaatagcgtatttttctggtagttgtc

SEQ ID NO: 131364 - DNA, 201 bp, Homo sapiens
tttagtgaagatagccgaacttaaaaatagacttccgctttagtaattgacatttcttgaggcttcccatcaactcttaatgcctcttatgcattggactttttttttttttttttttcagttcaatcaaatgcctggtaggaattgctagcgttgcccctgccaactctcaggtatgtggtgtcttaatctgacttcatt

SEQ ID NO: 131365 - DNA, 201 bp, Homo sapiens
gaactttgggaggccgagggggttggatcacctgaggtcaggagttcgagaccagcctgatcaatatggtgaaaccccgtttctactaaaaacacgaaaawtagccgggtggggtggagtgcacctgtagtcccagctacttgggagactgaggcaggagaattgcttgaacccaggaggcaaaggttgcagtgaggcaag

SEQ ID NO: 131366 - DNA, 201 bp, Homo sapiens
ggccgagggggttggatcacctgaggtcaggagttcgagaccagcctgatcaatatggtgaaaccccgtttctactaaaaacacgaaaattagccgggtgkggtggagtgcacctgtagtcccagctacttgggagactgaggcaggagaattgcttgaacccaggaggcaaaggttgcagtgaggcaagatcacaccact

SEQ ID NO: 131367 - DNA, 201 bp, Homo sapiens
gatcctgagggaggcagatgtcctaggagatgctgcactcaaagtcagtccgctgaagcctctgccaaggcggttgggagtgcgtggaatccccatgcacrttggctcttctgctgcttcctctgagcccacgagcagcactggcctctccgccttcagcgcatctcttctgactctcactgggatgtcctctgtttgata

SEQ ID NO: 131368 - DNA, 201 bp, Homo sapiens
ccgggtggggtggagtgcacctgtagtcccagctacttgggagactgaggcaggagaattgcttgaacccaggaggcaaaggttgcagtgaggcaagatcrcaccactgcactccagcctgggcagcagagtgagactctgtctcaaaaaaaaaaaaaaagaagaagaagaagtgaatcaccattcttctgaggagccttt

SEQ ID NO: 131369 - DNA, 201 bp, Homo sapiens
tgaatttcctaaactttaggtcattccatcaagttttattatatgattcattgttggccagtgttttgcttcatagttagcatttgatatgagtaggtttyggtgcccggcagagagccctggcctgaggcagacactcaggaggaagcttttagatacacattgtaagatggcacctacacgctggcccgacatggtgct

SEQ ID NO: 131370 - DNA, 201 bp, Homo sapiens
tgggaggaaggcagtgtttaaacagacatcctgggactctcccgtcagggtggtggtctccatagttactgggatatggttctcacggtaggtagagcgtytgctcacacagcccctccgcctttacacctgggcagagggaagcaggcaggactgcatctgggcaggcacgtaggctggaagtagaaaaaggagggatgc

SEQ ID NO: 131371 - DNA, 201 bp, Homo sapiens
caggaggttttgcagtccttcattaatactgacttttaaatgcatccggagcagccatttgtcagatgtgtagagaggataaaccttagctaggagtctgycaccctggaatagggaatccacctccccctcccccgctgtgcccagttgtttgaggaggacacctcaggtaggtaatgccgtgctatccctgggctctat

SEQ ID NO: 131372 - DNA, 201 bp, Homo sapiens
tggttgggcccttggagttttcttacaggaatttgtccctcagcaggcaaaatgtaagttgagatatacatgtgtttgtcataggaatcatcttttgtacsaggtggtttctgtgctctgagagtgggtacaaggtgataccatatgtgtttactgggctatgagtcctaaccaggtggcttcagcccaggaaagagatgg

SEQ ID NO: 131373 - DNA, 201 bp, Homo sapiens
agagatgtttgttctaagcagcaatagaaagcttctggaatctgttccattaagaggtgatagaaacaaaatatgagtcgttttggagttgttttcagcaragtcacaatgatagcaccattatagatattttacagacataatcctgatcttttgggtggatgaccagaatgtctagttggttcactgagccctggtttt

SEQ ID NO: 131374 - DNA, 201 bp, Homo sapiens
ggctccttcagcgcccggccacgtgagagccactctcaccccgcctgtgttttcagttagcgttttctccagaagcatgataccaagcatattccccggckcctgtaggccccagtgttccagcgcttccaggcagtagagggaacctcagtggtacccacaggtcttcccaccccaggcgctagagcacagacactcttc

SEQ ID NO: 131375 - DNA, 201 bp, Homo sapiens
cagttttcctcaggccagacactcgcgccactctgcatacaggctctgtcggaagagtctctgccccagccagcgtgggcacggctgcagggagagccccsaggaggcgcctgccgctgctgtttggctggcattctgttcactctcgtgtcctttgccttgtgctcaggtagacaacaccaagtttacgatggactgcgt

SEQ ID NO: 131376 - DNA, 201 bp, Homo sapiens
gctccttcagcgcccggccacgtgagagccactctcaccccgcctgtgttttcagttagcgttttctccagaagcatgataccaagcatattccccggctsctgtaggccccagtgttccagcgcttccaggcagtagagggaacctcagtggtacccacaggtcttcccaccccaggcgctagagcacagacactcttcc

SEQ ID NO: 131377 - DNA, 201 bp, Homo sapiens
caggctagtctttaactcctgggcttaagcagtccttctgcctcagcctcccaaagcgctgggattacctgagcgaccacacgcagcaccccgtttctttaaaaaaaaaaagcaaaaggcataaataccagtaaaatattacaaagtttgtgcagattcctgggctcaggtccagagaattcagattcgttgagatttggg

SEQ ID NO: 131378 - DNA, 201 bp, Homo sapiens
atggagtttcactcttgtcacccaggctggaatgcaatggcgtgatctcagctcattgcaacctccacctcccgggttcaagcgattcttgtctttgcccmctgagtagctgggattacaggcgcccaccactacacctggctaatttttgtattattagtagagatggggtttcaccatattggccaggctggtctcgaa

SEQ ID NO: 131379 - DNA, 201 bp, Homo sapiens
aggctgccctgacgtggcttcctcatgttgtcagatagagccgaccctccagtgtccagggagatgggggtgcagtgaagggccctgccgttgggtccacytgctcagcacagatgagaaggtgagctcaagcactttggaaataatacagtaagctggtgacagcattgctatcactgatgaggcaccagtgtttctgat

SEQ ID NO: 131380 - DNA, 201 bp, Homo sapiens
taaatgcatccggagcagccatttgtcagatgtgtagagaggataaaccttagctaggagtctgccaccctggaatagggaatccacctccccctccccckctgtgcccagttgtttgaggaggacacctcaggtaggtaatgccgtgctatccctgggctctatcggggtcattttatttcatcctcacagcaatgcaca

SEQ ID NO: 131381 - DNA, 201 bp, Homo sapiens
ctgccttacccaggacagatttgcagaagtgctttcctcttcccgggaacacgcccaccgtcagtcttcctccctggcagtggcttagttcccccaccacrtgggcttctgtcttcggcatgggctcgggttggtccattcctctaacctcagccagacagtgggatatggaacaagggattaaagcttcccacagccacg

SEQ ID NO: 131382 - DNA, 201 bp, Homo sapiens
cattttatttcatcctcacagcaatgcacaagtgaagaaaccagccggagaaggtggcttctcagaggccacacagcttgggagctcaggagctaggatcrtgccaacttctgacttaagtatggttttgcttctgcctggaaaaccttcccctctcttcagccagacctagctgaaaatttgctcttcttattctagaaa

SEQ ID NO: 131383 - DNA, 201 bp, Homo sapiens
ttcagattgattcatggtgcaaagatcatagctacgtgattgctggttattatcaagctaatgagcgagtaaaggatgccaggtacgtggatgcagaaccstctgtgggcgaggaagtgagcacgtgttgggcagaccccgtctctcgtgtgcttttcggccagatacgaaacctgtgagacctacaccccttccctctgt

SEQ ID NO: 131384 - DNA, 201 bp, Homo sapiens
ggaaagatgcccagaggggacagtgactgcctgctacctgagcgtgagagggcaccgggcaccgcaggggcccactctgaccttgctcccgcgcctcattsctagttacagtctgcactgtagacatccagcctccagcacctccccccaccacatgagtccccatccagcaagtaaggtccacacttgactccctgcggt

SEQ ID NO: 131385 - DNA, 201 bp, Homo sapiens
agaaacaagtcatcgttcacttggtggggattcgacagagtttcccttgaggatttcgagttgcaggaagtgttcacgttgttgggacattaatcgctagsatttggttcttcgcaccttcgcagagccgattccttatctggcaaagtgtaaatgcttctttggctgtcggtactcgggcaccccggagctcagacactt

SEQ ID NO: 131386 - DNA, 201 bp, Homo sapiens
cgctaggatttggttcttcgcaccttcgcagagccgattccttatctggcaaagtgtaaatgcttctttggctgtcggtactcgggcaccccggagctcasacacttgtagaaaggtagttgcatggtcagatctgtgtgatgcatcttaggcctggctccccttgattgaatgtgcctgagctttgtgtaaagagaattt

SEQ ID NO: 131387 - DNA, 201 bp, Homo sapiens
cgcggtggctgacccctgtaatcctagcactttgggaggccgaggcaggcggatcacctgaggtcagaagtttgagaccagcctgaccaacatggtgaaamcccttctctactaaaaatacaaaacttagccgggcgtggtggcgggcgcctgtcatcccagccactcgggaggctgaggcaagagaatcgcttgaaccca

SEQ ID NO: 131388 - DNA, 201 bp, Homo sapiens
cagagttaaacccaggaactataaacaactgcattcaagtcacctgtacatgaattttccacgggggagcagggctgcctcccaaaccacttaccagggasgaaagatgcccagaggggacagtgactgcctgctacctgagcgtgagagggcaccgggcaccgcaggggcccactctgaccttgctcccgcgcctcattc

SEQ ID NO: 131389 - DNA, 201 bp, Homo sapiens
ttgccaggcaatagttatttatactgacttttccgagatggagtctcactctgtcacccaggctggagtgcagtggagcgatgtcggctcgctgcaacctyggcctctcaggttcaagcgattctcccgcctcagcctcccaagtagctggtactaccagcgcacaccgccacgcacggctgatttcttttttattttagt

SEQ ID NO: 131390 - DNA, 201 bp, Homo sapiens
gcctcccaagtagctggtactaccagcgcacaccgccacgcacggctgatttcttttttattttagtagacaaggtttcaccgtgtcacccaggcgggtcycgatctcctgagctcaggcagtccgctcgcctcgccctcccaaagtgctaggattacagacgtgagtcaccgcactcagccctgacttttctcatattca

SEQ ID NO: 131391 - DNA, 201 bp, Homo sapiens
ttattttccattaaaaaaatccttgcatttgtgcatgctttttgcatgctttttatgtttttttaagtacttacgcctattaacttatttatccttataamcctttgacgtaggtagtgaaggaattattcctaatagcagaaacccataaaatgttagtatggaaattagcttgaacccgcttctctaatccctttctgc

SEQ ID NO: 131392 - DNA, 201 bp, Homo sapiens
cggggcggtggcagagcagacagagtctcactctgtcacccaggctggagtgcagtggcacgatctcgcctcaatgcaacctccacctcctgggttcaaastattctgctgtctcaggctcctgagtagctggaattacaggcacctgccaccacacctggctaatttttgtatttttagtagagacggggtttcaccgtg

SEQ ID NO: 131393 - DNA, 201 bp, Homo sapiens
gtagtttttctttttaatgagtgtttccttaccctctccccaataaaaatcaacaaccagcatgatcagtgttaagtaggagggtaagggctttgcaagckcttcatggcaagcggccctgccttttgctttccaagttcctcagcaaatgcaggagcaggcagaggtgggtacatgggcaggcctcctgagggctctgta

SEQ ID NO: 131394 - DNA, 201 bp, Homo sapiens
cttttagatacacattgtaagatggcacctacacgctggcccgacatggtgctgttgagggtgagcagagtggtctgccttcagggtgcctgcagtttcarttggcagctggctcttcctaggaacaaggagttcctgactagcaggaaccacagcgtggcagtcttcattcaggatcaagtggatcagtattggagattc

SEQ ID NO: 131395 - DNA, 201 bp, Homo sapiens
gagcctaagctgagcttcgtagcacgtgcctgtggtcccagctgcttgtgaggctgagcaggaaggattgattgagacccggagtttgtggccatgatcayacctgtgaatagccaccatgctccagcctgggcaacgaagcgagactctgtctctttttttttgacgtggagtctcactgttgcccaggctggagtacag

SEQ ID NO: 131396 - DNA, 201 bp, Homo sapiens
gtgagggtggcatgtcttctgggcactgaaagaggggaagcaattcagtaaggaggccttggtgtggagggccagacgggacagtgtgagtgaaacaagaygggcatgtgaggcagatgacatgtaggcagatttcctgacattgaagacacagcattgcccctgtggctgcacacggtagctcagttcaccgtaacgaag

SEQ ID NO: 131397 - DNA, 201 bp, Homo sapiens
tgcaagggaatgggttagatggcagattgcacagagctgtggtgaggacatggagcaagactagcggcttgttaaagaagttgaagaaacagtcatggaasggaggagggaagctggacagcagctagagggaaccggttcaatgcttttgtttttccctgaaaataaagacttacacagatttgaaggcagaactggggc

SEQ ID NO: 131398 - DNA, 201 bp, Homo sapiens
gacgggacagtgtgagtgaaacaagacgggcatgtgaggcagatgacatgtaggcagatttcctgacattgaagacacagcattgcccctgtggctgcacrcggtagctcagttcaccgtaacgaaggcctgcctctgccagcctgagaatagcagccttcatcttgcaggcagtggtgagcagtagtctgtggggctgtg

SEQ ID NO: 131399 - DNA, 201 bp, Homo sapiens
aactgggtgtggtggcctgtgcctatagtcccagctactcaggaggcagaggtgggattgcttgagcctaggaatttgaggttacagtgggctatgattgygtcactacactccagctagggcaacagagcaagaccctatctctaccaaaaaattaaataataagtaaaccagcgaagcgagcacgtgcagcctgttggc

SEQ ID NO: 131400 - DNA, 201 bp, Homo sapiens
agattgcttgaggccaggagttgaagaccagtgtgggcaacatagcaatacctcctctctaccaaaaaaaaaaaaaaaaaagcaaaaaaaaacactaaaawgtaactgggtgtggtggcctgtgcctatagtcccagctactcaggaggcagaggtgggattgcttgagcctaggaatttgaggttacagtgggctatgat

SEQ ID NO: 131401 - DNA, 201 bp, Homo sapiens
ttgaggttacagtgggctatgattgcgtcactacactccagctagggcaacagagcaagaccctatctctaccaaaaaattaaataataagtaaaccagcsaagcgagcacgtgcagcctgttggctccgccagtctttctgtcattgcttgttaagtctcagtggtgttgactgtgccttttgtaaacagtgttgaatgg

SEQ ID NO: 131402 - DNA, 201 bp, Homo sapiens
actgggtgtggtggcctgtgcctatagtcccagctactcaggaggcagaggtgggattgcttgagcctaggaatttgaggttacagtgggctatgattgcrtcactacactccagctagggcaacagagcaagaccctatctctaccaaaaaattaaataataagtaaaccagcgaagcgagcacgtgcagcctgttggct

SEQ ID NO: 131403 - DNA, 201 bp, Homo sapiens
tagcctgactatttctttgacagtccaaaccaggttgcagagaaggtggcctccagaatcgccgagggcttcagcgacactgcgctcatcatggtaagtcrcttctgtgcagcatgtgggaggcccttgcgcctcctctcaccaacctggagcttgctctgcggcggtttcctttccgctaaccccttcactcatttatct

SEQ ID NO: 131404 - DNA, 201 bp, Homo sapiens
atagtcccagctactcaggaggcagaggtgggattgcttgagcctaggaatttgaggttacagtgggctatgattgcgtcactacactccagctagggcarcagagcaagaccctatctctaccaaaaaattaaataataagtaaaccagcgaagcgagcacgtgcagcctgttggctccgccagtctttctgtcattgct

SEQ ID NO: 131405 - DNA, 201 bp, Homo sapiens
gtgcgccccatgctgccacgcgggctgggctccttcagcgcccggccacgtgagagccactctcaccccgcctgtgttttcagttagcgttttctccagargcatgataccaagcatattccccggctcctgtaggccccagtgttccagcgcttccaggcagtagagggaacctcagtggtacccacaggtcttcccacc

SEQ ID NO: 131406 - DNA, 201 bp, Homo sapiens
cactacactccagctagggcaacagagcaagaccctatctctaccaaaaaattaaataataagtaaaccagcgaagcgagcacgtgcagcctgttggctcygccagtctttctgtcattgcttgttaagtctcagtggtgttgactgtgccttttgtaaacagtgttgaatggcattaactggaatgtggtagcctgacta

SEQ ID NO: 131407 - DNA, 201 bp, Homo sapiens
tttcctgagtcctaccctttcttctggggtgtagggtatgaggattaagattctgtcatgtcttgtcccagcatgtggcagtgagatctgtggtttttacracttgatatttaagggagagtcattcatcttttcccaatttttgttcctctttcagattgattcatggtgcaaagatcatagctacgtgattgctggtta

SEQ ID NO: 131408 - DNA, 201 bp, Homo sapiens
gcatgggggcgagggccagggtgccgtggaagagggggatgcagtccacgaagagggtgtggtgggcgccggggccgcccagggggaggtgctccttacgyggcttctgcttctcggccaccaggagcccgttgacggcgcagtgcgggtacttggcgccgtgcagcaccatcttgcagtaggcctgggtggtcagtttca

SEQ ID NO: 131409 - DNA, 201 bp, Homo sapiens
taaacagtggctgtgaccccctgagatgatccagggtttcaaggcgtgcacatgtctgtgtttcggttttcagaagtatcaccttggggtgactctcaacytacatggattttcaaagatttattcaatgtgtttttcagaaagtgttgtgaagagcgaagacttttcgctcccagcttatatggatcggcgtgaccaccc

SEQ ID NO: 131410 - DNA, 201 bp, Homo sapiens
ctctagaaccctgccttgcctgtagagggtgcttggtaaatgtgctctgaatgaatggctccatgatcctcgtttctaagagctagcacgatttctcactyagtcctggttggacacaggttccctggaacagtgctgtcgtggttatcttctcacgtgtctttgtttctgaacttgaaacgcttttgagttttttattgt

SEQ ID NO: 131411 - DNA, 201 bp, Homo sapiens
atgtgctctgaatgaatggctccatgatcctcgtttctaagagctagcacgatttctcacttagtcctggttggacacaggttccctggaacagtgctgtygtggttatcttctcacgtgtctttgtttctgaacttgaaacgcttttgagttttttattgtttttgttcttcctcattagtttgagtcccttgcagatag

SEQ ID NO: 131412 - DNA, 201 bp, Homo sapiens
tttgggaggccgcaggggttcatggctggattcagcccatgatccttcactggtcacccgcatgccatggggacgtgatgctgacctgaccccaggtgctyactttcccaggctcacagggaggcagaccacaagtaaaacaaatacacagagaagtagaggatccagcagggtggagggagggggcacagggagaaaagg

SEQ ID NO: 131413 - DNA, 201 bp, Homo sapiens
gattctcctgcctcagccttccgagtaactgggactataggcacgtgccaccacgcccggctaattttttgtatttttagtagagacggggtttcaccatrttagccaggatggtctcgatctcctgacctcgtgatccgcctgcctgggcctcccaaagtgctgggattacaggtgtgagccaccgcgcccagccctgca

SEQ ID NO: 131414 - DNA, 201 bp, Homo sapiens
tgggaggccgcaggggttcatggctggattcagcccatgatccttcactggtcacccgcatgccatggggacgtgatgctgacctgaccccaggtgctcaytttcccaggctcacagggaggcagaccacaagtaaaacaaatacacagagaagtagaggatccagcagggtggagggagggggcacagggagaaaaggtt

SEQ ID NO: 131415 - DNA, 201 bp, Homo sapiens
tcgctctgtcaccaggctggagtgcagcggtgcgatctcagctcactgcaacctccgcctcctgcgttcaagcgattctcctgcctcagccttccgagtarctgggactataggcacgtgccaccacgcccggctaattttttgtatttttagtagagacggggtttcaccatattagccaggatggtctcgatctcctga

SEQ ID NO: 131416 - DNA, 201 bp, Homo sapiens
gtaggacagaattggagaaacagcttctaacagtgggaagactctcagtacaaccaagctattccttacctttctgatttctgaacttttttccatgtgayacctgctgctttgaaggcactaaaataacagaagcagatagagcagaaatcctcactcagatcttcctccttcctacctgtataacagtttgtggcttgc

SEQ ID NO: 131417 - DNA, 201 bp, Homo sapiens
tcccgacctgatagtttgtgtgtgggcattgccgggttgctcgctcgtggtaatgactcttccccgaggttctttctgtccaggcagaacaggcatttttscattctgaataggtatattctcgtacttttggtttgaatgtggatgtgggttaataacgacccgaatctatttgatcttccaggtcaccttgggctctgt

SEQ ID NO: 131418 - DNA, 201 bp, Homo sapiens
ccagggagcctgcctgtcttactcattgccgtatctccagcacataggaggcagatgaagacgaactgcagactcttagacaagtcttctctgttaagttwtaacttacgtaagtcatacatgaataatacatgaatctgttctcaagatattaaagcagtctggaataccatcagccgtcactgaagtcagttgggatat

SEQ ID NO: 131419 - DNA, 201 bp, Homo sapiens
aagtatgccagtcatttgcacggctaagagaaacatctagagaagtctatatacgacttgcttaaagctgaatgttgatttactgttcacatgatttgggygattttagtcactgggactgagctaatggagttgaagcattgttgcgggcattgtacctccagaccagtgtgtaatacaaagagttcttgcagacgtagg

SEQ ID NO: 131420 - DNA, 201 bp, Homo sapiens
gtcattagcaccacagtcagttctagaacattctcatcacccatatttacatttatttttaataactctcatgtgtaagctgagtgttttaaactttagaracttctggggggtgctgaacttgataaaaatattcagtatacaagtgttctttatagttcactcatcattttcatagaattagggttttaaaattagaaa

SEQ ID NO: 131421 - DNA, 201 bp, Homo sapiens
ggggggtgctgaacttgataaaaatattcagtatacaagtgttctttatagttcactcatcattttcatagaattagggttttaaaattagaaagtaattyaggccatttccatctcctgtccctcaaatcccagctcagttttgggatgaggtgtcaagtataagtttgtaagtatgccagtcatttgcacggctaagag

SEQ ID NO: 131422 - DNA, 201 bp, Homo sapiens
tgtcgttataatagctttttccccccagtctccctgtcatggcatttacaacagctttacaagatgtaattcatataacagtcacccatttaaagtgtatsctccagtggtttttagtatattcattgagttttgtcattagcaccacagtcagttctagaacattctcatcacccatatttacatttatttttaataact

SEQ ID NO: 131423 - DNA, 201 bp, Homo sapiens
ccttaattgctgggggaccaggcctgaagctctgaagaacccctgaaaccatgaattggccattcttattctggaagatgcaattttgaggtttgcatgcrccaaggttttgagggtttatgtcgttataatagctttttccccccagtctccctgtcatggcatttacaacagctttacaagatgtaattcatataacag

SEQ ID NO: 131424 - DNA, 201 bp, Homo sapiens
cagcacataggaggcagatgaagacgaactgcagactcttagacaagtcttctctgttaagttttaacttacgtaagtcatacatgaataatacatgaatstgttctcaagatattaaagcagtctggaataccatcagccgtcactgaagtcagttgggatatttgtgtggtgatgcacctgagtaaggggtgcccagat

SEQ ID NO: 131425 - DNA, 201 bp, Homo sapiens
gcgcgcggctgaggcctggacccgctgcctggccgcgcggcgcctcagccgagaagcgggacgaggcggcggcgattgatggcgcggccgcgggctggcgkgggacccttcaggcccggccccgtttgggcctcggctcctggaaaagcgactcgcgcctctgggaagccgcagccccagactccagtcgcgcttctcgcc

SEQ ID NO: 131426 - DNA, 201 bp, Homo sapiens
cagcctcttagagtgtaagccttttgaggccagggagcctgcctgtcttactcattgccgtatctccagcacataggaggcagatgaagacgaactgcagrctcttagacaagtcttctctgttaagttttaacttacgtaagtcatacatgaataatacatgaatctgttctcaagatattaaagcagtctggaatacca

SEQ ID NO: 131427 - DNA, 201 bp, Homo sapiens
ccgccggaaagcagcctctccaacgcctgccggaaagcagcccggcccggcattttacgacgttcgcagcgctacccttttccgctccacggtgacctccktgcggccgggtgcgggcggagtcttcctcgatcccgtggtgctccgcggcgcggccttgctctcttccggtcgcgggacaccgggtgtagagggcggtcg

SEQ ID NO: 131428 - DNA, 201 bp, Homo sapiens
agcccggcccggcattttacgacgttcgcagcgctacccttttccgctccacggtgacctccgtgcggccgggtgcgggcggagtcttcctcgatcccgtrgtgctccgcggcgcggccttgctctcttccggtcgcgggacaccgggtgtagagggcggtcgcggcgggcagtggcggcaggtgagacaggaggtggccg

SEQ ID NO: 131429 - DNA, 201 bp, Homo sapiens
gaagagcgaagacttttcgctcccagcttatatggatcggcgtgaccaccccttgccggaggtggcccatgtcaagcacctgtctgccagccagaaggcaytgaaggagaaggagaaggcctcctggagcagcctctccatggatgagaaagtcgagtgtgggtattgaagggacccacaggcgcgcccagcagctctcgg

SEQ ID NO: 131430 - DNA, 201 bp, Homo sapiens
aaaaataacaagattaaatagaccctaatactgtaattcaagtaagaaataattttgcagttttaatttgcacctgaagcgaactgtatgcattttcttcyttccttgccctgtcacatgcctgcgtgggcacgtgtgtgcacgtatgtgcgtgaacatgatgtggcctgggttggtgtatccttcagctctgtgtttcct

SEQ ID NO: 131431 - DNA, 201 bp, Homo sapiens
ttccaggccttggtgacctggagaactgaagtcgtgggaggttagtttataagccagcatctgattattcatagccatgcttgttgggtggtgaaataccytaactactttgtacagcacaccacgttttcagtagcaatttatgtgctcaccagtcacttagcaaaagatgacttcgtgaaggttcgagcaaggataagg

SEQ ID NO: 131432 - DNA, 201 bp, Homo sapiens
tttgtttgagacggactcttgctctggttgcccaggctggggtgcagtggtgcggtctcggctcactgcagtctctacctcccgggttcaagcgattcttstacctcagcctcccaagtagcggggattacgggcgcccactaccatgcccggctaatttttgtattgttagtagagacgggatttcaccatgttggccag

SEQ ID NO: 131433 - DNA, 201 bp, Homo sapiens
tgtgggcggtgccatgttcttcatcggtttcaccgcgctcgttatcatgtggcagaagcactatggtgagtagagagggaggaaggcatgggcgcctggaytggggctccagcctgcagtgcccattggtgggctgtgggggacctccataccttgaggctatgagatagggactgcattccagagttcatctcaggattg

SEQ ID NO: 131434 - DNA, 201 bp, Homo sapiens
acctgaagcgaactgtatgcattttcttccttccttgccctgtcacatgcctgcgtgggcacgtgtgtgcacgtatgtgcgtgaacatgatgtggcctggsttggtgtatccttcagctctgtgtttcctccttcacaagtgtggttttggggagaagtggttgaatgttgcagaggagggagctgctgacctttgtgcct

SEQ ID NO: 131435 - DNA, 201 bp, Homo sapiens
caaaacccaaaaactaccatcagaaccacccatccccacttgctcactgccccagccccctggccttactccattcctcccgtagagccccgagttgtggrtggtcgctcctgtctaatcattcaccctcgatacaaatgtgcttttagaacggcctctcctgaccatcctttctcaggaagctccctgtcacctcacctt

SEQ ID NO: 131436 - DNA, 201 bp, Homo sapiens
ctcgttatcatgtggcagaagcactatggtgagtagagagggaggaaggcatgggcgcctggactggggctccagcctgcagtgcccattggtgggctgtsggggacctccataccttgaggctatgagatagggactgcattccagagttcatctcaggattgtttccaggccttggtgacctggagaactgaagtcgtg

SEQ ID NO: 131437 - DNA, 201 bp, Homo sapiens
acgacgttcgcagcgctacccttttccgctccacggtgacctccgtgcggccgggtgcgggcggagtcttcctcgatcccgtggtgctccgcggcgcggcsttgctctcttccggtcgcgggacaccgggtgtagagggcggtcgcggcgggcagtggcggcaggtgagacaggaggtggccggtgcggcgccgccaggcc

SEQ ID NO: 131438 - DNA, 201 bp, Homo sapiens
ccttttccgctccacggtgacctccgtgcggccgggtgcgggcggagtcttcctcgatcccgtggtgctccgcggcgcggccttgctctcttccggtcgckggacaccgggtgtagagggcggtcgcggcgggcagtggcggcaggtgagacaggaggtggccggtgcggcgccgccaggccgggccgggtcggggggccg

SEQ ID NO: 131439 - DNA, 201 bp, Homo sapiens
ggcactaaaataacagaagcagatagagcagaaatcctcactcagatcttcctccttcctacctgtataacagtttgtggcttgccttgtctgttttgtgygtttcgttacgcgtatgtgagtatgtgcacgtgatttccagaaaggagaagcgcacgatactgcccgtgctctgtgactcctgagtgcatgcttcctctg

SEQ ID NO: 131440 - DNA, 201 bp, Homo sapiens; identical to SEQ ID NO: 22950

SEQ ID NO: 131441 - DNA, 201 bp, Homo sapiens
gaggccggcccgtggggactccgggctcggtggctccaggctcggggggccgccccgaagtgcccggtccatcttacccggtctcgcagcggctgcggacyggcctcgggcactgaccttggagcgcccgctggccgagggctcaggctgcggggaggcgggcccgcgctctgtgcctgcagcctccgcccttgctccttc

SEQ ID NO: 131442 - DNA, 201 bp, Homo sapiens
accaccccttgccggaggtggcccatgtcaagcacctgtctgccagccagaaggcactgaaggagaaggagaaggcctcctggagcagcctctccatggaygagaaagtcgagtgtgggtattgaagggacccacaggcgcgcccagcagctctcggaagcgtgtgtgtgacagagcctctgctcacttctgggcctactg

SEQ ID NO: 131443 - DNA, 201 bp, Homo sapiens
cagcacaccacgttttcagtagcaatttatgtgctcaccagtcacttagcaaaagatgacttcgtgaaggttcgagcaaggataaggggactcattcattkaatgactgtctcgactgttgtgaggactgcatctcaacagccagcatctgggggtcccgacctgatagtttgtgtgtgggcattgccgggttgctcgctc

SEQ ID NO: 131444 - DNA, 201 bp, Homo sapiens
aaaaaaattccaaaatgctctggggcaaaaagaagactaattccttgctgtttgtccttattcatagagaaggtgtacatttttatctttcagaatgttgrctaccagggtatttagcctagttggcaagcgagcaatttccacctctgtgtgtgtacgagctcatggtaagtgtgacttttcttacttttaaataggctg

SEQ ID NO: 131445 - DNA, 201 bp, Homo sapiens
tggttgcccaggctggggtgcagtggtgcggtctcggctcactgcagtctctacctcccgggttcaagcgattcttctacctcagcctcccaagtagcggrgattacgggcgcccactaccatgcccggctaatttttgtattgttagtagagacgggatttcaccatgttggccaggctggtcttgaacccctgacctca

SEQ ID NO: 131446 - DNA, 201 bp, Homo sapiens
ttattcatagccatgcttgttgggtggtgaaataccctaactactttgtacagcacaccacgttttcagtagcaatttatgtgctcaccagtcacttagcraaagatgacttcgtgaaggttcgagcaaggataaggggactcattcatttaatgactgtctcgactgttgtgaggactgcatctcaacagccagcatctg

SEQ ID NO: 131447 - DNA, 201 bp, Homo sapiens
tttcagagtcaccttgttagcattttttcttcttgcctttttttgtttgagacggactcttgctctggttgcccaggctggggtgcagtggtgcggtctcrgctcactgcagtctctacctcccgggttcaagcgattcttctacctcagcctcccaagtagcggggattacgggcgcccactaccatgcccggctaattt

SEQ ID NO: 131448 - DNA, 201 bp, Homo sapiens
ttttcagtagcaatttatgtgctcaccagtcacttagcaaaagatgacttcgtgaaggttcgagcaaggataaggggactcattcatttaatgactgtctsgactgttgtgaggactgcatctcaacagccagcatctgggggtcccgacctgatagtttgtgtgtgggcattgccgggttgctcgctcgtggtaatgact

SEQ ID NO: 131449 - DNA, 201 bp, Homo sapiens
gccccctggccttactccattcctcccgtagagccccgagttgtggatggtcgctcctgtctaatcattcaccctcgatacaaatgtgcttttagaacggsctctcctgaccatcctttctcaggaagctccctgtcacctcaccttgctgtgcttttccttataacactggatgcctcatgaatgcatgtctatttgagt

SEQ ID NO: 131450 - DNA, 201 bp, Homo sapiens
ggcctgaagctctgaagaacccctgaaaccatgaattggccattcttattctggaagatgcaattttgaggtttgcatgcaccaaggttttgagggtttaygtcgttataatagctttttccccccagtctccctgtcatggcatttacaacagctttacaagatgtaattcatataacagtcacccatttaaagtgtatc

SEQ ID NO: 131451 - DNA, 201 bp, Homo sapiens
ttcaaaatcaagagcaggtcaaatacaccccaatcgagcaccttccagtgctgtagaaacgcccttgatcccttgttctcgaaggaccagctgagcccccygggagagtgggatgcagggggctacagggccttgtggagtcttgccgtgaggactcgtgtgaaccccttggtggtttaactacaaaagcccacactgccc

SEQ ID NO: 131452 - DNA, 201 bp, Homo sapiens; identical to SEQ ID NO: 22951

SEQ ID NO: 131453 - DNA, 201 bp, Homo sapiens
ttttcagagtcaccttgttagcattttttcttcttgcctttttttgtttgagacggactcttgctctggttgcccaggctggggtgcagtggtgcggtctyggctcactgcagtctctacctcccgggttcaagcgattcttctacctcagcctcccaagtagcggggattacgggcgcccactaccatgcccggctaatt

SEQ ID NO: 131454 - DNA, 201 bp, Homo sapiens
gctggggtgcagtggtgcggtctcggctcactgcagtctctacctcccgggttcaagcgattcttctacctcagcctcccaagtagcggggattacgggckcccactaccatgcccggctaatttttgtattgttagtagagacgggatttcaccatgttggccaggctggtcttgaacccctgacctcaggtgatctgtc

SEQ ID NO: 131455 - DNA, 201 bp, Homo sapiens
tccagagtactttttccaaacatgtgatttgcacatttgttatgtttattgtttgttttccacttctagaagtgtgccgctaggcaggaatgtttgatttsttcactgatgatcccagatctctagaaccctgccttgcctgtagagggtgcttggtaaatgtgctctgaatgaatggctccatgatcctcgtttctaaga

SEQ ID NO: 131456 - DNA, 201 bp, Homo sapiens
ggcctcgggcactgaccttggagcgcccgctggccgagggctcaggctgcggggaggcgggcccgcgctctgtgcctgcagcctccgcccttgctccttcmaaaggtccctgtgcaacccctcccgggttttgcggggctcccgggcggcgctcggctttccagcctggaaggcgcctattgtttgctcacgcaagggcta

SEQ ID NO: 131457 - DNA, 201 bp, Homo sapiens
caggagggttgctctgctgggtttcggggtcactgtgccagggccccagtttatgtgctcaccagtcacttagctctgccagctgacaggatcttttgctrggcccccttctctgtgctgagtggaggtagcctctcagcatatctgctgggtaagacatagttaactgtaaattattgaaagaaactcagcaaaatgcat

SEQ ID NO: 131458 - DNA, 201 bp, Homo sapiens
agccgtcactgaagtcagttgggatatttgtgtggtgatgcacctgagtaaggggtgcccagatacaccagatctccccagcagaggctcaacagaaatcsgtccatgttgaagcggtgacaaacattccttacaatctggagtctttgtttttctctctctctaaaagaaatgtttggtatattaaccattgattttccc

SEQ ID NO: 131459 - DNA, 201 bp, Homo sapiens
gttctcaagatattaaagcagtctggaataccatcagccgtcactgaagtcagttgggatatttgtgtggtgatgcacctgagtaaggggtgcccagatayaccagatctccccagcagaggctcaacagaaatcggtccatgttgaagcggtgacaaacattccttacaatctggagtctttgtttttctctctctctaa

SEQ ID NO: 131460 - DNA, 201 bp, Homo sapiens
gggctcaggctgcggggaggcgggcccgcgctctgtgcctgcagcctccgcccttgctccttcaaaaggtccctgtgcaacccctcccgggttttgcgggrctcccgggcggcgctcggctttccagcctggaaggcgcctattgtttgctcacgcaagggctaggcccaaggagagaagctagacgcgggcgttcagccc

SEQ ID NO: 131461 - DNA, 201 bp, Homo sapiens
tgggcgattttagtcactgggactgagctaatggagttgaagcattgttgcgggcattgtacctccagaccagtgtgtaatacaaagagttcttgcagacrtaggacagaattggagaaacagcttctaacagtgggaagactctcagtacaaccaagctattccttacctttctgatttctgaacttttttccatgtgac

SEQ ID NO: 131462 - DNA, 201 bp, Homo sapiens
tgcccccctgctctactctttctccagagtactttttccaaacatgtgatttgcacatttgttatgtttattgtttgttttccacttctagaagtgtgccrctaggcaggaatgtttgatttcttcactgatgatcccagatctctagaaccctgccttgcctgtagagggtgcttggtaaatgtgctctgaatgaatggc

SEQ ID NO: 131463 - DNA, 201 bp, Homo sapiens
tgatcccagatctctagaaccctgccttgcctgtagagggtgcttggtaaatgtgctctgaatgaatggctccatgatcctcgtttctaagagctagcackatttctcacttagtcctggttggacacaggttccctggaacagtgctgtcgtggttatcttctcacgtgtctttgtttctgaacttgaaacgcttttgag

SEQ ID NO: 131464 - DNA, 201 bp, Homo sapiens
tccagggtttcaaggcgtgcacatgtctgtgtttcggttttcagaagtatcaccttggggtgactctcaacctacatggattttcaaagatttattcaatrtgtttttcagaaagtgttgtgaagagcgaagacttttcgctcccagcttatatggatcggcgtgaccaccccttgccggaggtggcccatgtcaagcacc

SEQ ID NO: 131465 - DNA, 201 bp, Homo sapiens
tgtacaggcggtattaggttttaaacactcagttgaatgtgatgcgtgccacggtccctgtgagctgtcacctccccccaccgctccctgaagaatggagyctgtcacggcagcacagtgctttaatgatctctagctttttcagagtcaccttgttagcattttttcttcttgcctttttttgtttgagacggactcttg

SEQ ID NO: 131466 - DNA, 201 bp, Homo sapiens
attaagttcaaggagagctttgctgagatgaacaggggctcgaacgagtggaagacggttgtgggcggtgccatgttcttcatcggtttcaccgcgctcgytatcatgtggcagaagcactatggtgagtagagagggaggaaggcatgggcgcctggactggggctccagcctgcagtgcccattggtgggctgtggggg

SEQ ID NO: 131467 - DNA, 201 bp, Homo sapiens
gttgagatagtcttgccccataacctgtctcacaccgtagtgtacggccccctcccgcaaagctttgacaaagagtgggtggccaagcagaccaagaggaygctggacatgaaggtgaaccccatccagggcttagcctccaagtgggactacgaaaagaacgagtggaagaagtgagagatgctggcctgcgcctgcacc

SEQ ID NO: 131468 - DNA, 201 bp, Homo sapiens
aaataattttgcagttttaatttgcacctgaagcgaactgtatgcattttcttccttccttgccctgtcacatgcctgcgtgggcacgtgtgtgcacgtaygtgcgtgaacatgatgtggcctgggttggtgtatccttcagctctgtgtttcctccttcacaagtgtggttttggggagaagtggttgaatgttgcagag

SEQ ID NO: 131469 - DNA, 201 bp, Homo sapiens
gcagaaagggattagagaagcgggttcaagctaatttccatactaacattttatgggtttctgctattaggaataattccttcactacctacgtcaaaggkttataaggataaataagttaataggcgtaagtacttaaaaaaacataaaaagcatgcaaaaagcatgcacaaatgcaaggatttttttaatggaaaataa

SEQ ID NO: 131470 - DNA, 201 bp, Homo sapiens
ctgttttgtgtgtttcgttacgcgtatgtgagtatgtgcacgtgatttccagaaaggagaagcgcacgatactgcccgtgctctgtgactcctgagtgcaygcttcctctgcatttgggctcctaggtcggcctcgtcctgtggacgttgccccttgtttcgtgccatccacacattcctgatgcccccctgctctactct

SEQ ID NO: 131471 - DNA, 201 bp, Homo sapiens
ctcctgagtgcatgcttcctctgcatttgggctcctaggtcggcctcgtcctgtggacgttgccccttgtttcgtgccatccacacattcctgatgccccsctgctctactctttctccagagtactttttccaaacatgtgatttgcacatttgttatgtttattgtttgttttccacttctagaagtgtgccgctaggc

SEQ ID NO: 131472 - DNA, 201 bp, Homo sapiens
aacaggtgtgagccagtgtgcccggcctatgaaccacttttcttctgggactgtccctccctccctgcagttttctttttcttttttttttttttttttaytgatcattcttgggtgtttctcgcagagggggatttggcagggtcataggacaatagtggagggaaggtcagcagataagtgaacaaaggtctctggttt

SEQ ID NO: 131473 - DNA, 201 bp, Homo sapiens
ataacaggtgtgagccagtgtgcccggcctatgaaccacttttcttctgggactgtccctccctccctgcagttttctttttcttttttttttttttttttattgatcattcttgggtgtttctcgcagagggggatttggcagggtcataggacaatagtggagggaaggtcagcagataagtgaacaaaggtctctggt

SEQ ID NO: 131474 - DNA, 201 bp, Homo sapiens
gataacaggtgtgagccagtgtgcccggcctatgaaccacttttcttctgggactgtccctccctccctgcagttttctttttcttttttttttttttttttattgatcattcttgggtgtttctcgcagagggggatttggcagggtcataggacaatagtggagggaaggtcagcagataagtgaacaaaggtctctgg

SEQ ID NO: 131475 - DNA, 201 bp, Homo sapiens
attttcatgtctgataaataccatgatagtgacgaggcaactgctgcgaggctcctgtttaatatggccggggtgacattccggtaagtggggagaatgcrggcggggggacggggtagggtgaaggctgatgaagagatgtatttgaccttgtctcctccttgtgatgcctgacttccacacttggaggtgtctttagaa

SEQ ID NO: 131476 - DNA, 201 bp, Homo sapiens
tgagccacctggggattctttttacagcaacattttgcattgagatttgaagtcttacagatttttatgattatctttgctaagaaatggttgtgagctayattttacttgcaagtaagttcaactacctttgattcatggcagaaaattcctttgggactgtaaagttttccagcgcttcatggtgttggcgttcagcag

SEQ ID NO: 131477 - DNA, 201 bp, Homo sapiens
ttttgcattgagatttgaagtcttacagatttttatgattatctttgctaagaaatggttgtgagctatattttacttgcaagtaagttcaactacctttrattcatggcagaaaattcctttgggactgtaaagttttccagcgcttcatggtgttggcgttcagcagcagtgggaccatggtcataggtgacgtgccct

SEQ ID NO: 131478 - DNA, 201 bp, Homo sapiens
atgaactcaaccgtggtgccttctgagactttaaattcaaattatttgtatactctcttgttcagtgattcttaaaagaatttgttttgttcccaaatgtyttctttttaattgttgtagaagaaatgaggaacgagtgaaaagttaatgagcaaaaaaaaaaaaaaaaaaagttggtttatgtttgcatttttagaacgt

SEQ ID NO: 131479 - DNA, 201 bp, Homo sapiens; identical to SEQ ID NO: 22971

SEQ ID NO: 131480 - DNA, 201 bp, Homo sapiens
aatgacaattaaaaaagaggaagcagcagatttatctaatttacaagattaaaaaacttgggaagatttttattttcatgagggggtgggttgctaaaccygtgatgaagtattcagttgacatttttcattcctttttctttgtggaattcattatagtgaagcacatttaatcaaaataccaatgttatcaaatgaggt

SEQ ID NO: 131481 - DNA, 201 bp, Homo sapiens
aggagctcacatcttatctgagaatctcgagttgggcggttgcttcccattttctacctgcagacccaggatcagtgcgctgcctgaggcaggccagggakagctggaattaattagaacacacatcccagctcctcttccagtgcccagtgctcaggcccggttcccctctaaacgctattaacacacaaaggaggcttt

SEQ ID NO: 131482 - DNA, 201 bp, Homo sapiens
acacagggtcctggagcgaaaggcagagtgtgatcagttgcaccattccggtggaggaagcagggtcatcggttgagagagctgggagttggagcttggaygccgggagaagagaagagctgattgtgtggggtgggagaagaatgtcctaggaatgtagggcagtgtcaggagctcacatcttatctgagaatctcgagt

SEQ ID NO: 131483 - DNA, 201 bp, Homo sapiens
ttgcaggcaccaagcctttgggcatgtttccttctaggtcggcgcctgcatcgtgaattcagaaaacaagattgtcgggattgggtacaatgggatgccaratgggtgcagtgatgacgtgttgccttggagaaggacagcagagaataagctggacaccaaatacccgtacggtagggcaagttttatgtcccattctgc

SEQ ID NO: 131484 - DNA, 201 bp, Homo sapiens
tatgaatatattgtttgctcccagaaatacacaataaaacctagttcttagagatttttgcaaatgtttgtattgctttttacttttacttcctgaagacttttttttttttaatctggatagggatatgcatgtctgtaatacacacattagctaagtaaagccccatagtgcttaaaacaacaattgccatattcacac

SEQ ID NO: 131485 - DNA, 201 bp, Homo sapiens
gagttctgaaagcgttctcggtcaaatcagagctgtaaaaagctgttggaggcaatgccacagggagaatgtgcatgtgtacatatggataaattaatagaaacaggcgcctttccctccctcctctaacgattaaagactggcgcagttctaagatgaatatagaccatatggagataggatgcatgaataggaggggac

SEQ ID NO: 131486 - DNA, 201 bp, Homo sapiens
gcggggggatcatgaggtcaagagatcgagaccatcctggccaacatggtgaaaccccgtctctactaaaaatacaaaaattagctgggcgtgttggtgcrtgcctgtagtcccagctacttgggaggctgaggcaggagaattgcttgaaactgggaggcggaggttgcagtgagccgagatcgcgccattgcactccag

SEQ ID NO: 131487 - DNA, 201 bp, Homo sapiens
aaaccccgtctctactaaaaatacaaaaattagctgggcgtgttggtgcgtgcctgtagtcccagctacttgggaggctgaggcaggagaattgcttgaamctgggaggcggaggttgcagtgagccgagatcgcgccattgcactccagcctggcaacagagtgagactttgtctaaaaaaaaaaaaaaaaaaaaaagaa

SEQ ID NO: 131488 - DNA, 201 bp, Homo sapiens
caagactgcgccactgcactccagcctgggtgacagagcaagactctgtctcaaaaaacaaaacaaaaacaaacaaacaaaaaacaaaacaaaaacaaagaaaagaaaaagctagaagtgtagaactgtaaacctttggcttgactgtctctggattttccccttgaaattagggaaggctgcttcttagagtttgttgcc

SEQ ID NO: 131489 - DNA, 201 bp, Homo sapiens
ggggttcagcaacgtggaggtcagaggtgatattgccaagtacagtttcagccaagtacagtttcagcggagcaatagggttggaagccacattggagccwcttgaaggagaacagagggtgagacaatggggacagctttatttagatcaggctttgggatgtgtggctgagaagagagcagagaagtggggtggtggct

SEQ ID NO: 131490 - DNA, 201 bp, Homo sapiens; identical to SEQ ID NO: 22977

SEQ ID NO: 131491 - DNA, 201 bp, Homo sapiens; identical to SEQ ID NO: 22978

SEQ ID NO: 131492 - DNA, 201 bp, Homo sapiens
gccaagtacagtttcagcggagcaatagggttggaagccacattggagcctcttgaaggagaacagagggtgagacaatggggacagctttatttagatcrggctttgggatgtgtggctgagaagagagcagagaagtggggtggtggctggaatggagataaggccacgggaaaggattgcattgtttgtaggatagga

SEQ ID NO: 131493 - DNA, 201 bp, Homo sapiens; identical to SEQ ID NO: 22980

SEQ ID NO: 131494 - DNA, 201 bp, Homo sapiens
tctgtagcagacatttgtttgttgatgggaatagtccaagacagagagagtgagatagagatttctggaacagaggcaaggtgctcaaggctgtgaggatyggtctctcagacaccctggttgataataagaggaaggactgagaggggaggtgggaggacagcagacacagggtcctggagcgaaaggcagagtgtgatc

SEQ ID NO: 131495 - DNA, 201 bp, Homo sapiens
gctgattagcgctctgtttctcttggtgctgttgtcacgcattttaggcatcacgtgtgcatttcacatgaacagtgggaagggagttggcatggcctacygtggatgcagtacagctatttccacatcctcctcctcctgacctgattgtgtgcccttagcccatagggaggcagtgtaattagagttctgggggcttta

SEQ ID NO: 131496 - DNA, 201 bp, Homo sapiens
aggatgggaagcactcacatgtagcaagtagcttgtctgtgctgtgctcttgacagatgttagtctttctaaccgttcttggagagggacttttctctctrtttcttaggtccggaggctgaggctgaagaagatgcttgactggtaggttgtggacagtgtgtgaggacatggtagggaggaagcagagaagacaggcag

SEQ ID NO: 131497 - DNA, 201 bp, Homo sapiens; identical to SEQ ID NO: 22982

SEQ ID NO: 131498 - DNA, 201 bp, Homo sapiens
gtcctgaaaaaacatttgtaatccacatacatttttctacagaaacaatgttacttgaagattcagttccccttgcacctgcgagcagtgcctagaacccycgttttctggattttctcagcactccttcagcagtcctactgtgttgctttagcttgcactcgggctgctgctgatttccatgctggggcatcgcagccc

SEQ ID NO: 131499 - DNA, 201 bp, Homo sapiens
tccccttgcacctgcgagcagtgcctagaaccctcgttttctggattttctcagcactccttcagcagtcctactgtgttgctttagcttgcactcgggcygctgctgatttccatgctggggcatcgcagcccagctggtgtgagctctgcagggaccagacccacctccatcccgcagcccacacacccagccctgtta

SEQ ID NO: 131500 - DNA, 201 bp, Homo sapiens
attcaaattatttgtatactctcttgttcagtgattcttaaaagaatttgttttgttcccaaatgttttctttttaattgttgtagaagaaatgaggaacragtgaaaagttaatgagcaaaaaaaaaaaaaaaaaaagttggtttatgtttgcatttttagaacgtaatttgaaaaattactcctcactaaaggtagtcg

SEQ ID NO: 131501 - DNA, 201 bp, Homo sapiens; identical to SEQ ID NO: 22968

SEQ ID NO: 131502 - DNA, 201 bp, Homo sapiens
gccctgagatccagggctctgctgcctgtgctgagcctggcaggcttcactggcaacctgctggcctgcaccacaccagtgcactgatagtcggcgtctckgcagagggtcacagccccttgcagagatagctgagggatgtgcatggtgtctctgtgggttcctttttttactacttggaagcagggtcggctaaccagg

SEQ ID NO: 131503 - DNA, 201 bp, Homo sapiens; identical to SEQ ID NO: 22969

SEQ ID NO: 131504 - DNA, 201 bp, Homo sapiens
tggtagtggccacacaggctggccctgagatccagggctctgctgcctgtgctgagcctggcaggcttcactggcaacctgctggcctgcaccacaccagwgcactgatagtcggcgtctctgcagagggtcacagccccttgcagagatagctgagggatgtgcatggtgtctctgtgggttcctttttttactacttgg

SEQ ID NO: 131505 - DNA, 201 bp, Homo sapiens
gtttaatgattgtactttaatttcagtaactttccggggtaattagactaattattcaagtactgagaagtttaaacattcacaagttttataataggaaygccaaaccttggtgaattttgcaaatgtaacaactttggcatagaaaatttaggatgaaagtagcctgccagattgaaacattggggattctctcttttt

SEQ ID NO: 131506 - DNA, 201 bp, Homo sapiens
aaaagctagaagtgtagaactgtaaacctttggcttgactgtctctggattttccccttgaaattagggaaggctgcttcttagagtttgttgcctgtctragccccagggaaaattccttcagagattgcctgggagggtccagccatagctttacttttccttgcattccttggagaatatgcaagcaatgctggaaaa

SEQ ID NO: 131507 - DNA, 201 bp, Homo sapiens
gtattagaaagcagcagatatgtatttcagtgactggacactgtctgcaagcacactcagaaaaggtcattaatcatagacgctgaaagtgctccagctgsttccgcctgtcttttgcagcatctgtaggtgcgtacactaagggagctcccattgttaccttacaggtataaaagaagtgattttcatgtctgataaata

SEQ ID NO: 131508 - DNA, 201 bp, Homo sapiens
ttttgtaaggttaggccctgtattttatgtctgagaatgaacagactggcgctgttggaagtgaagggagagtaaggccatccaaatgggaaagattgtgycttcaggccaaggcgtgatgtacgacctttcttctttgttgactctcctggtaggttttcttctgggtttttctcatgaagaatccaagtcaacatttag

SEQ ID NO: 131509 - DNA, 201 bp, Homo sapiens
tttactctcatcattcttcctccgttaggctaaattaatatagttaacaagcttttgtttggaatagcagttcaaatctgggatgtgcagatcagaactgrcgattattacagtagctgttatttatggagtgctgacagtcccctcaagtcccatgaatgaaacagaaaggggttcttctgtcattctctgtgctagaac

SEQ ID NO: 131510 - DNA, 201 bp, Homo sapiens
tgaagggagagtaaggccatccaaatgggaaagattgtgccttcaggccaaggcgtgatgtacgacctttcttctttgttgactctcctggtaggttttcytctgggtttttctcatgaagaatccaagtcaacatttagtctaatttatatatttttactaatgttcctggacctcaatcatgttaaataagccccataa

SEQ ID NO: 131511 - DNA, 201 bp, Homo sapiens
aacatttagtctaatttatatatttttactaatgttcctggacctcaatcatgttaaataagccccataaatttctttctaaattgcctaggggcaacttytccatgtttgaaagaaaaagttaagaggtacctggagagagaggaggaactgaggactgcaaagcagtctgggtttccaggatgtgaaaagtagtttagg

SEQ ID NO: 131512 - DNA, 201 bp, Homo sapiens
agaaagaagggaagtgattagttgtttttaagtccatgcaaagataatttttcacagtgcggttcaaagtcccctataaaaatggtgaaagtggagggtckatatgttaaaggtctgcattgaactgtgtgacggccacagtcagtatgtcaccgagtctgggcagtgaaatattggccctggggctggactttgatatgg

SEQ ID NO: 131513 - DNA, 201 bp, Homo sapiens
gcagaggcagtaggagtagctgtggctgagccctgagggctccagcgcttaaggtggttggagaaagaagggcccgtgagaaggagcacacagagcagtgytttaagaaagaaggcctcattttgggaggccgaggcggggggatcatgaggtcaagagatcgagaccatcctggccaacatggtgaaaccccgtctctac

SEQ ID NO: 131514 - DNA, 201 bp, Homo sapiens
taaattttctctgtgcttctttcaaatgatagatgccatagtaaatttaaaatattgaatatgataactgagcatgaattttttaattctgcaattaaaakactttgttcaaaatgccattaattttgagtttaggtgaataaagggaagcagaattcttctgtcatttttccttctccatgtgagttatcactttttagg

SEQ ID NO: 131515 - DNA, 201 bp, Homo sapiens
ttgagttctgcagtccccctggttttattccctgcttccacagcggcagaccagccagttgcaggcaccaagcctttgggcatgtttccttctaggtcggygcctgcatcgtgaattcagaaaacaagattgtcgggattgggtacaatgggatgccaaatgggtgcagtgatgacgtgttgccttggagaaggacagcag

SEQ ID NO: 131516 - DNA, 201 bp, Homo sapiens
gattgataaatgtagctgaagttgcccatgtttagagatttaaaggttcagtgtggttgggttgaactggaaaacagacttactaaaatgcttctctcaayttctgttttgtcatgtttttcttctagacccaacatgagtgaagtttcctgcaagaaacgggacgactatttggaatggccagagtattttatggctgtg

SEQ ID NO: 131517 - DNA, 201 bp, Homo sapiens
ttcaagcctgagtcttatcaaggcaaaaaaaaaaaaaaaaaatctatagttaacgatgaagtatttctcccttttgctttcccggcatccaccaagagcartacataatttaattattgaatctacaagctggaccatgagatgaagaatgatgtgtctgctgtagtgagaaattagatagaaccaactgtttactctcat

SEQ ID NO: 131518 - DNA, 201 bp, Homo sapiens
atgatcatcgatgaagcaagtgagtcgggactgaaatgtatgagcgccataagtttaggccactgctcatttaaggcctcagaactcctggaagtgttacrtgtagaaggttggcaggctggagagggtaggggagaccttgaagattcccatatttatattctaggtggcttgtgtgatgtgggccatggccggatgtca

SEQ ID NO: 131519 - DNA, 201 bp, Homo sapiens
gcagtccagcaggctggcaggaggaagacagggccttagccaggagaggggcggggagcaagaggggcttgtctggtggaactatcttagagaagtgatayctgttgatttctatatggtgctcccttccccagttccacctttatttcaaatcatttgaaaaccttgataatgagccagattgctgctttactaatagga

SEQ ID NO: 131520 - DNA, 201 bp, Homo sapiens
tttgctttagattttggggaagccataattgggaacacttcataagcttttgggagagtgtacttggtgggggttgtggggggcttaactgtcgcggctaytccgttgttaaattattgacgtgcaggatagggactgcggaggctggcagtgacatatgaggccctgtcaggatatctttcaataattaagaaacaagta

SEQ ID NO: 131521 - DNA, 201 bp, Homo sapiens
ataatggccttaccacagtcagaaatctctttagccctgagcactaccattggggctaagtggctcccctgggtgccgtgagttgtcatccgcagctttascaagaggcattgaggaagggggcagggatggggagcagagtgggagagagggaaaaagaaatgggtattctcacaggcaggctggattgggcaggccagg

SEQ ID NO: 131522 - DNA, 201 bp, Homo sapiens
actgtccgtgctctgaacggctcagcctggggtggcggcagaaggcgttgcaggtctgttctcagtggcagcaggcactccatgcctggccttctgacccyggtcctagcgggagccaccacaccaggctgccacctgttcaggtcagctttggcagaacaaccctcaggtctaaggacatcgttttctttaaggaaaatc

SEQ ID NO: 131523 - DNA, 201 bp, Homo sapiens
tggcagcaggcactccatgcctggccttctgaccccggtcctagcgggagccaccacaccaggctgccacctgttcaggtcagctttggcagaacaaccckcaggtctaaggacatcgttttctttaaggaaaatcctgtgtcactaaaaatgagggatttttaagcaacctggagagttcagaactagaactagagttca

SEQ ID NO: 131524 - DNA, 201 bp, Homo sapiens
tgtattagaaagcagcagatatgtatttcagtgactggacactgtctgcaagcacactcagaaaaggtcattaatcatagacgctgaaagtgctccagctscttccgcctgtcttttgcagcatctgtaggtgcgtacactaagggagctcccattgttaccttacaggtataaaagaagtgattttcatgtctgataaat

SEQ ID NO: 131525 - DNA, 201 bp, Homo sapiens
ggctcatgcctgtaatcccagcacttttggaggccgaggcaggtggatcacctgaggtcaggagttccagaccagcctggccaacatagcgaaaccctgtytctactaaaaatacaagaattagctgggcatggtgacgggtgcctgtaatcccagctactcgggaggctgaggcaggagaatcatcgcttgaaactggta

SEQ ID NO: 131526 - DNA, 201 bp, Homo sapiens
gccacggtgaacttccccatgtgtgcgtgtcagcacaccaatgagccagctcaggtgggcactttcatgccccagggtcttgtggagccgtgaagcggagstgcgcttagggtggggaaggcacttgacctcggccgtcctggccgctctaggtgccttcaggcctcactgctcatcagcaaccagccagaccacgtgggc

SEQ ID NO: 131527 - DNA, 201 bp, Homo sapiens
cacttttggaggccgaggcaggtggatcacctgaggtcaggagttccagaccagcctggccaacatagcgaaaccctgtttctactaaaaatacaagaatwagctgggcatggtgacgggtgcctgtaatcccagctactcgggaggctgaggcaggagaatcatcgcttgaaactggtaggcagaggttgcagtgagccg

SEQ ID NO: 131528 - DNA, 201 bp, Homo sapiens
ctcaattataagcccaaatacaaggtattagcaagagagatttaacacctacagtcacacttggagttacaaggtgttaatgagaaagacataccaaggartatatttctcccccctttggccgcgtggcttcactattggtgtacaatatttgaaacctcaagttgtgaaactctgaaccaggagggtttcctgtattat

SEQ ID NO: 131529 - DNA, 201 bp, Homo sapiens
tgtatggtggtcctgagaggttttagaatagagaggagtccaaagagagcaggtgaatcaaaaggttccaggccagaagagaccttgggttttcatgatgrcgagaccctcctgtggcctgtggagctggctctcatcaggtcatcagagccaactgtgcgcattgcttcccaagtacacgtcatgttgggagtgggagat

SEQ ID NO: 131530 - DNA, 201 bp, Homo sapiens
tagtatcttttgagtaagaaactccacaatgacaaaaactacttcgtatcagtaacattttttgttaatctgaactttattaattggatagcatttatgtrtgtttgggaaaagtttatgtatgtcctggacatgggatttatccagttgtggatatgcttggaccccttgcaataccttagtagtgtctcagggttctat

SEQ ID NO: 131531 - DNA, 201 bp, Homo sapiens
agccacatgcgtggctcactgtaacatttcttcaaaggggagtgcagtggactgaatgtgtctccccccaaattcacatgttgaaaccctaattccaatgygctgatatttggaggtggggcctggggggacgtaattaggccatgagggtggagctctcctgaatgggattagtgcccttctaaaagggaccccagggag

SEQ ID NO: 131532 - DNA, 201 bp, Homo sapiens
aattaggccatgagggtggagctctcctgaatgggattagtgcccttctaaaagggaccccagggagctcagttactctttttccatgtgcaaggataggmggagaagatggctatctgcaaccctgaaaggagaccttgccagaatctaaccatgctggtgtcctgacttccagcctccagaaccatgagaaataaatgt

SEQ ID NO: 131533 - DNA, 201 bp, Homo sapiens
agccacggtgaacttccccatgtgtgcgtgtcagcacaccaatgagccagctcaggtgggcactttcatgccccagggtcttgtggagccgtgaagcggasctgcgcttagggtggggaaggcacttgacctcggccgtcctggccgctctaggtgccttcaggcctcactgctcatcagcaaccagccagaccacgtggg

SEQ ID NO: 131534 - DNA, 201 bp, Homo sapiens
gcagcagatttatctaatttacaagattaaaaaacttgggaagatttttattttcatgagggggtgggttgctaaacccgtgatgaagtattcagttgacwtttttcattcctttttctttgtggaattcattatagtgaagcacatttaatcaaaataccaatgttatcaaatgaggtaaaatactcttggtgattcaga

SEQ ID NO: 131535 - DNA, 201 bp, Homo sapiens
cagcaaggttcagagtttcagggctatggagatcctggagctgatagacgagtgtcagccacaaaggtgaagctggatttcaggaccacaacaggcggcasctgggagttacgaagggggcagggctgggttgcggcctcaggtgctcctctgggttggggcttctctcctcagccccgcaggtgcgggtcgggcaagcct

SEQ ID NO: 131536 - DNA, 201 bp, Homo sapiens
ataatcaatggaaaacctttgaacaactgcatagaaaagaaattaagtagattatttttacgaatcaaggggcaaactcagctgtgatcgtgtggggtttyagataaacagagggacacaccagtgtatatatgagtcttctcccacccactaaaatcaaccagctccatgtaagcatgttttactttaagatataattgt

SEQ ID NO: 131537 - DNA, 201 bp, Homo sapiens
cagttttcagaaaggaataaataatgatattttaatataatttattttgatatttatgtatttttatagttacagagttaattatttttaaagtgctagartttactatttcattatgaatatctatgaaagacatatagtaacaaaataactccttgttttgaagagcacacatgttaggaaaagctgaaatgtttgggg

SEQ ID NO: 131538 - DNA, 201 bp, Homo sapiens
tcctgcttcagcctcggagtagctgtgtgattacaggcacgtgccaccacgcctggttaatttttgtatttttagtagagatggggtttcaccatgttggycaggctggtctcaaactcctgacctcaggtgatccacccgcctcagcctcccaaagtcctgggattacaggcttgagtcactgtgcccggccacttcttt

SEQ ID NO: 131539 - DNA, 201 bp, Homo sapiens
tgtgagctatattttacttgcaagtaagttcaactacctttgattcatggcagaaaattcctttgggactgtaaagttttccagcgcttcatggtgttggygttcagcagcagtgggaccatggtcataggtgacgtgccctggccccttgtgctggtcattagggatacagctcagtgtatctcatgaactcaaccgtgg

SEQ ID NO: 131540 - DNA, 201 bp, Homo sapiens
atggttgtgagctatattttacttgcaagtaagttcaactacctttgattcatggcagaaaattcctttgggactgtaaagttttccagcgcttcatggtrttggcgttcagcagcagtgggaccatggtcataggtgacgtgccctggccccttgtgctggtcattagggatacagctcagtgtatctcatgaactcaac

SEQ ID NO: 131541 - DNA, 201 bp, Homo sapiens; identical to SEQ ID NO: 22972

SEQ ID NO: 131542 - DNA, 201 bp, Homo sapiens
cccgtggttggacagtgcggaggggtcctgggtgagcactgagtgggcctcccaatggggcctgtgccttcttcagtcacccagagcccccagcagatctktaagcagtgacctggaagccaagggccatgcagtacatttgcagcacctgccccacaccccagacttcccagctctcctgacttcccgtgtagctgattt

SEQ ID NO: 131543 - DNA, 201 bp, Homo sapiens
gttgtcttctcaaggtttttcaggccacagagaagtaaatgtttggattgcctgggatgtcacagaaatgtttgctgataattgactcaaatgcaaagtctttttttttttttttgctttcgttttaagattttcaaaattaatttaaaaaataaggggatactgcctggagttggatagctcaacccattctttcctcat

SEQ ID NO: 131544 - DNA, 201 bp, Homo sapiens
tttttcaggccacagagaagtaaatgtttggattgcctgggatgtcacagaaatgtttgctgataattgactcaaatgcaaagtctttttttttttttttgctttcgttttaagattttcaaaattaatttaaaaaataaggggatactgcctggagttggatagctcaacccattctttcctcatctacattaatggtga

SEQ ID NO: 131545 - DNA, 201 bp, Homo sapiens
cattactagataattgtggtgaagggagactgtatctgagccagtgttgctgcctgtcatggctaataaatgacaataaggaaaccatctttcactgaacygttggtagaaggactacatttaaaaggcagaatttgtgagtgaaatgataggaactccatttccctgacacattttctgctttcttcccttttactcttt

SEQ ID NO: 131546 - DNA, 201 bp, Homo sapiens
ttttcaggccacagagaagtaaatgtttggattgcctgggatgtcacagaaatgtttgctgataattgactcaaatgcaaagtctttttttttttttttgctttcgttttaagattttcaaaattaatttaaaaaataaggggatactgcctggagttggatagctcaacccattctttcctcatctacattaatggtgac

SEQ ID NO: 131547 - DNA, 201 bp, Homo sapiens
ccttggggagaagctttccagaaggagggagttttgtgcagtcttttgcctcgcaggcattactagataattgtggtgaagggagactgtatctgagccartgttgctgcctgtcatggctaataaatgacaataaggaaaccatctttcactgaactgttggtagaaggactacatttaaaaggcagaatttgtgagtga

SEQ ID NO: 131548 - DNA, 201 bp, Homo sapiens
tttctaggatcactataagaatagtagaattgtcctatccagagaattctgcagatgttcatgttccagttaatagaggtttgctttgaactggtgccttsgggagaagctttccagaaggagggagttttgtgcagtcttttgcctcgcaggcattactagataattgtggtgaagggagactgtatctgagccagtgtt

SEQ ID NO: 131549 - DNA, 201 bp, Homo sapiens
taatggccttaccacagtcagaaatctctttagccctgagcactaccattggggctaagtggctcccctgggtgccgtgagttgtcatccgcagctttagsaagaggcattgaggaagggggcagggatggggagcagagtgggagagagggaaaaagaaatgggtattctcacaggcaggctggattgggcaggccagga

SEQ ID NO: 131550 - DNA, 201 bp, Homo sapiens
tttagcttgcactcgggctgctgctgatttccatgctggggcatcgcagcccagctggtgtgagctctgcagggaccagacccacctccatcccgcagcccacacacccagccctgttagctctccacccagtgcaggccagtttgcaaccagaacttaccagaacatacctgggaaactgcgaaagttttaaactgtttt

SEQ ID NO: 131551 - DNA, 201 bp, Homo sapiens
tacctggagagagaggaggaactgaggactgcaaagcagtctgggtttccaggatgtgaaaagtagtttagggatgaaggggaccgaatcctcagatcctygatttaacctcaccctccctcgtcggagtgggaagagaggatggagttgggggagggtaagactgtcttctcagcacagcttcagagccggtggtagtgg

SEQ ID NO: 131552 - DNA, 201 bp, Homo sapiens
ttagcttgcactcgggctgctgctgatttccatgctggggcatcgcagcccagctggtgtgagctctgcagggaccagacccacctccatcccgcagcccacacacccagccctgttagctctccacccagtgcaggccagtttgcaaccagaacttaccagaacatacctgggaaactgcgaaagttttaaactgtttta

SEQ ID NO: 131553 - DNA, 201 bp, Homo sapiens
tcttaagatatgacttcctcacaacttgtaagagcttcttagtaattaagatcaaatttgttctttccgtcctgaaattgaatgtcctctggtttcgttastcagtccatgaatttgataacttgctgtttcttttcctgcagaatttaatttcacttaaagcttcctgccgctcctcccctgcctggccttctactagtt

SEQ ID NO: 131554 - DNA, 201 bp, Homo sapiens
aaaaaaaaaaaccaaagcatatgaattgtcttataattacctgaaacagaaagtctcttctggcaatcaaggccttctaagcattaatctgatattttcarcatttgattcttttccttttaaacaaggttgggaataactggagggttgtgtgtcactctttgtgcttatcaaatatatatgtactgtttgcagatttat

SEQ ID NO: 131555 - DNA, 201 bp, Homo sapiens
tcatcgcttgaaactggtaggcagaggttgcagtgagccgagatcacgtcattgcactccagcctggacaacaagagcaaaactccatctaaaaaaaaaaraaaaagaaaaaaaagggcagtgactatgggagaaaaatcaaagaccaatattttaccttgggaagtgcccacaaaggcaggaaaaataaaaggacctaca

SEQ ID NO: 131556 - DNA, 201 bp, Homo sapiens; identical to SEQ ID NO: 22979

SEQ ID NO: 131557 - DNA, 201 bp, Homo sapiens
ctgtttaatatggccggggtgacattccggtaagtggggagaatgcgggcggggggacggggtagggtgaaggctgatgaagagatgtatttgaccttgtctcctccttgtgatgcctgacttccacacttggaggtgtctttagaaatgcaagggcataagaatttaaagactattataggggtagatatttaagagcag

SEQ ID NO: 131558 - DNA, 201 bp, Homo sapiens
tcaaaaggttccaggccagaagagaccttgggttttcatgatgacgagaccctcctgtggcctgtggagctggctctcatcaggtcatcagagccaactgygcgcattgcttcccaagtacacgtcatgttgggagtgggagattggctgtgtgaaaaaatgtctacaccacggaaattggcagatatatggtgacccagc

SEQ ID NO: 131559 - DNA, 201 bp, Homo sapiens
tgtttaatatggccggggtgacattccggtaagtggggagaatgcgggcggggggacggggtagggtgaaggctgatgaagagatgtatttgaccttgtctcctccttgtgatgcctgacttccacacttggaggtgtctttagaaatgcaagggcataagaatttaaagactattataggggtagatatttaagagcagt

SEQ ID NO: 131560 - DNA, 201 bp, Homo sapiens
cagagccaactgtgcgcattgcttcccaagtacacgtcatgttgggagtgggagattggctgtgtgaaaaaatgtctacaccacggaaattggcagatatrtggtgacccagcaaacacagttgacacctgaaacataatttttaggaatagtatttaaccttgtatgcgggatccattctgacctctatccttcccttct

SEQ ID NO: 131561 - DNA, 201 bp, Homo sapiens
gtttaatatggccggggtgacattccggtaagtggggagaatgcgggcggggggacggggtagggtgaaggctgatgaagagatgtatttgaccttgtctcctccttgtgatgcctgacttccacacttggaggtgtctttagaaatgcaagggcataagaatttaaagactattataggggtagatatttaagagcagtg

SEQ ID NO: 131562 - DNA, 201 bp, Homo sapiens
atgttgggagtgggagattggctgtgtgaaaaaatgtctacaccacggaaattggcagatatatggtgacccagcaaacacagttgacacctgaaacatamtttttaggaatagtatttaaccttgtatgcgggatccattctgacctctatccttcccttcttacctatttcattaaaacagaagaaaaagctggtgtaa

SEQ ID NO: 131563 - DNA, 201 bp, Homo sapiens
cctggctcactgcaacctccgcttctcaggttcaagcggttctcctgcctcagcctcccctgccacacccagctaatttttttgtactttcagtagagacrgggtttcaccatgttggccaggatgacctcatgagctgcctgcctcagcctcccaaagtgctgggattacaggtgtgagccacctggggattctttttac

SEQ ID NO: 131564 - DNA, 201 bp, Homo sapiens
cggaaattggcagatatatggtgacccagcaaacacagttgacacctgaaacataatttttaggaatagtatttaaccttgtatgcgggatccattctgayctctatccttcccttcttacctatttcattaaaacagaagaaaaagctggtgtaactcattgaactgatttcatgacctgcagtttgaaaaacattattt

SEQ ID NO: 131565 - DNA, 201 bp, Homo sapiens
tctcttgttcagtgattcttaaaagaatttgttttgttcccaaatgttttctttttaattgttgtagaagaaatgaggaacgagtgaaaagttaatgagcaaaaaaaaaaaaaaaaaaagttggtttatgtttgcatttttagaacgtaatttgaaaaattactcctcactaaaggtagtcgttttttgctatatataagc

SEQ ID NO: 131566 - DNA, 201 bp, Homo sapiens
tagtttcctctctgaggacagtctgggggctgaggcctggctgagtcctgtctcctcaggacaggcccaaaaggaggtacagggcggcctgggggacagcraggttcagagtttcagggctatggagatcctggagctgatagacgagtgtcagccacaaaggtgaagctggatttcaggaccacaacaggcggcagctgg

SEQ ID NO: 131567 - DNA, 201 bp, Homo sapiens
ttcctctctgaggacagtctgggggctgaggcctggctgagtcctgtctcctcaggacaggcccaaaaggaggtacagggcggcctgggggacagcaaggktcagagtttcagggctatggagatcctggagctgatagacgagtgtcagccacaaaggtgaagctggatttcaggaccacaacaggcggcagctgggagt

SEQ ID NO: 131568 - DNA, 201 bp, Homo sapiens
aagacagggctgagggggtctggggaagggtacgggaaccagcaagagagaccagggtggggctgatcttacaccctccaccgaacacttgagtttcctgyttgtcagtgtccacttttgcgtatgtgggattttggattgttccttttagagtctcatgtgtacccgacacactactgttcatattgcccagtagcttta

SEQ ID NO: 131569 - DNA, 201 bp, Homo sapiens
agcaaggttcagagtttcagggctatggagatcctggagctgatagacgagtgtcagccacaaaggtgaagctggatttcaggaccacaacaggcggcagstgggagttacgaagggggcagggctgggttgcggcctcaggtgctcctctgggttggggcttctctcctcagccccgcaggtgcgggtcgggcaagcctg

SEQ ID NO: 131570 - DNA, 201 bp, Homo sapiens
agattaaaagtgttcatggggttcagcaacgtggaggtcagaggtgatattgccaagtacagtttcagccaagtacagtttcagcggagcaatagggttgsaagccacattggagcctcttgaaggagaacagagggtgagacaatggggacagctttatttagatcaggctttgggatgtgtggctgagaagagagcaga

SEQ ID NO: 131571 - DNA, 201 bp, Homo sapiens
cacccgaacacgagagggtggctgaggagagtggccaggccttcatctctctgacccagagtacgtgctcagtaaatgatcatcgatgaagcaagtgagtygggactgaaatgtatgagcgccataagtttaggccactgctcatttaaggcctcagaactcctggaagtgttacgtgtagaaggttggcaggctggagag

SEQ ID NO: 131572 - DNA, 201 bp, Homo sapiens
tgtttgctcccagaaatacacaataaaacctagttcttagagatttttgcaaatgtttgtattgctttttacttttacttcctgaagactttttttttttwaatctggatagggatatgcatgtctgtaatacacacattagctaagtaaagccccatagtgcttaaaacaacaattgccatattcacacgaaagaatcct

SEQ ID NO: 131573 - DNA, 201 bp, Homo sapiens
ttcagaggggggaatggaatgtgttaacacttagtaaattcttcatgagctgcaaccaaagtttttctttctttccctttcaacccacagtgtgccatgcsgagctgaatgccatcatgaacaaaaattcgaccgatgtgaaaggctgtagtatgtatgttgccttgttcccttgtaatgaatgcgctaagctcatcatcc

SEQ ID NO: 131574 - DNA, 201 bp, Homo sapiens
ttaaaacaacaattgccatattcacacgaaagaatcctggagccgccgtaaggagccaagggttccaggtttggtatgttcatgcccagtgactgtggggytgttagaggcatcacctgacatttatttctcaatatctctatgaagtaaattatcactgaagattcttccagttctcttattccaaggaaaaatataagt

SEQ ID NO: 131575 - DNA, 201 bp, Homo sapiens
ttactctcatcattcttcctccgttaggctaaattaatatagttaacaagcttttgtttggaatagcagttcaaatctgggatgtgcagatcagaactggygattattacagtagctgttatttatggagtgctgacagtcccctcaagtcccatgaatgaaacagaaaggggttcttctgtcattctctgtgctagaacc

SEQ ID NO: 131576 - DNA, 201 bp, Homo sapiens
atatttattcaaacagagatacttgcttgacattgggaaatccctgtgataaatgcaggatactggtgaaggcaagagagttgcaatgcaagggaatgggygctccccttgctgatgctgtctgaagggtcggtgccaaccaattagtggaggtgtaaattttctctgtgcttctttcaaatgatagatgccatagtaaat

SEQ ID NO: 131577 - DNA, 201 bp, Homo sapiens
ttgtctgctggtgatggggatgatctctggagtcatctttctttctttttaaaatcctaactctattttataatgcgttggagtttttcagacaccatcayatgtggtcatttgttcattcagcagacacttctagggcatttattatgtgttttacatgccgggcactctgcagaggtcaacagaatgccatgggagggt

SEQ ID NO: 131578 - DNA, 201 bp, Homo sapiens
acacttctagggcatttattatgtgttttacatgccgggcactctgcagaggtcaacagaatgccatgggagggtctctgtttttgaagagtttgcagacyaattgtggaggaggtagacattaatgaaacaaacagatatgattgaatattcctttctgaggcagtcactttttttttcttttttaatgagatagggacc

SEQ ID NO: 131579 - DNA, 201 bp, Homo sapiens
acttctagggcatttattatgtgttttacatgccgggcactctgcagaggtcaacagaatgccatgggagggtctctgtttttgaagagtttgcagactarttgtggaggaggtagacattaatgaaacaaacagatatgattgaatattcctttctgaggcagtcactttttttttcttttttaatgagatagggaccag

SEQ ID NO: 131580 - DNA, 201 bp, Homo sapiens
acattttagcggcaacaagacagccatgtaaagtcaacttgaaattaaaaatcatcatcttaatctatgtggctctttcaagcctgagtcttatcaaggcaaaaaaaaaaaaaaaaaatctatagttaacgatgaagtatttctcccttttgctttcccggcatccaccaagagcagtacataatttaattattgaatcta

SEQ ID NO: 131581 - DNA, 201 bp, Homo sapiens
caaacagatatgattgaatattcctttctgaggcagtcactttttttttcttttttaatgagatagggaccagaccccgaatctgccagccccttgatctyggacgtcccagcctccagagctgtgagaaatacatttctgatgtttagaagctacaaatttatgatatttgttagagcagcccaaacaaactaggacagg

SEQ ID NO: 131582 - DNA, 201 bp, Homo sapiens
tcaggccacagagaagtaaatgtttggattgcctgggatgtcacagaaatgtttgctgataattgactcaaatgcaaagtctttttttttttttttgcttkcgttttaagattttcaaaattaatttaaaaaataaggggatactgcctggagttggatagctcaacccattctttcctcatctacattaatggtgactga

SEQ ID NO: 131583 - DNA, 201 bp, Homo sapiens
gtggtgtacgatgcgagggccttggagggggtgggtgctggggctggagaggcctggctggagatggggtgtattttaggggcagcatcaggaagatggcrtgataaagggtggaagaggtagattgactccccccaaatggttctggttgcagtagctagacaggcatgctgaggaggagaagcaagattttggaatgat

SEQ ID NO: 131584 - DNA, 201 bp, Homo sapiens; identical to SEQ ID NO: 22973

SEQ ID NO: 131585 - DNA, 201 bp, Homo sapiens
tgggtggctgatgaagggagcatgtgcagaggcagtaggagtagctgtggctgagccctgagggctccagcgcttaaggtggttggagaaagaagggcccrtgagaaggagcacacagagcagtgctttaagaaagaaggcctcattttgggaggccgaggcggggggatcatgaggtcaagagatcgagaccatcctggc

SEQ ID NO: 131586 - DNA, 201 bp, Homo sapiens
agaatttaaagactattataggggtagatatttaagagcagtgacaggaaaatctgaagaccatttgtttaatgattgtactttaatttcagtaactttcyggggtaattagactaattattcaagtactgagaagtttaaacattcacaagttttataataggaacgccaaaccttggtgaattttgcaaatgtaacaac

SEQ ID NO: 131587 - DNA, 201 bp, Homo sapiens
ccagcgcttaaggtggttggagaaagaagggcccgtgagaaggagcacacagagcagtgctttaagaaagaaggcctcattttgggaggccgaggcggggrgatcatgaggtcaagagatcgagaccatcctggccaacatggtgaaaccccgtctctactaaaaatacaaaaattagctgggcgtgttggtgcgtgcctg

SEQ ID NO: 131588 - DNA, 201 bp, Homo sapiens
ataaaagaagtgattttcatgtctgataaataccatgatagtgacgaggcaactgctgcgaggctcctgtttaatatggccggggtgacattccggtaagyggggagaatgcgggcggggggacggggtagggtgaaggctgatgaagagatgtatttgaccttgtctcctccttgtgatgcctgacttccacacttggag

SEQ ID NO: 131589 - DNA, 201 bp, Homo sapiens
aagaaagttggtcagaaggcatcatctcccttttgtcatcaacaactggaaagaaaagtatcctactgaactaccccaatttcctggccttgtctcttaarttccaaagagagccacggagagaagcatggtagtggccacacaggctggccctgagatccagggctctgctgcctgtgctgagcctggcaggcttcactg

SEQ ID NO: 131590 - DNA, 201 bp, Homo sapiens; identical to SEQ ID NO: 22976

SEQ ID NO: 131591 - DNA, 201 bp, Homo sapiens
gttttctttttaattgttgtagaagaaatgaggaacgagtgaaaagttaatgagcaaaaaaaaaaaaaaaaaaagttggtttatgtttgcatttttagaaygtaatttgaaaaattactcctcactaaaggtagtcgttttttgctatatataagcggcaaaagaaaatttactatttttttgcattagagagactccaag

SEQ ID NO: 131592 - DNA, 201 bp, Homo sapiens
gtttttctttctttccctttcaacccacagtgtgccatgcggagctgaatgccatcatgaacaaaaattcgaccgatgtgaaaggctgtagtatgtatgtygccttgttcccttgtaatgaatgcgctaagctcatcatccaggcaggtaggaaccgggtctttccatttgtcacatttgcattgctgcctgctcgtcagt

SEQ ID NO: 131593 - DNA, 201 bp, Homo sapiens
caggcttgttttgtcaaaaacttcaggcatcccattcacactaaatgcaagaaggagatgggtggcagagtggggatgaggcttctctgctcttggctatmcctttgatcagaaaagcagaaactttctcagaagccccagcaagtattctcttccatcccttgggccatagccagtcacatggccacccctagctgcaag

SEQ ID NO: 131594 - DNA, 201 bp, Homo sapiens
taagctcatcatccaggcaggtaggaaccgggtctttccatttgtcacatttgcattgctgcctgctcgtcagtagctcattgctgatgtgtttgatcttraattgctattgtttagatctaaattaattgcactatcagctttgcaagatatttcccgtgttttgtttttgaatggtgccaggtattctaagactaattg

SEQ ID NO: 131595 - DNA, 201 bp, Homo sapiens
ctgaaataggaaatttcttaagtttttacttaagaccagagactgtttagggcccatgtgctgtgatttctgattgataaatgtagctgaagttgcccatrtttagagatttaaaggttcagtgtggttgggttgaactggaaaacagacttactaaaatgcttctctcaacttctgttttgtcatgtttttcttctagac

SEQ ID NO: 131596 - DNA, 201 bp, Homo sapiens
aacttcttaaactgcaagctgccaaaaaacaacacaggcattgcatataattactgtcaatttactgttctctgacatattgtgcatagatttgggggagrgaagaaatgaacttctgtcagaaacaaggtcagctgggagtctgtatatgaaattttaatttgtatctaatacatggtagatatttgaggatctcaacat

SEQ ID NO: 131597 - DNA, 201 bp, Homo sapiens
tgagccaagactgcgccactgcactccagcctgggtgacagagcaagactctgtctcaaaaaacaaaacaaaaacaaacaaacaaaaaacaaaacaaaaasaaagaaaagaaaaagctagaagtgtagaactgtaaacctttggcttgactgtctctggattttccccttgaaattagggaaggctgcttcttagagtttg

SEQ ID NO: 131598 - DNA, 201 bp, Homo sapiens
gagaaagcagtaaatagatgaaatatttgggaacgtgaagctataggtttcaaattcaaacttctgaaataggaaatttcttaagtttttacttaagaccwgagactgtttagggcccatgtgctgtgatttctgattgataaatgtagctgaagttgcccatgtttagagatttaaaggttcagtgtggttgggttgaac

SEQ ID NO: 131599 - DNA, 201 bp, Homo sapiens; identical to SEQ ID NO: 22983

SEQ ID NO: 131600 - DNA, 201 bp, Homo sapiens
gtgattttcatgtctgataaataccatgatagtgacgaggcaactgctgcgaggctcctgtttaatatggccggggtgacattccggtaagtggggagaaygcgggcggggggacggggtagggtgaaggctgatgaagagatgtatttgaccttgtctcctccttgtgatgcctgacttccacacttggaggtgtcttta

SEQ ID NO: 131601 - DNA, 201 bp, Homo sapiens
gagccaagactgcgccactgcactccagcctgggtgacagagcaagactctgtctcaaaaaacaaaacaaaaacaaacaaacaaaaaacaaaacaaaaacaaagaaaagaaaaagctagaagtgtagaactgtaaacctttggcttgactgtctctggattttccccttgaaattagggaaggctgcttcttagagtttgt

SEQ ID NO: 131602 - DNA, 201 bp, Homo sapiens
atgaacaaggcactgaagctccagggggatctctcctcttttaacaaactccagaaattgagcatttgttggttcattgtaaggtctcaattctccatcawctaaactgaaaccattgctccacagtttaagcaaaatctgaacatcttgtagctgattttctccatgcatatattcagaccgcttacaaaaggaattacc

SEQ ID NO: 131603 - DNA, 201 bp, Homo sapiens
atcctgtgtgtactattgaatctttgtatcaaacgactcccatctgctaacctgatttgaatttttgttgttggcactgaatcatcaataagaacaaccgygttaagtattgatttatcctcctcttctggagaggaaggtgtactgactatttcaggtgtaagccttccaagtttttgcccttctccactaaaagccttg

SEQ ID NO: 131604 - DNA, 201 bp, Homo sapiens
gatgtaattaaggttactatggatttcaagacgaggcgataagcccagattatgcaatgggactaatttaatcatgagtcctgcagagaacctctccaggstggtgtcagagagatgtggtaacagaagggtcatagagatgaaacagtgctggtttttaagatagaaggccgcaagccaaggaatgcggatgttctctag

SEQ ID NO: 131605 - DNA, 201 bp, Homo sapiens
ccatcatacatgggagcagataacttgttttctaggttcgcaagtgcacagatggaggagaattatgccccagaaatcacacccagatcctctcccaaatktagatggctttagtgtgagatttgagacttttgagttggtgagactcagataagattttggatttagagttgatgctgtaataatgggttgtgacttttg

SEQ ID NO: 131606 - DNA, 201 bp, Homo sapiens
tatacactctatttgcatggtgaacaaaagagtttcttttgaagctgttcatgtccctttactaaaccctccctgcacgtgcgtacacacacacacacacwctctctctctctctctctctcccactcactcactcactcactcacataattcctgagctccctctactggatttttaacatcaaaaaattatttgaattt

SEQ ID NO: 131607 - DNA, 201 bp, Homo sapiens
tgttttttgaatctgtaaatcttttaattaaagaaaatcagttgccagtaagaagggctggctgtttaaattggttctggtgtcaatgctggaatgctagygcgcctgagtgtctaaggcttacctcctactcttagctcctagtttgtgaagagcaatttttagcagcttgtctccagacgaaatacaccttaaaatttt

SEQ ID NO: 131608 - DNA, 201 bp, Homo sapiens
tgaatactgtaggcagctcttcatgcaatggtgagtgtctgtgcatccaaacgtagatacagtaaaaatacaaattataatcttatgggaccacggtgtayatgtggtctgttgtcgacagactgagaggtcattatgccatgtatgtctgtagccccacaaaggtgactgtccttctgacctccattactgtagatgagc

SEQ ID NO: 131609 - DNA, 201 bp, Homo sapiens
gcactgctaaccctgagccgagggccattcttctgggagagagtggcagtaaagagcccttagtaggaactggcagcagctggggcatgggtgccctggcstggttaaggaatctgggtggggagccagctgtatgtacagcttgaaggatttttgcatatggacactctcctgtagatggaacaccactcacatcaaagg

SEQ ID NO: 131610 - DNA, 201 bp, Homo sapiens
agaagtgtgctgataatttttcagctttgaggttcgtgtgatggtgattgcttggaagtcacttgtgctccagaactaagtactgtgcagttaagggtggkcgtggtagcacttagggtcttccacgttaatgaaaatgttttatgagatcaaaggatttctacagttaggagagacttcagagaatctcagggccaaatc

SEQ ID NO: 131611 - DNA, 201 bp, Homo sapiens
gctctgagagatttatagcttcatatcttatactttaataatttgggataaaatgattacacagatgacttcaaagcagaaaaatacagatttgtttttcrttgtatgtgtagaattaaatatatataccgtccatgtgtttgtaaacaagtttttataatattttggaaaaaatattgaggatgtgcctggagagagaag

SEQ ID NO: 131612 - DNA, 201 bp, Homo sapiens
tgccatgttgcctaggctggtctcgaacacctgggcccaagtaatctgcttgtctcagccctcagcctcccagagtgctgggattgcaggtgcaagtcacygcgcccagcccctcgtgtgttttctaaccatttctttgccatgtgttttctaagaactgtggtgtatgtggtggggatgaatgctctttagctctgagag

SEQ ID NO: 131613 - DNA, 201 bp, Homo sapiens
cgcgtgtgtatgtgtgtgtgtagtgtttgttggttttgtctttatttttgtttttgttttctgaaacaaggtctcactttgtcacccaggctggagtgccrtggcgtgatctcagctcactgaaaccccgcctcccaggctcaggtgatcctcctacctcagcacccttgagtagctgggacgataggcgtgccaccacac

SEQ ID NO: 131614 - DNA, 201 bp, Homo sapiens
cactattttaaaatatgattaaatattcactggctatattttaagggggcaaaaaataaaggctctactgcagtatcagacaactaaaataagaaagtagrctaccaaagatagcctgttagaaaagtgcttggctttcatctggcatacgtggggtttttagtgggtactgtttcagagtttcattgactgcatttgtga

SEQ ID NO: 131615 - DNA, 201 bp, Homo sapiens
ggtacccaaagtcaggcaagtgtccgtgggcgtctgtgccagggggtgccagccagagaacataccttcctccctgggaattgctctcctcttaagttttktctgctcttttctggtagagattgatgtaggatattctactgtccaagcgtttcataaaaaataatttgtgtttttcttttctaaaccaacaaatactga

SEQ ID NO: 131616 - DNA, 201 bp, Homo sapiens
ggtctgctggtctgagatggtgtgttggcctcccaggagaggagggtctggtcccagaatgcaaatagctgcacctcttccttactccagaaagttgtgcratgggaaaatgtcagctgaacccagcagtgtgcttagtgatttaattgatttatattttggcacaagtcccttatctcatcaccagctggtagtacggtg

SEQ ID NO: 131617 - DNA, 201 bp, Homo sapiens
aaaataatgataatatcattgctgttttgagtcctatgttaaaatgtccctaagatcctcacaccccttccttaagccttcctgtaaggctagttgatgtyattgcttgcttgtaacatctttcctcctcaccctcccatttttttttaacagagcctgatttgaaaaagcggatccgtgtgcacttgctcaatgcccatg

SEQ ID NO: 131618 - DNA, 201 bp, Homo sapiens
gagcctctcagtgatcgagcatcccacaccacctaggaaacgttctcgccagaaagttaaatctaaatgtggtggaacctctacatctaactacaaaattrcaggaaacataggggttagaagtacatctttaacaacaccatgagggtgcaattagcaaaatctagattatgggaaattttacaggatgaaagtttcttc

SEQ ID NO: 131619 - DNA, 201 bp, Homo sapiens
ggactctgcgagcgaggaggtcttcaccaccatggcctccgtctgccacacgctgatggtgcagcaccgcatgatggtacccaaagtcaggcaagtgtccrtgggcgtctgtgccagggggtgccagccagagaacataccttcctccctgggaattgctctcctcttaagttttgtctgctcttttctggtagagattga

SEQ ID NO: 131620 - DNA, 201 bp, Homo sapiens; identical to SEQ ID NO: 23068

SEQ ID NO: 131621 - DNA, 201 bp, Homo sapiens
tagtagtgctaggattcctttctcattctgacgtacttttgttagtcttaatgttaaagattcaggtttgacagatgaatttactgcttttatctataaarcagtgttttgtttggtaagttattataaattatataaattgtattcatccaagtttccagacaatacagtcagcaatacccaatgttatatatattcaca

SEQ ID NO: 131622 - DNA, 201 bp, Homo sapiens
atcttctagaaatattttggtgagcagggtcaggggtttctgtgttttggagcctgaacctggaagccatagaactagaagtcgaggaaaaaaaggaaggrtcgagccaggtctggtggctcaagcctgtaatcccagcactttgggaggccaaggcgggagaatcacgaggtcaggagttctagaccagcctgaccaaca

SEQ ID NO: 131623 - DNA, 201 bp, Homo sapiens
aggtttctgtataatctgttcacttatagcttatgtacaatttattttaaaattgtacactacaaaaatagtagtgctaggattcctttctcattctgacstacttttgttagtcttaatgttaaagattcaggtttgacagatgaatttactgcttttatctataaagcagtgttttgtttggtaagttattataaatta

SEQ ID NO: 131624 - DNA, 201 bp, Homo sapiens
taggtttctgtataatctgttcacttatagcttatgtacaatttattttaaaattgtacactacaaaaatagtagtgctaggattcctttctcattctgaygtacttttgttagtcttaatgttaaagattcaggtttgacagatgaatttactgcttttatctataaagcagtgttttgtttggtaagttattataaatt

SEQ ID NO: 131625 - DNA, 201 bp, Homo sapiens
tatataaaacctaatgtgattgtatgagatttttccaaggtcaaagttcacccttgataagctcttttgcctttaggtttctgtataatctgttcacttayagcttatgtacaatttattttaaaattgtacactacaaaaatagtagtgctaggattcctttctcattctgacgtacttttgttagtcttaatgttaaag

SEQ ID NO: 131626 - DNA, 201 bp, Homo sapiens
ctctctcactcaacactgaaaaattctgtgagcagaaatgtggggttttttttcccacacaccaagcaattcttcagtggacaccaactaggtattctacrattcagttcaattctgatgccgtccacccggagataatgtcagatcccatcatctgagggcttagtcctgcaagactacacccacttcagaggccgatta

SEQ ID NO: 131627 - DNA, 201 bp, Homo sapiens
aggaatgcctgaagaagctggacacaaagcagcagaccaacaccctgctcaacctggtgtggagggactctgcgagcgaggaggtcttcaccaccatggcytccgtctgccacacgctgatggtgcagcaccgcatgatggtacccaaagtcaggcaagtgtccgtgggcgtctgtgccagggggtgccagccagagaaca

SEQ ID NO: 131628 - DNA, 201 bp, Homo sapiens
ggaggatggcagactgtcagtatcatacataacagaggaatgcctgaagaagctggacacaaagcagcagaccaacaccctgctcaacctggtgtggaggractctgcgagcgaggaggtcttcaccaccatggcctccgtctgccacacgctgatggtgcagcaccgcatgatggtacccaaagtcaggcaagtgtccgt

SEQ ID NO: 131629 - DNA, 201 bp, Homo sapiens
tggtacatgaggtttgtataccgttcggctgcctatatatttgtttagttttccttgctagcatgttaaagaactaacttaagtttggacctgtagagatkgttaaaagcatttaaaaattggcaagttttttcccttattacaggaaaaggcactaaattttaaatatgtgtttttccttttagggtattataggtctct

SEQ ID NO: 131630 - DNA, 201 bp, Homo sapiens
gtatatgtttgtagtgtagaggacgttccagttgagcacatttatggagactggttgttctggtatgttctaggaggatggcagactgtcagtatcatacrtaacagaggaatgcctgaagaagctggacacaaagcagcagaccaacaccctgctcaacctggtgtggagggactctgcgagcgaggaggtcttcaccac

SEQ ID NO: 131631 - DNA, 201 bp, Homo sapiens
tgatttttaaaaattttatgaagtgagcagtataaatcctaacacaaaagaacctttggtctcgacatcctcataggtagaaacccaagcacttcaggacwcctgggctcgagaagtatttgtcagcattaaaaatgtgcgtgagactagttgtgaagggaggtctggagagccgtggctgcagacagaattataagcagc

SEQ ID NO: 131632 - DNA, 201 bp, Homo sapiens
atgatgcctagctttctttgcccgaagaaaaatgtgatttcgtatatgtttgtagtgtagaggacgttccagttgagcacatttatggagactggttgttytggtatgttctaggaggatggcagactgtcagtatcatacataacagaggaatgcctgaagaagctggacacaaagcagcagaccaacaccctgctcaac

SEQ ID NO: 131633 - DNA, 201 bp, Homo sapiens
taggcttctctacagtttagcctttaatgccaggtttctgagacatctttggtttctaatatcttccatgtcaacacggatgatcacagggtatgtattayacagacttataaattgagctcaagggcacaggaagtggcagcctaatcaaaaatgttgccagaacctgtttttaagtcctgtttatactgggcttatttc

SEQ ID NO: 131634 - DNA, 201 bp, Homo sapiens
aaggagatgagatgcactgttaaagagattcgtatctgagtttaattaaatgcagcttcttggtacaattcatggattataatacttcttacagtgttttrtaatctttaatttttcgtgttcatttctccactgtccatttttcttgtctgtgaacttagtgccagcataccgtttggcacataacgagaattcttttaa

SEQ ID NO: 131635 - DNA, 201 bp, Homo sapiens
cagtttgctgctggccacttggcccatcagttttcatagacagtagaaaagttttaagctttttaagtctttcagtgtgtgttaaaagatggaaaaagaarcaatagaaaactggattgtgttttttagttgtaggtcaaagacaatcatcaatgatgccttttactttagaagagctgataatgttgtctcgatgccttc

SEQ ID NO: 131636 - DNA, 201 bp, Homo sapiens
ttccctgattatatttgtttgatgttatgttttaattagttcccaaactaagactaattttaaagtgactggtttttttcttcttttctttaattcaaggkctatggtaccgttgcttcaggtgatatccaggggttctcctatgtcttttgaagattctagtcgaatcatcccactcttttatctttttagctccttgtt

SEQ ID NO: 131637 - DNA, 201 bp, Homo sapiens
tgaagattctagtcgaatcatcccactcttttatctttttagctccttgtttagtcattcactaatttccatacatgataacgaattcttcggtgatcccrtagaaggtaaggattttgagaaaccagtttgctgctggccacttggcccatcagttttcatagacagtagaaaagttttaagctttttaagtctttcagt

SEQ ID NO: 131638 - DNA, 201 bp, Homo sapiens
ttgtgatggcaaaaagaagcccttttctgtgagcgggtttggtgtccggctcgacctgggttcctgcaccaccgctgtgtgctcctcctcgagtgaatgtrtggctcactgtgcattgtgctgccgagctcacgtgtgtgacgcggatatgttctttcttttcaggttatcaccaatctagtgaaaatgttgaagtccaga

SEQ ID NO: 131639 - DNA, 201 bp, Homo sapiens
caagaatcttcaccttaagaattgtcagtgggaatgcaggggaaagtacaagtgaactaattaaggttttaaaatgtgttttagtgggtttggagtccccrccgctgtctgtgtctgaggaaagacagcttgctgtcctgacagagttgccttttgtggttccatttgaggaacgagtaaaggtatgcaatttggcttctt

SEQ ID NO: 131640 - DNA, 201 bp, Homo sapiens
ggcagctggcctcccgctaagctgctgagcagacagagcagggaggaagggcaaagcctgtggtgactttggtcatggtgtatttgtccagcccactctcrgggtgaggggagtcgggctccaccccctaaagggcagcagtagcaaagcgtctgtggacataatcctgaagccaccgtagaagggagcttcaggtttagc

SEQ ID NO: 131641 - DNA, 201 bp, Homo sapiens
gcttgcattgctaggacttacagctttagtgggcagaagtatcatcaggggagcgtgttaaaatgcatattctcctgagacgagattgcgccattgcactscagcctgggtaacaagagggaaactttgtttcaaaaaaaaaaaaaaaaaaaatttcagcttctctgttcctgccctaagacttgggttagaaaccctgga

SEQ ID NO: 131642 - DNA, 201 bp, Homo sapiens
atcttttggggtaggtctcacagccacaggggagggagggcgggctttcctagcttggtaacagcacagatttacacctttgggagccgtgtctcggtgtmtcatcaaatggctggttgtctgaggcagctttttgtggtattagtacagagatttgctaaattgtacgttgatcttcagtgtatcgcttttttttttttt

SEQ ID NO: 131643 - DNA, 201 bp, Homo sapiens
ttatcagcacacatgctgctgacttttccaggttgacaagaggctctcccaccgcccgccgctgccctttgcgtcccagcggcttgttatgtgtagccccrctcctcctgcactcgtacacccctcgagagacaccagtgtggtgctgaggggaaagttgtgaaaagggcaaagacaaaacaaggtctggctgggtgtcct

SEQ ID NO: 131644 - DNA, 201 bp, Homo sapiens
gtgtttctcaggagcatactggtcactcagatggctctttttcaagagtctgttcaaatcttttacttcattttttaaggtgggttgtctcttgacaatayggatatccttttcccgtccaaggctgtcccgataaacctggagctacatcctatgttgtctctcacacgaggcaccgttccagcacttctctctgttgca

SEQ ID NO: 131645 - DNA, 201 bp, Homo sapiens
gggttccacagggatgcccacgcactcccagcctgcactgcactaccttgttgcagtgtggaatattgggagaaaccgtcacattccctcatgggattgckgtaagaattgtaaagtgggtaacaaagttccctcggggcctggagctcactctgtcattgactcttgggtgagagtgaggcacagctggctctgcactct

SEQ ID NO: 131646 - DNA, 201 bp, Homo sapiens
aataaacttttagtttgaaaaacacattgtatacattctttttgtgaagcaggagtttgcaaactttttatgtaaatggcgagatagcaaatattttaggrtttgtggtccacatatggtctctattatgtatttttcttgccttttgcttacaactctttaaaaataaaggaatcatgcttcactcaacagccgtacaaa

SEQ ID NO: 131647 - DNA, 201 bp, Homo sapiens
tgttttcagttaagtgaaaaggagttgggcttgtcttgagaagaattcctctaaattatggcactgagaaaacttctctgcagtggtgggctcaccacttycatcctgtggtagttctggtagcactcctggtatgaaaaccctagcacaggtaatttcacctctttgaaataagcagtgatcctggagaaaggtgaatat

SEQ ID NO: 131648 - DNA, 201 bp, Homo sapiens
cattacctgaatataacacctttaccagcttttaataaattgcttatatctcaactgtagtaaaattttcaaatgatcctgagccttccatataatttcasttaattttctggacactgtctgtaatatttgtttaggattactgtcagaactagtctttattaactgatttttccaaaatacttagctggaccaaaggta

SEQ ID NO: 131649 - DNA, 201 bp, Homo sapiens
tttcattgtttaataacgttttatggcaaagaaatgttaatgtcgaagaaactacttaaaaatataggcaaagacaaggctatgtggcgtatttatgactrgctacacttaagaggctatctttgccgagggtggtggctcacgtgtataatcccagcgctttgggaggctgaggttggtggatcactcgaggccaggagt

SEQ ID NO: 131650 - DNA, 201 bp, Homo sapiens
tctggatggaattaatgtcacaataagaagaaattacatttatgaagatgcttatgacaaactttctccagaaaatggtatatataattctttctgtgtaktatttggcaggtggaggctagggaattgttttagaaaatggtggttctttaaaaattagtgtccatcatcttgttccataatgacttaaaaactgaaatg

SEQ ID NO: 131651 - DNA, 201 bp, Homo sapiens
gttacatctaacggacttgaagtctggaccacttggtcctcttggtcctctgtcaaaactacagaaattaaacgcatactcatttcagccttgctgcttgrcgtgttactattttttagactccttagtttgttgaaaacttagggaaacagtattccgagttaattaaaagtaaactgaaagttgtggaatttgatcttt

SEQ ID NO: 131652 - DNA, 201 bp, Homo sapiens
gaggatcgtttgagcccaggtattcaaggctgcagtgagctatgatcctgcgactgcactccagcctgggcggttgaatgttgattcagttctcaagcatrgatgcgatagcaataaattaatcttaacgtaggggaaaatgtctcctgccccagtcttcacattgtttgccttctactctaggagtaagcataatgccac

SEQ ID NO: 131653 - DNA, 201 bp, Homo sapiens
aaactgggcaaaggagcagctttagaaatacttaaatatgatatacattatatattatctatacatttattgataaaaatcaagatttgataccttgactrttagcatttatttcagaatttatgaagatacaaaagataagatttagcagtttattctttggtaggttgtaagaggtcttttgtttctaataaccttaca

SEQ ID NO: 131654 - DNA, 201 bp, Homo sapiens
cctgccgtccctcattctcgggcaaaaattccagtgctgcacctccagacagtaggaaggcccgtgactgcctctgttgagagggtttctttctctaaaaytgttctccacctgttctccacacccccgggggtaattagactacctctgtttgacctgggaaaataggatcactgtaaatacacatctctctgaagactg

SEQ ID NO: 131655 - DNA, 201 bp, Homo sapiens
ttgacgtatacataacctgaaacccacaatccgaaaactcttaacacaagaatgaaagggtttttttgcaaacagattcatgaatgcagaattccagtatrtaatgtggtccctgacatatagttggcacttaataaatgtttgttacatgaatgggcaccatatgttgtatttggactcttgcattaaagatgaggtatg

SEQ ID NO: 131656 - DNA, 201 bp, Homo sapiens
attcctctagtgtttggctttaaaacccagcattgcctccggagttgagctaaggtggaacatggtgaagactttctgtaaaccgagaacgtgcagagaargaactgagagccagtctagagaggcagtgaaagccgttgaatctacccattctggacttcagttaagtgcaggctctttccaggcttgctttctgaagtt

SEQ ID NO: 131657 - DNA, 201 bp, Homo sapiens
ctgtaccccaacccggctgctcagatgcttgtgggagattcttttgccagacattactacttcctaggcagaatgcttggaaaggtaaagtaaccttcatrtaaaaatagacctcggaccaaaagatgttgacattttatgtttatgtgtggttgttatccaggtttaccataaaatactgtttgttttaaatttggatgc

SEQ ID NO: 131658 - DNA, 201 bp, Homo sapiens
ggactcctggcctcaggcagtccttctgccttggcttcccaaagtgctgggattacagaagtgagcctctgtgcaatgttttaatttatttatttattttwttttttgagactgtcacgcaggttgggatgcagtggcacgatcttggcttactgcaacctctgtctcccagattcaagtgattctccggcctcagccacc

SEQ ID NO: 131659 - DNA, 201 bp, Homo sapiens
ccatccctactagaatgatcctacttgaattaattacagcggacaaaggaatacatgattattcctctagtgtttggctttaaaacccagcattgcctccrgagttgagctaaggtggaacatggtgaagactttctgtaaaccgagaacgtgcagagaaggaactgagagccagtctagagaggcagtgaaagccgttga

SEQ ID NO: 131660 - DNA, 201 bp, Homo sapiens
agccatttacacagcctcggcatgagatgggattgtaccagtgctctagagatcatggaagtgcacagcacgtacacaggtgatacacacatgccacgccrttttagagaagggacttgaggatccatggactttagtttccgtgggggtctggaccaatccctgtgggtcctgaagggtgggtgtgctttgcatttcata

SEQ ID NO: 131661 - DNA, 201 bp, Homo sapiens
cccccgggggtaattagactacctctgtttgacctgggaaaataggatcactgtaaatacacatctctctgaagactggatgttttctctttttttgagayggagtttttgctcttgttgcccagactggagtgcagtggcacaatctcggctcactgcaacctccacctcccgggttcaagcgattctcctgcctcagcc

SEQ ID NO: 131662 - DNA, 201 bp, Homo sapiens
gggaagccaaggcgggcagatcacaaggtcaggagttcgagaccagcctggccaatatggtgaaaccccatctctactaaaaatagaaaaattagccaggygtggtggcacacgcctgtagtcttagctacttgggaggctgaggcagaagaatcacttgaacccgggaggcggaggttgcagtgagctgagatggcacca

SEQ ID NO: 131663 - DNA, 201 bp, Homo sapiens
gactgcaatggtaactttactgattggagcaggcacattttgtgtactttgtattaaaactcatgtaatgccatgcttgttacagtgacatcttgcacacrtgctgtttttcaggagttgtatcccgcattttgtattcacaacggaggctccgaccttgagcggctccccacagccagcacctgcatgaacctgctgaag

SEQ ID NO: 131664 - DNA, 201 bp, Homo sapiens
gagctccacgttatacctgcaaattctgtgagtatagccacgtactaataaaaagtgttcttactcactctgtttatatacataagaaattggctgatctrttatcactgatcgttaccaccaccctttgtatcgtaattaaagtgctttatagtaatggcattgtggaagcacacaggtaagtgtgtgctgcttatatgg

SEQ ID NO: 131665 - DNA, 201 bp, Homo sapiens
ggaagccaaggcgggcagatcacaaggtcaggagttcgagaccagcctggccaatatggtgaaaccccatctctactaaaaatagaaaaattagccaggtrtggtggcacacgcctgtagtcttagctacttgggaggctgaggcagaagaatcacttgaacccgggaggcggaggttgcagtgagctgagatggcaccac

SEQ ID NO: 131666 - DNA, 201 bp, Homo sapiens
gctgggactacaggtgtgtgtacaccttgttaatgttaaggctaatttttttttttgtagagatgaggtcttgctatgttgcccaggctggtcgtgaactyctagcctcaagtgatttttccctccctggcctctcaaagtgctggaattataggcgtgagccactgtacatgatttagggtctctttttgtggggagggc

SEQ ID NO: 131667 - DNA, 201 bp, Homo sapiens
tcgggaaaatgtgactgcaatggtaactttactgattggagcaggcacattttgtgtactttgtattaaaactcatgtaatgccatgcttgttacagtgayatcttgcacacatgctgtttttcaggagttgtatcccgcattttgtattcacaacggaggctccgaccttgagcggctccccacagccagcacctgcatg

SEQ ID NO: 131668 - DNA, 201 bp, Homo sapiens
aggttgctctcatctaaccccaggaatgcagttggggtgtttttgttgtttttttgttttgttttagaaatacaggtgggggtcttgctttatctcaaacycctgggcttaagggatcctcttgccttggcctcccacagtgctgggattagaggcgtgagccactatacccggcctgtttttttggttttcttaataaat

SEQ ID NO: 131669 - DNA, 201 bp, Homo sapiens
ttgaacccgggaggcggaggttgcagtgagctgagatggcaccactgcactccagcctggatgacagaggcagaccccgtctcaaaaaaaaaaaaaaaaaraaacctcctaatgttttaagaatttaggtatctgtattgggccgcattcaaagccatcccgagccacatcggcctgtgggctgcaggttgaggacaagct

SEQ ID NO: 131670 - DNA, 201 bp, Homo sapiens
catttcataattcattgtatgaaaatctttacaatgggccaggcatggtggatcacacctgtaatcccagcactttgggaggcctaggcaggcggatcacytgaggtcgggagctcgagaccagcctgaccaacatggagaaaccccgtctctactaaaaatacaaaattagctgggcgtggtggtgcatgcctttaatcc

SEQ ID NO: 131671 - DNA, 201 bp, Homo sapiens
aggcagagttgctctttttctctgagtaacagctagtgggctctgctcagttatccgtggtagacatctgctgaatgaggagtgagttcacctcagctcaygtttagagattggctttagggcacctgccagtggagtattagagtgaggcccacggcctggcccctcccagggagcttggtgtcctcctgctgctgttcc

SEQ ID NO: 131672 - DNA, 201 bp, Homo sapiens
cttcttgtgcctcagattctctcatctgattaagtcaagacagcttgtttggatgatctttaggatctttttttgggtgaaaacattctgtaatttttgtrtgggagttttaaaattgaaattataaccttacctccttttttctctgtttgggtgtaggaggaaaaggcttctcttttacatcgtactcaggaagaaaga

SEQ ID NO: 131673 - DNA, 201 bp, Homo sapiens
aggcaggcggatcacctgaggtcgggagctcgagaccagcctgaccaacatggagaaaccccgtctctactaaaaatacaaaattagctgggcgtggtggygcatgcctttaatcccagctactccagaggctgaggcaggataatggcttgaacctggaggcggaggttgtggtgagccaaggccttaccattgcactcc

SEQ ID NO: 131674 - DNA, 201 bp, Homo sapiens
aggagatgtgcacgtgtcctccacggtccccatcccccatcctctgtgccctgcagggcttccgaagtgaaagccgagttggagatgagaagggcaatctstgcaggctttccttgtctttatggagtgccagggtctcaaggaagaaaaggtacgagcactgtgaggcctcggcagctctgcatgctggggatttgggca

SEQ ID NO: 131675 - DNA, 201 bp, Homo sapiens
gcttattttaaatatggtatctttgtacaccttgttaattgaagtcaatgctgacagtagtattcttcccaataaataattttatttgttctaattattgkgaagatttatagataggtgagtttttaggtaatttttaaataataaaatacaaacatgggcctcaccacagttgaaaatcaaaatagaaggaagtcatga

SEQ ID NO: 131676 - DNA, 201 bp, Homo sapiens
catcaagtattgaatattctgatttatctcgagttcctatagcaaaaattttgctagagaatgttctaaaaccattgcactttacttacaactcctgtccrgaaggtgcgaggtgagactggaatggatttattgattttgtcctttcacaagatctatatctgatggtaacttttacataggatgtgattttaaatatag

SEQ ID NO: 131677 - DNA, 201 bp, Homo sapiens
aacatggagaaaccccgtctctactaaaaatacaaaattagctgggcgtggtggtgcatgcctttaatcccagctactccagaggctgaggcaggataatsgcttgaacctggaggcggaggttgtggtgagccaaggccttaccattgcactccagcctggcaacaagagcaaaactctgtctcaaattaaaaaaaagaa

SEQ ID NO: 131678 - DNA, 201 bp, Homo sapiens
tgaatactagtcattttggttgccttagtccttaaaggggcagagcttctcttgtataataccttgttttgaaccctaaactcttttttttttctcttttyttgagatggagtctcactctgttgcccaggctggagtgcagtggtgcgatcttggctcactgcaacctccacctcccgggttcaagcgattctcctgcct

SEQ ID NO: 131679 - DNA, 201 bp, Homo sapiens
atcccactgttgctgctttctgggtgatgcagcagagagcaaggatgggaagagcagtgttcccagaccagccacatctgcatcaccgggggatctattaraaatgcaaattcttgggctccaccccagaccttctgaatctggaactctagggctagggctcagcaagctgtgtgttttggtttttggttttttggggtt

SEQ ID NO: 131680 - DNA, 201 bp, Homo sapiens
tttgtatttttagtagagacggggtttcatcatgttggccaagctggtctcgaaatcctgacctcaggtgatctgcccatctcagccttccaaagtgctgrcattacaggcgtgagccagcgcacccggcaagacagttttctatgtaagtttatttcttcagaattaaccatgaaatacaagtggtttagattctacagt

SEQ ID NO: 131681 - DNA, 201 bp, Homo sapiens
gggtttcatcatgttggccaagctggtctcgaaatcctgacctcaggtgatctgcccatctcagccttccaaagtgctgacattacaggcgtgagccagcrcacccggcaagacagttttctatgtaagtttatttcttcagaattaaccatgaaatacaagtggtttagattctacagttaaaatgggagatgtattcct

SEQ ID NO: 131682 - DNA, 201 bp, Homo sapiens
agatttacacctttgggagccgtgtctcggtgtctcatcaaatggctggttgtctgaggcagctttttgtggtattagtacagagatttgctaaattgtaygttgatcttcagtgtatcgctttttttttttttttttttttaagaaatgttttgaataagtaattgctttactgttctgtgtttttctcctattcctttt

SEQ ID NO: 131683 - DNA, 201 bp, Homo sapiens
actcttttatctttttagctccttgtttagtcattcactaatttccatacatgataacgaattcttcggtgatcccatagaaggtaaggattttgagaaaycagtttgctgctggccacttggcccatcagttttcatagacagtagaaaagttttaagctttttaagtctttcagtgtgtgttaaaagatggaaaaagaa

SEQ ID NO: 131684 - DNA, 201 bp, Homo sapiens
gatcttttttacctgaacacacatatgggtagcattggcagatgagtcaagagaaggccatgcagtggcaggtgttatggaaaggtgggcctctcctggargagtgtatttgctggagggatgtggtctgggcagtgtgttcctggggacagtttccagatacagtggaaaagactgacatatatatgtgtcttatgaggc

SEQ ID NO: 131685 - DNA, 201 bp, Homo sapiens
aagagggaggagtggactagagacagccaagaagaaactttcgggagtggcagatgtgctctgtgtcttgattggtgcggcctgcccgactgcttgtgctrccctctctaaacggatagttaacctgcagttcttctcatagtaagaagggaagcctcagtcaaaatgagagttgacttaggaccagaaatatatcattgt

SEQ ID NO: 131686 - DNA, 201 bp, Homo sapiens
atgtaccctgacacagccttagcagttgccagcacgcctaggtcagtgggacgtgcaccctgaataccacatcatgattacttgcaaactctaaaatacarggtctcagtgtttacattttattattattatattagagatggggtcttactcagttgtcttgaattcccaggcttaagcagtcctcccacctcagcctcc

SEQ ID NO: 131687 - DNA, 201 bp, Homo sapiens
gggtgcagggggcttccaaggtgctaggcattttctgcgctgtggactaagtgcttttccataagtgtgttcactgggtaaaaatggatggaaccacaggsttgtgattagggcactctgcagcagtagacttcagagcagttacaagaggaaggatcggagaagaattgggggactggttatcaagaaaacttgagcagc

SEQ ID NO: 131688 - DNA, 201 bp, Homo sapiens
cagcagatgggctgaaaagaatgtcaggattatcttcctaaagcatcatattaaagctgaaaatatccacatcatatcacaagagaaatgtgtacctattmattagaatacatgtgaaagaatgtttatggtaacactgtatagcccctaaactggaaactacaaaaatgtccttcgaaagcataatgataataaataaat

SEQ ID NO: 131689 - DNA, 201 bp, Homo sapiens
actgcaacctctgcctcctggttcaagcaattctcgtgcctcagcctcccaagtaactgggactacggacacccaccaccacgcccggctaatttttgtgktttttgtagagatggggtttcgccatgttggccaggctggtctcgaattcctggcctcaagtgatccgcccacctcagcctcccaaagtgctgggattat

SEQ ID NO: 131690 - DNA, 201 bp, Homo sapiens
tcttatggaggcttagtgaggggcagttgaggataggggcctcaagttagaggcagtatctgggctgagccatcagcattcccagggtccttaaggtcatkagcctgaattagatcacccagggtgtaggtgtcactggagaagagaagagatgaagaactgagccccagggctctccaaggtttagagtccagagagtag

SEQ ID NO: 131691 - DNA, 201 bp, Homo sapiens
ccaaagtgctgacattacaggcgtgagccagcgcacccggcaagacagttttctatgtaagtttatttcttcagaattaaccatgaaatacaagtggtttmgattctacagttaaaatgggagatgtattcctgaattcagttgattgctgcacctaaataagatttctcggctgggtgcagtggctcatgcctgtaatcc

SEQ ID NO: 131692 - DNA, 201 bp, Homo sapiens
atatggcaaaagtagaattttgaaacttgaaagatgttttcttctaattgttgaaaatagttcttggttatgtggggtaccttgagactgagcctgagttkttttttttttttttttttttttttaaattcctactgtctttcagaagcaggagtgtaaaactgtcctcagatgctcagatgtttgcttcttgtcagtgga

SEQ ID NO: 131693 - DNA, 201 bp, Homo sapiens
aatgagatgttgggatgtgtgaggacaggagaaggtaagggaaccacctgggttctgttatgagaactagaaggatggaggtcatgctgactaagctgggraaggtgcgggcaggagcaggtgtggagagggaggcattcttatggaggcttagtgaggggcagttgaggataggggcctcaagttagaggcagtatctgg

SEQ ID NO: 131694 - DNA, 201 bp, Homo sapiens
acttgaaagatgttttcttctaattgttgaaaatagttcttggttatgtggggtaccttgagactgagcctgagttgttttttttttttttttttttttttaaattcctactgtctttcagaagcaggagtgtaaaactgtcctcagatgctcagatgtttgcttcttgtcagtggaagtgggaatatgggtttgctactt

SEQ ID NO: 131695 - DNA, 201 bp, Homo sapiens
tttctaaacttaaaatcagctttgagaggcggcagtaagtagagtggtggaggtcacgctctggagtaagacaggccagtggggactcctggcgtcaccarcagagggcagcagaatccggcctgtgttgtcgtgggcctccttggctttggtgtaagtagctagcattggtcaagcactcaagctgggagaccggatgga

SEQ ID NO: 131696 - DNA, 201 bp, Homo sapiens
cttgaaagatgttttcttctaattgttgaaaatagttcttggttatgtggggtaccttgagactgagcctgagttgttttttttttttttttttttttttaaattcctactgtctttcagaagcaggagtgtaaaactgtcctcagatgctcagatgtttgcttcttgtcagtggaagtgggaatatgggtttgctacttt

SEQ ID NO: 131697 - DNA, 201 bp, Homo sapiens
agcaaatgtaactttatgaaataaaagccaaatgaaggtatatggtgttaattttattgtttctaaacttaaaatcagctttgagaggcggcagtaagtaragtggtggaggtcacgctctggagtaagacaggccagtggggactcctggcgtcaccaacagagggcagcagaatccggcctgtgttgtcgtgggcctcc

SEQ ID NO: 131698 - DNA, 201 bp, Homo sapiens
acctggaagccatagaactagaagtcgaggaaaaaaaggaagggtcgagccaggtctggtggctcaagcctgtaatcccagcactttgggaggccaaggcsggagaatcacgaggtcaggagttctagaccagcctgaccaacatggtgaaaccccgtctctactcaaaatacaaaaataagctgggcgtggtggtggttg

SEQ ID NO: 131699 - DNA, 201 bp, Homo sapiens
agggcccatgtaaatccttttaaacatttaaatattcaatttaatttagatttagatttagcaaatgtaactttatgaaataaaagccaaatgaaggtatrtggtgttaattttattgtttctaaacttaaaatcagctttgagaggcggcagtaagtagagtggtggaggtcacgctctggagtaagacaggccagtggg

SEQ ID NO: 131700 - DNA, 201 bp, Homo sapiens
ccccgtctctactcaaaatacaaaaataagctgggcgtggtggtggttgcctctaattccagctacttgggaggctgaggtaggaaaatcgcttgaaaccrgaaggcagagattatggtgagccaagattgtgccactgctctccagcctgggtgaaagagggaaactccatctcaaaaaaaaaaggaagcgtcaactcca

SEQ ID NO: 131701 - DNA, 201 bp, Homo sapiens
aaagtagccaggcatggtggtgtgtgtctgtagtcccagctacttgggaggctgaggtgggaggattgcttgagcctgaaatgtagaggctgcagtgagcmgtgatggcaccaccacactccagcctgggtgacagagaccctgtctcaaaataataataaaatagggcccatgtaaatccttttaaacatttaaatattc

SEQ ID NO: 131702 - DNA, 201 bp, Homo sapiens
agctacttaaaaaacagcattcttcagtcaggagttcgagaccagcctggccaatatggtgaaactccatctctactaaaaatacaaaaattagctgggcmtggtggtgcacacctgtagtcccagctactcaggaaactgagacaggagaatcgcttgaactcgggaggcggaggctgcagtgagccgagatcgtgccac

SEQ ID NO: 131703 - DNA, 201 bp, Homo sapiens
ggcatgcctataaatcagattatttgatatgatcttggttatatatttgaaaatttcaattagattgtataactttggcgtggtttataattttttatcgyggtagaattcagtgtgcatttaatgtattctgtagtgtaatattggcacttaacagtttatcttgagattttcaaaagttggaaagtttctttttctcca

SEQ ID NO: 131704 - DNA, 201 bp, Homo sapiens
aacagcattcttcagtcaggagttcgagaccagcctggccaatatggtgaaactccatctctactaaaaatacaaaaattagctgggcctggtggtgcacrcctgtagtcccagctactcaggaaactgagacaggagaatcgcttgaactcgggaggcggaggctgcagtgagccgagatcgtgccactgcacactccag

SEQ ID NO: 131705 - DNA, 201 bp, Homo sapiens
taaaaatacaaaaattagctgggcctggtggtgcacacctgtagtcccagctactcaggaaactgagacaggagaatcgcttgaactcgggaggcggaggytgcagtgagccgagatcgtgccactgcacactccagcccgggcaacagagggagactccgtctcaaaaaaaaaaaaaaaaaaaaaaaacagtgttcttca

SEQ ID NO: 131706 - DNA, 201 bp, Homo sapiens
aaattagctgggcctggtggtgcacacctgtagtcccagctactcaggaaactgagacaggagaatcgcttgaactcgggaggcggaggctgcagtgagcygagatcgtgccactgcacactccagcccgggcaacagagggagactccgtctcaaaaaaaaaaaaaaaaaaaaaaaacagtgttcttcacaatgtctgtc

SEQ ID NO: 131707 - DNA, 201 bp, Homo sapiens
aacataagccagtccttcaactaaaaactcaaacatacttatcttaaggtctattcctaatccagatttgtctatattcaggttggaagacagaataacartaaaaccaaaatttatctgtaaaaataataaaaataatttgtttttttttttttttaatgctggaggtattgtccttattaatacgacacatcatctgtt

SEQ ID NO: 131708 - DNA, 201 bp, Homo sapiens
ttatcctcctcttctggagaggaaggtgtactgactatttcaggtgtaagccttccaagtttttgcccttctccactaaaagccttgaacctcaatctagrttttatgtattcttgatcctgatggtcctccatatcccaattcacttggccaccatgaacaaggcactgaagctccagggggatctctcctcttttaaca

SEQ ID NO: 131709 - DNA, 201 bp, Homo sapiens
tgccattgaatccttgccatggccctctgatgccgagtgtcatcagctgagaccgagtaaacttaggtctgcatgcaggctgtggcctctccgcagggccrggtttgtcttgcctagcagattgtgttttcagagtatttggtgtgaatgagatgagactaggtactttgactcctaatctaactaatcgtctaattgaga

SEQ ID NO: 131710 - DNA, 201 bp, Homo sapiens
ttcatttacctcattttcagtacttgctattgaaatcagccagtttagtttccttcttcttgaagatgagggaacccatagccagctggtactgttttccrttaggcatcccttgactacaacataacatagagatgctttgcccagatgtcttcagtgtgggcagtaggtgctggtgttggctgtttgataaataatctc

SEQ ID NO: 131711 - DNA, 201 bp, Homo sapiens
tgtagtcccagctactcaggaaactgagacaggagaatcgcttgaactcgggaggcggaggctgcagtgagccgagatcgtgccactgcacactccagccygggcaacagagggagactccgtctcaaaaaaaaaaaaaaaaaaaaaaaacagtgttcttcacaatgtctgtcattttctgaaacaaaaagccagtggtac

SEQ ID NO: 131712 - DNA, 201 bp, Homo sapiens
agacaggagaatcgcttgaactcgggaggcggaggctgcagtgagccgagatcgtgccactgcacactccagcccgggcaacagagggagactccgtctcmaaaaaaaaaaaaaaaaaaaaaaacagtgttcttcacaatgtctgtcattttctgaaacaaaaagccagtggtactctagatgtttgcttttgggaaaacc

SEQ ID NO: 131713 - DNA, 201 bp, Homo sapiens
gacaggagaatcgcttgaactcgggaggcggaggctgcagtgagccgagatcgtgccactgcacactccagcccgggcaacagagggagactccgtctcaaaaaaaaaaaaaaaaaaaaaaaacagtgttcttcacaatgtctgtcattttctgaaacaaaaagccagtggtactctagatgtttgcttttgggaaaacct

SEQ ID NO: 131714 - DNA, 201 bp, Homo sapiens
tctccacctgttctccacacccccgggggtaattagactacctctgtttgacctgggaaaataggatcactgtaaatacacatctctctgaagactggatrttttctctttttttgagacggagtttttgctcttgttgcccagactggagtgcagtggcacaatctcggctcactgcaacctccacctcccgggttcaag

SEQ ID NO: 131715 - DNA, 201 bp, Homo sapiens
agaattacctcatgtcactggtcacttctcaattaaaagttccattagcaaatgattcttgcttctggtgtgggtcatgattgcattttgtcgcctgtaartcaggctgcagacagggaataaataaacagcccaaggatgtggtaatgtcatcttgaacttttttttacagatagaagcacctaggtccatttaagccaa

SEQ ID NO: 131716 - DNA, 201 bp, Homo sapiens
gggcatggtggtggatgcctgtaatcccagctactggggaggctgaggcaggagaatcgcttgaacctgggaggcggaggttgcagtgagctgagatcgcrcggctgcactccagcctgggcaacagagcaagactccgtctccaaaaaaaaaaagagcataagtaatatttcttgacatgtgaaaatcacatgaaaccca

SEQ ID NO: 131717 - DNA, 201 bp, Homo sapiens
cacttacttagtgttgtctttttcattacagccattctagtgggtgggaattggtatctcattgtggttttaatttccctggtgactaataatgttgaccrtcttttcatgtgcttcatgacttctgttgagaaatgtctattcaagtccattgcctatttttttattggattgtcttttattattaagtccctgcaatgc

SEQ ID NO: 131718 - DNA, 201 bp, Homo sapiens
cttattctagctttttatgtatttatttatttattttgagggcgaatctcaccctgtcacccaggctggagtgcagtgatgcaatctcagctcactgcagsctctgccttctgggttcaagcaattctcccacctcagcctcccaagaagctgagattatgggtgcgcgccacaacatccagcgaatttttgtacatttgg

SEQ ID NO: 131719 - DNA, 201 bp, Homo sapiens
ctccacatcgttgtcagcacttacttagtgttgtctttttcattacagccattctagtgggtgggaattggtatctcattgtggttttaatttccctggtractaataatgttgaccatcttttcatgtgcttcatgacttctgttgagaaatgtctattcaagtccattgcctatttttttattggattgtcttttatta

SEQ ID NO: 131720 - DNA, 201 bp, Homo sapiens
cttatttcattgtatggatataccacactttggggtttgtttttttcattttgaaacaggtctttctctgccacctaggctggagtgcactgctacaaacrcggctcagtcctgcgcttaaggaggcctcctgctttcagcctcccgagtagctgggaccaccgttgcttgctaccacacctggctaattatttcatttta

SEQ ID NO: 131721 - DNA, 201 bp, Homo sapiens
ttatttatttattttgagggcgaatctcaccctgtcacccaggctggagtgcagtgatgcaatctcagctcactgcagcctctgccttctgggttcaagcrattctcccacctcagcctcccaagaagctgagattatgggtgcgcgccacaacatccagcgaatttttgtacatttggtagagacagggtttcaccatgt

SEQ ID NO: 131722 - DNA, 201 bp, Homo sapiens
ttgctttgttgttgttgttgctgttttgtttgtttctttgtttttgagacggagttttactctgtcgcccaggctggagtgcagagggcaatggcgtgatytccgctcactgcaacctctgcctcacagggtcaagcaattctcctgcctcagcctcctgaatagctgtgattacaggcgtgcgcctccatgcccggctaa

SEQ ID NO: 131723 - DNA, 201 bp, Homo sapiens
accaatgagaagacctcagcaggggctgcctctggaccatgggctcctggccttccagctataagaaatggatttcagtttttattaattactcagtttcrggtcttctgttataagcagtcaaaacggactaagacagtaagttactgcctagtgactattagtttaataggactgccgcaacaaattaccacactcttt

SEQ ID NO: 131724 - DNA, 201 bp, Homo sapiens
tgcgcctccatgcccggctaatttttgtatttttagtagagacggggtttcaccatgttggccaggctggtctcaaactcctgacctcaggtgatccaccyacctcagcctcacaaagtgctgggattacaggtatgagccatcatgcccggccccccaagtatttttttatatttctgagtgaagctattctttaacttt

SEQ ID NO: 131725 - DNA, 201 bp, Homo sapiens
cccggctaatttttgtatttttagtagagacggggtttcaccatgttggccaggctggtctcaaactcctgacctcaggtgatccacccacctcagcctcmcaaagtgctgggattacaggtatgagccatcatgcccggccccccaagtatttttttatatttctgagtgaagctattctttaactttttacttcgaaac

SEQ ID NO: 131726 - DNA, 201 bp, Homo sapiens
taacaacaagaaaacactcctcctcatctttcctctttaatctcagtaaggtctcatgtattttttaaaatacagtgtgtgacagatgacttttaatggtstgcttataggtagagagcaccctgtaagcagcccgtttttcttggcttggcctcatttgtattttgagagatctttgttttctgtgaggtcacaaagcct

SEQ ID NO: 131727 - DNA, 201 bp, Homo sapiens
caagatgctagctatgtggtgtcagtgattgaacaaattttgcactacatgattcacaatggtaagtagtaggcaggatcagaactgtggctcagcatccygatggggagtgagcagaggccagcctgctgctgtgagcctgtgccctcagtctcaatgtcagagcggtactggtgtcccagacgccttgtgctccatcca

SEQ ID NO: 131728 - DNA, 201 bp, Homo sapiens
tgggaaagtctctcccaccgctttgttagcacgttcatggaagtgtaaatggagacacatagctttgtgtttggttttttaggcaaaataggatcatactrtatgttaacttagttattaggaaatattttctggaagtgaaattgttgggtcaaaaagatcctttttaccctatcctgtgaacaccgggtagtgtcttcc

SEQ ID NO: 131729 - DNA, 201 bp, Homo sapiens
ctggcctggaatgttatttatccctttttatgcctgaagcacagtgcataatcttttatgtaagttagaactaagccatcaatgtaattttttaaaaaagmaaatgtgggccaggcacggtggctcacgcctgtaatcccagcactttgggaggcagaggtgggcagatcacaaagtcaggagttcaagaccatcctggcc

SEQ ID NO: 131730 - DNA, 201 bp, Homo sapiens
gaagggccctggtgactttttacaggagggagcccctagctttgtgatgccctgtgccgcctccggactctgcagagtccccaccaatgagaagacctcascaggggctgcctctggaccatgggctcctggccttccagctataagaaatggatttcagtttttattaattactcagtttcgggtcttctgttataagca

SEQ ID NO: 131731 - DNA, 201 bp, Homo sapiens
aaaggacatttcacttacttccccaaagctgttctctgattcagcctgtttatcagagcacatcttaacttggtccaccttgtgttttttttggttttggrtttttgtttgtttgttttttgaaatggaacttctctcttgttgcccaggctggagtgcaatggcacaatcttgactcactgcaacctccacctcctgggt

SEQ ID NO: 131732 - DNA, 201 bp, Homo sapiens
cctgcagaggaagaattacctcatgtcactggtcacttctcaattaaaagttccattagcaaatgattcttgcttctggtgtgggtcatgattgcattttrtcgcctgtaagtcaggctgcagacagggaataaataaacagcccaaggatgtggtaatgtcatcttgaacttttttttacagatagaagcacctaggtcc

SEQ ID NO: 131733 - DNA, 201 bp, Homo sapiens
gcgcagggaaagctgggtgctgcctgtgtggtggcagagtctggagggcttgctgtgctggggactaaagagcaggaggactgcaggtgaggcgtgcagaygactttttatcggtaaagattttaatgccatttggtaattttgtcattaacatttattatgatagacaaggcttctagtatctttgtttcaaaactggtt

SEQ ID NO: 131734 - DNA, 201 bp, Homo sapiens
taattgcattcaagttaaaagatttggaagaatcttctcatattgtttatactgtaatgcttgaaatctttataaatgttctcaactcaaatactgtaagmatgattaagccatgtgttaaaatgtggtgttttgctacgcaaattagtaaagtcagatatcatctcagaataattaatttacttgtgagagaatggtttg

SEQ ID NO: 131735 - DNA, 201 bp, Homo sapiens
ttttaagtgctcttcaggtttgagaaagggctccaacctgacttcactaccgtaacggtatgtgttatatcatcatcttcaggctcaccgtatttcaggtrgcagatttcaggtgttgatttgatgttgatttgtgagttggctttggtggcagttttcagatagcatctctctctttgttgatggtcacacagcctactt

SEQ ID NO: 131736 - DNA, 201 bp, Homo sapiens
aacagaagtagagggatttacatgagcttttaaaatcccaaatagactggccaggtgcggtggctcacacctgtaatcccagcactttgggaggccaaggygggtggatcccctgaggccaggagttcaagacgaacctgaccaacatgatgaaaccccgcctctactaaatacaaaaaaaaaatcagccgggcatggtgg

SEQ ID NO: 131737 - DNA, 201 bp, Homo sapiens
ttataacaagcctcaaatttcctaatgaatccttaagctttaaaaattgttaaaaaactgatcacacccacctccctaggggcatgctaataattgcattsaagttaaaagatttggaagaatcttctcatattgtttatactgtaatgcttgaaatctttataaatgttctcaactcaaatactgtaagcatgattaagc

SEQ ID NO: 131738 - DNA, 201 bp, Homo sapiens
cccctttatttgtgtctctttgaaatgcattgtcgtagccccagttatttctttgttcagactcccagtgattttaagtgctcttcaggtttgagaaaggrctccaacctgacttcactaccgtaacggtatgtgttatatcatcatcttcaggctcaccgtatttcaggtggcagatttcaggtgttgatttgatgttga

SEQ ID NO: 131739 - DNA, 201 bp, Homo sapiens
gaggcaggagaatggcttgaacccggaaggtggaggttgcagtgaaccaagattgcaccattgcactccagcctgggcaacaagagcaaaactctgtctgraaaaaaaaaaaaaaaaaaaaaaaaaaaaaaaatcccaaatagactaaaagggaaaatcctaccccagtcaagaccccgcacaatcataattgagttatac

SEQ ID NO: 131740 - DNA, 201 bp, Homo sapiens
ctcagtcttgaaagttcgtgtgctattaacctctaatatattagcagttttaacttccaaatattgtgcttatggtaatacattaattccatgttggtcartgccgaggggattaaaatgaaagtttaggctggatctaaaattaaaaatgaaatcatcttacccagcttttggaaggtgatgagttgtccaatgtgaaat

SEQ ID NO: 131741 - DNA, 201 bp, Homo sapiens
cagcctcccgagtaggtgggattacaggcacctaccaccacccccagctaatttttttgcatttttagtagaggcaggatttcaccatgttggccaggctrgtctcgaactcctgacctccggtgatccacccacctcagcctcccaaagtgctgggattacaggcatgagccaccgcgcccatcctcttcatagcatttt

SEQ ID NO: 131742 - DNA, 201 bp, Homo sapiens
ctgaagcacagtgcataatcttttatgtaagttagaactaagccatcaatgtaattttttaaaaaagcaaatgtgggccaggcacggtggctcacgcctgyaatcccagcactttgggaggcagaggtgggcagatcacaaagtcaggagttcaagaccatcctggccaacgtggtgaaaccccttatctaggaaaaatcc

SEQ ID NO: 131743 - DNA, 201 bp, Homo sapiens
aagccatcaatgtaattttttaaaaaagcaaatgtgggccaggcacggtggctcacgcctgtaatcccagcactttgggaggcagaggtgggcagatcacaaagtcaggagttcaagaccatcctggccaacgtggtgaaaccccttatctaggaaaaatccaaaaattagccaggcgtggtggcaggcacctgtaatccc

SEQ ID NO: 131744 - DNA, 201 bp, Homo sapiens
ggaggcagaggtgggcagatcacaaagtcaggagttcaagaccatcctggccaacgtggtgaaaccccttatctaggaaaaatccaaaaattagccaggcrtggtggcaggcacctgtaatcccagctacttgggagactgaggcaggagaatcgcttgaacctgggaggcagaggttgcagtgagctgagatggcgccat

SEQ ID NO: 131745 - DNA, 201 bp, Homo sapiens
cgggcgtggtggcgggcgcctgtagccccagctactcaggaggctgaggcaggagaatggtgtgaacccaggaggcggagcttgcagtgaaccgagattgygccactgcactcgagcctgggcgacagattgagactctgtctcaaaaataataataatagtaagtaaaaggaagtgtgatacacagcagcatgggtgcgc

SEQ ID NO: 131746 - DNA, 201 bp, Homo sapiens
cagaggaccgacacgcccataggtctcatgcattaagtctgcgttgagcaatccctaacacggtttttgcctacagatacatttgcacaactgtgaaaacyaggtacgtattcattgcatcattttttgtaaaaagctgagagaagtgcccagcaacacgtcgtgccgcgcgtgtgcatggaacaccatatagcctcacca

SEQ ID NO: 131747 - DNA, 201 bp, Homo sapiens
tgagtatgcattgtttggtgatcttcactcaaatacgaagctgtgtaggactgtttcaaaaactagcccatgcagatggattgtttttaatgtgctaccawatacgcttgtatatgatgagatactcaaaaattgcacctgaaccttcttattctataaaaatggagtaaatgattctgaaagaatatatgatttggatca

SEQ ID NO: 131748 - DNA, 201 bp, Homo sapiens
atttttgtagattgtatgagttaggcatcctcatattcttggcacccttgttgaaaattagttgaccgtacacgtaacactctgggtctgcccttatgcartatggtcttgattactgtagctttgcagtatggggtgtgtggatttattaatagcagatgggagtagaaccgcagccttgttaagcagggataatgggaa

SEQ ID NO: 131749 - DNA, 201 bp, Homo sapiens
ttgagttaatttttgtagattgtatgagttaggcatcctcatattcttggcacccttgttgaaaattagttgaccgtacacgtaacactctgggtctgccyttatgcagtatggtcttgattactgtagctttgcagtatggggtgtgtggatttattaatagcagatgggagtagaaccgcagccttgttaagcagggat

SEQ ID NO: 131750 - DNA, 201 bp, Homo sapiens
cagtggtgcaatcatagctcactgcagcctcaaactcctgggctcaagtgatcctcttgagtagctggaattacaggcacataccaccatgcccagctttwcttatattttgtagagacagggtcttgctagtgttgcccaggctggtcttggactcctggcctcaggcagtccttctgccttggcttcccaaagtgctgg

SEQ ID NO: 131751 - DNA, 201 bp, Homo sapiens
tctctcgagcgcagggaaagctgggtgctgcctgtgtggtggcagagtctggagggcttgctgtgctggggactaaagagcaggaggactgcaggtgaggygtgcagacgactttttatcggtaaagattttaatgccatttggtaattttgtcattaacatttattatgatagacaaggcttctagtatctttgtttcaa

SEQ ID NO: 131752 - DNA, 201 bp, Homo sapiens
tttgaattctatttgaaaatggctttttttcttgctttaggatattgatttaattgggatggcatgcctataaatcagattatttgatatgatcttggttrtatatttgaaaatttcaattagattgtataactttggcgtggtttataattttttatcgcggtagaattcagtgtgcatttaatgtattctgtagtgtaa

SEQ ID NO: 131753 - DNA, 201 bp, Homo sapiens
cggataagccgtgtagacacaccccacccagaaccctgcacgttattcccctcctggcagggcagaaggcttttgtcacatagagaagttagtttcagtgmggcattgaaacagcctcctgggtccctcattaaaggtgatgtgtggtcagatggattctgtttttttttttttttaagaaaaaggaaaaacagctgtaaa

SEQ ID NO: 131754 - DNA, 201 bp, Homo sapiens
cggaatactgtgtccaatgtgctcaccgtctcaattttaaacctaaaggagggagaacattttctcatgcgtgcatttcatctctgggagcacttaagacrctgaagcgttggttgccagtgggaatgggaactgggtatctgtgatacagggatgagaattttcacactgtacctttaaataccagaacgtcatgaacac

SEQ ID NO: 131755 - DNA, 201 bp, Homo sapiens
cttagatgtgtttacctgattcccaagggtgacacggacactgacccagaggtggcgggcacggcagggcagcactgcatccctgctgctgtgcagagtgrccccatcttgtccattcagtcagcgaccactgctcagtgaatgggaacttggtatttctgtgtggtggctgtaagcctcagtcagtccagtaaattgtat

SEQ ID NO: 131756 - DNA, 201 bp, Homo sapiens
ctggcctcacatactctaatcttgtagattgcaagatcaccaaggagcacagacaggcaggtgctgtgagatgtcgattggtgtctctccagagcacctaytgcctttgagtgaggtcctcaatcttagtcatcagtcacgacatggtgtagctacacagtcttgcttcagaagccatctgtgaaaagcttggaggtaaat

SEQ ID NO: 131757 - DNA, 201 bp, Homo sapiens
tttaccgttgccattgaatccttgccatggccctctgatgccgagtgtcatcagctgagaccgagtaaacttaggtctgcatgcaggctgtggcctctccrcagggccaggtttgtcttgcctagcagattgtgttttcagagtatttggtgtgaatgagatgagactaggtactttgactcctaatctaactaatcgtct

SEQ ID NO: 131758 - DNA, 201 bp, Homo sapiens
tagcttagtcgtaaacgctggcgctgcaaaacaaatacgctgtgttttctgcctcagcctattaggagttaaaaattgtggttttccttcttacctcttaycttctgtatcagtagttattggctacataaataacaacacagtgagttaaaaagcaagcattgtcaacatacattttggtgaatgtgagttcactcggag

SEQ ID NO: 131759 - DNA, 201 bp, Homo sapiens
tctttgtctggtttggtattagggtgatactggccttatggaatgaggatactctagggcctaccaaaaccaattactatagtttttttgttttattttgtttttttgagacagagtctccctctgtcgcctaggctggagtgcctggagtacagtggtgcgatctcactgccacctccatctcccgaattcaagtgattc

SEQ ID NO: 131760 - DNA, 201 bp, Homo sapiens
agaggcgggagaatcgcttgaacccaggaggcagaggttgcagtgagctgagatcataccactgtcctccagcctgggtgacagggcaagactctgtctcaaaaaaaaaaaagagtctaacaagatatgtcccctctaatccagcagaacaaatttctacatttagaaacgtaaaaatttattctagtgaactaatatgca

SEQ ID NO: 131761 - DNA, 201 bp, Homo sapiens
aaagaattgtggaaaacttgaaaaaagtattttgaatatggcatttacaaagttaggagtatttgacacagcaggcatgtggggaaaaaaagaaaagattaaaaaaaaaaaacagaattaggattaaaggtctccatgaatgttttcctaaaccagttggtggcggtgaatggataaagacagtctccccctaccctgttt

SEQ ID NO: 131762 - DNA, 201 bp, Homo sapiens
ggcctcaccacagttgaaaatcaaaatagaaggaagtcatgagagatcctttttttttttttttaaattgagactgagtctcactctgttgcccaggccakagtgcagtggcatgatctcggctcactgcaacctctacctcctgggttcaagcaattctactgcctcagcctcccgagtagctgggattacaggcatgtg

SEQ ID NO: 131763 - DNA, 201 bp, Homo sapiens
gaagtgctgggattaaaggcatgagccaccatgcctggtttttttttttttttttctttttaaccattttttttctacaattcaactgtgagcaaggaccrataatggtgttttcgttgtcaatttccaccattcctgtaaacacagcaacgtatatttacatcataagaattgtgtgtccaaatactatatttatgggtc

SEQ ID NO: 131764 - DNA, 201 bp, Homo sapiens
ggtcttctgttataagcagtcaaaacggactaagacagtaagttactgcctagtgactattagtttaataggactgccgcaacaaattaccacactctttgggggggagggaggcttagaaaaactgaaatttattatttgacagttctggaggctggaagtccaaactcagggtgtcagcagcagcatagattccttttt

SEQ ID NO: 131765 - DNA, 201 bp, Homo sapiens
ttgtcttttattattaagtccctgcaatgcaatgaattatgaaatttatattctctgaggaagctgaaacattgtcagataaatgatttgcaagtattttyttctctggattgtctcttcactttcatgatgatttcctttgaagaacgaacatttttaattttgaagtctaacgtgtttttttcttttattgcttgtttt

SEQ ID NO: 131766 - DNA, 201 bp, Homo sapiens
tcccattgctaatggccccaaccttacccttttggtaaggcagcttctgtttttttacaaacaaaatgaagactcaaaacgtttggtgagtgttaactacrttttcacttgtcctcgtttacacgtgttctgcttttttgtttaaagtggaaatggcttctcatcagaaagttaaacagctctccactgcatccaggcttt

SEQ ID NO: 131767 - DNA, 201 bp, Homo sapiens
agctgaggtgggagaattgcttgaacctgggaggcggaggttgcagtgagccgagattgtgccactcagtccagtctgggtgacagagcaagactgtctcaaaaaaaaaaaaaaatttatgtaatactctcacttattttgcttaaactgtgatctcaaattaaaatgaaaatgccattagatgatgatagtttcactatg

SEQ ID NO: 131768 - DNA, 201 bp, Homo sapiens
tcagcctcccaagtagctgggattacaggcatgagccaatgtgcctggccggatttttaaaatttattttaaactgggcaaaggagcagctttagaaatayttaaatatgatatacattatatattatctatacatttattgataaaaatcaagatttgataccttgactattagcatttatttcagaatttatgaagata

SEQ ID NO: 131769 - DNA, 201 bp, Homo sapiens
tgaaattacaggcatgagccaccgcgcccagccactttactttttataaaaaaagaaatggacaaatatcttaattccttgtctggtgtctttgatgtacwaaactttgtttatatatgtttccaaattttaaaatgttttgtttttatttgtcaactatttttaccaaatttctaaagattacttggttccgttcttcag

SEQ ID NO: 131770 - DNA, 201 bp, Homo sapiens
cagcatttttcatattattgttgtgccaaatttgagttgaagaattcgaggtagaatcaaccaaagaacgcagaagcgtttagcccatgatctcctgcctyccattgattttgacagaattgcaaacgatgagacctgactccttcaacaccgaccattttcatttttcagtcctatcatggtcctcccaaagtcatttgt

SEQ ID NO: 131771 - DNA, 201 bp, Homo sapiens
tgtgaattgccagctagggtccttaaaaggttgaaaaaatagatggtctcataagaccatagaatagcctcaaaagaagttcttgcaaaagctgtaaggarcttcactctgtgacttttctttaattcttctattatagaatgtaggcacctaggaatttggaagtggggcatcttattctttgactgtgacccctgtttt

SEQ ID NO: 131772 - DNA, 201 bp, Homo sapiens
agtcaggcctgtttccctccctctgctaaatttccagtgtgcctcttctagaataacatcttcctgtagtatgtttgaaaacatacatacatacatacatrcatgaattattcatgaaagaaatataggaaaatgtgaaaaccaaacttttgggggttgggtgcgggggggtatatagagtctcgctctgtcactaggctg

SEQ ID NO: 131773 - DNA, 201 bp, Homo sapiens
tgcacgccaccacacccagctaatttttgtatttttagtagagacggggtttcactatgttggccaggatggtctcaatctcttgacctcgtgatccaccmgcctcggcttcccacagtgctgggattacaggcttgagcccctgtgcccagcccaaactgtttttcttactctctcactcaacactgaaaaattctgtga

SEQ ID NO: 131774 - DNA, 201 bp, Homo sapiens
tctgaaaggctggactcatacctgcattagtgaaacactatgttacatatctttttaggcttttttcatagtactcgtgttttatggggtttttttttttyttcttcttcttcagacagcatctcactctgttgcccagagtgcagtggtgtgatcatagctcactgcagccttcacttcctgggctcaagcgatcctttc

SEQ ID NO: 131775 - DNA, 201 bp, Homo sapiens
ttgaatcttgcattatctgatgcaaattattatatatctgttttattgctttttatggcattagaagtgtccagtaatatttttttaaaaagaaaaatttvagaagaacaaattattgcctttgtacttgtgtgctataagagttcgacagatcattgggtgtctcgctgtttcttttacctgtggcacctggacttagag

SEQ ID NO: 131776 - DNA, 201 bp, Homo sapiens
acaagaataaagtcaagagctgcaaattcaggacaagactgtacaataaagttccggacatccaggatcctgtgtgtactattgaatctttgtatcaaacractcccatctgctaacctgatttgaatttttgttgttggcactgaatcatcaataagaacaaccgcgttaagtattgatttatcctcctcttctggagag

SEQ ID NO: 131777 - DNA, 201 bp, Homo sapiens
ccaccctgggctgactgtggaaacagaccagatgccaggcagcggtgttgagatgggcagaggtgcagtcaggagcacttcttccctacccatgtgggccrgtcagaacatttgaaagaggcccagcagatgtgggacagcaccccccagttaccagcaacactgaggttggtgtgagattcacatgggcattcttgctcc

SEQ ID NO: 131778 - DNA, 201 bp, Homo sapiens
caccatgttggccagtctggtctcgaactcctgacctcaagtgatccacccgcctcagcctcccaaagtgctgggattacaggcgtgatccaccaggtccrgccatatttcagagtgaattttaagtggaaatttgctcgaacattaatgacagacagcatacttagttacctgtcttaattggtctcctttaacttgtat

SEQ ID NO: 131779 - DNA, 201 bp, Homo sapiens
cattctctcattaagaaacccttttttgctatcttttcaaaattaattgggtaatcattagtcctcaaatcagaaataaaagcacaaggacataatacttyggtttacctggcagaggccagccgcagtcttcctggaggggatgttatgccggctctagttatcagacatgtgcctgagctacttaaaaaacagcattct

SEQ ID NO: 131780 - DNA, 201 bp, Homo sapiens
aaattttctataaaaaggtacttttaaaatccttgaaaatccttcattaggaatcatgttaaagatgctgaaatgatcctgataagacagattttcctgtrgcatcactggttctccagtggacaccaggggaagaagtggctcatggagcagggccacccagcagacgcaccgacctcagcacagaggagcacccaccct

SEQ ID NO: 131781 - DNA, 201 bp, Homo sapiens
ttgtaaaaggtgggaaatggtatcttcttgtggttttaatttgtgtctaccagccgactaatgatattcagcatctttttcatgaatttgtttttttgttktgttttcttggttgttttttgtttttttggagacagggtctcactgtgtgctcaggctggagtgcagaggcgcaatcacggctcactgcagccttgactt

SEQ ID NO: 131782 - DNA, 201 bp, Homo sapiens
aatgcgtttcttacttaccagcaatttaaaattaactttaaaactactccctgggcgtggcgcagtggctcacgcctgtaatcccagcactttgggaggcygaggcaggcagatcacaaggtcaggagatcgagaccagcctggccagcatggtgcaaccctgtctctactaaaaatacaaaaaaaaatagctgggcgtgg

SEQ ID NO: 131783 - DNA, 201 bp, Homo sapiens
aaaaaacagtgttcttcacaatgtctgtcattttctgaaacaaaaagccagtggtactctagatgtttgcttttgggaaaacctcaacagctattttctcrttttctccagtcgtatcagtggacgagtccttaaaatgtgaatctcaaggggtgtctgagcatgccctgttggagtgtataagttctggaatacttattt

SEQ ID NO: 131784 - DNA, 201 bp, Homo sapiens
ttggactcctggcctcaggcagtccttctgccttggcttcccaaagtgctgggattacagaagtgagcctctgtgcaatgttttaatttatttatttatttttttttttgagactgtcacgcaggttgggatgcagtggcacgatcttggcttactgcaacctctgtctcccagattcaagtgattctccggcctcagcca

SEQ ID NO: 131785 - DNA, 201 bp, Homo sapiens
ttattcacccatctgaaaggctggactcatacctgcattagtgaaacactatgttacatatctttttaggcttttttcatagtactcgtgttttatggggttttttttttttttcttcttcttcagacagcatctcactctgttgcccagagtgcagtggtgtgatcatagctcactgcagccttcacttcctgggctcaa

SEQ ID NO: 131786 - DNA, 201 bp, Homo sapiens
gcccggagccagacgtgagactccagtccggactgcgttctatgttcccgacacgcgggctgtccctaggcacctggccctcctcaggtcagcctggcctyctcccactcaacacctaccactgcatcacagaccctcccaacaacacctgaggccttcctgccgctttctctgcccctccctgtcccaagccattggctt

SEQ ID NO: 131787 - DNA, 201 bp, Homo sapiens
tccttttcctgactctttcaccggcttctttcatagataccatattcatgtgatttttcctttacttgggcttctcagtttcctttgtgggttcttttttcccctctttctcactctttcctaaacttctttttgtattcagttttttagggttgttagtttgtgacggagtcttgccttgtcgcccaggctggagtgcag

SEQ ID NO: 131788 - DNA, 201 bp, Homo sapiens
ggcagagtggcatatgcggttatgaactgggaccccccaaaactgtgctcaaatcctaataccccatcctgtgggcatggccttgtttggaaatagggtcyaatagctgcgaggccttgtttggaaatagggtccagtagctgcgaggcgtgagttcatgtggttttcagtctcgcagtgtgtgatcatttgccgtagcca

SEQ ID NO: 131789 - DNA, 201 bp, Homo sapiens; identical to SEQ ID NO: 23066

SEQ ID NO: 131790 - DNA, 201 bp, Homo sapiens
tctctatgtcatggtttgccagcctgacttgtggaaaatacaaccctgattattgcattctcttgaacagtgtagactccctttgcttttaggaaaaaatycacattccttggattattgatttgtgcagtatccccttgttatcaagcatttgtttacctctcaactttatttctagcacaaaatactttttctccaacc

SEQ ID NO: 131791 - DNA, 201 bp, Homo sapiens
tttttccccatctttgtgatggtaaatggtcaaatattttcctagcattttaaaaactttcttttgaacttgcatcatcttgtgcattatgttttataaatatgatttttagtggctgatgatgatgcacctgtaagtatgttttgcatttgtgaaattggcggttctcatattttcatagagattcttatttcatgtagg

SEQ ID NO: 131792 - DNA, 201 bp, Homo sapiens
gcccagcaacacgtcgtgccgcgcgtgtgcatggaacaccatatagcctcaccattaataggcaagatgagcgagacccattatcagatgagaaaagcacrgcacggaatactgtgtccaatgtgctcaccgtctcaattttaaacctaaaggagggagaacattttctcatgcgtgcatttcatctctgggagcacttaa

SEQ ID NO: 131793 - DNA, 201 bp, Homo sapiens
gtcgaacgggggccgggtgtggtggctcacgcactttgggaggctgaggcgggcggatcacctgagttcaggagttctcgaccagcctggccaacatggcraaaccccatctctactaaaaatacaaaaattagctaggtgtgatgatgggcacatatagtcccagctactcgggaggttgaggcaagagaattgcttgaa

SEQ ID NO: 131794 - DNA, 201 bp, Homo sapiens
tgccagacgtaggttctagacattctgacagccaactaaagagccagcaataacgtgtgcctaggagtgcgagagccttctccacctccgtgatgcctccrggttcgtgcatggccacttgtgctgcgtgagcgtcgtaggtttaggggaacagaagtagagggatttacatgagcttttaaaatcccaaatagactggcc

SEQ ID NO: 131795 - DNA, 201 bp, Homo sapiens
tgaaagagggaaactccatctcaaaaaaaaaaggaagcgtcaactccaagctgctcaaaatgtatcatattgtggctcgatcgctggaagccactatgagraaaataggacaggagatgtgcacgtgtcctccacggtccccatcccccatcctctgtgccctgcagggcttccgaagtgaaagccgagttggagatgaga

SEQ ID NO: 131796 - DNA, 201 bp, Homo sapiens; identical to SEQ ID NO: 23062

SEQ ID NO: 131797 - DNA, 201 bp, Homo sapiens; identical to SEQ ID NO: 23063

SEQ ID NO: 131798 - DNA, 201 bp, Homo sapiens
tattaaatatttattattaagtaatattttccaataatattaaataatatttgttggagaccccgtttgagattctgctcttactggaatgaatgcagtgkgcccccactttgtcatggcgtgtgactgataaacatcatgcatgttttcataaaatcataatacttctgagctggaaggaccttagaacagatgtatcac

SEQ ID NO: 131799 - DNA, 201 bp, Homo sapiens
cacttaagacgctgaagcgttggttgccagtgggaatgggaactgggtatctgtgatacagggatgagaattttcacactgtacctttaaataccagaacrtcatgaacacatctgaaaaacaatattcaaatttccctgatcatctttcttttttgttaacaattatttaaattctggcacaagcaagccacttttcatc

SEQ ID NO: 131800 - DNA, 201 bp, Homo sapiens
tgctaagtgaacgaagcaagacacaagactacgtattattatatgtaattccactcggataaactgtcctttgaaaggcacatttagagacacagagcggrtcaggggctgcacagggctggaggtggcagcgggagcttcggagaagtggagcgacccaaaaccggattgtgggggtcgctgcggaactctgtaaatttg

SEQ ID NO: 131801 - DNA, 201 bp, Homo sapiens
tgctctcgaccccctctcttggggtttaaggtacacaactttcatgacatttgctttaaagaccacttcataataagaaaggcagcagaacattcagtagrgttaaatgaagtccttttacatacacttttgtttttatcttcagctagatttttaattaagtactggttatgatgtatatattttggtgctagttttatt

SEQ ID NO: 131802 - DNA, 201 bp, Homo sapiens
tcactttgacagacattattgtggcaaatgttgtctgactactgcttcaacaaaccagaagacaagtaactgcgtatgagttaataaaagacatgaacttaaaaaaaaaaaaaagaagggattatcaaagaagacatttgaggtagtgaatgccactttcccccattttaatttaaactgtagcatgagggaaagtatgtt

SEQ ID NO: 131803 - DNA, 201 bp, Homo sapiens
agagatcatggaagtgcacagcacgtacacaggtgatacacacatgccacgccgttttagagaagggacttgaggatccatggactttagtttccgtgggkgtctggaccaatccctgtgggtcctgaagggtgggtgtgctttgcatttcataaagcatgtgttcattttgccataggaggctattctgcagaccatcct

SEQ ID NO: 131804 - DNA, 201 bp, Homo sapiens
tttttagtagagacggggttccaccatgtaggtcaggctggtctcgaactcctgacctcaggcgatctgccggccttggcctcccaaagtactgggattayaggtgtgagcccctgcagcagccactttcaaatttaactttaaaaatacagttttcattgtatttaatttggggggatgccttctgtttgtgaccagtga

SEQ ID NO: 131805 - DNA, 201 bp, Homo sapiens
atgagtaatttttaatctatcccactatgtgggagaagaatatcacttctttacattttagaagtagagccccagactaaataaccttcagaaatttgtctttttttttttttttttggtgaaaacattctttattagtaagcagacatttgaaactttttgattacatgcatcatgcaaaatgactgacctcacacatgg

SEQ ID NO: 131806 - DNA, 201 bp, Homo sapiens
tgcttttctctgtgtttatccttttgaatatctctgcttcagtttggatattttcacctgacctaatttctgatttacagctgatctctttagcattgactttttttttttttttttgaggtggagtctcactttgtcaaccgggctggactgcagtggcacgatctcagctcactgcaacctccgccttccaggttcaag

SEQ ID NO: 131807 - DNA, 201 bp, Homo sapiens
attttacaaggtttggttgttttttcctgttttgttaatccaaaacaggacaatgccctttgatttacaatgttcagttcttttaagaaatcattttcttyggaagatgattttgacccatgaaaaagttgttttacccctggtaatctttttgaaatggggctggctgttatacattatacaggttgttttcagttaagt

SEQ ID NO: 131808 - DNA, 201 bp, Homo sapiens
ggccacgtgcaagccccttctctgccgtctgttcagcggcggctttgaactgcagcacggttcttcaaaataaggctcctctgcagtagttcttggtgccygcattcatctttatagttacagggtgatccttattctagctttttatgtatttatttatttattttgagggcgaatctcaccctgtcacccaggctggag

SEQ ID NO: 131809 - DNA, 201 bp, Homo sapiens
cactgagggcttgcacctttaataatctcagctatgccagtaaataggtttaaaatattatattcattttggtgccaattaatgcacttaagacattttaytggtgttatttctgtagtatattaacaatgagggaacaatatacagcaattattttaggtttagggagcactttactagattaaaagctgtaagtggcag

SEQ ID NO: 131810 - DNA, 201 bp, Homo sapiens
aactgaagagaaaataagcaaataataccttttcaaattattttgaaagttcgtatttttcgtagcttttttcttactcttttttccgtatgactgttgcrtattcttagcaaataaaactccacaaaggcaagaaaaaacgttaacactcttatcaggcatatggtaaggattttaaatatctcagagatagggtatcta

SEQ ID NO: 131811 - DNA, 201 bp, Homo sapiens
gtcataagtttaaggaaatgaaatcagtctgacctttcctttgccaagagattgtcttcggttgttttcattacccatctgcactgagggcttgcaccttyaataatctcagctatgccagtaaataggtttaaaatattatattcattttggtgccaattaatgcacttaagacattttattggtgttatttctgtagta

SEQ ID NO: 131812 - DNA, 201 bp, Homo sapiens
ttccataccatagagctgaattttcaccaatgcaaaatttagataatttggcgggggggctgttactgtcattaggaagtactcgacatccagtgatgtcrcttgctgctaggtcttgcaccacctagtggcctgatttctaaatggcataaaagccttcggacggtgagtgttgtggtgacctgcctgaggcctttgcta

SEQ ID NO: 131813 - DNA, 201 bp, Homo sapiens
ggctaataagaatattactgttataaacatccacatacagcatactaaaataattattaatgagttagtaacatctgggatttgcttcaaatacactctgwgcatccataatctgaaaatccaaaatgttccaaaatccaaaactttctgagtgccaacatgaagctcaaaggaaatgctgattggaccatttcaggtttt

SEQ ID NO: 131814 - DNA, 201 bp, Homo sapiens
tatagataggtgagtttttaggtaatttttaaataataaaatacaaacatgggcctcaccacagttgaaaatcaaaatagaaggaagtcatgagagatcctttttttttttttttaaattgagactgagtctcactctgttgcccaggccagagtgcagtggcatgatctcggctcactgcaacctctacctcctgggttc

SEQ ID NO: 131815 - DNA, 201 bp, Homo sapiens
aaactcctggccttgagtgatctcccacaccagcctcccaaagcactggtactacaggtgtgagccaacatgctcggcctgttacacacacacacacctgrtattacaggtgtgagccaacatgctcagcctgttacgtgcacacacacacacctggtattacaggtgtgagccaacatgttcggcctgttaagcacagag

SEQ ID NO: 131816 - DNA, 201 bp, Homo sapiens
aacaagagcaaaactctgtctgaaaaaaaaaaaaaaaaaaaaaaaaaaaaaaaaatcccaaatagactaaaagggaaaatcctaccccagtcaagaccccrcacaatcataattgagttataccgtggaaaacactttgagcatccatgagacggtcttactgttttttttatttttctcaatgttctaacatatgtgaaa

SEQ ID NO: 131817 - DNA, 201 bp, Homo sapiens
ttctgatgggtgtgtagctgtattttattgtgattggaatttgtatttcctggattactaatgatgacgggtgtttctcaggagcatactggtcactcagrtggctctttttcaagagtctgttcaaatcttttacttcattttttaaggtgggttgtctcttgacaatatggatatccttttcccgtccaaggctgtccc

SEQ ID NO: 131818 - DNA, 201 bp, Homo sapiens
tggctggttgtctgaggcagctttttgtggtattagtacagagatttgctaaattgtacgttgatcttcagtgtatcgctttttttttttttttttttttwagaaatgttttgaataagtaattgctttactgttctgtgtttttctcctattcctttttaggcttctctacagtttagcctttaatgccaggtttctgag

SEQ ID NO: 131819 - DNA, 201 bp, Homo sapiens
gtgtctcggtgtctcatcaaatggctggttgtctgaggcagctttttgtggtattagtacagagatttgctaaattgtacgttgatcttcagtgtatcgctttttttttttttttttttttaagaaatgttttgaataagtaattgctttactgttctgtgtttttctcctattcctttttaggcttctctacagtttagc

SEQ ID NO: 131820 - DNA, 201 bp, Homo sapiens
ccaaagcaccttagccctggcgtctgagctgagtgcagttcctgctcccacgcatgaagcctgttcctgcccggcagcccctcctgcggagctccactctygaggctgcggcccaggcttgctgcttgtctggctcttcccggtgctgggggtggccgttcagcagcttcccggcaggaccccttgcttagtcctcactcc

SEQ ID NO: 131821 - DNA, 201 bp, Homo sapiens
ccaaaactgtgctcaaatcctaataccccatcctgtgggcatggccttgtttggaaatagggtccaatagctgcgaggccttgtttggaaatagggtccartagctgcgaggcgtgagttcatgtggttttcagtctcgcagtgtgtgatcatttgccgtagccaccttgggagactaacaaacctgcagttcctgaagga

SEQ ID NO: 131822 - DNA, 201 bp, Homo sapiens
caactgcaaacatggatcatgtatgctcaggttgtgtagcatgtggacatagtgtatcttctctgtgggaacacagtttcaggtgcacatatgggttcctkttctcaaagcggttgatgatggcagtgccctcccctgaaccatgcaccatggagactcagaagctccaggtggctcagccaagctccttacggccccgct

SEQ ID NO: 131823 - DNA, 201 bp, Homo sapiens
aactcctggcctcaggtgatccacctgcctcggccacccatagtgctgggattacaggcatgagcactgcacctggcctaggttaaatatgctatttatcttttttttttttcctttttgagacggagtcttgctcactctgtcgcccaggctggagtgtagtggtgcgatctcagctcaccgcaacctcgcctcctgggt

SEQ ID NO: 131824 - DNA, 201 bp, Homo sapiens
ctctccttccccctatcttttctgcaaagcacctgtagaacattcttagggaaagataaaggacatttcacttacttccccaaagctgttctctgattcakcctgtttatcagagcacatcttaacttggtccaccttgtgttttttttggttttggatttttgtttgtttgttttttgaaatggaacttctctcttgttg

SEQ ID NO: 131825 - DNA, 201 bp, Homo sapiens
cgactcagccagtgactctgaggaggagagtgaagaagccgacaagccctcaagcccggtaagccccgtgccctgcatctggggggctgcgatgcaggcarccccgtcggatcttctagctttctgtccacccgtagtttcagttacacaagtcagaccctcaagcagcctttgcagagaagccccgtcagccccactacc

SEQ ID NO: 131826 - DNA, 201 bp, Homo sapiens
gaccagcaatgaatgagagcctctgttgttcccagtcctcatcagcacttacagttgtcatttaaaaaaaaaaaattctatgggccaggcgtggtggctcwcgcctgtaatccccagcactttaggaggccgaggtgggcggatcatcaggtcaggagttcaagaccagcctgaccaacatagtgaaaccccgtctctact

SEQ ID NO: 131827 - DNA, 201 bp, Homo sapiens
tattttggcacaagtcccttatctcatcaccagctggtagtacggtgcacacacccacacttgaagtaggtttcacttctgcagtgaaaagcagagatggrgcctctcagtgatcgagcatcccacaccacctaggaaacgttctcgccagaaagttaaatctaaatgtggtggaacctctacatctaactacaaaattac

SEQ ID NO: 131828 - DNA, 201 bp, Homo sapiens
tgtcacagaaatattcgaggagagaaaacaggagtgtttcagaacaattttataagcatgactatgtcctcataagatatttgtgagttaagcctgttgcwtctaactctgcccactgacaaggtagagcaatggtggcagatcccccagcagtgaacagttctggggcccaggctggggttgcttcacagcaaaagaagc

SEQ ID NO: 131829 - DNA, 201 bp, Homo sapiens
tcagttcttgagaaaaagtcgtaactggattcatttcagaatcttgggagtaggagatggagtggtggagggtataaaagaaaccatgtcggctgggcgcrgtggctcatgcctgtaatcccagcactttgggaggccaaggcaagtggattgcctgagcttaggagtttgcgaccagcctgggcaacatggtcaaaccca

SEQ ID NO: 131830 - DNA, 201 bp, Homo sapiens
ctcagaaaactcagaaatactctttcaggaaaaagttgtacaaaattgcaccacttagaggtatctttcattagaactcagatgagctaagacatttccarattcgtgggtttttttttttttaatattttaggtttgggggtacatgtgaagttttgttacatagataaacatgtcatcggagtttgttgtacgcatcct

SEQ ID NO: 131831 - DNA, 201 bp, Homo sapiens
cataataaaatactaagctgtgatgacatagtgaagtgtgtccaggccagcctgtttggaaaggttatcaaggagatcagactcgatttttctggagttawgatcacagatctgactccatttgcttacgtgaggcaagtgctgcaattgttttctctttgggagatgtgacagtgatatctggggtgctgcttttttccc

SEQ ID NO: 131832 - DNA, 201 bp, Homo sapiens
acatttaattgtataataatttagtagaagaatgtaaatgagaacttaattgtctcatataatttgataatgtttgtaatctgtagaaaatatatgttctyatgaacagagattgaatagaaatagatatctaggagttaggcagacctgatctttccgttgcctgacctggagcaagttaccccctcaataaagctaagt

SEQ ID NO: 131833 - DNA, 201 bp, Homo sapiens
tagttatgtcccatgcaatattgtggacatactttaaagaaagcaatattttggacatacttctactaaaaatgtattatttgatataaataaatataaayatattatttgatgtttattaaaccatccattaccacagtgccgtctatcttgatatcccatccttaacataactcccttggctggactcacttttttacc

SEQ ID NO: 131834 - DNA, 201 bp, Homo sapiens
tttaaaaaatgtagttatgtcccatgcaatattgtggacatactttaaagaaagcaatattttggacatacttctactaaaaatgtattatttgatataartaaatataaacatattatttgatgtttattaaaccatccattaccacagtgccgtctatcttgatatcccatccttaacataactcccttggctggactc

SEQ ID NO: 131835 - DNA, 201 bp, Homo sapiens
ttaaagaatgaattttatggtatgtgaattacatagctgttagtgtttttaaagtctttactagcaaaatgtcattttcactggattctgaccaattgctmcctcactcctccttttattgtttaggaagaaaggcgaaggttgaaaaatgcaataattatccagtcatttattcgaggctatagagacagaaaacagcaa

SEQ ID NO: 131836 - DNA, 201 bp, Homo sapiens
ttttctttaattcaaggtctatggtaccgttgcttcaggtgatatccaggggttctcctatgtcttttgaagattctagtcgaatcatcccactcttttayctttttagctccttgtttagtcattcactaatttccatacatgataacgaattcttcggtgatcccatagaaggtaaggattttgagaaaccagtttgct

SEQ ID NO: 131837 - DNA, 201 bp, Homo sapiens
gcaaacacatctagtcagctaaaattgctcattaaaggagtgagagcagaagaaatgcattttccaaattgaatgctagatttacagtccgtttaataccrgcgacctctcgcacactaatgttcagttcgagtcatcagctgtccctttgggtcttttatcactgcttttgtcaagctatctatttaattgaaagaagtt

SEQ ID NO: 131838 - DNA, 201 bp, Homo sapiens
gaattaggattaaaggtctccatgaatgttttcctaaaccagttggtggcggtgaatggataaagacagtctccccctaccctgttttattaatatgtgartattaccaagtaaaaggacacattcaaaagatcagactgtggatggtttcttgaagcaaaagtttgttaaagcaaaatggcattttggttaggaattcct

SEQ ID NO: 131839 - DNA, 201 bp, Homo sapiens
taaacttttgggaacaaacaggttgaaagtagatgcacagagtggcaggaccggtgtagagaacactgcatctgtgcgttgtatttaatcacaaaggctasagctgctaattggccaagtgggaagctgctgccaaagctgtgattaaaagtgatgattagtcacaaagcaaataaaataatggacaagattcctttgtct

SEQ ID NO: 131840 - DNA, 201 bp, Homo sapiens
agggtgaaaatttaccttttttttgttggtggtggtgattgttttaggtttgaaatcaagttgttgtaagaccttttgagtttagaattgtttaaagacctttttttttttaaaggatttctgttctttggtcacctgtcccccaaaccattttatgctacctgctattgagctgagcccccaaaataaaaatcactgcat

SEQ ID NO: 131841 - DNA, 201 bp, Homo sapiens
tttgttactactttgtttaaaagtgagaaaatattataagtacatgggtgatcattcagatgggaatgtaaacagtcaaataaaatactagagcctttcasctccactcctcacacccccagttcttttttttttttttttttttttttgagacagagtcctgctctgtcacctgggctggagtgcagtggcatgatctcg

SEQ ID NO: 131842 - DNA, 201 bp, Homo sapiens
ctcttgaagtgtaatttagagctataattactttagcttgatgagataggaaatcctgttttgagatgtctgtgtgcatccaccaaacttaacaggagttwcctcctgtgatagggaaacaggaggaagtggcagggaatgaggaggaaggttcccatgccctcattatccatatgtctggagagagagagagagagagag

SEQ ID NO: 131843 - DNA, 201 bp, Homo sapiens
gttttcaactatgagtacaataaattgaaaccaaaaacttgttaatcaataggaagttcagtcctttttcaaaatcaaactgctttctcctggtaccttayttgcccctttcctcccagccactcagtggtgaacttgttcctcattatattgagctgtttttagaacttgttctcatattgctttgttactactttgttt

SEQ ID NO: 131844 - DNA, 201 bp, Homo sapiens
acagcagggagcgtgcacgctgtcaggacgatggcctcggtcgtttcagagaccctttgggtgtttgatggaccttgtctgtaactgctactaggcatccytacgggttctacatctgcataatttgaaagataaggatgttttcaactatgagtacaataaattgaaaccaaaaacttgttaatcaataggaagttcagt

SEQ ID NO: 131845 - DNA, 201 bp, Homo sapiens
ttaaaaacttctaggttgggagttgcagggcattccagctgatttgcctggagttcatttctggtgctccagggagtcctgatacccgcagcacctgggcyggaacctccagctgtacgtgccatccaggctccatggaggatggtctgtggcacagctgccgactgctcggctgtggcctggcccacagcccttcgagcc

SEQ ID NO: 131846 - DNA, 201 bp, Homo sapiens
aagcggaatggaaggagtgagacttgagactaattgtctcattgtctcattttctttggacattaaatctgggcctacagggaggtgagtaaagcaccatmcagtatttaaggaggcacttactctcaggttcatgcacaggcggaccctgcactggcacatccctgagagtgagtgcctccttaaatttgtgccttaagc

SEQ ID NO: 131847 - DNA, 201 bp, Homo sapiens
cttccttagtggttaagttgtattttttcagttccaaaaagctatttttaaaaagtaataaagcaacagcagtgccctgttaatataatcctaacatgcgrccatttgactatgttacaaccaagagatccaaagcttgtagcgctgtgccttatccttttctgttattgaagattttgattgattttgtttttgtttttt

SEQ ID NO: 131848 - DNA, 201 bp, Homo sapiens
ggtttcgttctgttgcccaagctggagtacagtggctcgatctcactgcaacctccaccccccaggctcaagtgattctttcacctcggcctcctgagtakctgggactacaggcatgtgccaccacacccggctaatttttgtattttttgtagagatagggtttcaccatgttacccaggctggtcttgaactcctagg

SEQ ID NO: 131849 - DNA, 201 bp, Homo sapiens
gattctaaatccctaccacgtttttaaagttttcttttaagcttgttaagaaatagtaagagaaggggcttccttttcgatccgccatctgcggtggagcygccaccaaaatgcagatttccataaaaacccttacggggaagaccatcaccctcaaggttgaacccttggatatgatagaaaatgtaaaggccaagatcc

SEQ ID NO: 131850 - DNA, 201 bp, Homo sapiens
gcttaaaaatcttacacagaaactgccgcttctagcatcttctgtggtacagcagttgtttactttctaacagtcgataaaattttagccttttaaattayagtattaccattatttgtattgttattgcacattctgtgccatgaagctttttaacatttgcaacagaacctttgtcatgttgtcagtctattcagtaag

SEQ ID NO: 131851 - DNA, 201 bp, Homo sapiens
agatttggtcatatttaatgttcagagaagataacgatagtacctaaagctccacaggcacccagagcagttggctgtgctcactgtggatttcacattgrtgggtagttacagcagggagcgtgcacgctgtcaggacgatggcctcggtcgtttcagagaccctttgggtgtttgatggaccttgtctgtaactgctac

SEQ ID NO: 131852 - DNA, 201 bp, Homo sapiens
tctgaataaatttattagtacttgaataatgtattagtttctgcatttatttaatgtaacgttttgatctggcgtggaagaacatgagaggaggcacaagrgttaacacatcagatggacataatgctattgtatttcagaacttaaaatccactaaaatttgtatattcagctagatacagctagttgttccagtgtttg

SEQ ID NO: 131853 - DNA, 201 bp, Homo sapiens
aaacctgttaaagcaagaatccgttcttaaaagctctttgcaagggtgggggacattggacgaggaggaggagtggttcccacaggcacgcaatttgaaarcccttgttctcaagatctagacagaggttagggattgcctcgggtctcactgatggtcagtaattcacctagctcccctgagttatgtgtgaatcagtgt

SEQ ID NO: 131854 - DNA, 201 bp, Homo sapiens
gtcatgttcttagagctttttctgacatgttacttttatatattcttcttatgaagtcaaattgtaaaaatccattctcatttgatgtatttcccacattrcacatttattgcacttcagaacctggaaattgtatgctaagtatgctttgtattttgctttttaaagaactaactcatctggtttcaggactagatctac

SEQ ID NO: 131855 - DNA, 201 bp, Homo sapiens
ccaacaagtattcatttttttgtatgtttataaaaaagagtgggttctgtagatggaatgtagataaatttttgtttttggaagaaagttattaaatagtyacctcccatagaatttgtgaaattaaacccttatttatatgcagtgtattttgtattcatgtgaagatgaggctgtgggctttctcagcgagagagagga

SEQ ID NO: 131856 - DNA, 201 bp, Homo sapiens
cttctcccgtatgctgcttggaaatgcttaggttcctgcattatcctgccggaaatactatctattaagccgtttaagtgtcttcctcaaaaaagcccagwagaaccataaggagtaattttttgtaacaatgcaaattcactgatttagatcatttagctttttaatccatttgcccttggagagaagagggggctatgc

SEQ ID NO: 131857 - DNA, 201 bp, Homo sapiens
cttaagaggacttggagtttgggacagggtgggactcgtgaggtactgcaacatttaatatgtgtgggagttggggatacttacaaaagagtcacacctcygggagtggaggagagtggtgtccagggagtgaatctcagggagggaggagtgacaggcaatgccaagtgctgcacagacacagtgagtccactgactgcg

SEQ ID NO: 131858 - DNA, 201 bp, Homo sapiens
cttctgaaaagaatacaaattgtatcagcatttttcatattattgttgtgccaaatttgagttgaagaattcgaggtagaatcaaccaaagaacgcagaarcgtttagcccatgatctcctgccttccattgattttgacagaattgcaaacgatgagacctgactccttcaacaccgaccattttcatttttcagtccta

SEQ ID NO: 131859 - DNA, 201 bp, Homo sapiens
atcccagctactagggaggctggggcaggagaattgctagaacccgggaggcagaggttgcagtcagccgagatagcgccactgcactccagcctgggcgrtagggtgactctctctccaaaaaaaaagagggtgaaaatttaccttttttttgttggtggtggtgattgttttaggtttgaaatcaagttgttgtaagac

SEQ ID NO: 131860 - DNA, 201 bp, Homo sapiens
aaggcgggtggatcacgaggtcaggagtttgagaccagcctggccaagatggtgaaaccccatctctactaaagatacaaaaaattagctgggcgtgatgyacgcctgtaatcccagctactagggaggctggggcaggagaattgctagaacccgggaggcagaggttgcagtcagccgagatagcgccactgcactcca

SEQ ID NO: 131861 - DNA, 201 bp, Homo sapiens
ttgttaataaagctttccatgatgtgcaatatcaggtgttgtgtatgatatcagataatttcactgttttatggcacctgttgagagtttcataatttccrtgacaggcttatctttagtatgtagaaatctctgaacttaataatgccatataagatattttccaccctggccttattttgttttggttaagcgttaaat

SEQ ID NO: 131862 - DNA, 201 bp, Homo sapiens
gctgtgaaaagaaaagaatggaaaggtagggaagttgaaatgtctttgttcatttattttgggcttattttatattttcattgtccacagtataggttgcyctcatctaaccccaggaatgcagttggggtgtttttgttgtttttttgttttgttttagaaatacaggtgggggtcttgctttatctcaaactcctgggc

SEQ ID NO: 131863 - DNA, 201 bp, Homo sapiens
atatttgattaaaccctggggtctttgttaataaagctttccatgatgtgcaatatcaggtgttgtgtatgatatcagataatttcactgttttatggcayctgttgagagtttcataatttccatgacaggcttatctttagtatgtagaaatctctgaacttaataatgccatataagatattttccaccctggcctta

SEQ ID NO: 131864 - DNA, 201 bp, Homo sapiens
aagtgaattattgagaataattgtatcatcctttaaaatgtgaaacgttaaaagaagcagatctggtaagttgaacgttcaagttcaatttgaacattctrtataaaatgagaaccagcaaacgagtctcctataaccatcagctgtaggatgacttaagtcaggctctctagcacatttgtgaaacaatctttctgtaaa

SEQ ID NO: 131865 - DNA, 201 bp, Homo sapiens
actgaaatgtatttaataattacctattggaaccctacccatcccttagaaatgaaatgctgttaatgcatagtcagtttttttccccatctttgtgatgrtaaatggtcaaatattttcctagcattttaaaaactttcttttgaacttgcatcatcttgtgcattatgttttataaatatgatttttagtggctgatga

SEQ ID NO: 131866 - DNA, 201 bp, Homo sapiens
tctcagtatcctctcagaacaagtctaaacataaacatgtcctcccctctcattttcagttaaaatgagagatcatattgctttttcacctcaacaaaatrtcttagtgattccatatcggcatctttatatttgttatttttcatggtatataatactccatagcatagtttgatacttaatataaccactttcctatca

SEQ ID NO: 131867 - DNA, 201 bp, Homo sapiens
gtcaggagttcagaccagtctggccaagatggtgaaatcccgtctctactaaaaatgcaaaaattagccaggtgtggtggcaggcggctgtaatcccagcwacttgggagactgaggcggagaattgcttgaacctgggaggtggaggttgcagtgagccaagatcacaccactgcactccagcctggtgacagttcgaga

SEQ ID NO: 131868 - DNA, 201 bp, Homo sapiens
tttctgtttaaaaaaaatgataggccgggcacggtggctcacacctgtaatcccagcaccttggggaggccgaggtgggtggatcacgaggtcaggagttyagaccagtctggccaagatggtgaaatcccgtctctactaaaaatgcaaaaattagccaggtgtggtggcaggcggctgtaatcccagcaacttgggaga

SEQ ID NO: 131869 - DNA, 201 bp, Homo sapiens
agaaagtcataattcttgataaggataaaaccaaactagattatcacgaatcttccttgctctaagaatggttgcgtttctactctgcagtcagtggcctwtttaaaaagttaacttttcctcccggcactctgggaggctaaggcaggcagatgccttgagcccaggagttccagatcagcctgggcaacatggcgagat

SEQ ID NO: 131870 - DNA, 201 bp, Homo sapiens
aagcaagcatcagtttttgtgtgctggactgggtaggattcttaggactatttacatattaacattactgtcaccagttagagggacagcatgggcaaagstgtccaaccatggagacgtggtgttcagctacaggttgtggccagaatgggggtgggcaaagggtgtagggaaagtggaagagaaggctgggaggaaggt

SEQ ID NO: 131871 - DNA, 201 bp, Homo sapiens
agtaattttttgtaacaatgcaaattcactgatttagatcatttagctttttaatccatttgcccttggagagaagagggggctatgcaattggaccaagrggagtcaatgattttgaagtcagtcagcccttggtttgtcaccatgacaaccgtggagcaggaggtagccacatcatgacagggaggagaggtgagtgaa

SEQ ID NO: 131872 - DNA, 201 bp, Homo sapiens
agagaagatgcatgggaaaggtgatttatggcattacttataatactgaaaaatactgaaacagcctacatgtctaaatacaggacatttgttaaataacygttaatataacaatgcagtgaaatactgtgcagccatttaaaatggtcatgatgcgtattaatgtctgtcattaatttattaacatacttgtatttatga

SEQ ID NO: 131873 - DNA, 201 bp, Homo sapiens
ccacccacctcggcctcccagagtgctgggattacaggcgtgagccaccatacccagccttttttcttttctttttttttttccttaatattttaaacttytttgaaacagagtctggctctgttccccaggctggagtgcagtggcgcaatctcagctcatggcaacctctgcctcctgggctcaagccattctcctgcc

SEQ ID NO: 131874 - DNA, 201 bp, Homo sapiens
tcgtagctcttttttatttatttattttttttggaaacggagtctcgccctgttgcccaggctggagtgcaatggcacgatctcggctcactgcaacctcygctgctcgggttcaagtgattcccctgcctcagcctcccaagtagctgggattacaggcacgtgccaccacacccagctaattttttgtatctttagtag

SEQ ID NO: 131875 - DNA, 201 bp, Homo sapiens
gatcttgctcacagtgtctgttaacctgtgattgatttgacttggtagaggggaccatggactttatagaaagagcttgcaggtgagcctattagctaaawgttccataagacaaggaaccagacttaaaaacgagagaaaaggaagaagttctaggtgaaataagtcaatttaatatatcgtagctcttttttatttatt

SEQ ID NO: 131876 - DNA, 201 bp, Homo sapiens
gactacgccagctttggttttcattagtgacaggtttgttttgggcagaagggaattgagaatcattaggacaggaaattatcgtttacccataagtgccycagcttagcaacagaaacactgtcatagttctgcctgataattgcttatttgtttatggcatttgtctcttgctaaggaaatggagtcatggtgtgtgaa

SEQ ID NO: 131877 - DNA, 201 bp, Homo sapiens
gagttttactgctgccgctgtgactggtgaaactcataaaggttaagtgagttatcttgcatcaacagtgggtggctaaagcagagacaaaagactcctasaatgatttactgtcttgagaaattcttttctttcatttccaaaccaaaatacaagattttaagtatgttttgttgtgttttttttggtgcatttcagcca

SEQ ID NO: 131878 - DNA, 201 bp, Homo sapiens
ttgggaggccgaggccagcggatcacctgaggtcaggagttcaaaaccagcctggccaacatggtgaaaccccatctctactaaaaatacaaaaattagtygggcatggtggtgcgtgcctgtaatcccagctacttgggaggctgaggcaggagaatcgcttaaacctggaaggcggaggttgcagtgagtcgagatcat

SEQ ID NO: 131879 - DNA, 201 bp, Homo sapiens
ctgatgaactggctgtgtggggttgggagctcatacactgttctgtctactttagcatatggggctttgttgttgttgttgtattgttttgagacggggtytcactctgtcacccaggctggaggagtctagtgatggcatctcggttcactgcaccctcagcctcctgagtagctgggattacaggcgtacaccaccaaa

SEQ ID NO: 131880 - DNA, 201 bp, Homo sapiens
aacagtgtagaagtttttaaacatttgttgaaataatttgatttttcttatttgaatcgtgtaatttaaaaaatatcatctttgacttaacatattttaaytgagtatgtaataggtaggaatttcatacttaaaatccttcatggtaaactgacttagcctagtactctgttgttgaatttttcctctgccagaagtcta

SEQ ID NO: 131881 - DNA, 201 bp, Homo sapiens
ccatggctgcttttgtgctgcagggcagagtggcatatgcggttatgaactgggaccccccaaaactgtgctcaaatcctaataccccatcctgtgggcayggccttgtttggaaatagggtccaatagctgcgaggccttgtttggaaatagggtccagtagctgcgaggcgtgagttcatgtggttttcagtctcgcag

SEQ ID NO: 131882 - DNA, 201 bp, Homo sapiens
gagtgcaggaaattactcgaccaatcaaatatgagatttttttattggattttgaaagacctcatctcttaaaaaaatatttatgctagctgattacacarttgtggctagaatgtttatcctgtcacaaacatgcagtataaaacagagctaatttaaatgctcatgcattcttcacaaagttcatcttttttaaatcta

SEQ ID NO: 131883 - DNA, 201 bp, Homo sapiens
ctgtatctgttaatgttatgtgattttccttctgcagcttgtggatatgatggatcacattaagtcattttagaatattgagcccgtcttgcgtatctggrataaatcccacttgactgtgatgcataattctttgtatacgatgttagattgagcttgttgatattttgttcaggatttttgcatctcttttgatgaggg

SEQ ID NO: 131884 - DNA, 201 bp, Homo sapiens
tagtaaactgtactacttagtatatatattaaactaaacttttttttaatttgagagggagcctcctgttgcccaggctggagtgcagtgttgtgacctcrgctcactgcaaactctgccttctgggttcaagtggttcttctgcctcagcatcctgagtagctgggtgggcatgtgccaccacacctggttaatttttgt

SEQ ID NO: 131885 - DNA, 201 bp, Homo sapiens
cctggctactctagtacagacgggggtttcaccatgttggtcaggctggtctcgaactcctgacctcgtgatctgcccgcctgggcgtcccaaagtgctgsgattacaggcatgagcccctgcgtccggcctttacgatctgtttctaagctctgttatggctttattctctcctccattgatctctctcccttttgtcaa

SEQ ID NO: 131886 - DNA, 201 bp, Homo sapiens
attaggctgaaatagctaagaatgatttataaaacccaaccagatacctctttttacaaactgaaagtattttcttagttacaactgattgaaagccagtaacactatagatttcttataatgagggtctaacgtcatttttctctattaaattttgcattatttggccaggtacagtggctcatgcctgtaatcccagca

SEQ ID NO: 131887 - DNA, 201 bp, Homo sapiens
cggcactttggaaggccaaggagggtgtatcacctggagtcagagttcgagaccagcctggtcaacatggtgatactctatctctactaaaaatacaaaarttagccaggcgtggtgacaggtgcctgtaattgcagctactcaggaggctgaggcaggagaattgcttgaacccgagaggcagagattgcagttagctga

SEQ ID NO: 131888 - DNA, 201 bp, Homo sapiens
agtatattcttgtaacaaacgtgcataggtaccccctaactctaaaataaaagttgaattttttttttttttttgagatggagtttcgctcacgctggagygcagtgttgcccaggctggagtgcaatggtgcgatctcagctcaccacaaacctccacctcccgggttcaagcgattctcctgcctcagcttcccgggta

SEQ ID NO: 131889 - DNA, 201 bp, Homo sapiens
tagagggggaaagagagggacggggacaagggctgggaagctacctgttggtaactgtgctcactccccgggtaatgggatcattcacaccccaaacctcsgcgtcctgcagtatattcttgtaacaaacgtgcataggtaccccctaactctaaaataaaagttgaattttttttttttttttgagatggagtttcgctc

SEQ ID NO: 131890 - DNA, 201 bp, Homo sapiens
gatgggatgatagacaccagggactactagagggggaaagagagggacggggacaagggctgggaagctacctgttggtaactgtgctcactccccgggtratgggatcattcacaccccaaacctccgcgtcctgcagtatattcttgtaacaaacgtgcataggtaccccctaactctaaaataaaagttgaatttttt

SEQ ID NO: 131891 - DNA, 201 bp, Homo sapiens
tgtccttctgacctccattactgtagatgagcgttacctgttgaacttcaggggcatggagccactcaccacttgtcgtttgtgcccggctgctttggctyggcttctgtctgagaggtggactccatccgcctcggtgcacggcattgccctttgtgtgaacgcaccgtggctgattctgttttcttacagacctttgct

SEQ ID NO: 131892 - DNA, 201 bp, Homo sapiens
gtctgtagccccacaaaggtgactgtccttctgacctccattactgtagatgagcgttacctgttgaacttcaggggcatggagccactcaccacttgtcstttgtgcccggctgctttggcttggcttctgtctgagaggtggactccatccgcctcggtgcacggcattgccctttgtgtgaacgcaccgtggctgatt

SEQ ID NO: 131893 - DNA, 201 bp, Homo sapiens
gtcttggactcctggcctcaggcagtccttctgccttggcttcccaaagtgctgggattacagaagtgagcctctgtgcaatgttttaatttatttatttatttttttttttgagactgtcacgcaggttgggatgcagtggcacgatcttggcttactgcaacctctgtctcccagattcaagtgattctccggcctcag

SEQ ID NO: 131894 - DNA, 201 bp, Homo sapiens
atccacccgcctcagcctcccaaagtgctgggattacaggcgtgatccaccaggtccagccatatttcagagtgaattttaagtggaaatttgctcgaacrttaatgacagacagcatacttagttacctgtcttaattggtctcctttaacttgtattattaccattttttcgtttttccaatattattaaatatttatt

SEQ ID NO: 131895 - DNA, 201 bp, Homo sapiens
cctccttcctatattgctgtttttttctaaaagtcataaagtttaatgctttactaaatgtagctctattatcaattttgtgttattttttgtataaggtmtgagatttagatcaaggttcattttttttgtggcttatggctgtccaattcctccaacgccatttttggaaagatgggtatattgttaaaaatcaactgg

SEQ ID NO: 131896 - DNA, 201 bp, Homo sapiens
tagggaggtctcaggaaatttacaatcatggcagaaggtgaaggagaagcagacagatcttacatggctggagcagaagcaagagaggctggggagaaggygccacacattcaaaccaccagatctcataaaaactcattgtcacgaggacaacacctaaggcgggatggtgtgaaacgatgagaaactgcccctaggatc

SEQ ID NO: 131897 - DNA, 201 bp, Homo sapiens
gaaagaaagtttcaagcatgttggcttgataggccagttccaagttggcaaaaataattatctcttttttctttctatccatgaaataaaaaattaagagmcaagaatgtttatggaattgcattatttcttcaaaatatgttcctagttttaaaggtattacctactattttttttaaaaccatcacattgaggcacttc

SEQ ID NO: 131898 - DNA, 201 bp, Homo sapiens
cagctcttactccccatgacatcttttgcagctttgagagacagaacaaaggggttctgctttatttcttttccttcaaaggctgcaccttatgggtgagwctgatcacagactggatataactgagatgagacagtggtggtcaatcaaactcagatatttaagcacaaaatgagtttgtggggttttttttttacacaa

SEQ ID NO: 131899 - DNA, 201 bp, Homo sapiens
taaaactttttttgtcaatctagagacctcatacatttttagctatcagccccctgtcacaaaccctgtcatcatatgcaaccactaatcaactttctgcytctatggatttgcctattctggacacttcatagaaatgatattaattcatcagggttttttattctctagttcatgaatttgtactttagtctgtatcat

SEQ ID NO: 131900 - DNA, 201 bp, Homo sapiens
ccctttgtggaaaacaccaagaagcttttaagatttgattttttggatccattctttctctcaataagtatgtggactactatttccttttatttatcttkctctcttaaaaataactgctttattgagatataaatcaccatgtaattcatccacttaaaatatacagttcagtgatttgtagtacatttgaagatatgt

SEQ ID NO: 131901 - DNA, 201 bp, Homo sapiens
accctttggaagtggacccagaaactgcattggcatgaggtttgctctcatgaacatgaaacttgctctaatcagagtccttcagaacttctccttcaaaycttgtaaagaaacacaggttagtcaattttctataaaaataatgttgtattaataattcttttaactgagtggtctgtattttttaaaaagaatatgctt

SEQ ID NO: 131902 - DNA, 201 bp, Homo sapiens
ttctctccttcattatgtatgaactggccactcaccctgatgtccagcagaaactgcaggaggaaattgatgcagttttacccaataaggtgagtggatgrtacatggagaaggagggaggaggtgaaaccttagcaaaaatgcctcctcaccacttcccaggagaatttttataaaaagcataatcactgattctttcac

SEQ ID NO: 131903 - DNA, 201 bp, Homo sapiens
aggcattatatttatttctatgttccaggtctctaaaggtcctaatccagtcctgatcaaacagaccagtgatggaccatcctgagcttctctcaggagaraaatcaagaggggcccaacttgtaatcataggagcttatgctattttaatgccatccatcagactacaatcaattaccactcatctagctttttgtccat

SEQ ID NO: 131904 - DNA, 201 bp, Homo sapiens
ggttaatctactgcaaagttattttccactttggaatggattagtaacttgtggggaaaacctctgagaccgtgtaaatatcctctttgtcttcaatgttycacctacgagttttacaacccatgtatgttttttactgaagtcactattactatgacagtggcaaaatgatgaccatggtcaattacaagccaccaagac

SEQ ID NO: 131905 - DNA, 201 bp, Homo sapiens
taccagagtctgggtatttataaagaaaagggatttaattgtctcatggttctgcaggctgtacagaaagcatagtgacttcttcctctagggaggtctcrggaaatttacaatcatggcagaaggtgaaggagaagcagacagatcttacatggctggagcagaagcaagagaggctggggagaaggtgccacacattca

SEQ ID NO: 131906 - DNA, 201 bp, Homo sapiens
acttcccagtataatgttgagtaaatgtggtgaatttttgaattgttcctaatcttaggagggaagccttcagttctttcatcattaagcatcatttagaygaagtgggctgtttttttgtagattctctttatcaaattgaggaattttctctccctagtttgctgagtttttatcataaatgaatgctggaagtactca

SEQ ID NO: 131907 - DNA, 201 bp, Homo sapiens
tttgctaaatcccatgagattgtggcctatcacatcttagtttttgttcacctcaaaacagtttctatttgcccttttggtttctactttgactcattggktacttaaatgtttattatttaacttccacatatgtgtgagtttctcaattttctttcccttattgattttatctttattccatgataggtgacagagata

SEQ ID NO: 131908 - DNA, 201 bp, Homo sapiens
tgtcatttatttgccatggctgtgacaacaaaggaaggaacaggagtgggaaaacccaaggccaccctggttttggtagatggtgcacacgcttccactarctgttctggggcaaagatccaaatgcactattgggcctggctatgctgcttctgctgggtcccccaaacatgagcctccacgccatttctcagttgtatt

SEQ ID NO: 131909 - DNA, 201 bp, Homo sapiens
taactttccctctgagcacttcctttgctaaatcccatgagattgtggcctatcacatcttagtttttgttcacctcaaaacagtttctatttgccctttkggtttctactttgactcattggttacttaaatgtttattatttaacttccacatatgtgtgagtttctcaattttctttcccttattgattttatcttta

SEQ ID NO: 131910 - DNA, 201 bp, Homo sapiens
agattactgatttgtgatttttttgttcctctaaatttagacattacagctgtaactttccctctgagcacttcctttgctaaatcccatgagattgtggyctatcacatcttagtttttgttcacctcaaaacagtttctatttgcccttttggtttctactttgactcattggttacttaaatgtttattatttaactt

SEQ ID NO: 131911 - DNA, 201 bp, Homo sapiens
ttctatccatgaaataaaaaattaagagacaagaatgtttatggaattgcattatttcttcaaaatatgttcctagttttaaaggtattacctactatttyttttaaaaccatcacattgaggcacttctttttcacgttgcccatgctgcaggagaacataaagacagcttgtctgaggcaacatacaatccaccaaagt

SEQ ID NO: 131912 - DNA, 201 bp, Homo sapiens
tggaaagaaactacacagtttgcccagcctagcctctgccttgacacggaaccatgtgagtctagacattcacctagatcattccttggggaccaatgctrctgacacattaactcaatagtttgtcctggcctgagaggtcatgtaacttgtagaaagtttagaagcagagattagtgtcatttatttgccatggctgtg

SEQ ID NO: 131913 - DNA, 201 bp, Homo sapiens
tcagaatatcactctgttgtgtcccctcaacactgaaggagtgtctcactcactttgatgctatactttctacttttgtttatttaatgcttctcaatatrcttgtttaactgttgcagatccccctgaaattaagcttaggaggacttcttcaaccagaaaaacccgttgttctaaaggttgagtcaagggatggcaccg

SEQ ID NO: 131914 - DNA, 201 bp, Homo sapiens
catttcacattggttttggttgtgaattacatgtttgcagcaggcaccatagtggtgtgtgatgtccccttagctgtatccacatatggacacaggaattkgctctttttatctctttttattttcttggttacagacatgtgacttttttttttgaaaggtaacaatcactttctcatatgttatttgatgctagtggtc

SEQ ID NO: 131915 - DNA, 201 bp, Homo sapiens
tccacaagacccctttgtggaaaacaccaagaagcttttaagatttgattttttggatccattctttctctcaataagtatgtggactactatttcctttwatttatctttctctcttaaaaataactgctttattgagatataaatcaccatgtaattcatccacttaaaatatacagttcagtgatttgtagtacattt

SEQ ID NO: 131916 - DNA, 201 bp, Homo sapiens
cccactgcacagaggacagtctcagcccaaagcctcttgggatgaagctcttgtcaacctaactacaaacagagagaagttctctgaaagaagaagatatktatttgggtgtagagtattgcaatgggaatctgcatgcctttataaactatgtgcaaattcagggaagtaaagcaagacaaagaggctccaaggaaaata

SEQ ID NO: 131917 - DNA, 201 bp, Homo sapiens
ttctttgattgcttttaacatcttgtagttttcagcatagagatcctgtacatgttttgttagatttacagctaaattatttcatttttgttggaatgacygtaaatgatattatgtttttcttgtattttcagatattgattgttgttacatagaaatgtgctttgattttgtgtgttgatctggtatcctagaaccttg

SEQ ID NO: 131918 - DNA, 201 bp, Homo sapiens
gcatgtaaaagaagactgggatatagaggctggagacgacatcagggtctcctgaacactgccgccacccccccgccccgccccacacaaatacatcccargacactgggcatctgggataaatctctattgagcatctagcatagggcccatcacccagtagacagtcactaaatagttgttgaataagtgttcctgttt

SEQ ID NO: 131919 - DNA, 201 bp, Homo sapiens
tctcctgaacactgccgccacccccccgccccgccccacacaaatacatcccaggacactgggcatctgggataaatctctattgagcatctagcataggrcccatcacccagtagacagtcactaaatagttgttgaataagtgttcctgtttaacacattttctacaaccatggagacctccacaactgatgtaggaca

SEQ ID NO: 131920 - DNA, 201 bp, Homo sapiens
acccaataaggtgagtggatggtacatggagaaggagggaggaggtgaaaccttagcaaaaatgcctcctcaccacttcccaggagaatttttataaaaascataatcactgattctttcactgactctatgtaggaaggctctgaaaagaaaaagaaagaaacatagcaaatggttgctactggcagaagcgtaagatct

SEQ ID NO: 131921 - DNA, 201 bp, Homo sapiens
acagtcactaaatagttgttgaataagtgttcctgtttaacacattttctacaaccatggagacctccacaactgatgtaggacaaaatgtttctgctttsaactctagccttttggtccagtgggatttatgaaaagtgccatctctatagctgaggatgaagaatggaagagattacgatcattgctgtctccaacctt

SEQ ID NO: 131922 - DNA, 201 bp, Homo sapiens
caatccaacagcctcactgaatcactgctgtgcagggcaggaaagctccatgcacatagcccagcaaagagcaacacagagctgaaaggaagactcagagsagagagataagtaaggaaagtagtgatggctctcatcccagacttggccatggaaacctggcttctcctggctgtcagcctggtgctcctctatctgtga

SEQ ID NO: 131923 - DNA, 201 bp, Homo sapiens
cattttctgtatataacaaaagtcctccttttagtgtgtgtatacacatatatatacacatatatatgtgtgtgtgtatgtgtgtgtgtatatatatatasacatatatacacggttatgctaaggatttcagtccctggggtgagagccttcccgaatgcttcccaccttcataactcctccacacatctcagtgggcca

SEQ ID NO: 131924 - DNA, 201 bp, Homo sapiens
gaaatctgaggcgggaagcagagacaggcaagcctgtcaccttgaaagagtaagtagaagcgcagccatggggttctgagctgtcatgaacccctccagckgcctgccatggagctgatattcctgctgttgggttattccagtgaccagacaaaaggagggctgtggtaatgcaacttcaatgggtctcccaagatgggg

SEQ ID NO: 131925 - DNA, 201 bp, Homo sapiens
aaatgaaaaggatgacaaagagataaaacactgtgcattctcttctgatgctaattcactttcccttggcctcagtttccccatgtgcccctggaggtgaycattcagggattcatgagattttcaagacaacacatgaaaaagcaaaaagacatcagaaagacaaagaggtacttagtatttatacacaaggataagtca

SEQ ID NO: 131926 - DNA, 201 bp, Homo sapiens
ctagagtctgcacatttaactatgggtggtgttgtgttttgtgcttagatggtccctatcattgcccagtatggagatgtgttggtgagaaatctgaggcrggaagcagagacaggcaagcctgtcaccttgaaagagtaagtagaagcgcagccatggggttctgagctgtcatgaacccctccagctgcctgccatgga

SEQ ID NO: 131927 - DNA, 201 bp, Homo sapiens
tgatgattgactctcagaattcaaaagaaactgagtcccacaaaggtaaccagagtgtttctgagggctacttgtggggcactcagagggaaggccttgtyctgaaaatgtgcaggaagtattccaggatgatgagaatttctgccacatagcagaacgacacatgtttgaatgttataagtggtagttggaggcactttc

SEQ ID NO: 131928 - DNA, 201 bp, Homo sapiens; identical to SEQ ID NO: 23116

SEQ ID NO: 131929 - DNA, 201 bp, Homo sapiens
agaagttaaagaacagacgtcattgattcatattaaacaataccctataaatcttatttctaggtctcatgtatttattattcaattccaccccttaagtrggctttctatataggagaggaagaagacagaaatagtttccatattatttccatattccatattatttgtggctttaggccagcagtgtagctgtattat

SEQ ID NO: 131930 - DNA, 201 bp, Homo sapiens
ctaagtataaagaatccaagatttatagtgctgaaagtagtttttatatgtttacaaagcattattgtcattactgcattttttttgcccattactccatrgagatcagaatatcactctgttgtgtcccctcaacactgaaggagtgtctcactcactttgatgctatactttctacttttgtttatttaatgcttctca

SEQ ID NO: 131931 - DNA, 201 bp, Homo sapiens
aatataatcaaatatttaggaataacattttaataaaaaacatgcatctaatcttcaaagaattttatagcttactggaacagatagacaaagaaagcagkgatgatactgcattacatcggtacagtagcatcatatgcctgtgtaaattatctgacttcaactattctatggaggtgtgggggagaaagagggagagat

SEQ ID NO: 131932 - DNA, 201 bp, Homo sapiens
agactgtttcagcaagtgaggacagggctgtgtggggttctatcctctttataacttccactagcactgaaatcgtgttctctggttacatccaaccagarccttctttgtcatttttgggatagaaagggactagtttatcctcaaattatttatggagattttatataatatagtgtttctctccacattttctgtata

SEQ ID NO: 131933 - DNA, 201 bp, Homo sapiens
cggctttggggctggcccggctgtggcagtgaggtgaacacaaagggatgttcttcagagattacagtccagccctgaagcaacaactaggagactgtttsagcaagtgaggacagggctgtgtggggttctatcctctttataacttccactagcactgaaatcgtgttctctggttacatccaaccagaaccttctttg

SEQ ID NO: 131934 - DNA, 201 bp, Homo sapiens
acacggctttggggctggcccggctgtggcagtgaggtgaacacaaagggatgttcttcagagattacagtccagccctgaagcaacaactaggagactgwttcagcaagtgaggacagggctgtgtggggttctatcctctttataacttccactagcactgaaatcgtgttctctggttacatccaaccagaaccttct

SEQ ID NO: 131935 - DNA, 201 bp, Homo sapiens
aatactaggtgcatatcacccacactgttttcagacctctgccaaaattgggattctttgtggtatgaagagacacggctttggggctggcccggctgtgrcagtgaggtgaacacaaagggatgttcttcagagattacagtccagccctgaagcaacaactaggagactgtttcagcaagtgaggacagggctgtgtgg

SEQ ID NO: 131936 - DNA, 201 bp, Homo sapiens
ccaagctaggaaccaggatatctggctcctgagctaaagtcttaaaacactatcatattgccttccaaatataacaccaaatactaggtgcatatcacccwcactgttttcagacctctgccaaaattgggattctttgtggtatgaagagacacggctttggggctggcccggctgtggcagtgaggtgaacacaaaggg

SEQ ID NO: 131937 - DNA, 201 bp, Homo sapiens
gcacaggcacactccaggcataggtaaagatctgtaggtgtggcttgttgggatgaatttcaagtattttggaatgaggacagccatagagacaagggcargagagaggcgatttaatagattttatgccaatggctccacttgagtttctgataagaacccagaacccttggactccccagtaacattgattgagttgtt

SEQ ID NO: 131938 - DNA, 201 bp, Homo sapiens
agcctattagtcacatttgtttcaatgagaaagaaaaaccagtacacggttatgctaaggatttcagtccctggggtgagagccgtctcgaatgtctcccyacttcataactcctccacacatcatagttggatagtgagctctgctgatattggcaggacttgctctggtctggctgtagtctgacggagcctggccctg

SEQ ID NO: 131939 - DNA, 201 bp, Homo sapiens
taggaatgcttgtgatttttgtaaattgattttgtatcctgagactttcctgaagttgcttatcagcttaaggagttttggggctgagacgatggggtttyctaaatatacaatcatgtcatctgcaaacagagacaatttgacttcctcttttcctaattgaatatccatttctttctcttgcctgattgccctattcag

SEQ ID NO: 131940 - DNA, 201 bp, Homo sapiens
atctaccaacgtggaaccagattcagcaagaagaacaaggacaacatagatccttacatatacacaccctttggaagtggacccagaaactgcattggcaygaggtttgctctcatgaacatgaaacttgctctaatcagagtccttcagaacttctccttcaaaccttgtaaagaaacacaggttagtcaattttctata

SEQ ID NO: 131941 - DNA, 201 bp, Homo sapiens
ttgcatctcatctgcttgaagcctggacacagaggcaccatctgtgtcactctgtgtgtggtctgccatgttgtggggtggtcactacagactcaggcagytgggcagacaataccttagccttagatgatgctgatgcagcccaggagtcagaaactgtagtgcagacaatgccctccttaggccaacacaattaagtgc

SEQ ID NO: 131942 - DNA, 201 bp, Homo sapiens
tatgcctctccatttccttagattttctttgattgcttttaacatcttgtagttttcagcatagagatcctgtacatgttttgttagatttacagctaaaytatttcatttttgttggaatgactgtaaatgatattatgtttttcttgtattttcagatattgattgttgttacatagaaatgtgctttgattttgtgtg

SEQ ID NO: 131943 - DNA, 201 bp, Homo sapiens
tggtgccatgtttgaaagttctttgcctagccctccttcctatattgctgtttttttctaaaagtcataaagtttaatgctttactaaatgtagctctatwatcaattttgtgttattttttgtataaggtatgagatttagatcaaggttcattttttttgtggcttatggctgtccaattcctccaacgccatttttgg

SEQ ID NO: 131944 - DNA, 201 bp, Homo sapiens
aattcttttatttcctttccaatctgtatgccttttatttcttttcttttgtctattgcactaggacttcccagtataatgttgagtaaatgtggtgaatktttgaattgttcctaatcttaggagggaagccttcagttctttcatcattaagcatcatttagatgaagtgggctgtttttttgtagattctctttatca

SEQ ID NO: 131945 - DNA, 201 bp, Homo sapiens
tttccttttctggattgtacttttggtgccatgtttgaaagttctttgcctagccctccttcctatattgctgtttttttctaaaagtcataaagtttaaygctttactaaatgtagctctattatcaattttgtgttattttttgtataaggtatgagatttagatcaaggttcattttttttgtggcttatggctgtcc

SEQ ID NO: 131946 - DNA, 201 bp, Homo sapiens
ctactgtcatttctaaccatggtctctttgaagagctcttttgtctttcaatgtctcttccttgtttggcccacattatccttcatcatatgaagacttgrgtggctcctgtgtcagactcttgctgtgtgtcatacctaatgaactagaacctaagattactgtgtattgtacaactaagggattatgtaaagtcaggat

SEQ ID NO: 131947 - DNA, 201 bp, Homo sapiens
aattgtgaatgggagttcactcatgatttggctctctgtttgtctattattggtgtgtaggaatgcttgtgatttttgtaaattgattttgtatcctgagrctttcctgaagttgcttatcagcttaaggagttttggggctgagacgatggggttttctaaatatacaatcatgtcatctgcaaacagagacaatttgac

SEQ ID NO: 131948 - DNA, 201 bp, Homo sapiens
ttgcatttctctaatgaccagtgatgatgagcattttttcacatgtctgttggctgcatagatgtcttcttttgagaagtgtctgttcatatcctttgccyattttttgatggggttgtttgctttttttcttgtaaatttgtttaagttctttgtagattctggatgttagcccttcgtcagatggatagattgcaaaaa

SEQ ID NO: 131949 - DNA, 201 bp, Homo sapiens
cctgatgtccagcagaaactgcaggaggaaattgatgcagttttacccaataaggtgagtggatggtacatggagaaggagggaggaggtgaaaccttagyaaaaatgcctcctcaccacttcccaggagaatttttataaaaagcataatcactgattctttcactgactctatgtaggaaggctctgaaaagaaaaaga

SEQ ID NO: 131950 - DNA, 201 bp, Homo sapiens
gaggaaggatggtaaaaaggtgctgattttaattttccacatctttctccactcagcgtctttggggcctacagcatggatgtgatcactagcacatcatytggagtgaacatcgactctctcaacaatccacaagacccctttgtggaaaacaccaagaagcttttaagatttgattttttggatccattctttctctca

SEQ ID NO: 131951 - DNA, 201 bp, Homo sapiens
ggtatacgtggcacattttctttatccagtctgtcactgatggacatttgggttggttccaagtctttggtattgtgaatagttctgcaataaacatatgygtgcatgtgtctttatcatagaatgatttatgctttgggtatatgcccagtaatgggattgctgggtcaaatggtatttctagttctagatccttgagga

SEQ ID NO: 131952 - DNA, 201 bp, Homo sapiens
tgagggcttcacttagatttctcttcatctaaactgtgatgccctacattgatctgatttacctaaaatgtctttcctctcctttcagctctgtccgatcyggagctcgtggcccaatcaattatctttatttttgctggctatgaaaccacgagcagtgttctctccttcattatgtatgaactggccactcaccctgat

SEQ ID NO: 131953 - DNA, 201 bp, Homo sapiens
ggtgagactgatcacagactggatataactgagatgagacagtggtggtcaatcaaactcagatatttaagcacaaaatgagtttgtggggttttttttttacacaaaggcggaatcacatgcaaaatcactagaaaggggatgatttgatgaaattattaaatatttaattttgctgaatagaatataatatgtgccacg

SEQ ID NO: 131954 - DNA, 201 bp, Homo sapiens
ttttgtttttcctacagcagtctttccattcctcatcccaattcttgaagtattaaatatctgtgtgtttccaagagaagttacaaattttttaagaaaakctgtaaaaaggatgaaagaaagtcgcctcgaagatacacaaaaggtaaaatgtggtggtagttataggaggatgtttagtttttcataattttttagata

SEQ ID NO: 131955 - DNA, 201 bp, Homo sapiens
aattggttctttagttgtgattcttctgcacactgtcattcagggaaatatgagtcaatcatccttcccaataggtcaaatcaaccagatcatctgatcayagagactgaggtgtagctgaaagctgctcacatttctatgaggtcaatggaagccttgagcacagttgtcaatctgtagaaataaggactctgtgactcc

SEQ ID NO: 131956 - DNA, 201 bp, Homo sapiens
gaacttatttgcttttctgctatgcctaattgtggtaactgactttgctcttatgttctaggtattactctggagagaaaaaggctccagttctcacgctyttcattgggggaaaccatgaagcctcaaatcatttgcaagagttaccctatggtggctgggtggcaccaaacatttattatttaggtatgtgattgtgtt

SEQ ID NO: 131957 - DNA, 201 bp, Homo sapiens; identical to SEQ ID NO: 23129

SEQ ID NO: 131958 - DNA, 201 bp, Homo sapiens
gtggtgcgatctcagttcactgcaacctctgccccctggcttcaagcgattctcctgcctcagcctcctgaatagctggaactacaggtgtccgccaccaygaccagctaatttttgaatttttagtagaaatagggtttcatcatgttggccaggctggtctcaaaactcctggcttcaaacgatccacccgctttggcc

SEQ ID NO: 131959 - DNA, 201 bp, Homo sapiens; identical to SEQ ID NO: 23131

SEQ ID NO: 131960 - DNA, 201 bp, Homo sapiens
ccttggcctcccaaagtgctgggattataggtgtgagccactgtgcccggcaaaattttttttacttcaataattacgagtttattttagtaagaatgaargatttaattcatgatttcaaatattacttaggttaaggctaaagaatacctattaaagtgatatttaaaataaaatgttaaagtgatattttaaagaaaa

SEQ ID NO: 131961 - DNA, 201 bp, Homo sapiens
tccacctccctcggcctcccaaagtactgggattacaggcgtgagctgctgtatctggcctccacctttgtttttaatcaagggaattattgttgaatgartgtcagaacaattcaaagtttgcaggttttccatctaaaagagacaggaaaatggactgttgagcattacctcaaataaatttataagtgaataagtgta

SEQ ID NO: 131962 - DNA, 201 bp, Homo sapiens; identical to SEQ ID NO: 23133

SEQ ID NO: 131963 - DNA, 201 bp, Homo sapiens
attaacttaattttggaaaagtaacagtcattcctttgacacacaacttaggggtatgtgtgataaagattattttcatcctattccgtgtatgaagaatyacctgtggttgttttaacattctttcttaaatcatgattcatattgtccaggcaaaggataaaggacagacagccagagcaaccaaatttttagccttgg

SEQ ID NO: 131964 - DNA, 201 bp, Homo sapiens; identical to SEQ ID NO: 23134

SEQ ID NO: 131965 - DNA, 201 bp, Homo sapiens
taaaattaaatggattgatttaaaattaaataattgaaattaaatttaaattaaattcctttttattttattaaattatattaaagtgattagactgttamaaatatatatgtatttcttaacattgatttcatcctgtagatattagagatagaacatgaccccagtgctcctgattacttggaatatgatattgaatgg

SEQ ID NO: 131966 - DNA, 201 bp, Homo sapiens; identical to SEQ ID NO: 23130

SEQ ID NO: 131967 - DNA, 201 bp, Homo sapiens; identical to SEQ ID NO: 23132

SEQ ID NO: 131968 - DNA, 201 bp, Homo sapiens
agatgccatttcccaaccatgagttttcttcttttttttttttgagacaaggtctcactctgtcacccaggctggagtgcagtagtatgatcatggcttgrctcactgcagcctcaatctgccaggcttgggtgatcctcccacttcagcctcccgaatagcttggactataggcatgcatcacctcgcccagctaatttt

SEQ ID NO: 131969 - DNA, 201 bp, Homo sapiens
accacgcccggctaatttttttgtatttttagtagagacggggtttcaccatgttggtcaggctagtctcgaatacctgacctcaagtgatcccacccacytctgcctcccaaagtgctgggattacaggcgtaagctaccacgcccggcctgtattttgctatttttttatttttatttttaagaaataaaacagtatag

SEQ ID NO: 131970 - DNA, 201 bp, Homo sapiens
tttttttatttttatttttaagaaataaaacagtatagatacaattaaagttcattgtttatctgtcctcaatcccgttcccttcttttcttccctccctstctttgccaggcagtcactgtgttgaatttggtgattataatttacttgattattttacatcattaccacatatgtaagaactttaaacaatgtacttgt

SEQ ID NO: 131971 - DNA, 201 bp, Homo sapiens
agttccctgggatcccagaattaggtttgaccttcccggtccctctctcgcgagatctggaaaccggaagtgaattattttgcaggagtctacacccaggmggtggctatacttattaaagttggcgggagctgagcgatcagtcggtcctgggctggctgtggtgtagggcgttgcaggcagcgctcacctcctcaggcc

SEQ ID NO: 131972 - DNA, 201 bp, Homo sapiens; identical to SEQ ID NO: 23136

SEQ ID NO: 131973 - DNA, 201 bp, Homo sapiens
agttaggtaccaaattatgtctgtttcactttcagtaccctatctcatttgtcccttccagaatctacttagtgttttggctcatctaattccagaccttrcctttatatactgttataatatatccctaatacactgttggcatattattatgtaaaaagcataacctcatcatggtgcttaattttcaaataattttag

SEQ ID NO: 131974 - DNA, 201 bp, Homo sapiens
tattttattaatattgggagcataaggaactagtctctagtcaacagttagaaagtaactgaagtgtgccagcaaccatgtgtgggaccttagaaagcagrtacacccttatttgagcctgcaaaggaaggagactgcagtccaccatctttttaaaaaatttccctagataactttttaaaatcgtatatattgaaggtg

SEQ ID NO: 131975 - DNA, 201 bp, Homo sapiens
tagctgtgattacagacgtgcgctactgcgcccagctaatttttgtatttttagtagagacagggtttcaccattttccccagagtggaaagaaatttttmaacaaacaaatatctagaaaaaaattaatctgtcgtcggcctacactaaacaaacaggaaaacttaaactgagctcttcagacagaagaaaaatgattcc

SEQ ID NO: 131976 - DNA, 201 bp, Homo sapiens; identical to SEQ ID NO: 23137

SEQ ID NO: 131977 - DNA, 201 bp, Homo sapiens; identical to SEQ ID NO: 23138

SEQ ID NO: 131978 - DNA, 201 bp, Homo sapiens
atagtttaagttctgccagtttacttttaagctcttttgtttatctttaatccttgggttatatgctttgatttatgtgtgttcaatgctttgagttaacrtcatcatcatcattagtttttgccttgaattttgtatggaaattgaaggtctgagaagttaaatgccttctcttttatcacacaagtgggtatagaatta

SEQ ID NO: 131979 - DNA, 201 bp, Homo sapiens; identical to SEQ ID NO: 23139

SEQ ID NO: 131980 - DNA, 201 bp, Homo sapiens; identical to SEQ ID NO: 23141

SEQ ID NO: 131981 - DNA, 201 bp, Homo sapiens
atttgcagggttcagtttggcaaagacttggtgcagatgtgacagcagttgaatttttaggtcatgtaggtggagttggaattgatatggagatatctaaraactttcaacgcatccttcaaaaacaggggtttaaatttaaattgaatacaaaggttactggtgctaccaagaagtcagatggaaaaattgatgtttcgt

SEQ ID NO: 131982 - DNA, 201 bp, Homo sapiens; identical to SEQ ID NO: 23144

SEQ ID NO: 131983 - DNA, 201 bp, Homo sapiens
aagctgaagttatcacttgtgatgtactcttggtttgcattggccgacgaccctttactaagaatttgggactagaagagctgggaattgaactagatccyagaggtagaattccagtcaataccagatttcaaactaaaattccaaagtaagttggataattgtctgcattttcagtaattttaaaattgatttcaaaca

SEQ ID NO: 131984 - DNA, 201 bp, Homo sapiens; identical to SEQ ID NO: 23148

SEQ ID NO: 131985 - DNA, 201 bp, Homo sapiens
taggaacatactagcgaaagaagaaaatgttttacaataaattattaagatgatttcgtaaacatttgctatagaaacttttatgattattgggttttttwaatttatttgcagggttcagtttggcaaagacttggtgcagatgtgacagcagttgaatttttaggtcatgtaggtggagttggaattgatatggagata

SEQ ID NO: 131986 - DNA, 201 bp, Homo sapiens
gatgtatcatccctgtctctttaagcaaaacactcaagtttcaaaatcagtttagcaaatatagggttttttctaacttaaggtcattttattacttaatrtaactcagttgcttatcaaattattgcattagcacattgaaatttatgattaggttaatgctagaaagagaatccaatattctcattgttgtgccttctt

SEQ ID NO: 131987 - DNA, 201 bp, Homo sapiens
ttcatgtcaatggatatggaaagataactggcaaaaatcaagtcactgctacgaaagctgatggcggcactcaggttattgatacaaagaacattcttatwgccacgggttcagaagttactccttttcctggaatcacggtatttatgcttcataatttacaaccattacaacttttctttagaaatacgttttataagt

SEQ ID NO: 131988 - DNA, 201 bp, Homo sapiens
gttgaaattttccagttggtgagtgaaaaacactgcatattgcttcaagaatttagctaagaactaaagattaattgaacaaattacagtgtccgaagttygcttgaatttagacaagatgatggagcagaagagtactgcagtaaaagctttaacaggtggaattgcccacttattcaaacagaataaggtcagtgttta

SEQ ID NO: 131989 - DNA, 201 bp, Homo sapiens
atatcttttagaataattcacttttgggtcagcccaaaagtgtttattattattcaaatgataaattataaaggactatatattttagtctgtgaaaacayagcccgaatagcttgttttgtagaagaattaagacatatatttggaattttagtgatctgaaacattgaggttatgtgcagttaaataatgttttctttg

SEQ ID NO: 131990 - DNA, 201 bp, Homo sapiens
attgttacatatcagtgattaaaagtatatgctcaaaaatacatatacttaaaatctaaaatatttaattcagttttattgtcattaaaagggtttttggrgaattatagcagtaatatatgttataaatatatatgctcatgtaagagtgagaaaagaatataaaatatggcaaaaattgaattttataaaaactttcct

SEQ ID NO: 131991 - DNA, 201 bp, Homo sapiens
agagatgatgtatatgcactaaagcaaatagaatatcatactagttgaaaaatggaatgacgtaaagaaagaagagctaggggtagtcaggagacctgcaytgtaggcaaggcttttacatcctagctctgtgaccttgggtaaatcagaaatctctcagagtctctttttccttatctctaatatatgtgttggttatat

SEQ ID NO: 131992 - DNA, 201 bp, Homo sapiens
gtatacttttcatgcttaatgatattaccagactgcttgacttggctcttctgtctaaagacttaaatgtgtctaacgtacgcataatagatgtttagtgraggaagagtaaaataaataatctaaaaaatgtggagagatttacttaaaaaagaaggcctaaatccagatttctcccagccaagtataaccaagcctaac

SEQ ID NO: 131993 - DNA, 201 bp, Homo sapiens
attcttccatttttacatctgctctttgggctgaattctccatattatgcaagttcccctttcttaggcttccctttaattgttagtatttttgtttttctttttttttttttttgagtccgagtcttgctgtgtcgcccaggctggagtgcagtggcgcgatctcggctcactgcaacttctgcctcccgggttcaagtg

SEQ ID NO: 131994 - DNA, 201 bp, Homo sapiens
atatacacacacacagacacagcatgtgcagacacacccctccaagagcctaaagtagtgtttgtaatgtgaaatgcctgctgttagtgtttatttctagrtagatggaacagatcgtacataggtagaccagcataattctatgcatgtaggctaagagtagtaattcaccgttactgaagcttaaactgcatggtattg

SEQ ID NO: 131995 - DNA, 201 bp, Homo sapiens
tcaattttttatctttatttgaaaaatggccacaatagttaattgaatattctggttagcctattatcttaaggtatgtaaaaattatcaatatgcaagtwcaaaacatatttgttaaatattacatagaagctgttttttccctcatatttcagaagttaaggacctgaaaaaggtaataggtcttaaatttattggaaa

SEQ ID NO: 131996 - DNA, 201 bp, Homo sapiens
accagcataattctatgcatgtaggctaagagtagtaattcaccgttactgaagcttaaactgcatggtattggtgagtaaacagaacgtggtaggagatraggctggagaaatagttactgaaggaatttggatgctgtacttaggaacatgggctttatctaacaagacactggagaaccaacagagcgtaacaacaga

SEQ ID NO: 131997 - DNA, 201 bp, Homo sapiens
atagaaatgtaatgaggcttacataagacagtacacgtgactggctcactaactggcacattttaagctacccaagtggtaggtattattgtagactgactttttttttttttttttttttgaaacttggtctcactctatcatgcaagctggggtgcaatggtgcgatcttggttcactgcaacttccacctcccgggtt

SEQ ID NO: 131998 - DNA, 201 bp, Homo sapiens
ttcctaaggaattatgttgatagctaaaaaggttgagagtaactctcgttacaggttggaccttttactgtaattcttttttttatttagactgtaagaartagggctatgtcatttatatatacacacacacagacacagcatgtgcagacacacccctccaagagcctaaagtagtgtttgtaatgtgaaatgcctgct

SEQ ID NO: 131999 - DNA, 201 bp, Homo sapiens
ttattttccttataatgatctaatatgtaacacttgtaggaatttgtagagtacttttcttgacttttttctttgagttaattttaataacattaattgcsttgtttaagtcagtcacctcttattgtactccagtatttttaaagtatcaacctgatactttaaacctggtaggagcacacatttcagaatctaaaggac

SEQ ID NO: 132000 - DNA, 201 bp, Homo sapiens
caaatttttgaccaggatgaaacatcgaaagccatctgacagtacagtctttcaccagttataaacacctttgatgtttattcatcttcgtttctccatckcatctacaaggatatcatgagattttcttaaaattttttttaacaccttgctgatatcaaaatatactacattcaccagtccagaaacccttcagaaagt

SEQ ID NO: 132001 - DNA, 201 bp, Homo sapiens
agttgggaaattcccatttgctgctaacagcagagctaagacaaatgctgacacagatggcatggtgaagatccttgggcagaaatcgacagacagagtaytgggagcacatattcttggaccagtgagtattgtaaaaccagagaaatcccattaagatttctagaaagcattgctgtttattaattataaaccacctgg

SEQ ID NO: 132002 - DNA, 201 bp, Homo sapiens
ggcaaaaattgaattttataaaaactttcctagaagaaggattgggaggacctataaacagttctctctgggctgtatggcaatgtggatgggttgttttytttttaattttgctttagtgtatttaaatttattcagtaaacctaaatttttaatcagaaaagacattaaaaattcagcaaagaaacctgttttgtagct

SEQ ID NO: 132003 - DNA, 201 bp, Homo sapiens
aaataaataatctaaaaaatgtggagagatttacttaaaaaagaaggcctaaatccagatttctcccagccaagtataaccaagcctaaccctgcaaatcsagatttctaccattatatcttctgttcctttgccaactttttcctgaggtttgcctttatgtgtttttgaagagtcagttttcatttcctaaaatctgga

SEQ ID NO: 132004 - DNA, 201 bp, Homo sapiens
ttattcaaacagaataaggtcagtgtttaatattcagatttctgctttactttgaatacaaattaaactttgcattatagagtgatgatatttgaacttgrttacaggggaatatttatttaatttaaaatagcttgctaacctgaaatagatttccctgacatatatcacagatttttttgctgcaccatggtgtagcat

SEQ ID NO: 132005 - DNA, 201 bp, Homo sapiens
aagcattttgttttagataaattatttacagagtaatttttcctttgaatgatttatcaaacaaattactttaaactttgtgaatttataaagattatttygtaaaggttgttcatgtcaatggatatggaaagataactggcaaaaatcaagtcactgctacgaaagctgatggcggcactcaggttattgatacaaaga

SEQ ID NO: 132006 - DNA, 201 bp, Homo sapiens
tttaggagtgaacggacttctccttccagtcttgctaattcttgagctttatcttctaagtatctttgattgtcttcatattttctttctaaatctgtggrgatatatatatatataaagtctgagcaatttatactatgatgatctcaagacaaagtgaatatatttttcacttttaaataaactatggatgccttaaag

SEQ ID NO: 132007 - DNA, 201 bp, Homo sapiens
ctagtggttgtgtagtagtaactcactgtggggtttttttttctatttttattttttaaattgctatgtaatagatgtacttttttcaaggtacatgtgawaatttgatatattcatataattaaatcagggtaattaggctatccatcacctcgaacattttttttaatgctaggaatattgaattattctcttctagct

SEQ ID NO: 132008 - DNA, 201 bp, Homo sapiens
attgatggttgcctaaattttcttctgacccacaaatatttggattttaattttaaatttcttcccttgcagaccttatcagaagcttttagagaagcaamtcttgctgcgtcatttggcaaatcaatcaacttttgaattagaagattatatatatttttttctgaaatttcctgggagcttttgtagaagtcacattcc

SEQ ID NO: 132009 - DNA, 201 bp, Homo sapiens
cgggcgcctgggccgcaccacccctggccccgcctctgcactggctcagcccggccctgggctccgaggtggccgctcatcctgcagcaggcgagggacgrggctgggcccaggctgtggcgagtcctttcgggttgtgtgacggccggcggtcacacatgccacacccccaagcctgggccgagggccatcccggtcaca

SEQ ID NO: 132010 - DNA, 201 bp, Homo sapiens
gtggacatttcatataaatgaaatcatacaatattattttgtgtgtgctctctttacatagcataatgttcttatggttcatccaagttgtagcatgtatstatacttcatttctttatctggctaaatatctcattctatggatatggcacattttgtttatccattcatcatgggtggacatttgggttgtttctactt

SEQ ID NO: 132011 - DNA, 201 bp, Homo sapiens; identical to SEQ ID NO: 23143

SEQ ID NO: 132012 - DNA, 201 bp, Homo sapiens
aatttcttcccttgcagaccttatcagaagcttttagagaagcaaatcttgctgcgtcatttggcaaatcaatcaacttttgaattagaagattatatatdtttttttctgaaatttcctgggagcttttgtagaagtcacattcctgaacaggatattctcacagctccaagaatttctaggactgaattatgaaacttt

SEQ ID NO: 132013 - DNA, 201 bp, Homo sapiens; identical to SEQ ID NO: 23147

SEQ ID NO: 132014 - DNA, 201 bp, Homo sapiens
cttgcagaccttatcagaagcttttagagaagcaaatcttgctgcgtcatttggcaaatcaatcaacttttgaattagaagattatatatatttttttctkaaatttcctgggagcttttgtagaagtcacattcctgaacaggatattctcacagctccaagaatttctaggactgaattatgaaacttttggaaggtat

SEQ ID NO: 132015 - DNA, 201 bp, Homo sapiens; identical to SEQ ID NO: 23149

SEQ ID NO: 132016 - DNA, 201 bp, Homo sapiens
gaagaattaagacatatatttggaattttagtgatctgaaacattgaggttatgtgcagttaaataatgttttctttggttgtagacagtctgcattgagraaaatgaaacacttggtggaacatgcttgaatgttggttgtattccttctaaggtgagcatgtgttttgtacagcacagagattgtttttggctagcaac

SEQ ID NO: 132017 - DNA, 201 bp, Homo sapiens
tagcatgtagtttttgccttggaagcaaatttacttggcttgttattttaaagggtgctggagaaatggtaaatgaagctgctcttgctttggaatatggmgcatcctgtgaagatatagctagagtctgtcatgcacatccggtaattattaacaacatatagaattgatggttgcctaaattttcttctgacccacaaa

SEQ ID NO: 132018 - DNA, 201 bp, Homo sapiens
gttattttaaagggtgctggagaaatggtaaatgaagctgctcttgctttggaatatggagcatcctgtgaagatatagctagagtctgtcatgcacatcyggtaattattaacaacatatagaattgatggttgcctaaattttcttctgacccacaaatatttggattttaattttaaatttcttcccttgcagacctt

SEQ ID NO: 132019 - DNA, 201 bp, Homo sapiens; identical to SEQ ID NO: 23155

SEQ ID NO: 132020 - DNA, 201 bp, Homo sapiens
aacatatagaattgatggttgcctaaattttcttctgacccacaaatatttggattttaattttaaatttcttcccttgcagaccttatcagaagcttttrgagaagcaaatcttgctgcgtcatttggcaaatcaatcaacttttgaattagaagattatatatatttttttctgaaatttcctgggagcttttgtagaa

SEQ ID NO: 132021 - DNA, 201 bp, Homo sapiens
tggtggtaaagctgaagttatcacttgtgatgtactcttggtttgcattggccgacgaccctttactaagaatttgggactagaagagctgggaattgaastagatcccagaggtagaattccagtcaataccagatttcaaactaaaattccaaagtaagttggataattgtctgcattttcagtaattttaaaattgat

SEQ ID NO: 132022 - DNA, 201 bp, Homo sapiens; identical to SEQ ID NO: 23159

SEQ ID NO: 132023 - DNA, 201 bp, Homo sapiens
accattatatcttctgttcctttgccaactttttcctgaggtttgcctttatgtgtttttgaagagtcagttttcatttcctaaaatctggaaatcactgrgaaggctggattcctgagtactatggggagatagaggaaggaaggaaggcccacttaagctgttgatagtagaaaaattagaggagagaaagagtgaggc

SEQ ID NO: 132024 - DNA, 201 bp, Homo sapiens
ctaccactgagcctaaagtatgtatctttcttgtagatatctcttgtatctgatgtaacaataatgagaatagaatatttgagtgctgtgtcactttagtrtacattttgttatttttacatcagctttttgaaataggtgctgttatttttgaggtgaagaaactgaatgaagcacaaagaaccaatgaatggttaaggt

SEQ ID NO: 132025 - DNA, 201 bp, Homo sapiens
atttcatatattcacttcattctttcagtacttctgatgatctaagctgagattgatgtaaaattttttctgacagtaaaaaaaaacaaaaaaccccaccyccccaaggagcatgatgtgttgagaaagcattttaaggacacctgcaaactttggctaaagaacattcacaaataagcagctgtgcgaagagggatttcc

SEQ ID NO: 132026 - DNA, 201 bp, Homo sapiens; identical to SEQ ID NO: 23161

SEQ ID NO: 132027 - DNA, 201 bp, Homo sapiens; identical to SEQ ID NO: 23160

SEQ ID NO: 132028 - DNA, 201 bp, Homo sapiens
cattgactacaattgtgtgccatcagtgatttacacacaccctgaagttgcttgggttggcaaatcagaagagcagttgaaagaagaggtaagtctgaacrtgggtggttttaagccaatgtgtgagttgtgccaatgacattggtggttgagaaacagcattttatcattatgctaatatatttaacagctgtgaaatat

SEQ ID NO: 132029 - DNA, 201 bp, Homo sapiens; identical to SEQ ID NO: 23162

SEQ ID NO: 132030 - DNA, 201 bp, Homo sapiens
atgacatctcttttcctgttcgttttttctttttaaaaatctggttttgtttttgtttgtttttttttttgagacaaagtctcgctcttgtcccctaggcwggagtgcagtggcgtgatcttggctcactgcaactccacctcccgggttcaagtgattctcctgcctcagcctcccgagtagctgggattacaggtgcct

SEQ ID NO: 132031 - DNA, 201 bp, Homo sapiens
catgccacacccccaagcctgggccgagggccatcccggtcacacataggcctctaccttggaggaagtgtaagccacccatgtcccgtatagtctggctytttataccatttgcctttttctcatcctaattctgatccctgagtggcctaagtttatgcagtgggcaggtaaccctggggtcacttcttgaatggttta

SEQ ID NO: 132032 - DNA, 201 bp, Homo sapiens
tgtttcttttgatttctgtggtagtatctatgccattggtgatgtagttgctggtccaatgctggctcacaaagcagaggatgaaggcattatctgtgttraaggaatggctggtggtgctgtgcacattgactacaattgtgtgccatcagtgatttacacacaccctgaagttgcttgggttggcaaatcagaagagca

SEQ ID NO: 132033 - DNA, 201 bp, Homo sapiens
ctgtatatacacgctagcttagagttaggaaacaaaaattacaggtaaaaagattatcatgtatagattattcaagtatttaagttagaactttcagagcwttatttatttatttatttatttatttattttgagacggagtctcactctgacatccaggctagagtgcaatggcactatctcagctgactgcaacttccg

SEQ ID NO: 132034 - DNA, 201 bp, Homo sapiens
gatacagtgtcaggaaaggcctttctgaggagatgatgtctgggcagggtcctgagtgaagtgggggagtgaggttacttcaggcagagggaaacaacacygagaaaggcctgaggtgggacttagcttgtgaagtttaaggagtaataagaaggctggtatgactggagcagaaacccatgcaatgtaaagtcggagagg

SEQ ID NO: 132035 - DNA, 201 bp, Homo sapiens
tgccaggcagaccctgagccagaacttagattttagtggaatgaggctgagtgttccataatcagtttggtgatcccttgacattgagtaaatcataaatsacttagtacccatgtgtgtaaagtgtgtaaaagctttgagtggatgcagtaacaagcattttacacacatacttgtattttatctgaggtacatgcttac

SEQ ID NO: 132036 - DNA, 201 bp, Homo sapiens
ttgagacggagtctcactctgacatccaggctagagtgcaatggcactatctcagctgactgcaacttccgcctcccgggttcaagtgattctcctgcctyggcctcccgagtagctgggattacaggcacccaccactacacccggctaattttcttgtatttttagtagagtcggggcttcactatgttggccaggctg

SEQ ID NO: 132037 - DNA, 201 bp, Homo sapiens; identical to SEQ ID NO: 23165

SEQ ID NO: 132038 - DNA, 201 bp, Homo sapiens
gcccgtttatagtcttatgggaccactgttgtatatgcggtccatcattgaccaaaacattgatatgcaatgcatgactatattagattatattattatamaaattgaatccccattaaaattgtaatgtcacttagatgtgtctcaatgtggctcttcatttatttgtgtgtttgaaacccaatgatctgagtgttgctt

SEQ ID NO: 132039 - DNA, 201 bp, Homo sapiens
ttattatggaattgcaaaaattgctgcccaaggacaatttctgtaatgtcatagtaattcaaatgccaactctgatgattttcaaagccattttcttgatracattggctgttaccaactaaaacaagcttaaagtctcattgtcctcacctggttactctaactagcccgtgcatacttctgcagtcttatctcaacaca

SEQ ID NO: 132040 - DNA, 201 bp, Homo sapiens
tcgagcaatcaaagcgttatctgtcaaagcaattcgcttcttattgattttgccataaccactcttgtagattagttcatttactgacttcagattggggkacccccatgcaatatatggctctacaatcctcagcatgttagtcgaagccttgttgagcttcacaaaggttccattgtagatttgacgaaggcgaagaag

SEQ ID NO: 132041 - DNA, 201 bp, Homo sapiens
tatcgtttcttgctaaaatttgtttgcctcttcatcttttcccttttttgtcttttctgatcatccttatataggcttttatataatgaaaatgtgtttcrtctaaaatacctacttgattagaagttacacagagtataacaaatataaaatttaaggtttaaatggtttagtaaaaaaataacttttctgccaaattag

SEQ ID NO: 132042 - DNA, 201 bp, Homo sapiens
agtggtagacacagacagctgtggcaacttggcagatatatacgtatttaaattcattcggaatttatgagtacaacatttttaaatagttaagtttcccrattatacgagtagttagaaaaacctgagagagaaaaaaaccccaaaaccatagctcacaactcttaagattattttagtattttgatttattttcttcta

SEQ ID NO: 132043 - DNA, 201 bp, Homo sapiens
tgagtaaagttgaaggaacagaaatttgctttgaaaaatggttagcacaactacaggaaacctgccagttttttgatttgggattgattttgcagttatcrtttcttgctaaaatttgtttgcctcttcatcttttcccttttttgtcttttctgatcatccttatataggcttttatataatgaaaatgtgtttcatcta

SEQ ID NO: 132044 - DNA, 201 bp, Homo sapiens
aggaactaccatggacctaatattagcccaatgacctactgatagaatagccatctgacaagagtaggctaactataagcagagcttaaaagatagtatgyttcaccactagattagagtgagcccagaaaccttaactgctgtacttttttgataaaaagtgagtaaagttgaaggaacagaaatttgctttgaaaaatg

SEQ ID NO: 132045 - DNA, 201 bp, Homo sapiens
gagtgtgggtgataaaaatgtttggaaatagattgtagtgctgagatacagtggcttacacctgtaatcccagcactttgggaggttgaggctggaggatmgcttgagctcaggagttcaagaccagcctgctgcaacaaagtgagaccctgtctctaccaaaaaaagaaaaaatattaacaggatgtggtctacaggaac

SEQ ID NO: 132046 - DNA, 201 bp, Homo sapiens
tgcactccagttaataagacaaatgagtaaaaatttaataaacttagttaactttgaaaaagatataacaagaattgctgttataagatataacaacaacattgctgttggcccacaaaaacaacaattttatagggtttaatctgtggtgaattgctaaataaatggtaaatgattgtaagtgattaagactatgaatta

SEQ ID NO: 132047 - DNA, 201 bp, Homo sapiens
cctgtctttggagaaagaatctgataaattagtttacactagaggttttgatgaccaattctgatatacatattattcctaccaggctttatttacatcayaaaagtttttgttcagagcttaggatacataaacataaataaattatgaaatttttatttaaacattccaggtaaagagtgtttttagcagaaagagcct

SEQ ID NO: 132048 - DNA, 201 bp, Homo sapiens
ctgcactccagttaataagacaaatgagtaaaaatttaataaacttagttaactttgaaaaagatataacaagaattgctgttataagatataacaacaacattgctgttggcccacaaaaacaacaattttatagggtttaatctgtggtgaattgctaaataaatggtaaatgattgtaagtgattaagactatgaatt

SEQ ID NO: 132049 - DNA, 201 bp, Homo sapiens
taatttagacagtgtatgtaaaatataatagaatttttaagttataaccttaatagtgctacaaacttgcagttatgccaattagtgaaagtctcaaataytaaataattacatttggggatcttgtgttttccacacttcaaaagaagttatttcatttgctctttattctttatccaaaagaaagtagttctaaagttt

SEQ ID NO: 132050 - DNA, 201 bp, Homo sapiens
cctgcactccagttaataagacaaatgagtaaaaatttaataaacttagttaactttgaaaaagatataacaagaattgctgttataagatataacaacaacattgctgttggcccacaaaaacaacaattttatagggtttaatctgtggtgaattgctaaataaatggtaaatgattgtaagtgattaagactatgaat

SEQ ID NO: 132051 - DNA, 201 bp, Homo sapiens
attcttatgtaccatgtcataaattgagaaataatttagacagtgtatgtaaaatataatagaatttttaagttataaccttaatagtgctacaaacttgsagttatgccaattagtgaaagtctcaaatactaaataattacatttggggatcttgtgttttccacacttcaaaagaagttatttcatttgctctttatt

SEQ ID NO: 132052 - DNA, 201 bp, Homo sapiens
tgtgtgtgcctggtaagaacacttaagatttactcccgtagcaaatttaaagtaaacaaaacttaatacattgttattaactatagttaccatgctgtacrtcagatctctagtaggtagtcataactgaaaatttgtaccctttgaccaacatctctccatttcccctactccccagtgtctggcaaccaccattctcct

SEQ ID NO: 132053 - DNA, 201 bp, Homo sapiens
aaacttcaaaactttctaatggatcatttaaactaaaacatttttatcaattttatctcattttgatacaatagcttatatatattttaaaatgttatggycagctattcctattttctttttaatctttaagtaatataatatttgtagttaagagattaaaataggattcctttgtctttggagtcagttcaaaccatt

SEQ ID NO: 132054 - DNA, 201 bp, Homo sapiens; identical to SEQ ID NO: 23198

SEQ ID NO: 132055 - DNA, 201 bp, Homo sapiens
agacttggattactcacaggaatttggcatgtgacctttgtttattaaatatcaaaacaattggcaggacttggcacaggacactaactttggcctcatcratacctgtcagcctcttaagtttgtattacagatcattaataaaacagcacatttcatgtaaatttaactgacagtgataaaatttgagacctgagatgg

SEQ ID NO: 132056 - DNA, 201 bp, Homo sapiens; identical to SEQ ID NO: 23199

SEQ ID NO: 132057 - DNA, 201 bp, Homo sapiens
gtgctatggagcataaaagcagttctttgaaagcatatttttaaagagacatgagggccagctaatttaaggaagtgagatttgagatgtcaatgtgaagrccattgagtagcagcattcctggcaaagggaatggcctgtgcaggaagagttatagagaattccaggaaatgatagagttcttaaagattagtgcctcgg

SEQ ID NO: 132058 - DNA, 201 bp, Homo sapiens
gttaactgtgggtttgggtgactctttggcacagtgaacctccgtgtggtggttacttagatcctgtcctgttgtctgtattttaattgagtcttcctctmtgatttctgtggcaaggaaataatatttcagcagaagttgccacgggtttcttctactcacaatctgtttatcctgtccgattgcatgggcctgaaaagt

SEQ ID NO: 132059 - DNA, 201 bp, Homo sapiens
acaaaaattagctgggcttggtggcgtgcgcctgtagttccagctacttgggaggctgaggcaggagaatggcttgaacctgggaggcggaggttgcggtragctgagatcacgccgctgcactccagcctggcaacagagtgagactccgtctcaaaaaaaaaaaaaaaaaaaaaaaaaaaaatatatatatatatatat

SEQ ID NO: 132060 - DNA, 201 bp, Homo sapiens
ttttggccaggcgccgtggctcaggcctctaatcctagcacttcgggaggctgaggtgggcagatcacgagatcaagcgatcaagaccatcctggccaacrtggtgaaacctcgtctctactaaaaatacaaaaattagctgggcttggtggcgtgcgcctgtagttccagctacttgggaggctgaggcaggagaatggc

SEQ ID NO: 132061 - DNA, 201 bp, Homo sapiens
ttcggtttgccagtattttagttaccggttttcaaagtaaggtgttgctttaatagctgcctcagtgattaaatgaatttttttgcacctttaaaaaaaawattatggactccttgtttttctaagttaaatgtgtttctttttctttttttgggagacagagtctctgtcacccaggctggaatgcagtgccatagtctt

SEQ ID NO: 132062 - DNA, 201 bp, Homo sapiens
tttattgagagtttttagcatgaagggttgttgaattttgtcaaaggctttttctgcatctattgagataatcatgtggtttttgtctttggctctgtttrtatgctggattacatttattgatttgcgtatattgaaccagccttgcatcccagggatgaagcccacttgatcatggtggataagttttttgatgtgctg

SEQ ID NO: 132063 - DNA, 201 bp, Homo sapiens
cctctaatcctagcacttcgggaggctgaggtgggcagatcacgagatcaagcgatcaagaccatcctggccaacatggtgaaacctcgtctctactaaamatacaaaaattagctgggcttggtggcgtgcgcctgtagttccagctacttgggaggctgaggcaggagaatggcttgaacctgggaggcggaggttgcg

SEQ ID NO: 132064 - DNA, 201 bp, Homo sapiens
ttatcgaaaattaggatcagatgtattttcacaaaatgtcattgttggaacagtaaaaatgagttggagccatgcattttatgacagtcaaacatgggaaracattcttaagtaagttacaattactctttttaaatcttctgattatataggtagtatgtgcatattataatttgaaaaatgtcaatattaaattatatt

SEQ ID NO: 132065 - DNA, 201 bp, Homo sapiens
tgccaattagtgaaagtctcaaatactaaataattacatttggggatcttgtgttttccacacttcaaaagaagttatttcatttgctctttattctttayccaaaagaaagtagttctaaagtttaattcagtactgttgaatatatattaccaaagtaattcagtggttccttttccatttcagatagattagtgatat

SEQ ID NO: 132066 - DNA, 201 bp, Homo sapiens
cagctcaatattaggggaaaaaatattgagaaagaatttagagtatttcaggttgattgatcataaaaaagaaacaaaatgagtgatacctaggaaaattrtttgatttacagaaggttgcacagcagaattatagctgccactcagccattccattaaacctgcggtactgactatgtaagatgcttctgtgtacagaag

SEQ ID NO: 132067 - DNA, 201 bp, Homo sapiens
tatatatatatatatatatatatataaattttcttgtgttttcttctgaaaccttgctttgccttttactcttctatctagtattcatctagaatagattkggttgtgtggtgtgtgtcagaagtcctgacttttaaaaaatacacttatccagttgactcagcaccatttattgaaaagacctttatcataaatgagatg

SEQ ID NO: 132068 - DNA, 201 bp, Homo sapiens
tatatatatatatatatatatatatatatataaattttcttgtgttttcttctgaaaccttgctttgccttttactcttctatctagtattcatctagaakagatttggttgtgtggtgtgtgtcagaagtcctgacttttaaaaaatacacttatccagttgactcagcaccatttattgaaaagacctttatcataaat

SEQ ID NO: 132069 - DNA, 201 bp, Homo sapiens
atcttgcctatttttccattgggttcaccaactttttcttcattatttgtagaattttaaaaatatattacggttgtaactcacttgtcatatgtgcggtrtgtatgtgtatgtcttacaaatcgttctcctattccgtggctgaccttctcactcttgtgttttttgatgaacagatattcttaattttgtccaatttat

SEQ ID NO: 132070 - DNA, 201 bp, Homo sapiens
tctgcctatattccctgtgatagtgctttgctttttcatagataagcttcctccttgcctttcgaagcatcttttgggcaaacttctttctcaggcgcttsatcttcagctctgagaaattccttcgctttttcttaagggtttctggcacagcaggaaccttcttcttctcttctacacccaccatggttccagccggaa

SEQ ID NO: 132071 - DNA, 201 bp, Homo sapiens
agacagggtttcttcatgttggtcaggctggtctcaaactcccaaactcaggtgatctgcccgccttggcctcccaaagtgctgggattacaggcatgagycatcgtgcccggccctgagggcccttttattaaggtattacagattgtattaattctttatatattgagtcattctatgaagagatgggatatcatcctt

SEQ ID NO: 132072 - DNA, 201 bp, Homo sapiens
atttttaagtctggaaaagtctgcattgaaataaaattctcttattatggaattgcaaaaattgctgcccaaggacaatttctgtaatgtcatagtaattyaaatgccaactctgatgattttcaaagccattttcttgatgacattggctgttaccaactaaaacaagcttaaagtctcattgtcctcacctggttactc

SEQ ID NO: 132073 - DNA, 201 bp, Homo sapiens
taatgatacagcatagcaaatcttttctcattattcttttacacaattttcatttaattttcaaagttaatcttaggctacttttatcacataaaaaaaaattccactggtatttggatggaaattacatgaaatgtatcacttattttgtggaacattgacatctttccaatcgtgaaagcttcccatccattatcattg

SEQ ID NO: 132074 - DNA, 201 bp, Homo sapiens
gtcacacagtttacccatgtaacaaaacctgcatgcatactctttatactaaaagtttaaatttaaaaataaataaataagtcttttctactctgaaggtrggtaaatatttgtattatttcctagttctaaagttttcagtttatatgtaattctgaagttacctaaaacttattttgatatgtgttgtaagagaatcaa

SEQ ID NO: 132075 - DNA, 201 bp, Homo sapiens
acctaatttattgagagtttttagcatgaagggttgttgaattttgtcaaaggctttttctgcatctattgagataatcatgtggtttttgtctttggctstgtttatatgctggattacatttattgatttgcgtatattgaaccagccttgcatcccagggatgaagcccacttgatcatggtggataagttttttgat

SEQ ID NO: 132076 - DNA, 201 bp, Homo sapiens
tgatttttaacttttatgtttttaagtcttttctacaatcctactactgggcatatacccaaaggaaaataattcattctgtcaaaaagacacatgcactyatgtgttcattatagcactgttcacaatggcagatacatggaatcaacctaggtaggtgcccatcaacagtggattggataaagaaaatgtggcacatat

SEQ ID NO: 132077 - DNA, 201 bp, Homo sapiens
agctcttattattttgaaatacgtcccatcaatacctaatttattgagagtttttagcatgaagggttgttgaattttgtcaaaggctttttctgcatctwttgagataatcatgtggtttttgtctttggctctgtttatatgctggattacatttattgatttgcgtatattgaaccagccttgcatcccagggatgaa

SEQ ID NO: 132078 - DNA, 201 bp, Homo sapiens
gctatatctttaagtaaagtaaatttctagaagtaaaattgtgggccagaggatatgcatgttttaagaatcttgatacatacatggctgaatttgttctkcaatacagtggttttagcttattcatctgccaacatcaatttgtatttctatttcatgaaatatttgtgaacaccaaacacttaatttttaaaatgacat

SEQ ID NO: 132079 - DNA, 201 bp, Homo sapiens
aatttcatccatgtccctacaaaggacatgaactcatcattttttatggctgcatagtattccatggtggatatgtgccacattttcttaatccagtctaycattgttggacatttgggttggttccaagtctttgctattgtgaataatgccgcaataaacatacgtgtgcatgtgtctttatagcagcatgatttatag

SEQ ID NO: 132080 - DNA, 201 bp, Homo sapiens
ttttatggacatttacgacatttatgttcctaattttttgggattatgaacaatgctgtcatagaaaactttaaatttcttctcacatttcagaatatatyagtaggtcactatataagaagcatatttattgggtccaatgttgatgtcttcttaaaataattattatataggaaatagaaaatatatcgagaaaacaat

SEQ ID NO: 132081 - DNA, 201 bp, Homo sapiens
tcctgtgtccgtgtgttctcattgttcaattcccatctatgagtgagaatatgcggtgtttggttttttgttcttgcgatagtttactgagaatgatgatytccaatttcatccatgtccctacaaaggacatgaactcatcattttttatggctgcatagtattccatggtggatatgtgccacattttcttaatccagt

SEQ ID NO: 132082 - DNA, 201 bp, Homo sapiens
caaatggggctctgagaaggaaagtcatttgtcccaggtgacatagctagaaagtatcaacgctaaaatttaagccaaaactatgattcaggaaatcttatcatcataagggctataacttaacactgataaaagctaaggattcttttttccaggtgccatattagctttcatgttggggttgtttcatatgcccttgga

SEQ ID NO: 132083 - DNA, 201 bp, Homo sapiens
gactttgagcatggctttattattttataaaattattttttattttttaaattgccagataaaggtgtatgtatttatggtgtgcaacatgatgtttttargtattattttcattgtggactaactaaatctaacatatgcattacctcacacagttatttttctggtttcattttacagtctcagtattcttcaagttga

SEQ ID NO: 132084 - DNA, 201 bp, Homo sapiens
cccaccacagtccccagagtgtgatattccccttcctgtgtccgtgtgttctcattgttcaattcccatctatgagtgagaatatgcggtgtttggttttwtgttcttgcgatagtttactgagaatgatgatttccaatttcatccatgtccctacaaaggacatgaactcatcattttttatggctgcatagtattcca

SEQ ID NO: 132085 - DNA, 201 bp, Homo sapiens
caaggcacaatttgacactcaaaattttttgatgcctaactacctttgtgttccaggacttacctaccccctaccttgtgttgggaatagagcttttcatygtttttttattctcccactgttaaaaattgtcatgatacacacatgacagtttacatggtacatacaccctcaattggtctatatctcctaagctttttc

SEQ ID NO: 132086 - DNA, 201 bp, Homo sapiens
cattagctatgcatgagtgtaaatgtctttggccagatgtgccgttagagtgcatagtatccctgggcactggacgttatgagagtgatgtgagaaacacrgtaacatacacaagcttgaaaactaaactttctaatgttatcaacagtgctacagatacagaaggttagtcttgtttgctgctttaaaatacttcaactt

SEQ ID NO: 132087 - DNA, 201 bp, Homo sapiens
ttaatcttacataattttctagttacttcttgttaacattatcaaggcacaatttgacactcaaaattttttgatgcctaactacctttgtgttccaggayttacctaccccctaccttgtgttgggaatagagcttttcatcgtttttttattctcccactgttaaaaattgtcatgatacacacatgacagtttacatg

SEQ ID NO: 132088 - DNA, 201 bp, Homo sapiens
ctcccaatgctatccctcccccctccccccaccccaccacagtccccagagtgtgatattccccttcctgtgtccgtgtgttctcattgttcaattcccayctatgagtgagaatatgcggtgtttggttttttgttcttgcgatagtttactgagaatgatgatttccaatttcatccatgtccctacaaaggacatgaa

SEQ ID NO: 132089 - DNA, 201 bp, Homo sapiens
aataaaaagtttctttatgagaccaatgagtcttcgcatggatttttttgcagctgtagtctataaaagaaatgcacttttaaggaacctcttggttttarataatttatttagcttattacatagttcagctttccccgtgagtcagttttaaaagtttctttttttaacttgtattttgcaggatggaggtttgcttct

SEQ ID NO: 132090 - DNA, 201 bp, Homo sapiens
acccactaactcatcatctagcattaggtatatctcccaatgctatccctcccccctccccccaccccaccacagtccccagagtgtgatattccccttcstgtgtccgtgtgttctcattgttcaattcccatctatgagtgagaatatgcggtgtttggttttttgttcttgcgatagtttactgagaatgatgatttc

SEQ ID NO: 132091 - DNA, 201 bp, Homo sapiens
catatgtatacatgtgccatgctggtgcgctgcacccactaactcatcatctagcattaggtatatctcccaatgctatccctcccccctccccccacccyaccacagtccccagagtgtgatattccccttcctgtgtccgtgtgttctcattgttcaattcccatctatgagtgagaatatgcggtgtttggttttttg

SEQ ID NO: 132092 - DNA, 201 bp, Homo sapiens
ggatttaggaagtacatgggaggaaacattttgttgttttcctttctcacttgtttcttgttaggtgactctagaacagagactgttttccatttgagagmtagtgctacctttgcccacttactgttggagaagtacctaaagctggatagcacaacattttgttggagactctgaagccagttaagaaagggaaaagca

SEQ ID NO: 132093 - DNA, 201 bp, Homo sapiens
tgcaggttagttacatatgtatacatgtgccatgctggtgcgctgcacccactaactcatcatctagcattaggtatatctcccaatgctatccctccccmctccccccaccccaccacagtccccagagtgtgatattccccttcctgtgtccgtgtgttctcattgttcaattcccatctatgagtgagaatatgcggt

SEQ ID NO: 132094 - DNA, 201 bp, Homo sapiens
gggtacatgtgcacattgtgcaggttagttacatatgtatacatgtgccatgctggtgcgctgcacccactaactcatcatctagcattaggtatatctcycaatgctatccctcccccctccccccaccccaccacagtccccagagtgtgatattccccttcctgtgtccgtgtgttctcattgttcaattcccatcta

SEQ ID NO: 132095 - DNA, 201 bp, Homo sapiens
tgtcagtttgaataatgaaattagtgaatctttgtaatgtgcctaaaaagaagttaattttaaataaagacaaattaacagttcattgctcactttatccmctcttttcttatccccttatccttttcttttttgctttaacagaagtccatataatgcttgatggcctgttacctcctgacacctattttagattcaatc

SEQ ID NO: 132096 - DNA, 201 bp, Homo sapiens
gatgtaaatgatatgtcaatgaagttgatcccaaaaaaaaggaaagttggaaagggcatttcagcagtggtgaacagtatgaccaaaagcacagagagaayagaagaagtatactaatttcacagaataatgtattttggaagatgaattttatcttatagttttacccattattatggattacttctactgtcagtttga

SEQ ID NO: 132097 - DNA, 201 bp, Homo sapiens; identical to SEQ ID NO: 23196

SEQ ID NO: 132098 - DNA, 201 bp, Homo sapiens
tagtcttgtgttttctgttatacccaatttcaatttttaacgtgaattctaattttttttcttgccatttcaggtaagaccatgaattatggcatttcttwaatgaagcgttcaagaagtgagagaatgtcatagaaaataaatgatttttaagttatgtctattaatctgactgtagatatatatatttacctccttagt

SEQ ID NO: 132099 - DNA, 201 bp, Homo sapiens
ttgccgggaacgagcgagtcgccgctgcagccctagtgactgcggcctgcatcccggtaagtagccgcgaggggacaggggcgggacgataggaggctggytgatcgttctggacccttgtccggcgctccgggtcgtcctttctttctttggagggcacttcccgagcgagagggtggggacacgccaggctttggggag

SEQ ID NO: 132100 - DNA, 201 bp, Homo sapiens
caacaaatggtccgggactattagatacctgtatccacagcgttgaccttgaccctttgcaccatacacaaaagtaacttggaatgcatcacagtcgttcrtggctaatatgcagaaatacaactgatttttcttattgaccttatataacttcaaacttgctaaactcacttattctagtagctttctatagctttctca

SEQ ID NO: 132101 - DNA, 201 bp, Homo sapiens
ctgaagctatttgggtattctcaaaggcaaattttacaaattttacaggaaaggaaagagaaatgcttaatttatttgtatttagttaccagttttctttytttttttttttttttccaatttgagagcaggtactgtttattaaccaaccagcttagagaaatagtcatggtagacaccttagttcattcttctaataag

SEQ ID NO: 132102 - DNA, 201 bp, Homo sapiens
gcatgggcctgaaaagtacaaccttctgtatgcttggaaggggaagcaaacagtgtattggtgaacattagtaatgtctgcacagtattccttcagaaatyattctatgcacatatataccaaaataaactcattctgtatatgttgttttataatctggttttttagcatataatgtatacctttctatatcagtaaatg

SEQ ID NO: 132103 - DNA, 201 bp, Homo sapiens
gctataataggaatattttgtctgctttttttgagacagcttgctgagtttagtccaaatagtcttgtgttttctgttatacccaatttcaatttttaacktgaattctaattttttttcttgccatttcaggtaagaccatgaattatggcatttcttaaatgaagcgttcaagaagtgagagaatgtcatagaaaataa

SEQ ID NO: 132104 - DNA, 201 bp, Homo sapiens
gcctcccaaagtgctgggattacaggcgtgagccaccacgcctggccagaagtttttaatattaatgaagtctaccttaccaattttttcttttgtgtatygtgcatttgatattgtctcaaagtcattgccattcctaaggtcatctaagttttctcctatgttatattctagttttatacatttgcattttacatttag

SEQ ID NO: 132105 - DNA, 201 bp, Homo sapiens
tgcatatagcttatatagaactgcagattgcttttttttaaagacttttttaagaatagtttttaggttcacaggaaaattgagaggaaggtacagacgtktccatataccccctaccctgacacacgcatagccacctccattatcggcatcacccaccagagtggtacagttattataattgatgagcctgcattcaca

SEQ ID NO: 132106 - DNA, 201 bp, Homo sapiens
aacaggtgcttatcctttcagaatcaatatgtgtatgtatatgtgtgtccataagatttcaactgcatatgtagattttcattttttaatttcttaatatrtgtgtgtgtgtgtgtgtgtgtgtgtgtgtatatatatatatatatatatattcatgtgcatatagcttatatagaactgcagattgcttttttttaaaga

SEQ ID NO: 132107 - DNA, 201 bp, Homo sapiens
catttatctgggctggtctcaaactcctggctgtgtttgttttgtttaccgttatttagaattctctcctttccttctcatctttacacgtgatgaattcycttttaaatttggccagtttttaacctcttttttttttttttaaacttccctcgattttatctcactttgtctttcattcacatggtaccttctgttaca

SEQ ID NO: 132108 - DNA, 201 bp, Homo sapiens
taggactacaggcatgtgccaccatgcccagctaatttgttttatttatttttttttaagagacaaggtttcaccatttatctgggctggtctcaaactcytggctgtgtttgttttgtttaccgttatttagaattctctcctttccttctcatctttacacgtgatgaattcccttttaaatttggccagtttttaacc

SEQ ID NO: 132109 - DNA, 201 bp, Homo sapiens
aaattgttttcccttctccctgaggaggagaagggaaaacaattgttccccttggggaatctgtctggtctttttgtagatagggaaaaagtctcttctascatctgttgatctctgatggggctttaattcaaaatacttataccagggagccatattttgtggtagaattccctgggctccttcagcctggaagacaag

SEQ ID NO: 132110 - DNA, 201 bp, Homo sapiens
ataaaaatacaaacattagcccggcatggtggtgcacacctatagtcccagctactcgggaggctaaggcaggagaatggcttgaacctgagagacggagrttgcagtgagccaaatagcgccagtgcactccagcctaggcgacacagcgagactccatctcaaaaaaaaaaaaaaaaaaaagaagaagttaggcttgtt

SEQ ID NO: 132111 - DNA, 201 bp, Homo sapiens
gaaaaggaatgagaaaacttgattggtgtagacagcttataagacataaagtagacttgatatgggtcttaaaggatgtataggatttggacattttaaaagagagttaagacttcctcttctggacatcataaactattagggaccagatatttcctcttaccttaaacaactagaaaagtagacaaaacaatgattttc

SEQ ID NO: 132112 - DNA, 201 bp, Homo sapiens
gagaaattttggccctaattggctatgtggatccagtgaaagggagaggaatccgaattctctcaattgatggtggaggaacaaggtaaggctaggaacaygattctttttttttttttttttttttttttttgagatggagtttccctctgttgcccaggctggagtgcagtggcacaatctcagctcactgcaacctct

SEQ ID NO: 132113 - DNA, 201 bp, Homo sapiens
tgattaagactatgaattaagaaaaggaatgagaaaacttgattggtgtagacagcttataagacataaagtagacttgatatgggtcttaaaggatgtayaggatttggacattttaaaagagagttaagacttcctcttctggacatcataaactattagggaccagatatttcctcttaccttaaacaactagaaaag

SEQ ID NO: 132114 - DNA, 201 bp, Homo sapiens
cagggtgtgttcacttaaccaccatctcattgggtcctaaaatctcaagaatacaaagccttccactctgattttcagaggtcttcggcttaccttttgcyttccacacctcatgattttagaattcagcaaatgtcttgaggtaaagccaaccatgtgtttgaagcccttcaggtcttccatttttttcactccaaaccc

SEQ ID NO: 132115 - DNA, 201 bp, Homo sapiens
tttgttgagtttccaagccatgacatatggcatattttttcaattattcgggtcatctttattttcctcctgtgttttaaaaattttcagtgttgggtgtsttttacatcttccattggaatgattttatttaactaattcataggtatctgatatattttgataattttattttgttatttttatttcaacatgtttttg

SEQ ID NO: 132116 - DNA, 201 bp, Homo sapiens
ccactggtatatttgtgtgtggttgtgctgatagtgcactggctcaatttttgcagctgtataaacctaggtagtataaatcctccaaccttgttcttctyaatgttgttggcatggctattcttgacatgttatatttctatatgaattttagaatcaccttatctacaaaaaaatttttaaaagagaaaaacatggtgg

SEQ ID NO: 132117 - DNA, 201 bp, Homo sapiens
gaaccttcttcttctcttctacacccaccatggttccagccggaaaaagagctagttaccggttttctttctttttttttttttttattatactttaagtyttagggtacatgtgcacattgtgcaggttagttacatatgtatacatgtgccatgctggtgcgctgcacccactaactcatcatctagcattaggtatat

SEQ ID NO: 132118 - DNA, 201 bp, Homo sapiens
gacaaatgccagtttgggttctgcaggtacaaagtagttgccagcttttcttgccatcctcgccattcgaatttcagttctgtacatctgcctatattccytgtgatagtgctttgctttttcatagataagcttcctccttgcctttcgaagcatcttttgggcaaacttctttctcaggcgcttcatcttcagctctga

SEQ ID NO: 132119 - DNA, 201 bp, Homo sapiens
catacattatgctaatcaattcattttattttgttagcaccaatatgtatactttgaaattaaacatttataaaatagaaaataatcagtttattagttgrattgcctaacagctgccagatttttctttagtgcaatgtaaatatttatactatgtaactgttcttttaagataggagacataattcatatgtgaggctg

SEQ ID NO: 132120 - DNA, 201 bp, Homo sapiens
actaaattatggttttaattttttatttcattgatagctatgatattcagcatcttttccagggtttattggccatgtttatacttccttgtgaagtaccyattccagatcttgcctatttttccattgggttcaccaactttttcttcattatttgtagaattttaaaaatatattacggttgtaactcacttgtcatat

SEQ ID NO: 132121 - DNA, 201 bp, Homo sapiens
cctagctaattttttgtatttttggtagagatggggtttcaccatgccgaccaggctggtcttgaactcctgacctcgtgatctgcctgcctcagcctccyaaagtgctgggattacaggcgtgagccaccacgcctggccagaagtttttaatattaatgaagtctaccttaccaattttttcttttgtgtattgtgcat

SEQ ID NO: 132122 - DNA, 201 bp, Homo sapiens
ttctttggagtatatacctaagagtactattgctgctcacagagtgagcatatttgtaacgttagtagatactgccaaatggttttgcatagtgcttgtgscaatttattctttcaccagaattctatgaggcctctgtgttctactttctctccaacactttattttgtaattttttttttgagactgagtgtcgctctg

SEQ ID NO: 132123 - DNA, 201 bp, Homo sapiens
tctcgctctgtcacccaggctgcagttcagtggcaggatcttggctcactgcaatctccgcctcccgggttcaagtgattcttctgcctcagcctcccgartagctgggactatagtcacgtaccaccacgcccggctaatttttgtatttttagtagagacggggtttcaccatattggccaggctggtcttgaactcct

SEQ ID NO: 132124 - DNA, 201 bp, Homo sapiens
tgatatcagcaaaagttgcacagtgagtttcgacatgcatacattctggacatgtatagagattctagttacttataaatttctgggaaagaatcctggtaccagatgccggctttagctaatagagaagtctaattgtttctgaattcctcagataaggagctttccctctggatggtctgctcgatggccaccaggtga

SEQ ID NO: 132125 - DNA, 201 bp, Homo sapiens
tagtccagaatttaacaatgaggaagggaaaaaaaagcatagtatctaaattgcatattaaattatgtgttgtgcaacggaagacttatctattgggaaasttccctaaattagttcttctccctaaacattctattcctcattttctttttttatttacctctatactgaaagtgaattattttctattagcttaaaaat

SEQ ID NO: 132126 - DNA, 201 bp, Homo sapiens; identical to SEQ ID NO: 23192

SEQ ID NO: 132127 - DNA, 201 bp, Homo sapiens
atcagtttttcagaattctagcagcataatttagttgtgcctctttttgcatgttctatgaattatacagcatgtgttcttatatgtctggttttttttttcactcaatattatgtttgtgagaaccttctatattgttgggtatacttttcatttttccctctattgctagacatttggatggtttgcagtttgggaata

SEQ ID NO: 132128 - DNA, 201 bp, Homo sapiens
agtggattttttcttaggggtatttatggaccttaaagcagaagctgaagggtaacttggaccatattagccacgtaggtcatgatcagtgattacatttrtagacattttggtgctttgatatcagcaaaagttgcacagtgagtttcgacatgcatacattctggacatgtatagagattctagttacttataaatttc

SEQ ID NO: 132129 - DNA, 201 bp, Homo sapiens; identical to SEQ ID NO: 23193

SEQ ID NO: 132130 - DNA, 201 bp, Homo sapiens; identical to SEQ ID NO: 23194

SEQ ID NO: 132131 - DNA, 201 bp, Homo sapiens
agtgagacataatgcatcaatcagtcacattggtttgatttggaagggcaggacaactcaaaggggacggggcctccaggtcatacaaaaattttctaatyggcggttggttgaaagagttactatcagtagaagaaatgtttgggttaccataaggaggtgtggaaaccaaggttttatgatgcagatgaaggctccagg

SEQ ID NO: 132132 - DNA, 201 bp, Homo sapiens
agtgtacctgcactccagttaataagacaaatgagtaaaaatttaataaacttagttaactttgaaaaagatataacaagaattgctgttataagatataacaacaacattgctgttggcccacaaaaacaacaattttatagggtttaatctgtggtgaattgctaaataaatggtaaatgattgtaagtgattaagact

SEQ ID NO: 132133 - DNA, 201 bp, Homo sapiens
atggtctgctcgatggccaccaggtgatctttgctctcctcagtactgttaccttcagactgttgtcacccttttgactgttatattaataattaagtgasatactctgtaaattcattctttccatccttagctgggtctccatctaacaattcccttaattcctctagttaaaactccattcccttctctaagtgtttg

SEQ ID NO: 132134 - DNA, 201 bp, Homo sapiens
tcagtgtacctgcactccagttaataagacaaatgagtaaaaatttaataaacttagttaactttgaaaaagatataacaagaattgctgttataagatataacaacaacattgctgttggcccacaaaaacaacaattttatagggtttaatctgtggtgaattgctaaataaatggtaaatgattgtaagtgattaaga

SEQ ID NO: 132135 - DNA, 201 bp, Homo sapiens
atatcagcatattattggccaagtcattaacataagtgagaatcttaaactccccactgaggacttttattcattgaatgaaaaccaaaaaaaagctcatrtgctagatttttcactatctgaaattttgttgccagatcagtaaaatactctttttctcccagctttattgaggtcagactgacataaaaattgtatata

SEQ ID NO: 132136 - DNA, 201 bp, Homo sapiens
tccccacactagtacttgctgggtgaggtgtcagagccccagcatcagaaagtggtcagcttggggtagtagggtagtaagaaaaatttaccgacaacacygtaggtttgaaaaggaaagttttattggatagaaagagtgctgcagaagagtgcagccaggcgcctcagcaagagaggacagctcaccgcagtggatttt

SEQ ID NO: 132137 - DNA, 201 bp, Homo sapiens
atacaatcagcagtaaaaaggagtaaactattgatacatgcaactacttggattagtctcgatgacatgctcagaaagagaaggcagtttaaagaagtcccatactgtattattccatttctatgacctccttagtagtggcagaaaacagatcagtggttgtcaagggttatgggtgggaggaggggtgcctacaaagac

SEQ ID NO: 132138 - DNA, 201 bp, Homo sapiens
gtattgcaaatacacatttttcaaggaagaaaagctttactcaggttgcctgatcccaaaatagtcatgtattattactgtaaactatcatctggtaaatmcgtctaatgttgtggtttctgctgccactatgctggtaattccacaagtaaatccacagtctgtgtacatttccatttgaatgtcccactgttacttcat

SEQ ID NO: 132139 - DNA, 201 bp, Homo sapiens
gtcctacagtggatgaatgcatgaactgtgtggtacatccatacaatcagcagtaaaaaggagtaaactattgatacatgcaactacttggattagtctcratgacatgctcagaaagagaaggcagtttaaagaagtcccatactgtattattccatttctatgacctccttagtagtggcagaaaacagatcagtggtt

SEQ ID NO: 132140 - DNA, 201 bp, Homo sapiens
atatatatttgtaaaaaggtcagagttagaatgctgagccatagacaccttcctgtcctgccattttttgttgttgttgggagtctctctctgtcgcccargctggagtgccttggtgcgatctcgactcactgcaaggttcaaacgattctcttgcttcagcctcccgagtagctgggatttacaggcgtgcgcaaccac

SEQ ID NO: 132141 - DNA, 201 bp, Homo sapiens
atgaaggaaggaataagtactgagagaaggaagctaacctcagatggtggcagtggaaggcaggaggaaggaaaaatgtaccagtaactttttttttttttgagacggagttttgctctggttgtccgggctggagtgcagtgacgtgatctcggctcactgcaacctccacctcccaggttcaactgatcagttctcctg

SEQ ID NO: 132142 - DNA, 201 bp, Homo sapiens
gaataattggaaaccaaaattgtaacaaaagcagtacagtttacagtagatccaaaaaattaaacacttagatataaatctgacaaaacatagggaatctrtatgttgaaaacagaagatgaaagaaataaaagaagacctaaagaaatggaaaggcataccattattgaaagatgctacatggtaaagatgtgagttatt

SEQ ID NO: 132143 - DNA, 201 bp, Homo sapiens
taatgggacctttaagccagagcaccaatggtgggggtagttgattttccacaaagaaaactacttgggagaatcaattatattcctatatacaagcaaakaataattggaaaccaaaattgtaacaaaagcagtacagtttacagtagatccaaaaaattaaacacttagatataaatctgacaaaacatagggaatctg

SEQ ID NO: 132144 - DNA, 201 bp, Homo sapiens
attcttctaagtaaaagaaaccagacccaaaaaaacttacactatatgattccatttattttgataacgaagttcaatgcgtgactttgaagagtagttgratgaataggtttttgaagtaaatgtggcaacaaaccacccatgctaaaatggagaatagagcaagcaatagaaagacgtggcaaactgcttttctgaacg

SEQ ID NO: 132145 - DNA, 201 bp, Homo sapiens
actttcaacaaatgtataaagatagctaaatttaaaaatagttcttttcaactggtgaatggataaactatggtatattcaaacaatgaaatattactcarcaataaaaaggaatgaattactgacattcacagagacatagatgaatctcacaagcattcttctaagtaaaagaaaccagacccaaaaaaacttacacta

SEQ ID NO: 132146 - DNA, 201 bp, Homo sapiens
gggataagtatcattctaatgatctgttaattgaaaacaaaggaaaaagttgaaaggattaagttaaaatttgtacttgagaaggcctttaggaaatagcytaattattaccacctgcattgaaggaatctaagtagatttttacaaagctcagcaatacaaatataaatacctatccaatttatgactttcaacaaatgt

SEQ ID NO: 132147 - DNA, 201 bp, Homo sapiens
ctgtccgattgcatgggcctgaaaagtacaaccttctgtatgcttggaaggggaagcaaacagtgtattggtgaacattagtaatgtctgcacagtattcyttcagaaattattctatgcacatatataccaaaataaactcattctgtatatgttgttttataatctggttttttagcatataatgtatacctttctata

SEQ ID NO: 132148 - DNA, 201 bp, Homo sapiens
aagtagccgcgaggggacaggggcgggacgataggaggctggctgatcgttctggacccttgtccggcgctccgggtcgtcctttctttctttggagggcrcttcccgagcgagagggtggggacacgccaggctttggggaggagctggcgctggaaggagcccgcaggtcctggagctcattggtactcggcgccctcc

SEQ ID NO: 132149 - DNA, 201 bp, Homo sapiens
attttgtgtgaaataaatttctactgtttataagctacctaagccaggcatgtgtacctgtagtcccagctacttgggaggctgaggcaggtggattgcaygagcccaggagttcgaggtggtagtgagtgagctatgatcatgccactgcactccagcctgggtgacagagtgagaccctgtctctataaaacacacaca

SEQ ID NO: 132150 - DNA, 201 bp, Homo sapiens
cttcagattggggtacccccatgcaatatatggctctacaatcctcagcatgttagtcgaagccttgttgagcttcacaaaggttccattgtagatttgaygaaggcgaagaagctgcaacacctttcggacctttgggctcacgccactgatacctctgattctgatgacaaatgccagtttgggttctgcaggtacaaa

SEQ ID NO: 132151 - DNA, 201 bp, Homo sapiens
gaaccagtaagtgggccttcagcagataccaaatctgttaatactgatcttggacttcccagtctccagaactgtgagaaattttgtgtgaaataaatttmtactgtttataagctacctaagccaggcatgtgtacctgtagtcccagctacttgggaggctgaggcaggtggattgcacgagcccaggagttcgaggtg

SEQ ID NO: 132152 - DNA, 201 bp, Homo sapiens
aaggttttatgatgcagatgaaggctccaggtagcaggctgcagagtgaatagattgtaaatgttttttttttttctttttttgtttttttttttgagagrgagtctcgctctgtcacccaggctgcagttcagtggcaggatcttggctcactgcaatctccgcctcccgggttcaagtgattcttctgcctcagcctcc

SEQ ID NO: 132153 - DNA, 201 bp, Homo sapiens
ggtaattccacaagtaaatccacagtctgtgtacatttccatttgaatgtcccactgttacttcatcctgtgaatccaaaagaaaatgtgtttttctctcmtattaaattgtccccttcacagttttctcatattcgcaaatggcactctccgtatttttcagatttaaaaccttagagctctcttaacacttccctctct

SEQ ID NO: 132154 - DNA, 201 bp, Homo sapiens
attctcttgcttcagcctcccgagtagctgggatttacaggcgtgcgcaaccacacccggctaatttttttaagtagagacgggtttccccatgttggccrggctgctctcaaactcctggcctcaggtgatccgcccgcctcggcctcccaaagtgctgggatttcaggcctgagccaccgcacctggccagtcatttct

SEQ ID NO: 132155 - DNA, 201 bp, Homo sapiens
cttatgcaaattagttgtcctttcaatataagaacatgtttttatttcgtaattataatcaactttttcttaatgttgatctctttttttatttctatathaggactaaattaaaatcttgtaaacgcccttttaatgagtgatgttgaatgaaagggccagtttcactagtttagctattcacttgtttcacatgcaaag

SEQ ID NO: 132156 - DNA, 201 bp, Homo sapiens
ttttttcatattttgacatctcggaaataaacaattaccattgctttttttacaagtttatattcataagtgaattcactaaaagcattttaggttttgakaaaaccaagatttaaacaaatataaaaataaataaatatgaactttgccaaaaagtgtgaaatcagcatgctcctaggatttctcttgtaattttacagt

SEQ ID NO: 132157 - DNA, 201 bp, Homo sapiens
gtttctgagaaaggtgtattaaatctctcatgattatgaaattgtctaatcttgtaatagttcccttattttggccttttgtactgtattttaatgccaarttgataggtggtttcataaattcgtcatattggaaagaaacaatgcaaaattcttaccatagcctagtctccatttcctgcctgaattttggggtctgtg

SEQ ID NO: 132158 - DNA, 201 bp, Homo sapiens
tccctggttcaggtgattctcttgcctcagcctcctgagtagctgggactacaggtgtgcgccaccacccccagctaatgtttcttatttttagtagagaygaggtttcactgtgttgtccaggctggtcttgaactcctgggctcaggcaatccacctgcctcagctccccaaagtactgggattacaggcatgagccac

SEQ ID NO: 132159 - DNA, 201 bp, Homo sapiens
gatagctcatgtctttgtagcactgaacaattttccattgtctgtctgtggcacatacacataccgtatattgatgtaccacagtttatccattcacttaytaaaatacatcttgttgttttgaaattttggcaattatgaataaggcttctgtaaacatcctcgtgcagattttattatggacttagtcttcagctcctt

SEQ ID NO: 132160 - DNA, 201 bp, Homo sapiens
gatctgagtgttgcttgagttctgtttaatattacttgtttaaagaatagaatttatgtgcctagaaatttcatgcagcttgtatttattctcagataacraactgtaaccatgaaaaatcaaacaagtgcagctctttctgttgctcttaactatggcatactcatactttgattcattctgcaagtattaattatacac

SEQ ID NO: 132161 - DNA, 201 bp, Homo sapiens
gatccgagggccctcccagctcatgacctgccgttctgtgtgatgccaacctgcctgctcctcttctctcccaccaggtacttgaagctggtgtgtgtttyctttcagcgtcaagggttccacactgttgggagtcgctgcaagaatcggacaggcgctgagcacctgtggctgacccgacatctcagggacccatttgtg

SEQ ID NO: 132162 - DNA, 201 bp, Homo sapiens
ggctcttggcatcctggtggctcgcgccggtccgctctcaggaagggggcgtgtgggcccggtttcccctcggggatggcaagggccaccctgatctcgtytgggcaatggaggaattgggctgtggagcctccttccaggcgggcctgcctctgcggggctggcagcctggggagctcaggcctctgcttgcaccaggcc

SEQ ID NO: 132163 - DNA, 201 bp, Homo sapiens
ctcttggcatcctggtggctcgcgccggtccgctctcaggaagggggcgtgtgggcccggtttcccctcggggatggcaagggccaccctgatctcgtttrggcaatggaggaattgggctgtggagcctccttccaggcgggcctgcctctgcggggctggcagcctggggagctcaggcctctgcttgcaccaggccaa

SEQ ID NO: 132164 - DNA, 201 bp, Homo sapiens
ctgctttccatctgtgtagccttatcagttcacctcccctcctgggccttggtgccccatctctagaaatgaatgagttgatccgagggccctcccagctsatgacctgccgttctgtgtgatgccaacctgcctgctcctcttctctcccaccaggtacttgaagctggtgtgtgtttcctttcagcgtcaagggttcca

SEQ ID NO: 132165 - DNA, 201 bp, Homo sapiens
cggaggttccggcgggcctgcttcccatcgctgctcctgtgtccccggcctcgctagtctttggggatcagggatgctgtctagaaaggtcggctcacacygtgcgcctgaagcccaaatctgcacacccccacaattcagtactccctacgtgcctgtcccctgccccacagaggagggtctgagtccagccctctggac

SEQ ID NO: 132166 - DNA, 201 bp, Homo sapiens
tcttggggtcctcctgatagaataggactgggtattgcgtggataaagcaggaaccagcctccccagagaccgggctgccgacgctcctccctgcctcccsctcctgagcagcacgggcctggggttgccccaggagcaaatccattcagactcgcaggtactgaagcccagggccgtgctggtggcctgtggctgatggt

SEQ ID NO: 132167 - DNA, 201 bp, Homo sapiens
aattcaagctgctgcacagaggcttccagatacgccctgcagcccccagcaccaccgcaccacaacagctaacacgcactcagcacgcaccgcacaccgcrcaccgttctaagtccttcgagttcatttcctcattttatcttcacaagagtccgaagggctgcggactgttcttcattctgagatgaagacactgaggct

SEQ ID NO: 132168 - DNA, 201 bp, Homo sapiens
ccagaggctgtggctgcagtcagctgtgatcatgccactgcactccagcctgggtaatagtaaaaccctgtctctaaaaaaacaaaaagaagaaagaaaaatgcctgggtgcagtggcttacacctgtaatcccagcactttgggaggccaaggcgggcagatcagcggaggtcaggagtttgagaccagcctggccaaca

SEQ ID NO: 132169 - DNA, 201 bp, Homo sapiens
aagtgctgggattacagatgtgagccatggtgcccggctactcttaatgatgtattgacatctttccccaacagcacagctaaatttccaagtcgcataarccctggggctttcctggtggccccactggggctgctccgtccggaacctagaagaggcttcatggccagggctatggattctttgctctggatgaagctg

SEQ ID NO: 132170 - DNA, 201 bp, Homo sapiens
cccagaggctgtggctgcagtcagctgtgatcatgccactgcactccagcctgggtaatagtaaaaccctgtctctaaaaaaacaaaaagaagaaagaaaaatgcctgggtgcagtggcttacacctgtaatcccagcactttgggaggccaaggcgggcagatcagcggaggtcaggagtttgagaccagcctggccaac

SEQ ID NO: 132171 - DNA, 201 bp, Homo sapiens
tgggaggttcacttgagccccagaggctgtggctgcagtcagctgtgatcatgccactgcactccagcctgggtaatagtaaaaccctgtctctaaaaaamcaaaaagaagaaagaaaaatgcctgggtgcagtggcttacacctgtaatcccagcactttgggaggccaaggcgggcagatcagcggaggtcaggagttt

SEQ ID NO: 132172 - DNA, 201 bp, Homo sapiens
tccgaatacccccatattctgaggtaccaagggttaggacatcaacacattaattttgcggggacacagtttggcctgtgatgcctgctttccatctgtgkagccttatcagttcacctcccctcctgggccttggtgccccatctctagaaatgaatgagttgatccgagggccctcccagctcatgacctgccgttctg

SEQ ID NO: 132173 - DNA, 201 bp, Homo sapiens
tcttggaagttgtggtgtctgagaaaagggaccagatgataaggaagggggcagggaagtgctgggtagaggagggcgtggtctctggccagggctccacmcccaggcctgtgcccagggacctgggtgaggacaggcatttctgtttttttgcccaaatgttgcatttcccgagcccgccacgtccccgtcctgtgccta

SEQ ID NO: 132174 - DNA, 201 bp, Homo sapiens
cactttgttgcatgtactgtatttttgtaaaaagattcagggtgtaaataaataacacattcaccatttcttccatagatcccagctctcctgttggcttygtgcttggggtagatcttcttcacatattccccctggaaggagcaacttttctgtgccctgctgacgtgactgacccgagaacctcacagagaatcctcg

SEQ ID NO: 132175 - DNA, 201 bp, Homo sapiens
tcacttcctgtctgggcctcagcttctcagatgttaaggcccgccatctccaccatgtgtctttataggatgtatagatagagaaggcctgtgtttacctrtttgcacattagctctttgccttggtcttgacattttatttttatttcatcactttgttgcatgtactgtatttttgtaaaaagattcagggtgtaaata

SEQ ID NO: 132176 - DNA, 201 bp, Homo sapiens
ctaatttatctttttttcttgtcacttgtgcttttggtattgagtctaagaagtctttgtctaatgtgaggtcataaagatttactcctacagttttttckgtaagagttttgtagttttagctcttacgtttatatctgtggttcattttgtgttaatttctatacacggtgtgaagtaagggtccaacttcattctttt

SEQ ID NO: 132177 - DNA, 201 bp, Homo sapiens
tagtcttttggggtttcatcacacagaatatttatttttctcttattctaagcttttctgtatttcttcagtttgaatattgtcactttccatagtttgtrtatttcagtcagtaaacattgcatcaggtattgtggtaagaactgggaatataggctgtgtgcggtagctcgcgcctgtgatcccagcactttgggaggc

SEQ ID NO: 132178 - DNA, 201 bp, Homo sapiens
gaggtagtaaagttagttgcttttataaaaattgtttttccctcacatgttaattttggtcacataatttagttatggctgtctttttttaaaattaatargcttatcaagtgagactctggaattgcttactatcccaagataataattgagaaattacttaccagttttggttctagagtttttcttctgtaaaaaagc

SEQ ID NO: 132179 - DNA, 201 bp, Homo sapiens
tgagctctatgggccagttaaatcgaagatatttttgtttggtagttggtttcttttaagttaatagtgccacccagaggtagtaaagttagttgcttttwtaaaaattgtttttccctcacatgttaattttggtcacataatttagttatggctgtctttttttaaaattaataggcttatcaagtgagactctggaat

SEQ ID NO: 132180 - DNA, 201 bp, Homo sapiens
ctgcaaaaaaatggtaatatttataagaaacaattaatgaaacccacacttgaatttgatacaggtttttggaatttgagctctatgggccagttaaatckaagatatttttgtttggtagttggtttcttttaagttaatagtgccacccagaggtagtaaagttagttgcttttataaaaattgtttttccctcacatg

SEQ ID NO: 132181 - DNA, 201 bp, Homo sapiens
agaaatgttttgggactgggtgtggtggctcatgcctgtaattctagtgctttgagggactagagtaggagtcttgaaaccaggagttcataaccagcctrggcaacatattgagactccatcatacagaagataaaaaattagcggggcatggtgggtgtcgcttgtagtcccagctgcttgggaggttgaggctggagg

SEQ ID NO: 132182 - DNA, 201 bp, Homo sapiens
aggggcttttccctattttgctcagcacttctccttactgccaccatgtgaagaaggacgtgtttgtttccccttctgccatgattgtaagtttcctgagrtctccccagccctggggaactgtgagtcagttaaacctctttccttttatgggtttactcagtcttgggtatgtctttattagcagcatgagaatggact

SEQ ID NO: 132183 - DNA, 201 bp, Homo sapiens
aaatctcatcttgaattgtagttcccataatccccatgtgtcatgggagggacccggtgggaggtaattgaatcatgggggtggttacccccatgctgctrttctagatagtgagttctcacaagatctgatggttttataaggggcttttccctattttgctcagcacttctccttactgccaccatgtgaagaaggacg

SEQ ID NO: 132184 - DNA, 201 bp, Homo sapiens
agaccatatctcaaaaaaaaaaaaaaaaaaaaaaaaagaactgggaatataatcgttatgacacatttacctgtgcttaggttcatatgttagtgagggaratataaatgcttatagtattgtacataaataatataaaaaaaaactgtatcttcaagcagacaggtatgtaccagcatggaggtgggagtaactatgcct

SEQ ID NO: 132185 - DNA, 201 bp, Homo sapiens
gaaagaatgaagacaagggagaaaagggttttagaaagcttagcagtgtcaatacttcatagggattaagatggtgattgaaaagtgtcccttgggtttgrcacttgaggtgaaatgataagggcctgaactatgataatgacaatggcagtggtaggaagggagagagttaagggatactgaggagttagcattgatagg

SEQ ID NO: 132186 - DNA, 201 bp, Homo sapiens
tagaagccaaggagggctagagtttcaataataatgatcatgatattaataatgataatagggaataacagcagatatttatattaatagtatgtttgctwtgtaccagattttgttctaagtgcattacatatattaacccatgtatgtaattcatacagcagtcttatgaggtgggtattattatcatccctattttac

SEQ ID NO: 132187 - DNA, 201 bp, Homo sapiens
ttcttttacttagcataatattttcaagtttcatctgtgctgtagaatgtatcagtattaattttttaattgccaaataatattttacctgttcagcattygagggacatttggatggtttccatattttggctattatgaataacgctacagtgaatatttgtgtccaggtttttgtgtgaatatgttttcctttctctc

SEQ ID NO: 132188 - DNA, 201 bp, Homo sapiens
tacaggaagacatgtggtgggagtagatttagcagaaggttggaatcatcaggagtaggtaagagcaccctagaaaaatatttgagtgagaagagatgacrgtggaagttaagacatgaggaataccaatattgaaggtaaagtggaattggaggaatttgggaaggagaatggaaaggagctttctcagaagtaggagat

SEQ ID NO: 132189 - DNA, 201 bp, Homo sapiens
agggatgtggagggcaaatggagttgtaaaggtaatcattttgtgttctcagtctttgagtggcttaatctgagttacaaagggaggaggaagtagttgcktaacaaatccatttggtccaggccctgtgaatatatccattctgctactccccacccctctgaaggcatacaaaggacaacagcacagttaataccccta

SEQ ID NO: 132190 - DNA, 201 bp, Homo sapiens
atgctaatgatatgatattggggtgtaagaaggatgtggccaccgtcctgggggcctacttaatcctcagtgtgttgctagagaaaagaatgggctagacrtgaattgaaacagaaacactagcgttgtcttcagagtttatgttccaggatatccctgtggggaaatcagaaggaaaggtgagatactgttaatcattct

SEQ ID NO: 132191 - DNA, 201 bp, Homo sapiens
tgactgacttagtcttattaaatgagcttcttagagaagttgaaatgtgatctggacatactgaagaatgagtagaaattttccagcagagaagaagtgargagtttttccaagctgagataatggcctatgcaaaggcttggagcatgaaagagaatttcatatttgagctaacagtaacaagttcaggaattcagggtg

SEQ ID NO: 132192 - DNA, 201 bp, Homo sapiens
cagggattttgagatgaataatgttattttttgttgaagttttattctagtacatggagacagacatccaaaataatagtcataattcagtattttaactrctctagtagaagtaaatggtagtgctgttgaaacaaagaagtgggagtgactgacttagtcttattaaatgagcttcttagagaagttgaaatgtgatct

SEQ ID NO: 132193 - DNA, 201 bp, Homo sapiens
ttaaagctaccgactccacatacaggaaatgcatcttaaaatttggaaaaaaaatccccaaaacactgacatccaaacactttaaagctgccaaggtggayggaacaccttgaattcccagacgcgctccactgagcatgcccagagcctcaggccaaaccccctcctacccgccaaggggaggtggggcagggctggcct

SEQ ID NO: 132194 - DNA, 201 bp, Homo sapiens
taaaaacgtgaacatttcaaagcattcatttgatctcctaaggactacctataccggagcctcattccagcacatttgtaagcgaggcacgcctcctagargccacgagtgaagttaatttccagttctcgaaaatcttacagacagcggagaactggtgtggtggctctgacgccccgcttgtgagtctgcagtcggaca

SEQ ID NO: 132195 - DNA, 201 bp, Homo sapiens
aaaaatacaaaaattagccaggcgcctgtaatcccagctatttgggaggctgaggcaggagaatcgcttgaatcccggaggcggaggttgcagtgagccargatcgctccactgcactccagcctgggcgacagaacaagactctgtctcgggtattggtggtgggtcggggggaataacctatcttatgtggttatgata

SEQ ID NO: 132196 - DNA, 201 bp, Homo sapiens
atctagaaaatacgtttaatataataacctttgggaggccgaggtgggcggatcacgaggtcaggagttcgagaccagcttgccaacatggtgaaaccccrtctttactaaaaatacaaaaattagccaggcgcctgtaatcccagctatttgggaggctgaggcaggagaatcgcttgaatcccggaggcggaggttgca

SEQ ID NO: 132197 - DNA, 201 bp, Homo sapiens
gcatgtaagagggagccctaatttatgttggagaaccaagggaaggcctttctgatacagtgatttttaagctgttatctgaaagataaatgagtttggtraagaatagacagaaaaagcctttaagcagagacagcaggaagtacgatggcctgaggcagcaaacaattcactgggtttgaataattgaaagggagccag

SEQ ID NO: 132198 - DNA, 201 bp, Homo sapiens
gagatccactggacagttttaaaaaattcctctgactgctatctagggaaaacatagagtagtggaaaatgggagagcaatggaaggccggttcaggcaaragatgatggagggttagactgagatggttacaggggtgatacagaaaagtgcatttgtttttaatcttggaagtagaacctataggatttggctatggtg

SEQ ID NO: 132199 - DNA, 201 bp, Homo sapiens
tgtatctctaaagttcaaaatccttcaagaaggttgctggtgtatgctgggtgtcagaacaggagagatgtttttaacacctagcacagctgcaaactagrtggtctggaatttgcaagtacatctttcagttttatttcatcttgaagctttcatgtgggtttaacagttattcaatgtaattgaagttaatgtagctaa

SEQ ID NO: 132200 - DNA, 201 bp, Homo sapiens
agaacaggagagatgtttttaacacctagcacagctgcaaactaggtggtctggaatttgcaagtacatctttcagttttatttcatcttgaagctttcaygtgggtttaacagttattcaatgtaattgaagttaatgtagctaaaattgcatattatttttgaagtgttaagaatgaaaataatttatggtctttaaga

SEQ ID NO: 132201 - DNA, 201 bp, Homo sapiens
ttttgaagtgttaagaatgaaaataatttatggtctttaagaatgaatatgccaatatttcatattctgtattggcagtacagtaaaaattaattattttyactataagtattatataaataataaagatatttaggagggagtatatatgctaataggaaataaatgttttgcctcccaggagatcatcttagctggtac

SEQ ID NO: 132202 - DNA, 201 bp, Homo sapiens
cagcaccctttctgaatacctgaccatcagaattgagagctgtaatacaatggctgttattttaaactgttaagttttgggatagtttgttatacagtgayagataattagaactggtagctagagcttctggcttcttgagtttgagctgaaaatagcaatcagtgtatcctaaatacctcaaaacaactgtactatgat

SEQ ID NO: 132203 - DNA, 201 bp, Homo sapiens
aggcgcccgccaccacgcctggctaattttttgtatttttagtagagatggggtttcaccatgttagccaggatggtctcgatctcctgacctcgtgatcygccctccttggcctcccaaagtgctgagattacaggcgtcagccactgtgcccggccagaaccatttaattttttaaactatgaatatgtaaatagataa

SEQ ID NO: 132204 - DNA, 201 bp, Homo sapiens
tacaattttgttggctgggcgcggtggcttacacctgtaatcctagcactttgggaggccagggcaggtggatcacctgaagtcgggagttcgagaccagyctgaacaacatggattaaaccccgtgtccactaaaaatacaaaattagctgggcgtggtggcgcatgcctgtaatcccagctactccggaggctgaggca

SEQ ID NO: 132205 - DNA, 201 bp, Homo sapiens
ggggggtctgaagaaactccccaaacctccatgatttagcaggagacaagataagggtaatcacccagcacctggacccattaggattaagtaaatttacsgaggctccagaggaaggtcttcaggattcagatcttagttatagattagaagaagttaatcacttatgtcttcagatgaatgcacactaacacacagaca

SEQ ID NO: 132206 - DNA, 201 bp, Homo sapiens
ggaaaactttgtaactttgagttggcctggcgatattttccaggccttttccctgtacccagttacagaaataaactgtcttctttcccagttcgtctgcmtctcattattgggctgcgagaataggcagcctgaccctcagcttggtccggaaacagtttggtcacctcaattcctttatttaattcaccttttgatctc

SEQ ID NO: 132207 - DNA, 201 bp, Homo sapiens
cagtgtgaaatgccctaagggggcttaaatgctgagtaaacaaatttttaaaagcaatttagacacgcacacacacacacatacacacacacacacacacrcacacattagatgtacaagcatagaaaagtcttggaaggataaatactgtcttgctttatccatcagcatactgattacagttgtgatgaggtaagtacc

SEQ ID NO: 132208 - DNA, 201 bp, Homo sapiens
aaattctgtgcttttcctccattggattgcgttatcttttctaacaaaagtagacttttgctccttctccaagttttctttctctctttctctttctcttmcacacacacacacacacacacacacacacatgccatgcaggcacacacacacagtttttcctttctctttctctcactttcacacacacacacacacaca

SEQ ID NO: 132209 - DNA, 201 bp, Homo sapiens
aattctgtgcttttcctccattggattgcgttatcttttctaacaaaagtagacttttgctccttctccaagttttctttctctctttctctttctcttacacacacacacacacacacacacacacacatgccatgcaggcacacacacacagtttttcctttctctttctctcactttcacacacacacacacacacac

SEQ ID NO: 132210 - DNA, 201 bp, Homo sapiens
acacacacacacacacacacatgccatgcaggcacacacacacagtttttcctttctctttctctcactttcacacacacacacacacacacacacacacatacactcttacatcttagtccaaagtaaaaatatcctgcttatcagatgctctgccttattttcaaggcttatgcttattttgagtgtagccatggtgaa

SEQ ID NO: 132211 - DNA, 201 bp, Homo sapiens
cacacacacacacacacacatgccatgcaggcacacacacacagtttttcctttctctttctctcactttcacacacacacacacacacacacacacacatacactcttacatcttagtccaaagtaaaaatatcctgcttatcagatgctctgccttattttcaaggcttatgcttattttgagtgtagccatggtgaac

SEQ ID NO: 132212 - DNA, 201 bp, Homo sapiens
aggacactgaaaaatgtagatgaaaatctttgaaagaagtattttttatcttaaaagaaaaaagaaaatattatgaaacagaataaaatatctgtaggcattttttttttttttttgtgagatggagtcttgctcttgttgcccaggctggagtgcaatggcgcaatctcggctcaccgcaacctccacctgctggattca

SEQ ID NO: 132213 - DNA, 201 bp, Homo sapiens
ctttgtgaagcatactacaccttgattataagatgttgcagtgataacctagctggcttttatcagttattttgaattcccctatacaccaagacctgtgytagtttaatgaaatgacaagtttatagaaactgcattagttgcagtaaacatttcactttattacttgaggaaaaagcctgaaatacagaaactaatcaa

SEQ ID NO: 132214 - DNA, 201 bp, Homo sapiens
gaaatacagaaactaatcaaaatgtaaattacaggtagtaacaacaagtgtttaccatgtactaagggtgtgctgtatgttaggcctattgtacacacttyacatactttatttaatcccaagaaaagctacatgagataggtatgattttcttcattttatccctgaagaaactaaggtgtaaagaggttaactaacctg

SEQ ID NO: 132215 - DNA, 201 bp, Homo sapiens
tcaaatcacttttggctaattgtgtacttatggacatcagattgctcttgtattaaaatttattaggcagactttgagtgggaaaataaaaatcttgattyggtagatgctggagaacagtaaaaaatagaaaaatttgcaggttggtgagatttcccagattcagtgtgtggtgtatctctaaagttcaaaatccttcaa

SEQ ID NO: 132216 - DNA, 201 bp, Homo sapiens
aagaaaaaatataatattaaaacaatttaagaataattagctgggcatggtggtttgtgcctgtagtcccaattactcagaaagttcaattactcagtgakccgtgatcataccattgcattccagcctgggtgaacaaacaagaccctgttagagatgggggtctcacttagtcgcccaggctagtctcaaactcctggc

SEQ ID NO: 132217 - DNA, 201 bp, Homo sapiens
cctggcctgcattgctttaattcttttgaacataattattttagtccctttgctattgttccattatttccaattcttttttgttgcactcgatgactctccctcatcatgcctcctttggtggtttttaatttaggaatgtgaagtcatcttcatgagggctgccttttctatgggacttctatatgcttagcccctgta

SEQ ID NO: 132218 - DNA, 201 bp, Homo sapiens
gcattccagcctgggtgaacaaacaagaccctgttagagatgggggtctcacttagtcgcccaggctagtctcaaactcctggcctcaagcgatccaaccrcctcagcctcccaagtagctgggattacagatgccaactcccatgcctggccatttgtatattttaaccattctaattgtcatgtagtggtatgtcattg

SEQ ID NO: 132219 - DNA, 201 bp, Homo sapiens
tggtcaagtctttatatcttttttctttgtaatttataatatttaaatttgtttgctatccagagataagatattcatgtaaatattcttatggtctgtgrtgcaggttttttcaggcagtttatatgctttcaggtgtcttctttggaccacgtgatgtatttgtattacgtatttgtattatgtatttaatacagagag

SEQ ID NO: 132220 - DNA, 201 bp, Homo sapiens
ggcctgcattgctttaattcttttgaacataattattttagtccctttgctattgttccattatttccaattcttttttgttgcactcgatgactctccctcatcatgcctcctttggtggtttttaatttaggaatgtgaagtcatcttcatgagggctgccttttctatgggacttctatatgcttagcccctgtacaa

SEQ ID NO: 132221 - DNA, 201 bp, Homo sapiens
agaccctgttagagatgggggtctcacttagtcgcccaggctagtctcaaactcctggcctcaagcgatccaaccacctcagcctcccaagtagctgggaytacagatgccaactcccatgcctggccatttgtatattttaaccattctaattgtcatgtagtggtatgtcattgaggtttccattatggtttcaaaccc

SEQ ID NO: 132222 - DNA, 201 bp, Homo sapiens
tttgaagtgttaagaatgaaaataatttatggtctttaagaatgaatatgccaatatttcatattctgtattggcagtacagtaaaaattaattattttcrctataagtattatataaataataaagatatttaggagggagtatatatgctaataggaaataaatgttttgcctcccaggagatcatcttagctggtaca

SEQ ID NO: 132223 - DNA, 201 bp, Homo sapiens
ggaccatcaagaccataaagaccgtctatatatttgttttaaattcttaaaattttgcctttcatatacaagttcttaaatcatctggaattgattttttwtatagtaggaggtagggaatacatttttcctccctatagacagccaattgtcccagcaccatttagaattgtctatttttttcttccattgatttgtacg

SEQ ID NO: 132224 - DNA, 201 bp, Homo sapiens
tctctttcatctagaccaggacatctcttcaatcacttgggagcattcaaccttctgttttggtcctcaggtggggcactttcttggcctgtcaggaccaytggggattcccctttctttgttttgacataggctattgtattttttgttgttgttacagtttatcttagtgtatatgtttatctacgcttatcaaggctg

SEQ ID NO: 132225 - DNA, 201 bp, Homo sapiens
ttgccagcagcaccctttctgaatacctgaccatcagaattgagagctgtaatacaatggctgttattttaaactgttaagttttgggatagtttgttatrcagtgatagataattagaactggtagctagagcttctggcttcttgagtttgagctgaaaatagcaatcagtgtatcctaaatacctcaaaacaactgta

SEQ ID NO: 132226 - DNA, 201 bp, Homo sapiens
agcacagttaatacccctattctggacttgtctccatttattctctgcttgcttctgtttgtttatctccatgactttcaaataccttgtgctgtacttcrgctattgatacctgcctcctgtctggctttgtttcctgttcatctctggtcaaagtgtgctctccccattccaggagaatccttctgttatcttggagct

SEQ ID NO: 132227 - DNA, 201 bp, Homo sapiens
tggcacaatctcggctcactgcaagctctgcttcctgggttcacgccattctcctgcctcagcctcctgagtagctgggactataggcacccgccaccacrcctggctaattttttgtatttttagtagagatggggtttcaccgtggtctcgatctgacctcatgatccgcccacctcggcctcccaaagtgctgggatt

SEQ ID NO: 132228 - DNA, 201 bp, Homo sapiens
gggttcgctcccttcccagatctatgcacaggagtgtcaggggacctaacaagtatatttgctgtggaggaaacttccccactgagccatcagcagtccgygtcctgaaacctcagcctctattacaatattagatctgtcttgggtctaatagggagagaaaagagagggccaaaggtccccacctgtgcatcttctttc

SEQ ID NO: 132229 - DNA, 201 bp, Homo sapiens
agttacttaaatctctcagcgcctcagtttcctcacttgtaaaatggagataatagtagtacttcctggagttattagaggaatttaatgagttaccataygtaaaagcacttagaagagtgtaagccctcaaaagagttagtagaagtactagtagtatttgaaagttactagttatatgggaatggaagggacagaaat

SEQ ID NO: 132230 - DNA, 201 bp, Homo sapiens
aataaaaaagattggattaactctacatgcagacagaaaattcccacagtgaaggtcattaatcagagtttgtagaaaaacagctgctcctgccattccaytggagaaagcacaaaacaacataattgcttcataactgtactctggggaagactgaccttggttctaagagttgcttgtgtggcctggttctgtgtgtgg

SEQ ID NO: 132231 - DNA, 201 bp, Homo sapiens
gttttatctagactatgtactattttaaaaattaaactagcttttataattctaaaagttacaacttgcactggtaaaacttcaacctctacacaaaatgygtaaaatgatcactaaatgtctaccctctccgtatgcacttacctgatgcctgttccactcctaggggtaacatcttgttaacaatgtctttcctccttc

SEQ ID NO: 132232 - DNA, 201 bp, Homo sapiens
ggaatatggaaatataactttgccaaaacagttaaaacccagtgtaatttttacttgataaaaaactataccgttataccatgtgctaccatttgaaacaytcaggtactgactgttgagtgggtggatatgaataatagggattgagatgtggggaattatgagtagtagtggcaagagcagaacttcaaagctagaatg

SEQ ID NO: 132233 - DNA, 201 bp, Homo sapiens
ggacactgaaaaatgtagatgaaaatctttgaaagaagtattttttatcttaaaagaaaaaagaaaatattatgaaacagaataaaatatctgtaggcattttttttttttttttgtgagatggagtcttgctcttgttgcccaggctggagtgcaatggcgcaatctcggctcaccgcaacctccacctgctggattcaa

SEQ ID NO: 132234 - DNA, 201 bp, Homo sapiens
gacactgaaaaatgtagatgaaaatctttgaaagaagtattttttatcttaaaagaaaaaagaaaatattatgaaacagaataaaatatctgtaggcattttttttttttttttgtgagatggagtcttgctcttgttgcccaggctggagtgcaatggcgcaatctcggctcaccgcaacctccacctgctggattcaag

SEQ ID NO: 132235 - DNA, 201 bp, Homo sapiens
tatctttgagtcatcttgggggttggctgatttaagctgggctaggctaggtggctggggtagctctgctctatatgcctctcatcttcctcctgggaccagtaggttgccctggacatgtgtaagaagaaaattggaaatatgcaaggtctcttaaggcctaggcttggaactggcacactaatttctgcctcatcctgt

SEQ ID NO: 132236 - DNA, 201 bp, Homo sapiens
tgacttcctcctttcctaattgaatgccctttatttccttctcctgcctgattgccccggccagaacttccaacactatgttgaataggagtggtgagagrgggcatccctgtcttgtgcctgttttcaaagggaatgcttccagtttttctccattcagtatgatattggctgtgggtttgtcatagatagctcttatta

SEQ ID NO: 132237 - DNA, 201 bp, Homo sapiens
gaatgccctttatttccttctcctgcctgattgccccggccagaacttccaacactatgttgaataggagtggtgagagagggcatccctgtcttgtgccwgttttcaaagggaatgcttccagtttttctccattcagtatgatattggctgtgggtttgtcatagatagctcttattattttgagatatgtcccatcaa

SEQ ID NO: 132238 - DNA, 201 bp, Homo sapiens
tacatgagagcagagccatctaagaacctccagattaatctgttcaccagctcagtacctctggtgacttcatttggtgccacatggagtagagacattgycagcagcaccctttctgaatacctgaccatcagaattgagagctgtaatacaatggctgttattttaaactgttaagttttgggatagtttgttatacag

SEQ ID NO: 132239 - DNA, 201 bp, Homo sapiens
atttacccagtagtcattcaggagcaggttgttcagtttccacgtagttgagcagatttgagtgagtttcttaatcctgagttctagtttgattgcactgkggtctgagagacagtttgttataatttctgttcttttacatttgctgaggagtgctttacttccaactatgtggtcgattttggaataggtgtggtgtgg

SEQ ID NO: 132240 - DNA, 201 bp, Homo sapiens
ttacattcaaagttaatattgttatgtgtgaatttgatcctgtcattatgatgttagctggctattttgctcgttagttgatgcagtttcttcctagcctygggggcctttacaatttggcatgtttttgcagtggctggtaccggttgttcctttccatgtttagtgcttccttcaggagctcttttagggcaggcctga

SEQ ID NO: 132241 - DNA, 201 bp, Homo sapiens
agcttagtttggctggatatgaaattctgggttgaaaattcttttcttgaagaatgttaaatattggcccctactctcttctggcttgtggggtttctgcygagagatcagctgtttgtctgatgggcttccctttgtgggtaacccgacctttctctctggctgcccttaacattgtttccttcatttcaactttggtga

SEQ ID NO: 132242 - DNA, 201 bp, Homo sapiens
tctcgaggagtatctttgtggcgttctctgtatttcctgaatctgaatgttggcctgccttgctagattggggaagttctcctggataatatcctgcagartattttccaacttggttccattctccccgtcactttcaggtgcactgatcagacgcagatttggtcttttcacatagtcccatatttcttggaggctttg

SEQ ID NO: 132243 - DNA, 201 bp, Homo sapiens
tcccagctactccggaggctgaggcaggagaatcgcttgaacccgagtggcaggggttgaggtgagcccagcctgggtgataagagcgaaactccatctcaaaaaaaaaaaaaattgcttaatttctgttttcatgcctgtgggtatttgccctgcaacactgcagcagttttcaaaaccaaagtttctgaactccttgag

SEQ ID NO: 132244 - DNA, 201 bp, Homo sapiens
caagataacaaatgaattcttaacagaggcctgtttaggattaaacaagttttattggaggtctgaagaaactccccagacctccacaaacaagtttattggggggtctgaagaaactccccaaacctccatgatttagcaggagacaagataagggtaatcacccagcacctggacccattaggattaagtaaatttacg

SEQ ID NO: 132245 - DNA, 201 bp, Homo sapiens
ttcttcagctttactgctctgcagtgtccaagtatggattgtttttattatatctacagtatttagtgtgctacttcaataatgtctttcttcagttctgsaaaattctcagccttatatcttcaaatattgcctctaacccattctattttctttttctggaactcctattaagagaggctgatcctaaacccctcttat

SEQ ID NO: 132246 - DNA, 201 bp, Homo sapiens
ccttatatcttcaaatattgcctctaacccattctattttctttttctggaactcctattaagagaggctgatcctaaacccctcttataattttcatatsattatctttctggctttattatgtgaaatggccgatcttccagtttaccaatttcttctccatctatttctattctacagtttaaatttacctgagttta

SEQ ID NO: 132247 - DNA, 201 bp, Homo sapiens
aaagtaataactgattttttaaagaagatcgttttctaagatttctaaaattgtcaaaaaccattttaagttactgcaggtgcatttattctatgagttgygttataaatcaaaagatttcctattaacctattttaggaatagacttgtaattctcaaacttgagtaatgtaatgtaaaaaagcccttaaaaggaagaaa

SEQ ID NO: 132248 - DNA, 201 bp, Homo sapiens
ccaccctgggccagtgcttctcaatctgggcacacaagaaacaactggtgtatcttcttgaagcaagagttctccttgaagatttacttgaagagaaagtkgaagcaggacactgaaaaatgtagatgaaaatctttgaaagaagtattttttatcttaaaagaaaaaagaaaatattatgaaacagaataaaatatctgt

SEQ ID NO: 132249 - DNA, 201 bp, Homo sapiens
agagccttatatacataaatcagaatgctaatttattaacctgtaataggatatatagcaagcatgataaccagatttaaacttgtcacaaaacaccttcyctttcttacaaatagcagactcctccttcttgccctctccctgttcttcttccctgaatgttttctttttgttgtgcacatacagttaggacaccaaatt

SEQ ID NO: 132250 - DNA, 201 bp, Homo sapiens
tgccactgcttccatacctagtgtggataggaccttttttcttcttttattatccttcctacctgttgaaagactgttgtcagtcagagctgaaacccagrttggccctgagctcaaatcatagtcaagtatggtagtcttaagaatgggagagtcagctgggtgtggtgggttatgcctgttatcccaggactttgggag

SEQ ID NO: 132251 - DNA, 201 bp, Homo sapiens
attaacctgtaataggatatatagcaagcatgataaccagatttaaacttgtcacaaaacaccttccctttcttacaaatagcagactcctccttcttgcyctctccctgttcttcttccctgaatgttttctttttgttgtgcacatacagttaggacaccaaattgtaagtcagaaagttgttgggtgagcacacagtt

SEQ ID NO: 132252 - DNA, 201 bp, Homo sapiens
actgtaggcatttttaaggcacaactttaatggaattttgaactggtggtaaactactcatggtaacctgtggttgaaaccataggctttggggcaagacygaaacctagctcctcccttttctaactgtaccctggggcaagttgcttagcctttttgtgtctccatttctcatttgtaaaatgggaataatatcatctg

SEQ ID NO: 132253 - DNA, 201 bp, Homo sapiens
aacagtccccggccgggtgcagtggctcacacctgtaatcccagcactttgggaggccgaggcaggcggatcaagaagtacctttatttctttattaaagyatcttgattcaaaaggtttccctcttaccaaaaagggatagggaaagttgccagttaaattttccatcctaatagtaatgttgctgtgagagaaggagat

SEQ ID NO: 132254 - DNA, 201 bp, Homo sapiens
caaagtattggaattacacatgtaagccgccatctctggccctctgttaacaatttcttatttattcttccagaattttagtgtgtacgaataaatagatrtatgattttctgccaaatgctacatacatctatatgtgataagtaattctcaatttgaaggatagactaaatttctttcaaacacagacttagctcttta

SEQ ID NO: 132255 - DNA, 201 bp, Homo sapiens
gtctccatttctcatttgtaaaatgggaataatatcatctgcctcatagagttatcatgagaattaagtgaccagtatatgttaaatgttggaacagtggrtcgttcatagtgaattctccctaatgttagctattttcattttcatttatatttctagatatcccaagggttattattttgtcctcctcttttgttaagt

SEQ ID NO: 132256 - DNA, 201 bp, Homo sapiens
atttgaaggatagactaaatttctttcaaacacagacttagctctttagatgaaaagtcattaggcaggaatggaggtaagggctggtctaaggtctcttkggtgtctggattcactgaatttcaatgatgatacagtaaaaaaaattgtaaaagagcaaaaacaattaaaaatagatgtgtagttatatttttcttctta

SEQ ID NO: 132257 - DNA, 201 bp, Homo sapiens
tgggttgcaattaaattagtcccatttttttctgtgtcaatcttgcttcccctattcccttaaaatggctgtttccaagagcattcctcaataattactcyatgaaatctaaccttcaacatgagagggactccaaagccaatggtgaagggcaaagatatagtataggaaagaatcaaaaccaataacgcaatctaccac

SEQ ID NO: 132258 - DNA, 201 bp, Homo sapiens
atttcttcctcagttctacaacatatatctaagagcaaaaaccatccttcccaacacccggattaaaataacctctaagtctggatgaaaagaatggaggratgggaataggatagaagggatgaggggggaatggcatttttgtgacttttataaccatagtcacaaccattttgtgacatttataaccatatcaatgtt

SEQ ID NO: 132259 - DNA, 201 bp, Homo sapiens
gagattatcaagagcaggaagctgctaccactgcctaaagcttaagggacaaaaggagccaggccaccagggagaagttggaaccacagaagctcttggascaagagctgggtccatagaagagatggccgctgccagagacaatacttgaagctgagagaagtggggaaaaatacccagcttctccctttctgctctctc

SEQ ID NO: 132260 - DNA, 201 bp, Homo sapiens
cctgagtgccaaatcttaactaccaattgcctgatgcttatctccacatgaacagctacacaggcaccttaactcatttacaaaattgaatgtgtcatctycttcctacaaatcttccatttcttcctcagttctacaacatatatctaagagcaaaaaccatccttcccaacacccggattaaaataacctctaagtctg

SEQ ID NO: 132261 - DNA, 201 bp, Homo sapiens
actttgcagatgtggttaagaattgtgagatggggagattgtgctggattatccaagtgggcccagtgcaagcataaggagtctttataagagggaagcargagggtcagagccaaaaaagtagatgtgacacagaagcagaggtcagaaagaggggtggagaagagagagagatttgaagatgttgtgctgctggctttc

SEQ ID NO: 132262 - DNA, 201 bp, Homo sapiens
atatgttacttctagaatcagaagaagaaacctctttgttttaaaaaacttcacccaaaaagtcatccattcaagagttgtttttctccaccccagctgaygtgacaaaatgctgccaacaattttgatgccaataatgacttctacatattaaatacttctacatactgacaaaaaattatctcttaacagcatgaattg

SEQ ID NO: 132263 - DNA, 201 bp, Homo sapiens
agcagcggtggctgcagaacagcggatattggtgaaccacaaatgctgctgcctgatcattcctttggaaattttgtctccgaggagtacccggccgtgtraggtgtcagtccgcccctactggggggtgcctcccagttaggctactcaggggtcagggacccacttgaggaggcagtctgcccgttctcagatctccag

SEQ ID NO: 132264 - DNA, 201 bp, Homo sapiens
agtacccggccgtgtaaggtgtcagtccgcccctactggggggtgcctcccagttaggctactcaggggtcagggacccacttgaggaggcagtctgcccrttctcagatctccagctgcatgctgggagaaccactactctcttcaaagctgtcagacagggacatttatgtctgcagaggttactgctgtctttttgtt

SEQ ID NO: 132265 - DNA, 201 bp, Homo sapiens
aggggtcagggacccacttgaggaggcagtctgcccgttctcagatctccagctgcatgctgggagaaccactactctcttcaaagctgtcagacagggayatttatgtctgcagaggttactgctgtctttttgtttgtctgtgccctgcccccagaggtggagcctacagaggcaggcaggcctccttgagctgtggtg

SEQ ID NO: 132266 - DNA, 201 bp, Homo sapiens
ggaagctgaggcatgagaatcacttgaacccaggaggcagaggttgcagtgagccaagatcgtgccattgcactccagcctgggcaacagagtgagactctgtttcaaaaaaacaaacaaataaaagtagattatgttattactggacagttactactgaatgaatccaaatatttgctttcttcagccttacacttggac

SEQ ID NO: 132267 - DNA, 201 bp, Homo sapiens
tacttttttgttcttacctatattgtttttattcatggagtctcatttcctggtgtgctttgttactgttgtatgctggagattgtgtttcgaaagttatktgtggactatattgaagcttaggaggattatatctttctggaagggttttcatttgttttttttttttcattggcctggggtcattgctggtccaggcta

SEQ ID NO: 132268 - DNA, 201 bp, Homo sapiens
gaagctgaggcatgagaatcacttgaacccaggaggcagaggttgcagtgagccaagatcgtgccattgcactccagcctgggcaacagagtgagactctgtttcaaaaaaacaaacaaataaaagtagattatgttattactggacagttactactgaatgaatccaaatatttgctttcttcagccttacacttggact

SEQ ID NO: 132269 - DNA, 201 bp, Homo sapiens
tgccactgtactccagcctgggcaacagagtgagactgtctcaaataaaataaaataaaccaaaaacaaaagttaaaaattataaaacaataccatttacatatatatatatatacatgcatacatatgtatgtatgtaaatacatatataatagtaaaaaagaaaaggtagtggttacttttagtaagggaaaagcatgg

SEQ ID NO: 132270 - DNA, 201 bp, Homo sapiens
gccactgtactccagcctgggcaacagagtgagactgtctcaaataaaataaaataaaccaaaaacaaaagttaaaaattataaaacaataccatttacatatatatatatatacatgcatacatatgtatgtatgtaaatacatatataatagtaaaaaagaaaaggtagtggttacttttagtaagggaaaagcatggg

SEQ ID NO: 132271 - DNA, 201 bp, Homo sapiens
ttgtttgccatgctaagaaatctggacaccctcaacagtccttagggatactgagggagcctgaggaaggcagtgagcactttcaaatagtttttgttttygtttttattttttctcctgtaaaattaaaaaattctcattgaagaaaatttggaggtgacagaaaggcataaagagaaaatatgtcacctttaatttctc

SEQ ID NO: 132272 - DNA, 201 bp, Homo sapiens
acctccacatttctgtcatgtaccagcattctctcaggcataactatctgggagtctttttttctagtactctcactcttctcatcattaattgttttgctttttttaaaaaaattaccccttattggcacagctattactctagtcctcctcagttttgattcttatttcatagcctcaacacattttcctcaaatacag

SEQ ID NO: 132273 - DNA, 201 bp, Homo sapiens
agtataaaaaccctagaagaaaacctaggcaataccattcaggacataggcatgggtaaagacttcatgactaaaacacccaaagcaatggcaacaaaagycgaaattgaaaaatgggatctaaataaactaataagcttctgctcagcaaaagaaactatcatcagagtgaacaggcaacctacagaatgggagaaaagt

SEQ ID NO: 132274 - DNA, 201 bp, Homo sapiens
tgagagtattactttaggggtattatgtcaggtattaagtcaaggacactttttaaaccgtatttaggattgtgtctctggcccatccacaccatatataytttgggtggccacagcttctcaaaaacttcattttcctacctttttcttttcctgctttgctcagtgacaagtcagcttgcccttcgttcttctgtggtt

SEQ ID NO: 132275 - DNA, 201 bp, Homo sapiens
gtggtctgtcttccgtggctccaggtctcaccagctctcaccaggtctctctctaggagtggtttccttctattgctggtctctgggtgtctcaacatccyttgctaattcccttaattctgcccacagctatgtcagcagtatctttgttaaagtcccttcatttgaacaatttggcttgagttctgttttctgccagaa

SEQ ID NO: 132276 - DNA, 201 bp, Homo sapiens
aagtcaaggacactttttaaaccgtatttaggattgtgtctctggcccatccacaccatatatactttgggtggccacagcttctcaaaaacttcattttyctacctttttcttttcctgctttgctcagtgacaagtcagcttgcccttcgttcttctgtggttaggagagagatggtgggtcaattctagttcactctt

SEQ ID NO: 132277 - DNA, 201 bp, Homo sapiens
tcttttacattttcagcatcctaatgatgtccttagtgatagttgctatggaagtattttagtgttttctgcagtgttgggtggtgcagtacctgaagccytctttagtgtgtatttataatgacaccaagccatgaatttcattttagtggtagctttcttgcttaataactggttgtcgtcgggggagtggtctgcatt

SEQ ID NO: 132278 - DNA, 201 bp, Homo sapiens
ggtttcaccatcttggccaagatggttccaatctcttgaccttgtgatctgcccactggcagatcttgtttgtccccatttattggctgggattaaaggcrtcaaaaacttttaagaatgtatagtttggagactgagactcagtaatgggtggaggagagaaaactgggatatctagagaattggattgtgatgtcttcc

SEQ ID NO: 132279 - DNA, 201 bp, Homo sapiens
tccccatttattggctgggattaaaggcgtcaaaaacttttaagaatgtatagtttggagactgagactcagtaatgggtggaggagagaaaactgggatwtctagagaattggattgtgatgtcttccgtaaaatagtaatagtagtacatgttctacctacttgataggattgttatgagggtcatgtgattaatgtat

SEQ ID NO: 132280 - DNA, 201 bp, Homo sapiens
aaactggatggagaacgagtttgatgagttgacagaagtaggcttcagaaggtcggtaataacaaacttctctgagctaaaggagcatgttctaacccatytcaaggaagctaaaaacctcgaaaaaaggttagatgagtggctaactagaataaacagtttagagaaggccttaaatgacttgatggagctgaaaaccac

SEQ ID NO: 132281 - DNA, 201 bp, Homo sapiens
ctgcaattaaacagaatttttttataaagaattctgtgcctgacaactctagacatatttattatgcagcttctcttaaaggattttcaatttgctcattyggagcaaattttgtgtgttaaatgcagttggttcctagacactgactcattttccaaatctgagtacactttttcctcaattgactttcccctgccagta

SEQ ID NO: 132282 - DNA, 201 bp, Homo sapiens
cctcttctcctccaaaggatcacagctcctcgccagcaagggaacaaaactggatggagaacgagtttgatgagttgacagaagtaggcttcagaaggtcrgtaataacaaacttctctgagctaaaggagcatgttctaacccatctcaaggaagctaaaaacctcgaaaaaaggttagatgagtggctaactagaataa

SEQ ID NO: 132283 - DNA, 201 bp, Homo sapiens
gctggagtacagtggcatgatctcagcccactgcaacttctgcctcctgagttcaagcgattctcctgcctccacattctgagtagctgggactacaggcrtgcaccaccatacccggctaatttttgtatttttagtagagatggggtttcaccatgttggccagactggtctcgaactcctgacctcaggtgatcagcc

SEQ ID NO: 132284 - DNA, 201 bp, Homo sapiens
tgcaattaaacagaatttttttataaagaattctgtgcctgacaactctagacatatttattatgcagcttctcttaaaggattttcaatttgctcattcrgagcaaattttgtgtgttaaatgcagttggttcctagacactgactcattttccaaatctgagtacactttttcctcaattgactttcccctgccagtat

SEQ ID NO: 132285 - DNA, 201 bp, Homo sapiens
cacacctcttctcctccaaaggatcacagctcctcgccagcaagggaacaaaactggatggagaacgagtttgatgagttgacagaagtaggcttcagaargtcggtaataacaaacttctctgagctaaaggagcatgttctaacccatctcaaggaagctaaaaacctcgaaaaaaggttagatgagtggctaactaga

SEQ ID NO: 132286 - DNA, 201 bp, Homo sapiens
ctggagtacagtggcatgatctcagcccactgcaacttctgcctcctgagttcaagcgattctcctgcctccacattctgagtagctgggactacaggcgygcaccaccatacccggctaatttttgtatttttagtagagatggggtttcaccatgttggccagactggtctcgaactcctgacctcaggtgatcagcct

SEQ ID NO: 132287 - DNA, 201 bp, Homo sapiens
tctgtatttagatttttggtgcaaatatcatctctgtctctaggaaacaaacccagacggcctacagagtcaagaatgaagaattcattttactgaaatgytaatgtcaactctaaaaatatcagagttttcaattttacctaatcaaataatcagctcgacaatttttttgcaaccacagttgcttatagggctgaccaa

SEQ ID NO: 132288 - DNA, 201 bp, Homo sapiens
ccaaaaccccatctgtaggttaccaacgtcaaagaccaaaggtagataaaacaacaaagatggggagaaaccagagcagaaaagctgaaaattccaaaaamcagcacacctcttctcctccaaaggatcacagctcctcgccagcaagggaacaaaactggatggagaacgagtttgatgagttgacagaagtaggcttca

SEQ ID NO: 132289 - DNA, 201 bp, Homo sapiens
tttggtgcaaatatcatctctgtctctaggaaacaaacccagacggcctacagagtcaagaatgaagaattcattttactgaaatgttaatgtcaactctraaaatatcagagttttcaattttacctaatcaaataatcagctcgacaatttttttgcaaccacagttgcttatagggctgaccaaagtgacgatttgtt

SEQ ID NO: 132290 - DNA, 201 bp, Homo sapiens
tatcctggcttaaacagaaccacagaagtttgtttcatgaagataaaaagaacatagagcaaacttttttctgtgggaaagaagaacatgaaagagagagrgttgagtctctacttgggagaatatttcatctagcagagattgtaaagtctgtgggtaaaatttattgtacttaaatgtttgcatgtcagataagacaaa

SEQ ID NO: 132291 - DNA, 201 bp, Homo sapiens
gaaaatgctgttttctttcctggcatttttttctcctctccttctagttttaccacttcttttatattttgtaagaatttgtttaggccatgtgtagtgaygcatgcctataatttcagcactttgggaggcaaagggggatggatcacttgagttcaggaattggagaccagcctgggcaacatggcgagaccccaaatc

SEQ ID NO: 132292 - DNA, 201 bp, Homo sapiens
gtctcagctactcaggaggctgagactggaggatcacttgagcctaggagtttgagattacagtgagctatgatcacatcactgcactccagcctggatgrcagagtgagaccctgttttaaaaaacaaaaaataaaaaaagcagattctcctcttcatgataggaagttgatagatgtgtaaaactgaaaactttttcag

SEQ ID NO: 132293 - DNA, 201 bp, Homo sapiens
tggaggatcacttgagcctaggagtttgagattacagtgagctatgatcacatcactgcactccagcctggatggcagagtgagaccctgttttaaaaaayaaaaaataaaaaaagcagattctcctcttcatgataggaagttgatagatgtgtaaaactgaaaactttttcaggaaactgctgaaggaatggcaagcag

SEQ ID NO: 132294 - DNA, 201 bp, Homo sapiens
actttgaacttctggcctccagaaccataagaaaataaatttctgtggtttaaactacctagtctgtggtattttgttatggcagtcctactaaacgaatrtacttcctttacctgaattataagctgactttcccaatacacctccacatttctgtcatgtaccagcattctctcaggcataactatctgggagtctttt

SEQ ID NO: 132295 - DNA, 201 bp, Homo sapiens
tctttatgcaaagaggatattaggactcagacacacacagttggaagaccatgtgaagacacaagagagaagacagccatctgtaagctaacgagagaggstgcaaaagaaaccaaacctacaaacactttgactttgaacttctggcctccagaaccataagaaaataaatttctgtggtttaaactacctagtctgtgg

SEQ ID NO: 132296 - DNA, 201 bp, Homo sapiens
ctttaaaaaatagcagtattagcaaggatagaaatggctgtaaataccaaaagaaaccgaaaaaagtgttgaaagtctttggaaacaagaattggggggakggggaggagtatggaattactagattactgttttaatactaaactatgcagaactatgtattttttttttttttttttgagatggagtcttgctgagtgc

SEQ ID NO: 132297 - DNA, 201 bp, Homo sapiens
tagaggtgtcatggagtctcacagcttcagctaagatcttttagtacgtaaattctgttgggtatctccaactgcttcctaaatggttctacccagtaacytactttcattgctaattccaaaaagctaatactgaaacagtccctcccttagtctctccctgttatgagctgaattgtgtctccctgctccctccaccaa

SEQ ID NO: 132298 - DNA, 201 bp, Homo sapiens
ttaaattaggttatttttaagaacaataatttaatactaaaaaattatgttttgtggctaaaaaatggaaataaaataacttacaattgacttaaattgcrtcatgtttttccaaaccaatatgatggttaccaaatcagaaggaaaaacatgttaatcatagtgtaagcttttttcctaatatggtataaacaattttaa

SEQ ID NO: 132299 - DNA, 201 bp, Homo sapiens
acgaggaagcagtcacatattctgttctcagaaagatgtagaagtatcactggatctccctttctgcaatcaagcctgtgacgtctgagtttgggcttggraaacgaccaatcagagctcacctaccgcagccaatcagaaaccagccatattgaccgatcagaacttagctgcaccaaccaatcagaactaagcaagttt

SEQ ID NO: 132300 - DNA, 201 bp, Homo sapiens
tcatgactaaaacacccaaagcaatggcaacaaaagccgaaattgaaaaatgggatctaaataaactaataagcttctgctcagcaaaagaaactatcatyagagtgaacaggcaacctacagaatgggagaaaagttttgcaatctatgcatttgacaaagatctaatatccagagtctacaaggtacttaaacaaattt

SEQ ID NO: 132301 - DNA, 201 bp, Homo sapiens
gaatggtaatcgttaaaatgtctggaaacaacagatgctggtgaggatgtggagaaataggaatgcttttacggtgttggtaggagtgtaaattagttcarccattgtggaagacagtgtggcgattcctgaaggatctagaactagaaataccatttgacccagcaatcccattactgggtacatacccaaaggattgta

SEQ ID NO: 132302 - DNA, 201 bp, Homo sapiens
acagtgtggcgattcctgaaggatctagaactagaaataccatttgacccagcaatcccattactgggtacatacccaaaggattgtaaatcattctaccrtaaagacacatgcacacgtatgtttattgtagcactatttacaataagcaaagacttgtaaccaacccaaatgcccatcaatgacagagtggataaagaa

SEQ ID NO: 132303 - DNA, 201 bp, Homo sapiens
aaggttagatgagtggctaactagaataaacagtttagagaaggccttaaatgacttgatggagctgaaaaccacagcacgagaactttgtgacgcatgcrcaagcttcaatagctgatttgaccaagtggaagaaaggatatcagtgatcgaagatcaaattaatgaaataaagcaagaagagaagattagagaaaaaag

SEQ ID NO: 132304 - DNA, 201 bp, Homo sapiens
aggacaactacaaaccactgctcaatgaaataaaagaggacacaaacaaatggaagaacattccatgctcatggataggaagaatcaatatcatgaaaatrgccatactgcccaaggtaatttatagattcaatgccatccccatcaagctaccaatgactttcttcacagaattggaaaatattactttaaagttcattt

SEQ ID NO: 132305 - DNA, 201 bp, Homo sapiens
ttttacactgttggtgggagtgtaaattagttcaaccattgtggaagacagtgtggcaattcctcaaggatctagaactagaaatacgatttgacccagcsatcccattactgggtatatacccaaaggattataaatcattctaatataaagacacattcacatgtatatttattgtggcactattcacaatagcaaaga

SEQ ID NO: 132306 - DNA, 201 bp, Homo sapiens
ttttgatgccaataatgacttctacatattaaatacttctacatactgacaaaaaattatctcttaacagcatgaattgaattttataaaaaaaaaaattygattgggaatatctgctccagtacttagaggtttaactagtagcaaaccactggtttattttggagtgaatcaatctacattgattctatggaaagagtc

SEQ ID NO: 132307 - DNA, 201 bp, Homo sapiens
ttcactgatacaaacaattgaataaataataaataaataagtggtggaagaggggaacatgctctcttttttttaacagtagaattctaattcacaaatakagaagaagtgacggaaatagaaaaatatcgagtgcagtggctcacgcctgtaatcccagcactttgggaggttgaggcgggtggatcacttgaggtcagg

SEQ ID NO: 132308 - DNA, 201 bp, Homo sapiens
agaataaacaccctgggcttcagctctgagtgggcaaggatacttgctgttcattgctgtcctgtctcgtgtgcctgtatgagctcgtgtgtgtgtatgtkcgtgtgtgtgtgcacgcatgtgtacatgttgagggatctgaaaatcgggtagtggatgggctccagacccttgagtatggtttactgtgtgccttctagt

SEQ ID NO: 132309 - DNA, 201 bp, Homo sapiens
ctgcttttctttgctttctccatggcacttattcaggataggcacttcagaagacattcctatttactggctgggaggccaaaagctaagacagaactttcagtctcactcttaggggtcacaaaattattgctttccaatttaaactgtttcacttccaaatttgagcccccaaatatgaaatactgcctcacctgtgcc

SEQ ID NO: 132310 - DNA, 201 bp, Homo sapiens
gtgacgggttgataggtgcaggaaaacaccatggcacctgtatacctatgtaacaaagctgcatgttcagcacatgtatcccagaacttaaagtaaaatgaaaaaaaaaaaaagatattccaagattcttccaagatggctaaataggaacagatctggtctgcagctcccagcaagattgacacagaagacgggtgattt

SEQ ID NO: 132311 - DNA, 201 bp, Homo sapiens
gggaaacaaattatccctgaggctcagtcctagcccctctgtgtgttccttttcaacatccaatgtgacctcgtctttctctaagtactcttagcacttayctgtcctcttttggggccattttcatcctctgtcatttgcatagttgtgtctgtgtatatttcttattattttgtatatttcttgagaatatcttctccc

SEQ ID NO: 132312 - DNA, 201 bp, Homo sapiens
agtctgatccagcatttactgacattgcttaaagccagtactaaatgatttatgctcaattctaaagtcctgggttgaatcacttggtccttccagattgwccaaggaaaataccatgtgctggcaaaggtcaccgttaatgagggaaacaaattatccctgaggctcagtcctagcccctctgtgtgttccttttcaaca

SEQ ID NO: 132313 - DNA, 201 bp, Homo sapiens
tcttttatctattcatccattgatgagtactttggttgattccattccccggctattgtgaatagtgatgcaataaacataggagtgcagatatctcttcsatatattcatttcctttcttttgtatatatacccagcagtggaattgctggatcacgttctgttttcaggttttagttttttgaggaaactccatactgt

SEQ ID NO: 132314 - DNA, 201 bp, Homo sapiens
catttttaggtgtatatttcagtgttattaaatacatttatattcttttttccctttatctctctcttcccccatccctcctggcctctgctaaccacagyctactctctatcttgatgagatccacttttttagctcctgcatatgagtgagaacatgaaatatttgtcttttgtctttctgtgcttgtgttatttcact

SEQ ID NO: 132315 - DNA, 201 bp, Homo sapiens
gtctcgaactcctgacctcatgatctgcctgcctcggcctcccaaagtgctgggattacaggcgtgagccaccatacccagcatgtactatcttttttttwaaaaaaaattttcattgaggtaaaatatccatatataatttaccacctttaccatttttaggtgtatatttcagtgttattaaatacatttatattcttt

SEQ ID NO: 132316 - DNA, 201 bp, Homo sapiens
ccctttcaggctagccctccttcattgccataacatctaggggtgacattgactgagttgtatatgattattcatcatttctcgggcctagatagattgtratgagttttagggcttgtcaaatttcaaggctctgtttttataccacacataattttgggaatttgtaaagtgcttaataattatccatcaatgagtaag

SEQ ID NO: 132317 - DNA, 201 bp, Homo sapiens
ttttagtagaaacggggtttcaccatattggtcggctggtctcgaactcctgacctcatgatctgcctgcctcggcctcccaaagtgctgggattacaggmgtgagccaccatacccagcatgtactatctttttttttaaaaaaaattttcattgaggtaaaatatccatatataatttaccacctttaccatttttagg

SEQ ID NO: 132318 - DNA, 201 bp, Homo sapiens
aaattctcatttatagctgctgcagaagagatgcaaatgttctctatgtggttgctctgtgtgaggaggtgtttcatgggactatcaaaatcctatcttargttgtcattttggacactaaaaattttcaagtaataatttaaagaatcttgaggtttccttttgatatggcctagaaacctttggcaactaatttctgta

SEQ ID NO: 132319 - DNA, 201 bp, Homo sapiens
cacgcctggctaatctttgtagttttagtagaaacggggtttcaccatattggtcggctggtctcgaactcctgacctcatgatctgcctgcctcggcctyccaaagtgctgggattacaggcgtgagccaccatacccagcatgtactatctttttttttaaaaaaaattttcattgaggtaaaatatccatatataatt

SEQ ID NO: 132320 - DNA, 201 bp, Homo sapiens
taatgtattacttcaaaataacagaatttattgaacaacacacaagtcaatttgcttattagcacattgttctctgcagaactgctggcgacctcattgcyctactttggaaaccacgttaatatactggggaaacagatttagttagctttgaaccatgatcacaggacaattatgaaaacatgcaaatttgaaaggcta

SEQ ID NO: 132321 - DNA, 201 bp, Homo sapiens
atctggacaccctcaacagtccttagggatactgagggagcctgaggaaggcagtgagcactttcaaatagtttttgttttcgtttttattttttctcctrtaaaattaaaaaattctcattgaagaaaatttggaggtgacagaaaggcataaagagaaaatatgtcacctttaatttctccacacagaaataaccactg

SEQ ID NO: 132322 - DNA, 201 bp, Homo sapiens
atgtattacttcaaaataacagaatttattgaacaacacacaagtcaatttgcttattagcacattgttctctgcagaactgctggcgacctcattgcccyactttggaaaccacgttaatatactggggaaacagatttagttagctttgaaccatgatcacaggacaattatgaaaacatgcaaatttgaaaggctaga

SEQ ID NO: 132323 - DNA, 201 bp, Homo sapiens
atatgggtgtagcagtccatttggacagtggcaagaaagtggatgttgtgatgtcgacaagatttggatttggaccgtgcctgttccagttttagtactgraagtcccacatccttagaaacctctcattcctggacaaactgggatggttggtcaccataatgaggtgccagaaggatatgatgaacttgaggcattgaa

SEQ ID NO: 132324 - DNA, 201 bp, Homo sapiens
acacccatggcattactacaccctgcctgaactagttcttggccttcctgctgttgggaggaccagtatctaaatgtgtatcttcctgtgttagtgcaagttccactgtggcttagattgttcatctggtggtttggagcacacatcctgagagatgaacgaatggaacaattgttagtttattgacctagtcctgtgtgc

SEQ ID NO: 132325 - DNA, 201 bp, Homo sapiens
acagacaagtgggtgagacagattaatgtgtgataaatgcaaaaagcagccaaagtatggtactatggtagcatggggtagagaggaggcagggaagtccwgttgagtgaggctgtggctgagtcctaagggatagtccttaacaaggggaagatttgggggaggaatttccagactgaagacaccctataccatgaagta

SEQ ID NO: 132326 - DNA, 201 bp, Homo sapiens
aaaattaaaaactttttgagcactgatatgacatccaaaggaaatgctcactgcagcatgtcaaattttgggtttttagatttgtgattctcaactgatayaacgcaaatattccaaaatctgaaaaaaatcataaatctgaaacacttcttgtcccaagcatttcaaatgaaggatactcaacctgtagttgtttttatt

SEQ ID NO: 132327 - DNA, 201 bp, Homo sapiens
gaaattcgtgaacttgtaaaggcaggaaagagaacatctagttagaatgatcataaaaaaacttcaaggctattatggcagatacaaatatgaataagacmctactagacttttttaagcccttaagtataggaatggcataatttatattcatttcactgatagcaccaagcgcttttcaaaagagaattaatgaattat

SEQ ID NO: 132328 - DNA, 201 bp, Homo sapiens
ccactgtgcccggccttgctcttgccttcttaattgcaactctgtactgacatgcatgttaataaattggccaaactggcattctcactgcagctctgttsttttccaatccttgaacctctcattatggatgcctcatctcatcctgttgccttttccactgtgggttgtattgatcagaaagcagatctgtttatggaa

SEQ ID NO: 132329 - DNA, 201 bp, Homo sapiens
gtataggaaagaatcaaaaccaataacgcaatctaccacatctttgcatttaagaagtagattaaactgcatcccaggtccaaaaacaaaagcatatagtrgagcagacagaatctctgtctgacatgtcttaatgtatatctaaaccattgatattggaccttgaaatatatttgacttggaaaaggcatgtggtcctga

SEQ ID NO: 132330 - DNA, 201 bp, Homo sapiens
ggagagtgttcaactaaaattaactctgtaggcagcattcccagttgtttgagtttcaggatcccctcctcaatttcctaagaaaaacaacatgcaagttaaaaaaaaaaataaacagtagttaggggcaaagaaaccggtgtaattagggctaaagtgatctgtggtatctctaaatggtagctccatttagagaatgat

SEQ ID NO: 132331 - DNA, 201 bp, Homo sapiens
tgactttcccctgccagtatgtcatccaactattctttaatgtactgtcaaaatatggtcacctcatcattaacaggaaatgggcttcttgcccagtcttwtgaaagtagaataaaatcagacagtttgatttttaaactataagaaaaggagaatgaaaaaacagcaaaacttaactaatttccaagctcagggctattt

SEQ ID NO: 132332 - DNA, 201 bp, Homo sapiens
gagtgggtcagaggatgctgacgactgtgaaactagtgttgactggatcatccatatgggtgtagcagtccatttggacagtggcaagaaagtggatgttrtgatgtcgacaagatttggatttggaccgtgcctgttccagttttagtactggaagtcccacatccttagaaacctctcattcctggacaaactgggatg

SEQ ID NO: 132333 - DNA, 201 bp, Homo sapiens
agtggagggtgagtgggtcagaggatgctgacgactgtgaaactagtgttgactggatcatccatatgggtgtagcagtccatttggacagtggcaagaargtggatgttgtgatgtcgacaagatttggatttggaccgtgcctgttccagttttagtactggaagtcccacatccttagaaacctctcattcctggaca

SEQ ID NO: 132334 - DNA, 201 bp, Homo sapiens
aaaatgtctatgcataaaaggtgaaaaaaaatgctatctcagagccaaggttaacattcttggtagaaaaatagattacaatcaatattttttaattgagytttaaaaagaattctgatgcactaggttctgaggcattacaaggatatatatgtatatatatatggcaatttccccccacatttacttatttatttttaa

SEQ ID NO: 132335 - DNA, 201 bp, Homo sapiens
gttaatattgttttcttactgagaatgtgaacttttggatgtgattatcagctaatccagttggaattcaatcttggcattataacaggatcatatttacaacctacttcagtttccaaaaatcagccaactgagagaaaatattgtgatcaggaatttcaatgggaaagccaaaatctagagtgaaaacacatcttctgt

SEQ ID NO: 132336 - DNA, 201 bp, Homo sapiens
ttactgtaattgtagtagttcattcatttttcacttaaaaaattccattgtatgaatacaccagaatttatttatctatttctttttctttttttctctctttttttttttgagacaaggtcttgctgtgtctcccagcaggagtgcagtggcaggatcatggctcatggcagcctcccagcctcaggtgatcctcccacc

SEQ ID NO: 132337 - DNA, 201 bp, Homo sapiens
acacggtaacaatctgatctctctttcttttccccgcatttctcccttttcttttcgacaaaaccaccatcgtcatcatggcccgttctggatgattgctrtctctttggagctgttgggtacacttcccagatggggcggccgggcagaggcgttcctcacatcccagacggggtggcggccgggcagaggcgctcctca

SEQ ID NO: 132338 - DNA, 201 bp, Homo sapiens
aaagaattataaagattttttaaaaatttaagttaaaatagcttcttaaattattatatcaaattaatagagaagtattatttctttaatttgtttaactrcccttgtgctcatctggagaaactgtcaggaaagatgatttttattaaaggcactgctgttacattcactcaggcatgattctgtcataacttcttggta

SEQ ID NO: 132339 - DNA, 201 bp, Homo sapiens
gatggcattaaccttttcgatgttatacttttggtagacctttctctagtttgatgagtgcaaaatacttctgtgaattttttacatgcataattttataytttttatggtcaagtctttatatcttttttctttgtaatttataatatttaaatttgtttgctatccagagataagatattcatgtaaatattcttatgg

SEQ ID NO: 132340 - DNA, 201 bp, Homo sapiens
tgtttatagttgaagagagcaggaaaagactgatttcaggaaacagaacaaggtaaaataatctggtgtcagaatatttaatatggtctacaagggttatrgggggaaaaaaaagtgggcattgccatgggctggattaatgtaggaaggcgtcattgagctgacagctgtgaacagcatcttaaaagataaggcagaaag

SEQ ID NO: 132341 - DNA, 201 bp, Homo sapiens
gtgaagagtttttccaagctgagataatggcctatgcaaaggcttggagcatgaaagagaatttcatatttgagctaacagtaacaagttcaggaattcagggtggatggagaagtatggagggcattttgtgccatgctaatgatatgatattggggtgtaagaaggatgtggccaccgtcctgggggcctacttaatcc

SEQ ID NO: 132342 - DNA, 201 bp, Homo sapiens
tatggaagatttgcattaacatgtttatagttgaagagagcaggaaaagactgatttcaggaaacagaacaaggtaaaataatctggtgtcagaatatttmatatggtctacaagggttatagggggaaaaaaaagtgggcattgccatgggctggattaatgtaggaaggcgtcattgagctgacagctgtgaacagcat

SEQ ID NO: 132343 - DNA, 201 bp, Homo sapiens
tgaagagtttttccaagctgagataatggcctatgcaaaggcttggagcatgaaagagaatttcatatttgagctaacagtaacaagttcaggaattcagggtggatggagaagtatggagggcattttgtgccatgctaatgatatgatattggggtgtaagaaggatgtggccaccgtcctgggggcctacttaatcct

SEQ ID NO: 132344 - DNA, 201 bp, Homo sapiens
gaagagtttttccaagctgagataatggcctatgcaaaggcttggagcatgaaagagaatttcatatttgagctaacagtaacaagttcaggaattcagggtggatggagaagtatggagggcattttgtgccatgctaatgatatgatattggggtgtaagaaggatgtggccaccgtcctgggggcctacttaatcctc

SEQ ID NO: 132345 - DNA, 201 bp, Homo sapiens
gtgatgtcgacaagatttggatttggaccgtgcctgttccagttttagtactggaagtcccacatccttagaaacctctcattcctggacaaactgggatkgttggtcaccataatgaggtgccagaaggatatgatgaacttgaggcattgaaacgtggagagcaataatctgtaagtggggagcagctggctagggtgg

SEQ ID NO: 132346 - DNA, 201 bp, Homo sapiens
gaaaatgtgtgagggtaggggtgatgcgttgcttgtgaattgtgctgtgatcgtgggagtgggctgcagaagtggagggtgagtgggtcagaggatgctgrcgactgtgaaactagtgttgactggatcatccatatgggtgtagcagtccatttggacagtggcaagaaagtggatgttgtgatgtcgacaagatttgga

SEQ ID NO: 132347 - DNA, 201 bp, Homo sapiens
tgttttggagaactatatgactagattgtggcaagtttctctttgcatctagggatgttaggggaaggtggtgatggcggcgctacaggagaaacaatgawtatagtgaatgaaattagtctcattaaaaagtggtggaggttctactatgtgctagcactgtgccaggctccaaagcctggataataacacagagaccct

SEQ ID NO: 132348 - DNA, 201 bp, Homo sapiens
agattgcacctctgcactacagcctgggtgatagagcgagactgtttaaaaaaaaaaattctacctttggagcatatacctaaaggtagccttatgctctrgggcactaggaagtctgttatccaaaaccatctctcttcccttccatgtgtcctcctaccaccagtctgttgctattagaaattcattccattgcctcca

SEQ ID NO: 132349 - DNA, 201 bp, Homo sapiens
taggacacagcagtgaacaaatcagcccaaaatctgccctcatgagcttaggtgtctggcaggcaaattctgtatctagcctgtttgtgtgaacttcctarctaggcattcagggaaggacagagatttatttactctacaaatatatattgaacacttcatatatgtcaaataatgctggatgctggggagatggaatga

SEQ ID NO: 132350 - DNA, 201 bp, Homo sapiens
gcatacatatgtatgtatgtaaatacatatataatagtaaaaaagaaaaggtagtggttacttttagtaagggaaaagcatgggtggaaagacatatatargagcttcaattttaatggtaccatcttaatttgtaagctgaatggtagatgaagaaatgatcattaagatgtaatgatatatttgggaggccaaaacagg

SEQ ID NO: 132351 - DNA, 201 bp, Homo sapiens
catactgccgaggatccatagttgattattagaattactctccattgggccgggtgtggtggtgcacacctgtaatcccagcactctgggaggccgaggcrggcggatcacgaggtcaggagatcaagaccatcctggctaacacagtgaaaccctgtctctactaaaaatacaaaaaattagccaggcatggtggcgggc

SEQ ID NO: 132352 - DNA, 201 bp, Homo sapiens
accacaatatacagcaatgtcccatttaaatcataagcataatacagaaattcgtgaacttgtaaaggcaggaaagagaacatctagttagaatgatcataaaaaaacttcaaggctattatggcagatacaaatatgaataagacactactagacttttttaagcccttaagtataggaatggcataatttatattcatt

SEQ ID NO: 132353 - DNA, 201 bp, Homo sapiens
tctccaaaatatagaactgaacaaagaaagaaaataagcaagtagcagtagcatgctagaatattatataactaataaaaagttaaaaactgggccaggcrcagtggctcacacctgtaatcccagcactttgggaggccaaggtgggtggatcagctgaggttgggagttcaagaccagcctggccaacatagtgaaacc

SEQ ID NO: 132354 - DNA, 201 bp, Homo sapiens
cgttagcacgcctgtaatcccaggctatttgggaggctgaggcaggagaattgcttgagcttgggagatcaaggctgtagtgagctgttccagcctgagcwgcagagtgagaccatatctcaaaaaaaaaaaaaaaaaaaaaaaaagaactgggaatataatcgttatgacacatttacctgtgcttaggttcatatgtta

SEQ ID NO: 132355 - DNA, 201 bp, Homo sapiens
taatgttaaattattgaaataaaatttcaactacatttgggtaaaagtgaattatgatcttaggagttcagtcatgaactattgaccatctcagtagttartatttcccaaactgggcaaagtatgggtgagagtgtgtagaggggagacccaagaaaacatagaaatggtccatcacccttgggtctactcatctactga

SEQ ID NO: 132356 - DNA, 201 bp, Homo sapiens
aagagtttttccaagctgagataatggcctatgcaaaggcttggagcatgaaagagaatttcatatttgagctaacagtaacaagttcaggaattcagggtggatggagaagtatggagggcattttgtgccatgctaatgatatgatattggggtgtaagaaggatgtggccaccgtcctgggggcctacttaatcctca

SEQ ID NO: 132357 - DNA, 201 bp, Homo sapiens
aaatttggtgtcttttatttggcatttataaagacacctcaagccaaaggagtgccccatttccccattttcttttttttttctcttttctctctctctctttttttttttttgagctagggtctcatgccattacctaggctggagtacagtggtgtgatctcggctcactgcagcctcaacatccgtgggctcaggtga

SEQ ID NO: 132358 - DNA, 201 bp, Homo sapiens
gggagtctgtggtgggcagatcacttgaggtcaaaagtgcgagaccatcttgaccaacatagtgaaacccccactctacaaaaaatacaaaaattagccargcatggtgctgcgcgtccataattccagctagtcaggaggctaaggcatgaaaattgcttgaacccgggaggtggaggttgcaatgagctgagatcatgc

SEQ ID NO: 132359 - DNA, 201 bp, Homo sapiens
attacattgaatctgtagatcagtttgggaggtattcttttgtaatgatattaagtcttccaatccatgaacatgggatgtctttctatttatttagatcytctttaatttttttcaacaatgtcttgtaattttttgttacatttatacctaaatattcttcaatgttattgtaagtggagttgttttcttcatttcatt

SEQ ID NO: 132360 - DNA, 201 bp, Homo sapiens
tagctaatatttaataaatgctttatgtgtgtccagcattgtgttgtatgttatggaagatttgcattaacatgtttatagttgaagagagcaggaaaagwctgatttcaggaaacagaacaaggtaaaataatctggtgtcagaatatttaatatggtctacaagggttatagggggaaaaaaaagtgggcattgccatg

SEQ ID NO: 132361 - DNA, 201 bp, Homo sapiens
gttttcttcatttcatttttggaatgttcattgctagtatataaaaatccaggtgatttttgtatattgatcttgtatcctgcaaccttgctgaacttgttttttttttttgtttttgtttttttgtttttttgtttttttttttttgagatggagtcttgcactgtagccgaggctggagtgcaagctccacctcctgga

SEQ ID NO: 132362 - DNA, 201 bp, Homo sapiens
actcctaagcacatcctatgtagaaattctggagccactgttgtcctttatattattttatagctaatatttaataaatgctttatgtgtgtccagcattrtgttgtatgttatggaagatttgcattaacatgtttatagttgaagagagcaggaaaagactgatttcaggaaacagaacaaggtaaaataatctggtgt

SEQ ID NO: 132363 - DNA, 201 bp, Homo sapiens
ttcatttttggaatgttcattgctagtatataaaaatccaggtgatttttgtatattgatcttgtatcctgcaaccttgctgaacttgttttttttttttktttttgtttttttgtttttttgtttttttttttttgagatggagtcttgcactgtagccgaggctggagtgcaagctccacctcctggattcatgccatt

SEQ ID NO: 132364 - DNA, 201 bp, Homo sapiens
gtggaccttgaagtaagataaatgtgtgagtagcctctttctccttcttgatgcagggcacatggatgagatggttgggaaacactttttaagtccctgtsaatgtcaagaagtggcttgaaggggctttaatctctcaatcccttccccaccaaggtaccccagattaatgaacaattgataaaaagtgtgctttctatg

SEQ ID NO: 132365 - DNA, 201 bp, Homo sapiens
gtgaaggattggtttaaatgtttggtagaatttaccagtgaattaatctgggcctgggcttctctttgtgggtcattaaaattaccaattcattctctttrcttattatgaatctatttaagttttatattactttttgagtcagttttagtaatttgtgtcttttttggaatttattcactttatctaagttatctaatt

SEQ ID NO: 132366 - DNA, 201 bp, Homo sapiens
tggtgtacctgaaagtgacggggagaatggaaccaagttggaaaacactctgcaggatattatccaggagaacttccccaatctagcaaggcaggccaacrttcagattcaggaaatacagagaacgccacaaagatactcctcgagaagagcaactgcaagacacatagttgtcagattcaccaaagttgaaatgaagga

SEQ ID NO: 132367 - DNA, 201 bp, Homo sapiens
tgcaggatattatccaggagaacttccccaatctagcaaggcaggccaacattcagattcaggaaatacagagaacgccacaaagatactcctcgagaagwgcaactgcaagacacatagttgtcagattcaccaaagttgaaatgaaggaaacaatgttaagggcagccagagagaaaggttgggttaccctcaaaggga

SEQ ID NO: 132368 - DNA, 201 bp, Homo sapiens
aattttcaacccagaatttcatatccagccaaactaagcttcataagtgaaggagaaataaaatcctttacagacaagcaaatgctgagagattttgtcamcaccaggcctgccctaaaagagctcctgaaggaagtgctaaacatggaaaggaacaactggtaccagccactgcaaaatcatgccaaaacgtaaagacca

SEQ ID NO: 132369 - DNA, 201 bp, Homo sapiens
ttaggagggagtatatatgctaataggaaataaatgttttgcctcccaggagatcatcttagctggtacagtggattaaaaatggcctcaaattatttgayattttctcattgagaagtgggatctatgtcaccaccccttgaatctcagtagctttaaaaaattatggttaaatatacataatctttacattttaaacta

SEQ ID NO: 132370 - DNA, 201 bp, Homo sapiens
atctcgctctgttgcccaggctggagtgcagtggtgcgatcttggctcactacagcctctgcctcccaggttcaagcaattctcttgccttagcctcccgrgtagctgggattacaggcacatgccaccacccatgcccagctaatttttgtatttttagtagagacagggtttcaccatgttggccaggctgatctcgaa

SEQ ID NO: 132371 - DNA, 201 bp, Homo sapiens
actggtcatcagagaaatgcaaatcaaaaccacaatgtggtgatgactcttaacaagcatgctgccttcaagcatctgtttaacaaagcacatcttgcacygcccttaatccatttaaccctgagttgacacagcacatgtttcagagagcagggggttgagggtaaggttatagattaacagcatcccaaggcagaagaa

SEQ ID NO: 132372 - DNA, 201 bp, Homo sapiens
tccatcctggaccacagggtgagactctgtctcaaaacaaaacaaaacaacaacaaaaaataaactttagaaattagttttttaaaaaaaacatcaattcrcagactggtacactgtgctgagggaatgacgagaacaaagagatgaggagtggaagcttgggaaggctgggcacaggtggggccttcgggggatggccct

SEQ ID NO: 132373 - DNA, 201 bp, Homo sapiens
atggagttgtaaaggtaatcattttgtgttctcagtctttgagtggcttaatctgagttacaaagggaggaggaagtagttgcgtaacaaatccatttggyccaggccctgtgaatatatccattctgctactccccacccctctgaaggcatacaaaggacaacagcacagttaatacccctattctggacttgtctcca

SEQ ID NO: 132374 - DNA, 201 bp, Homo sapiens
ctcaggggtcagggacccacttgaggaggcagtctgcccgttctcagatctccagctgcatgctgggagaaccactactctcttcaaagctgtcagacagkgacatttatgtctgcagaggttactgctgtctttttgtttgtctgtgccctgcccccagaggtggagcctacagaggcaggcaggcctccttgagctgtg

SEQ ID NO: 132375 - DNA, 201 bp, Homo sapiens
ctgacagttgttggcaggaatggaaaccaaatatattaaatataccattggtagctttctcggtataatattgccatctctagggaaaacattatattcayccaacttagtcgttgaggggtttgttttctagcccgtagtttttctatgccctttttgtttttcttctctgctaccttttgtttatctttttaaaaacat

SEQ ID NO: 132376 - DNA, 201 bp, Homo sapiens
tcatccacctcagcctcccaaagttctgggtctacaggcgtgagccaccatgcctgatatatatatatgtgtgtgtgtgtgtgtgtgtgtgtgtgtgtgtrtacatacatatatatttatatcctcaaagaatgaaattaattacactaaatataattttcagtgttaaatattctctgtagtttaccatttacattatgg

SEQ ID NO: 132377 - DNA, 201 bp, Homo sapiens
tcgaatgaaaatggccacatttaggtagggtaggagaacaggctttggaaggagcgggtattttattacagtgtgaataaaataaatatttagaacattayaagaatgatggctgacactgagagattcatgttaatgttataggtttctcaaggctgataggagctcttatattgtatttctaatgtagaggaatagaag

SEQ ID NO: 132378 - DNA, 201 bp, Homo sapiens
aattataacaaactatctctcagaccacagtgcaatcaaactagaactcaggattaagaatctcactcaaaaccactcaactacatggaaactgaacaacytgctcctgaatgactactgggtatataatgaaatgaaggcagaaataaagatgttctttgaaaccaacgagaacaaagacacaacataccagaatctctg

SEQ ID NO: 132379 - DNA, 201 bp, Homo sapiens
ttcatccacctcagcctcccaaagttctgggtctacaggcgtgagccaccatgcctgatatatatatatgtgtgtgtgtgtgtgtgtgtgtgtgtgtgtgygtacatacatatatatttatatcctcaaagaatgaaattaattacactaaatataattttcagtgttaaatattctctgtagtttaccatttacattatg

SEQ ID NO: 132380 - DNA, 201 bp, Homo sapiens
agtaagtgatcaatgtcaggatctttacagagaacaataagatggatctaaaatgaatgaactgagtgttttctctttttttgcagttttggggggcatcraatgaaaatggccacatttaggtagggtaggagaacaggctttggaaggagcgggtattttattacagtgtgaataaaataaatatttagaacattataa

SEQ ID NO: 132381 - DNA, 201 bp, Homo sapiens
gaacaggcaacctacaaaatgggagaaaattttcgcaacctactcatctgacaaagggctaatatccagaatctacaatgaactcaaacaaatttatgagraaaaaaaaacaaccccatcaaaaagtgggcaaaggacatgaacagacacttctcaaaagaagacatttatgcagccaaaaaacacatgaaaaaatgctca

SEQ ID NO: 132382 - DNA, 201 bp, Homo sapiens
attcatccacctcagcctcccaaagttctgggtctacaggcgtgagccaccatgcctgatatatatatatgtgtgtgtgtgtgtgtgtgtgtgtgtgtgtrtgtacatacatatatatttatatcctcaaagaatgaaattaattacactaaatataattttcagtgttaaatattctctgtagtttaccatttacattat

SEQ ID NO: 132383 - DNA, 201 bp, Homo sapiens
tttttttgataacactagcagtagcaagcaaagtatagataagaacaagtgacatattttgagtaagtgatcaatgtcaggatctttacagagaacaatargatggatctaaaatgaatgaactgagtgttttctctttttttgcagttttggggggcatcgaatgaaaatggccacatttaggtagggtaggagaacagg

SEQ ID NO: 132384 - DNA, 201 bp, Homo sapiens
cttcttgagtttgagctgaaaatagcaatcagtgtatcctaaatacctcaaaacaactgtactatgatttggaaagactatataaaatgtaatgaaagatrctattaacaattaaataatatggaaaatgaaattccaataattagttgagtggagaagacaactctgaggagcccagattacttagaagggacagaaatg

SEQ ID NO: 132385 - DNA, 201 bp, Homo sapiens
atggttatagacatcgagtttcagagccacgttgatgagtccagattctggtcctcaaatttgtaagtttaaaaattaaaattttagggactgggcgtggyggctcacgcctgtaatcccagcactttgggaggccgaagcaggcggatcatgaggtcaggagttcgagaccagcctgaccaatgtggtgaaaccccatct

SEQ ID NO: 132386 - DNA, 201 bp, Homo sapiens
tttttttttggaaaacacttgccagttggagcctcaaagaagattgagtttgagaggcctttaattgtgcaccaaaaggttattgcagaagataacataarggagatgtcataaagaagaaaatttgaagctcagtaagagaaagctgtgtgaaaaaataggcattctgccaattaactgggtgcttgaaataaatagttt

SEQ ID NO: 132387 - DNA, 201 bp, Homo sapiens
accaagacctgtgttagtttaatgaaatgacaagtttatagaaactgcattagttgcagtaaacatttcactttattacttgaggaaaaagcctgaaatayagaaactaatcaaaatgtaaattacaggtagtaacaacaagtgtttaccatgtactaagggtgtgctgtatgttaggcctattgtacacactttacatac

SEQ ID NO: 132388 - DNA, 201 bp, Homo sapiens
tcaggaggctgaggcaggagaatcacttgaactgaggcggaggttgcagtgagctgagatcgcgccactgcactccagcctgggtgacagagtaagactcygtcaaaaaaaataaaaataaaattaaaattttaccaagggatggttaggtaccaggaaaccaaccatctttcaagagccttatatacataaatcagaatg

SEQ ID NO: 132389 - DNA, 201 bp, Homo sapiens
tcaatatagggaatatttgttagtgtccccagacgaagttacattggttcaattttcggcgtgtgggagttttcgccactagcattcagcaccccagtttyaaccgttaaagctaccgactccacatacaggaaatgcatcttaaaatttggaaaaaaaatccccaaaacactgacatccaaacactttaaagctgccaag

SEQ ID NO: 132390 - DNA, 201 bp, Homo sapiens
caagatttggatttggaccgtgcctgttccagttttagtactggaagtcccacatccttagaaacctctcattcctggacaaactgggatggttggtcacyataatgaggtgccagaaggatatgatgaacttgaggcattgaaacgtggagagcaataatctgtaagtggggagcagctggctagggtggaggaaaaagg

SEQ ID NO: 132391 - DNA, 201 bp, Homo sapiens
agatcaagcaatagtgtgcagttagcaaactgggtccacaaactcaagattcaaatcacttttggctaattgtgtacttatggacatcagattgctcttgyattaaaatttattaggcagactttgagtgggaaaataaaaatcttgatttggtagatgctggagaacagtaaaaaatagaaaaatttgcaggttggtgag

SEQ ID NO: 132392 - DNA, 201 bp, Homo sapiens
aggagggggagattgcagtgagctgagatcgcgccactgcgctccagcctgggcaacaagagcaaaactccatttcaaaaaaaaaaaaatgaaaaaaatgyttaaatgtaggactggattaatgaaattcaaagacacttgtgcttcatgcaaacatagtgtcactttagcatctgtgataggcaagataatgccccaatc

SEQ ID NO: 132393 - DNA, 201 bp, Homo sapiens
tttctcaaggctgataggagctcttatattgtatttctaatgtagaggaatagaaggaaagctatggatggggtgcagaagaatggccctttggcagtgtmggtagtgctgcttcctgtcacactctagtgttacagcacttataaactggatgtgccttctgaggatactatcctttctgagtgcatcgtggcctcttcc

SEQ ID NO: 132394 - DNA, 201 bp, Homo sapiens
acatcagattgctcttgtattaaaatttattaggcagactttgagtgggaaaataaaaatcttgatttggtagatgctggagaacagtaaaaaatagaaamatttgcaggttggtgagatttcccagattcagtgtgtggtgtatctctaaagttcaaaatccttcaagaaggttgctggtgtatgctgggtgtcagaaca

SEQ ID NO: 132395 - DNA, 201 bp, Homo sapiens
taaataccagtaatgggatggctgggtcaaaaggtatttctagttctagatccttgaggaatcgccacactatcttccacaatggttgaactagtttacastcccaccaacagtgtaaaagtgttcctatttctccacatcctctccagcacctgttgtttcctgactttttaatgattgccattctaactggtgtgagat

SEQ ID NO: 132396 - DNA, 201 bp, Homo sapiens
gaaaaaaaagagcccctaatagtgagctaggtgcaaaaaagatcctaatgccttttttcctcattcctccccagattgaaagtgatgagtgccagccctgmgggttaaagcgccatattttcctcaatatagggaatatttgttagtgtccccagacgaagttacattggttcaattttcggcgtgtgggagttttcgcca

SEQ ID NO: 132397 - DNA, 201 bp, Homo sapiens
gcaagaaacaaagtgaacaagatacagcatcaaaattctcttttaagtttcccaaggctgctcttatttctctctacaaaatagaaataataattttgccytttttttgataacactagcagtagcaagcaaagtatagataagaacaagtgacatattttgagtaagtgatcaatgtcaggatctttacagagaacaata

SEQ ID NO: 132398 - DNA, 201 bp, Homo sapiens
taatgggatggctgggtcaaaaggtatttctagttctagatccttgaggaatcgccacactatcttccacaatggttgaactagtttacactcccaccaasagtgtaaaagtgttcctatttctccacatcctctccagcacctgttgtttcctgactttttaatgattgccattctaactggtgtgagatagtatctcat

SEQ ID NO: 132399 - DNA, 201 bp, Homo sapiens
cttagccccttagagtttgccaaaatttaaagcagaccaagtttaatgagtgtacttcatagtatagattgtggacagtcctttttgcttgctaaattcartttagctcagatggtgaataccaatatgttcagagtactgtgtaggtgctatgggggatttaaaaacaccttcttaagtagaaagaggtataaataaatg

SEQ ID NO: 132400 - DNA, 201 bp, Homo sapiens
cagtttctatagtttctttcatttacttcatgaggtttctaagtcacatctacctttgcatagacagatgtcatgcatggtaccatctgaaccaaacccaytgcatcttccactttgcttttaactttgatccttggtgaagtccattattgcaattatcaattacagttaatttatccattcctattagaaatagtttat

SEQ ID NO: 132401 - DNA, 201 bp, Homo sapiens
acaatggttgaactagtttacactcccaccaacagtgtaaaagtgttcctatttctccacatcctctccagcacctgttgtttcctgactttttaatgatygccattctaactggtgtgagatagtatctcattgtggttttgatttgcatttctctgatggccagtgatgatgagcattttctcatgtgtctgttggctg

SEQ ID NO: 132402 - DNA, 201 bp, Homo sapiens
tgggttgtcatagttcgtttcgaatgtgtattcattatcatgacctactccatttctattatgtaaaatatgaacatcccatgcattgatatacatgactytctttatacctaccctcttgggtctcaagttattataagcctattaacaagttgcaaagcaatttttgtgtgatgcctgcaaaatagagagctgtgtgta

SEQ ID NO: 132403 - DNA, 201 bp, Homo sapiens
aaattcttccaaagacagctttattatgtttaggacagtggaaagtaatgtaataaggtataaggtatgagataatgaggttgatgtttttatgtggtgcycttagccccttagagtttgccaaaatttaaagcagaccaagtttaatgagtgtacttcatagtatagattgtggacagtcctttttgcttgctaaattca

SEQ ID NO: 132404 - DNA, 201 bp, Homo sapiens
tcctgactttttaatgattgccattctaactggtgtgagatagtatctcattgtggttttgatttgcatttctctgatggccagtgatgatgagcattttytcatgtgtctgttggctgcataaatgtcttcttttgagaagtgtctgttcatatcctttgcccacttcttgatgtggttctttgtttttttcttgtaaat

SEQ ID NO: 132405 - DNA, 201 bp, Homo sapiens
ggaactctgggtttctcccctttttagactatatagggtaatttttggatgttgccatggcatttgtaaactgtactggtgctggtgggagtatcttttarcatgctaatggattataattagcatatagtgagcagtaaggatgaccagaggtcacttttgtggccatcttggttttggtgggttttggctggcttcttt

SEQ ID NO: 132406 - DNA, 201 bp, Homo sapiens
cgtgaagtccttgaccatgcctatgtcctgaatggtattgcctaggttttcttctagggtttttatggttttaggtctaacatgtaagtctttaatccacyttgaattaatttttgtataaggtgtaaggaagggatccagtttcagctttctacatatggctagccagttttcccagcaccatttattaaatagggaatc

SEQ ID NO: 132407 - DNA, 201 bp, Homo sapiens
catattattgtcaagctccttagtatgaccttgcctttgtcgtgctgtctagtcacacgtctctctatatcccacaatgtattccctgtttttcttttttmtttttttattttttttttattttgagacaaggtctcactctgtcgtccaggctggagtacagtggcatgatctcagcccactgcaacttctgcctcctga

SEQ ID NO: 132408 - DNA, 201 bp, Homo sapiens
catgttggccagactggtctcgaactcctgacctcaggtgatcagcctgacttggcctcccaaagtgctaggattacaggtgtgagccaccatggctggcrtgttcctcttattctgctacattgaatttgttatagttcccaatacgtatcatgctatttaatgtctctgtacctttgaaaatgctgttttctttcctgg

SEQ ID NO: 132409 - DNA, 201 bp, Homo sapiens
tgtgaaactagtgttgactggatcatccatatgggtgtagcagtccatttggacagtggcaagaaagtggatgttgtgatgtcgacaagatttggatttgkaccgtgcctgttccagttttagtactggaagtcccacatccttagaaacctctcattcctggacaaactgggatggttggtcaccataatgaggtgccag

SEQ ID NO: 132410 - DNA, 201 bp, Homo sapiens
ggatgcttttcattagagtactacagaatggcagggacagtgaaaatgagcattcttaaagatgtggaagaatattctgtgtgtcacaaatgatgactctrcctcatattaaaaagacctagtgttcagttgctatttatgttcagggaagtgagggcttttgggtgaaggcaagtgaagttggtaacctcgttgcctcac

SEQ ID NO: 132411 - DNA, 201 bp, Homo sapiens
gtggagggcaaatggagttgtaaaggtaatcattttgtgttctcagtctttgagtggcttaatctgagttacaaagggaggaggaagtagttgcgtaacaratccatttggtccaggccctgtgaatatatccattctgctactccccacccctctgaaggcatacaaaggacaacagcacagttaatacccctattctgg

SEQ ID NO: 132412 - DNA, 201 bp, Homo sapiens
ggagtctcactctgtcgcccaggctggagtccaatggcatgatctcagctcactgcaacctcctccgcctcctgggttcaaatgattctcctgccccagcstcccgagtagctgggattacagtcgcccaccaccatgcctggctaatttttgtatttttggtagagacggggtttcactatattggtcaggctggtcttg

SEQ ID NO: 132413 - DNA, 201 bp, Homo sapiens
atgatggctgacactgagagattcatgttaatgttataggtttctcaaggctgataggagctcttatattgtatttctaatgtagaggaatagaaggaaakctatggatggggtgcagaagaatggccctttggcagtgtaggtagtgctgcttcctgtcacactctagtgttacagcacttataaactggatgtgccttc

SEQ ID NO: 132414 - DNA, 201 bp, Homo sapiens
aagcaccctagaaactgtttggccttttgaatgtttattgtaaagtttaaattctcagttgtttgttcttagtttgtgctaacagcttcataaaatgggtrgatcaagcaatagtgtgcagttagcaaactgggtccacaaactcaagattcaaatcacttttggctaattgtgtacttatggacatcagattgctcttgt

SEQ ID NO: 132415 - DNA, 201 bp, Homo sapiens
aagtagctacctacagttgttccccagaagatacattacttaagcaccctagaaactgtttggccttttgaatgtttattgtaaagtttaaattctcagtygtttgttcttagtttgtgctaacagcttcataaaatgggtagatcaagcaatagtgtgcagttagcaaactgggtccacaaactcaagattcaaatcact

SEQ ID NO: 132416 - DNA, 201 bp, Homo sapiens
aaaaaataaaaaaagcagattctcctcttcatgataggaagttgatagatgtgtaaaactgaaaactttttcaggaaactgctgaaggaatggcaagcagaaaaaaaaaaaactttaaaaaatagcagtattagcaaggatagaaatggctgtaaataccaaaagaaaccgaaaaaagtgttgaaagtctttggaaacaag

SEQ ID NO: 132417 - DNA, 201 bp, Homo sapiens
tgtggaagaatattctgtgtgtcacaaatgatgactctacctcatattaaaaagacctagtgttcagttgctatttatgttcagggaagtgagggcttttrggtgaaggcaagtgaagttggtaacctcgttgcctcactaaaaacaagtacacgtaaaactttgaattacttctgtttatttaaaagtagtttttcttat

SEQ ID NO: 132418 - DNA, 201 bp, Homo sapiens
ctcatattaaaaagacctagtgttcagttgctatttatgttcagggaagtgagggcttttgggtgaaggcaagtgaagttggtaacctcgttgcctcactraaaacaagtacacgtaaaactttgaattacttctgtttatttaaaagtagtttttcttatcctgagcctgacatctaaaatttgtttctcatccctttta

SEQ ID NO: 132419 - DNA, 201 bp, Homo sapiens
aaggacatggagatgtggttggggaaaatgtgtgagggtaggggtgatgcgttgcttgtgaattgtgctgtgatcgtgggagtgggctgcagaagtggagkgtgagtgggtcagaggatgctgacgactgtgaaactagtgttgactggatcatccatatgggtgtagcagtccatttggacagtggcaagaaagtggatg

SEQ ID NO: 132420 - DNA, 201 bp, Homo sapiens
gggaaaatgtgtgagggtaggggtgatgcgttgcttgtgaattgtgctgtgatcgtgggagtgggctgcagaagtggagggtgagtgggtcagaggatgcygacgactgtgaaactagtgttgactggatcatccatatgggtgtagcagtccatttggacagtggcaagaaagtggatgttgtgatgtcgacaagatttg

SEQ ID NO: 132421 - DNA, 201 bp, Homo sapiens
gctcactgaaacctctgccttctgtatgttcaagagattctcctccctcagcctcctgagtagctaggattacaggtgcctgccaccactcctggctaatktttgtatttttagtagagatggggtttcaccatgttggtgaagctggtatcggattcctgacctcgtgatccacccgccttggcctcccaaagtgctggg

SEQ ID NO: 132422 - DNA, 201 bp, Homo sapiens
acatgaaatttagatcgaagtgcatgatttagagtgtgtttgcttactttgggtgaaaagtttagaaacacattgaattccttagaattctatctatagcyttttttttttttttttttgagatggagtctcaccctgccacctgcgctggagtgcagtggtgcgatctcagctcactgcaacctttgcctgcctcctagg

SEQ ID NO: 132423 - DNA, 201 bp, Homo sapiens
gaaatttgattggtgaatctgcttaaaagttagctgagaagtttgtggctttttcattttgaagaagagatttgccaggagtctgagaatcctttaaattyttccaaagacagctttattatgtttaggacagtggaaagtaatgtaataaggtataaggtatgagataatgaggttgatgtttttatgtggtgctcttag

SEQ ID NO: 132424 - DNA, 201 bp, Homo sapiens
cgcctgtcttgaaatgggctctaagtctcctgaaagcaaaggaccctgaatatggtgtttattacctaacacaatgtctagcctataggaggtacttaatrtatgttggttgaacaaaggagtaaataaatgaagtagctacctacagttgttccccagaagatacattacttaagcaccctagaaactgtttggcctttt

SEQ ID NO: 132425 - DNA, 201 bp, Homo sapiens
cccatcggtgtgctgtattcaggagacccgtctcacatgcaaacacacacataggctccaaataaagggatggaggaagatctaccaagcaaatagaaagaaaaaaaaaaaaaaagcaggggttgcaatcttagtctctgataaaacagacttctattaaatccactgcagtctctgataaaacagacttagtctctgata

SEQ ID NO: 132426 - DNA, 201 bp, Homo sapiens
ccctgcccccagaggtggagcctacagaggcaggcaggcctccttgagctgtggtgggctccacccagttcgagcttccctgccgctttgtttacctaatmaagtctcggcaatggcgggtgcccctcccccagcctccctgcggccttgcagtttgatctcagactgctgtgctagcaatgagcaagactccgtgggcat

SEQ ID NO: 132427 - DNA, 201 bp, Homo sapiens
ttactttgggtgaaaagtttagaaacacattgaattccttagaattctatctatagctttttttttttttttttttgagatggagtctcaccctgccaccygcgctggagtgcagtggtgcgatctcagctcactgcaacctttgcctgcctcctaggttcaagctattttcctgcctcagcctcctgagtagctgggatt

SEQ ID NO: 132428 - DNA, 201 bp, Homo sapiens
ttttgagatggagtctcaccctgccacctgcgctggagtgcagtggtgcgatctcagctcactgcaacctttgcctgcctcctaggttcaagctattttcmtgcctcagcctcctgagtagctgggattacagcgtgggccaccatgcccggctaatttttgtatttttagtaaagatggggtttcaccatgttggccagg

SEQ ID NO: 132429 - DNA, 201 bp, Homo sapiens
ggagtgcagtggtgcgatctcagctcactgcaacctttgcctgcctcctaggttcaagctattttcctgcctcagcctcctgagtagctgggattacagcrtgggccaccatgcccggctaatttttgtatttttagtaaagatggggtttcaccatgttggccaggctgggctcaaactcctgacctcaggtgatctgcc

SEQ ID NO: 132430 - DNA, 201 bp, Homo sapiens
aagatctagaatagaatggggaagaggggagcttgaagttgaaactttgagagagcatttgataagtcagggtctttaagaggcacaagcaaatgggttgyggggtttaggtgcaggaattagcttttcatatggtttggctgtgtccccacccaaatctcatcttgaattgtagttcccataatccccatgtgtcatggg

SEQ ID NO: 132431 - DNA, 201 bp, Homo sapiens
tgcagtggtgcgatctcagctcactgcaacctttgcctgcctcctaggttcaagctattttcctgcctcagcctcctgagtagctgggattacagcgtggsccaccatgcccggctaatttttgtatttttagtaaagatggggtttcaccatgttggccaggctgggctcaaactcctgacctcaggtgatctgcccacc

SEQ ID NO: 132432 - DNA, 201 bp, Homo sapiens
gatctcagctcactgcaacctttgcctgcctcctaggttcaagctattttcctgcctcagcctcctgagtagctgggattacagcgtgggccaccatgccyggctaatttttgtatttttagtaaagatggggtttcaccatgttggccaggctgggctcaaactcctgacctcaggtgatctgcccacctcagcctccca

SEQ ID NO: 132433 - DNA, 201 bp, Homo sapiens
tattttcctgcctcagcctcctgagtagctgggattacagcgtgggccaccatgcccggctaatttttgtatttttagtaaagatggggtttcaccatgtyggccaggctgggctcaaactcctgacctcaggtgatctgcccacctcagcctcccaaagtgctgggatttcaggcatgagtgactgcacccagcccagaa

SEQ ID NO: 132434 - DNA, 201 bp, Homo sapiens
caagactagatagcttttattcttctttgggtgggggtagatttcaatgagaagaaatattgcattaaactctaatttttatttaagttcttgaggtttgkttttttttttttttcaaaattatatcttgtatatttccaaggcagaagactatttggagaagtaaagtctgttgtagctaaagtattctgttgtgtggca

SEQ ID NO: 132435 - DNA, 201 bp, Homo sapiens
aagactagatagcttttattcttctttgggtgggggtagatttcaatgagaagaaatattgcattaaactctaatttttatttaagttcttgaggtttgtktttttttttttttcaaaattatatcttgtatatttccaaggcagaagactatttggagaagtaaagtctgttgtagctaaagtattctgttgtgtggcag

SEQ ID NO: 132436 - DNA, 201 bp, Homo sapiens
attaggacaaacatctgtatgttcaaagatactagtttctttattgctgggtaaaaggtgattataaaaggatcatgacaggttaacacatttggcttcartttcagttttgccagatctaggcaagatttatttgggcaacaaacaatacatgtaatcaattataattattcttattaatggtggggaacacagagatgt

SEQ ID NO: 132437 - DNA, 201 bp, Homo sapiens
aagatactagtttctttattgctgggtaaaaggtgattataaaaggatcatgacaggttaacacatttggcttcaatttcagttttgccagatctaggcargatttatttgggcaacaaacaatacatgtaatcaattataattattcttattaatggtggggaacacagagatgtatattaaaattttatttaatttcag

SEQ ID NO: 132438 - DNA, 201 bp, Homo sapiens
taacatgtttgaaaaacatgttgagtaaagacttacatttctagaatacagtatacggtaaattaatataagatagaaaactaagcaaataacaaaaataytaagctgcgcacagtggctcacacctgtaatctcaacactttgggaggttgaggcaggaggatcacttcaacccagaagttcaagccagcttgggcaaca

SEQ ID NO: 132439 - DNA, 201 bp, Homo sapiens
cctgcattgctttaattcttttgaacataattattttagtccctttgctattgttccattatttccaattcttttttgttgcactcgatgactctccctcatcatgcctcctttggtggtttttaatttaggaatgtgaagtcatcttcatgagggctgccttttctatgggacttctatatgcttagcccctgtacaatg

SEQ ID NO: 132440 - DNA, 201 bp, Homo sapiens
cagatctaggcaagatttatttgggcaacaaacaatacatgtaatcaattataattattcttattaatggtggggaacacagagatgtatattaaaatttyatttaatttcagataaatgtttactgggaaaatttgaaatatatttttatatttaggttggatgcttacttaaaaagcaatgaaagagcatcgtgaagac

SEQ ID NO: 132441 - DNA, 201 bp, Homo sapiens
ttcttattaatggtggggaacacagagatgtatattaaaattttatttaatttcagataaatgtttactgggaaaatttgaaatatatttttatatttagrttggatgcttacttaaaaagcaatgaaagagcatcgtgaagacatgaagatttcttctcctttcaccctatctccccaatcagtttcttccttcattaat

SEQ ID NO: 132442 - DNA, 201 bp, Homo sapiens
gttttcagggggaatgtttccagcttttgcccattcagtatgatattggctgtgggtttgtcatatatggctcttattattttgaggtatgttccttcaayacccagtttattgagagtttttaacatgaagggatgttgaattttattgaaggctttttctgcatctattgagataatcatgtggtttttatctttagtt

SEQ ID NO: 132443 - DNA, 201 bp, Homo sapiens
catctattgagataatcatgtggtttttatctttagttctgtttatgtgatgaatcacatttattgatttgtgtatgttgaaccaaccttgcatcctggakatgaagccaagttgatcgtggtggataagctttttgatgtgctgctggattcggtttacaagtattttgttgaggatttttgcatcagtgttcatcaagg

SEQ ID NO: 132444 - DNA, 201 bp, Homo sapiens
aatataggggttgttttagggaaaagagaagatatacaagcacacacttgtacatatatgacaggagatacttaaacatgtttataagctgagcagaagakctagaatagaatggggaagaggggagcttgaagttgaaactttgagagagcatttgataagtcagggtctttaagaggcacaagcaaatgggttgtgggg

SEQ ID NO: 132445 - DNA, 201 bp, Homo sapiens
ttggcctggggtcattgctggtccaggctaattttaatttaaatctgggatctgagatctcagaatcactagataagttgaaaatgggttgtagatccatrtgaaggctgataaggttctggttcatcctcaagtaattgttcacagctacaggaatttcaggggtttcttcctgactccattgagttttaaatttctgtg

SEQ ID NO: 132446 - DNA, 201 bp, Homo sapiens
atgacagtggttggagaaggaaggtggagcggtggatatagaagatgtacttttttaaaatgtgtagctgaaaagagaagagaaatagggcagaatatagrggttgttttagggaaaagagaagatatacaagcacacacttgtacatatatgacaggagatacttaaacatgtttataagctgagcagaagatctagaat

SEQ ID NO: 132447 - DNA, 201 bp, Homo sapiens
gtttaacagttattcaatgtaattgaagttaatgtagctaaaattgcatattatttttgaagtgttaagaatgaaaataatttatggtctttaagaatgartatgccaatatttcatattctgtattggcagtacagtaaaaattaattattttcactataagtattatataaataataaagatatttaggagggagtata

SEQ ID NO: 132448 - DNA, 201 bp, Homo sapiens
cataattatgcagctcagattggggaggtttgggaaggctttccagaagaggtagtagtggagctgcatgttgacagatgtgattagattttcattttggraagatgactgccagcagcagattgacagggtcatgtctgttaggagggaaaccagttagaagcccggaaatgatgagagtctgaattaaatgagagaagg

SEQ ID NO: 132449 - DNA, 201 bp, Homo sapiens
ataaagattaagagggtatgttaattggaatattgggacagatgagaaggttaaatcctgttttatttatttacttgtttgcttatttatttatttgagayggagcctcggtatgttgcccaggctggagtgcagtggtgcgatctcagctcactgcaacctccgcctgccgggttcaaatgattctcctgcctcagcctc

SEQ ID NO: 132450 - DNA, 201 bp, Homo sapiens
ttaaaatatgtttttttagataagtgatgaagagaagactcttcgagaacaggagattgttgcctcatcaccaagtttaagtggacttaagttggggttcragtccatttataaggtatgtaaacatgtaaaatacttcctaggttttgttaaatatgtcgcattgagctttatatacatatttaattaatccatttttat

SEQ ID NO: 132451 - DNA, 201 bp, Homo sapiens
ttgtaaagtgcttaataattatccatcaatgagtaagctttgaaggaagattaaaaagtattatgaaataaattacagagttatagttgaggcttattcaragcaaaattatttttggtgtattttgagcactaggtaaatgtcaaaggcacccatgagaaatagcaaaaactgctgtaatagtataaattctcatttata

SEQ ID NO: 132452 - DNA, 201 bp, Homo sapiens
aatatttcatattctgtattggcagtacagtaaaaattaattattttcactataagtattatataaataataaagatatttaggagggagtatatatgctwataggaaataaatgttttgcctcccaggagatcatcttagctggtacagtggattaaaaatggcctcaaattatttgatattttctcattgagaagtggg

SEQ ID NO: 132453 - DNA, 201 bp, Homo sapiens
tggttcatttggctgtttggatggcctttcttcttcactgttgtgctctgtcctcggcttcatcaggaaaggaagggatgctttttttctgttgaatctaygccaagtaaatgatgcctactgcctaacaggcagctcccatacgaaggatgcaaacaaggagtgcctagtttttttttccatactgacatacttttctgt

SEQ ID NO: 132454 - DNA, 201 bp, Homo sapiens
caaagaaggtatacaaatggccgatgagcacatgaaaagagactcaaggtcactaatcatgagggaaatgcaactcaaaaccatgagatacaacttcacamtcattaaaatgatgattataaacaaagcagaacagaaaataaatatgagtgttggcaaggatgtggaaaaattataacctttgtgtgctgctggtgggaa

SEQ ID NO: 132455 - DNA, 201 bp, Homo sapiens
cagctgcgcgcttcctctgtgcgaggcattgccggagagcggggagcgaattgaacgtggaacctgccagtaggggcttgccgcccaatacgaaattcaamatatgtattgtatgtagacgggcaaactaacgaggatcttgtaacttgttttctcatctgccaaatgggggtaatacgatcttataggaccttataggtc

SEQ ID NO: 132456 - DNA, 201 bp, Homo sapiens
ggctcagctgggaggatcgcttgagtccaggaggtggaggctgcagtgggcagtgatagcatcactgcactccagcctgggcaacaggaaaccctgtcttraaaaaacaaatgaacagaaactccctccccatgcaaaatcccttaagttcttaatttaatgtagttaaaatgatcaatctttctctttttagcttgtttt

SEQ ID NO: 132457 - DNA, 201 bp, Homo sapiens
tggtacacagtcttcaggagctctgggatgccattaagaattctaagtagacttgatggagaatctgttctgaaacctggcagtaactagtaattgccatrctggagaggcatgttgacattcccacctgagcccagccttttaagcatccctgtcaaggtgccatacatgagagcagagccatctaagaacctccagatt

SEQ ID NO: 132458 - DNA, 201 bp, Homo sapiens
ggagaatctgttctgaaacctggcagtaactagtaattgccatgctggagaggcatgttgacattcccacctgagcccagccttttaagcatccctgtcamggtgccatacatgagagcagagccatctaagaacctccagattaatctgttcaccagctcagtacctctggtgacttcatttggtgccacatggagtaga

SEQ ID NO: 132459 - DNA, 201 bp, Homo sapiens
acggagtcttgctctgttgcccaggctggagtgtagtggtgcaatctcagctcactgcaacctcggcctcctgggttcaagtgattctcctgcctcagccwcccaagtagctgggactacaggcgcacaccaccatgcccagctcatttttgtagctttagtagagacagggtttcaccatgatggccaagctggtcttga

SEQ ID NO: 132460 - DNA, 201 bp, Homo sapiens
gttgttttcagtgagatgtagatctgaataacttaagaaatcagaaactgctaatagcacggagcccatctgctgctgtgctgttggtgatgttgcaaatygttcccctctccccttaacatattctgagcctcaagtcaagacagcttactgggctggagaggtgatggtctaaagaattataaagattttttaaaaatt

SEQ ID NO: 132461 - DNA, 201 bp, Homo sapiens
aataaggagtctggtggaacagctgagacaggacacacagatgtaacagtagaacaggctagagaacacatgtgtttgataagcctggaagcttttcacasggcttctggcaagccgttgactatgacaggagtgaaaatggagcctgaagaagagtgaagtgggatggtaaaacacacactctcaaacactcttagtgga

SEQ ID NO: 132462 - DNA, 201 bp, Homo sapiens
gaagaaatattgcattaaactctaatttttatttaagttcttgaggtttgtttttttttttttttcaaaattatatcttgtatatttccaaggcagaagastatttggagaagtaaagtctgttgtagctaaagtattctgttgtgtggcagttgaactgatgtgtgcttccctgacatttacttggtaagtagttaattg

SEQ ID NO: 132463 - DNA, 201 bp, Homo sapiens
taagtatgtgaaagatttgtaaggcatctacaaaacaatatttggtattatttgttgagtttggccttcttgatgcttcccatattgtcttttattgccaygaatcctgtcttcccaagtgcctgacaaactcgtttggggcctaaattataggtaatatattctttctgactcttaaagtacctagtcatcatttaatac

SEQ ID NO: 132464 - DNA, 201 bp, Homo sapiens
accatgacgactaaatgcaacgcgggatcatggatcagaaaaaaagacatcagtgggacaatgtctttggggatagctgaaggtcgataggtaatttttgrtgttacttctcactttttatacacctgaaattattctgaagtgaagagtaataaaaactttagacatttggtctggtgccgtggctcatgcctgtagtcc

SEQ ID NO: 132465 - DNA, 201 bp, Homo sapiens
tatctatgcttaccagtacattttaaggcaagctgtgtcatttcagatgctcatatgtgtcaccaatcccattggggtcacatgagaggctggcatatggyacaatttgaaaataacacagtcatccagacaacccaggatatgctttttatgaaacttataaaaatggatggaaaaaaatggaaaaaataaaaaggaaat

SEQ ID NO: 132466 - DNA, 201 bp, Homo sapiens
gttagcacgcctgtaatcccaggctatttgggaggctgaggcaggagaattgcttgagcttgggagatcaaggctgtagtgagctgttccagcctgagcarcagagtgagaccatatctcaaaaaaaaaaaaaaaaaaaaaaaaagaactgggaatataatcgttatgacacatttacctgtgcttaggttcatatgttag

SEQ ID NO: 132467 - DNA, 201 bp, Homo sapiens
ggctgtagtgagctgttccagcctgagcagcagagtgagaccatatctcaaaaaaaaaaaaaaaaaaaaaaaaagaactgggaatataatcgttatgacayatttacctgtgcttaggttcatatgttagtgagggagatataaatgcttatagtattgtacataaataatataaaaaaaaactgtatcttcaagcagaca

SEQ ID NO: 132468 - DNA, 201 bp, Homo sapiens
actgacccagaaaccagagggcaaaggaacaaggaaaaagtaattctctgtgatacggaacagggtagagcggggacaggggataaatctaagagcaaaayaggacaagactagcacatggcctcaacttctctgctctccatggcaatgtcttcctcctcttctgtttccaggagtctctaattcctgccacttattgcc

SEQ ID NO: 132469 - DNA, 201 bp, Homo sapiens
atacagaaactaatcaaaatgtaaattacaggtagtaacaacaagtgtttaccatgtactaagggtgtgctgtatgttaggcctattgtacacactttacrtactttatttaatcccaagaaaagctacatgagataggtatgattttcttcattttatccctgaagaaactaaggtgtaaagaggttaactaacctgttt

SEQ ID NO: 132470 - DNA, 201 bp, Homo sapiens
gaagtgttaagaatgaaaataatttatggtctttaagaatgaatatgccaatatttcatattctgtattggcagtacagtaaaaattaattattttcactrtaagtattatataaataataaagatatttaggagggagtatatatgctaataggaaataaatgttttgcctcccaggagatcatcttagctggtacagtg

SEQ ID NO: 132471 - DNA, 201 bp, Homo sapiens
agaagttcggagtcaattagattgatatgtttttactgcaattaaaaaaatggttttggaataggaacagctccggtctacagctcccagcgtgagcgacrcagaagatgggtgatttctgcatttccatctgaggtaccgggttcatctcactagggagtgccagacagtgggcgcaggtcagtgggtgcgcgcaccgtg

SEQ ID NO: 132472 - DNA, 201 bp, Homo sapiens
ttttttagattccacatatgagtgagatcatgacatatttgtctttctgtgcctggctttatttacttaacgtaatatccctgtttcattcatggtgttgyaagtggcaggattttcatttttttttatgactcaatattattccgttatgtatatatattgcatttaaaaaaatccatgtatctatcggtggacacttag

SEQ ID NO: 132473 - DNA, 201 bp, Homo sapiens
aggtcataaagatttactcctacagttttttctgtaagagttttgtagttttagctcttacgtttatatctgtggttcattttgtgttaatttctatacayggtgtgaagtaagggtccaacttcattcttttgcatgtagatatctagttgtcccagcatcatttgttgaaataaccattctttcctcattgaattgtct

SEQ ID NO: 132474 - DNA, 201 bp, Homo sapiens
tgacatgaaatttagatcgaagtgcatgatttagagtgtgtttgcttactttgggtgaaaagtttagaaacacattgaattccttagaattctatctatarctttttttttttttttttttgagatggagtctcaccctgccacctgcgctggagtgcagtggtgcgatctcagctcactgcaacctttgcctgcctccta

SEQ ID NO: 132475 - DNA, 201 bp, Homo sapiens; identical to SEQ ID NO: 23207

SEQ ID NO: 132476 - DNA, 201 bp, Homo sapiens
accaagagcttgtgtctggcagagccggtatgagatgagacaatgctgtcccacctccgggataaccaggagttttggccagacttttgagcacataccgrgagagtgaggagccagatgacaagcacatactatggcactaagacagattaataaggaacttagtgatttggcccatgaccctccagcacaatgttctgc

SEQ ID NO: 132477 - DNA, 201 bp, Homo sapiens
cattcagaaaactcatttttaagatgatgttcttctagaaccactcttgctacgaaaacctgacagcacagtccccaggctgtttgttagggtctggcatraattcttggaaaggcaaaggagaatggtgagagcgtgtgtaactgtctgtctgtctgtccatcccagttggttttcactgtgctttggtggctgcatatg

SEQ ID NO: 132478 - DNA, 201 bp, Homo sapiens
ctttgtcatccccccatggcagcccctctgcctctggagaatcccagagcttggggaagcacaggatggaaaccaacccatcctggcactgcctccccctstgcccacctcccctgcaaagcttgcaatgcgattggtcctggtgtagcctccgtgttgagttgtaggggaaagggtgtttagtaagcaggcatataccca

SEQ ID NO: 132479 - DNA, 201 bp, Homo sapiens
tctggtgcagctttcattgtgccgccttcttcctctgaagccttcagtgactccctcttgctcagagaatcagcccaagtgtcagaaccctccacgacgcrgcctattcctgctgccccagcccagacttgcattgtcatctcagccagggatgccctccctttctttccctgcttctagaagcttcatcacccttggtgg

SEQ ID NO: 132480 - DNA, 201 bp, Homo sapiens
gattgtctttgtgaacaggaagatggaagtccctgtctctgatcccacccttgtctctctctcagatttatgaagtactgagtgtgatccgggatattggygccatagcccaagtccacgcagaaaatggcgacatcattgcagaggtacagggctttctttttcgtcatttcttcatcacctggagggtgagaggcaggc

SEQ ID NO: 132481 - DNA, 201 bp, Homo sapiens
atttagagaagtgcagaagggccaattaagcccatttcgtggtttattattattagtggtaattatttctggcatgcagttcaagggtgtctgtggcctgkctgagctccggaagtgcatccacagcaccctcctgtgaatgtttatagacccaggaggggagccctgggttgggagctccagaccactggggatgggagg

SEQ ID NO: 132482 - DNA, 201 bp, Homo sapiens
ggtggtggctatggcagggcttggacaaattacatgtatgggggagtagccccttcaccccagttttgctcctgaccgttgaagctttttatattgacccrtggctactgtggtattcgaagggctaaatttgttttgtgacttttgccttcagcagccatcgcattacatcatctaccttttcttgtgttcttctgtcgt

SEQ ID NO: 132483 - DNA, 201 bp, Homo sapiens
cttttatcccacagcccaggtggcattcagccttgcgtgtggttcaatcaaggcccctctgtctcttacattttcctatttcctgccgcctgggcagcctyactcctcagaggcactctgttaatgcccatgggtgaatgaatgagtgagtgaatgaatgaatgactgaatacactgacgatacttgatatcctgcttcct

SEQ ID NO: 132484 - DNA, 201 bp, Homo sapiens
acaacatggagaaatcacatggtcccagcaccacagtggacccagcagtcattcccccagtgccttgggcttgtcccggctcttcctactgagcctccccwtggaggcaggagggctgggaggaaggtgaggtggcttcctgaagggacgtggctcctgaatgtcactgcggtacatccacggcttgtcatttgttcatcc

SEQ ID NO: 132485 - DNA, 201 bp, Homo sapiens
ttgtgctattttacactcccaccagcagtgtgggagggccccggtttcttcgcatccttgccaacacttgctattgtctgtcgttttgattatagccatgsgagtgggtgttaggtgctgtgtcattgtggctttaattttaggctttattttgaggcccgtgtactcattcactgacccctagtcacatttatcttgacc

SEQ ID NO: 132486 - DNA, 201 bp, Homo sapiens
ggaagaatccatccaccctcaggtgtcactgcgtgaatctcggccttgaacggctggactggaagaatccatccaccctcaggtgtcactgcgtgaatctyggccttgaacggctggactggaagaatccatccaccctcaggtgtcactgcgtgaatctcggccttgaacggctggactggaagaatccatccaccccct

SEQ ID NO: 132487 - DNA, 201 bp, Homo sapiens
ggcatgaatgccagtgacacacgtgcctctccgtgtgtgccacagaacatctaagtcagttactattgcagagagaggccatttctctcggtgctgtaacrcagctgccttgggtggggtacgggaaccctcacgtcacacacaggcattttacaccgtggctgagggttgcaaatgcaccagtcgtcagcatcccaggga

SEQ ID NO: 132488 - DNA, 201 bp, Homo sapiens
ggtagccactggtctccatggccactatgctttgaacatacctttgctgcagggccgatgaaaagttggacgttagctatcttcatctcaacctactcccygtcaagtcttgctttttttttttttgagacaagagtcttgctctgtcacgtaggctggagtgcattggtgctatctcggctcactgcaacctccacctct

SEQ ID NO: 132489 - DNA, 201 bp, Homo sapiens
gcagaactgctctggttggaatggtgggtggcaggtgggctgtgggggagtccagatcctctccgctttctctttgtcatccccccatggcagcccctctrcctctggagaatcccagagcttggggaagcacaggatggaaaccaacccatcctggcactgcctccccctctgcccacctcccctgcaaagcttgcaatg

SEQ ID NO: 132490 - DNA, 201 bp, Homo sapiens
ttttaatccctatacagtgaagtaggcactgttgccatttctattttgcagatggggaaactgaggcactgaggagttaagtactttgcccagggtcctaraactagtcagtggtagagccaggattctacccagacaggtgagctctggagccaaagccctgagcatctgtagtagattccttgtggctttctgtcctgt

SEQ ID NO: 132491 - DNA, 201 bp, Homo sapiens
ggaaatttggaagaaacctataggttcttccacagggaaattgttaaggaaatgatggtagattctccgcaagaatggctcccattaaaaattgaattagkaagactctaagataatgtggtattaagaaaaaaactccatgattaaaaatgagcatgggccaggtgtggtggctcacgcctgtaatcccagcactttggg

SEQ ID NO: 132492 - DNA, 201 bp, Homo sapiens
aggaagactgaatgctgacggacgggaggaaggaagtcaggagaaagggagaagggctggccaggaaggaggagagaggaaatgacagaggagagggagaratcaggagccccatgcctgccagccagggaaggccctgctgttgcactcttcagaaccccaacttgggacattttgaatagatgttaggagtgtgagtgg

SEQ ID NO: 132493 - DNA, 201 bp, Homo sapiens
tccagaactttatcatcatccctaactgatcatcatccctaaactgttgccattaaacactaactccccattcccacctttctctagcccctggtggcccstattctattatagttgtttctatggatttgactgttctaggaacctcatgtaaatatatatgcttatgacattgcagaatggccccaagttcacctatgt

SEQ ID NO: 132494 - DNA, 201 bp, Homo sapiens
acctgctggcccacggcccttgaggctcttggtgatgatgacatatgtctgtttctttctagttgaccacgttgttcctgagcctgggacaagcctgctcrctgcctttgaccagtggagggaatgggccgacagcaagtcctgctgtgactactctctgcatgtggacatcagcgagtggcataagggcatccaggagga

SEQ ID NO: 132495 - DNA, 201 bp, Homo sapiens
ggataaaggtagcggctcgtggggtgggctgagccacattctcatgctctgctgctgttttgcaggtcgaggccgaagccgtgaatcgtgccatcaccatygccaaccagaccaactgcccgctgtatatcaccaaggtgatgagcaaaagctctgctgaggtcatcgcccaggcacggaagaagggtgagtgctgtggcc

SEQ ID NO: 132496 - DNA, 201 bp, Homo sapiens
gggaatgacgtctgctgatgatttcttccaaggaaccaaggcggccctggctgggggaaccactatgatcagtaagaagcttaaaaatcatcattgtagtrcttaggaagtgtgagagtttgcaaataagtctattgtttgattctctccttctaaaacttgctgtcctgagccacagttcaatctaccaaataagggggt

SEQ ID NO: 132497 - DNA, 201 bp, Homo sapiens
ctatgggtgttttacatggagagtcacagcactgggggtttcccagagcctagactctgacttgccctaaagctgggtcacacagactattgggaacttcytgtcgatcctgctggcctgattgacagctggaaccgggagtggaggtggggcccatgggaatgctaggctccagcaagttctgcctgacctttggatgtg

SEQ ID NO: 132498 - DNA, 201 bp, Homo sapiens
gaaaatcttgccctggttcatgtagcctgtgggaattagaaaccatgattccaggctcctggccacctctctttccatggagggccccttgtggggatttmttctctagaatgggctccctctgaccacattttgtccatgtgtgaaatccagcatgactgctgatgccttccatgtgtgagtggtggccgtgggcagtgc

SEQ ID NO: 132499 - DNA, 201 bp, Homo sapiens
tactgcctcgggtgcaggagggggtggttgggatcctttcagacttgaggggaagggatgaggctggaagaggagaaaggagtcaagacaggcagaaagaygagagtgggagccactcggaatgctttgcacacagtcagggtccacgctttgttctatccttcttgctgcatgcatatgcacacatagacacacatgtac

SEQ ID NO: 132500 - DNA, 201 bp, Homo sapiens
ccccacctggccctgggagctggcagttacagtgctggaaatgagcctgactcactggggtggtgatcttccaccccttcaggtgccctcatcccagttcytactctgcctatgggtgttttacatggagagtcacagcactgggggtttcccagagcctagactctgacttgccctaaagctgggtcacacagactattg

SEQ ID NO: 132501 - DNA, 201 bp, Homo sapiens
cctttagccatgggcaccccggcttcctctccgtgcacaagggcacacccatccgcaggagagagaaggggagcaaatgcataggggagggggcgtgtgcycggaggattttctaggatgatctgaagaagggcgctagcttcttcttgaaggcaaaagacccaagatcccaaagggccgggcacggggcacccacccttg

SEQ ID NO: 132502 - DNA, 201 bp, Homo sapiens
gctctgtggctgttcagcaggatggcgtgttcagccggggagtggtgtgtcatcaacccaatttggcagctgaggcaatgaacacagagccaggaccagamgacctgggggcatttttactcttgaaaagaacttagacattgatcaacttaataggctcatttcatggaagaagtagaaatgcagaaattgaaaatcttg

SEQ ID NO: 132503 - DNA, 201 bp, Homo sapiens
atggcccggccccggccagacaatgatcgcggcggccggagggctcggcgcagtgctggggcctggacttgttggtttgcaaaccacggggaaaacgtctrtgccgtgaattagcgatgcctcagagatcagcaccagtcttgctcccacctctcccctgctccctccctctccccatcttttcctggaaaaattcgttcg

SEQ ID NO: 132504 - DNA, 201 bp, Homo sapiens
tgctgctcctcccctccaccctccctaaccctggaagaacccatctagcccctcatctgttctccatctctaccattttgttatttggagaatgttatagraatggagtcatacagtgtgtgacctttgagacggtttgtgtttcacttggcacaacgctcttgacatccatctaagctgtcgtgtgtatcaatagtttgt

SEQ ID NO: 132505 - DNA, 201 bp, Homo sapiens
cgaattacagtcacagagacacagacggagggagagccccagggtttctaaaaagaacttgctgtgatgggaatgcgctcgactgaggatgttatgatttkcaatttgctgggaaaagaatagttatttcattttctttagtgaggtcaataagattgttactctcataatcattttggaataccacagcctctctatcta

SEQ ID NO: 132506 - DNA, 201 bp, Homo sapiens
tgggaatgcgctcgactgaggatgttatgatttgcaatttgctgggaaaagaatagttatttcattttctttagtgaggtcaataagattgttactctcayaatcattttggaataccacagcctctctatctatagacctttagagcctctaaagtgatgtcaggatgtgcaaagcttccagaagtcaggcaccgctcca

SEQ ID NO: 132507 - DNA, 201 bp, Homo sapiens
gtctgggctttagagcttagagatgtcctctcttgttaacaggacccagggcaagtctgttaatgtcttacgctcctcagctgagagtgaggggttcagamgaggtctccaagtgtcctgtgattctgtgaggtcagcagacattaagcagagttgttagacactgccgattcctcacaagcaacatggtataggcagaaa

SEQ ID NO: 132508 - DNA, 201 bp, Homo sapiens
gagtttgtcaagagggatctgttgtgtgttaaaccctgtgtgggtgataaagagaacaagtatggaacaattttgtgtgaattttagcttcccagtctacytggggaggtgctgctgatggaatgaaacacatcccagtgtaacttctctgtagtttggtgacctatccatcactagcatgatggttctcttggatttgaa

SEQ ID NO: 132509 - DNA, 201 bp, Homo sapiens
gcttctgcatgactgctttgagactcagagcaatgtactgacagccctcgtggttgttttcacccaacattgtatgcggggcattgtgcatttacatgccygatgtgagctgctgagctggccgaatccgtgttaccagccgctgcactaagcagaaatgtcatcttgaactgcagggtgctagcacagctctctgttcag

SEQ ID NO: 132510 - DNA, 201 bp, Homo sapiens
tggagggcttggtgacctctctcctccctcatgctccatgggtataaccccaaggtgggatcacaggctgagtgaaggctcctcatcctccctcctccctyctattccacgtgtgtaatcccaagatgggatcagagggcagggtggagggttacacatcctctcccctccctcctgctccacgtgcgtaacccccagctg

SEQ ID NO: 132511 - DNA, 201 bp, Homo sapiens
accccaagtcacccattaagggctgtttctccctttttttttcctcttcctccccaagctgacctttctctcttcttaagaagtgattactgatttctttrggttttgagggttctgtctttgactctccgtgattgttgggtgaagccatttgcttaaattccttgcttttagagcgtcttaactgccatggtaatgata

SEQ ID NO: 132512 - DNA, 201 bp, Homo sapiens
tgcatttacatgcccgatgtgagctgctgagctggccgaatccgtgttaccagccgctgcactaagcagaaatgtcatcttgaactgcagggtgctagcacagctctctgttcagaggccagctccctgagtgctgataacctggtctgaactttcccagaagcccagggtgctttttatggttggagcaacctattaatc

SEQ ID NO: 132513 - DNA, 201 bp, Homo sapiens
ttcctgagcctgggacaagcctgctcgctgcctttgaccagtggagggaatgggccgacagcaagtcctgctgtgactactctctgcatgtggacatcagygagtggcataagggcatccaggaggagatggaagcgcttgtgaaggatcacggtaggttgcactgagtcaatgccctctgcagatgtttccgcttcagtc

SEQ ID NO: 132514 - DNA, 201 bp, Homo sapiens
aaattaactagccctcaatcattttatcggaggcatgtctcttcagtgaccacaatcctttcatttagggacttcagtttaaccacaccgcaaacagactrgaaaaccaggctagccagtgggaaaacctacttgtggatggctcatttcaagattaaatttagaacttggtcagagaaggcctttggaattcaaccggaa

SEQ ID NO: 132515 - DNA, 201 bp, Homo sapiens
taaggacccagaggagggagccactgctgtagttggggagagtgtcatggggagaggacattttgagttgggctttgaaggttaagtaggagtttgtcaartcaaagaagggagatgagggaatttgataagagtatcatgagcatagaaaatgtacagtgtattcagggcatgtgaagcaggaaagagatggagctataa

SEQ ID NO: 132516 - DNA, 201 bp, Homo sapiens
atctttaccacctcaaggtgcctctgggactcttgtcaacaagaacctcgggggtttgcggggaagagccaggccacatcatcttcctgggtctcgctggrcttggctagagaccagattaacttcactggatcttagtgttcagggaaacacctattgctttagggttctggggacttccaggcttagaaacaccatgtg

SEQ ID NO: 132517 - DNA, 201 bp, Homo sapiens
ggccattgctgtgctgttgaattcaagcccctccgtttttcatggtggattccttgcattgtctgctaggggggttgcattcctcgctgaaccagacctcygccctcttccccgctgccttgcagtttgctgagcttccaggcagggctgcagggtcgtgctgctggaagtattggtgacaaattcttccccagtgggtgt

SEQ ID NO: 132518 - DNA, 201 bp, Homo sapiens; identical to SEQ ID NO: 23211

SEQ ID NO: 132519 - DNA, 201 bp, Homo sapiens
tgggtatgttcctgggccctctctttttttgtttttgtttttgtttttttttgttttgagacagagtctcgctctgtcccccaggctggagtgcggtggcrccatctcagctcactgcaagctccgcctcctgggttcacgccattctcctgcctcagcctcccaagtagctgggactacaggtgcccgccaacatgcccg

SEQ ID NO: 132520 - DNA, 201 bp, Homo sapiens
gaactgaaagcaaagggaggacccattattagccagttctggcagaggcgagcagcttctttgtgtggacaggcatatctcatgcctttttgcttcagctkggagtttgttttttttttaattactgttatttatttatttagtaccttagctcattagctgcagaaatcacaggggatgaaaaagcaggtaggatgggtc

SEQ ID NO: 132521 - DNA, 201 bp, Homo sapiens
ttaccatggtaactgttgcctggcaacgggagaagggccaggatgtccagaggcatttaactcaggcagctcccagcaccccccaggtggcttgaattaarctccaaggctgcgaggttgtcaggacaattgtttaaaattgtgatgaatgttgggcagggatgtttggtctggtgcctagggaggcaagaactccaagac

SEQ ID NO: 132522 - DNA, 201 bp, Homo sapiens
atggaataatacaatatgtggccttttatagctggcttctttcccttagcataatgttttcaaggtttatccaagttgtaatatgtatcaatacttcatgmctttttatggtcgaataatattacatttatgagtagaccacattttgtttgcccattcatcgatggatggcatttgggttgtgtccactgttttggctat

SEQ ID NO: 132523 - DNA, 201 bp, Homo sapiens
gcttgggcacagcattggtggcgtgttgttgtgtcactttgcacagttagatggggcttcagccctctttgtaggatgaacgtttaggttcttgtccaaaygaatacacttctatatcctactaaaaatgattgcaggacagcagtgcaaaccagggctgtcctaggcaaacccaggcatctgtcactctaaaggacacaa

SEQ ID NO: 132524 - DNA, 201 bp, Homo sapiens
gccggactggctgatggcaggtggggaggtttggaggggaggggggctcctcactagggagggctccttttccagaccctcatgccaagtgggccacttgyaccatgttctggcattaacctaattacagcagggcaaggcaggagctccagtttcctcctctgctccactgctgcggccttgttagtatctatttaaagc

SEQ ID NO: 132525 - DNA, 201 bp, Homo sapiens
gcatggaaggcagtctgtctgccaaagaaaagacatttatcacagttcttcataggcagaaacttctaattcattttcttgttacagtcgcaacagacttrtttggtagaggcagcttaaaaaattaactgtggtaaaataaatataacattcaagttaccatcttaaccatttttaagtgtgtgtgcagttcattgtttt

SEQ ID NO: 132526 - DNA, 201 bp, Homo sapiens
gtgggaggatcacttgaaggcgccaggagttcaagaccagcctgggcagcaaagtgaagccttgtctctaccaaaatcaatcaatcaatcaatcaatcaataactaaaaataaaaataaaaaattagctgggcgtggtgacacatacctgtagtcctagctgcttgggaggctgaggtaggaggattgcttgagccccaga

SEQ ID NO: 132527 - DNA, 201 bp, Homo sapiens
aagtgtgtgtgcagttcattgttttaaaatacactcataatgttgttgcaaccatcaccaccctccatccacaggtctctttatcttgcaaaactaaaacrctacactcactcattaaacactaactctccactgtccttcaccccagtccctggcaactgctgttgtactttctgtctgtgaaattgacttctagggacc

SEQ ID NO: 132528 - DNA, 201 bp, Homo sapiens
gacttacgtttaaaagactgggcctggaacaaagacagtacttgacatttatatatattttataaaagggggtgggctagcttgaaataagctcatagtgktgcgaaagcagggatattgaggcaggacaaagacaggattgtatatgactgttgccaagcaacctagatgtttgttatttaggtttgcctgggcaaaggc

SEQ ID NO: 132529 - DNA, 201 bp, Homo sapiens
ggtgggaggatcacttgaaggcgccaggagttcaagaccagcctgggcagcaaagtgaagccttgtctctaccaaaatcaatcaatcaatcaatcaatcaataactaaaaataaaaataaaaaattagctgggcgtggtgacacatacctgtagtcctagctgcttgggaggctgaggtaggaggattgcttgagccccag

SEQ ID NO: 132530 - DNA, 201 bp, Homo sapiens
tggcatgaatgccagtgacacacgtgcctctccgtgtgtgccacagaacatctaagtcagttactattgcagagagaggccatttctctcggtgctgtaaygcagctgccttgggtggggtacgggaaccctcacgtcacacacaggcattttacaccgtggctgagggttgcaaatgcaccagtcgtcagcatcccaggg

SEQ ID NO: 132531 - DNA, 201 bp, Homo sapiens
aggtgggaggatcacttgaaggcgccaggagttcaagaccagcctgggcagcaaagtgaagccttgtctctaccaaaatcaatcaatcaatcaatcaatcaataactaaaaataaaaataaaaaattagctgggcgtggtgacacatacctgtagtcctagctgcttgggaggctgaggtaggaggattgcttgagcccca

SEQ ID NO: 132532 - DNA, 201 bp, Homo sapiens
caagcacagacacgcataggtgtacacacacattttcacacacacatgcacatatgcgcttgcacacacctatgcaggcaccatccccctttgcagacacygcaagggttcgtttctgtggtttcacttctccctctgggccggcttctgtgactgccctcgccagattccccaggatccacctgtcgggtggtttaaacc

SEQ ID NO: 132533 - DNA, 201 bp, Homo sapiens
gaggtgggaggatcacttgaaggcgccaggagttcaagaccagcctgggcagcaaagtgaagccttgtctctaccaaaatcaatcaatcaatcaatcaatcaataactaaaaataaaaataaaaaattagctgggcgtggtgacacatacctgtagtcctagctgcttgggaggctgaggtaggaggattgcttgagcccc

SEQ ID NO: 132534 - DNA, 201 bp, Homo sapiens
agatccagggatgcaccagtatgggatgcagtttttcagctgatttagaggcccctcttgtatgccaggccctgagtccttttagccatatgacagcccartgaggcgaggaggggggatgcagggggtttgaaaggcttggatagtggcagagcgtgattagaactcaagcccacaggcacctgccggctgacgtctcct

SEQ ID NO: 132535 - DNA, 201 bp, Homo sapiens
aaagggtgtttagtaagcaggcatatacccacggagtcgcttaagaaaacacctaaccacactgtaagtttttagtagtttcgtttaatatccctctctctgttcaagacaggaaccagggtagagcacctgtttcattttccctgcctaggtttgggttggttttcttagctttttatgacagcccataataggtgagca

SEQ ID NO: 132536 - DNA, 201 bp, Homo sapiens
gaaagggtgtttagtaagcaggcatatacccacggagtcgcttaagaaaacacctaaccacactgtaagtttttagtagtttcgtttaatatccctctctctgttcaagacaggaaccagggtagagcacctgtttcattttccctgcctaggtttgggttggttttcttagctttttatgacagcccataataggtgagc

SEQ ID NO: 132537 - DNA, 201 bp, Homo sapiens
aggctgagctgccgtagggcttgacctgagtattcactgagagcaggcgctgtctaggcgtggctggcggactgtgtgctttgtgtgttgcttctgggggyggcatcttgaaacattacacttcctgggtcccaccttacctggttaaagtagcaaatctgctggtggggtctgtgactctgtattcgaatctggtgcttg

SEQ ID NO: 132538 - DNA, 201 bp, Homo sapiens
ttgaacctgggaggcggaggttgcagggagctgagattgcaccactgcactctatcctgagcaatagagtgagactccgtctcaaaaaaaaacaaacaaamaaattctcgagtgaatggtcagtgtcatctatcattggagagggaaatgcccccagccaggagttaggagtctggagtgctggcccccttctgacactga

SEQ ID NO: 132539 - DNA, 201 bp, Homo sapiens
ggagaatctttgaacctgggaggcggaggttgcagggagctgagattgcaccactgcactctatcctgagcaatagagtgagactccgtctcaaaaaaaaacaaacaaaaaaattctcgagtgaatggtcagtgtcatctatcattggagagggaaatgcccccagccaggagttaggagtctggagtgctggcccccttc

SEQ ID NO: 132540 - DNA, 201 bp, Homo sapiens
tttttttgtaaccactgtcttgatggcaaaataattatggtaaaaaacaagtctcgtgtttattattccttaagaactctgtgttatattaccatggaacrcctaataaagcaaaatgtggttgtttcaggggtgtgtctgtattgagatgttcgggaggcggctgcttgacttgggcctccaaccagacttcccctccac

SEQ ID NO: 132541 - DNA, 201 bp, Homo sapiens; identical to SEQ ID NO: 23225

SEQ ID NO: 132542 - DNA, 201 bp, Homo sapiens
ccagagatgatgacttccagacggacccagcgactcctggccctggttctttggagtgctcctggggcctctgtccttaggctacacatcaaatggttgcygcctttctgtcttctcctggcaccttgaaggaattgccttttagaaataagaaagcattcacctaaaataatgtaacctactcagaatgagctttgagtt

SEQ ID NO: 132543 - DNA, 201 bp, Homo sapiens; identical to SEQ ID NO: 23228

SEQ ID NO: 132544 - DNA, 201 bp, Homo sapiens
ttgtgttgatttggcaaaaaaattacaaatgtgtgtctatacacaaacgtatgtatgtaacttttataaggatctcaaaagaataaataaaataggccggrtgtggtggttgatgcctgtaatcccagcactttgggaggccgaggtgggtggatcacctgaggtcaggagttcaagaccaggctgaccaacatggcgaaa

SEQ ID NO: 132545 - DNA, 201 bp, Homo sapiens
cctcgttttccacccagaggattggaaaggacactagggagtgcagacatctggaactgaaccatctgtggctgagaggagtggcgactgagcctgcgtgmcaatccgggcagtgcctggcattgtggggatgcaaaacagataagaaagtgatcctttctgaagggactgtggacaaggcgaggagaaagaggtagacag

SEQ ID NO: 132546 - DNA, 201 bp, Homo sapiens
atttgattgaaggtacaaagtactgagcattgcctggcacataatcagtattaagtcccatcctgaagggccccttctagcctctcctgaaaagtgaaccytttaaagcaaaaggacttttaactatttggatgaaaaaatacctcttcaaatgtagtttatggttcttaaatggaggtcctttttggcacttttgtggag

SEQ ID NO: 132547 - DNA, 201 bp, Homo sapiens
tatatttcagctgttagctttttcattatctgaataactaaacacacgcttccaaaattttaaatcattgcaatcatagtgttcactttttttttttttttgctttgatttgttctacctcacccttccacccctattttccttctggtgaaaaggatatgataaaaataaatgtttggaaagtacggccaggtctggaga

SEQ ID NO: 132548 - DNA, 201 bp, Homo sapiens
acaaagtactgagcattgcctggcacataatcagtattaagtcccatcctgaagggccccttctagcctctcctgaaaagtgaaccctttaaagcaaaagsacttttaactatttggatgaaaaaatacctcttcaaatgtagtttatggttcttaaatggaggtcctttttggcacttttgtggagtttgggtgaggagt

SEQ ID NO: 132549 - DNA, 201 bp, Homo sapiens
ccgcctcagcctcctaaagtgctgggattacaggcatgagccactgcacctggccttgcctctcaccttttattatggattccagcagttagtgaggaaarcaccgcatgctagtccaggactgcgccatctcttggttgcatccaagaccctatctctcaggagaacaaggaggaattgtgagaattcatgcccaggcct

SEQ ID NO: 132550 - DNA, 201 bp, Homo sapiens
gagaacaagtatggaacaattttgtgtgaattttagcttcccagtctacttggggaggtgctgctgatggaatgaaacacatcccagtgtaacttctctgyagtttggtgacctatccatcactagcatgatggttctcttggatttgaactttccaaaacatgttcctaacccactaggcctttcttcccaacccaccat

SEQ ID NO: 132551 - DNA, 201 bp, Homo sapiens
acacaatagcaacataaaatataaaattactaggaattataagaatacattcttatatatggaatccaagaagagtcttaaataaattaaaagaaatgctrtgttagtgaacagaaaaacccaatactgtaaagaagtgtatactttagattaattttaaaattgaaaacctcaaaaggtggttgagtttttgttttgttt

SEQ ID NO: 132552 - DNA, 201 bp, Homo sapiens
gagaacaaggaggaattgtgagaattcatgcccaggcctagctgcctagaggcagagagaagggctctcagcccgatccccaactctggccacttttctcrcccactccctcccactgcgcccacttttgacatcctgcaccaccagtctcttgtccgttcggttttctggtcgtaaacctccacctagcctgtcctccgc

SEQ ID NO: 132553 - DNA, 201 bp, Homo sapiens
atctctgggaggtgctgagggttctagtggagtccatctcacacttcacacccatgcaagacgtccctgtccccgcctggtgctgccgggccacaggcatstctgctgtaagtggagagagagggcttctccttcagctgtcttaggaatgaaaaacatttgggtgtttaatatgctttttcaagagccctttgcttggat

SEQ ID NO: 132554 - DNA, 201 bp, Homo sapiens
attaaaccctgggaacctcaatttgagataagacctcttatgtcctgtgggtcaataggagtgactcaaacgttatgagaagcacatggtcgcagggcctstgaggaccacctcagcttggggatgagtccttagttaagcttatgcttgatgttgcaatcttgaacagaaaagggggatgagagaggagagaggacagta

SEQ ID NO: 132555 - DNA, 201 bp, Homo sapiens
tgttggaggattcacttttatctgttttatttaatttcttttatataaataatacttcaggcaaatatgataaacttaataaatgtcaattctgagggggraagaataaaggagttaaataagtagaagttgtaatacccagtgttggctaggttgtggttaaatgaacactcaaactgcggataggtatttacattggca

SEQ ID NO: 132556 - DNA, 201 bp, Homo sapiens
acgcctgttatcccagcactttgggaggctgaggtgggtgaattgcctgacatcaggagttcgagaccagcctggccaatatggtgaaaccccatctctaytaaaaatacaaaaattaaccgggcatggttgcacgcctgtagttccagctacttgggaggctgaggcaggagaatcacttgaacctgagaggtggaggtt

SEQ ID NO: 132557 - DNA, 201 bp, Homo sapiens
attgtcttttagatatgaaaattgctgacacccacagctgggtgccccttacgtattgctccaagggctttgtgctttttttttttttttttttttttgaracagagtttctctcttgttgcccaggctggagtgcaatggtgcaatctgggctcactgcaacctctgcctccccggttcaagtgattctcctggctcagc

SEQ ID NO: 132558 - DNA, 201 bp, Homo sapiens
gctgtggctggccatgtctgtgcttcacacacagggggccattggtgtagacaaacggggcccactccgttcctagagccctgtgaggctgcattgtttcrtgggtgatgctgacttcattcatgagcatttaatgggagcccagcacaaactccacatcactgaatatcttgactcaagaccctgggagcagaatgaata

SEQ ID NO: 132559 - DNA, 201 bp, Homo sapiens
gtaattgtcttttagatatgaaaattgctgacacccacagctgggtgccccttacgtattgctccaagggctttgtgctttttttttttttttttttttttgagacagagtttctctcttgttgcccaggctggagtgcaatggtgcaatctgggctcactgcaacctctgcctccccggttcaagtgattctcctggctc

SEQ ID NO: 132560 - DNA, 201 bp, Homo sapiens
cactatcacatccagatgttttggtgtttgataaactctcttgatgcattctgaactggggctgggtctctggtattactagggtgtccactgtaactaaytgatgaagtgcagcttccagtgcttcctctagaggacgccccatgaggcacctcatgcattttgaatgcagctgagccctgttgtcacccaccgctgaca

SEQ ID NO: 132561 - DNA, 201 bp, Homo sapiens
gggatactttgcatctggactgttatctcttacccacatcattcttgaggacgaagagaaaatacctgtgaggaagtatttacatttgttacggtggtgcwgggctgagtttgtgtggaccctggactcccagctgtccacacagttataaagagtaattaaaagctccctgaacaacaggtcccttatcagccttaaacc

SEQ ID NO: 132562 - DNA, 201 bp, Homo sapiens
ctctttgcaccagcttctgcatgggagactttgagcaggccaggagccaaggggaccctcctaggccttccgagcacctagcactggcccttttcttcctyggggcttccttctggaggaggtttccctgggtttggagtcctccctcctgctgggggtgggggcgtggttgctggtggcctggagtgagctgcctgctgt

SEQ ID NO: 132563 - DNA, 201 bp, Homo sapiens
ggtttgtgtgtagaactcagtaagaagtaatcatgaccctgtccgttcatttgctctttgttctttcctgttattaacaatggctttggggcttttggggmgcatttagttctgcacgttgtgtatgtaagtagatgttcttctgtgggggctgcaagtccttaagttatagttggattcccttcccagcaaggaaccaac

SEQ ID NO: 132564 - DNA, 201 bp, Homo sapiens
tgatttttgatagaatgagagatgaattgatttgttcctgatacattctgttgggatacagtccatttgataggaaggttgtttacatcacagtgtcctgyatttgggggctgccctgggatgtgaaaagtctgtttatgtctgttgacagagggtctctatgcttcttccttttctagcatttactcttatgttacaatt

SEQ ID NO: 132565 - DNA, 201 bp, Homo sapiens
ggatgatctgaagaagggcgctagcttcttcttgaaggcaaaagacccaagatcccaaagggccgggcacggggcacccacccttgtgtgttcactgtgcwggaggaaggagtggtgactctggggagggaggatggaaagcagatttgcagcaagcctcaaataatttgctgtcttcgtgaatgaacaaggcagcttcat

SEQ ID NO: 132566 - DNA, 201 bp, Homo sapiens
gtttttagggctggatataaggacgctctttggttctggttttccctttagccatgggcaccccggcttcctctccgtgcacaagggcacacccatccgcrggagagagaaggggagcaaatgcataggggagggggcgtgtgctcggaggattttctaggatgatctgaagaagggcgctagcttcttcttgaaggcaaa

SEQ ID NO: 132567 - DNA, 201 bp, Homo sapiens
ggccgcgcctggggccgccgccaaacccggtccccaccgccccggcccgaagaaagcgcgcgaaaggcgcgctcccagcgcgggcgctcgcgccgcctgcygcccccggccgttcactgccgcatttcgcgctctcgcgccgcgccccgccccaccggcctaaatttgcatatcccaggatcgcggccaatcgctgctcgt

SEQ ID NO: 132568 - DNA, 201 bp, Homo sapiens
tcttttttttctttctttctttctttccttccttccttccttccttccttccttccttccttccttccttccttccttccttccttccctctctctctctytctttctttctttctttcttttatttttgttttgggtgttgatgaggggacatacaacttaagaagaaaaattggaattattttgtcaacttttctacat

SEQ ID NO: 132569 - DNA, 201 bp, Homo sapiens
gtttgtgttatctgctctgataggtggttttacttgcatttgatttttgatagaatgagagatgaattgatttgttcctgatacattctgttgggatacartccatttgataggaaggttgtttacatcacagtgtcctgtatttgggggctgccctgggatgtgaaaagtctgtttatgtctgttgacagagggtctcta

SEQ ID NO: 132570 - DNA, 201 bp, Homo sapiens
tgtttacatcacagtgtcctgtatttgggggctgccctgggatgtgaaaagtctgtttatgtctgttgacagagggtctctatgcttcttccttttctagyatttactcttatgttacaattagtgcctgcttgctgtgtgaacaggacagatttgtcttgtttgtttgggtcgtatgcagtttcatgcagaagacttagc

SEQ ID NO: 132571 - DNA, 201 bp, Homo sapiens
cccacactgagccaaggatttcaacatctcttggagaaattctgcatggacctgaagtttgaagctttgcattgtaaccaagttggctctccttgccttcyccccaggccacgatttcgtcatcctgctttacggatggcatttcctattaagtgtctgtctgtgaacataaacatggagctgagacaaagcacagcttct

SEQ ID NO: 132572 - DNA, 201 bp, Homo sapiens
gctgcatggctgtattcagggagcaccatttacattctactgcccatgagtggtggtaccagagctgtgctgcagtgggctccttggttatctctctttakatgaggacactccagaagcatgaagttaagtgactgcccagttatcaaagcagagagctagaaagtgcagggtcctgcctgctaccccaacccctcccgc

SEQ ID NO: 132573 - DNA, 201 bp, Homo sapiens
ttacggatggcatttcctattaagtgtctgtctgtgaacataaacatggagctgagacaaagcacagcttctccctggacccggaaagagggactcaggcscctggggctggggcctggctccagacctgctgctgctgcctggcctggttcggggatgcctagcctaacaaggcagcctgggctgggaatcgcttaggcc

SEQ ID NO: 132574 - DNA, 201 bp, Homo sapiens
gggaaggaaaaacagggacgaggtgatgagcagaggaggaaggcggggggcaaggcgggggcttcttgttggccaggaaccggttttgggtgcccccccccggttttctcgccctgtagttcggggctggggccctggcggggattcgggctctttttcacgtctcttttccgccccttctgccgctcaggaggcgtccgt

SEQ ID NO: 132575 - DNA, 201 bp, Homo sapiens
taatcatgtggttgtaaaattgtcagtaacttctttgtatggctagttgatctgatctctcatgtaggactcagtcccccagttggatcttggaaggtagmcatttatttgaaacagacagcctggtagagtgaaaagagctttgtgttttaccccctcagatagtaagcaaagaaaatggaaaaagcagcgctgtctggg

SEQ ID NO: 132576 - DNA, 201 bp, Homo sapiens
cacatccataggcacagacatgcacgtgtacacacacagacacattttagcatacgcacatgtgcacaggcacagacacgcacatatgtgttgtacccacrtattttcacatacacatatacacatgtacaagcacagacacgcataggtgtacacacacattttcacacacacatgcacatatgcgcttgcacacaccta

SEQ ID NO: 132577 - DNA, 201 bp, Homo sapiens
tgacacatttggaacataatgtggccatctgtatgaagaaccatagttcatccagtcatcccaaccctaggactctccagagaaaaccgtttaaaataggrggaaagttatttgcatgaatatgttcataagaacattatgtataatagaggaaatttggaagaaacctataggttcttccacagggaaattgttaaggaa

SEQ ID NO: 132578 - DNA, 201 bp, Homo sapiens
ctttgggaggccgaggcgggtggatcacttgagctcattatctgatgccctgaattggctttttctcatgcacattaggttaaggtcagtagttactcacktaagttacccattgcatgtgtttccagtgacagaaaaggatttagggatggatcgttgaggtgactgctatgcatagaaatgcctagaaggaggcggtgg

SEQ ID NO: 132579 - DNA, 201 bp, Homo sapiens
cacttaagttacccattgcatgtgtttccagtgacagaaaaggatttagggatggatcgttgaggtgactgctatgcatagaaatgcctagaaggaggcgktggtttaagctgtagaaggaggcaggtgccaagtgctcccagtttggggtttgagctcccacattctgtctgcacagcagcaggcaagtcccgtggcctc

SEQ ID NO: 132580 - DNA, 201 bp, Homo sapiens
tgcctaccttgtttgagcatcagatgagataaggtacgtgataacactttgtgaatcacttaaaaacactatgtctatgtgaggttgatattattgctatycaataaatgcaaacgtgtaggaaattataaaatgattcaactgttccattcctgtttttgaaactttctgaagagaggtggatatgtttccctgaggtgg

SEQ ID NO: 132581 - DNA, 201 bp, Homo sapiens
gtgaggttgatattattgctattcaataaatgcaaacgtgtaggaaattataaaatgattcaactgttccattcctgtttttgaaactttctgaagagagrtggatatgtttccctgaggtggggagctagggttgtgcctgtgttcatccaggaaaatgggatgaaaagcccaagatacatctgcgacatcatcttcaga

SEQ ID NO: 132582 - DNA, 201 bp, Homo sapiens
ggagggtccttcaggatcattttatccgtatccctttcgtatcttttagtgagtttttgttttccctaactggattgttggcattttaagggcacagtttrtatcttctacctctttgtttcctccaaagttggccgatcaccagatcacttaaaggaggttgtttgttttataagcgttttaccagatcttggcttaaca

SEQ ID NO: 132583 - DNA, 201 bp, Homo sapiens
acagacattctaaatagttccagctcttaggaaaatgcttctttagcattgcgggagaaacagtatatttgtacaaggcaagtagttcaccctgtaaggcrgcacgtgctttggaggcacctaaatactacacagtgttttatgcatgggcgtttttcttacaaaggaacatagctttatcttcctgggggtgtttatcaa

SEQ ID NO: 132584 - DNA, 201 bp, Homo sapiens
tactcagttaatcctcgtctactcttggaaatgggctcaatttccttaaaagtgtcttttagggctctctggacttagcatgtcttctactgccagcttcyagtaggcctgctatgaacatacactgacctttagaggatctttgggctttttcattttaatgttttaaaatatattaacagaataggttttctgtttttt

SEQ ID NO: 132585 - DNA, 201 bp, Homo sapiens
gtatccctttcgtatcttttagtgagtttttgttttccctaactggattgttggcattttaagggcacagtttgtatcttctacctctttgtttcctccamagttggccgatcaccagatcacttaaaggaggttgtttgttttataagcgttttaccagatcttggcttaacacttcccccagagttagtcataatcatt

SEQ ID NO: 132586 - DNA, 201 bp, Homo sapiens
ttgatttatatgaagatactggtttagttttaaaagcaaacttacattgaacaaagtgtaggaaagagaaaggagagggctactcaagtgcctgaaggtcygagcagtgaagaacatgtttccatatgcctgccacccttaggctaaggacacggttttcctatctgtttattgaattgggtcacttgctttagttataat

SEQ ID NO: 132587 - DNA, 201 bp, Homo sapiens
gctcttcaagcatttcccatattccctcgtttacaacaccctggaaccctgagttaattattagtcccatttcatggctgaggaatctgaagctctgagartttgaacttcttgtctaaagtcacatggtgaggaagtggtagaactgacctggaccccaggtatctggctctggtctttccaatagtgcctcttcagtgg

SEQ ID NO: 132588 - DNA, 201 bp, Homo sapiens
taggcgtagtggcttgtacctgtcatcccagcactttgggaggccgaggtgggaagattgcttgagcccaggagttcaagaccaacctgggcaacatggcraaaccccgtgttgggacaataaatggagtagtcacctgtatctctgggaggtgctgagggttctagtggagtccatctcacacttcacacccatgcaaga

SEQ ID NO: 132589 - DNA, 201 bp, Homo sapiens
gtataaccccaaggtgggatcacaggctgagtgaaggctcctcatcctccctcctccctcctattccacgtgtgtaatcccaagatgggatcagagggcakggtggagggttacacatcctctcccctccctcctgctccacgtgcgtaacccccagctgacttacagactgtggtacctgctcaactgcttcaattccag

SEQ ID NO: 132590 - DNA, 201 bp, Homo sapiens
tgccaagagccttacctgccagaggcacgggaggtgtggctgttgcgcagcttctgtggcccaggccctctgcctggcacattttaagtaatgtgagcggrttacttaatcttactgtctgttcagctgaaaactagggccaaccctggctcagagctcagggggccgttgcgaggattaaatgagagaatccatggaaga

SEQ ID NO: 132591 - DNA, 201 bp, Homo sapiens
catcctccctcctccctcctattccacgtgtgtaatcccaagatgggatcagagggcagggtggagggttacacatcctctcccctccctcctgctccacrtgcgtaacccccagctgacttacagactgtggtacctgctcaactgcttcaattccagaactggaactgcagggaagctgtttctgacatccctggtttt

SEQ ID NO: 132592 - DNA, 201 bp, Homo sapiens
aggctgccctcttggaggggccgatagctcagggaggtcaccagaggaaaggcctgtgagctctgtgcaagtcattttcaggcttgtgtcctcagtggggrctctactccctccggaagtgagtatgacattctgccctattcccttggagcagctcttcccaggagagcttcagtggaaagaaaactgtgggaaaacatt

SEQ ID NO: 132593 - DNA, 201 bp, Homo sapiens
cttcagaatccccagcaactgattatggagtctccttgagggctggcagatccagggatgcaccagtatgggatgcagtttttcagctgatttagaggccyctcttgtatgccaggccctgagtccttttagccatatgacagcccagtgaggcgaggaggggggatgcagggggtttgaaaggcttggatagtggcagag

SEQ ID NO: 132594 - DNA, 201 bp, Homo sapiens
tgaaatttcctaatagcaagaccagcgaagcggttgcacccttttcaatcttgcaaaggaaaaaaacaaaacaaaacaaaaaaaacccaagtccccttccyggcagtttttgccttaaagctgccctcttgaaattaattttttcccaggagagagatgtcttatcaggggaagaaaaatattccacgcatcacggtgagt

SEQ ID NO: 132595 - DNA, 201 bp, Homo sapiens
gtctgccttggcctcccaaagtgcaacggctatatttctgacatatacaaatccaagcccagttgatcagaatttagcagtatctgcaagatttgaaccayttcagaaatctgagctctctagcattacatggactgatgttttcttagctcagaactgcttacctgtgtgtagaaaatctaatatttaggaagaataatt

SEQ ID NO: 132596 - DNA, 201 bp, Homo sapiens
tatccccgttttaaagcagcacagaaattagggcagtggagattaaggagtttaccccaggacaccatgcaggtgaatgatggagccaggaaaccaactcrggtcagcttgcatccaaagtcctcagtcttccagatcagcgtacctccatagtaatataacaatgactgcagttttaaaacactttgaactcttaagatg

SEQ ID NO: 132597 - DNA, 201 bp, Homo sapiens
tgacccatgagtggaggaactttcagttctaaagctgataaagtgtgtagccagaagagtacttttttttttgtaaccactgtcttgatggcaaaataatwatggtaaaaaacaagtctcgtgtttattattccttaagaactctgtgttatattaccatggaacgcctaataaagcaaaatgtggttgtttcaggggtgt

SEQ ID NO: 132598 - DNA, 201 bp, Homo sapiens; identical to SEQ ID NO: 23219

SEQ ID NO: 132599 - DNA, 201 bp, Homo sapiens
gaaagattggaagtcaggcccacagcagctcgaattattccgtatttatctagctaagctttgctgagcaggtgtgagccaattacatactctttcttccyccaccccccagcccatgattacgtagggattctatgtatccttcgacctcaagcagagaagcccgagcgctacgagggctggtccagatgttttagttat

SEQ ID NO: 132600 - DNA, 201 bp, Homo sapiens
ccccccggttttctcgccctgtagttcggggctggggccctggcggggattcgggctctttttcacgtctcttttccgccccttctgccgctcaggaggcstccgtgttggtgcatacaaagcggactgcagggtgggcgcggggaccgcggcgagcggccgggcgctaatggcgctgcgcgacgcgggagcagatggccc

SEQ ID NO: 132601 - DNA, 201 bp, Homo sapiens
agggaaattcattgttatataaggatgtgcaattgcaaccggccagctgattcccgggtagaacctaggactgaggcagagatcgaaagagccttttaaarcagtcaggatgtgtttttagggctggatataaggacgctctttggttctggttttccctttagccatgggcaccccggcttcctctccgtgcacaagggc

SEQ ID NO: 132602 - DNA, 201 bp, Homo sapiens
gacagtgaggaggctccagaagcccgggagggaggagcttggcaagagctccctgcagggctgtggccactgagtcactgagtgtcagcaccgtgccaccmccctgagtttgggatgtggtcatgttcataccagtgtgggaggggagccggtccctgtgataaggaagtggattcaggagggcttggaagcaaaggcacc

SEQ ID NO: 132603 - DNA, 201 bp, Homo sapiens
ctgtcttcgtgaatgaacaaggcagcttcattttgacagtgtggggagaaaaaaaaaattaaaagcaaacgatcaacaagacttttttttttttttttttttaaagagcgcccccccccccacaccctttaaaaaatctggttgcattatcataggacctatagcatggtattcctccctccctcaccactggcagcctct

SEQ ID NO: 132604 - DNA, 201 bp, Homo sapiens; identical to SEQ ID NO: 23216

SEQ ID NO: 132605 - DNA, 201 bp, Homo sapiens; identical to SEQ ID NO: 23218

SEQ ID NO: 132606 - DNA, 201 bp, Homo sapiens; identical to SEQ ID NO: 23220

SEQ ID NO: 132607 - DNA, 201 bp, Homo sapiens
ggagttctctcctcgtacagaaagcctgagggcatgtcgttcattttgatggtggatcttaggctgatctgaaatgaacattataaaagggtccccttctyccttcctttctcccttttatgttccctcctcccctttgcttgttgggatctctccatctctgtgtctccacttctcttcccttctttcctgatttctgtt

SEQ ID NO: 132608 - DNA, 201 bp, Homo sapiens
tctcagttttttaaacatttctcatatatgagggtcttggactagatgtcctctaagattctttccagcacaaagcttccacataaaagaaaataggtaamctttgacttttctcacttttgatcatgcggagactccaagtggtttaactgtggatacttagactgaatctgctccaaaccaggcaggagggttaccatg

SEQ ID NO: 132609 - DNA, 201 bp, Homo sapiens
tgggaacagggcagtgaacccttctcttcatgaggtcttgggatgagggcagaacgatcggcagtggtaattttccatcttgcccggataactgcatgccygggcctctgccatcagagctgtgcaaaatccactctccctcacagcctgactttctctaaacattgcaggagcagcagaggatcctggatctgggcatca

SEQ ID NO: 132610 - DNA, 201 bp, Homo sapiens
gtctggtgcctagggaggcaagaactccaagacgccaggatgagaattgcgacatctgcttgttgaactaatggaccttttcttacttaaaaaatcatttkcttaaaaatcagcatggaaggcagtctgtctgccaaagaaaagacatttatcacagttcttcataggcagaaacttctaattcattttcttgttacagtc

SEQ ID NO: 132611 - DNA, 201 bp, Homo sapiens
aaattgacttctagggacctcatacaagtggaatcatatagtatttgtccttttgcaactggcttatttcatttaccatgatgtccttaaggtttctccawgttgtagcatgtgtcagggtgtctttcctttttaaaggctgaataatattccattgtatggatagaccacatttggtttattcatttatcagttaatgga

SEQ ID NO: 132612 - DNA, 201 bp, Homo sapiens; identical to SEQ ID NO: 23226

SEQ ID NO: 132613 - DNA, 201 bp, Homo sapiens
gatgtgcaaacactggcaacttttaattttgatatacttgtaaacttacaggaagattataagaatactaaaaagcatccttgtgcctcttcctcccacawtcacaggttatttatatggtactctgcttcctttaccattctgtgtctccatttctctcctctctctttctctgtactgaaacacacacacacacacaca

SEQ ID NO: 132614 - DNA, 201 bp, Homo sapiens
agagtgaacgggggtgtggtgtttcactttttttcatggcatcatgttggctcgggatattcgcggtgatggctggggcaggtaccacagtgactgtggargcaggaggtgaagggggaggcctctccttgccttccaggtgatatttattccatggaagcttagagatctgggagagaagtggaggtcattgtagacaga

SEQ ID NO: 132615 - DNA, 201 bp, Homo sapiens
ctgtgtctccatttctctcctctctctttctctgtactgaaacacacacacacacacacacacacacacacacacgtacacacacagacagtattatcackttcttatcccttatttggttatttggtttatctattaaaagtccacttctctattttgtccgcactaggggtaaattccttcctcgtgtacatggctttc

SEQ ID NO: 132616 - DNA, 201 bp, Homo sapiens
attctcagactttatctgctgcttgtcctttattttttagcataaatatcaccggttaaaatataagtgcatcagcaatctgtagtgcattgcatcttagratttgctatctcagatacttattcgtgggagtttacctttttcttaacagcctagttaaaatggcatcaatggcgtattttttgtagtctttttgctata

SEQ ID NO: 132617 - DNA, 201 bp, Homo sapiens
gatgtatgcatgtttcctagcttcctgggaagtggctggtggatgcagttactgatgtaactgagccttggaagagagtatgaacgcagtgccctggcccscagcactgccactccgccgccctggatctgaggctctgccccgcacggcgtgtgtgggagcggcactcagaacctccttagcaaacctggtgcagagcca

SEQ ID NO: 132618 - DNA, 201 bp, Homo sapiens
gcatcagcaatctgtagtgcattgcatcttagaatttgctatctcagatacttattcgtgggagtttacctttttcttaacagcctagttaaaatggcatmaatggcgtattttttgtagtctttttgctatacttgctgtgatttacctcaaagataaatgcaaatataaaggacatattgaatggaaaccttgctatgg

SEQ ID NO: 132619 - DNA, 201 bp, Homo sapiens
tgctaagttgtactgcctctgttaatttctgaggggtctttctccatcaaatgtggccagtaacattgccctcatcatatcaaaaaaagtcaggctaatasaatcgcctaggtgtcctgtttctcatcccagaaatgcctctggtggggagatgattgtctttgtgaacaggaagatggaagtccctgtctctgatcccac

SEQ ID NO: 132620 - DNA, 201 bp, Homo sapiens
caatctgtagtgcattgcatcttagaatttgctatctcagatacttattcgtgggagtttacctttttcttaacagcctagttaaaatggcatcaatggcrtattttttgtagtctttttgctatacttgctgtgatttacctcaaagataaatgcaaatataaaggacatattgaatggaaaccttgctatggttgaacc

SEQ ID NO: 132621 - DNA, 201 bp, Homo sapiens
tttagtggttcacaacttatggtctccaatatcttaccaaaattcaccaaaacgtagttggaaggatggaaaagctcttctaaatgcctagaaggcgtgtkgggaattgtttttccaaggtaaccctgcacaggatatcacatgatatgcagagtttggtagacagaatcttttaaaattatggagggaagattcagagca

SEQ ID NO: 132622 - DNA, 201 bp, Homo sapiens
tagaacctaggactgaggcagagatcgaaagagccttttaaagcagtcaggatgtgtttttagggctggatataaggacgctctttggttctggttttccytttagccatgggcaccccggcttcctctccgtgcacaagggcacacccatccgcaggagagagaaggggagcaaatgcataggggagggggcgtgtgctc

SEQ ID NO: 132623 - DNA, 201 bp, Homo sapiens
gggtttcaccatgttggccaggctggtctcaaactcctgacctcaggtgatccgcccatcttggcctcccaaagtgctgggattacaggcatgagccaccrtgcccggccctatcttctttatatgaaataattttcactgctttttttttttctttggagtccaaggtctaattgaaagagatggttcgtttatctagga

SEQ ID NO: 132624 - DNA, 201 bp, Homo sapiens
ggtgtgtgagttcgaagggagggtgcacacgtcttaggtaatggagaacctgtgttcatcagttagaatttgtggctgtgaaatacttttcagaagttggytccttaatgacaggctggatgtcaggctctaggggccctgactagggagcagcctgcagcttcgagtgaagcgtgcaatcagggaatctccagggaacca

SEQ ID NO: 132625 - DNA, 201 bp, Homo sapiens
agcctcccaaagtgctgggattacaggtgtgagccaccacgcccagccacatttatgtctttggttgaacatttatgttgtttctggttttttttttttttaacttgaatgacatttttataatagacacattcttgattatgtttgtaggagaaatttctacaagtggcattgctgggtcaaaggatgcatatattttta

SEQ ID NO: 132626 - DNA, 201 bp, Homo sapiens
tcaccatgttggccaggctggtctcaaactcctgacctcaggtgatccgcccatcttggcctcccaaagtgctgggattacaggcatgagccaccgtgccyggccctatcttctttatatgaaataattttcactgctttttttttttctttggagtccaaggtctaattgaaagagatggttcgtttatctaggataagc

SEQ ID NO: 132627 - DNA, 201 bp, Homo sapiens
tgttaatgttacaaaggagaagcaacagggcagttcctgagtttgggtatttttggacgccagagggttaaggaagctgagttcatcccagtatctgcctrccctttctactggggtagctcccggggctctggagaaatagcacatctgtttgaagacaaacactgcagccagtgacagcttttaaataagcagcattca

SEQ ID NO: 132628 - DNA, 201 bp, Homo sapiens
cacacgcttccaaaattttaaatcattgcaatcatagtgttcactttttttttttttttgctttgatttgttctacctcacccttccacccctattttccytctggtgaaaaggatatgataaaaataaatgtttggaaagtacggccaggtctggagaaaattgctataggataattagctcaattgcaagtgctgtaaa

SEQ ID NO: 132629 - DNA, 201 bp, Homo sapiens
aaaaaaaaagtgatagtcctaagggaaaggcttgcttgcattggggattttttttttttttgacattaaaactcaccttggtggaagaacctttgtcctcrtcatagcaatgatggcacttatttatgcacaaaatgttaagggcacctgccagagacaaggcagtgtgctggtagctgggagaagagggggctttttgct

SEQ ID NO: 132630 - DNA, 201 bp, Homo sapiens
aacaaggcagcttcattttgacagtgtggggagaaaaaaaaaattaaaagcaaacgatcaacaagacttttttttttttttttttttaaagagcgcccccycccccacaccctttaaaaaatctggttgcattatcataggacctatagcatggtattcctccctccctcaccactggcagcctcttatgtaagagccttc

SEQ ID NO: 132631 - DNA, 201 bp, Homo sapiens
aatgaacaaggcagcttcattttgacagtgtggggagaaaaaaaaaattaaaagcaaacgatcaacaagacttttttttttttttttttttaaagagcgcccccccccccacaccctttaaaaaatctggttgcattatcataggacctatagcatggtattcctccctccctcaccactggcagcctcttatgtaagagc

SEQ ID NO: 132632 - DNA, 201 bp, Homo sapiens
gaatgaacaaggcagcttcattttgacagtgtggggagaaaaaaaaaattaaaagcaaacgatcaacaagacttttttttttttttttttttaaagagcgcccccccccccacaccctttaaaaaatctggttgcattatcataggacctatagcatggtattcctccctccctcaccactggcagcctcttatgtaagag

SEQ ID NO: 132633 - DNA, 201 bp, Homo sapiens
tgtcttcgtgaatgaacaaggcagcttcattttgacagtgtggggagaaaaaaaaaattaaaagcaaacgatcaacaagacttttttttttttttttttttaaagagcgcccccccccccacaccctttaaaaaatctggttgcattatcataggacctatagcatggtattcctccctccctcaccactggcagcctctt

SEQ ID NO: 132634 - DNA, 201 bp, Homo sapiens
gctgtcttcgtgaatgaacaaggcagcttcattttgacagtgtggggagaaaaaaaaaattaaaagcaaacgatcaacaagacttttttttttttttttttttaaagagcgcccccccccccacaccctttaaaaaatctggttgcattatcataggacctatagcatggtattcctccctccctcaccactggcagcctc

SEQ ID NO: 132635 - DNA, 201 bp, Homo sapiens
tgtaaataatgctgctatgaacatgagtgtgcaaatatctattcaagtccctgccttcaactcttgggtgtgtgcccgtaaatggaattgccgcatcatayggtaattctgcaccacagttttctgatttgtcatataatttcagggttactgtgcagcttaaatttgattgaaggtacaaagtactgagcattgcctggc

SEQ ID NO: 132636 - DNA, 201 bp, Homo sapiens
atgtaaatatatatgcttatgacattgcagaatggccccaagttcacctatgtgatagcctgtgtcagaatttccttttttttatggataatatttcatcktatatatagaccatattctgtttatccattcatccattgattgatagatacatgggctgcttccaccttttggctattgtaaataatgctgctatgaaca

SEQ ID NO: 132637 - DNA, 201 bp, Homo sapiens
tagcatacataacacaaattttaccactcgaactattattaagtgggcagttcagtggcattgtgtattcgcattgttgtacagtcatcaccgtggtccayttccagaactttatcatcatccctaactgatcatcatccctaaactgttgccattaaacactaactccccattcccacctttctctagcccctggtggcc

SEQ ID NO: 132638 - DNA, 201 bp, Homo sapiens
aggcgtgagccaccgcgcccggctctttcttctttattttatagtggtagcatacataacacaaattttaccactcgaactattattaagtgggcagttcrgtggcattgtgtattcgcattgttgtacagtcatcaccgtggtccacttccagaactttatcatcatccctaactgatcatcatccctaaactgttgcca

SEQ ID NO: 132639 - DNA, 201 bp, Homo sapiens
ggggtttcaccatattggccaggctggtctcgaactcctgaccttgtgatctgcctgccttggcctcccagagtgctgggattacaggcgtgagccaccgygcccggctctttcttctttattttatagtggtagcatacataacacaaattttaccactcgaactattattaagtgggcagttcagtggcattgtgtatt

SEQ ID NO: 132640 - DNA, 201 bp, Homo sapiens
ccggctaatttttgtatttttagtagagacggggtttcaccatattggccaggctggtctcgaactcctgaccttgtgatctgcctgccttggcctcccaragtgctgggattacaggcgtgagccaccgcgcccggctctttcttctttattttatagtggtagcatacataacacaaattttaccactcgaactattat

SEQ ID NO: 132641 - DNA, 201 bp, Homo sapiens; identical to SEQ ID NO: 23221

SEQ ID NO: 132642 - DNA, 201 bp, Homo sapiens; identical to SEQ ID NO: 23222

SEQ ID NO: 132643 - DNA, 201 bp, Homo sapiens; identical to SEQ ID NO: 23223

SEQ ID NO: 132644 - DNA, 201 bp, Homo sapiens
cgccaccaccaatatatgtcattccccagtgtcttctaccacctgggtgtcatcagcaaagatccattgtttgctgatttgataggtgaattttgtgtctyattgttttacatttaatttattcaattactgattagagtgaaaattttttcctatgcttagtggccatttgtacttttttctccctcttaataccagctt

SEQ ID NO: 132645 - DNA, 201 bp, Homo sapiens
gcagcctgcagcttcgagtgaagcgtgcaatcagggaatctccagggaaccaccaggatttccccttcatgggaggaagtggcagaaaagggactggcgcygagcagtgggggaagatcaccaagggcctgagtggaggctgacagtgaggaggctccagaagcccgggagggaggagcttggcaagagctccctgcaggg

SEQ ID NO: 132646 - DNA, 201 bp, Homo sapiens
cagccatttgcattttataaaggtctttggcagcggccaaggccttctcattatgtggtgtttttccacttcgggatgaaccggagtggtttgtgcagccrcctgatagctctttgcaccagcttctgcatgggagactttgagcaggccaggagccaaggggaccctcctaggccttccgagcacctagcactggccctt

SEQ ID NO: 132647 - DNA, 201 bp, Homo sapiens
ttcatgggaggaagtggcagaaaagggactggcgccgagcagtgggggaagatcaccaagggcctgagtggaggctgacagtgaggaggctccagaagccygggagggaggagcttggcaagagctccctgcagggctgtggccactgagtcactgagtgtcagcaccgtgccaccaccctgagtttgggatgtggtcatg

SEQ ID NO: 132648 - DNA, 201 bp, Homo sapiens
agaactgatgactgctgctgggtcctgcccagccatttgcattttataaaggtctttggcagcggccaaggccttctcattatgtggtgtttttccacttygggatgaaccggagtggtttgtgcagccacctgatagctctttgcaccagcttctgcatgggagactttgagcaggccaggagccaaggggaccctccta

SEQ ID NO: 132649 - DNA, 201 bp, Homo sapiens
tgcctgctgggttcaagtgattctcctgccttatactcccaagtagctgggattacagtcacctgctgccatgcccagcttttttttttttttttttttttaattgtatttgtagtagatacggagtttcaccatgttggccaggctggtcttgaactcctgatctcaggtaatccacctgcctcagcctcccaaagtgct

SEQ ID NO: 132650 - DNA, 201 bp, Homo sapiens
ttattatgaatcgtaacaatgatctgaaaagcccacggcacagagcggaggatagtttataggttagtgaaagtagctgtcagatcccatttgagtccacrtttcatttacaacccttatcaccaaccctgtttatttaggcaaataggagaaaatctgattgtgccaggaggagtgaagaccatcgaggcccactcccgg

SEQ ID NO: 132651 - DNA, 201 bp, Homo sapiens
tggtgatccccggaggaattgacgtccacactcgtttccagatgcctgatcagggaatgacgtctgctgatgatttcttccaaggaaccaaggcggccctrgctgggggaaccactatgatcagtaagaagcttaaaaatcatcattgtagtgcttaggaagtgtgagagtttgcaaataagtctattgtttgattctctc

SEQ ID NO: 132652 - DNA, 201 bp, Homo sapiens
aacccattacgctcaaacaacggggacgggggtagggaatacaacaagaatacaaacaatataattataggttactttgttttaaattaatttgagtctckttatttactcccttgccaagtagtttttttgtgagctaataggacactcctctccactgccctgtcctccgcaaagctgggactgactgttggtttttca

SEQ ID NO: 132653 - DNA, 201 bp, Homo sapiens
aaattcctaagagtgcttctttttagaatgaggatgggctgcaacaaatgaaatgctgaagcaggaactcctgttcctctgatatgaaaatcaaatggagrcgatactctctaggctgagtttaacataaaaggaattgggcagccctgtctggagggggacccacaggtaattgtcttttagatatgaaaattgctgaca

SEQ ID NO: 132654 - DNA, 201 bp, Homo sapiens
tcaagaccaacctgggcaacatggcgaaaccccgtgttgggacaataaatggagtagtcacctgtatctctgggaggtgctgagggttctagtggagtccrtctcacacttcacacccatgcaagacgtccctgtccccgcctggtgctgccgggccacaggcatctctgctgtaagtggagagagagggcttctccttca

SEQ ID NO: 132655 - DNA, 201 bp, Homo sapiens
agagaggtatcctctgtggctgtggcctgagctggggggactcttgtgttttgcagctggctgagctgagaggggttcctcgtggcctgtatgacggaccygtgtgtgaagtgtctgtgacgcccaagacagtcactccagcctcctcggccaagacgtctcctgccaagcagcaggccccacctgtccggaacctgcacc

SEQ ID NO: 132656 - DNA, 201 bp, Homo sapiens
caaagtgctgggattacaggtgtgagccaccacactgactggaacatccgatttaaagcgccagattatttactcaagcagttcttcaatcttgtgctgarggtcgtaccaggctgtggctggccatgtctgtgcttcacacacagggggccattggtgtagacaaacggggcccactccgttcctagagccctgtgaggc

SEQ ID NO: 132657 - DNA, 201 bp, Homo sapiens
tattttttagataaaacagaatacttgaagttactagttatagagaacaggaatttataaattttataaaacaaaggaaatttttttttttttttttttttatgttgagggagtgctgcgagagtttttaggagcgtattagataatattattaagacttttttgggtctgggccatgcctttgctgcctttgggacaagt

SEQ ID NO: 132658 - DNA, 201 bp, Homo sapiens
agctgtttctgctatagaaaaacctttcttactggttatttttccgagtggtggtctttttgcttgtggctttggggtctatctggaagcttcttttctaycttgcctgagctagaggaatgttgccctgccatcccctcctagtctgagttcccccgcattttaaatcacaactcatcctctggcgttctctctgtcctg

SEQ ID NO: 132659 - DNA, 201 bp, Homo sapiens
gcggcggcctccgcggattggcgcgcaggcgggcagggaccggggcgcgcgcaggcgagtgcgtgcggccccgaagccccgccgtctcggggtcccgcccytccccccggccgcgacgaccacccctccattgtccccgcgtggcccaggccgcgcctggggccgccgccaaacccggtccccaccgccccggcccgaaga

SEQ ID NO: 132660 - DNA, 201 bp, Homo sapiens
aggcattaaacaggagcgcgagtgcacgaaggtagccttaggtaacgcgccagacccggtctatcttttattgtcagtgagagatgctgcagcgtcggccygcggggtgcaagcaaatggatgccagattgaatatgcatgcctggagctcggatattgttctctgggctgcgtgctgcgaggctggactcctccagcagc

SEQ ID NO: 132661 - DNA, 201 bp, Homo sapiens
ggtctttttgcttgtggctttggggtctatctggaagcttcttttctatcttgcctgagctagaggaatgttgccctgccatcccctcctagtctgagttsccccgcattttaaatcacaactcatcctctggcgttctctctgtcctggtcctcagggtctgaagcatcaggaacagctctctcctgtttcagctttctt

SEQ ID NO: 132662 - DNA, 201 bp, Homo sapiens
tggaggggaggggggctcctcactagggagggctccttttccagaccctcatgccaagtgggccacttgcaccatgttctggcattaacctaattacagcmgggcaaggcaggagctccagtttcctcctctgctccactgctgcggccttgttagtatctatttaaagccatgtgcacgccaaggcggggtgggcaggca

SEQ ID NO: 132663 - DNA, 201 bp, Homo sapiens
tcttttctatcttgcctgagctagaggaatgttgccctgccatcccctcctagtctgagttcccccgcattttaaatcacaactcatcctctggcgttctstctgtcctggtcctcagggtctgaagcatcaggaacagctctctcctgtttcagctttcttggcaccactgagaaaagcctccaagtgtaagccttgcga

SEQ ID NO: 132664 - DNA, 201 bp, Homo sapiens
aaccaaggcggccctggctgggggaaccactatgatcagtaagaagcttaaaaatcatcattgtagtgcttaggaagtgtgagagtttgcaaataagtctrttgtttgattctctccttctaaaacttgctgtcctgagccacagttcaatctaccaaataagggggtgaggatgtgttaaccatttgtcttatttattta

SEQ ID NO: 132665 - DNA, 201 bp, Homo sapiens
ttgcctgagctagaggaatgttgccctgccatcccctcctagtctgagttcccccgcattttaaatcacaactcatcctctggcgttctctctgtcctggycctcagggtctgaagcatcaggaacagctctctcctgtttcagctttcttggcaccactgagaaaagcctccaagtgtaagccttgcgacttgtgtcttg

SEQ ID NO: 132666 - DNA, 201 bp, Homo sapiens
ccttgtcatttgctggggaatcactggcacctgtgggcgtttctgcctctcctccagggcggactgtggagaaacacttgaacttggagaagcttagactrttcgggtgtcagccgggaaggccaagtcagggtgatcatctgcctcagtttggagttcacagggagaccctgcaggcccctggattggtcacagacagtc

SEQ ID NO: 132667 - DNA, 201 bp, Homo sapiens
ctgagaaaagcctccaagtgtaagccttgcgacttgtgtcttgctgtacatgttgccctttaacctagtgggtgccattttccagggatgtcggggggagwtttcatgcacacctagggagagcagagcctgcaccttgtcatttgctggggaatcactggcacctgtgggcgtttctgcctctcctccagggcggactgt

SEQ ID NO: 132668 - DNA, 201 bp, Homo sapiens
gagtacagggaattgtcattctagcaccattttgggaggggattctggataaaaacctgggccatgttgaaagtcaagccaagaagggagaggaggcgtcraaaggactccacttgggttggtgtgatgccattcatgagacagcccaccaaataggtgtaggcgcacagcatcttgacgaagctgcagcaccacgttatg

SEQ ID NO: 132669 - DNA, 201 bp, Homo sapiens
acagaaagtccctgttttctctcacacttgctggaaagaatccctcagcccaccatctcctgtcctgcattcctgggtctgcctcttccctccacacgctygccccgtgcttaggcccccactcttgttcttgtttttgactctttcctgccttcccttccccaccacaggagcatcaccttcttgccaccaccccgaatt

SEQ ID NO: 132670 - DNA, 201 bp, Homo sapiens
acgctcgccccgtgcttaggcccccactcttgttcttgtttttgactctttcctgccttcccttccccaccacaggagcatcaccttcttgccaccacccygaatttctctttcgtcttccccctcagaggctgtggccttttttccattcatccagatgggttccttctgtttagggacgagggacatccccctctgagt

SEQ ID NO: 132671 - DNA, 201 bp, Homo sapiens
tgccattgcttttatagcctgagaaaagtactaactacttttgcaaataaccacctatgtttactgacctctgtagaatttctactagcctgcctttcccygggggagggaatggtaataatacaggtgaggaactgaggaatttttatcctttttctgtttgctgaccagacgttctgcattgctttaagtgagtgagtg

SEQ ID NO: 132672 - DNA, 201 bp, Homo sapiens
tttttatgcttttcttttttttctttctttctttctttccttccttccttccttccttccttccttccttccttccttccttccttccttccttccttccytctctctctctttctttctttctttctttcttttatttttgttttgggtgttgatgaggggacatacaacttaagaagaaaaattggaattattttgtca

SEQ ID NO: 132673 - DNA, 201 bp, Homo sapiens; identical to SEQ ID NO: 23212

SEQ ID NO: 132674 - DNA, 201 bp, Homo sapiens
acacacagacataggcacacgcagacaggtaggcacacaacagacatagacacacatgcatacacatagtaacacacacagacacatagacacacagacarctagacacagccatagacacctacacacacacacatacacatagacacacagacacatacagacacagacacagacatacacagacacatacacatgcag

SEQ ID NO: 132675 - DNA, 201 bp, Homo sapiens
agccaataggtcctatgtgagctgacccttgaaagccggctcaaattttaccctggggtggatttcacccatggggtgggcaggagaagggagtgtccacscaagagagagatgtgtgcagaagaatttggtagatgagtctggtgtattttagaatttagactccggatttgaccataggatgtttgagttctatcttca

SEQ ID NO: 132676 - DNA, 201 bp, Homo sapiens
ggtagccttaggtaacgcgccagacccggtctatcttttattgtcagtgagagatgctgcagcgtcggcccgcggggtgcaagcaaatggatgccagattsaatatgcatgcctggagctcggatattgttctctgggctgcgtgctgcgaggctggactcctccagcagcgatggggagatggggacttggatcctcccc

SEQ ID NO: 132677 - DNA, 201 bp, Homo sapiens
tccacgcatcacggtgagtttggtacttgggaaatctgcggtcggccagccaccttttgtagcacagaaggtctaaggaatttttaaaaaggaggggaaargagagggaccgaactttttttttcctttctgttgctaacggaggcgatggtgatggtggtggtggttgtgggagatgcagtgatccaggattagaagtcg

SEQ ID NO: 132678 - DNA, 201 bp, Homo sapiens
ttatttatatggtactctgcttcctttaccattctgtgtctccatttctctcctctctctttctctgtactgaaacacacacacacacacacacacacacmcacacacgtacacacacagacagtattatcactttcttatcccttatttggttatttggtttatctattaaaagtccacttctctattttgtccgcacta

SEQ ID NO: 132679 - DNA, 201 bp, Homo sapiens
aaaaaagtaaattttgtcaaaagaaaattcagcttagatggccatattgtatgtgtgtgtgtgtgtgtgtgtgtatatgtgtgtgtgtgtgtgtgtgtgtrtatatatatattttttttttcttgagacaaggccttgctctgttgccctggctggagtgcagcggcacaatcttggctcactgcaacttctgcctcccgg

SEQ ID NO: 132680 - DNA, 201 bp, Homo sapiens
atatttttatgcttttcttttttttctttctttctttctttccttccttccttccttccttccttccttccttccttccttccttccttccttccttccttccctctctctctctttctttctttctttctttcttttatttttgttttgggtgttgatgaggggacatacaacttaagaagaaaaattggaattattttg

SEQ ID NO: 132681 - DNA, 201 bp, Homo sapiens
gatatttttatgcttttcttttttttctttctttctttctttccttccttccttccttccttccttccttccttccttccttccttccttccttccttccytccctctctctctctttctttctttctttctttcttttatttttgttttgggtgttgatgaggggacatacaacttaagaagaaaaattggaattatttt

SEQ ID NO: 132682 - DNA, 201 bp, Homo sapiens
gagatgaagccaggggagtgggtagggagattctgcccaaactgattgctacacagtgatatttttatgcttttcttttttttctttctttctttctttcyttccttccttccttccttccttccttccttccttccttccttccttccttccttccttccctctctctctctttctttctttctttctttcttttatttt

SEQ ID NO: 132683 - DNA, 201 bp, Homo sapiens
ccaaggctgggagtgatttctgccggggtatgtaaggcagctttgtggggtgtggggatgcattttgccccagacactatcacatccagatgttttggtgyttgataaactctcttgatgcattctgaactggggctgggtctctggtattactagggtgtccactgtaactaattgatgaagtgcagcttccagtgcttc

SEQ ID NO: 132684 - DNA, 201 bp, Homo sapiens
ggcaggttgaggctgcagtgagctatgatcctgccacgaacttcacaaagcaagaccctgtgtcaaaaagaaaaaaaaaaatcggctgggtgtggtggctmatgcctgtaatccccacactttgggaggctgaggtgggcggatcacaaggtcaggagatcgagaccatcctggctaacacggtgaaaccctgtccctact

SEQ ID NO: 132685 - DNA, 201 bp, Homo sapiens
tcattttgatggtggatcttaggctgatctgaaatgaacattataaaagggtccccttcttccttcctttctcccttttatgttccctcctcccctttgcytgttgggatctctccatctctgtgtctccacttctcttcccttctttcctgatttctgtttcattttatctttcatttgactctttctcagtccctctgt

SEQ ID NO: 132686 - DNA, 201 bp, Homo sapiens
gctcctggggcctctgtccttaggctacacatcaaatggttgccgcctttctgtcttctcctggcaccttgaaggaattgccttttagaaataagaaagcattcacctaaaataatgtaacctactcagaatgagctttgagttgttttctaggagatattgtggatgacgatggaatcggtggccttgggccacccagac

SEQ ID NO: 132687 - DNA, 201 bp, Homo sapiens
gctagctgggcaagtgacttttcatttctcggagccacagttttctttcttctttatttatttgtttttatttttattattttttttgagacagggtctcrctctatctcccaggctggagtgcagtggcccgatcttggctcactacaacctccacctcccgggttcaagcgattctcctgcctcagccttctgagtagc

SEQ ID NO: 132688 - DNA, 201 bp, Homo sapiens
cccaccacaggagcatcaccttcttgccaccaccccgaatttctctttcgtcttccccctcagaggctgtggccttttttccattcatccagatgggttcyttctgtttagggacgagggacatccccctctgagtgcagcacctggcccagggagctcagaagagtcagcagatggccttatgggcaggtggtccggaaa

SEQ ID NO: 132689 - DNA, 201 bp, Homo sapiens
ccagtatggacctattaccccaactcagtgcctggtagcccccgttgttgttttttttaatttattttattttatttttgagatggagtctcactctgtcrcccaggcaggcgtgcagtggtgccatctcagctcactgcagtctccgcctcctggactcaagcgattctcccgcctcagcctccttagttgctgggatta

SEQ ID NO: 132690 - DNA, 201 bp, Homo sapiens
atattgagtccagaaagaaatgcctggggcactttgaaaacttcacaggcccactgctgcttgctgaaataaaaaattgaagtgaattggtacaaaaatcyccctcttcctcccaactccccgccaccccgcccctgggcactccaccctcctggctttctggccttctccagaccatgtcaccatgtcacctgccctcac

SEQ ID NO: 132691 - DNA, 201 bp, Homo sapiens
taataatacaggtgaggaactgaggaatttttatcctttttctgtttgctgaccagacgttctgcattgctttaagtgagtgagtggctgggatttgcttyacagagaaggaggccttgcaaagagaaatagcttaatgccacttcattggcacctaagacctgctactttctttgacttaatatattgagtccagaaaga

SEQ ID NO: 132692 - DNA, 201 bp, Homo sapiens
catgatgtgatactttaggcctgcgtaccaggaaaataaatggtcccaaccacagttagctcctcgacttgcaggggaaggatgctgagtggaaagtcacrttgggaggtagtcggggctacaaaaggggtacaagtcaggagaggttgagcccagaagggagtctcagagaggtcaggctgcgtaagcagactcgaaatt

SEQ ID NO: 132693 - DNA, 201 bp, Homo sapiens
cctcgtgctgccttgagttgctttcatctctgtgttacctcttgcactcattcccttacccacacagatttgacttttgtcacctcttcctggattttggycctgtcctctgaggagtcttactgtctgtcccccacctcctgcctctcgccaggctgtttttctggtgcagctttcattgtgccgccttcttcctctgaa

SEQ ID NO: 132694 - DNA, 201 bp, Homo sapiens
ctggggcactttgaaaacttcacaggcccactgctgcttgctgaaataaaaaattgaagtgaattggtacaaaaatctccctcttcctcccaactccccgycaccccgcccctgggcactccaccctcctggctttctggccttctccagaccatgtcaccatgtcacctgccctcacgggtaaatcctcgcctgcctccc

SEQ ID NO: 132695 - DNA, 201 bp, Homo sapiens
aatgtctccttctcttagtgatccacatgaacctccccagccaagacctgctggtccagaatctaagacaagagaagttcggggaagtgaggatatgaggwgaaacgaatgagaactgttttcacgtgcctgcttgagccagcacgactgcatcctgccttccctgagagacatgctgagagacacgctgcttccatcagc

SEQ ID NO: 132696 - DNA, 201 bp, Homo sapiens
gtcttactgtctgtcccccacctcctgcctctcgccaggctgtttttctggtgcagctttcattgtgccgccttcttcctctgaagccttcagtgactccytcttgctcagagaatcagcccaagtgtcagaaccctccacgacgcggcctattcctgctgccccagcccagacttgcattgtcatctcagccagggatgc

SEQ ID NO: 132697 - DNA, 201 bp, Homo sapiens
ggggcactttgaaaacttcacaggcccactgctgcttgctgaaataaaaaattgaagtgaattggtacaaaaatctccctcttcctcccaactccccgccrccccgcccctgggcactccaccctcctggctttctggccttctccagaccatgtcaccatgtcacctgccctcacgggtaaatcctcgcctgcctccctg

SEQ ID NO: 132698 - DNA, 201 bp, Homo sapiens
gggtttcaccatgttggccaaggtgttctcgaacttgtgagctcaggtgatccacctgcctcagcctcccaaagcgctggaattataggcctgaaccaccrtgcccagcttgtgtactgtttttaatggccttttctttcttcaattaatagcaaaaaaatgatacaaattaaaatagcttttgtctaagatactaacctg

SEQ ID NO: 132699 - DNA, 201 bp, Homo sapiens
atcaagcaagcaatcagttttgcagcagacaccagctgggtgtccccccattcagttccaacactgtctacctggaaatagcatcatattccccaggttgmgggggctcggtcccacaagactgcccccactttttccaatgccagttggaagccccaggttgtttacctgtgcctctgaccaagtggccatacatagagg

SEQ ID NO: 132700 - DNA, 201 bp, Homo sapiens
ttccctctactacaaatattatgtcttgtaagttagcatttttagcacacaggagaaattttatgtaataaaattactgtatcttttggatttaacaaatktgtatttgaaacacattctatgtctgataattcttaatggcacttttactaatttatttggggatcttgggtacattcttaatttgtgtttattcttcac

SEQ ID NO: 132701 - DNA, 201 bp, Homo sapiens
ttgcttttacttaaaattcccaagtggacttctttttgtcattggaataaagtctgtaaaatgttttgtaacataccttaaagactccgccattttctctraatattttgcctctttgttttcagtttgtgggtgaactagaacaattctggcaggaaacaaactgtattgggtgtgactctaccaagaaagatggatagt

SEQ ID NO: 132702 - DNA, 201 bp, Homo sapiens; identical to SEQ ID NO: 23252

SEQ ID NO: 132703 - DNA, 201 bp, Homo sapiens
cccgtgtaagtctacatttaacactgaaccctttgtgttgagtactctgcatacagtgtcatcataccttgagtatttacatttagtcatcatgttttcaratagtcccgccctgccccttcccaggactgcagtgatacttacgttagagcacttgatgttatcccacaggtcaggtcttggttactttttcttcctgtc

SEQ ID NO: 132704 - DNA, 201 bp, Homo sapiens
aatgtgttaacatttggaagatctgtataactcagtaaatcagtcttttacgggtgaccgatgcatgtgatgttaaacagtcatacatcagtaaaagtgcrtgctagagcattgaattttaatgtgacagactaccgatatgttttgagattccacaaaccttcaagaatccaccactgtggaattttggtgtagtatcaa

SEQ ID NO: 132705 - DNA, 201 bp, Homo sapiens
aggggaacctcttattttctcatcccctcactattaatttaaaaagcaaattctaacacctagaccataaacatttgcagaatatatacttaaatgacttyaggatgaaatgggggaagaaattcagcacttcctccatctaattgatgcccctcgtccacagtattagttcttagaaatgctgttcacaaatgcctgatg

SEQ ID NO: 132706 - DNA, 201 bp, Homo sapiens
gagaggctagtttaaagaaaaagcagctcaattattttgatgtcagttcataataatactgttacaatgatttaaatgtaaaggtttaaatgacagttgcrtgtacatgcatgtaaagtaacttaaaagtgcagtgctagctttttgaagaaagaaaattgcagaatcggtaattaaagtgggcttttgttttgtttttct

SEQ ID NO: 132707 - DNA, 201 bp, Homo sapiens
tgttttttccttctctgtttcatttgttctttctggaacttatctggatcttggactttttgtactggtcctctttttttttcccttcccccccccccccccaactattttccatttcctttttgctttacattctgggggagttcctcagttttgttctcaactctttcatttatttttaccattgcatttttaagagct

SEQ ID NO: 132708 - DNA, 201 bp, Homo sapiens
gggatggtgtcaggcacacggaggctctaaaacaccctgctattggctccccttgctacctagggcaacgttgtaaatagcatattttttacattataaatattttctctttctcctcgttcttctactcacttgtttgtatgatgatctgaatcttttatcagagtttcaagtaggctgacaaatatatttagagccctt

SEQ ID NO: 132709 - DNA, 201 bp, Homo sapiens
tgaacccaggaggcaaatgttgcagtgagcaaagatcgcgccactgtactgcagcctgggtgacagagcgagactctgtctgaaaaaaaaaaaaaaaaaaagttttctagagccaataaactgcatttacaaaagaaaaacattttacagcactgtacttctgagtcatacacagactacatttacatctaacttttccca

SEQ ID NO: 132710 - DNA, 201 bp, Homo sapiens
ttgaacccaggaggcaaatgttgcagtgagcaaagatcgcgccactgtactgcagcctgggtgacagagcgagactctgtctgaaaaaaaaaaaaaaaaaaagttttctagagccaataaactgcatttacaaaagaaaaacattttacagcactgtacttctgagtcatacacagactacatttacatctaacttttccc

SEQ ID NO: 132711 - DNA, 201 bp, Homo sapiens
attaatttgctagagtggctcacagaactcagggcaaacatttaccactttattatgaagggcattttaaaggatacaaatgaacagctacatgaagagakatgtaggacaaggtctggaagggtcctgaatgcaggagcttctatccccgtggagttggagtgcgccacctacgcagctcctggatgtgttctagtttac

SEQ ID NO: 132712 - DNA, 201 bp, Homo sapiens
ggtcctcttattactttttcctgagataatatgggagggattaatcatctgtaaaataccagacttgacagatttagtgtgttcccatcttttttttttttcctttattaaaaactgtctctcatgggtaaaaacattagaaggatatattggattttgaaccagttgcttattttatactttaatcagaaggaaatttaa

SEQ ID NO: 132713 - DNA, 201 bp, Homo sapiens
ggattctaaatttggaagaatcaaggatatttgtgtggtaataatggtgtttagactatttaggagggtattttttcttaccggtcctcttattactttttcctgagataatatgggagggattaatcatctgtaaaataccagacttgacagatttagtgtgttcccatcttttttttttttcctttattaaaaactgtc

SEQ ID NO: 132714 - DNA, 201 bp, Homo sapiens
gctgagacttgagcctgagaggtctgctacagttaggctgtgattgtgccactggtctccagcctggacaatagagtaagactctgtttcaaaaaaaaaaaggaacaacttaaccattcaagatagttattttaattattttaatgtagatttttcattgtttagtaatcttaaaatatcagatgttattaaatatttaat

SEQ ID NO: 132715 - DNA, 201 bp, Homo sapiens
tctgtctagaacagtgcctggcacacagtagttgaatatttgtttgaatgaaggaacgtaaatgttattgttcttaggttttgaaaggggaagagaaatgrtaaaaggcaggatgattgagatgtagttctagcagtcatggatttatttacttggtaggctttttaaaataaaaatttaaaacgctttctgcagaatcat

SEQ ID NO: 132716 - DNA, 201 bp, Homo sapiens
ttctagtgattgagttgatgtcaacagcccctgtcccttagtttaaatctgcttttgaagtagcttcctatggtttaattgccgaatcattttacttgaamacaatttcttgttctgcttgtttgactgagtgtactgtctattttcacagtgttgtcatgactggatcttacaataatttcttcagaatgtttgacagaa

SEQ ID NO: 132717 - DNA, 201 bp, Homo sapiens
agatcctcacatgaaagctctgagctccatataagggtttctttgttatgtaaattccacatacaaataaatggtgatgcatttttatgtttgtacattgkttttagataagtaaattgaaataggtgccatcaacatttggctcagaaacattcttaacggcatctttgatttttatgggaagattttttaactactttt

SEQ ID NO: 132718 - DNA, 201 bp, Homo sapiens
ctggttaatcactctaatttgtttttctatacattgaaaatgatatgcatattacagtgatgttataaagattaagagagaataaatgcccacttagcacratgtttggcacattttggttgtaacatctgtatgtgctttggcattagtttgatatgactttgtgttattttaatgccagtatccagttaatataaagca

SEQ ID NO: 132719 - DNA, 201 bp, Homo sapiens
ttctgcactcctaagaagttttacttgaggatgctgtcaactttgctgatagttttggtagccataaaaagaataagcagaaaacccagttaattagtacygtatttctggtttattctagtgattgagttgatgtcaacagcccctgtcccttagtttaaatctgcttttgaagtagcttcctatggtttaattgccgaa

SEQ ID NO: 132720 - DNA, 201 bp, Homo sapiens
tgccgtctattcaactcatgggcatggctaagttccattaaagaattatttacaaaaacaggttgtgggccgtagttttccaacctgtgactagaggttasttttgtatttctttgtcttttttgtttttgttgctgttttcatttgacagctttggtacaatgtatttcttaactattgagtatttcaaataccttcagc

SEQ ID NO: 132721 - DNA, 201 bp, Homo sapiens
ttatagtcttgcttatttgactaaggggagatttgcttttctgaagtaaaataaggttattaacacattccccacccccctacctttagactgatctcttmaacaggttacatgtagctcaacttttacttgcctgttttctgttaatgatacattttgattgtctccatattgcctgcctttctcccgtctacatgcagt

SEQ ID NO: 132722 - DNA, 201 bp, Homo sapiens
actaatgttctgaaaggtccttctttattaactgtattagaatgttcttttgtaagattaatacaggcatttttcattgtaaaataacattgtgattggtsataggacagatttttccttttaaagaagttgtttgttctttggcattttggtggtggtggtttgtgagaatataactcaactgatatactatactaaagt

SEQ ID NO: 132723 - DNA, 201 bp, Homo sapiens
tcagtttgatcttaggactagagcttgtgttgcactggagaatctcatcagaggatgttggaattttaaaagaagtgtgtgtttattgaatacaatgtccwatatatagacagctctggttctcttagctttgtatgtgtgcatgtgtgtacatgagcgtatgttgttttggtttaaaaacataacactaattgtaaaaat

SEQ ID NO: 132724 - DNA, 201 bp, Homo sapiens
tttatagcatgacccgatataagtgacccatgttatttttatagcttctaatagcttttgacagcaaagtaaatgatagggtatattctttttgttaatgraaatattaatacagggttttgaggagaagagtccaaacagctattaaagtggataatgatgttctctaggttttagggatttttgttgtttccatgggtg

SEQ ID NO: 132725 - DNA, 201 bp, Homo sapiens
tcgttgccctttaaggtgatgatggaatttgtaattaagtaatcaagtatccataaggtgcttcctcagcagacagaaagaaaagtaaaagctggcggggcgcggtggctcacgcctgtaatcccagcactttgggagacggaggcaggcagatcacgaggtcaggagtttgagaccagcctggccaatatggtgaaacac

SEQ ID NO: 132726 - DNA, 201 bp, Homo sapiens
tttaaatctgcttttgaagtagcttcctatggtttaattgccgaatcattttacttgaaaacaatttcttgttctgcttgtttgactgagtgtactgtctrttttcacagtgttgtcatgactggatcttacaataatttcttcagaatgtttgacagaaacacaaagcgagacataaccctagaagcatcgcgggaaaac

SEQ ID NO: 132727 - DNA, 201 bp, Homo sapiens
cagtggcgtgatctcagctcactgcagcctccaccaccagggttaaagcagttctcctgcctcagcctcctgagtagctgggactacaggtgcacaccacyacacctggctaatttttgcatttttggtagagatgggttttcaccatattggccaggatggtctcgatctcctgacctcatgatccacccgtctcgtgat

SEQ ID NO: 132728 - DNA, 201 bp, Homo sapiens
tttttctcaggtgaaaggagcagtagatgatgatgtagcagaaggtaagaaagcgtttaatgcaaaatttggatatataatttttgcagaaatgtttcctrctggaggatttccttgaagccgagactgctataaattcaagatgattttgttgtccaagaaatgtaagaacagttttaaaagatacctttctgaaaaaca

SEQ ID NO: 132729 - DNA, 201 bp, Homo sapiens
ttaaattgcataaaatatttaagattataaaggttgaaataatttaccaaaatattcataattgagtaatatatgttttaagtggataacagctggattaygatattaaaatgtcatttctgtttgacagagtcacaagaattgctaatactatatgcagtttgttacctatgcccataatcaaaagaaatgctgaaattt

SEQ ID NO: 132730 - DNA, 201 bp, Homo sapiens
agaagtgtttcaaatttcagatgttttcggattttggaatatgcgcatgtgtacataatgagatatattggggatgggacccaagtcctaaacacaaattmaattgtttcatatacaccttatacatatgacctgaagataattatacaacattttaaatcatttgtgcatgaaacacagttttgactgtgacccatcaca

SEQ ID NO: 132731 - DNA, 201 bp, Homo sapiens
ataccaaaggcctgtctttctgaatatctgattataaatttagggttgtatgattttttttctcacatactgtatagtgaataccttttcatgtcattcarttttctgtatcaccatctctgtaatgacatgacatgacataattatgtttatttgatctagtctctattgttagattcctagattgtttatttctgcctc

SEQ ID NO: 132732 - DNA, 201 bp, Homo sapiens
gtagccaattcagagggtcttcatttggtttgagtatgtttcagactgataattgtttaatatttttagctgtcatttaatagcattgttataactaatayatttgtataggtattctgctacacggaatctctgttgtagaatcagggcacctaaagaaattgaggcacacaagtaaagtgatttccctgatgtaatcac

SEQ ID NO: 132733 - DNA, 201 bp, Homo sapiens
tgtctaaatttcagtttgatcttaggactagagcttgtgttgcactggagaatctcatcagaggatgttggaattttaaaagaagtgtgtgtttattgaayacaatgtccaatatatagacagctctggttctcttagctttgtatgtgtgcatgtgtgtacatgagcgtatgttgttttggtttaaaaacataacactaa

SEQ ID NO: 132734 - DNA, 201 bp, Homo sapiens
aattggtcaaaataatagaacaggccaggtgcagtggctcacgcctgtaatcccagcactttgggaggccaggcgagaggatctcttgaatccaggagtcygagaccagcctggacaacatagtgagaccttttctctacaaaaattaaaaatattagcagggcatggcagtgtgcaactgtagtcccagctactaaggag

SEQ ID NO: 132735 - DNA, 201 bp, Homo sapiens
atggatttaaaatgcacattagatcagtcatctgcagagttgtgtctagacttcactatattttagcttttcaaagtcttattcaaggatgatgaactctrctagtctttctactttattcgttccttcttacagttgagttgtgtagataggttttgaaatgtattgaaattgggttctttctcaaatatctctctatag

SEQ ID NO: 132736 - DNA, 201 bp, Homo sapiens
tttgaatttgtccactttgggagtgtgatgctgcttggcatattctgtgaagagatgatagctcagattattcattttgttgtctttctggtatttaggtkgataagacagtaacaatgctatgcatatatcgcttgtcttttaggaatcgtatattcttgtgcaggtagaaactgtgtttgatcagttgaagtacttacg

SEQ ID NO: 132737 - DNA, 201 bp, Homo sapiens
acatttcagtggttttctttaagccagagagatttattcattcatgcattaatcccacaaattatgtggctgatgatatggcaatgaatggcatacttccwaccctcaaagaactcagtgtagtaacagacaaatatttagataatttgagtgtggtctagaaagacagaagtgaactggattttacaagaatattgagta

SEQ ID NO: 132738 - DNA, 201 bp, Homo sapiens
ttttagtgtttgaagaacctgaagatcccagtaacaggtcatttttttccgaaatcatctcctctatttcggatgtaaaattcagccatagtggtcgatayatgatgactagagactatttgtcagtcaaaatttgggacttaaatatggaaaacaggcctgtggaaacataccaggtatttgagttttttctttcaatga

SEQ ID NO: 132739 - DNA, 201 bp, Homo sapiens
agttttgaaacttcaaggttttgcattcatttgagatggtcttaggcagcggaggcattttccacaaagttgttgcattgtttcattcctgagaaatgttraagtttgagttttaatggtattgtgtgtcttgaattacagtaggaattttccaaacaaaactcagataaatttaaacatgtacttgtgagttttaaaaat

SEQ ID NO: 132740 - DNA, 201 bp, Homo sapiens
tacatgcctgttaccaaaataattttacctggctactagaaaataagatcctggtatgaatttgggatgggcgaggatggtgtgtttctcatggtgatgakacaggcagtcagtgaggcatattgcaggaataataccaataaacctggtgcactgaagtcagaagtcccaggtgagtctggttctaaattagtcatatga

SEQ ID NO: 132741 - DNA, 201 bp, Homo sapiens
tgttctccaggccgaactcggaactcctggcctcaagcgatcctcccacctcggcttcccaaagtgctgggactacaggcgtgagccaccgcgcccggccstgagcccagctcttaagcacgcagtccaacacgtttagctggagagacgccgggtcacttcttgggccataccctctcatcacaaactcaggtttctctt

SEQ ID NO: 132742 - DNA, 201 bp, Homo sapiens
cctggaagagatgtctttattctacttccacactttcaagtttggctggttaacattttccgttagaatttgggaggtgtttcttttgtctgttagcttcyggtgttacatttgagaacactaatgccattctgtttactgatttttcctttctggatgatgtgctttggtgtgggtctttttcattaattggactcgtac

SEQ ID NO: 132743 - DNA, 201 bp, Homo sapiens
aaagtagtagtgtaagtttacccattaaataccatgaatgatagtatctgtttagcatcaaatagttttcttgctttgttttaaaatactaagttttttcwcattcatttgacaaaaaattatgagagagaatggccattgaaaacatattgctgacattttgtcatgttattaaaataaaacaaaaattagccttaggtg

SEQ ID NO: 132744 - DNA, 201 bp, Homo sapiens
tgtaaatcaaggttttctgatgaagtcagtggtgtttgacttgttcagagaagtaagtcctgacttcaagggaggagttgtgtattactcatgttgtaackacattacctgttgaatagtaaacactccagtattggatcattagttctgtgcagttgtgtaatactcaccaagttatgaaagtgctgtatacttggaaaa

SEQ ID NO: 132745 - DNA, 201 bp, Homo sapiens
gagtagctgggactacaggcacgtgccactacacccagctaatttttttttttttccgagacggagtcttgctcagttgcccaggctggagtgcagtggcrcgaccttggctcactgcaagctccacctcccgggttcacaccattctcctgcctcagcctcccgagtagttgggactacgggtgcctgccaccacgccag

SEQ ID NO: 132746 - DNA, 201 bp, Homo sapiens
aacaaagtcaaagttttcaagaacctattgacgtgaagttaggagataaatcagttatagttcccctttgctgatacttagtagctgcatttttctactgrttggttaaataattttctttagaggttgttaaatattttaacgtaagcatattcttagcatcgtaaaatgctgatacttggtatatacattttagtaaga

SEQ ID NO: 132747 - DNA, 201 bp, Homo sapiens
tactattttgattctacataataggcagtcttaatcaacttcattgttccctttaaattttttaaaattcagtactgaacatgtatatgtttacatgtagrtacagacatatatgtgtttgcatacaccacacatgcatatcaagtttttccctctagctttaattacttttaagggacagggatagagacctgtctgtga

SEQ ID NO: 132748 - DNA, 201 bp, Homo sapiens
tgtatgattttttttctcacatactgtatagtgaataccttttcatgtcattcagttttctgtatcaccatctctgtaatgacatgacatgacataattakgtttatttgatctagtctctattgttagattcctagattgtttatttctgcctcttttttcagggttgggaggtgagcgactgcccctttgcagttactg

SEQ ID NO: 132749 - DNA, 201 bp, Homo sapiens
gattggttaaataattttctttagaggttgttaaatattttaacgtaagcatattcttagcatcgtaaaatgctgatacttggtatatacattttagtaarataacatatcttagtaaaaatatgactagttctaataggtattgctgtacaaatgtattaagtataaaaataatccagttttcaaatgacactgctttaa

SEQ ID NO: 132750 - DNA, 201 bp, Homo sapiens
ttctacataataggcagtcttaatcaacttcattgttccctttaaattttttaaaattcagtactgaacatgtatatgtttacatgtaggtacagacatayatgtgtttgcatacaccacacatgcatatcaagtttttccctctagctttaattacttttaagggacagggatagagacctgtctgtgacttgatttgac

SEQ ID NO: 132751 - DNA, 201 bp, Homo sapiens
gacatgacataattatgtttatttgatctagtctctattgttagattcctagattgtttatttctgcctcttttttcagggttgggaggtgagcgactgcscctttgcagttactgtgtttttccctctttctaaaaaaagaaaagtagcaacttggtgattgaaaatacattatttcattggattttggttttactttac

SEQ ID NO: 132752 - DNA, 201 bp, Homo sapiens
tttttctcttccaccttccccacccattcacagattaccagtcgggttattattattattattattattattattatttattttagttttacagagtctcrctctgtcaccctggctggagtacagtggcatgatctcagctcactgcaacttccaccacccaggttcaagtcatccttatgcctcagcctcccgagtagc

SEQ ID NO: 132753 - DNA, 201 bp, Homo sapiens
cacagtcaaaactttgtttcatgcacaaaattaattaaaatgctgtataaaattactttcaggctatatgtataaggtatatacaaaaccactgaattttrtatttagacttgggtcccctccctaagataatatcatgaatatgtaaatattccaaaatatggaaaaaaatgtgaaatctgaaacacttctggtcctaag

SEQ ID NO: 132754 - DNA, 201 bp, Homo sapiens
aagtatacatattttctttccatgtgcccactgtgtgtacctgttgcacatatcctgtagcctaggagaggaatcatttaacagagatacttgtaaaaagsacttttgtttttctatacagaatgtaaactctacttttttactgtcacttgcagtttttagattctctgaaagattctctgatagcaattttttgtttac

SEQ ID NO: 132755 - DNA, 201 bp, Homo sapiens
gataatatcatgaatatgtaaatattccaaaatatggaaaaaaatgtgaaatctgaaacacttctggtcctaagcatcttggataagggatactcagcctrtaaaagcacaatggagttacttatatttagaagtagctgttgaaaaatgttaagtgaaattctttcagaagtttgcctttaagtcttgactattcttagt

SEQ ID NO: 132756 - DNA, 201 bp, Homo sapiens
tggtagggatggtctcactgtgttgctgatcttgaactcctgacctcaagcaatcctctgtcttggcctcccaaagtgttggattacaggcatgagctgcsactcctagccagagctgctttttatatgtttattggctatttggatgttatcttttggaagtgactatcgaaatctcttataattttctgtgttgtgtgt

SEQ ID NO: 132757 - DNA, 201 bp, Homo sapiens
tttctttttaaagatatggacttgttaaatcattttcctaatttcagtgcagtatatttgtatttttcccccaggtgcatgaatacctcagaagtaaactytgttcactgtatgaaaatgactgcatatttgacaaatttgaatgttgttggaatggatctgacaggtaattaagtcaaacctctcaaatatgaattttat

SEQ ID NO: 132758 - DNA, 201 bp, Homo sapiens
ttttcttagggttactggtttttctgtcctgtataagaaatacttttcaaccccaaaatccagggaagacatttccgttatcttttagaactgtatgactsgtactgtagctactagatccatgtggctattcagattaatggggagttgagtctgttctctctcccctaatgcaagaccctgttgcagtggtccctgtct

SEQ ID NO: 132759 - DNA, 201 bp, Homo sapiens
tgttcagtgtgtgcctagtgctcaacatgactagtggcaaccatactggacaacacagatacagactatttccatcattgcagaaaagttctcttgggtcmtgttatcctaaaacttaattattgtaccttcacatttatatctcttattcatctgtaatcactttacgagtggttttgggaaggggtcgagcttcatttt

SEQ ID NO: 132760 - DNA, 201 bp, Homo sapiens
ggcatcttgagctttttagacagaattttctccttttgtgatacattaatttatttcctgttgcaaagagatggagcttcttgcagtccacgaaactgccrtatacctctatgattttgtttttggattctgtaagataccatgtttagtagacctgtgttgttgtccacgagtctacaggaagatgttcatgttttgttt

SEQ ID NO: 132761 - DNA, 201 bp, Homo sapiens
tatatagacagctctggttctcttagctttgtatgtgtgcatgtgtgtacatgagcgtatgttgttttggtttaaaaacataacactaattgtaaaaatasttgattagagaagggggtggaaagtgatggaataatccaagattttaacggttttgaagccttggcccttcattataatttttcctttgaaactccgtaa

SEQ ID NO: 132762 - DNA, 201 bp, Homo sapiens; identical to SEQ ID NO: 23251

SEQ ID NO: 132763 - DNA, 201 bp, Homo sapiens
aagagatactgaaataaggtgtggcgcacagctacaaccagtttttcattgtatttaagcagataattagcagttttatgttctattatcagaaaaaaackatttgttttccttaatattaaaaatttttttttaactatttcaaacttagagaaaatttgttagaataacacaaagaactcttggctggccttgacccag

SEQ ID NO: 132764 - DNA, 201 bp, Homo sapiens
tagtgaacaaaatattaaaatcaagttcttgaaaattgtggaataagcagaatgatgagaggttgaagcaaaaatgtattaaatcagtgaagaggttacartatgttacgtatttgcatataagtgtttgcctagtttatcttaaagttgattgtaggaagaaaggtacgtttcttaatgctgttaaataggaaaactgaa

SEQ ID NO: 132765 - DNA, 201 bp, Homo sapiens
ctctaggttttacgtgttcagttcacttaaggaatattaaggtttcttccttattagaaattgagcccggctgggtatggtagcgcttgcaaacttccagmagtttggaaggctgaggtgggaggatcactgaagaccacaagctcgagactaccttgagcaacatagtgagaccctgtctctacaaaaaaattttttaaa

SEQ ID NO: 132766 - DNA, 201 bp, Homo sapiens
ttactttgaaggaagagtctttggagtatgagtatattgaggatttgtctttaaagcctactaaaaatttctcaaagtgaaggaaatagcatatatgtgtkttatacatactctttgattccactagtaaattacaaaatacattcaaaattaagctataggtttagaggcacatatgcagctggtaaaactatgaagaaa

SEQ ID NO: 132767 - DNA, 201 bp, Homo sapiens
tgatgtgtgtgaaattgtgtgtgattgtacatatgtgcatttctctggtcggagtccgtagctgccatcaaaattgatatcatttagtccagtggttctcyaaatgtcgtctggcaacccctgaactcattccaaatgtctgtgaagtaaaaactattttcacagtagtactcaggtgatacttgcctttttcaatacatt

SEQ ID NO: 132768 - DNA, 201 bp, Homo sapiens
gtagaggtaatcttcattaccatgtactagcagtttaaaaaaccatcagttttaagaatgtccttgaagcagtgaaaacttaatttgattaaatttctacytgaacacatgtctattaaacgttctgcatgacagaatggaaggtatacctagagaaagaacttctgcaagggggtaaagtggttgtctggaggaacagca

SEQ ID NO: 132769 - DNA, 201 bp, Homo sapiens
gcagcagtgtaaagcaatgtcattaattttgttggtggggagggggatgtagtcatttttcataacatttttgttaatgtgtgaggtttattactattttmcaatgaagaaatattttaaagtttaaaaggtctttgatggtctaagattttaagagttaaggggatcctgtcattcagaaaatttgagttgttggtttag

SEQ ID NO: 132770 - DNA, 201 bp, Homo sapiens
tccgaaacctaatgacctatggtaaaggtcttatttaatatccttaccttgtatgacatgtgacacttctttttcttaacactagcattactactgaagtstagtagacctcactcagtacagtcacttaaagtagtagtgtaagtttacccattaaataccatgaatgatagtatctgtttagcatcaaatagttttctt

SEQ ID NO: 132771 - DNA, 201 bp, Homo sapiens
aaatttcttatcaaggcatgcaacatgcaaaaatgtttgttaaaggaattggtagtagcaaaggcattgcttgttctgtctttcttctccttgacataaartgagcattatttttttttctagcaacagaaccaatttttaatgaaaatttttagctacctaatgtttttatgcatattatagaaaacatataacattaaa

SEQ ID NO: 132772 - DNA, 201 bp, Homo sapiens
gtcttcctttatagcactttgttacgtagatatcatatggtaccccacatctctactgttacatactacagagtttagtgtaggactgatttatcttcgtwccttatgcaggcatgaagctgctctgtctagaacagtgcctggcacacagtagttgaatatttgtttgaatgaaggaacgtaaatgttattgttcttagg

SEQ ID NO: 132773 - DNA, 201 bp, Homo sapiens
gcattatttttttttctagcaacagaaccaatttttaatgaaaatttttagctacctaatgtttttatgcatattatagaaaacatataacattaaatttrccatcttaaccattttcaaatacactgttcagtagtgttaactctattcatattgtgaaacagatcctcagaactttttcgtcttgcaaaactgaaactc

SEQ ID NO: 132774 - DNA, 201 bp, Homo sapiens
gaaattagcattttcttttaaccagtagattaaaaccatacagatttctatatggagagttgctgagaaggttgtacacatttggaatttacatctagatrtgtaattagtggactctaaacaaagctaagtaaaatctataatatctaagatatacaagtctttaaaaataacagtttgggttcacagatactggagtct

SEQ ID NO: 132775 - DNA, 201 bp, Homo sapiens
caaattctaacacctagaccataaacatttgcagaatatatacttaaatgacttcaggatgaaatgggggaagaaattcagcacttcctccatctaattgwtgcccctcgtccacagtattagttcttagaaatgctgttcacaaatgcctgatggccatcagcgttggccgcctcctgggtgcccgtttttctgatcatg

SEQ ID NO: 132776 - DNA, 201 bp, Homo sapiens
gaaaaagtaagaatttcattctgtataataaattaccaatcccttggtttgcattaatagtgtatagataaaatttaagaacattacattactttttttttaacaaaaatactcttatgccttttaaatactacctttatatcgcacaatttggaagtcaatgtgtatctaaaattgctgggttgacttaatgcatagtag

SEQ ID NO: 132777 - DNA, 201 bp, Homo sapiens
agtagagctgttcctttctttcccatcctcccttcctactttgagcttcctaggaagatttcttctgaggtttccttggcttaaaaaaaaaaaaaaaaaaacaactttggtttaaaaacttcaggatacaatattcttgtcttgttgaatattaactcatgaaaattgatacatgcctgttaccaaaataattttacctgg

SEQ ID NO: 132778 - DNA, 201 bp, Homo sapiens
caacccgggaggcagaggttgcagtgagctgagatcatgccactgcactccagcctgggtgacagagcaagactcttttgtctcaaaaaaaaaaaaaaaaagaagaagatacaaattgatatcaaaataccttttgaaaaaaaaatacttaagcaattcctctcagttgtttcttcccctcctttatttttatttttttaa

SEQ ID NO: 132779 - DNA, 201 bp, Homo sapiens
ctaattttatctcatctgaaagtttcataaatacattgtggtttctttatttggatctttaataaggaggatggatttaaacaggccacaagacaactggmccagggggcgggggtgttgtcatcctcatcacaaatactttgcaagtatttagaacaaatacttctcagaatacagatttaggctaggctcatatctatc

SEQ ID NO: 132780 - DNA, 201 bp, Homo sapiens
tggtttcttcttgaaggacttggggatgtatgcttttaatcagttttcttcaggccctgtttcctacttgtgaaccctgatacaagaaggggaaaggttttaaaaaggaggcatccagtcctatggaggcctctgtggaatctttgataggctctgctaagaagtgggagcaagggagagcagctttactattttgattct

SEQ ID NO: 132781 - DNA, 201 bp, Homo sapiens
atagtatgtttttttatttttagtcacatttttgtctttcgtcttttatttctcatcatgttgatgatttattcttttttcttttttttttttttttttttgagacacagtctggctctgtcgcccaggctggagtgcaatggcaccatcttggctcactgcaacttcacctcccgggttcaagcgatcctcccatgttca

SEQ ID NO: 132782 - DNA, 201 bp, Homo sapiens
ggatattctacaaagtacctcaccaccactactcaaaactgtcaagatcaagaaaaataaggagagcctgagaaacttaaaggcagagagactaaggaaacttgatgactaaatgcagtgttgtttgaattctggagcagaaaaggaatgttagtggaaaacctggttaaatctccaaatgcagtctgtagttaatagtaa

SEQ ID NO: 132783 - DNA, 201 bp, Homo sapiens
tctttcacttcaaatagtatgtttttttatttttagtcacatttttgtctttcgtcttttatttctcatcatgttgatgatttattcttttttcttttttytttttttttttttgagacacagtctggctctgtcgcccaggctggagtgcaatggcaccatcttggctcactgcaacttcacctcccgggttcaagcgat

SEQ ID NO: 132784 - DNA, 201 bp, Homo sapiens
gagtccctactggggcattgcctcgccaagctgtgagaagagggctaccatcctccagactacagaatggtagatccaccgacagcttgcaccatgccccrggaaaagctgcagacaatccacaccagcctgtgaaagcagccagcagggaggctgtaccctgcaaagccacaggagcagagctgcccaagaccatgggaa

SEQ ID NO: 132785 - DNA, 201 bp, Homo sapiens
gttttttccttctctgtttcatttgttctttctggaacttatctggatcttggactttttgtactggtcctctttttttttcccttcccccccccccccccaactattttccatttcctttttgctttacattctgggggagttcctcagttttgttctcaactctttcatttatttttaccattgcatttttaagagctc

SEQ ID NO: 132786 - DNA, 201 bp, Homo sapiens
gattctctgaaagattctctgatagcaattttttgtttactacacctccaatttgtagtgaaaagaatgggctgctataccattggatttaggtcaggtamtatttctgtcatttctcagtctcgtaatcttgggcaggttactaacactgaattgaattttcctcagcagcaaactagagatagcaattttttattatag

SEQ ID NO: 132787 - DNA, 201 bp, Homo sapiens
ctatttccatcattgcagaaaagttctcttgggtcctgttatcctaaaacttaattattgtaccttcacatttatatctcttattcatctgtaatcacttyacgagtggttttgggaaggggtcgagcttcattttatttcctatgaatagtcaacctaacaccatttagtgaaaagaccatcctttccccattgcccagc

SEQ ID NO: 132788 - DNA, 201 bp, Homo sapiens
gcagcaaactagagatagcaattttttattatagtattattatgaatattaaataacttcacatacatcatgagtgcaagtgctcaataaatgttaatttrttcctcctttttaagtgtttgtaaactacacagagtatctcaaactgcagatacaaaatactcaaaggatggtctccattccaggatacgctataggaga

SEQ ID NO: 132789 - DNA, 201 bp, Homo sapiens
tttaacacatgaagaaaacgtgatccaggggattgttatattttatgaacttcaaagggaaagagacacaagtagtaaaatgaatctttttttttttttttaatctaacaccaggtagggttcatctgaatcttctctcagagagaaaccaactccttaagggtccaggttagattgaaattccattttgagagaaacaag

SEQ ID NO: 132790 - DNA, 201 bp, Homo sapiens
ttcaagcaaaatattgaaactaagaactgcaaattctaatagtattgcaaccagtaaaagaagatatattatccacattgttcattttttcttcagcactygaaaggatcaacatcagttgctttttaaaactaaatctatgtaatattgttctattttatgttctcaaaaactgaaataatgaagttttctgaatcttaa

SEQ ID NO: 132791 - DNA, 201 bp, Homo sapiens
tttctcatggtgatgatacaggcagtcagtgaggcatattgcaggaataataccaataaacctggtgcactgaagtcagaagtcccaggtgagtctggttmtaaattagtcatatgactggaagtatactgcatacttatgcatcttcaacttcaatattcaattaaactaagaagctttcaggagaattctagccagaga

SEQ ID NO: 132792 - DNA, 201 bp, Homo sapiens
atacatgtgcatttataatggaaaatataggcttcagttaaatttatgcccagaaaatggtatttaagaaagaaataggcacagtttcagtgttgttatcmgtagttaatggactgaaagccaagaatagtgatattcagatattgctataatgttcttttattagtctcttaactgtgccattttcaagtgtttttggcc

SEQ ID NO: 132793 - DNA, 201 bp, Homo sapiens
tcttactttgagtcttttagttgtctatttgccactatgttccagtagaacagaaagtagtaaaacataattttggaattaaactgacatttaaagtaatsagagatacttcaacaacagttttatcacagagcttaatatgattccgatttcatggtgttgtgtgttacagaggataatagaacttatagaatgttttct

SEQ ID NO: 132794 - DNA, 201 bp, Homo sapiens
agtctcatagcagaggagaatataatgtttacagcaccttccagagccatgaaccagagtttgactacttgaaaagtttagaaatagaagaaaagatcaayaaaattaggtggttaccccagaaaaatgctgctcagtttttattgtctaccaatggtaagtatacatattttctttccatgtgcccactgtgtgtacctg

SEQ ID NO: 132795 - DNA, 201 bp, Homo sapiens
tttgttagcttttgacattgtataatatgatactatcaaatttttaataatatatgcccagaataaccatataatttatcaccaaaccaaggcatggttaygctatgcatacatgtgcatttataatggaaaatataggcttcagttaaatttatgcccagaaaatggtatttaagaaagaaataggcacagtttcagtgt

SEQ ID NO: 132796 - DNA, 201 bp, Homo sapiens
ttcctcatgattagattcaggctatacatttttggcaggaataccacagaaatgctggcctaatgatacctttttaaagtttcaagtagccacagcctagrtgtcctaatacattaaaaccacgcaaactcagatgatatggggatgtcaatctaaattacacaagccatttttaaagaaatacagttttgtcatcttcag

SEQ ID NO: 132797 - DNA, 201 bp, Homo sapiens
taaaatgctgtataaaattactttcaggctatatgtataaggtatatacaaaaccactgaattttgtatttagacttgggtcccctccctaagataatatyatgaatatgtaaatattccaaaatatggaaaaaaatgtgaaatctgaaacacttctggtcctaagcatcttggataagggatactcagcctgtaaaagca

SEQ ID NO: 132798 - DNA, 201 bp, Homo sapiens
atacttaataaatgtcgagcagtaatgggtggcaaatagaactgacaaggaagtgtcttgggcagtttaaaaattttgccacccctttaaactgatacttwtataaatatttgcttaaaatgttctaagtggtaaaagtaaaatgatgttctgttaagaaaatattacagcctgggcaacatagcaagaccctgtctctac

SEQ ID NO: 132799 - DNA, 201 bp, Homo sapiens
acccgggtgacagagtgaaaccctgtcttgaaaaatacatatatataggccgggcacggtggctcacgcctgtaatcccagcactttgggaggccaaggcmggcggatcatgaggtcaggagattgagaccatcctggctaacgtggtgaaaccctgtctctactgaaaatacaaaaaaaactagccgggcgtggtggcgg

SEQ ID NO: 132800 - DNA, 201 bp, Homo sapiens
atgaacgaaaaataatgtgtgacaacagaaattcaagcttctttttttctctcttgttttcccttttttctccagttcctccagtgttttattcttccctrtaattatatattctgcatcttccctcaagagtaatataattgggtggggtggggtgcacctagaacatgcaggagggtccaaagcacccttcactattgg

SEQ ID NO: 132801 - DNA, 201 bp, Homo sapiens
gctcatacagctgtttttaaaagcaatccacagatggaaatggtagctaagaactgaggtccgctaggctcttcctactgctcctcccagctttcttggtrttgttacactgtgttgattgtttaagccagtgttcacagttgtagtagactggataatggtccccgaaagaaatctgcgtcctaatctctggaacctgtg

SEQ ID NO: 132802 - DNA, 201 bp, Homo sapiens
aagattaatagttttttgggtttcttttcattttctaatctgagcatctatttcctttgagtttcttttttcttattcatattggtagactggtatctggkaatccttggttgtctgttagttcttaagaatgaggtagtaagagtaaattaggagctttgtgtccactggcagagatattcggctggtgggcttcactgt

SEQ ID NO: 132803 - DNA, 201 bp, Homo sapiens
gcttcattttaccttgatctcctttccacatttcgttcagttgaaaaggagatgtatgaaaatgtttattatgatttcagaaaaatatggaggacactttrtaagttgaggaaatgaagaaggcatgttagtggttttttcaaaagttagtttgtggtattttgcattagaaagttgtttcaagtctgtctaaatataagt

SEQ ID NO: 132804 - DNA, 201 bp, Homo sapiens
ccagctactcgggaggctgaggcaggagaatggcgtgaacccgggaagcggagcttgcagtgagccgagattgcgccactgcagtccgcagtccggcctgsgcgacagagcgagactccgcctcaaaaaaaaaaaaaaaaaaagaatggaaaaaagaaagtagggacaaggcattgtatggattataatgtagcagaatct

SEQ ID NO: 132805 - DNA, 201 bp, Homo sapiens
aaagcagatagctacattatgaatccataagaacttttaattctaatattaatccttaggaagattttaccttccatcattgtttggatttattaagaagwtatgtatgaaattaaatattcatattttgttactaacttaattttttcagaagttactttaattctcagtggttctagctaactgataattgtggcattt

SEQ ID NO: 132806 - DNA, 201 bp, Homo sapiens
aggtggaaggagttagcaaggcagtgggccaggaaagggagatacacacaggggccccttacagtgttcagataagtactgagtaacacatgggtgaggaractgcttgaggctagtaaaagaaccacacggaaagatgagaggtaacaagcctaggaactcacacagagtctgtaatagtttctgttgccaccagccata

SEQ ID NO: 132807 - DNA, 201 bp, Homo sapiens
cttccctctttcccctcttctgtgtctccgtcgctccctgtctttctctctctttctctttctctgaggtttcttttctctgccagtgtttgttcatctgsttcattcttctttctgcagactggatttttctgtattatttctctatggcctaaatgtggtcttttacaacccatactttatgtgtccttggcttagaag

SEQ ID NO: 132808 - DNA, 201 bp, Homo sapiens
tacttgcttcaaaaattttatcagtctgtatttgtggtatagaaacaatggttgtagttttattttttttcaaatatagtcatattctaatactaagtatrcttttttaaaacacacatttcccatctataatcattcacttagggatgaagttagcaaaagttttttgtttggaggttggtcttttggggtttgtttttt

SEQ ID NO: 132809 - DNA, 201 bp, Homo sapiens
ttatttttatcgaaaagttaatagcaaatttgctattgacactcagtactttttacgacatactgtcaactttgtcacctcttcttaagcaaactttttgygatttttagcaaactaattttagcattcttgataacatatactggttgaaagtgacggtaaacacgttttaagctctgttgcctagaaattttatttttg

SEQ ID NO: 132810 - DNA, 201 bp, Homo sapiens
tttctgtagcctcacaaaatgagttgtgtttcattccctacctattcctattttgtcagtattctgacaaatagaataataatagagttaatttagaatgwaagaaccagtgggggaaagcagcattaggaagaagcttcaatcatgtcagactccttagagggtgtttattatcaatttttgcatcttttctttttgatt

SEQ ID NO: 132811 - DNA, 201 bp, Homo sapiens
tcagactccttagagggtgtttattatcaatttttgcatcttttctttttgatttatgtatttattcattttttatttaatttgatttgtcaattatgctrtttatatattaatatagccacagactcatttgtcatgaaaagatatttgacctggtcacattacaatggctcttcagattttagaggctggtgcatttcc

SEQ ID NO: 132812 - DNA, 201 bp, Homo sapiens
tgaaaattacaccacttaaaaagcgcttgtttttatcctacctgtgtgaaagcttcttgtcttagtctatttgtgctgctataaaaaaataccatagactsggcaatttctaagcaatagaaatttatttctctcagttctggaggctaggaagtccaagatccaggtactcgtaggcttagtgtctggtggggaccccgt

SEQ ID NO: 132813 - DNA, 201 bp, Homo sapiens
aacttaacaaaaattgctgccttttttcaacatatagcctttgaataagggagataaattactaggtttggttttgttttaggtgattttgataataccaygagtggtacctctgttttcatcttttgtgttagaaaatttaaaaataattaagctatagaattaattttatagtgatattataatcccagaagaatcaca

SEQ ID NO: 132814 - DNA, 201 bp, Homo sapiens
gcaccctctagtctataatcacttttgctcagtttgttatttcttaaggcacgtgagcaagattagtaccccttgaaaccaccaaagataatctgttgtattataatatatatatatatatatatatatatatatatatattttcagggaatttgattgtttcttttaaatttccacaggaatctttacagatagcacact

SEQ ID NO: 132815 - DNA, 201 bp, Homo sapiens
tccaaatggagaaaaaaatacatatttatttaagaagcatcaataaaaattacaagttgcatgagagttgatattagtggtagtgtgccttactgtgtcgktgttctttatataataatgccttgtgttatatttgaatacatgtttatacaagacagttaacttttctgctaagtcagtaaatggcattgatacttatta

SEQ ID NO: 132816 - DNA, 201 bp, Homo sapiens
accctctagtctataatcacttttgctcagtttgttatttcttaaggcacgtgagcaagattagtaccccttgaaaccaccaaagataatctgttgtattataatatatatatatatatatatatatatatatatatattttcagggaatttgattgtttcttttaaatttccacaggaatctttacagatagcacactca

SEQ ID NO: 132817 - DNA, 201 bp, Homo sapiens
agatattaaaaattagtaaattccttgcttcccacagttcctgtactaagccagtcagaataagggctgcatgtcactcctacatttcacagccttaggartaatctatatatttgactggctcagtgctgtgttaaataaacacagattaattgactaggctgaggatgaaataataatctgaggtagctgtgaaattac

SEQ ID NO: 132818 - DNA, 201 bp, Homo sapiens
tgtgttttagtctagcaaactctgcaggcacctgtggtttaatggaaaaacctgaacttagggtctgaatatctgggatctagtctttcctcttctgtttyataacccagtagtcttcagcaagtgtctaactttttctcatctttggttttctcagtagtaaaagttggattccaagacctcctttccagcttgttgtaa

SEQ ID NO: 132819 - DNA, 201 bp, Homo sapiens
tcctttttattcattctatcctgccttggctggatattttaatgaaatcataggactccagtctacatttctattaggatagaaaaacactgattatgttktattcgtcccatgaatttgatgatgcttgaactagcctggccacatatcattttgtggagtagattttctgtggcatatcatctggaatacagcttctat

SEQ ID NO: 132820 - DNA, 201 bp, Homo sapiens
agtaaggctaggcatggtggctcacttctgcaatctcagcacgttgggaggctgagacagcaacatggtttaaggccaggagtttgagaccagcctgggcracatagtgagaccctatctctatataattatttataaataaatatttaataaatatttatttaaaatataatgaattaaattaagaagtatttattagta

SEQ ID NO: 132821 - DNA, 201 bp, Homo sapiens
tcttaatctcaattaatagacttaaagtaaggctaggcatggtggctcacttctgcaatctcagcacgttgggaggctgagacagcaacatggtttaaggycaggagtttgagaccagcctgggcaacatagtgagaccctatctctatataattatttataaataaatatttaataaatatttatttaaaatataatgaa

SEQ ID NO: 132822 - DNA, 201 bp, Homo sapiens
cctctagtctataatcacttttgctcagtttgttatttcttaaggcacgtgagcaagattagtaccccttgaaaccaccaaagataatctgttgtattataatatatatatatatatatatatatatatatatatattttcagggaatttgattgtttcttttaaatttccacaggaatctttacagatagcacactcaag

SEQ ID NO: 132823 - DNA, 201 bp, Homo sapiens
tctagtctataatcacttttgctcagtttgttatttcttaaggcacgtgagcaagattagtaccccttgaaaccaccaaagataatctgttgtattataatatatatatatatatatatatatatatatatatattttcagggaatttgattgtttcttttaaatttccacaggaatctttacagatagcacactcaagtt

SEQ ID NO: 132824 - DNA, 201 bp, Homo sapiens
tctcatgtcttttcttgcaatttagcctgtggacttccccatctcccttttttggtagggtaaggtaggtgtcattggaaggaagcagatacagcttttartttttttaggtttaaattgaaaacctgactcatgagtgttctgatcaaaggtgacttaaaactcatataaacagtgtggaattatggtagctataaaatc

SEQ ID NO: 132825 - DNA, 201 bp, Homo sapiens
ctagtctataatcacttttgctcagtttgttatttcttaaggcacgtgagcaagattagtaccccttgaaaccaccaaagataatctgttgtattataatatatatatatatatatatatatatatatatatattttcagggaatttgattgtttcttttaaatttccacaggaatctttacagatagcacactcaagttc

SEQ ID NO: 132826 - DNA, 201 bp, Homo sapiens
gacccagaaagtctgtgtgtaacatgcactcatattctcaataaccttagtttaactcaataaacaaaaattaccccagtattatattttataagacagtwaagtgctaaattgacatagatgttcagaaaaggagtaatcaaagtcttcaagaaatcaaggaagacttcttggagatgaggagacttatttacactggat

SEQ ID NO: 132827 - DNA, 201 bp, Homo sapiens
agtctataatcacttttgctcagtttgttatttcttaaggcacgtgagcaagattagtaccccttgaaaccaccaaagataatctgttgtattataatatatatatatatatatatatatatatatatatattttcagggaatttgattgtttcttttaaatttccacaggaatctttacagatagcacactcaagttcag

SEQ ID NO: 132828 - DNA, 201 bp, Homo sapiens
ataatcacttttgctcagtttgttatttcttaaggcacgtgagcaagattagtaccccttgaaaccaccaaagataatctgttgtattataatatatatatatatatatatatatatatatatatattttcagggaatttgattgtttcttttaaatttccacaggaatctttacagatagcacactcaagttcagctagc

SEQ ID NO: 132829 - DNA, 201 bp, Homo sapiens
ttcttaaggcacgtgagcaagattagtaccccttgaaaccaccaaagataatctgttgtattataatatatatatatatatatatatatatatatatatattttcagggaatttgattgtttcttttaaatttccacaggaatctttacagatagcacactcaagttcagctagcaaatagaaatccagttccgtactctg

SEQ ID NO: 132830 - DNA, 201 bp, Homo sapiens
tcttaaggcacgtgagcaagattagtaccccttgaaaccaccaaagataatctgttgtattataatatatatatatatatatatatatatatatatatattttcagggaatttgattgtttcttttaaatttccacaggaatctttacagatagcacactcaagttcagctagcaaatagaaatccagttccgtactctgt

SEQ ID NO: 132831 - DNA, 201 bp, Homo sapiens
attaaaggattaaaaaacatttcaagtaaaatattgattactatgtcagtattctattgaaaaattgtgttcatttgtctctttcattcctcataggaagkgctttaactatgcataccaccaaggataatgatgaatacttgtaaaacacctgtaaaaacattagaatcaatttaaattatattttgattacagataaag

SEQ ID NO: 132832 - DNA, 201 bp, Homo sapiens
ccctattgccatgcccaccaaacttgaaccccattctttccctctcgggaaatattaccacaagctacccggttgctccagccaaaaacctacaagtcggrctttattcttctcttgttgtcttaccttgtgttcagttcatcatccagttttgttggttttacctccaaaatctattccaaatccatttttcttagttgt

SEQ ID NO: 132833 - DNA, 201 bp, Homo sapiens
tgcctcagcctcctgagtagctgggactacaggcacccaccaccatgcctggctaattttttgtatttttagtagagacggggtttcaccgtgttagccargatggtctcgatctcctgaccttgtgatccgcccgcctcggcctcccaaagtgctgggattacaggcatgagccaccgtgtccggccaactactttctct

SEQ ID NO: 132834 - DNA, 201 bp, Homo sapiens
agacagagtctcgctctgtcgcccaggctggagtgcagtggcacaatctcggctcactgcaagctctgcctcccaggttcacgccattctcctgcctcagcctcccgaatagctgggactacaggcgcccgtcaccacgcccggctaattttttgtatttttaggagagacggggtttcactgtgttagccaggatggtct

SEQ ID NO: 132835 - DNA, 201 bp, Homo sapiens
ttcccgcctttctattccacaaagccgccattgtcatcctggcccgttctcaatgagctgttgggcacatggggggggctgacccccccatctccctcccrgacggggtggctggccgggcagaggggctcctcacttcccagtaggggcggccgggcagaggcgcccctcacctcccggacggggcggctggccgggcag

SEQ ID NO: 132836 - DNA, 201 bp, Homo sapiens
ttttagtagagacggggtttcaccgtgttagccaggatggtctcgatctcctgaccttgtgatccgcccgcctcggcctcccaaagtgctgggattacagrcatgagccaccgtgtccggccaactactttctcttaatatttaggtctcagcctaaaaatcaccactgctaataagctcttcctgacctctcatatgggc

SEQ ID NO: 132837 - DNA, 201 bp, Homo sapiens
atcagacatgaatatttcaaactgtttcagtgcattggagagcaatcagcatttgcttctattgctcattttaacagttagcatatttcatcccaaaactaaaaaaaaaaaaaaaaaatgcacttgttactttgcttctgccatgtgttaacttcaacattttattcttttgatgtactcttttgtgggagcatctttttg

SEQ ID NO: 132838 - DNA, 201 bp, Homo sapiens
gtagtttttataacattatgattataataccccaaatctttacatagctagaatcctcctgtgcttctgaaggacatcaaaagggatgtgatcttctcacrtacccagccatgtcaatcatgagccattttagggtgtgtaggctggacaacagattaagaactatctaagtcttagaataatcctgctccattgagttat

SEQ ID NO: 132839 - DNA, 201 bp, Homo sapiens
ccccctcctgcctctcggctgccagcagcatagacaacctcactggccctttagcagagttggccgtaggaggagcctccaatgcaggggatggcgccgcrggaacagaaaggaaggaaggagaaggtgagtagaccccatgaatgcttatttatttataccttttgttagtggagcagaatgacttttttctattgataa

SEQ ID NO: 132840 - DNA, 201 bp, Homo sapiens
tttttagaagaaacttctgttaaggatgaaaatggagatacagaggagtgaattgttaaataaaaacaggtatacacaatggtgctttaccagatgatctmattcttaactctttgtatccttttcttttttttcagcatgttgacatagcggctttattgataaaatacaacacgtgtgtaaatgcaacagataagtggg

SEQ ID NO: 132841 - DNA, 201 bp, Homo sapiens
tgtactgatgaaaaagaagccattggtaattattctataaaataagttatctagtgtagtagaagaaaatttactaaaaactaaactaatttggcattctrtcattttgataaacactcttgtctctatttggtagacttagttatcacaatcaaatttgtcttctgctttagaatatagggagatcatctcattcattct

SEQ ID NO: 132842 - DNA, 201 bp, Homo sapiens
cggtggctcacgcctgtaatcccagcactttaggaggccgaggcaggtagatcacgaggtcaggaggtcgagacaatcctggcaaacacggtgaaaccccstctctactaaaaatacaaaaaattagacgggcatagtggcgggcacctgtagtcccagctactcgggaggctgaggcaggagaatggcatgaacccggga

SEQ ID NO: 132843 - DNA, 201 bp, Homo sapiens
caacatgaatccagcaacagaatgcagatatagctaagaaatggcagctgagatggcagtgatacatgctttaatggtttactcatttacaaaccgtatgrggaaagaggagattaacattggctggtatcttcaaaagtaatcagattcttcattaaaatcaaattcttcattaaaacctttgacaaagctttcagcaga

SEQ ID NO: 132844 - DNA, 201 bp, Homo sapiens
agaaaactgaccgcacgcggtggctcacgcctgtaatcccagcactttaggaggccgaggcaggtagatcacgaggtcaggaggtcgagacaatcctggcwaacacggtgaaaccccctctctactaaaaatacaaaaaattagacgggcatagtggcgggcacctgtagtcccagctactcgggaggctgaggcaggaga

SEQ ID NO: 132845 - DNA, 201 bp, Homo sapiens
agtccttcttacttctcattctcaactgaccaagctagaaaactattaagtataataattgtatttataggctttacatttgtactttacttttaaaaaaygtagtgtcttgtattatttaaatctgctaattatctttttaaaaatatggtgggtattagatttttcatatgtaagcagaatccaagattaagaatgtta

SEQ ID NO: 132846 - DNA, 201 bp, Homo sapiens
tgcggcatcttatggggtaagcatactaacattaaaatctagaaaactgaccgcacgcggtggctcacgcctgtaatcccagcactttaggaggccgaggmaggtagatcacgaggtcaggaggtcgagacaatcctggcaaacacggtgaaaccccctctctactaaaaatacaaaaaattagacgggcatagtggcggg

SEQ ID NO: 132847 - DNA, 201 bp, Homo sapiens
atatattattagaagtatggcttccctttgtacagttttaatactgaaatgtggaggtaggtccatatttgagataaagatgtagggagtccttcttactyctcattctcaactgaccaagctagaaaactattaagtataataattgtatttataggctttacatttgtactttacttttaaaaaacgtagtgtcttgta

SEQ ID NO: 132848 - DNA, 201 bp, Homo sapiens
gggtggtttaattcctcttcataatgcggcatcttatggggtaagcatactaacattaaaatctagaaaactgaccgcacgcggtggctcacgcctgtaawcccagcactttaggaggccgaggcaggtagatcacgaggtcaggaggtcgagacaatcctggcaaacacggtgaaaccccctctctactaaaaatacaaa

SEQ ID NO: 132849 - DNA, 201 bp, Homo sapiens
tttctggtccttattacatatgtatgtattttttttcctttaagctgacacgtttcctgtattttttttactctaaatagcaggctataataacctggaartagctgaatatcttctagagcatggagctgatgttaatgcccaggacaagggtggtttaattcctcttcataatgcggcatcttatggggtaagcatact

SEQ ID NO: 132850 - DNA, 201 bp, Homo sapiens
gctttcactcttccaaggccttaagaaatacattgaagatgcttaaattaggtggaaaaagcaaaaaactagaaaaaaaattttcatatacttttttacartgatgcaaggctttacttaatgcccaggtctgtctgtctaataaaagcattacacatttgcatttacttttagactcacttcaattgttcaaaacaatct

SEQ ID NO: 132851 - DNA, 201 bp, Homo sapiens
acctacctacctacttactacagaaaatacaaaccccatttggtttttcttctttgtagcatggagcagatccaactaaaaagaacagagatggaaatacmcctttggatttggtaaaggaaggagacacagatattcaggacttactgagaggggatgctgctttgttggatgctgccaagaagggctgcctggcaagag

SEQ ID NO: 132852 - DNA, 201 bp, Homo sapiens
tatagtattttgaaggttaacaactttctgggttttttcttaacagcattattagaagtgatagttgcccattaaagaaaaatgagaaaatatactgatgrtaactctcacaccttgttttttgtctatttagacttgcatggtccagtgtgatagccattaaattaaaatcaattacagttttaaaaattaaaaatttag

SEQ ID NO: 132853 - DNA, 201 bp, Homo sapiens
tttggattaagtatgtgataatacatctagacatactgatagttgtcatgattttattgctcagtggggaaatcaaaagatgtagtcattaaatttttgtrttccaggcacataacagtatataggtcttccaaagcagatagctacattatgaatccataagaacttttaattctaatattaatccttaggaagatttta

SEQ ID NO: 132854 - DNA, 201 bp, Homo sapiens
gcttttagtaaggcatggggcttctgtcaatgtggcggacttatggaaatttacccctctccatgaagcagcagctaaaggaaagtatgaaatctgcaagmtccttttaaaagtatgtagtttaaaaagttatgaaatataactaattttatttatattttggttattacttgaaagtaagttggggtatgttattctatt

SEQ ID NO: 132855 - DNA, 201 bp, Homo sapiens
tcaactgaggttggtgttggcacaagcagatacgctatgacaaacagtagagcatatctcagggaggaaagacttacaaagataaaacagcaaggcattakttgctttggaaatgcttgctttattgtgggtttttctatttgattccgattttggttgggaaatgttgaaaaacattaatttgctctgtacataataaaa

SEQ ID NO: 132856 - DNA, 201 bp, Homo sapiens
aaaatacaaaaaaattagctgggtgtggtggcgggcacctattgtcccagctacttaggaggctgaggcaggagaatggcatgaacccgggaggcggagcytgatgagctgagattgcaccactgcactccagcctgggcgacagagcgagactctgtctcaaaaaaaaaaaaaaaaaaaagtccatttagaaatcttgaa

SEQ ID NO: 132857 - DNA, 201 bp, Homo sapiens
tttaacattatttccagctaaatctctgctatctgttgtatattttatacttaaagcatatctcaattgaaacaacgttttcatgatcaatacttgatctrtatttgggtttcataaaatttgtagttgagaaactaggtttacatacacaaggtgtcctaaatatattaaacatttaccaataactgaatcaactatcaa

SEQ ID NO: 132858 - DNA, 201 bp, Homo sapiens
ccgtagagaaggagaataattcaaccttcctgggtcaggacagcacttatggcccagtggaagagtagggcattgatggtagagggaaggaagtcgaagtyagagaattaaagaaaacctaacatccgtaaagttctgcaggtatttaaaaaacaaaaccaggaaccctggtaagatgctgacagtttacttgagcatgta

SEQ ID NO: 132859 - DNA, 201 bp, Homo sapiens
acagagatcttctgaaaatttttgaagttcacactttttctatgaaaatataatttaaaactcttaagacaaactaaacagtaagttaatttaattttttkccattcttagcctgctgggaaaacatggatcttaagaaaacatgtttttagagtgtaccctcaaagaattatatttagtaaaatatcttgtaccttctat

SEQ ID NO: 132860 - DNA, 201 bp, Homo sapiens
acctgtagtcccagctactcgggaggctgaggcaggagaatggcatgaacccgggaggcggagcttgcagtgagcccagatcgcgccactgcactccagcytgggtgacagagcgagactctgactcaaaataaataaataaataaataaaataaaatctagaaaacttccctggcatttacgactttattaaatgcatac

SEQ ID NO: 132861 - DNA, 201 bp, Homo sapiens
tatgttgcctggcaacagcactcggagtagtaattgtgttttctcattgtgatgttggtctgtgtgagcaaccagtgtagtgactctttggttcattattsgtgttgtttttatttttagtctctgtgtgacccaacagtggcaggggttacaaccccctctcctttcttttttgtatttatctatttgtaggattgtcag

SEQ ID NO: 132862 - DNA, 201 bp, Homo sapiens
aaggaacttaaaatctaattgtctaacacagtctacttgactactatatgaactggaaagtagtatatataataagagaagtatagatggatttatattcwgaggaataaacagttatttctgttggtggtggcagcctggggaagagattggagaaatctcatgaagaaaatagaatttcagctaggaatgttcaggaat

SEQ ID NO: 132863 - DNA, 201 bp, Homo sapiens
cacattgtcttaagcagtctcacaactagctaaatgattcttcttcctgtgtataataactcttcaaagctttaaaaaggaatgtttgaatcctcaaatcttttttttgcttaaatatgcttgtaattcaattaagatattataattagctatattacctaaattagaaaagaaatataatcaactactttgacagtcttt

SEQ ID NO: 132864 - DNA, 201 bp, Homo sapiens
ctagtcgtcgaagggagtagcagaaatgggaaatggtcaggaaaatggtcattccgggaagaaagggtatgttgtaattttcagtaaggtgatcagagaarggtaactaaaaagaagatagttcttcagaatcagtgagcaaaagtttataatcaatatctatgagactttttaaaagctttgaaagttgatttttttttt

SEQ ID NO: 132865 - DNA, 201 bp, Homo sapiens
atcagagaagggtaactaaaaagaagatagttcttcagaatcagtgagcaaaagtttataatcaatatctatgagactttttaaaagctttgaaagttgattttttttttaataagaatgtattttctaaggtataaaaggaaactaaacaagatgctcaattccatgtgcccacgcaatgatttttcagatgaatgcact

SEQ ID NO: 132866 - DNA, 201 bp, Homo sapiens
ggtaactaaaaagaagatagttcttcagaatcagtgagcaaaagtttataatcaatatctatgagactttttaaaagctttgaaagttgattttttttttmataagaatgtattttctaaggtataaaaggaaactaaacaagatgctcaattccatgtgcccacgcaatgatttttcagatgaatgcactggacaccctt

SEQ ID NO: 132867 - DNA, 201 bp, Homo sapiens
ataatcacttgaaatgcatatttggataactaaactggtaaatttggaaatagaccaattctaaatataaaatgttttatattttgattttataaaaaaaatgctttaatttgttaatagtaacataataccctacttttgaatattataaaaatgctccataaaataatctactttcagacagtgttcaatacccattag

SEQ ID NO: 132868 - DNA, 201 bp, Homo sapiens
gaggtgggtgtatttctttttgcgcagtgttcagtatagtcagtaccatagaagaatggtaggatttttattataagaatcattgtaactcaaaggtttgwtttatgactttaaaataactttcttttgtttagtggcttggtgccccttcataatgcctgttcatatggacactatgaggtggctgagcttttagtaagg

SEQ ID NO: 132869 - DNA, 201 bp, Homo sapiens
atgctaggtcattcgtagatagtgatcattctacttcagccttaatggtgatcttgagacgggaagatttagaaggaaatctatccagcatgtcttcactrtcaacatgagtaagatccagctgaacaaatgaaattttctatataaatttcaagcttgaactcaaaaaaaaagactttgacttcctgtttttatggagtg

SEQ ID NO: 132870 - DNA, 201 bp, Homo sapiens
acacttacatacttttaagtactccagtgttccccttctctccacttaaatgtccttattatccaagctctgtcccagctgcctttggataaaataacctrtagattgtcttgtaatctataaagcatataatttaattaattcagttggagcttggccttcccctctcttcacccagtgtcacatttaataaataaattt

SEQ ID NO: 132871 - DNA, 201 bp, Homo sapiens
catgctcttgcctcagcctcccgagtagctgggactacaggcacccgccaccacgcccagctaattttttatgtatttttagtagagacaggatttcaccrtgttagccaggatggtctctatctcctgacctcgtgatccgcccacctcggcgttccaaagtgctgggattataggcgtgagctgccgcgcccggcccca

SEQ ID NO: 132872 - DNA, 201 bp, Homo sapiens
atttttgaaattattactccttatttagaaatggataactatatcttaaagaacagaggtgggtgtatttctttttgcgcagtgttcagtatagtcagtamcatagaagaatggtaggatttttattataagaatcattgtaactcaaaggtttgttttatgactttaaaataactttcttttgtttagtggcttggtgcc

SEQ ID NO: 132873 - DNA, 201 bp, Homo sapiens
cctttggtatactttttttgtttttgtttgtttttttttgtttgtttgtttttgagatggagtctagctctgttgcccaggctggagtgcagtggcgtgayctcagctcactgcaacctccgcctcccaggttcacacgattctcttgcctcagcctcctgagtagctgggattacaggcataggccaccatacccggcta

SEQ ID NO: 132874 - DNA, 201 bp, Homo sapiens
tcccaggttcacgccatgctcttgcctcagcctcccgagtagctgggactacaggcacccgccaccacgcccagctaattttttatgtatttttagtagakacaggatttcaccatgttagccaggatggtctctatctcctgacctcgtgatccgcccacctcggcgttccaaagtgctgggattataggcgtgagctgc

SEQ ID NO: 132875 - DNA, 201 bp, Homo sapiens
taaaaagttatgaaatataactaattttatttatattttggttattacttgaaagtaagttggggtatgttattctattaagaacaatactgctgtagagmctgctctcattttctatttcccagaagaccgtttatgtgatatgacacatagctttgcgtagtgcctaaagtgaatatctgaaatggtttaagtccatgt

SEQ ID NO: 132876 - DNA, 201 bp, Homo sapiens
tattactctgctgaaaagacttcccagggcctttggtatactttttttgtttttgtttgtttttttttgtttgtttgtttttgagatggagtctagctctkttgcccaggctggagtgcagtggcgtgatctcagctcactgcaacctccgcctcccaggttcacacgattctcttgcctcagcctcctgagtagctggga

SEQ ID NO: 132877 - DNA, 201 bp, Homo sapiens
ggcagcaatagcaagcatatattataaaaacatcttacagcggttttgcaaaatttatctaggttgagcatctcctgaaaagagtagtagaatgttttcartacaattaaaactgctttcttggaaatgcttaaagatttggtcactgaggataagtagcagttttttatgttggcaaatatacaagaatgatacttgtaa

SEQ ID NO: 132878 - DNA, 201 bp, Homo sapiens
tatagaatattggtcacgattaacagcctttgaggcttccacattcggcaaggctttaatattgtgcctactagaagggtgatttgtttttcttcttgtcyttcccaggcatacccagagtatcttatcacttaccagatcatgaagccagaagccccttcccagaccgcaacagccgcagagcagaagacctagtgaatg

SEQ ID NO: 132879 - DNA, 201 bp, Homo sapiens
ggtgatttgtttttcttcttgtccttcccaggcatacccagagtatcttatcacttaccagatcatgaagccagaagccccttcccagaccgcaacagccrcagagcagaagacctagtgaatgcctgctggtgaaggccagatcagatttcaacctgggactggattacagaggattgtttctaataacaacatcaatat

SEQ ID NO: 132880 - DNA, 201 bp, Homo sapiens
aaacaagatgctcaattccatgtgcccacgcaatgatttttcagatgaatgcactggacacccttggtcagactgctttgcatagagccgccctagcaggycacctgcagacctgccgcctcctgctgagttacggctctgacccctccatcatctccttacaaggcttcacagcagcacagatgggcaatgaagcagtgc

SEQ ID NO: 132881 - DNA, 201 bp, Homo sapiens
tcttttctttaacagccatatttaaattcacattgtttctctgatttggcaaaataaaataactgtgttcccaagacgtttacttactatttctccattgycctaccctcaacccttctcagttcttcaatttctcatagttgaggattttagttctagactagtagtatattatatctcttcattttagaaattcctgct

SEQ ID NO: 132882 - DNA, 201 bp, Homo sapiens
gttgaataatatagtatcctttctagttaatgaaatatagtacccatgtgactttggcgcttcctttataacatagctttgtacctatgaacataggtagraacactttttatatgggaaagacagattttatttacactgcaattcctagaacataaatgctatcacttggaagactgcttgtggacatttttatggtta

SEQ ID NO: 132883 - DNA, 201 bp, Homo sapiens
aatgcaataaaagagagacaattaccttttctttctttcctcttttctgtagtttcatgactcccctgcatgttgcagccgaaagagcccataatgatgtmatggaagttctgcataagcatggcgccaaggtgaggcacacacctgagcagagtgccagactcagcactgagcagccagctgctcttaacactgcttctc

SEQ ID NO: 132884 - DNA, 201 bp, Homo sapiens
ccgttgatctcattaaatcctcatggtactggactttgcataatgttgttgttccttgacttccacgatgttgatgttgtgctttcttagtatttcttacytttctaagtgtttgcctcatccttagactacttgagactctttctgactccccctaaacccccatttttgtctgaaaactgtgatacttcttataaaatt

SEQ ID NO: 132885 - DNA, 201 bp, Homo sapiens
ctaaattgtcctgtttcccatagatactttgccaagttctatgttgaataatatagtatcctttctagttaatgaaatatagtacccatgtgactttggcscttcctttataacatagctttgtacctatgaacataggtagaaacactttttatatgggaaagacagattttatttacactgcaattcctagaacataaa

SEQ ID NO: 132886 - DNA, 201 bp, Homo sapiens
gttagtcaactgccatggcaaaagtgctgtggatatggctccaactccggagcttagggagagattgacttgtacgtatttatatcccgaaatcattatcrcataaattggaatatttaatttctgttgagttttatctaccttaaataataaccttccattcctacaagcagactaattcataatcctcatttctaattg

SEQ ID NO: 132887 - DNA, 201 bp, Homo sapiens
agagtagggcattgatggtagagggaaggaagtcgaagttagagaattaaagaaaacctaacatccgtaaagttctgcaggtatttaaaaaacaaaaccargaaccctggtaagatgctgacagtttacttgagcatgtaccctatgcttttactgattcagttactaatacaaaattgatcttttcacctaaaattatca

SEQ ID NO: 132888 - DNA, 201 bp, Homo sapiens
ggactttatagactgctgtctataaaatcattttcttttccaaccatttattcatcctctggtttggagctttcttaggacaatatcctaaatagtaagastgcttcatccttattccctaactgaaggtgtgaaagctgatttaaaaccattatactctgctgttcccatattacagctatagctgttcttcccaaatca

SEQ ID NO: 132889 - DNA, 201 bp, Homo sapiens
ttacttagccatggcgctgatcctacgttagtcaactgccatggcaaaagtgctgtggatatggctccaactccggagcttagggagagattgacttgtaygtatttatatcccgaaatcattatcgcataaattggaatatttaatttctgttgagttttatctaccttaaataataaccttccattcctacaagcagac

SEQ ID NO: 132890 - DNA, 201 bp, Homo sapiens
agaaccgtgtagaagtctgctctttgttacttagccatggcgctgatcctacgttagtcaactgccatggcaaaagtgctgtggatatggctccaactccrgagcttagggagagattgacttgtacgtatttatatcccgaaatcattatcgcataaattggaatatttaatttctgttgagttttatctaccttaaata

SEQ ID NO: 132891 - DNA, 201 bp, Homo sapiens
taggtttacatacacaaggtgtcctaaatatattaaacatttaccaataactgaatcaactatcaatttttaaatttaactatgactttttttttttgagwtggagtctcgctttatcgcccaggctggagtacagtggcgcgatcttggctcactgcaacctccatctcccagtttcaggccattctcctgcctcaggct

SEQ ID NO: 132892 - DNA, 201 bp, Homo sapiens
ttaaatttaactatgactttttttttttgagttggagtctcgctttatcgcccaggctggagtacagtggcgcgatcttggctcactgcaacctccatctsccagtttcaggccattctcctgcctcaggctcccaagtagctgggattacaggtgcacgccaccacacccagctactttttttattttgggtagagacag

SEQ ID NO: 132893 - DNA, 201 bp, Homo sapiens
agaagaaccctggtttattaagtgaatgtcaccgctcattcagtgctgaagataccattgtgcatcaaagaaatgtttatcttatgttctcaagagaaacwtaatagcacgaggatattaagagagaacagaactcatcactctttttgtgtctcaaatttaatctggtatacagagtcagtgattattttctttgaatgg

SEQ ID NO: 132894 - DNA, 201 bp, Homo sapiens
tttgatttgtttttgtttctctgatttggctaatcagacatagattatgccttagttgcaggatactatatatgcattataggcacattacctcagtgtasatatattatgttcactgtacattgagctcatcatgttttgaagttttggagatttcatccctgttttattaccttttgtacatatactactgtatgtaca

SEQ ID NO: 132895 - DNA, 201 bp, Homo sapiens
caacaacaacaaaaacctataaagtatctagtgtctaatctagagtgataggaaacgtatattatactgtctgtcccaatatgtaataggagctcttatcyttgttttagagcagttaaggaagtctttgtaggtagatttttttaaagcaggaattaaaagggtgagcccaagctagccaagcaaaggttggaagggacg

SEQ ID NO: 132896 - DNA, 201 bp, Homo sapiens
tgagctcatcatgttttgaagttttggagatttcatccctgttttattaccttttgtacatatactactgtatgtacaaaacctttgagtgtatctacttyactcttgccatttatttaaaatattttaaacagtgtaacataatttaattgatatcaccaaacttcaatctattccaagaataggaatatggggttttta

SEQ ID NO: 132897 - DNA, 201 bp, Homo sapiens
taccttaagaataatcatattctttccagcagtaaaattaagaatcctttgtatcctatcttggattgtgataatttgtttagaatatggtttagagactktgttaataatggaatcatcctatctgcagttaagacaaaatcttgtttccattgttgatacaggttctcaaaatactatttttgatgcctttgtaagatg

SEQ ID NO: 132898 - DNA, 201 bp, Homo sapiens
tgtatgtacaaaacctttgagtgtatctactttactcttgccatttatttaaaatattttaaacagtgtaacataatttaattgatatcaccaaacttcartctattccaagaataggaatatggggtttttacagctgcaaaataattgctttttgcaagttggtagtagaattaaatagaattcaatggaaatggaatt

SEQ ID NO: 132899 - DNA, 201 bp, Homo sapiens
aatttttattcttgttttagcagatcaccttattgctggtttaaaatcacccttaacttatggaggtttggttttaagctttgttagtgcagatctgtggmaagcccaaggtgtttcccatgtttctttaagattgtctcttctgcagaccttgttttgcctcggttttgggctttattagtattatgtgtctagactagg

SEQ ID NO: 132900 - DNA, 201 bp, Homo sapiens
gcttactgcatgttagcatgagtaacattttttgaaaaattgttttccaaaacaaaaaataatcctaagagtggaatcattttacatttatgcaaatgttrttcatatttgacttaattgaagacagcaggattctcttttctgcttgtgtatgcagtcttttctgataggctttttggggttgaaatatctgaagaagat

SEQ ID NO: 132901 - DNA, 201 bp, Homo sapiens
attttttgaaaaattgttttccaaaacaaaaaataatcctaagagtggaatcattttacatttatgcaaatgttattcatatttgacttaattgaagacarcaggattctcttttctgcttgtgtatgcagtcttttctgataggctttttggggttgaaatatctgaagaagatctacatttatagttagaaaagggaag

SEQ ID NO: 132902 - DNA, 201 bp, Homo sapiens
acagtttgaacatttggctgcctttagctgagtctttgtgattggtacaagagtaggttacattcagtttacgtatccagttagatgtatgtatgaagaaacctttaggcctaaccttaaatatgtaaggaggcaacttcaggctaaattaaatttaacacatagatgtatatgagagagttccatgagttattttcctag

SEQ ID NO: 132903 - DNA, 201 bp, Homo sapiens
tgataattttttctgaaactttcaaatgtatctagaatggacacttacatacttttaagtactccagtgttccccttctctccacttaaatgtccttattrtccaagctctgtcccagctgcctttggataaaataacctgtagattgtcttgtaatctataaagcatataatttaattaattcagttggagcttggcctt

SEQ ID NO: 132904 - DNA, 201 bp, Homo sapiens
ctaaagtatcttttacagtgtaaataatatctgaggtttgatcataccaaaataaagtccaaaggggcaagtgtcccagagacattttagttctcagtaasaaaccaactcaatctagattaaacacaaatggaaatatattttatactaatataaatgtatattaatgcaaatgtgtttattacttctgtgagaaacccg

SEQ ID NO: 132905 - DNA, 201 bp, Homo sapiens
gtatacccttctgtaagaaaccacaaatttagatgagcaggtaattggaggaacatgattttaattcagaaaacttaaggatttctttaagtgtcaacttyctgtaaatatttgcttccaaatagttaataatgaagatgactggaaacagagaaaagtaaagtgtttgaaaactactttcaaaaggaaatcaatcagaaa

SEQ ID NO: 132906 - DNA, 201 bp, Homo sapiens
tgttttaacagttattctgtacaatagtggtagatatacacataacatatatatatgttatgtacttattaattgtgttttattagaattccaggaaaagsacccgtatggaagctttcactcttccaaggccttaagaaatacattgaagatgcttaaattaggtggaaaaagcaaaaaactagaaaaaaaattttcata

SEQ ID NO: 132907 - DNA, 201 bp, Homo sapiens
agcatggagcttgtgttaatgccatggatctctggcagtttactccactgcacgaggctgcttccaagaaccgtgtagaagtctgctctttgttacttagycatggcgctgatcctacgttagtcaactgccatggcaaaagtgctgtggatatggctccaactccggagcttagggagagattgacttgtacgtatttat

SEQ ID NO: 132908 - DNA, 201 bp, Homo sapiens
tcaggaaggttagagtagtgtgcatttacctgataaaattgggactgttttaacagttattctgtacaatagtggtagatatacacataacatatatatatgttatgtacttattaattgtgttttattagaattccaggaaaagcacccgtatggaagctttcactcttccaaggccttaagaaatacattgaagatgct

SEQ ID NO: 132909 - DNA, 201 bp, Homo sapiens
ttaaacaagtctcagtgtagcattttcataaaaaacaaagatgacaaaattccatacttgtatccttaaaacagagaagagaggcccagaatgagagtcaytgtgcctttggaaataatctccgctgacactgagtactcttaacgttgatgacttgtctgcttgtgttccaactgctttcaggaaggttagagtagtgtg

SEQ ID NO: 132910 - DNA, 201 bp, Homo sapiens
tgtagacatagaaatttttgttatcacagaaagttctgttggacagtgctgttagacccagtgaacctgtgtatacaatccattttacgtaaaatgagatmattccaccatattatttatttatttttctactttatgtagtaacatattttattgtcagtgaatatttttatataatctcattttaaaggcttctaagaa

SEQ ID NO: 132911 - DNA, 201 bp, Homo sapiens
aagatggctttgtaaagatgagccattcttttattgttgactagaatttatatgagactttttcttctacagatgtggtccttgaccctggttttctattrtttaaagtatagcagtcaaaatagttttataaatagtaccaatttagagtgatacctccttaggatggtttctagtagtgacatatttttgttaaaggac

SEQ ID NO: 132912 - DNA, 201 bp, Homo sapiens
cccgagtagctgggactacaggcgcccgccaccacgcccggctaattttttttgtatttttagtagagacggggtttcaccgtgttagcgaggatggtctsgttctcctgatcttgtgatctgcccgccttggcctcccaaagtggtgggattacaggcctgagccaccgcacccttccagcaacgactttctttaaaaga

SEQ ID NO: 132913 - DNA, 201 bp, Homo sapiens
ctctttcttttacctcaatgatactgctctttggaagcaaatgatttaaagaacaaattagccatttataagatgatatgtaaatttattgctaatagcaraaaatttgtaacaagccaactgttcaacaatagagaaatgcttacataaattataatactgtacaatttctattacatgtgtattcctacatatatgttc

SEQ ID NO: 132914 - DNA, 201 bp, Homo sapiens
cccatattttagtcctttccttttctgtgtcaagacctaatcaccattgatattttggtaaatatttctgtaaatgttttctataccattacttatggtgwacttatggtggcaatagtagtagcaagagtagtgacaataccaaaaataatgcatcagcctgtcctttcttttttgaattttcatgtaccactgtatact

SEQ ID NO: 132915 - DNA, 201 bp, Homo sapiens
ataaattataatactgtacaatttctattacatgtgtattcctacatatatgttcttttatccgtcaatcatctttttattaaagcatgtgagtgtaaatrgtaggcatctgtgcagcttctccaaatatgctaatttgcatatcattatctaagttcagtatttgtgtaaagatttatcttttagtgtgaaatctgtgca

SEQ ID NO: 132916 - DNA, 201 bp, Homo sapiens
ctttcttttttgaattttcatgtaccactgtatactttcatgtcagtgtatgtagacctatctcttgtttaagagctagaaagtgttacagcatatgtgcrcacaaattatttaactggtttccttttggtggacatttaggtttcctgtttcaaaattttgctgcaataagtatctttataggtgtatctttatgactct

SEQ ID NO: 132917 - DNA, 201 bp, Homo sapiens
tataagaaactgccaacacctttccccaaagtatatgtaccattttacattcccatcaacgatttttgatggttgctgtttgattttgctcttgttgcccmggctgtcgtataatggtgcgatcttggctcactgcaacctctgcctcctcggttcaagcgattctcctgcctcagcctcctgagtagctgggattacagg

SEQ ID NO: 132918 - DNA, 201 bp, Homo sapiens
atgagttatcgttctagatatgggaatttctcttaaaagaagtaatatttgggaaattaattagacaggaaatcagtcctagataaggaatgcttttcaaktgtagactgtccattgatttgtggattatcagaactttgttattgcctgtgagtatcatgttgtttttctttctgacgatacagactggttctgtgtacc

SEQ ID NO: 132919 - DNA, 201 bp, Homo sapiens
aactggttgttttttagaggtgacttgaaattatagattttttcattctcaagaatgtatatttcaaagcagttgtctccaaagtagggtatagactcccyatggagcatacaagatgccctgttggaaaaatcctagcatttcaatttataatacttttatttaagaataaggaaattcagatttaccaatattgaatac

SEQ ID NO: 132920 - DNA, 201 bp, Homo sapiens
gtagagctagggtcttgctatgttgcttaagctagtctcaaactcctggctttaagagatcctatcaccgcagcctcctaaagcgttgggattacagatayaaggtgctgcctccagcctgaattcttatatttccctgtgtttgccttaatcatggcttccatgtcaatgttacttactttctcattagttaaagtatac

SEQ ID NO: 132921 - DNA, 201 bp, Homo sapiens
agtttataaaggttcaatggaaaataacattatgacttgttctagtcagcctttctctaggtctgtggttctcactctttatttgccctttatgtgcacartacattttcatcagtaacatcttagttcattactagccctgtcaatgacttagaagaacttctagacttttgtgttcatcctagtctttccactgtagtt

SEQ ID NO: 132922 - DNA, 201 bp, Homo sapiens
tgcctatgtacctatgtatgattttgtaatgatttccatttgtcgtatcaaaaatactcgtttcctaagtgaggcctaacttgttaacatgttgtattatmctatataaaataattacatttgttattttatatccatgtcagcagaaaagtctatgaatttgggagccctttataagtactttctaattcttcacagaga

SEQ ID NO: 132923 - DNA, 201 bp, Homo sapiens
ctgaactctctccttttatttctaactcaggcacatgctatacgttcatatcttgtatcattctcgtattctcttttagctagtgttaaaataattgattrtaattttgtctgctttgtgggcatttttttctgttaggtattaattgtctgcggggatgttattctccaaattcttcttgtaagaattttgtatgtattt

SEQ ID NO: 132924 - DNA, 201 bp, Homo sapiens
tgtatttagtagcccttttctgttcactgattatacttcacaagatgattctgatttcaaaagtagtacattgagactaaaagaaaaatcaaggctgggcrcagtggctcacatctgtaatcccagcactttgggaggctgaagcaggaggatcacttgagcccaggagtttgtgaccagcctgggcaacatggtgaaacc

SEQ ID NO: 132925 - DNA, 201 bp, Homo sapiens
tatgttttatagtgaagaatgtaataatcactaatagatgttgatgacaccgccttgatttgtgttattttagttttaagacagggtttcacattgtcatycaagttggagtgcagtggtgcgatcatggctcactgcagccttcacctcctgaggctcaagcgatcctcccacctgagccccacgaatagctgggaccac

SEQ ID NO: 132926 - DNA, 201 bp, Homo sapiens
cacagtcaactgaggttggtgttggcacaagcagatacgctatgacaaacagtagagcatatctcagggaggaaagacttacaaagataaaacagcaaggsattatttgctttggaaatgcttgctttattgtgggtttttctatttgattccgattttggttgggaaatgttgaaaaacattaatttgctctgtacataa

SEQ ID NO: 132927 - DNA, 201 bp, Homo sapiens
catgcatcattaatagatacttatagtaagaattgaataggattagttaagataagatgggttggagtctgagggctaggtgcagcctccccttacggggyttaataaaaccaatgaaacatacacgagaaagaaacattcagaaatggactttcagtttcttggtgaataaaaagcattatatcttcaagaaaaaatgag

SEQ ID NO: 132928 - DNA, 201 bp, Homo sapiens
tgatgacaccgccttgatttgtgttattttagttttaagacagggtttcacattgtcattcaagttggagtgcagtggtgcgatcatggctcactgcagcyttcacctcctgaggctcaagcgatcctcccacctgagccccacgaatagctgggaccacaggtgcgtgccatcacgcctggctcatttttttactttttg

SEQ ID NO: 132929 - DNA, 201 bp, Homo sapiens
ttaagaatttttgttttgctttttattttggatgaaagtggactgataatacttaagatagggaaagtaatatttatgttatatgtatatatatatatatwgcaagccattctcatattttagattctagtttttcttaatgtttctaaagataatgatgaacaagtcacatttgtcaccaagtgcctttttatctttccc

SEQ ID NO: 132930 - DNA, 201 bp, Homo sapiens
tgatttgtgttattttagttttaagacagggtttcacattgtcattcaagttggagtgcagtggtgcgatcatggctcactgcagccttcacctcctgagsctcaagcgatcctcccacctgagccccacgaatagctgggaccacaggtgcgtgccatcacgcctggctcatttttttactttttgaaaagtccaggtct

SEQ ID NO: 132931 - DNA, 201 bp, Homo sapiens
ctctgcacagatccttcttctctagtttcccatcctgcagactccagccaattcttctgccttgagtttggatttctgtcttctcagttcagtgtaaccaycatgttctgctttgactcttgttgtgtttatgtggttggcaaattgtgttaggcagagagttgggtgattatggtacccatcttgtgagtttctcttctt

SEQ ID NO: 132932 - DNA, 201 bp, Homo sapiens
aaaaatgagtagggtgggtttcctagggatttctactaaagcctaggagctcaggataaccccggggctcattaaaaaaaaaaaatcactttgatttcaastaattgaggaaagttttaggtgttttgtttttgtgtgcccgttgtttttcttttaaggcttcatcagatgtctaagtttgctttcaccagagcgagttac

SEQ ID NO: 132933 - DNA, 201 bp, Homo sapiens
aaacacaataagcatggttctttttgtaatacatgtcttgtacctctgatatctgaagtttttatgggtctgttcttgagttgtctatttctgctcgttgyaggttttgcattttagattatttatgtgcctcattatcttggctgtgcactggacattttaccaactgtttatttataggagttactgccaatctggggc

SEQ ID NO: 132934 - DNA, 201 bp, Homo sapiens
ttcattcttttaagttgtcatttccagatgtaatttgctaggcagaaatagattactaatacactataggaattaaggaaaaaaaactcatttaactgcatatatatatatatatatatatgtatatatattttttttccaaaaataagcacaagaaggataaaccagaaaacattgaaattgattacctataagaacgtg

SEQ ID NO: 132935 - DNA, 201 bp, Homo sapiens
agacacccaaagtttccaaccagagctgtaattctgtactaggaccagttcacatctattttatcctcatcctgaggtatcacccttgttgtgtggggaasagtctcgtaatagtccttacttttgggggcctgtgggcttttattgctcttcccctgattccatgagacattgaaatgacagattttatttttcttgatc

SEQ ID NO: 132936 - DNA, 201 bp, Homo sapiens
tttcaaaccaactttgacttcttattaagtttgttgttctttgttttttgcagtgtgtggtgtagtaattctgcaactattttatgtatgttgtaggattmagcaaataagtaaatgtgttgggagcaagggctcttactgtagaagaagaagatacaaatgtggaagggggaagacagaggagaaacttgtggatttgga

SEQ ID NO: 132937 - DNA, 201 bp, Homo sapiens
gcttttattgctcttcccctgattccatgagacattgaaatgacagattttatttttcttgatcagtaattgccttcagaacaatgacagcttccatacaygtttaccctctagatttcctttgctcttcagttttcagctggtaattctttaactgtcttgttagctcatagatgattttagaagttgtgtttttgtttt

SEQ ID NO: 132938 - DNA, 201 bp, Homo sapiens
tgtttttgttttaaatctagttctgttcattgtttacagcctaagggtagatttaaataagctactctgccgttactgaaaacagaaaattgtgccatttraattctaatttaaattcagtaagccatcctatatagggatagcactggttacttgaattttctttttttcttttttttctttttgaagtggagtctcgct

SEQ ID NO: 132939 - DNA, 201 bp, Homo sapiens
atatgaagaaaatccttcttcaaacagaaaatgttgttggaaaaggaagaaatattttaatagcattgtcagataattttgccttttttctctttgattctgtacccacagttgataagtaatagtttcctaagggttagttgcaacgtagaatctgaagccaaatcagtgaatttttttatacttctgctgtgttagaat

SEQ ID NO: 132940 - DNA, 201 bp, Homo sapiens
aacatttattttttattgaaatgaaaaaataaatatggtcactttaaaatgtatacatagataattttgttttcactatataatcttgtttatctaagccttttttttttttggctttctggtttttcctgagtagctttcaatcttgtatcttttcattatgtaagagactgtaaaatatatttactatgttttagatat

SEQ ID NO: 132941 - DNA, 201 bp, Homo sapiens
ccggtgtctactgcgaacaatggcacatttcatcacacagctggataatgttaagaattataatctgtaaccccagattagatgaaaataaatgccactcrtaatactaattatgttcctgaccttattgtatttacttactaaccccaaataaactcatctatttacttaaatgggaatattaacatcacataaatcata

SEQ ID NO: 132942 - DNA, 201 bp, Homo sapiens
taactctccttgctttctatcttgttctgaagaaaactcttgggcattacatccagtgaggctgttttgaagcaaatgatatctgtgtcattttgtcttgycttttccataagatgacaatagattcagtgttcctaattggtcaagagtgctttcacttcactctttgagaatacgttacgttagatggacaccagatga

SEQ ID NO: 132943 - DNA, 201 bp, Homo sapiens
tgttgcttaagctagtctcaaactcctggctttaagagatcctatcaccgcagcctcctaaagcgttgggattacagatataaggtgctgcctccagcctraattcttatatttccctgtgtttgccttaatcatggcttccatgtcaatgttacttactttctcattagttaaagtataccttgggccaaatgttatggt

SEQ ID NO: 132944 - DNA, 201 bp, Homo sapiens
aggaaaactgattgatgttaataagttatgtggtcatgccatctatactagcttttctggttttctgaccttagacagcctcttttttgaattattagtgyttataaagagctcaagactttttttttctttttctttacattttacttctaactgcattgatggtcttttctattgattattgtttcaaaattaaatgtc

SEQ ID NO: 132945 - DNA, 201 bp, Homo sapiens
aaatagacaatctacagaatgggagaaaatactcataaactatgcatctgacaaaggtctaatatccaggatctataaggagcttaattcaaagcaaaaaycagtcccatcaaaaagtaggcaaaggacatgaacagacatttttcaaaataagacatacaagcagccaacaaacatgaaaaaatgcttatcattactaat

SEQ ID NO: 132946 - DNA, 201 bp, Homo sapiens
tatcgatgtattgcagccttctcaaatggataaaaaattggttgttacatatacctatgtgcataaacataagcgagaggatataaagcacatgggcagaygattataagtaggtgagatggaggatatggaggagccccttgtactaattttgcaaattttctgtttgaagttatttcaagtaaaatgttattcaaagtg

SEQ ID NO: 132947 - DNA, 201 bp, Homo sapiens
aaaagtaggcaaaggacatgaacagacatttttcaaaataagacatacaagcagccaacaaacatgaaaaaatgcttatcattactaatcatcagagaaaygcaaatcacaaccacaatgagatactgtctcacaccactcagaatggctgttattaaaaagtcaaaagacaatagatactgacaaatttgcagagaaaaa

SEQ ID NO: 132948 - DNA, 201 bp, Homo sapiens
atggcatctatgtgctaaagacccctctcgttcagacctcctaccttccagtttatagctctagtgttgctctgccctcttcagaggtacatatcctactrcctacttgacatttccaaatgagttgtctggatgtctcaaccttaacatggccaacacagaattctttatctccctatccaaccctattgccatgcccac

SEQ ID NO: 132949 - DNA, 201 bp, Homo sapiens
tgagcagctgtataattatatgattctcagcatgattgctcatagattgataattacttgggagaaactatacattgacaaaatctgacaatacttttttyggatatcaaaattaacatcactaatgagaatgaattaagcctgtgtgctggcagatgtaatacctgagaaggtcacaacatttcttatgttgtattctgg

SEQ ID NO: 132950 - DNA, 201 bp, Homo sapiens
tgtgtgatagggattacacttcccacttcacagatgttggaagcccggacgcagagacgttaataaattaacacaaatacctagtaaaatttccaaagccrgaatgcaaaaccaggatttaaaagcctttattcatttttgcatgccatgcttcctggacttacgttgaagccacagctttgcaaaaggcttatcagttgt

SEQ ID NO: 132951 - DNA, 201 bp, Homo sapiens
aggtgtaaaaggagcctggaacatcttctgtgctagaaagtaatgaactgctcggccgggcgcggtggctcacgcctgtaatcccggcactttgggaggcygaggctggtggatcacgaggtcaggagatcgagaccacggtgaaaccccgtctctactaaaaatacaaaaaaaaatattagccgggcgcggtggcaggcg

SEQ ID NO: 132952 - DNA, 201 bp, Homo sapiens
cataattgggtacaaagaaataataaggaatacttagaagataagtttaagtttacttttctgaaatttactaattaaccatctcccaggtaaaatttgasttgataatttagtcagagtgtctcatgaaataattttagagagtgattagtacaaaacttatttgaaagaaaaaaaaaaatgcctaaataaaaaaatgca

SEQ ID NO: 132953 - DNA, 201 bp, Homo sapiens
tgactgatctcaaagctaggtcggggaaggtgtaaaaggagcctggaacatcttctgtgctagaaagtaatgaactgctcggccgggcgcggtggctcackcctgtaatcccggcactttgggaggccgaggctggtggatcacgaggtcaggagatcgagaccacggtgaaaccccgtctctactaaaaatacaaaaaaa

SEQ ID NO: 132954 - DNA, 201 bp, Homo sapiens
ccaacagtctcatcctcctaaaatacaactttgatcatattactctgctgaaaagacttcccagggcctttggtatactttttttgtttttgtttgttttkttttgtttgtttgtttttgagatggagtctagctctgttgcccaggctggagtgcagtggcgtgatctcagctcactgcaacctccgcctcccaggttca

SEQ ID NO: 132955 - DNA, 201 bp, Homo sapiens
ctttgatttcaagtaattgaggaaagttttaggtgttttgtttttgtgtgcccgttgtttttcttttaaggcttcatcagatgtctaagtttgctttcacyagagcgagttactgagttctcttctcgaatcttgttttgccagtttgttcaggtatctgtttatagaattaaagcagcgtgagggtaaacttttttttaa

SEQ ID NO: 132956 - DNA, 201 bp, Homo sapiens
cgtgagggtaaacttttttttaagctgttttttggagtgtgtcagctccccattcaatttagacaagttatttatttatttatttattttggttttggaaragggaaaataacgtgatgtaaaattttttctctatcccttttgccttttcagtagaacaaactaaactgctggtaggtggcagatgtttggacttgttta

SEQ ID NO: 132957 - DNA, 201 bp, Homo sapiens
cgtgatgtaaaattttttctctatcccttttgccttttcagtagaacaaactaaactgctggtaggtggcagatgtttggacttgtttattttttcttctktggtatattttcttttaaagtgaggaagcatttggtagttagcagatgatttccatgaactacaagtccaaactgaacaaaatttgttttaaatttactg

SEQ ID NO: 132958 - DNA, 201 bp, Homo sapiens
tttgatatctgtctcattaattgctatgctgtcgtaagcataagcagtaagattgttggtctacttagaatgatagcattaaatcataacatctttcactygtattttagtcatttttatggtttatatcataatttttctgtatctcatcctctcagttgtttaagacctttactgttgagcaagcaagggcatttatat

SEQ ID NO: 132959 - DNA, 201 bp, Homo sapiens
attaatttttttaaaagggtttcttttgaaaggaatgccttagagttattagagatcattctgagtaatatgtcattctttatttttatgccagatgcaawtgtagtacccttacttaccttgagagtgaaattttccttcttaaatattttttctttaggaatttacttgctgcaaatgtctttccagtatctcatcgtt

SEQ ID NO: 132960 - DNA, 201 bp, Homo sapiens
cttgttttcgtatggcttgcaagctaagaattgtttatatattttttaatggttttttaaaaaatcagaagaagaatattttataaattttataaaatttragtttcaaagtccttaagtaagattttattggaatgcagccatgctcattcatttaaatattatctgtggctgctttcacactataatggtagagtcgag

SEQ ID NO: 132961 - DNA, 201 bp, Homo sapiens
ctactattgaccagaagccttttcgataacataaacagtcaacacttattttgtatgttatatgtattatatattgtattcttatagtaaagcaagctagrgaaaagaaaacatttttaaggaagataaaatgtatttactattcattaagtggaagtggatctccataaagatcttcatcctcatcgtcttcccattgag

SEQ ID NO: 132962 - DNA, 201 bp, Homo sapiens
atagtcatgcatcacttaatgaacgacataagttctatgaaatgcgtcattaggtagttgtcattgtgtgaacatcatagaatatacttacacaaacctasatggtatagcgtactacacacataagctatatggtatagcctgttgctcctagagtacaaacctgtacagcatgttactccactgaatactgtaggcagt

SEQ ID NO: 132963 - DNA, 201 bp, Homo sapiens
gcaagctagagaaaagaaaacatttttaaggaagataaaatgtatttactattcattaagtggaagtggatctccataaagatcttcatcctcatcgtctkcccattgagtgggctgagaaggagggtgaggagtggttgttcttgctgtctcaggggtggcagagacaggcacactcagtgtaacttttactgaaaaaaa

SEQ ID NO: 132964 - DNA, 201 bp, Homo sapiens
gagcacagagctacttgaactaccataggaagaagaaaaagttttgacagcaatcagtcaaccaatcaaatatgtagccgtttgtgctaagcaaataactyattttcttgtttctccagagaatactggacaaattatacatggcgaataagatgaggcaaggagttttcacgtttttaaagatcatatccaggctattta

SEQ ID NO: 132965 - DNA, 201 bp, Homo sapiens
cagtggttctagctaactgataattgtggcatttgagttgcatgaagtggagtggagtgaagaaaggggagaggaaaaggtgaagttggaaagttgtgggrtgggatgtagtcagggagattgcttatggccttctagaacattttaaacacttcagtttcttcttagagtgagatgaagacccactggaagattttgagc

SEQ ID NO: 132966 - DNA, 201 bp, Homo sapiens
ctggattttacttaaacagtgattttttcttttgtaggaacctccatatttaagaattcccagtagctactttttacccaatatggcaggcattacattcrtgccttaggatatattatagtgattgagtttctgtttctaaacatttttgatggaaagaatgagtataagaggcagttcctttttgcagctccacgccag

SEQ ID NO: 132967 - DNA, 201 bp, Homo sapiens
atacaaaaaacagacacgtagactgatggaatggaataggaagctcagaaattaagccacatacctataatcatctgatcttccacaagtccaacgaaaasaattaatggggaaaggattccctatgcaagaaatagtgctgggatagttggctagccatatgcagaagaatgaaatgggacccttacctttcctcatata

SEQ ID NO: 132968 - DNA, 201 bp, Homo sapiens
aagaaactaccagcagagtaaatagacaatctacagaatgggagaaaatactcataaactatgcatctgacaaaggtctaatatccaggatctataaggarcttaattcaaagcaaaaatcagtcccatcaaaaagtaggcaaaggacatgaacagacatttttcaaaataagacatacaagcagccaacaaacatgaaaa

SEQ ID NO: 132969 - DNA, 201 bp, Homo sapiens
cagtaaatacttgtttctttccacttgctttcttcttgtatgcaacagtaaggttgccacacaagactatttttgtattctgacacaaagcggacactcartcaaagctcagtgaagggctgacattcccataagctgctctttgttaccatcagcgtgaatttgtgttacattctttgtttagtatcctttgtaattttg

SEQ ID NO: 132970 - DNA, 201 bp, Homo sapiens
gaatttgtgttacattctttgtttagtatcctttgtaattttgtaaacttgagttgtgatttgataagacatgaagctcttttttcctcattgtaatttasattcttttaacctagtgagtggagatattgcatataggattatggagaatcgttaatgtaacttaaacattttccccacaaatatttcaatagcaggggt

SEQ ID NO: 132971 - DNA, 201 bp, Homo sapiens
gcattctagctttggcgacaaaacaaaaccctatctcgaaaaaaaaaaaaaaaagaaagacttattaattgccacccacctcttcctcttttgcttcttaygagctattcttaaacccacaacacatttctataagaagccagaggagcccagtattttatacttctccccaaaattgtctaacaaatgagtctttatttt

SEQ ID NO: 132972 - DNA, 201 bp, Homo sapiens
aaactctttcagaacttttatttaaaagtaaatagaaagtgcataaatttaatatttatgtttgaaattattttctcaccaaaaatacttatccactaaayttgttcatcaatttatagtgaactcctatttatttattaatactgaattttagactcatcattgtctagaattacacactgggatgtttttataaaatta

SEQ ID NO: 132973 - DNA, 201 bp, Homo sapiens
ttgtagatgacttaatgtgttttttaatatgtttccccattgtgtttacagaaaactctttcagaacttttatttaaaagtaaatagaaagtgcataaatktaatatttatgtttgaaattattttctcaccaaaaatacttatccactaaacttgttcatcaatttatagtgaactcctatttatttattaatactgaat

SEQ ID NO: 132974 - DNA, 201 bp, Homo sapiens
gtttaaagtaaccgaatttatcaggttcaaattgcagatagtttaggtttgttccaaaacctcaattacttattatgaatttttttttttttttttttttwataaaatagagcctgagtagtgtagacttttgttttatatgttaatttttctctccgacaggcaccaatccttatttgacttttcactgtgttaatcagg

SEQ ID NO: 132975 - DNA, 201 bp, Homo sapiens
aaattgtcttttttttttttttttttttgagatgaagtcttgctcttgtcacccaggctggagtgcggtggcacgatcctggctcacgcaacctccacctyctgggttcaagcaattctcctgcctcagcctcctcagtagctgggattacaggcacctgccaccacgcccagcaaatttttgtatttttagtagagatgg

SEQ ID NO: 132976 - DNA, 201 bp, Homo sapiens
aggtcatgctatatatgtcacaggtaagcatcttgccattagtgtaacgtttcccacccctaggtcacgaaccaaattgtcttttttttttttttttttttgagatgaagtcttgctcttgtcacccaggctggagtgcggtggcacgatcctggctcacgcaacctccacctcctgggttcaagcaattctcctgcctca

SEQ ID NO: 132977 - DNA, 201 bp, Homo sapiens
atccacttaaagcctggctcaaaagcctcagaatgtcacttcttctccattctattggtcaagacaactcacagggcaaaccacattcggcgggtagggggcagaaattcaaggggaggcatacatgacgggaggaaggaattgatgggtggctgtctttggagactatctcccgcatactcgaaaagcagttgcatctaa

SEQ ID NO: 132978 - DNA, 201 bp, Homo sapiens
taaataatattaaaccaaaagttggccatacattccaatagacccaccctattttgggatccatcttaaatgtctgtgaaggtctaaggatggagtcatcrttagggcatttatgaattaggattcttctgtttgttttactgttttcatacaggataaggagttgtaatattgtatgctttcattattatgatcagcttt

SEQ ID NO: 132979 - DNA, 201 bp, Homo sapiens
aagaagccagaggagcccagtattttatacttctccccaaaattgtctaacaaatgagtctttattttatctttataagcagtctagcactatgcattttrttacatgtcaaaacttagaccatgcaactacctcaaaagaatgttttcatgattgtccttggttgtttgtttccgaaaaatgtcagtctttattcatctc

SEQ ID NO: 132980 - DNA, 201 bp, Homo sapiens
aatgatttacgtaatagacattgaaaaccaatgcactctgtaccataaagttggtttttttttaaatgagagttaattttttaatgttaactaaaaacctraaacatttttaaagacacattacaaaaattgaggaaaattgtatgtctgatatttagaaatgaattcttttgaaattatttacagtgaaaatgttacggc

SEQ ID NO: 132981 - DNA, 201 bp, Homo sapiens
gaactcagatttgttagtttgtgctcacattttagcctagtgcagggcctgacagataatggataatacttagtgaaacctaagacaatctgtttaactgscttgacaccaatttcagatgatcccttaggagagtggttctgaaattgggggtgaggtgacacggagaaagggtgactttcaaatgacattcctctactt

SEQ ID NO: 132982 - DNA, 201 bp, Homo sapiens
ttattcctgaaattcccttggcccaatagcctttgcttgcaagctcatctgtaaatttaaatgctttaaagtagttttgatgaacattttttgcttgttayattgatgtgattaacctagttaaagctaataattgtcattattttttaagttgtttgattgttattactatttgttactctctccttttgcttacatgtc

SEQ ID NO: 132983 - DNA, 201 bp, Homo sapiens
gagtgagaaaaacatctaccctttgccatttagaaaattaaatcagaagtatgtgaatgcgatattttatgttttttgttattattactaatattattatwtttattttggggtactgttaacatgagggagaaccgtataatttataatgtatagaacatttttaagaacgtacctcaagcattattattgtaccaaaag

SEQ ID NO: 132984 - DNA, 201 bp, Homo sapiens
gcacccgccaccacgcccagctaattttttatgtatttttagtagagacaggatttcaccatgttagccaggatggtctctatctcctgacctcgtgatcygcccacctcggcgttccaaagtgctgggattataggcgtgagctgccgcgcccggccccaaattgtttcttttatctaaaaaggggaattttattgtctg

SEQ ID NO: 132985 - DNA, 201 bp, Homo sapiens
atatctgaagtgtttgaccttttgttgcccagttacctcagagcattatttgaggattaagtgagtttattcaaggaaagtgcttgtcaaatacaaacacrtgtgtgtatatgtatgtgtaaaggaaaagaaacctcttttttgttttactgcttatttcacttctggtcaccaaaatttgcaagtttttcctaccatgag

SEQ ID NO: 132986 - DNA, 201 bp, Homo sapiens
ggactttgcataatgttgttgttccttgacttccacgatgttgatgttgtgctttcttagtatttcttacctttctaagtgtttgcctcatccttagactrcttgagactctttctgactccccctaaacccccatttttgtctgaaaactgtgatacttcttataaaattctggttttatattcccaagtgcttgtattc

SEQ ID NO: 132987 - DNA, 201 bp, Homo sapiens
ttggaatgtatcccctgtgaataatgggggctactgtacatctaccatatattacaaaacaccccccgtggagactggggctgtactatgtaacagtgatrtttttgtagtgaaatatatgacagctgtgctgtgtagctgtgtacactaaatgggtcaagttttgctgccatctgagtttttagagctttttgggtttca

SEQ ID NO: 132988 - DNA, 201 bp, Homo sapiens
cccgtatactttaaatcagctttagttataataactaatacaaagtcagtgctgtataagtagttttgttatactatattttatttgtattattattattrctatttaaatctgtagttgcttgaatccataaatgcagaacccacagatacatagggccaactgtatttctccttaaatgtttggtagaattcactagtg

SEQ ID NO: 132989 - DNA, 201 bp, Homo sapiens
ctattgataggtaagaggtagatcaaataatgtcaatagaccttaagttagttatagatactaacctgtgtacaggcatacctcagagttagtgcagattyggtttcagaccactatgaagaagcaaatattgccataaagtgaaacacactttttttttttttttggtttcctagtgcttttgaaagttgtgttcgtact

SEQ ID NO: 132990 - DNA, 201 bp, Homo sapiens
gctagtctcgaactcctgacctcaggtgatccacccacctcagcctccgtaagtgctggaattacaggcttatttttgtttttttcttttggccattgttytgttagtttgctgttttgcacattagctatactataacctggcatattgcataccatgtgtaatacatgttttactgtcagactatatgattatttttct

SEQ ID NO: 132991 - DNA, 201 bp, Homo sapiens
ttttagtagagatggggtttcactatgttggtcaggctagtctcgaactcctgacctcaggtgatccacccacctcagcctccgtaagtgctggaattacaggcttatttttgtttttttcttttggccattgttctgttagtttgctgttttgcacattagctatactataacctggcatattgcataccatgtgtaata

SEQ ID NO: 132992 - DNA, 201 bp, Homo sapiens
tttttagtagagatggggtttcactatgttggtcaggctagtctcgaactcctgacctcaggtgatccacccacctcagcctccgtaagtgctggaattacaggcttatttttgtttttttcttttggccattgttctgttagtttgctgttttgcacattagctatactataacctggcatattgcataccatgtgtaat

SEQ ID NO: 132993 - DNA, 201 bp, Homo sapiens
aatgagtagtttattcagaggtgaaactcttctgttaaaaaaacaaagatgttaataattgaagaggattctaaaaagaaataaaaagaggaagtaaaatwctttaaaaatgcgaaattttgcaaatgaaaataagtactacatttatatcaaagagttttgatttgtttttgtttctctgatttggctaatcagacatag

SEQ ID NO: 132994 - DNA, 201 bp, Homo sapiens
aaattactaaccattttattgctaaagagaacaggctaagaccacacaaccattacttctaaacttttctcctgacacccagttcagttccctgttcattrtactagaatacctgttcttaaatctctattttagaagagctttatgagtaaggcacaataggctgtacatgatatgatgaggttctcataggttcctcca

SEQ ID NO: 132995 - DNA, 201 bp, Homo sapiens
tcagtgcattggagagcaatcagcatttgcttctattgctcattttaacagttagcatatttcatcccaaaactaaaaaaaaaaaaaaaaaatgcacttgwtactttgcttctgccatgtgttaacttcaacattttattcttttgatgtactcttttgtgggagcatctttttgtccttttagaatgtcagctgcttaca

SEQ ID NO: 132996 - DNA, 201 bp, Homo sapiens
ctttgttggctattttattattgttaactaactcattcactagtaaacatcaaatattgtgtctttaagaacttattgtagtatcagatttttattaaaayataagatgatctctaaagttgttcatatagattttagatacatgtaaaagagtgaaaactagtagttatatgaaactaactataatttatgctcacttaa

SEQ ID NO: 132997 - DNA, 201 bp, Homo sapiens
ctgaggcaggagaatggcatgaacccgggaggcggagcttgcagtgagcccagatcgcgccactgcactccagcctgggtgacagagcgagactctgactmaaaataaataaataaataaataaaataaaatctagaaaacttccctggcatttacgactttattaaatgcatactatgcattaagtaagtagatatctaa

SEQ ID NO: 132998 - DNA, 201 bp, Homo sapiens
acactattgcattggagattaagtttcaacatgaattccagaaggacacaaacattcaacccgtagcactcctacttcctctatcagtagaaatttttcargttcttaatttttatgtaataatagcttattactgtgacggaagtggcagcaaaattagtgaatacctgaaaatccccagggaccctgcaatcgtccttt

SEQ ID NO: 132999 - DNA, 201 bp, Homo sapiens
gatccttctcttaaggaacttaaaatctaattgtctaacacagtctacttgactactatatgaactggaaagtagtatatataataagagaagtatagatkgatttatattctgaggaataaacagttatttctgttggtggtggcagcctggggaagagattggagaaatctcatgaagaaaatagaatttcagctagga

SEQ ID NO: 133000 - DNA, 201 bp, Homo sapiens
aacattttagtagttcctaatgtttgttcaatatacagaacagtatgtcaaaagtagtattttttatcaccagaatttattagtttgttgctcttgtgagkcattcacttaccaaccattttcaaatatctgtttatacaaggcatggtacttactgctgagaggatgtataaagtttgaatttgatcaagatccttctct

SEQ ID NO: 133001 - DNA, 201 bp, Homo sapiens
cttttaattcctgtgactttgggcagattataaggtctgtgcttctggtgagtctgtttctgaaacacgtggccatttataaaggtttactgtgtgaagtkctttcagactgttccatctctaatgagctgcttggcctatggttcttttagtgaccaggaaaacaaaggaaaagtgatattgaaaccccatagccttatt

SEQ ID NO: 133002 - DNA, 201 bp, Homo sapiens
aggaaaacaaaggaaaagtgatattgaaaccccatagccttatttcaaattagactaggaagaagaagcttatccaagttgagagggataggttaatgggytaatcggagtggggaaagatgacagcattcagcacatcatggatattattgtcatagataattgaatatatgacaaactcgattggtatgggaatttgtc

SEQ ID NO: 133003 - DNA, 201 bp, Homo sapiens
ctttagtttttggtgtgcaggaatacagttagatttggacagctttagagtagttttgtcgtttgtgtgctagtttattttgtttttacaagggtatgtcstttgaggacagtccagaccaaaagaggtttaatacaacccaacacatgtttgaggatctattgtagccttaataacccaatgaaagacataaatgaagtg

SEQ ID NO: 133004 - DNA, 201 bp, Homo sapiens; identical to SEQ ID NO: 23272

SEQ ID NO: 133005 - DNA, 201 bp, Homo sapiens; identical to SEQ ID NO: 23271

SEQ ID NO: 133006 - DNA, 201 bp, Homo sapiens; identical to SEQ ID NO: 23273

SEQ ID NO: 133007 - DNA, 201 bp, Homo sapiens
attcatttatagaatacctttattaatttgcttagttttaaacaaaacaagtctcaattctctcacaaggctgcttttttaaactagatattcttggctamgtattagaagcctcatatctacaaatgtactgatttcaaatatctcatctaaccgttaactagttcataaagtagtttttataacattatgattataata

SEQ ID NO: 133008 - DNA, 201 bp, Homo sapiens
cagaaaattagctgggtgtggtggtgggcgcctgtaatcccagctactagggaggctgaggcaggagaatggtgtgaacccgggaggcggagcttgcagtragccgagatcacgtcactgcactccagcctgggcgacagagcgaggctccgtctcaaaaaaaaaaaaaaaagaacagataaaatcagtccccaaacatct

SEQ ID NO: 133009 - DNA, 201 bp, Homo sapiens
tttaattctaatattaatccttaggaagattttaccttccatcattgtttggatttattaagaagttatgtatgaaattaaatattcatattttgttactracttaattttttcagaagttactttaattctcagtggttctagctaactgataattgtggcatttgagttgcatgaagtggagtggagtgaagaaagggg

SEQ ID NO: 133010 - DNA, 201 bp, Homo sapiens
taaaagagtgatgtgaaattcaaactggaagattttgtgcttgagtcttgcttatttatctgtattttagttcatccatgaaactaacaaagataatgtgwtttaaagcaattgtaagtggctatttcaagccatcttacaagagtttttagaggataatttttatattttagatctgactatattgtgatgtcagtgcct

SEQ ID NO: 133011 - DNA, 201 bp, Homo sapiens
actgaactattgtacctcctgtcccttccccatctcagttattggcctcatgctccctctagctggaaaaatctgagtcagtcttccctgtctcccaacastttgtatcctcaatttttctggaatctctgtacttctgtcctttcccatgactgtcacttgatccaagccaccattctctctcgtggactgtcccagcca

SEQ ID NO: 133012 - DNA, 201 bp, Homo sapiens
aagcctggctcaaaagcctcagaatgtcacttcttctccattctattggtcaagacaactcacagggcaaaccacattcggcgggtagggggcagaaattsaaggggaggcatacatgacgggaggaaggaattgatgggtggctgtctttggagactatctcccgcatactcgaaaagcagttgcatctaatacttaaaa

SEQ ID NO: 133013 - DNA, 201 bp, Homo sapiens
attcagattatcagtttctctagtcacgtttcaagaatgcgatactcacatgtggctagtagctaccatattgggcagcataactctagaacactgggaarttactaaccattttattgctaaagagaacaggctaagaccacacaaccattacttctaaacttttctcctgacacccagttcagttccctgttcattgta

SEQ ID NO: 133014 - DNA, 201 bp, Homo sapiens
ttattctgacaaaaaaatcagcagaggtccaggcctaatttgtcagttttttaaatgttacttgcaagttaaaaagtggaaaaaagcgatcttgtttgagytggaaactgcatgtctataaaaggatttcttggttttccaaggcaggggaaaatcaaagactaatcttgtagactagtatatggattgtcacaaagctag

SEQ ID NO: 133015 - DNA, 201 bp, Homo sapiens
tctttactatttactactattatcttttctacttatttacagttttactttattgctttacttatttcttatgtttagaaaccacataaatctttcttcaratgaaatataatgcagtagcccaatatataaaagcgttcagaggcccgggagaagccttgcatgtgtatgaggaggtggggacgggtccataggaaccta

SEQ ID NO: 133016 - DNA, 201 bp, Homo sapiens
ttccaaagaacgagtgatatatgctcatttcactggaaagatcaaactcatattttattctgacaaaaaaatcagcagaggtccaggcctaatttgtcagktttttaaatgttacttgcaagttaaaaagtggaaaaaagcgatcttgtttgagttggaaactgcatgtctataaaaggatttcttggttttccaaggcag

SEQ ID NO: 133017 - DNA, 201 bp, Homo sapiens
gttctaccttccgtaagacctcctgtggcagcgttgccaaactttctgctacacagcattagtcccctttctctcgccttcagtagcacttgcctatctaycttccattcacagcctccctcagcaataaccaggccacccttcacgcctccaaccaaagccacatgtccaccagcaccccacttccaggtactggtgtgc

SEQ ID NO: 133018 - DNA, 201 bp, Homo sapiens
aaaaattatgtgcataggcttgttttgtcctaacagccctatgagataggtactctaatattatctcctgatttacaggcaaggaaatggaagctgagagrggtaaaggaattgctagggtcccacaagtaatggcagcagaactggtattctagcctgtgcagtttggccccagaagccagcctctgaagtacagctgtg

SEQ ID NO: 133019 - DNA, 201 bp, Homo sapiens
attatttccaaagaacgagtgatatatgctcatttcactggaaagatcaaactcatattttattctgacaaaaaaatcagcagaggtccaggcctaatttktcagttttttaaatgttacttgcaagttaaaaagtggaaaaaagcgatcttgtttgagttggaaactgcatgtctataaaaggatttcttggttttccaa

SEQ ID NO: 133020 - DNA, 201 bp, Homo sapiens
gggtcacttgtgcaactgcatatagctggtggctggggcagaaacataaagacggcttcattcatatgcctggggccttgacagatacaactagaaggcasgggcctctctagtcccatgtggcatctcatcattaagtggtcttgttagaatttcttcacagaataattgtatctcaagagggagaaagcagaggctgtc

SEQ ID NO: 133021 - DNA, 201 bp, Homo sapiens
ttagtttagaatatttagaagaaaaaaatgggacatcaataacatagtttccaaattatattaaaatcatgtctagctaagaatgtaaaggctcctattaytttgtgaactattccatctcaaagatgtgtatttcagaactggggtttgttgttttgttttgttttgtttttaaagctctgctgaaacctttcttttggg

SEQ ID NO: 133022 - DNA, 201 bp, Homo sapiens
ctggggtcacttgtgcaactgcatatagctggtggctggggcagaaacataaagacggcttcattcatatgcctggggccttgacagatacaactagaagscaggggcctctctagtcccatgtggcatctcatcattaagtggtcttgttagaatttcttcacagaataattgtatctcaagagggagaaagcagaggct

SEQ ID NO: 133023 - DNA, 201 bp, Homo sapiens
atgtatatgtacagaataatctatacctaagttactgcagatgtgatgtgcctttttaaaaaaaaaaagtcttgattttctatatttataagtaaacttgrcaacaggcgcaaaattgaattggaagattcttttattattgtaaaatttcatgccagagtttgtccataaagattgaaggagatgcatttaactcattaa

SEQ ID NO: 133024 - DNA, 201 bp, Homo sapiens
agttatgttctgtttcatttattgattgctgcgtaacaaactgtttcaaaacacccagtggcttaaaataataatgacttattatttcttatgattctgtrtgttggctaggagattcttctggtcttacctggggtcacttgtgcaactgcatatagctggtggctggggcagaaacataaagacggcttcattcatatg

SEQ ID NO: 133025 - DNA, 201 bp, Homo sapiens
aatctgctatgtatatgtacagaataatctatacctaagttactgcagatgtgatgtgcctttttaaaaaaaaaaagtcttgattttctatatttataagwaaacttgacaacaggcgcaaaattgaattggaagattcttttattattgtaaaatttcatgccagagtttgtccataaagattgaaggagatgcatttaa

SEQ ID NO: 133026 - DNA, 201 bp, Homo sapiens
tctgaaaaccagggagttactgtatagtcacagtaatttctaatttttaagccagaaatgttttttcaagttatgttctgtttcatttattgattgctgcrtaacaaactgtttcaaaacacccagtggcttaaaataataatgacttattatttcttatgattctgtgtgttggctaggagattcttctggtcttacctg

SEQ ID NO: 133027 - DNA, 201 bp, Homo sapiens
ttcagttgattgtttttataaacataaaaagtgtgattggaagtaatctttgaagaacctcataactaaatggaagaaggaaggatattttagcaactgcyttcttatttatttattttttttttgagacggagtctcgctctgtcgcccaggctggagcgcagtggcgcgatcttggctcactgcaagctctgcctcccg

SEQ ID NO: 133028 - DNA, 201 bp, Homo sapiens
ggataaaattgatctgggatataaaaatctgctatgtatatgtacagaataatctatacctaagttactgcagatgtgatgtgcctttttaaaaaaaaaaagtcttgattttctatatttataagtaaacttgacaacaggcgcaaaattgaattggaagattcttttattattgtaaaatttcatgccagagtttgtcca

SEQ ID NO: 133029 - DNA, 201 bp, Homo sapiens
gaattgcaatgtatcacatacagactgattttacacatttgctttgagcttcagtttcttaattataaaacggacgttggctctactgcataaaatttttrtgggaagttaaatgaaagaatatagagaaagcaagtagagtctcagtaaatacttgtttctttccacttgctttcttcttgtatgcaacagtaaggttgc

SEQ ID NO: 133030 - DNA, 201 bp, Homo sapiens
caaaacaatctatgggttaggttaggtgcagtgactcatacctctaatcttggcactttgggaggccaaagtgggaggattgcttgagttcagagtttgaraccagcctgagcaataaagtgagatcctgtctctacaaaaaatttaaaaattagctgggggtggtggcacacacctgtggtcctagctacttggaaggct

SEQ ID NO: 133031 - DNA, 201 bp, Homo sapiens
gatgaagttaacatcctggaacttggaatggcacgggattggggatgggggaaagaaatgtggaatgagtgttcaactgcctttggtacattcttatcccytgatatttatttatttatttattattattattattattattttttgagacggagtctcactctgtcacccaggctggagtgcaatggcacgatctcagct

SEQ ID NO: 133032 - DNA, 201 bp, Homo sapiens
ctgcccagggtcaggggtcagcaaaatggtccgtaggccaaacccagcctatctcttgttttcgtatggcttgcaagctaagaattgtttatatattttttaatggttttttaaaaaatcagaagaagaatattttataaattttataaaatttaagtttcaaagtccttaagtaagattttattggaatgcagccatgct

SEQ ID NO: 133033 - DNA, 201 bp, Homo sapiens
ataccttctcctaaaagtcttaactttactgagtttttaatttttaattcatatgtgatgaatgaaatatggttaaatattttctaatgtgaattttgttrtcagcatctggtttagaaagttcagctgcttctttcctgttgctacattactttgctgtagatgtgtctgtgttcaggtctaattaaagaggtaggcatg

SEQ ID NO: 133034 - DNA, 201 bp, Homo sapiens
gaaacgaacaaagcctccaagaaatatggaactatgtgaaaagaccaaatctacgtcctgattggtgtacctgaaagtgacagggagaatggaaccaagtkggagaacactctgcaggatattatccaggagaacttcccaaacctagcaaggcaggccaacattcaaattcaggaaatacagagaactccacaaagatac

SEQ ID NO: 133035 - DNA, 201 bp, Homo sapiens
gggaagcccatcagactaacagctgatctctcggcagaaactctgcaagccagaagagagtgggggccaatattcaacattcttaaagaaaagaattttctttttttttttttttttaatttatttttttattgataattcttgggtgtttctcacagagggggatttggcagggtcatgggacaatagtggagggaaggt

SEQ ID NO: 133036 - DNA, 201 bp, Homo sapiens
ctattccacaaagccgccattgtcatcctggcccgttctcaatgagctgttgggcacatggggggggctgacccccccatctccctcccggacggggtggctggccgggcagaggggctcctcacttcccagtaggggcggccgggcagaggcgcccctcacctcccggacggggcggctggccgggcagggggctgaccc

SEQ ID NO: 133037 - DNA, 201 bp, Homo sapiens
ctaattaaccatctcccaggtaaaatttgacttgataatttagtcagagtgtctcatgaaataattttagagagtgattagtacaaaacttatttgaaagaaaaaaaaaaatgcctaaataaaaaaatgcactcagcatttattttatttccggggaggataattgctcttccatattcaggtatacttgtacacatggat

SEQ ID NO: 133038 - DNA, 201 bp, Homo sapiens
aagccgccattgtcatcctggcccgttctcaatgagctgttgggcacatggggggggctgacccccccatctccctcccggacggggtggctggccgggcwgaggggctcctcacttcccagtaggggcggccgggcagaggcgcccctcacctcccggacggggcggctggccgggcagggggctgacccccctacctcc

SEQ ID NO: 133039 - DNA, 201 bp, Homo sapiens
gttgtgtttatgtggttggcaaattgtgttaggcagagagttgggtgattatggtacccatcttgtgagtttctcttctttcagggatcactgtttacaamtgcagctggctactgcctgcagttagttgcttcatctattttctccaatttcataatcggttatgtcagagagggaaagctagtctgataccagttactc

SEQ ID NO: 133040 - DNA, 201 bp, Homo sapiens
ggcacatggggggggctgacccccccatctccctcccggacggggtggctggccgggcagaggggctcctcacttcccagtaggggcggccgggcagaggygcccctcacctcccggacggggcggctggccgggcagggggctgacccccctacctccctcccggatggggcggctgccgggcggagaggctcctcactt

SEQ ID NO: 133041 - DNA, 201 bp, Homo sapiens
aatgctccaattaaaagacacagactggcaaattggataaagagtcaagacccatcagtgtgctgtattcaggaaacccatctcatgtgcagaggcacacrtaggctcaaaataaagggatggaggaagatctaccaagcaaatggaaaataaaaaaaggcaggggttgcaatcgtagtcttggataaaacagactttaaa

SEQ ID NO: 133042 - DNA, 201 bp, Homo sapiens
cttggataaaacagactttaaaccaaccaagatcaaaagagacaaagaaggccattacataatggtaaagggatcaattccacaagaagaactaactatcmtaaatatatatgcactcaatacaggagcacccagattcataaagcaagtccttagtgaagtacaaagagacatagactcccacacaataataatgggaga

SEQ ID NO: 133043 - DNA, 201 bp, Homo sapiens
attgtccctgtttgcagatgacatgattgtatatctagaaaaccccatcgtttcagcccaaaatctccttaagctgataagcaacttcagcaaagtctcaggatacaaaatcaatgtgcagaaatcacaggcattcttatacaccaatagcagacagagagccaaatcatgagtgaactcccattcacaattgcttcaaaa

SEQ ID NO: 133044 - DNA, 201 bp, Homo sapiens
ggtcctatgagtaaacctaatccttttgtactctggcagttcatcaagtatttgaagagcactattatgcgactttaaaactcttttataactgtctttaraaaaagaaaaatttgggaaattttatatcccttagtagatgatggcagagaggtagcagagcaaagatggctaaactaaaacgtggatcagatttgcaaa

SEQ ID NO: 133045 - DNA, 201 bp, Homo sapiens
cagcagtctgagatcaaactgcaaggcagcagcgaggctgggggaggggcgcccaccattgcccaggcttgagtaggtaaacaaagcagcccggaaactcraactgggtggagcccaccgcagctcaaggaggcctgcctgcctctgtaggctccacctctgggggcagggcacagacaaacaaaaggcagcagaaacccc

SEQ ID NO: 133046 - DNA, 201 bp, Homo sapiens
ccacctcagcctccgtaagtgctggaattacaggcttatttttgtttttttcttttggccattgttctgttagtttgctgttttgcacattagctatactrtaacctggcatattgcataccatgtgtaatacatgttttactgtcagactatatgattatttttctcatgctgttaatctgaacttaaagaattacttat

SEQ ID NO: 133047 - DNA, 201 bp, Homo sapiens
tctagtacttcaagtccttccaatgaatctttttgtgtaattaaagccaccaggcttacatcattaaaaaaagtgacatatttgtgaagcatgataacttsttagtgtatactctgagagcagctgtcattttccctagtaaattatagcaactctgtaacatttgtattgcaatttggattagaacttcagctacaacca

SEQ ID NO: 133048 - DNA, 201 bp, Homo sapiens
ctttaactagtttttttaattagggtaaacctggccttatagaatgagttagttttccttttattttctggaagagactgtaatgtgttagtaatacattyggccctaggtgtcctcaggggtactggttccaggatcccctgaagatgcagatgttcaaatcccttataaaaagttacatagtataacctatggaggcat

SEQ ID NO: 133049 - DNA, 201 bp, Homo sapiens
cttgtctgtttttcacatagctgacagatgatccttttaagatttaaatagaatcaagtaatttccctaataaatggtttcccacatacttacaatgaaayccaatcttcttacccttgacttacaaagttgtgacaaatactgttggttatgtaccccaaatttattttcttcaaattcttcactaacagatcttagatt

SEQ ID NO: 133050 - DNA, 201 bp, Homo sapiens
ttaggctatgtgttaggaatttgggtttcttcactgccagcacaccacatagtatatttttaaattgctttgaatatgtaatataatgttattttttctcwtgaactgtttggggaaagaatgtgctgaaatttatacattatattacttgatatagttgttgcagaaaagcagttcatcggggtacacttcttgttgcta

SEQ ID NO: 133051 - DNA, 201 bp, Homo sapiens
ccaagtctgtagttgccagaagtttacattaataaagttttcattataaactgctggcaatatttgtgtcaaaactaacatcaatgtaaagaaaacaagasaagcagctttttatgaattagcactttaaaacattatttccaaagatttgatttctttctctagacttgctctttccaatatggtagccactagctacat

SEQ ID NO: 133052 - DNA, 201 bp, Homo sapiens
acactagccacatttcaggtattcagtagtcacacgtggctaatggctagcataatagcacaaataacactatttctagcaccacagacagttcttttggycatttcttttaagttcgatcttgacctgaattcttgcgattgtataacccagtgtgggataagcattacttttatctacacaggtaaagattaggcttat

SEQ ID NO: 133053 - DNA, 201 bp, Homo sapiens
ttctagcaccacagacagttcttttggtcatttcttttaagttcgatcttgacctgaattcttgcgattgtataacccagtgtgggataagcattactttyatctacacaggtaaagattaggcttatgatagctaaattaaacattgaaaccccatttacagtggcacattgaaataagccattaagacctgttgccagt

SEQ ID NO: 133054 - DNA, 201 bp, Homo sapiens
ccgggatggggagcttgcagtgagccgagattacaccactgcactccagtctgggtgacagagcaagactctgtctttaaaaaaaaaaaaaaaaaaaaaaatctgggagtcacaatggatatttgtgatttttttcattttgactaattagtatccaattctttttctgattttggagattttaaactgtgggcactcctt

SEQ ID NO: 133055 - DNA, 201 bp, Homo sapiens
tcttttaagttcgatcttgacctgaattcttgcgattgtataacccagtgtgggataagcattacttttatctacacaggtaaagattaggcttatgatasctaaattaaacattgaaaccccatttacagtggcacattgaaataagccattaagacctgttgccagtccagtagtctaatattgatcaaactactaagt

SEQ ID NO: 133056 - DNA, 201 bp, Homo sapiens
acagcttgtcctggtttcatcagtttcattgttctttttttactgcagtttcattctgagtaaatggttccattggttttcttttagccagaataatttcyatagccttttattgatcaatacatagacgattgcatttaatgtatattaccaagcacagttctttccctccagacaggtgatactacctttctttgtatt

SEQ ID NO: 133057 - DNA, 201 bp, Homo sapiens
ttaagaatgtgtctgataaccttcagtgctcctggtctcaacttttagttttgtttgttctttttaaagagttaagataaatgaaaacctttctgttattrtttttttcattttgattcagagggtgggagaagaagagattctatttgaagcagctgttttttatttttattttttgaatattttagatcgtaatgcttc

SEQ ID NO: 133058 - DNA, 201 bp, Homo sapiens
tcatgttctacaggctgagtgtggttgctcacgcctataatccctgcactttgggaggcaacggtgggaggattgcttgagctcaggagttcaagcccagyttgggcaacatggcgaaaccccgtctctacttaaaaatttttaaaaattagccgggtatggtggtgcatgcctatggtcccaactactcaggaggctaag

SEQ ID NO: 133059 - DNA, 201 bp, Homo sapiens
taaataagctactctgccgttactgaaaacagaaaattgtgccatttgaattctaatttaaattcagtaagccatcctatatagggatagcactggttacytgaattttctttttttcttttttttctttttgaagtggagtctcgctctgtcggccaggctggagtgcagtggcacaatctcagctcactgcaagctcca

SEQ ID NO: 133060 - DNA, 201 bp, Homo sapiens
agtccctagcagctattgccaaataagcctcaggggttttgtcctgcacaggtacagcccagcccagccatgtgatccctggggactccttcacagacatytggggcctgctctctgcacagatccttcttctctagtttcccatcctgcagactccagccaattcttctgccttgagtttggatttctgtcttctcagtt

SEQ ID NO: 133061 - DNA, 201 bp, Homo sapiens
acacgtgtggtctcagctacttggggctgaggtggggaggattgcttgatcctggaaggttgaggctacagtgaactgtgatcacgccactgcactgcagycttggtgacagagcaactgtctcaaaaaataaatacatacatatgtacatacataaaaaaagtaaacattaagtactgaaagttgtgtggcttccctagg

SEQ ID NO: 133062 - DNA, 201 bp, Homo sapiens
tctaattcttcacagagaatattttaaagaaatctaatggtcaatatttaataaaatgcagtaattttactgctttgtcaggggcattctaatgtgaaacmctccttttttttgactgcatatatgttttatagtgaagaatgtaataatcactaatagatgttgatgacaccgccttgatttgtgttattttagttttaa

SEQ ID NO: 133063 - DNA, 201 bp, Homo sapiens
ctaggaacttgcatagggaactcaggaccatgaccccagggctgtatttcagctcatacgtagcgcatcaggaaggcatcatggggtccggtgtcttactmcctaattctcctagcagttagtacattttgataacaatgtcaaaaatgtagtgactcttcacaagtggagcagtaaggaagagaattcattttttttatt

SEQ ID NO: 133064 - DNA, 201 bp, Homo sapiens
caggaattaattagaaatatattaattgaattgaatattgcaaaagagatttattgtgatccatgtaaaagaaatcaaagcaaacccatattttactctcrtgtgaaaaaattatgcataaatattcataagaagctttgtaattttagaggaattgacttactacctttttataggagtggtaatgaagaaaaactaatg

SEQ ID NO: 133065 - DNA, 201 bp, Homo sapiens
ttgaatgaagagcaaaaagtaaatgttaaaatcctcatctattttttttgtgttcttggtcgtttataatttaattgattagctctttacagcattttgtrtgtatttttaactccaacgttttagtctatttatcagaataaagtttgtttgtaattaagaagatgactttatgtagataaataaaacaaaaatgtagaa

SEQ ID NO: 133066 - DNA, 201 bp, Homo sapiens
tttttgaatgaacagcccaaagactaaaggaagagcttccttagttctaaattctgtgaaatgagtcagtttgaatgaagctaatgtttcttttgttttayaccatttactatagagtgcagtacttcagttgttcatacttgttgatattgttacagatattctaatggttctttttacaaaatcaaatatatatacaag

SEQ ID NO: 133067 - DNA, 201 bp, Homo sapiens
attttcctaaagccattcaataaatgtgaattaaacaaatgtctgtatttagtagcccttttctgttcactgattatacttcacaagatgattctgatttyaaaagtagtacattgagactaaaagaaaaatcaaggctgggcacagtggctcacatctgtaatcccagcactttgggaggctgaagcaggaggatcactt

SEQ ID NO: 133068 - DNA, 201 bp, Homo sapiens
gatccatataatacttttaaaatgtcttcttactgaatgcagttagaatatatgagttctggcaaaagataaaactactgaatacaaatgaaatatttttyttcgattattttgataaatctcctttaaaattgatttttgaaataagacattatataggtaattaaatgcttaatttagaacatgcagaactttttattt

SEQ ID NO: 133069 - DNA, 201 bp, Homo sapiens
ggatttattttcctcatgctaggtcattcgtagatagtgatcattctacttcagccttaatggtgatcttgagacgggaagatttagaaggaaatctatcyagcatgtcttcactatcaacatgagtaagatccagctgaacaaatgaaattttctatataaatttcaagcttgaactcaaaaaaaaagactttgacttcc

SEQ ID NO: 133070 - DNA, 201 bp, Homo sapiens
catttctataccatatccctatgtgctgtctgccattagtccattgttgggtaacttaaatggttagaaatacttctatgcattaagccaaatatagtaamttctttttggaactacatcgtataaggatgtttttccttttgagagccctctctgaaatactgacaatgctaatcaagacctttcctatactcaccacct

SEQ ID NO: 133071 - DNA, 201 bp, Homo sapiens
tgaactgcatttagagaactgaagatggttctaatgaagatcagaaaataaaaaacgcatgcatgtgtaatttaagttcaattttatataattaacaagtrtacaactgttaataaaagtcacacgttcatgactctagaagagaccttaaatttagaggttagctaatctaaccttttaccccataaggattccgtacta

SEQ ID NO: 133072 - DNA, 201 bp, Homo sapiens
aattattcatgagggatccacctccatgactcagacacctcttactaggtcccacctccaacattgggcatccaatttcaacatacatttggaaggcacaracattcaaactgtagcacgttaacatataaaaatgtacttatcacttatctgagacactcatctgaaattccaagagatttaggggctatgtgccaggaa

SEQ ID NO: 133073 - DNA, 201 bp, Homo sapiens
acaagtcacatttgtcaccaagtgcctttttatctttcccaactcagcttctctgatttcctttatgtcacatattaaaagaaaaaccttagtcaaattamatttaacagttaaattgagcaaagaatgattggtgaatcaagcagcctccagagccagaataggttcagagtaattccagggctgccacatggtcagata

SEQ ID NO: 133074 - DNA, 201 bp, Homo sapiens
atatttatgttatatgtatatatatatatatagcaagccattctcatattttagattctagtttttcttaatgtttctaaagataatgatgaacaagtcayatttgtcaccaagtgcctttttatctttcccaactcagcttctctgatttcctttatgtcacatattaaaagaaaaaccttagtcaaattacatttaaca

SEQ ID NO: 133075 - DNA, 201 bp, Homo sapiens
cctgtaaccattttgaactacagtacttaaggtccctcaaatactctgtattcttttaactgattttccctttgcacatggtattccctctgtcttaagcmcacttccctccttcccctgactgatgagctcctgctgcttagctgaattatgaccttcttctgagaacctttcctcatctccttcctgctccttccttcc

SEQ ID NO: 133076 - DNA, 201 bp, Homo sapiens
ttatatgtgaatgagctaacataaatctgaatttcttagcttttcattgaaggtttttcagtggccactgcctgatagatatgtggacaaattggacaccrtgtaactcactgcgactaaatttaacgcttaatcatgtccaccttctagtcatccttttaaagaatataaacagggaaaagacagatacagctatacatc

SEQ ID NO: 133077 - DNA, 201 bp, Homo sapiens
ctttagactgctcaagggaccggaagggagttggtactaaatcctttggccgtgagtgtgagtcattattaaaaatttagaagccaaattacaaatatgayacttcagcatctgtttttaaaattgttagaatcgaagtttaaagtgttctttctgcctttacaagtaaaccgaactttacattagtagagtggattacaa

SEQ ID NO: 133078 - DNA, 201 bp, Homo sapiens
tagttgggtgcctctggctcaaggtctgtcctgaagctgcagtaaactgtccaacaggtctgcagtctcacctggggactcacctggcaagggctgggacycgctttcaagctctctcacagtgttggttgactggccttgattcctcacctgtgggcctctccacagtgaccttatggagtattacttacctgctgctgc

SEQ ID NO: 133079 - DNA, 201 bp, Homo sapiens
taagggtaattagtaccaatgccaagtgcgctgttttctctgctggagaaatgaatttttagtagaaggggaccgaccacagtgctaaaaagcagcaagaygataaaacttagttgtccatttacctctatttagccactctcctagctttgaattgtcctgccttcctatccagaagcacaagtttcctgctgttttcca

SEQ ID NO: 133080 - DNA, 201 bp, Homo sapiens
gtccaacaggtctgcagtctcacctggggactcacctggcaagggctgggacccgctttcaagctctctcacagtgttggttgactggccttgattcctcrcctgtgggcctctccacagtgaccttatggagtattacttacctgctgctgcttgataaattaccgcaaactcagcagctcaaaacagcacacattttgt

SEQ ID NO: 133081 - DNA, 201 bp, Homo sapiens
tgtgattcattcattgtactatgtttaaccttttcctccctactgtggccttaagagtaatttctacaacaaattctatgttgaatttaaggaagctacaycaaaaactatcagcagaatttcaagaatccttgtagccttttttcctttttggctgccaagattgatgtatatataggtacctatctatatttagcagtt

SEQ ID NO: 133082 - DNA, 201 bp, Homo sapiens
gtagataaaaggtcataccagttttaaatttccaacttttatggatcctagctcagatgctacttgggattacaagaaggtcaaaatgcagtaagtctgcrttagggaactcttcaaatacttcaggttcaattatatatctaatcaagtcacttcttcggagtacgtcttgctgagcaatgcatatcttactgtagtgcc

SEQ ID NO: 133083 - DNA, 201 bp, Homo sapiens
gccttgattcctcacctgtgggcctctccacagtgaccttatggagtattacttacctgctgctgcttgataaattaccgcaaactcagcagctcaaaacrgcacacattttgtgagtcaggagtctatgcacagcttagttgtgtcctttgcttcacgatctctcacaaggctacagagcattagccagggtcagtatct

SEQ ID NO: 133084 - DNA, 201 bp, Homo sapiens
ataattctattgtgggaatataccactacttacccattctactgttgagtatttgggtggtttttatgtgtgttctattatgaatagtgctgctatgaacrtttttgtacacgtctgtaaacgtcaacattgaaaactttttagttgtttgataaaagcaatatttagttaatttgcatttcttagtcactgttttacttt

SEQ ID NO: 133085 - DNA, 201 bp, Homo sapiens
ttttattactcatgcccttgtctagccccctgccacactgactctgggcttagcctgggactgctttgaataaaataaggcacaagtgatactctgtcctwttcaggacacgcccctgagttggcctggcagctgctagtttctttttttgtaattcttcttggaacccagctgccatgtcataaggcagcccaagcagcc

SEQ ID NO: 133086 - DNA, 201 bp, Homo sapiens
ggagtattacttacctgctgctgcttgataaattaccgcaaactcagcagctcaaaacagcacacattttgtgagtcaggagtctatgcacagcttagttrtgtcctttgcttcacgatctctcacaaggctacagagcattagccagggtcagtatctcatctaaagactctactggagaaggatccccttccataccct

SEQ ID NO: 133087 - DNA, 201 bp, Homo sapiens
agtcagtactattttgtgggagattcatctatcttatatagttgtagtttgttcattttcattgtttgtataattctattgtgggaatataccactacttrcccattctactgttgagtatttgggtggtttttatgtgtgttctattatgaatagtgctgctatgaacatttttgtacacgtctgtaaacgtcaacattg

SEQ ID NO: 133088 - DNA, 201 bp, Homo sapiens
tgcctcaataaaccgtcccttttattactcatgcccttgtctagccccctgccacactgactctgggcttagcctgggactgctttgaataaaataaggcrcaagtgatactctgtccttttcaggacacgcccctgagttggcctggcagctgctagtttctttttttgtaattcttcttggaacccagctgccatgtca

SEQ ID NO: 133089 - DNA, 201 bp, Homo sapiens
actggagaaggatccccttccataccctcacgtgcttattggcaggattcagtcccttgcagtctgttggactgaagccctcagttccttgccatgtgagmctgtataacatggtttcttgctctatcaaagccagcaagagaaagatgatctgctagtcacttctcatcaccattgctgtatttgcttggttagaagcaa

SEQ ID NO: 133090 - DNA, 201 bp, Homo sapiens
tggtttcttgctctatcaaagccagcaagagaaagatgatctgctagtcacttctcatcaccattgctgtatttgcttggttagaagcaagtcactaggcmagcctgcactccaggggaggggagcacacaggatgtgatgtaaggaggtgggaatcattgagtctgtctgccatagcgtggcagccagttcttctagggt

SEQ ID NO: 133091 - DNA, 201 bp, Homo sapiens
ttattctccttttctaggtgtctttatccccttccaaaataaatgtccaaaattatccattcctcatcttaataggcaataggtaggggttagggactatkgcacatatttccaaatagaaataatatgtatctttgaatatatctactctgcctactgttgctactagtatatgtcaccaattaaaagtaactaatattt

SEQ ID NO: 133092 - DNA, 201 bp, Homo sapiens
taatgatgaactgtaatgagagttatgtcaatgtggtctctctctgtgtctcacaatatctaattgtactgtattcacctattttcagactgtggttgacygggggtaactgaaaccacagaaagggaaactgcagataatggggaatatcataaacgatcttcttcagtctttgctctctagtcactagggttgatgaac

SEQ ID NO: 133093 - DNA, 201 bp, Homo sapiens
ataaattgattctttgaactttgcatagtaaccttcccttatctgtggggatacgttccaagacccccagtggatacctgaaaccacagatagtactgaamcctgtacagactatggtttttcctatatgtacatacctgtaataaagtttaattcataaattaggcacagtaagagattaacaaccataccaataataaa

SEQ ID NO: 133094 - DNA, 201 bp, Homo sapiens
agtcgtcactggtagagttgagagtacacattttaacatgtgctttaaatattatggtgagctgatggggattgtcatgctccctgaccagcacctttgcwtgtcactttatgttctaattcagtcctcctggcaatcttgtaatcttgtatgaaagctggataagtttagacccctgctgatctaatgaggggttagata

SEQ ID NO: 133095 - DNA, 201 bp, Homo sapiens
atgccatggatctctggcagtttactccactgcacgaggctgcttccaagaaccgtgtagaagtctgctctttgttacttagccatggcgctgatcctacrttagtcaactgccatggcaaaagtgctgtggatatggctccaactccggagcttagggagagattgacttgtacgtatttatatcccgaaatcattatcg

SEQ ID NO: 133096 - DNA, 201 bp, Homo sapiens
gtccctgtaattccctccctttctctccaccttccagctacaatggcctttttgtctctctaatgcaccaaacttgttctgcctgcggtactctttccccrgatttttcactaataatgttaattcatctgagttgtgccctgacaaagctgtcataatttcttgccctgccctgtttgtttgattactcttttatcatgt

SEQ ID NO: 133097 - DNA, 201 bp, Homo sapiens
attgacttgtacgtatttatatcccgaaatcattatcgcataaattggaatatttaatttctgttgagttttatctaccttaaataataaccttccattcytacaagcagactaattcataatcctcatttctaattgtatacttttcttcatgaattccatgggaatgttatatacagacactttttgtatatattgtat

SEQ ID NO: 133098 - DNA, 201 bp, Homo sapiens
acacctctgcatgaagctgctattaaagggaagatcgatgtgtgcattggtaagtatcatttgatgatatctaaattttaaataaaggtttattcttactwtttttgtggtacaaatagtgtttcctgagaataggtaaggaagggtttattgcttcttgtagaagcagttcttttccatcaaaaggtaaacagagagatg

SEQ ID NO: 133099 - DNA, 201 bp, Homo sapiens
ctggggcagcaggacctgggacaggggtcccagcagtgagcggggccctacgggaactgctggaggcctgtcgcaatggggacgtgtcccgggtaaagagrctggtggacgcggcaaacgtaaatgcaaaggacatggccggccggaagtcttctcccctgcacttcgctgcaggtcagagacttttgaattgtttattaa

SEQ ID NO: 133100 - DNA, 201 bp, Homo sapiens; identical to SEQ ID NO: 23284

SEQ ID NO: 133101 - DNA, 201 bp, Homo sapiens
atctatacttcttatctgctggctgtcaattgggggttcccatgacctcttcatcaagtttaattatttgctagtggtgcccacagaactcaggaagatakgtttaccagtttattataaaggaattacaaaggctgcagatgaatggccagatgaggaggtacatagggcaaggtcagtgggcaggggcaaggagcttcc

SEQ ID NO: 133102 - DNA, 201 bp, Homo sapiens
gtggcacaatctcagctcactgcaagctccgcctcctgggttctagcgattctcctgcctcagcctcctgagtagctgagattacaggtgcccgccaccayacccagctaattttttgtatttttagtagagatggcgtttcactatgttggtcaagctgggctggaagtcctgacctcaggtgatccacccacctcggcc

SEQ ID NO: 133103 - DNA, 201 bp, Homo sapiens
gcggcaaacgtaaatgcaaaggacatggccggccggaagtcttctcccctgcacttcgctgcaggtcagagacttttgaattgtttattaagggttatggstttgggtgcagggtccggttaggacaagaaaacaggttattgtgatgggacaaagtgggggcgtggttatggttcttcatcacctcaccagaagactgga

SEQ ID NO: 133104 - DNA, 201 bp, Homo sapiens
aacttgtgatacatgatactatatagtcagtactattttgtgggagattcatctatcttatatagttgtagtttgttcattttcattgtttgtataattckattgtgggaatataccactacttacccattctactgttgagtatttgggtggtttttatgtgtgttctattatgaatagtgctgctatgaacatttttgt

SEQ ID NO: 133105 - DNA, 201 bp, Homo sapiens
tgttttgaacttgtgatacatgatactatatagtcagtactattttgtgggagattcatctatcttatatagttgtagtttgttcattttcattgtttgtrtaattctattgtgggaatataccactacttacccattctactgttgagtatttgggtggtttttatgtgtgttctattatgaatagtgctgctatgaaca

SEQ ID NO: 133106 - DNA, 201 bp, Homo sapiens
acaaaattgatcttttcacctaaaattatcagcttaatttttaaggatattttctacggaaacctcattctgactttgtaatacatatctgtggaaatgtrtgctttactttggagactttttcttagagcctgcttttctggaatgaatgaatttctatagatagcatggaagacatatcttgagataaatttctttttt

SEQ ID NO: 133107 - DNA, 201 bp, Homo sapiens
ttttactttgtaataaaaataataagcataattgttaatattgccactaatctcatcagaaaagtattttagaattgggaaactgttaagcttatagcaayagttgcaagtgttacagaattctagtatttccttgaaagctcagattttatcattgggaacaaataccgtttggtttcctaaaagattctaataattcct

SEQ ID NO: 133108 - DNA, 201 bp, Homo sapiens
aaatcacattttctgtcattatcctttgctacttgagcatccactaacatgacctttggatatcctgtcctttcagttttttgacatcttccagtttcaaytgactctcccatttcctcctaagtctctcactaacatagccacatcctggaccaagtcattacataaaactaccttgagaagcttcaacttataacatcc

SEQ ID NO: 133109 - DNA, 201 bp, Homo sapiens
gattctgtacccacagttgataagtaatagtttcctaagggttagttgcaacgtagaatctgaagccaaatcagtgaatttttttatacttctgctgtgtyagaatccattgttagaatccagaaacgggtatacctgtacttgttttgagcatttagaaaatattggttcttgaagctgtgcagatattccaaatgttga

SEQ ID NO: 133110 - DNA, 201 bp, Homo sapiens
tggttaagattattcctccttatagccatctattgcagcttctaatatatttttcaatattcctcaaattattgcaatgcctgatataaaactattttttwaaaaaatcacattttctgtcattatcctttgctacttgagcatccactaacatgacctttggatatcctgtcctttcagttttttgacatcttccagttt

SEQ ID NO: 133111 - DNA, 201 bp, Homo sapiens
ctttgattctgtacccacagttgataagtaatagtttcctaagggttagttgcaacgtagaatctgaagccaaatcagtgaatttttttatacttctgctrtgttagaatccattgttagaatccagaaacgggtatacctgtacttgttttgagcatttagaaaatattggttcttgaagctgtgcagatattccaaatg

SEQ ID NO: 133112 - DNA, 201 bp, Homo sapiens
aaatactcacattccaaaagggagaaatcaaccaaaacaaagggcctgcaggctccatggacttcgaaacccagcagggcagttgttcaatcttaaagttscaaaataatctcccttgactccacggctcacatccaggccacaccaacacaaggggtgggctcccaaggccttgggcggctccacccctgtggctttgca

SEQ ID NO: 133113 - DNA, 201 bp, Homo sapiens
atgaagaaaatccttcttcaaacagaaaatgttgttggaaaaggaagaaatattttaatagcattgtcagataattttgccttttttctctttgattctgyacccacagttgataagtaatagtttcctaagggttagttgcaacgtagaatctgaagccaaatcagtgaatttttttatacttctgctgtgttagaatcc

SEQ ID NO: 133114 - DNA, 201 bp, Homo sapiens
gatttgggtggggccacaaatccaaaccaaattttttggtccctggctcctcccaaatctcatatccttctcatatttcaaaatacaatcatgccttcccratagtccccaatagtctcaactcattccagcattaactcaaaagtccagagttcaaagcaaagcaagtcccttctgcctgtaaaatcaaagccagttagt

SEQ ID NO: 133115 - DNA, 201 bp, Homo sapiens
tgtaaacaacattcttaatgaaaagaagctattttctaaaggaaataatgagaagcagcattattttacactttgcaagtcactttaatgtctggcttaawaagagatagctaattctcatctgcttctacctgccaattctggtatattgtttgggttaaagtatatgaagaaaatccttcttcaaacagaaaatgttgt

SEQ ID NO: 133116 - DNA, 201 bp, Homo sapiens
atgcagtgtttctcaaactttttggtctcactgctttttcacactcttaaaaataattgaaataatttttgtttatgtgggttctgtctatggagacttamcgtatgaaaaatttaaaatgaatataatattagaaattttaaaaataaaatgataaactccattatatgtaaatatgtgtaaacaacattcttaatgaaa

SEQ ID NO: 133117 - DNA, 201 bp, Homo sapiens
gtgtgtttttcccccttggtttgtttctcagggatctggcttgagctgtaaggtttttgagtagttcagtaacagctcgagaaatatgagcaagattatgrgaatggaatgtttcctgcccttaagaaagcttatagtaaaaatgcagtgtttctcaaactttttggtctcactgctttttcacactcttaaaaataattg

SEQ ID NO: 133118 - DNA, 201 bp, Homo sapiens
tacttgcagaagtaagatggtatctcattgtggttttaatttgcatttccctgatagtaatgttgagcattttttcatatgtttgttggccacttgtgtaycttcttttgagaattatctattcatgtcctttgcccactttttgatggggttggttttttttcttgctttgtttgagttccttgtagattctagatgtta

SEQ ID NO: 133119 - DNA, 201 bp, Homo sapiens
ctatcatattgggggttggggcttcaacataaattttaggggaatactaagcattcagtcaataaacctggttattttttctttatcactgcctttttttycttttattaaagagattatcactcaagcttgcttctctgtctcacacatatgcatattaatccattcactcatctcattcagttaaattaggattgtgtt

SEQ ID NO: 133120 - DNA, 201 bp, Homo sapiens
aagaatgccatcaagagtaaagcttcaagaaagcactgtaaatactatgcataatcacttgaaatgcatatttggataactaaactggtaaatttggaaayagaccaattctaaatataaaatgttttatattttgattttataaaaaaaatgctttaatttgttaatagtaacataataccctacttttgaatattataa

SEQ ID NO: 133121 - DNA, 201 bp, Homo sapiens
aatgttttatattttgattttataaaaaaaatgctttaatttgttaatagtaacataataccctacttttgaatattataaaaatgctccataaaataatmtactttcagacagtgttcaatacccattagaattgggagagaaggctgtgggcagggaacagaactagacgtctctgctcctggctgtttttggctgcca

SEQ ID NO: 133122 - DNA, 201 bp, Homo sapiens
tttttctcctttgttcattgttatggttcccgcactcaataaatatttgttaaatgaatgatcattccgccagtgggtgcttcatagactagcactgttayattatagcagcacaacatggtaaaatcaaaacagcataccagcagtataaaatgtacaagaaatattagggaggcaagctggaattgacaatgagaagat

SEQ ID NO: 133123 - DNA, 201 bp, Homo sapiens
gtctttgtgggactgagccctcaacttgtggcatctaatgctgtctccaggtagtgtcaggactgatttggaggccatcctgctgttgcctgtggcaaaabttgcttgcttgcttgcttgcttgcttgcttgcttgcttgcttgcttggtgtttggggaaaactccccacacattcagtcacagaaatcttctgtgttgat

SEQ ID NO: 133124 - DNA, 201 bp, Homo sapiens
attcattcttttaagttgtcatttccagatgtaatttgctaggcagaaatagattactaatacactataggaattaaggaaaaaaaactcatttaactgcatatatatatatatatatatatgtatatatattttttttccaaaaataagcacaagaaggataaaccagaaaacattgaaattgattacctataagaacgt

SEQ ID NO: 133125 - DNA, 201 bp, Homo sapiens
accatcacaatgagcgcatgttgtttcatggtaagcagcgtggcagggacggtggacgtctccctgggcctttgcaggagtcagtaaagggaaaaacctaygttaaattgactataatacggttgtgttaaaaacggcttgttttgattattttgttcaaataattacttcttggtaccagctttctaatgtatcacacat

SEQ ID NO: 133126 - DNA, 201 bp, Homo sapiens
agctttatcacttttaaattatgtcttaagcaaaataaaaattgaaccttcctaaaaggaaaacatacttttcattttaaatcataaatgcacgtttcacmgataatgtttctttcttcttcatccttaaagattcaaaaagttgtcaacaagaagttgagggagcggttctgccaccgacagaaggaagtgtctgaggag

SEQ ID NO: 133127 - DNA, 201 bp, Homo sapiens
tttttaatcctgaggtgatttagaggtaacagccaggtctggtatagaacaacaaaaactgtaactgaaaattatgtcactaacagctagagtattttctsaattacactgacatggtagctttatcacttttaaattatgtcttaagcaaaataaaaattgaaccttcctaaaaggaaaacatacttttcattttaaatc

SEQ ID NO: 133128 - DNA, 201 bp, Homo sapiens
agtaagtcagcaaaatgtatccgaaatcctttgctttttttttttttttttcctgctaactgcctcctgctgcccttcagataagaccaacatctttagcrtaaccagtgaggacttaaatgctctgtaccctgaccacctagctttgactactagattttgctgaaaccaaaatttggaactctttccttatttttattt

SEQ ID NO: 133129 - DNA, 201 bp, Homo sapiens
gagatggagtctcactctgtcgcccaggctggagtgcagtggtgcagtcttggctcactgcaagctccgcctcccgggttcacgccattctcctgcctcarcctcccaagtagctgggactacaggtgcccaccaccacgcctggctatttttttatatttgtagtagagacggggtttcaccgtgttagctgggatgttc

SEQ ID NO: 133130 - DNA, 201 bp, Homo sapiens
cttcatgatttctggggcagaaagttagttgattccacgtttttttctttttttgagatggagtctcactctgtcgcccaggctggagtgcagtggtgcartcttggctcactgcaagctccgcctcccgggttcacgccattctcctgcctcaacctcccaagtagctgggactacaggtgcccaccaccacgcctggct

SEQ ID NO: 133131 - DNA, 201 bp, Homo sapiens
catagtggacattttagcctctctattgtcctggagcgtttcttaatattactaacacgaaatatggaaaatagtatatttaatagactgaatctctgcarttatgttgaggatactcttttcatcttatctgttgattcacattttttgagagtgacctgtagaccttctctgtcagtatgaagctcagcattaatgaag

SEQ ID NO: 133132 - DNA, 201 bp, Homo sapiens
catttaaaaatggttatgatggcaaattttatattatgtgtattttaccacatttaagtgaaaaaaaaggggggtatcatagtggacattttagcctctcyattgtcctggagcgtttcttaatattactaacacgaaatatggaaaatagtatatttaatagactgaatctctgcagttatgttgaggatactcttttca

SEQ ID NO: 133133 - DNA, 201 bp, Homo sapiens
tcctgatcttgtgatctgcccgccttggcctcccaaagtggtgggattacaggcctgagccaccgcacccttccagcaacgactttctttaaaagactatwtagagttgttagaaaatctcgtagataaattttgctgtatgttttgactcatggaagaagaagttaaaaattttttgaacagtaactgaaacatattgga

SEQ ID NO: 133134 - DNA, 201 bp, Homo sapiens
tatctgttgattcacattttttgagagtgacctgtagaccttctctgtcagtatgaagctcagcattaatgaagtgtttatggaaattcaagcaagctgcmtgcaacttgtttaattaacattcactggggcaattccatggtgtgtttttcccccttggtttgtttctcagggatctggcttgagctgtaaggtttttga

SEQ ID NO: 133135 - DNA, 201 bp, Homo sapiens
atcttatctgttgattcacattttttgagagtgacctgtagaccttctctgtcagtatgaagctcagcattaatgaagtgtttatggaaattcaagcaagstgcatgcaacttgtttaattaacattcactggggcaattccatggtgtgtttttcccccttggtttgtttctcagggatctggcttgagctgtaaggttt

SEQ ID NO: 133136 - DNA, 201 bp, Homo sapiens
ccttttcaccatatccacaccaacatctgttatttttttatttcttaattatggccatacttgcagaagtaagatggtatctcattgtggttttaatttgmatttccctgatagtaatgttgagcattttttcatatgtttgttggccacttgtgtaccttcttttgagaattatctattcatgtcctttgcccacttttt

SEQ ID NO: 133137 - DNA, 201 bp, Homo sapiens
tctttgaagaacctcataactaaatggaagaaggaaggatattttagcaactgctttcttatttatttattttttttttgagacggagtctcgctctgtcrcccaggctggagcgcagtggcgcgatcttggctcactgcaagctctgcctcccgggttcacgccattctcctgcctcagcctcccgagtagctgggacta

SEQ ID NO: 133138 - DNA, 201 bp, Homo sapiens
tacaatcatggcagaaggcaaaggggaagcaatcatggtggggcaggagagagacagcagaaagcgggaggtgccaccacccccctctttttttttttttwttttttttgagatggagtctggctctgttgcccaggctggagtgcagtggggcgatctcggctcactgcaagctccacctccctgttgccacctactttt

SEQ ID NO: 133139 - DNA, 201 bp, Homo sapiens
ttacctatttttttttttaatcctgaggtgatttagaggtaacagccaggtctggtatagaacaacaaaaactgtaactgaaaattatgtcactaacagcyagagtattttctgaattacactgacatggtagctttatcacttttaaattatgtcttaagcaaaataaaaattgaaccttcctaaaaggaaaacatactt

SEQ ID NO: 133140 - DNA, 201 bp, Homo sapiens
ttcattagacaattataatttacttatccaagatgttgaactattttggggcaaaacctgtgaataaagagtaatgttcgttttgtgtttgtctttgtgtrtgcaccacgaaagcaactttgcagctctcaaaatgtgaattgtagagacttagagggccggcattccacgcccttacacttcgcagcaggctacaaccgc

SEQ ID NO: 133141 - DNA, 201 bp, Homo sapiens
tatttacaatcatggcagaaggcaaaggggaagcaatcatggtggggcaggagagagacagcagaaagcgggaggtgccaccacccccctctttttttttwttttttttttttgagatggagtctggctctgttgcccaggctggagtgcagtggggcgatctcggctcactgcaagctccacctccctgttgccacctac

SEQ ID NO: 133142 - DNA, 201 bp, Homo sapiens
gagatgcctaaacataacctttttacctatttttttttttaatcctgaggtgatttagaggtaacagccaggtctggtatagaacaacaaaaactgtaacygaaaattatgtcactaacagctagagtattttctgaattacactgacatggtagctttatcacttttaaattatgtcttaagcaaaataaaaattgaacc

SEQ ID NO: 133143 - DNA, 201 bp, Homo sapiens
aggatatttacaatcatggcagaaggcaaaggggaagcaatcatggtggggcaggagagagacagcagaaagcgggaggtgccaccacccccctctttttwttttttttttttttttgagatggagtctggctctgttgcccaggctggagtgcagtggggcgatctcggctcactgcaagctccacctccctgttgccac

SEQ ID NO: 133144 - DNA, 201 bp, Homo sapiens
gaacttttatttaaaagtaaatagaaagtgcataaatttaatatttatgtttgaaattattttctcaccaaaaatacttatccactaaacttgttcatcartttatagtgaactcctatttatttattaatactgaattttagactcatcattgtctagaattacacactgggatgtttttataaaattagttattttgtt

SEQ ID NO: 133145 - DNA, 201 bp, Homo sapiens
atgaacccgggaggcggagcctgatgagctgagattgcaccactgcactccagcctgggcgacagagcgagactctgtctcaaaaaaaaaaaaaaaaaaaagtccatttagaaatcttgaacccatgtgtttctttcatagatgctatttaccatcaaaaagaagaaaattcaaactgagattattttaaaaatcaacttg

SEQ ID NO: 133146 - DNA, 201 bp, Homo sapiens
catgaacccgggaggcggagcctgatgagctgagattgcaccactgcactccagcctgggcgacagagcgagactctgtctcaaaaaaaaaaaaaaaaaaaagtccatttagaaatcttgaacccatgtgtttctttcatagatgctatttaccatcaaaaagaagaaaattcaaactgagattattttaaaaatcaactt

SEQ ID NO: 133147 - DNA, 201 bp, Homo sapiens
taaaaatagcagctaaagtttatgtttatgtattcaaccagcataataacttttactttaatataaggatagaaaatataggaaagtgattgacatatgcrtatgtcttttgttgaatgccatcggtcaaagaccaccagaaacatatctgtgattaacaaagttaaatttatttcgcttgttgcctcaagggaggacaca

SEQ ID NO: 133148 - DNA, 201 bp, Homo sapiens
gcatgaacccgggaggcggagcctgatgagctgagattgcaccactgcactccagcctgggcgacagagcgagactctgtctcaaaaaaaaaaaaaaaaaaaagtccatttagaaatcttgaacccatgtgtttctttcatagatgctatttaccatcaaaaagaagaaaattcaaactgagattattttaaaaatcaact

SEQ ID NO: 133149 - DNA, 201 bp, Homo sapiens
tatcagccaggcaaattggtagttcctcaatatttaacatactgctgatcctaggttaattttttaatttatcccaaacttcatacttcaaaatactaatrtacatattatccttcactcgagtttcataaggattattacactgcagggttggtacatttctatggcataaaaatatgccacaatcaatatgcgtttcat

SEQ ID NO: 133150 - DNA, 201 bp, Homo sapiens
gtagggtgggtttcctagggatttctactaaagcctaggagctcaggataaccccggggctcattaaaaaaaaaaaatcactttgatttcaagtaattgargaaagttttaggtgttttgtttttgtgtgcccgttgtttttcttttaaggcttcatcagatgtctaagtttgctttcaccagagcgagttactgagttct

SEQ ID NO: 133151 - DNA, 201 bp, Homo sapiens
aaacatatttagaaaacatctatttcaagtaaatgtttacttcttttaatgtcacctaaagtacaacaaaactacaactaaactgtaatggcacatttctrttgcaaaatgggcaacatatagtagttaaaatacgggttaaaacaagaaggattgaggttttaggtgactttggagaaacagtcagactttcactatttt

SEQ ID NO: 133152 - DNA, 201 bp, Homo sapiens
ggtcaagaatgtcagtagttcaaatggagactctatattttagagtagcactgttcattagcaatgtaatgccacacatatatgtaatttaacattttctrttagccacatagaaaagaaatgtgataccaacttaataatgtttcatttaactcaatgtatctcaagtattatttcaacatgtaatgtgtctaaaacaat

SEQ ID NO: 133153 - DNA, 201 bp, Homo sapiens
aggttaggtgcagtgactcatacctctaatcttggcactttgggaggccaaagtgggaggattgcttgagttcagagtttgagaccagcctgagcaataargtgagatcctgtctctacaaaaaatttaaaaattagctgggggtggtggcacacacctgtggtcctagctacttggaaggctgaggcagaaggatcactt

SEQ ID NO: 133154 - DNA, 201 bp, Homo sapiens
tgaattttgtgaccctaccttaattttaactgtcttgttatgccagctgctacattttctccgcccgtcttacctcgaaaggagatgaatagagctgagaygcattagtaaaacaattagaaatcacttactctctggaatttgaggtttaataatgtcccagtggttaaagatagtatagggggctttgtgaatggccat

SEQ ID NO: 133155 - DNA, 201 bp, Homo sapiens
cccagtaatgggattgctggatcaaatggtagttgtgtttttacttcttttagtctccacactttcttccgtagtggttttactagtttgcattcccaccmgcagtgtaaaattgttcccttttcaccatatccacaccaacatctgttatttttttatttcttaattatggccatacttgcagaagtaagatggtatctc

SEQ ID NO: 133156 - DNA, 201 bp, Homo sapiens
caaagcatggaattagtcgtcactggtagagttgagagtacacattttaacatgtgctttaaatattatggtgagctgatggggattgtcatgctccctgmccagcacctttgcatgtcactttatgttctaattcagtcctcctggcaatcttgtaatcttgtatgaaagctggataagtttagacccctgctgatctaa

SEQ ID NO: 133157 - DNA, 201 bp, Homo sapiens
atctcctcattaacacttggtattgccagtctttttagtttgtatttttctgttgactaataatgttgagcatcttttcatggacttactagtaatttatrtatcttcttctgtgaaatgccctagtctcttgctcatttttcaagttgtattgtttgccttttaatgattgatttgtagaagttctttctctaatctaga

SEQ ID NO: 133158 - DNA, 201 bp, Homo sapiens
agcccattgtatgaaataggaattcttcagtggtaatacatgaacgaatggggagggacactttcttactgtagaatgcctactaatcaatgtggagggastgttggaattggaaaatcaccatttgcaaccatgatagtaaagactggttaggacaacaatcgttagtggatgccaaatctcaggggcaaagtttgatga

SEQ ID NO: 133159 - DNA, 201 bp, Homo sapiens
cagagatcttctgaaaatttttgaagttcacactttttctatgaaaatataatttaaaactcttaagacaaactaaacagtaagttaatttaattttttgscattcttagcctgctgggaaaacatggatcttaagaaaacatgtttttagagtgtaccctcaaagaattatatttagtaaaatatcttgtaccttctata

SEQ ID NO: 133160 - DNA, 201 bp, Homo sapiens
ctgacgggaagtgattctttgacagttaacaggccagagaaatacattgggaggataggaggcatatcatcaaaggtcgagttgtgagcataaatatgttwaaaaaaaaaatctcaagcttagaatccagaagaaaagtaatcaaggaatgtgaataattctgagaaaataaattttattgtaatgttaggtttggttttg

SEQ ID NO: 133161 - DNA, 201 bp, Homo sapiens
tatagtcctgctcctttatagttcttctccagcttccatttttccttttgtctcctctgaggatttttcttccactctccttttccaaaatattgttgttktcaaggttttatccaccttgtaattatctttctgtattcctttccttaatgagctcatttatcaagtagctacaactattaatcccctattccatttcgt

SEQ ID NO: 133162 - DNA, 201 bp, Homo sapiens
tattctgcttgactcatctaaatcttgtttctcttacagaatttccatctatgtccactctattggaataatgctgtttctgtatacttctacaatgcctsctttactattgaacagtaggtatgaaatggagtcctcaatgggattatctcattcatggatacatcttttgatagtagaaaaacaaaagtatacataggt

SEQ ID NO: 133163 - DNA, 201 bp, Homo sapiens
tgcttttattatcgtgaaataacatgattagaaatagttttcttcttgtattacattatattgttccagatacttttatatttactgaaaatgcaagaaaraatagagatctgatggtatttttctaaaaagtctctaagcaaattggcttcttaggggaaattaagctgactatataaagatagtattatttaataccat

SEQ ID NO: 133164 - DNA, 201 bp, Homo sapiens
ttagctatagtaaggaatcatatatagcagcagatttttgctttagtgtgggcagtggcctggtcataatgtttcctactaaaagacagttgtgcttcctmctcttagctctacagcttcttatgtgtttctaaggttggtcctctactctcctgtcatttcagtctaagatagacaatggtttctgttacttgcaaatta

SEQ ID NO: 133165 - DNA, 201 bp, Homo sapiens
acttgacaacaggcgcaaaattgaattggaagattcttttattattgtaaaatttcatgccagagtttgtccataaagattgaaggagatgcatttaactyattaagtcatatatagaagacctctcccatgtaaaactcagtaattttattcacatggatgaatttttgagtgggtaattaaatattttttaatatctct

SEQ ID NO: 133166 - DNA, 201 bp, Homo sapiens
cttaagtgctaaccagcctaacatcctaaatgtatttataaaaatatacaagttatttttaatattcttaaaaagcctatttgttgaatcagtagtgcctrttgtgtgatcgattgtcttagcttattttataaggatttttgggaagaagctgaagccttttgctatgtggagctcttgcttgagtgaacctggtctcca

SEQ ID NO: 133167 - DNA, 201 bp, Homo sapiens
tcttgactcactgcaatctccgtctcccagattcaagcgattctcctgcctcagcctcccaagtagctgggattacaggtgtgtggcgccacacccagctratttttgtgtatttagcagagatggggtttcgccatgttggccaggatggtctcaaactcctgacctcaaatgatctgctggcctcggcctcccaaagtg

SEQ ID NO: 133168 - DNA, 201 bp, Homo sapiens
agttgtgcagtaaaaaatttcaaggaacaattctgagctgtttcagccaaatatctatacctgcattagtcactgttctgcagatagagtgtgatgattarccagaagtggagcaaggtgctgtgattgggaactgcaccagaatcacaagatctcaatagaggagagcaattccccaaatcatacttgagagatcactgg

SEQ ID NO: 133169 - DNA, 201 bp, Homo sapiens
tatacctgcattagtcactgttctgcagatagagtgtgatgattaaccagaagtggagcaaggtgctgtgattgggaactgcaccagaatcacaagatctsaatagaggagagcaattccccaaatcatacttgagagatcactggaagattctaacaggcatttggcagataaaaataacatgcctactgtgcttttcta

SEQ ID NO: 133170 - DNA, 201 bp, Homo sapiens
aagaaataataaggaatacttagaagataagtttaagtttacttttctgaaatttactaattaaccatctcccaggtaaaatttgacttgataatttagtsagagtgtctcatgaaataattttagagagtgattagtacaaaacttatttgaaagaaaaaaaaaaatgcctaaataaaaaaatgcactcagcatttattt

SEQ ID NO: 133171 - DNA, 201 bp, Homo sapiens
aatttgattctgttctaacactgtctgcttggaattaacgtcagatccagtgagttaaaggctcagtcccagaagactacaccccactttagaggctactygctagtagtaggttgtcatctatacttcttatctgctggctgtcaattgggggttcccatgacctcttcatcaagtttaattatttgctagtggtgccca

SEQ ID NO: 133172 - DNA, 201 bp, Homo sapiens
gttttctttaaaaacttattttatttgggtcaatgtgaaatgaattttcagtttatttacattggattaatcaaaataataactcatttgttagcctctaracctaacagcccaatttaattatattctgtttcgcattgctatcatacctccaattatacaaacattgaaagttgcattttcctaaagccattcaataaa

SEQ ID NO: 133173 - DNA, 201 bp, Homo sapiens
gccaggatggtcttgatctcctgacctcgtgatccgcctgcctcggcgtcccaaagtgctgggattacaggtgtgagccaccgcgcccggccagtaatgayatactttcttaggagactaaaattgaaagcagaatcaaattattactattatggtacaggtttaatcctgttttccttgggagggaggatgttttaaata

SEQ ID NO: 133174 - DNA, 201 bp, Homo sapiens
tatagtctctgtgtcattagttcaaaaataaactaaaccagccaggcgtggtggctcacgcctgtaatcccagcactttgggagggcggatcacaaggtcwggagatggaggccatcctggctagcacagtgaaaccccgtctctactaaaaatacacacacacaaaattagcctggcgtggtggcgggcgcctgttgtcc

SEQ ID NO: 133175 - DNA, 201 bp, Homo sapiens
tttgtgcattagtctaaactgtgtacaagtatttatgtgttttccttaaaggcaattaataaagtgacaatctcttttttggtttttttttttttttttttgagatggagttttgctctgttgcccaggctagagttcagtggaacgatctcagctcactgcaacctccgtctcccgggttcaagcgattcttctgcctca

SEQ ID NO: 133176 - DNA, 201 bp, Homo sapiens
cattatatcttcaagaaaaaatgagtagggtgggtttcctagggatttctactaaagcctaggagctcaggataaccccggggctcattaaaaaaaaaaaatcactttgatttcaagtaattgaggaaagttttaggtgttttgtttttgtgtgcccgttgtttttcttttaaggcttcatcagatgtctaagtttgcttt

SEQ ID NO: 133177 - DNA, 201 bp, Homo sapiens
cctactttttttctagatccaaggagataattttgaatgacagtttatatactttgtttctgaaagaaaagagaataggagaaattattctaagtttattwtgctttaaatatttatgtcattcttttcagacaaaaatgattaggaaaaagttgaaatgatattttaaaacataatttaaccaaagagtggaagtaaaga

SEQ ID NO: 133178 - DNA, 201 bp, Homo sapiens
gccggagactggcgtaaacccgggaggcggagcttgcagtgagccgagaccgcgccactgcactccagcctggacgacagagcgagactccgtctcggggaaaaaaaaaaaaaaaaagtaatgaactgctcaaagaaataatggagacacatgaaaagaacataggaaccatcctgaaggggctcccaatgaacatatccg

SEQ ID NO: 133179 - DNA, 201 bp, Homo sapiens
aaaattattttaaatgtgtgaaaagccataagatccaaaaggagactggtatcttatttataatggaaaaaaaataggatgaggatgaatacaaagctctrcaggagaactgagtgtatatctatttttcaaattggtgcccaaatgacagggcaaaagaacctaaaagagtgaatgattccaagaactttctatacctta

SEQ ID NO: 133180 - DNA, 201 bp, Homo sapiens
ttaaatgtgtgaaaagccataagatccaaaaggagactggtatcttatttataatggaaaaaaaataggatgaggatgaatacaaagctctgcaggagaastgagtgtatatctatttttcaaattggtgcccaaatgacagggcaaaagaacctaaaagagtgaatgattccaagaactttctataccttaattaaaaag

SEQ ID NO: 133181 - DNA, 201 bp, Homo sapiens
ctaacctacttctgttattaaattaactttcttcctgtgaaccttgacttgaaaagtatttagacttttatcatcatactctgccaataggtttgctattgtccagtagtgtgatataattgaatctgaatattttctatgttattcagagcaaataacagtactaccttgtaaattcttgaagcttaagaattcaggaaa

SEQ ID NO: 133182 - DNA, 201 bp, Homo sapiens
gatagactggattaagaaaatgtggcacatatacaccatggaatactatgcagccataaaaaaggatgagttcatgtcctttgtagggacatggatgaagstggaaaccatcattctcagcaaactatcgcaaggacaaaaaaccaaacaccgtatgttctgactcataggtgggtattgaacaatgagaacacatggaca

SEQ ID NO: 133183 - DNA, 201 bp, Homo sapiens
tcaagagcttctgcacagcaaaagaaactaccatcagagtgaacgggctacctacagaatgggagaaaattttttgcaacctactcatctgacaaagggcyaatatccagaatttacaaagaactcaaacaaatgtacaagaaaaaaacaaacaaccccatcacaaagtgggcaaaggatatgaacagacacttctcaaaa

SEQ ID NO: 133184 - DNA, 201 bp, Homo sapiens
ccaaaagactaatcgggacggttcaagaacagtgggaattgtgcttttacttactcaacgaaggataattgtagaaaagcatcgtgggctgctataaatcttttccactatgtgtgaactctttagctaaaaagtgcctatacagggaatatatcaaggggtctttctggcaattttgatagtctcatatcttgattatac

SEQ ID NO: 133185 - DNA, 201 bp, Homo sapiens
gcacacacttcagttatttttttcttatattttcccaaaagtatcactaaatctcttactgtgttagatttcattgactttagtgaagtctgattaatatyctttctcatttaagcccttctgggtttttttttttttttttgagtctcattcatttactagttctctttgaatcacgtcatttattttttcatttaacaa

SEQ ID NO: 133186 - DNA, 201 bp, Homo sapiens
ggactgtaaactagttcaaccattgtggaagtcagtgtggcgattcctcagggatctagaactagaaataccatttgacgcagccatcccattactgggtrtatacccaaaggattataaatcatgctgctataaagacacatgcacatgtatgtttattgcggcactattcacaatagcaaagacttggaaccaacccaa

SEQ ID NO: 133187 - DNA, 201 bp, Homo sapiens
cttctttttttattaactttttttctcctttcatcttctatttttcttaaggcaggagttggaaactttctgtaaatggccagatagtaaatattttaggstttgtagccatatggtccctctcatagctactcagttttgcttttatactgtgaaagtatccatagactatatgtaaatgaatgagtgtgattgtgttcc

SEQ ID NO: 133188 - DNA, 201 bp, Homo sapiens
tttcagatcttttatttcagaaaagtttctcaaattatactttttattattcgttcttttctttttatgtatattgaaactttgcctcttctaaatttgtyacttgctccatttctttaatacgatatatgtaaaatttaccattttaaccattttaagtgtacagttttgtggcattaagttcattcgccatgttatgca

SEQ ID NO: 133189 - DNA, 201 bp, Homo sapiens
tcagtttcttaattataaaacggacgttggctctactgcataaaatttttatgggaagttaaatgaaagaatatagagaaagcaagtagagtctcagtaartacttgtttctttccacttgctttcttcttgtatgcaacagtaaggttgccacacaagactatttttgtattctgacacaaagcggacactcaatcaaag

SEQ ID NO: 133190 - DNA, 201 bp, Homo sapiens
ctggttaacggggagctcaaacattggtagaatgattaagacattatggaagacattgaagctaatgcattaaaatgatacagtattccttttgcggtgayacagttataaagtgctgatttaaggtgacagtgttttttcctggcccttttagttttaacgctttagtatttagtatacccttctgtaagaaaccacaaa

SEQ ID NO: 133191 - DNA, 201 bp, Homo sapiens
tgtgcgagcatttggtgagaagtatctggcacaaagttctccctcaaaaagtgtgaatttcttaagctctggaccccacacttgtctttttttttttttttgcaagtagttgatgattttctctcaaagacacctaataatatgtttataaaataaagagaactgtaaaataaaaacaaaggaccataatctcactgcctg

SEQ ID NO: 133192 - DNA, 201 bp, Homo sapiens
gagcttaattgacagtattcgaagtagaaataacattcagttttctagattgtagggtttatacacatttatttacagttaagtaggtgaacctcaaattsttcaggcacctattaagaaactgagtctatatagaatattggtcacgattaacagcctttgaggcttccacattcggcaaggctttaatattgtgcctac

SEQ ID NO: 133193 - DNA, 201 bp, Homo sapiens
tttcatagatcttgctttttggtgttgtataaaaactcatagccaaactgaagatcaactagattttccctttaaacagcagaaataaatacttttaaatwtataaaatgtattagtatatgttatatagtctaatatattcacatataaaacttatattttatattcatatataaaacattatgtatagtgtgtgtgtat

SEQ ID NO: 133194 - DNA, 201 bp, Homo sapiens
agtgcttaattgtgtttttaaaaaaaaccctcgagtttatgaggagatcaaggtcagtgtgagctggactagtaagagaaggcatcttggaagccagaccttttttttttttttgagacaggatcttgctgtcttccccaggctggagtgcgatgacatgatcatagctcactgcagcctcaacctcccgagctcaaaagc

SEQ ID NO: 133195 - DNA, 201 bp, Homo sapiens
tgctggagtgcagtggcacaatctcggctcactgcaacctccacctcccatgttcaagtgattcttctgcctcagcctcctgagtagctgggattacaggygtgtgccaccacacctggctaatttttctatattttgtagagacggggtttcaccacgttgcccaggctggtctcgaactcctgagttcaagcaattctc

SEQ ID NO: 133196 - DNA, 201 bp, Homo sapiens
ctggagtgcagtggcacaatctcggctcactgcaacctccacctcccatgttcaagtgattcttctgcctcagcctcctgagtagctgggattacaggtgygtgccaccacacctggctaatttttctatattttgtagagacggggtttcaccacgttgcccaggctggtctcgaactcctgagttcaagcaattctcct

SEQ ID NO: 133197 - DNA, 201 bp, Homo sapiens
tggctcatatttataacagtagttaacacatccatatgtatgcatataatttatgtatttgagggcactactgcaaaaagttataggagctgtggaatgcktgcgcatattataaagtttaaaaatacaagtttattatggagagtaagcctcttatcccctgcctagaatctgcaatattccagtttcttgtattttaag

SEQ ID NO: 133198 - DNA, 201 bp, Homo sapiens
ttttttttgagacagagtcttgctctgtcgcccaggctggagtgcagtggcgcaatcttggctcactgcaagctccgcctcccgggttcatgtcattctcctgcctcagcctcccaagtaactgggactacaggcgcccgccaccatgcccagctaattttttgtatttttagtagagacggggtttcaccgtgttagcca

SEQ ID NO: 133199 - DNA, 201 bp, Homo sapiens
ctggaggtgggctaattagaagcaaggcatcttatgtgattggtgttgggttagtatacttggctttcttcgttggtcctgaatctctcaggttgagattrcgattgataaaattgtgaggtctaaggatgtgtgtgtgtgtgtgtgtgtgtgtgtgtgtgtgtgtatgatttctaataaatattgcaaaattgccctcca

SEQ ID NO: 133200 - DNA, 201 bp, Homo sapiens
aaaaggtttaaaacagacaaacaaatgataagtacttgccagaccaaacttaaaccatcatgcaaaggagtaatcctgaaattacttgggataaatgccakcctttattggatgctcttttaatttttacatattatgacttattttcaaaatgacagcagacagaaataactaaaagaattcaaagcctggaatagtgca

SEQ ID NO: 133201 - DNA, 201 bp, Homo sapiens
ttcaaacccagaaagtaagaagcctattttaattatctgtgctctttactcacaatgcctcagtatacatttcagatttattgggttccacaaatagaaayctatggaaattttgaatcaaattgcattaagctatagacaaggttgagacaaattgacatctccagaatattgagttttccaaaatatgtaagtggagta

SEQ ID NO: 133202 - DNA, 201 bp, Homo sapiens
aaatccttgtggattataattataactgatttaataatcagttcttgtgtctcatagaattaaaaagtctagattattattaaaaatgtaatagcctttcrtcatagaatttctatttagttttgtttttgaaaaatatatctgtgatgttagagagattgattgttttatgtagattttagtcctgggacaattttcgca

SEQ ID NO: 133203 - DNA, 201 bp, Homo sapiens
ttgcagggtcacaaaacttgtcactcctctgcatcttttctcagaggctgccagaataaggacatctaccaaaacaagtgcctaaaccaataattatcaartggggtgatttttcactcaggggacatttgttaatatatgaaaacagttttagttgtcataactggggggtggggtagtccagtggatagaggccaggga

SEQ ID NO: 133204 - DNA, 201 bp, Homo sapiens
tcctgacctcaggtgatccacccacctcggcctcccaaagtactgggattacaggcataagccaccgtgcctggcccaaagatagttggttttttttttttgagacagagtcccactctgttgcccaggctggagtgcagtggcgtgatctcagctaactgcaacctccaccttcctggttcaagtgattcttctgcctca

SEQ ID NO: 133205 - DNA, 201 bp, Homo sapiens
acaaaaaaccaaacaccgcatgttctcactcatagatgggaattgaacaatgagaacacatggacacaggaaggggaacatcacactctggggactgttgyggggtggggggaggggggagggatagcattaggagatatacctaatgctaaaggacgagttaatgggtacagcacaccagcatggcacatgtatacatat

SEQ ID NO: 133206 - DNA, 201 bp, Homo sapiens
aaaacaaaacagattcacgttggggtgtgtgtgtgtgtatgtgtgtgtgtacgtgtgtgtgtgttttaaataaacacttattggattgctgcaagcctttsttttattttcagaactctaaaatagttgatttcaacaatttttgtcagtattcttgttgcttttatggagaagtagatattcagagtttgatatcatttg

SEQ ID NO: 133207 - DNA, 201 bp, Homo sapiens
accgcatgttctcactcatagatgggaattgaacaatgagaacacatggacacaggaaggggaacatcacactctggggactgttgtggggtggggggagsggggagggatagcattaggagatatacctaatgctaaaggacgagttaatgggtacagcacaccagcatggcacatgtatacatatgtaactaaccggca

SEQ ID NO: 133208 - DNA, 201 bp, Homo sapiens
atgtgttatcctctcagaactctagtaagtgactgtgctttgcgcagtgaatctcctatgaatagcaagcagaaagtcactgccttatgggagtagtaggrccagctgtcagcctcaggaagtagaatataattaaggaaggaaaatcttaaaagttctccgaggctatgcttatattcaataggatgtatgcttatcagc

SEQ ID NO: 133209 - DNA, 201 bp, Homo sapiens
tgctaaaggacgagttaatgggtacagcacaccagcatggcacatgtatacatatgtaactaaccggcacattgtgcacatgtaccctaaaacttaaaatwaaaaaaaaaaaaaagattaccaatgctaaaaaaaaaaagttgggatgaaccccacttgagttattttctcttttagaacatcatacctaattatatatgg

SEQ ID NO: 133210 - DNA, 201 bp, Homo sapiens
ctagcctgggtgacagagggagaccctgtctcaaataaataaataaataaataaataaataaatctttggagacatgttatataattatattattgtgtgyacctcgattaaacttgtttccaccttagaccaaattagactgaaaaggaactattttattttaattgctgtagaatagttattgtcttctagccactgat

SEQ ID NO: 133211 - DNA, 201 bp, Homo sapiens
aattacttatatattggttagagtataaatctttttttttttttttttttttttgaggtggagtcttgctgtgttgcccaggctggagtgcagtggtgcamtctcggctcactgcaacctctgcctcctgggttcaagcaattctcctgcctcagcctcctgagtagctgggattacaggcacatgccacaatgcccggct

SEQ ID NO: 133212 - DNA, 201 bp, Homo sapiens
atgaatacagtaagatgactttcaaattatcagaaatctttatctttcagtaaacttgtctacattctaaatatgcatccatataaaatttgttaaggatrtacccatataaatattatgtacatttgtacatattattacataatgattgtaatgtgatttttcagcataaatataacatttactgcttttttccccatc

SEQ ID NO: 133213 - DNA, 201 bp, Homo sapiens
ccctttttttatttatagaatttggcttaccgtggtgggcagggggtggttgtggtggtgtactagaaaatcacattatgtaaaggaaccttctaggataytcgagttttatggctttcctcctcttcactctctttgacttttccttctcttgttgagttcaaaacattctaatgccccagggcttccggcctgtcccta

SEQ ID NO: 133214 - DNA, 201 bp, Homo sapiens
cacccaccaccacgcccagctaatttttttgtatttttagtagagacggggtttcaccatgttagccaggatggtcttgatctcctgacctcgtgatccgyccaccttggcctcccaaagtgctgggattacaggtgtgagccaccgttcccggccatactgagttttctaaaggctgcttacagtatactttggaaagaa

SEQ ID NO: 133215 - DNA, 201 bp, Homo sapiens
gcaatctcggctcactgcaacctctgcctcctgggttcaagcaattctcctgcctcagcctcctgagtagctgggattacaggcacatgccacaatgcccrgctaatatttttgtatttttagtagagacggggtttcaccatgttggccaggctggtgttgaactcctgacctcaagtgatctgcccgtcttggcctccc

SEQ ID NO: 133216 - DNA, 201 bp, Homo sapiens
tcccaggttcaatcgattctcctgcctcagccccccaagtagctaggattgcaggcatgtgccaccatgcccggatactttttttttgtctcaaaaaaaaaggggaatactgaatatgacaaaattgaaaatcattcttctggagaatatttagcttaatactatatatctccttagagtgtttacaaagtttgacagcca

SEQ ID NO: 133217 - DNA, 201 bp, Homo sapiens
ttgagggtcaaatagtagtctctgccacatatactattcccatttgtttctatgcagatactacaaataggttactttgttgacttgggttgctatatttrtatctatatctacatctatatatctatatctatatctacatttatatatctatatctatatctacatatctatatctatatctacatatatatatataaa

SEQ ID NO: 133218 - DNA, 201 bp, Homo sapiens
gcacccaccaccacgcccagctaatttttttgtatttttagtagagacggggtttcaccatgttagccaggatggtcttgatctcctgacctcgtgatccrcccaccttggcctcccaaagtgctgggattacaggtgtgagccaccgttcccggccatactgagttttctaaaggctgcttacagtatactttggaaaga

SEQ ID NO: 133219 - DNA, 201 bp, Homo sapiens
aaactgaagaaacttttttggatttgacagttaggaattcattgatgatcccagcaggggccattttaggagactgtttatggctgaaaatcaggttgcartggagtgaagagtaaagaggaggtgataaaatctaaatatttcagctatttcatttattaaacccatatgtaatatagctgcagtcatcacttccttaag

SEQ ID NO: 133220 - DNA, 201 bp, Homo sapiens
ataggctcttttggctcaaatgaaatgctttttgaagtacttttacaaatatagcctcctatatttgcaaatataagtttttttttttttttttttttttkttttttttttttttttttgcctttctaatctcttggagagtctttcttgaagaagatcagtttgggatagagattttagtctttgaatatatataagcca

SEQ ID NO: 133221 - DNA, 201 bp, Homo sapiens
tttttaaaaagtctgttctcggtctggttatcggttctttgtaagtaatgtcttttttacaccttagtgcatcaaaaagtttctctttgcctttgtctgcrgtacaatctgtgcgtgtgtatttcttttatttcttttttttatcaccattttcattgtgccttttcaaagaagtcacatcttttagtttctgaaaacttt

SEQ ID NO: 133222 - DNA, 201 bp, Homo sapiens
cagccttgaactatgctcaggtgacccatctgcctcagcctcccaagtggctaggattacatgtgtgcaccaacacacccagctaatttttttctttatctttttttttttttttttttttgagatggagtcttgctctgtcaccagtctggagtgcagtggcccaatctctgctcactgcaacctctgcctcccgggttc

SEQ ID NO: 133223 - DNA, 201 bp, Homo sapiens
gaacccaggaaggggaggttgcagtgagcggagatggcaccattgcatactccagcctgggcaacaagagcgaagctccatctcaaaaaaaaaaaaaaaaatcttgcataatagtttagctgggtatggagtttttgtttactattattgggatacagtataattgtcatatcacaattcactggtttagagtgtacattt

SEQ ID NO: 133224 - DNA, 201 bp, Homo sapiens
gctatagaagtttgaaatccaaattgactgctttcctcagaagccttgaggatattattcatttgtcttctagtctcggtttttaaaaagtctgttctcgrtctggttatcggttctttgtaagtaatgtcttttttacaccttagtgcatcaaaaagtttctctttgcctttgtctgcagtacaatctgtgcgtgtgtat

SEQ ID NO: 133225 - DNA, 201 bp, Homo sapiens
gcactccagcatgggtgacagagtgagactccgtctcaaaaataataataataatagagttgtagctgggtgcagtggctcaagcctgtaatgccagcactttcagagcctgaggtgggaggattgcttgagccctggagtttgagaccagcctggaccacatagtagaccccatccctacaaaaaaaaaaaagtcgggtg

SEQ ID NO: 133226 - DNA, 201 bp, Homo sapiens
atgaacccgggaggcagagcttgcagtgagccaagatcgcgccactgcactccagcctgggtgacagagcgagactccgtctcaaaaaaaaaaaaaaaaaaggcaaaatgaagttctatactgttcagtttttaagtacccattataatgcatacttcaccatgaacacatcaacagttggggctgatttgttgtctttga

SEQ ID NO: 133227 - DNA, 201 bp, Homo sapiens
gtgaattttaaaatttcagttattgcccttttcaactctggaatttctgtttgattcatttaaataatatctatctattgatagtcttcctttgttgatayatcattctcacagttgttttgttttgttttgttttgagatagggtcttgtgctgtcgcccaggctggagtgcagtggcgcggtctcggctcactgacacc

SEQ ID NO: 133228 - DNA, 201 bp, Homo sapiens
ggccttctaaatgttttataggtttacatattacatgagaggttgttttttgcacttcttttaactgagattttgactgttgtcaataagtaatatatttyccccctttaatttcttggatgggacatggggttccgtcagaagttttatagttagaaaaagaaatggtaaaatgaaattttggaacttgctgagcagtgg

SEQ ID NO: 133229 - DNA, 201 bp, Homo sapiens
gtgaaatcccgtatctactaaatacaaaaaatagctggttgcggtggcgggcgactgtggtcccagctacacaggaggctgaggcaggagaatggcatgawcccgggaggcagagcttgcagtgagccaagatcgcgccactgcactccagcctgggtgacagagcgagactccgtctcaaaaaaaaaaaaaaaaaaggca

SEQ ID NO: 133230 - DNA, 201 bp, Homo sapiens
actattattgggatacagtataattgtcatatcacaattcactggtttagagtgtacatttcagtggttatatgcattttctgagttgtgcaaccatcacyacaattaattttacaacatttttatcaacccttcaaaaaccctgcactccttagctgttacccccaaccccctccctgaaaccactccaattctaggcaa

SEQ ID NO: 133231 - DNA, 201 bp, Homo sapiens
gggtttctccatgttggtcaggctggtcttgaactcccgacttcaggtgatccgcccgccttggcctcccaaagtattgggattacaggcatgagtcaccrcgcccagccagatttaacaaattccaaaattaatccataacttagccctcttcttgatcattataggtactttaggataaattctaccacttatatttta

SEQ ID NO: 133232 - DNA, 201 bp, Homo sapiens
tctcctttttcttctcttccccctttccttgactcttgggggaagaaagacttttctgctgttcaccagatatttttccctcagcaggcttgccttttctrttgcattagtttttaaagtaaattgatgagcaccgttgatttgtaaaaaccagcatatacatgaacttgtttttctaaactttctttctaatgtttttca

SEQ ID NO: 133233 - DNA, 201 bp, Homo sapiens
gatggagtctcgctgtgtcacccaggctggagtgcagtggcacgatctcagctcactgcaagctccgcctcccgggttcatgccattctcctgcctcagcyttccgagtagctgggactacaggcacccaccaccacgcccagctaatttttttgtatttttagtagagacggggtttcaccatgttagccaggatggtct

SEQ ID NO: 133234 - DNA, 201 bp, Homo sapiens
tttttacttttgtgtttattctgttctcattttttaaaatgaactcttggctgggtgcagtggcttacgcctgtaatcccagcactttgggaagccaaggkggatcactttcgctcaggagtttgagaccagcctgggcaacatggtgaaaccctgtctctacaataataataataataataataataataataattagcc

SEQ ID NO: 133235 - DNA, 201 bp, Homo sapiens
gatttaacaagttttttttgtttgaaacgggagtttccctcttgttgcccaggccagagtgcaatggcacgatctcagctcactgcaacctccgcctcccrggttcaagtgattctcctgcctcagcctcccgagtagctgggattataggaatgtgccaccatgcctggctaattttgtagttttagtaagacggggttt

SEQ ID NO: 133236 - DNA, 201 bp, Homo sapiens
aatgtcaaattcattctgctgagaggctggaactttcctagatagacaagccacagagactttctgaaaatcaaggtagagagcctaagcattttagagcttcatgttgtgtttgagaatggaggcccagagaaggaggccatcagctccagtgacttccctagtgccttcatggtaaaactcagcatagaattttccctc

SEQ ID NO: 133237 - DNA, 201 bp, Homo sapiens
accctgtaatccttaagcatgcagtttattcagatgtcaaatatctatgttgaatttgaatcaatgtggtgtgtgtgtgtgtacatatgtatgtgtatatrtttttatttatatgtatataagaataatttttttcctttagttggtggtatggattggataatgtacatatatataatttgtgaagtgataaaagtgtat

SEQ ID NO: 133238 - DNA, 201 bp, Homo sapiens
acttgatctctactaataatacaaaaaattagctgggcatggtggcgggcacctgtaatcccagctacttgagaggctgaggcagaagaatctcttgaacmtggagggtggaggttgcagtaagctgagatcgcggcattgcattccagcctgggcaacaagagcgaaactccatctcaaaacaaaacaaaacaaaaaaca

SEQ ID NO: 133239 - DNA, 201 bp, Homo sapiens
ttgtagcatatagtagaatttcattccttttaaaggctgaataggctgggcctggtggctcacgcctgtaatcctagcactttgggaggccaggacgggcrgatcacgaggtcaggagttcgagaccagcctggccaacatggtgaaaccccgtctctactaaaaatatgaaaattagctgggtgtggtggcccgcatctg

SEQ ID NO: 133240 - DNA, 201 bp, Homo sapiens
ggaaaagagaggaaaatgtttaggtgcattctcaggtttttagtttgccaccatcaataggggtagatagtgagcggaagaggtttgtggtgtcgtgacaraaaaaaggaaacataaaatcaagcctcagactgggaatcgtattcacaatgaacagaacaaggggtaaatatttaaagagcccatagaagtgaacataag

SEQ ID NO: 133241 - DNA, 201 bp, Homo sapiens
acgaggtcaggagttcgagaccagcctggccaacatggtgaaaccccgtctctactaaaaatatgaaaattagctgggtgtggtggcccgcatctgcagtyccacctactcgggaggctgagtcaggataatcacccctgagtccaggaggtggagcttgtgccgagatcacaccactaaactccagcctggcgacagaga

SEQ ID NO: 133242 - DNA, 201 bp, Homo sapiens
cccaaaatgtgtaaaggaaatgcctctgaagtaatcataccagccaataggcagtggtgacttgttagttatgtgactacaaacaaggcacagaaaactgrttgagcttcaggtttttcatatccttgagaattatagcatctgtatgtcagggttattaaaaggaattgagataacataagcaaatgtgcttatcagaat

SEQ ID NO: 133243 - DNA, 201 bp, Homo sapiens
tatttgcaccagcaatacacaagatttccagtttctccacagccttgcctgggtttggttttataaaaaaaaaactctgtggtgttgttttttgttttttkttttttttttttttttgagacgaagtctctctcttttcccccagtctggagtgcaatggcacgatctgggctcactgcaacctccgcctcccgggttcaa

SEQ ID NO: 133244 - DNA, 201 bp, Homo sapiens
tcctcaggctgaggcaggagaatcaggcagggaggttgcagtgagccgagatggtggtagtacagtccagcctccgctcggcatcagagggagaccgtgcmaagtgggagacggagacggagacgagagggagagggggagggggagggagagggagagcctttttttgttttttgatacagagtctctctctgttgccca

SEQ ID NO: 133245 - DNA, 201 bp, Homo sapiens
caggagtttgagaccagcctgcgcaacatagtgagatcttgtctctacaaaaaatgaaaaaattagctgggtgccatgcacctgtaatcccagctacttgrgaggctgagataggaggatcatttgagctccagaggttgacgatgcagtgaactatgattacactactgcattccagcctgggtggcagagtgggaccct

SEQ ID NO: 133246 - DNA, 201 bp, Homo sapiens
acacctgtaatcctagcactttgggaggccgaagcaggaggattgcttgagctagggtttcaagacagcctgggcaacaaagcaagacactgtctctattaaaaaaaaaaaaaaaatttggccaggtgcagcgatttcatgcttgtaatcccagccctttgggaggctaaggcagatggatcacttgagttcaggagttcg

SEQ ID NO: 133247 - DNA, 201 bp, Homo sapiens
cacctgtaatcctagcactttgggaggccgaagcaggaggattgcttgagctagggtttcaagacagcctgggcaacaaagcaagacactgtctctattaaaaaaaaaaaaaaaatttggccaggtgcagcgatttcatgcttgtaatcccagccctttgggaggctaaggcagatggatcacttgagttcaggagttcga

SEQ ID NO: 133248 - DNA, 201 bp, Homo sapiens
aggcctgatgacaaccttatagagtggcggcaatagccccattttacaagtgaggatattaaggcaacagagagtagacatatcaggattttaaccctggsagtttggctcatattctttttttttaatccaccatgccttaatatctccaaaaaatatgataaatagagagaagatccagaaacaatagagactcagtcc

SEQ ID NO: 133249 - DNA, 201 bp, Homo sapiens
attgcagaattttgagtagtttaagtttcatatttatcttctttctttctttcctttttttttttttttttttttttttttggagacagtttctcactctyttacccaggctggagtgctgcagtggcttaatcttggctcactgcaacctccacctccaaggttaaagcgattcttatgcctcagcctcccaagtagctg

SEQ ID NO: 133250 - DNA, 201 bp, Homo sapiens
atattgagatatcatacaagagtgatgacaagaagtagatattaaggttgaatagcaagaacctcagagttacttctacataggtttttctctaatactakgaagttggccaaatggactggtttaggttagtgatgtctcaaattctactatacaatgaattgcagaattttgagtagtttaagtttcatatttatcttc

SEQ ID NO: 133251 - DNA, 201 bp, Homo sapiens
aggtaagtcttttatattttactttgagcccaccaggtgctttagtaactataaacaagcataatatatttaatagaaaaatagctgctttagtttttttytgaaccgtttataacatttatatggttttggtgccttctcctgtttcttgataccagcactcttgatttttatgatttgagatttgacaaagtaattcag

SEQ ID NO: 133252 - DNA, 201 bp, Homo sapiens
agcttgtaagagttcttttccagtgaagtcaccccaaacacttttatttctatcaggagtgagttgtgataatacaagtctgcaagggaagcttgttagaracttcgtggccacggtttttacgggcagctatcacataagcaccctctgcctagcatgtaccagatttctatactcccagcagtaaagtggatatacaac

SEQ ID NO: 133253 - DNA, 201 bp, Homo sapiens
atctcttacaaaaaaaaaaaaaaaggttaaaatttaaaaattactaggcattccactgtatttgctaagtaactatgtaatttattcacgtaggtgaattytaatgtgtcaaattacatatataagttaacaatttatgctgagtgcagtggctcatgcctgtaatcccagaactttggggccaaggtgggtggatcacct

SEQ ID NO: 133254 - DNA, 201 bp, Homo sapiens
cctggcgacagagagagactccgtctccaaaaaaaaaaaaaggctgaataatattccattgtatgtacacaccacatttccacattttttttgtctatgtrtctgttgatggtgacactggtgctgtttctaccttctggctgttgtgaccagtgctgctgtgagcactggtgtacaaatctgagtaaatccctgctttca

SEQ ID NO: 133255 - DNA, 201 bp, Homo sapiens
tgttcctgtagtcctagctactcaggaggctgagttgggaggattgcttgtacccaggagttcaaggctgcagtgagctacgatagtgccactgcactccwggctggacaacagaatgagaccctatctcttacaaaaaaaaaaaaaaaggttaaaatttaaaaattactaggcattccactgtatttgctaagtaactat

SEQ ID NO: 133256 - DNA, 201 bp, Homo sapiens
aagcaagcaagaaggaaaaaattaaccatgtaattaatgtaatacacatacagtgtaatacaaacagtattacagcatacaattagtacccctgaacccakgtgttatcctctcggacctctagtaagtgactgtgctttgcgcagtgaatctcctgtgaatagcaagcagaaagtcactgccttatgggagtagtagggc

SEQ ID NO: 133257 - DNA, 201 bp, Homo sapiens
aaaattagctgggcatggtggcgtgttcctgtagtcctagctactcaggaggctgagttgggaggattgcttgtacccaggagttcaaggctgcagtgagstacgatagtgccactgcactcctggctggacaacagaatgagaccctatctcttacaaaaaaaaaaaaaaaggttaaaatttaaaaattactaggcattc

SEQ ID NO: 133258 - DNA, 201 bp, Homo sapiens
gcacacaccaccacacctggttcactttttgtattttttgtaaagatggggtttcaccatgttgaccagggtggtattgaactcctgagctcaagtgattyacccaccccggcctttcaaagtgctgggattacaagcatgagccaccgtgcccaggcaaggatattttcagtaatatattcatacatcttgtttcagtga

SEQ ID NO: 133259 - DNA, 201 bp, Homo sapiens
tttccatgaaccttcagtaatggaaaacaagatctaagcatttttttagttgacacatttgcctgtttcttttggatagtgtctagtgctgagtacatatytaagaaatgcatcatattatttcattagaatcacaatggaaagaatttcttgctgtactcttaaaagctgtcttatagagaggtttggtgagttttggca

SEQ ID NO: 133260 - DNA, 201 bp, Homo sapiens
tttggaatgtcaaattcattctgctgagaggctggaactttcctagatagacaagccacagagactttctgaaaatcaaggtagagagcctaagcattttrgagcttcatgttgtgtttgagaatggaggcccagagaaggaggccatcagctccagtgacttccctagtgccttcatggtaaaactcagcatagaatttt

SEQ ID NO: 133261 - DNA, 201 bp, Homo sapiens
ttttttttttttttttttgagacagggtctcactgtcacccagcctggagtgcaatggcacgatcttggctcactgaaacctccacctcccaggcccaagkgatcatcctacctcagcccccagagtagctggaactacaggcacacaccaccacacctggttcactttttgtattttttgtaaagatggggtttcaccat

SEQ ID NO: 133262 - DNA, 201 bp, Homo sapiens
ttcttttgtacatttcttttagctaaagagttggccatgggaaactccgctttattcacatacacctttatattaatgtattagagtgtgtgaatattttmctatatccatcatttattcatggaacatttttgagaggatatgtattgtgtgctgtatgaggcactgggggtgcaaagttgaagaagattcatggctcat

SEQ ID NO: 133263 - DNA, 201 bp, Homo sapiens
gtttcatatttatcttctttctttctttcctttttttttttttttttttttttttttggagacagtttctcactctcttacccaggctggagtgctgcagkggcttaatcttggctcactgcaacctccacctccaaggttaaagcgattcttatgcctcagcctcccaagtagctgggattacaggcaagtgccaccatg

SEQ ID NO: 133264 - DNA, 201 bp, Homo sapiens
atggattttatggtctatgctcataaggaaaattgaggaatattggtgtgttcttgacttgtaatgtctttctttgattttggtattagaataacgttggycatataatgaggtgagaagccttctctattttctgaacaagtttacgttcagaaaataccagttggactggtattatttattgcttaaatatttaattga

SEQ ID NO: 133265 - DNA, 201 bp, Homo sapiens
atggactggtttaggttagtgatgtctcaaattctactatacaatgaattgcagaattttgagtagtttaagtttcatatttatcttctttctttctttcctttttttttttttttttttttttttttggagacagtttctcactctcttacccaggctggagtgctgcagtggcttaatcttggctcactgcaacctcca

SEQ ID NO: 133266 - DNA, 201 bp, Homo sapiens
acactgcatattttctgggagcctcagcttgatgttaaagacaataaaaggatgatatatgtatgaacaaattattctaactcctgtttttttttttttttgattgatgaattgtgagaggaagactttaccctgtacatagctgttcttgttattactataaacttacaaaaggacaaggtgttgaaacacttaaagtat

SEQ ID NO: 133267 - DNA, 201 bp, Homo sapiens
cgtgtctggctaatttttgtatttttagtagatagggggtttctccatgttggccaggctggtcttgaactcctggcctcaactcatccacttgcctcagyttcccaaagtgctgggattacagacgtgagccatcacacccagcctaaagttgaattttaaacataatggttttgatttagttggccattgttgatacac

SEQ ID NO: 133268 - DNA, 201 bp, Homo sapiens
gtctttcccacctatatccctcagctaccttgtttctattcacaccattcctccaatgctccaccccacctaggaaactattgttcaatttctcatgtaamcttctagagtttctttatataaataaagacaataaaaatacagattcctggccaggcacagtggctcacgcctgtaatcccagcactttgggaggctgac

SEQ ID NO: 133269 - DNA, 201 bp, Homo sapiens
cacactgcatattttctgggagcctcagcttgatgttaaagacaataaaaggatgatatatgtatgaacaaattattctaactcctgtttttttttttttttgattgatgaattgtgagaggaagactttaccctgtacatagctgttcttgttattactataaacttacaaaaggacaaggtgttgaaacacttaaagta

SEQ ID NO: 133270 - DNA, 201 bp, Homo sapiens
catcaagctgcataggtccttcctagtttcctgtgagcaaggtctcagcctctgtggaaactgcatgcttgaattcatctccctacatagtcttagtggtytccttgcatagaagcagaatttaaaaatgaaaacatgttataaattaaatctcttgttcatggaatttcaagccacattgtttatatttgtgatagacat

SEQ ID NO: 133271 - DNA, 201 bp, Homo sapiens
tcacggcaacctcaactccttgggctcaggtgatcttccatctcagcctcctgagtagctgccacaggcacctgtcatcacacctggctaatttttttackttttgtagagacaaagtttcaccatgttgcccaggctggtcttaaactccttgactcaagcagtccgcccaccttggcctcccaaagtgctaggattaca

SEQ ID NO: 133272 - DNA, 201 bp, Homo sapiens
tgcattgaagtaagtgagggtggaggtagtaggagctgacatcatcattgtgaatgtggtagaggcttgagtcaagttgtagaccagagtcaggccttttyctctgtatgatggtggagctgcagatccaggagtgaggttgtggtgggaagtgaaaggtcaagctgtggctgagaggtgtaacttcaggctgaagaattg

SEQ ID NO: 133273 - DNA, 201 bp, Homo sapiens
acatctctgcctatttcccttgtgttcatggctaccatcctagtccaagctactattctttttcactggacttcttcattaactatctaaattgtaccccktgtttcccttcctacatctcccccaacattctatacacagaagataaagtgacattttaaaaatgtagactgtggccagatgcagtggctcacacctgaa

SEQ ID NO: 133274 - DNA, 201 bp, Homo sapiens
ggttcacggcaacctcaactccttgggctcaggtgatcttccatctcagcctcctgagtagctgccacaggcacctgtcatcacacctggctaatttttttactttttgtagagacaaagtttcaccatgttgcccaggctggtcttaaactccttgactcaagcagtccgcccaccttggcctcccaaagtgctaggatt

SEQ ID NO: 133275 - DNA, 201 bp, Homo sapiens
tgatgtgggaggattgcttgagcccaggaggtagatgttgcagtgagccaagatcgtgccactgtactccatcctgggtgacagagtgacagcctgtctcaaaaaaaaaaaaaaaaaaaaaagaaggccgggcgtggtggctcacgcctgtaatcccagcattttgggaggctgaggtgggcagatcatgaggtcaggaga

SEQ ID NO: 133276 - DNA, 201 bp, Homo sapiens
tttacattttacatccccccccccttttttttttttttttttgagacagggtctcactgtatcaccccagctggagtgcagtagcacaatcatggttcacsgcaacctcaactccttgggctcaggtgatcttccatctcagcctcctgagtagctgccacaggcacctgtcatcacacctggctaatttttttacttttt

SEQ ID NO: 133277 - DNA, 201 bp, Homo sapiens
gatgtgggaggattgcttgagcccaggaggtagatgttgcagtgagccaagatcgtgccactgtactccatcctgggtgacagagtgacagcctgtctcaaaaaaaaaaaaaaaaaaaaaagaaggccgggcgtggtggctcacgcctgtaatcccagcattttgggaggctgaggtgggcagatcatgaggtcaggagat

SEQ ID NO: 133278 - DNA, 201 bp, Homo sapiens
tgcttaagtttgcattggagacctgttgtggaggggccacctggttctccttgggctgagccaagtgtttttcttaaacgcattgatccctctgaggagayggcagtgatccgtgtattccgtgtagctaattctggtggtttttctattgtgaaatttctggttatgagtttttggttttggtatatagtgccctgggtt

SEQ ID NO: 133279 - DNA, 201 bp, Homo sapiens
ggaatttgctcctagaaaatggttatggtattttcattgatgacaagcttgccattctcagccttgactgtgccacggaatttgccatgggtagaatcatmttggaacatatagaccgtgtagttgagggcaatgagggggtccttgatgagacaatatccacttcgccagagttaaaagcagccttggtgaccaggtgtc

SEQ ID NO: 133280 - DNA, 201 bp, Homo sapiens
gtctcccttggatggtgcatttgtgagaatctatgagattcactgaagaaatgactgtctcagacaatgaagtttatccattttctttctaggttcaaaartgaggcttatgtactttatggtttttgaaacataaaagcccacaaaatagtgtggatactatgatccttttttctttttaaaatcgtgtatgttttaagc

SEQ ID NO: 133281 - DNA, 201 bp, Homo sapiens
gaatttgctcctagaaaatggttatggtattttcattgatgacaagcttgccattctcagccttgactgtgccacggaatttgccatgggtagaatcatawtggaacatatagaccgtgtagttgagggcaatgagggggtccttgatgagacaatatccacttcgccagagttaaaagcagccttggtgaccaggtgtct

SEQ ID NO: 133282 - DNA, 201 bp, Homo sapiens
cggctgaggtaggaggatcacttgagccctggaggcggaggttgcaggagctgagatggtgccactacactccagcctgggtgacagagtgagaccctgtstcaaaaaataaaatacaaatacataaataaataaaaattcaacatcaggtttttgaggttagtctctcccattatgtttaaatgtcatttattcctttca

SEQ ID NO: 133283 - DNA, 201 bp, Homo sapiens
tcacaatttttttaagctacttttcaatactttgttagattatttagattctttttttttttttttttttttgaggtggagtctcactctgtcaccaacawtggagtgcagtagcatgatctcagctcactgcaatgtccgcttcccaggctcaagtgatcctcctacctcagcctcccaagtagctgggaccacaagtgc

SEQ ID NO: 133284 - DNA, 201 bp, Homo sapiens
caggcagatcgatgagcccaggagtttgagaccagccttggcaacatggttaagccccgtctctaccaaaaatacagagacattagctgggcgtggaggtrcgcacctgtggtcccagctacttgggcggctgaggtaggaggatcacttgagccctggaggcggaggttgcaggagctgagatggtgccactacactcca

SEQ ID NO: 133285 - DNA, 201 bp, Homo sapiens
gatgaaataatctatacaacaaacccctgtgacaacagcttacctatgtaacgaaccttcacatgtacccccaaacctaaaatgaaagtttaaaaaaaaaaccacaaaaaatttctattttcattcatggtttcatttaatgagttttggattgactgtggtcattttgctgttatgtctgtatatagggtcttacatttg

SEQ ID NO: 133286 - DNA, 201 bp, Homo sapiens
caagggatctttttctggcacaggttgtttggttactcactgtgtcttttgtttctttcagtgatgaagaactttctcaatatcttttacaactggtgcargtgttaaaatatgagccttttcttgattgtgccctctctagattcctattagaaagagcacttggtaatcggaggatagggcagtttctattttggcatc

SEQ ID NO: 133287 - DNA, 201 bp, Homo sapiens
caatactgccacccagtgtttgcacagtttacatttttagatttttagaaactgttttaagaatctcttcatccttagcttagaaattattaaaggatctrccttttttttttttatggaattatatttttgtatctcacatacttaggttcatttattatatataaatatatataaatttactgaaagtttgctgtggtg

SEQ ID NO: 133288 - DNA, 201 bp, Homo sapiens
tttcattttttaaacagcttcaggcgctgcttcagatttggcctaaactgcccccccgggaggccctagagcttctggatttcaactatccagaccagtaygttcgagaatatgctgtaggctgcctgcgacagatgaggtatcttctgcaggtggttttctttggggcaaggaataacttgggtgggtttgggatgaggg

SEQ ID NO: 133289 - DNA, 201 bp, Homo sapiens
gaaactgttttaagaatctcttcatccttagcttagaaattattaaaggatctgccttttttttttttatggaattatatttttgtatctcacatacttargttcatttattatatataaatatatataaatttactgaaagtttgctgtggtgtttgcacaattaaattctataatgagcattttacttttttagagtcg

SEQ ID NO: 133290 - DNA, 201 bp, Homo sapiens
gccactgcacctggtagtgttgatttttataaggaaatctttgaacaaattctcagaatttaggagccaggcaccatggctcaagcctgtgatcccatcarcttgggagtctgaaccaggaggataacttgaggctaggagttcaagatagcctggacaacatagagagacccttgtctgtacaaaaatttaaaagttagc

SEQ ID NO: 133291 - DNA, 201 bp, Homo sapiens
cacaaaaattttctgagaacggaagaaaaacacccttactaagtacctgcactatgaaatttcagtgcatcagacgtaaagagaaagtcttaaaactttcrcagagacacagcaggccacataccagagtttagaagtcaaaatgacttggctcctcaatagctacattggcaattataagacagtgcacgttagccttca

SEQ ID NO: 133292 - DNA, 201 bp, Homo sapiens
ggttattgtgacaaccatgaaaaccagattacatgtgattaagaagtccatatgtagtgatgagattatagtttctatgggccacctaattttgatggagrgagagcagttccaattaaagtcttttcaagattgagaactaaatttgaattaagaggtaaagtagtcattcagttttgttaactttctcatttttaaaac

SEQ ID NO: 133293 - DNA, 201 bp, Homo sapiens
ggaaagaagggcacttactaagcaaataatatactaagacatttcccagagccaatgttcatgaatatccagtcaaaatagcacaaaaattttctgagaasggaagaaaaacacccttactaagtacctgcactatgaaatttcagtgcatcagacgtaaagagaaagtcttaaaactttcacagagacacagcaggccac

SEQ ID NO: 133294 - DNA, 201 bp, Homo sapiens
gtgtgtgtgtgcctgtagtcccagttactcaggtgcttgaggcaggaggatcgtttggggctaggagtttgtatccagcctgggcaatgtggcaagacccygtctctaaaaaaacaggaagattaaaaaaaaaaaaaaagagttgcctccatccaggtgaaaattgagtttgggctgggtgtgattgctcacacctgtaat

SEQ ID NO: 133295 - DNA, 201 bp, Homo sapiens
aatggatattccagaaagaaggagaatggcgtgaacctgggaggtggagcttgcagtaagctgaaatcacgccactgcactctagcctgggcgacagagcragactccgtctcaaaaaaaaaaaaaaaaaaaaaaaaagaagaggaaagaagggcacttactaagcaaataatatactaagacatttcccagagccaatgt

SEQ ID NO: 133296 - DNA, 201 bp, Homo sapiens
aagggccaatcttaggttttgagtccagcctatctggcattagtatatgccacccaaggctgtcctcatggttgcttttctaccaagtgggactcttctawgtctgactcttctgcagacctgacaggaataggtgaggagttttcccaagcctagtatatagtggtaaaattataatcttctgtatcattacactgaagt

SEQ ID NO: 133297 - DNA, 201 bp, Homo sapiens
caattttttgacagttgcctccattaagacttcatatctgaattacactaatggagtttacattttacatccccccccccttttttttttttttttttgaracagggtctcactgtatcaccccagctggagtgcagtagcacaatcatggttcacggcaacctcaactccttgggctcaggtgatcttccatctcagcct

SEQ ID NO: 133298 - DNA, 201 bp, Homo sapiens
taatcagaggagacaacaatcaccaatattccagctatccactataaactacttcttttttttttttttttttgagacagcgtctcactctgttgcccagrctggagtgcagtggcacaatcttggctcactgcaacctctgcctcctgggttcaagcaattctcctgtctcagcctcctgagtagctgggactgcaggcg

SEQ ID NO: 133299 - DNA, 201 bp, Homo sapiens
atttttataaaatttcatgtgatacaaatttagaggatggattttgttactgctttttctgaaaacaaaaacttctttttttatgcttcttttctttttawtgggagattctaaattcagagaacaaaatttttagcatcattataaagttgggtcttttttcctactcttgtttctttttaacgatttgtcaactttaat

SEQ ID NO: 133300 - DNA, 201 bp, Homo sapiens
acttctaattgaaatcagtgacttaaatgtttgaaactgcagtgcttaactcttaaacatgaaattgtagtcagtctttggtcaaaactaactaaaatgtkcccaacccctagcatgatctagcaaagccatggtctcttctaagtactgtgaacatgagtctactcacagccccaccgaaacacagctcccaggacgttt

SEQ ID NO: 133301 - DNA, 201 bp, Homo sapiens
gcagccaagcctgctgtgttacctcttttcttcacacagtctatccaccctccagaattaagaaatgttaatttttgtcatgggtttaaaatatatatatatatatatatatatatatatatatatatattttaagcaaatacattacagttaaagttgaagtcctcatagtttccttatccagtcttgattacttctctt

SEQ ID NO: 133302 - DNA, 201 bp, Homo sapiens
atccctaattctacttcatttcctatacctgagttttgccagaagtttttggatgcagttataactagcattctgttttgttttgtttttaaatactagcraacatttattgagcctttattatatggtgggaacttatttgtctttatttctcaatgtctttatcaccagaacactgaaaaataatcatttgtaaaattc

SEQ ID NO: 133303 - DNA, 201 bp, Homo sapiens
agcagccaagcctgctgtgttacctcttttcttcacacagtctatccaccctccagaattaagaaatgttaatttttgtcatgggtttaaaatatatatatatatatatatatatatatatatatatatattttaagcaaatacattacagttaaagttgaagtcctcatagtttccttatccagtcttgattacttctct

SEQ ID NO: 133304 - DNA, 201 bp, Homo sapiens
gagagacagagtctcactatgttgctctctctggtctcaaactcctggcctcaagcgatcctcccacctcagtcttacaagtatctgggattacagacatrtgccaccatacccagctcttatatagaatctttatatactatattatttattttagggaatattcttaagtttttaaactgcatatttgatttaacaagt

SEQ ID NO: 133305 - DNA, 201 bp, Homo sapiens
ctgaggttgcagtgagccaagattgtgccattgtattctagcctgggtgacagagggagaccctgtctcaaataaataaataaataaataaataaataaatctttggagacatgttatataattatattattgtgtgtacctcgattaaacttgtttccaccttagaccaaattagactgaaaaggaactattttatttta

SEQ ID NO: 133306 - DNA, 201 bp, Homo sapiens
gggaggccaaggcaggtggatcgcttgagctcaggagttccagaccagcctgggcaacatggtgaaaccccatctctacaaaaaatacaaacattagctggacatgctggcatgtgcctgtagtcctagctacttgagtggctgaaatgggagaattgttggaatctgggaggttgaggctgcagtgaaccaaatgccatt

SEQ ID NO: 133307 - DNA, 201 bp, Homo sapiens
gctgaggttgcagtgagccaagattgtgccattgtattctagcctgggtgacagagggagaccctgtctcaaataaataaataaataaataaataaataaatctttggagacatgttatataattatattattgtgtgtacctcgattaaacttgtttccaccttagaccaaattagactgaaaaggaactattttatttt

SEQ ID NO: 133308 - DNA, 201 bp, Homo sapiens
aaaggatctgccttttttttttttatggaattatatttttgtatctcacatacttaggttcatttattatatataaatatatataaatttactgaaagttygctgtggtgtttgcacaattaaattctataatgagcattttacttttttagagtcgaggtggaaaaaagtttcttcctgtattgaaagaaatcttggaca

SEQ ID NO: 133309 - DNA, 201 bp, Homo sapiens
ggctgaggttgcagtgagccaagattgtgccattgtattctagcctgggtgacagagggagaccctgtctcaaataaataaataaataaataaataaataaatctttggagacatgttatataattatattattgtgtgtacctcgattaaacttgtttccaccttagaccaaattagactgaaaaggaactattttattt

SEQ ID NO: 133310 - DNA, 201 bp, Homo sapiens
aggctgaggttgcagtgagccaagattgtgccattgtattctagcctgggtgacagagggagaccctgtctcaaataaataaataaataaataaataaataaatctttggagacatgttatataattatattattgtgtgtacctcgattaaacttgtttccaccttagaccaaattagactgaaaaggaactattttatt

SEQ ID NO: 133311 - DNA, 201 bp, Homo sapiens
cagtggccaaaatagaatcctatagtcccttactagaatcctgcagtctcttcccgcagggctgaattggaaccctgtctcaggtactgagtgggaattaytgctgaaatgaaaccgagcaaattcgggattcgcttaggatgaaagatggtgggacgtaaacttgaagtgctttgctgtttcatctcaagtgacacttga

SEQ ID NO: 133312 - DNA, 201 bp, Homo sapiens
ttcagatcaagctgtcacccacttctttttgcattcactaatacatcttccttgaatcagtgttactgcagtgggttgccaattttaaatcttgcttttcsttttggatttattagttggcttataacataggttagaggcttttcttctactctatctctatctatctatctatctatctatctatctatctatctatct

SEQ ID NO: 133313 - DNA, 201 bp, Homo sapiens
actttggtgtatttacttatttgctcaatcccctgtttgtaatcagtcttctagtcttataactgtcttcttagtctccacctcattatccttttttttttgtattttgtattttttgtaaagacgggttttcaccacgttgcccaggctagtctcaaactcctgacctcaggcagtccacccacccacattggcctccca

SEQ ID NO: 133314 - DNA, 201 bp, Homo sapiens
tcctggctgctggcgtgcgtttgggggcacatttatttccgatctgctctggtgttgcagtaaccgatactggagttgcttaatattggagcctgttaacytcgcagtggccaaaatagaatcctatagtcccttactagaatcctgcagtctcttcccgcagggctgaattggaaccctgtctcaggtactgagtgggaa

SEQ ID NO: 133315 - DNA, 201 bp, Homo sapiens
tgggactacaggcatgcgccaccatgcccagctaattttttgtattttagtagagatggggtttcaccatgttggccaggatggtctcgatctcttgaccycgtgatctgcccgtctcggcctcccaaagtgctgggattacaggcgtcagccaccacgcccggccacatcatgtccttttaccccttaattcttcagtat

SEQ ID NO: 133316 - DNA, 201 bp, Homo sapiens
cttttggctcaaatgaaatgctttttgaagtacttttacaaatatagcctcctatatttgcaaatataagttttttttttttttttttttttttttttttktttttttttttgcctttctaatctcttggagagtctttcttgaagaagatcagtttgggatagagattttagtctttgaatatatataagccagggacag

SEQ ID NO: 133317 - DNA, 201 bp, Homo sapiens
aaatatggcaagaatcatatacgttagtatacactgagtagaaaaagctacattttgactcatccaatacgtttatgtagtgtctttagttattcctttgrtagaaatttatccataagccatagctactcgtgatatatttaatagttttagctgtgactattatcatgttcagttatgatgtgtgttcaacagttatag

SEQ ID NO: 133318 - DNA, 201 bp, Homo sapiens
agaaaagaaaaattactttggagagagaggatcttagattgtacacctaactctattttctcatcatgagtttcttatctgtgaaataaaaaaattatatratgcgaactccagagttttctaactacactgaaattctaaaatcacacacacagttctgtgaattgaccatatttagcgtggtggaaaaggaaaaggaag

SEQ ID NO: 133319 - DNA, 201 bp, Homo sapiens
catgatcatagctcactgcagcctcaacctcccgagctcaaaagcgatccttccaccatagcatctcaaatagctgggactataagtgccaccaccatgtmtggttaatttttaaaatttttagtgtagatgagatcttgtcatgttgcccaggttggtcttgaactactggactcaagtgatcctcccaccttggccttc

SEQ ID NO: 133320 - DNA, 201 bp, Homo sapiens
ggtcttgaactcctgacctcaggtgatccgcccgcctcggcctcccaaagtgctgggattacaggcgtgagccactgcgcccggcttaattttcttaatcrtatctttcacagaagttgtaagtttttttttgagacagaatctcactctgtctcccaggctggagtgcagtggcgcagtctcggttcactgcagtctccg

SEQ ID NO: 133321 - DNA, 201 bp, Homo sapiens
ttttaaaaatgattgttttactaagcacaaattttttagcatgatcagaaatcagtattaaagtacctaatatttttggtaactcttagctgactgaaaaatacagtcatgaattttaacaatctgtagtagtccattttcacaccattataaagaattacctgagactgggtaatttataaaggaaagatgtttaattga

SEQ ID NO: 133322 - DNA, 201 bp, Homo sapiens
gaggcaggagaatcgcttgaacccaggaggcggaggttgcagtgagccaagatcgcaccatttgcactccagcctgggtgacagcgagactctgtcccccmaaaaaaaaaaaaacctctcattctacctttttatagccccagtcacctccctcccaccctttctaacctctggcaaccactaatctgttttttatgattt

SEQ ID NO: 133323 - DNA, 201 bp, Homo sapiens
ggttatgtgtgtttatggttatgtgtatatgttgggagcaggtgttattgattgatatgatcacatgatattatattacttttagtcaaatgaatttttgrtgtggggaacttatttttcaggttgaagcactcaataagttaaaaactttaaatagtttaatcaaactgaatgccgtgaagttaaacagagccaaaggga

SEQ ID NO: 133324 - DNA, 201 bp, Homo sapiens
cttttaaaattcatgtttctgttacaaagcatagcaatgccagatcttatgtagtctaagtacaaatgtagtcatttacacttaaaattctacaaatatgrgagccaaaattcattttctttaatttttttaaacagattattgaaaaggcagctgagattgcaagcagtgatagtgctaatgtgtcagtaagtatcaaga

SEQ ID NO: 133325 - DNA, 201 bp, Homo sapiens
caagtaggctttctaaaacttggcatgtttcttcttccagtatgttccttccttctccaaaataaagatgtttttagtgtagaaacaaacaaacaaacaawaagagatgtttttcgtggtacagtattcatgactttgtttttgtttttgtctgcttcattacaggttcatgtcagggctggtctttttcatggtactgag

SEQ ID NO: 133326 - DNA, 201 bp, Homo sapiens
gtctcaaaaaaaaaaaacttaaggatatgaagtttctaagcagaaatcatgtgtgaatagatggcactgccctctcccccactcacctttcatgaagataygtggagtgttagttgactatgaaatcactttcattttcccaaaaagtagcttaaacagggctttgaagtttttttgtagtttgcaggcttattatctctc

SEQ ID NO: 133327 - DNA, 201 bp, Homo sapiens
ttattattgattgtaaaagtcttaagagtgttagatatggtctcttctcacctggctcagtgggctataaacagagggagaagggctcagatgtggatggrtatagttcctgggggtctaggactatggaggttttgcctttatatttggaacccaccagaaaaatgaaggaaattaaatcccatttgttttccagctctt

SEQ ID NO: 133328 - DNA, 201 bp, Homo sapiens
aaaagatgtgaaaaggcattttataaaaagtataaaaacaaactaataggcatgttggcacacacctgtaatcccagcactttgggagaccaaagcgggcmgatcacttgaggtcaggagtttgagaccagcctggcccacatggtgaaaccctgtctcttctaaaaatacaaaagttagccaggcgtggagcacatgccc

SEQ ID NO: 133329 - DNA, 201 bp, Homo sapiens
aatagaggatagttaattgacaggaaataagaaaaaaaaaaaaaacacccagtagcaagattcctagtaggtatgtgtataatattagatcctgtgtgatwaattttttgatgtgggctacatatttgactgtctgcttgccctacacctagtggacaaggcaaagagaaaacatgatcagttataatattcagaatctca

SEQ ID NO: 133330 - DNA, 201 bp, Homo sapiens
ctaattcatttgcattgccagaagaactctcataggcttccattaggtgtttttaatatttaggatttttcatgatgttaaaaactttttctgatcccttmcttttgaaaagcccattaatgattgtaataatagctaatgtttattcatcacttattatgggtcatttattcttaacaacaacatggaatcaatattatt

SEQ ID NO: 133331 - DNA, 201 bp, Homo sapiens
tgactttaaaaaaaatagaggatagttaattgacaggaaataagaaaaaaaaaaaaaacacccagtagcaagattcctagtaggtatgtgtataatattaratcctgtgtgattaattttttgatgtgggctacatatttgactgtctgcttgccctacacctagtggacaaggcaaagagaaaacatgatcagttataat

SEQ ID NO: 133332 - DNA, 201 bp, Homo sapiens
aggaaattgtattaatagatttctcatttctgactctgtactcagacattttttttccctcccaatctggacttcatagtactgaaactaatgcttgtcaraaaaaaaaactaccttttttctttctttctctctttctccttccttccttttcttttctttttcttcttttcttcttttttcttttctttgctgagcttc

SEQ ID NO: 133333 - DNA, 201 bp, Homo sapiens
aattgttcactcagtactttttaaatataaaaattatatttgactataaattttacagtagccttaaggaaaatttaagctttgctgttagattctcttasaagaaggtatgtagggtattaactaggtttaaaattaaattacttagcttaaagtgttcgttatttttgataaaatttcttttttttttttgagatggag

SEQ ID NO: 133334 - DNA, 201 bp, Homo sapiens
ctcatccaatacgtttatgtagtgtctttagttattcctttggtagaaatttatccataagccatagctactcgtgatatatttaatagttttagctgtgrctattatcatgttcagttatgatgtgtgttcaacagttataggctcttttggctcaaatgaaatgctttttgaagtacttttacaaatatagcctcctat

SEQ ID NO: 133335 - DNA, 201 bp, Homo sapiens
gagaataaaaaacaaccttattattaccctcccttcgataaggtaagctaattatttaaaggacctctatgcatgaaatgattgaatgatcagttcctctrtgtatagtttaagctctatctgtctctttcaaaacttcccatacagtgacagctttgttgagtgggaagaccatggatcagggagccttcttaactctgt

SEQ ID NO: 133336 - DNA, 201 bp, Homo sapiens
attaaatttatgtaattcactctttcttcattttcattataattggattttatccatctaaggagtaattttttatttcaagttttttaaacatgtttttytgaacaataatttacaaccaaattaaattttgtgcttataatataaatttcaaatatggcaagaatcatatacgttagtatacactgagtagaaaaagct

SEQ ID NO: 133337 - DNA, 201 bp, Homo sapiens
gaaagtctaacatttgtgcaatctgactttgagaaaaataagagaaagagtacagttcaggaagactacttaaggaaataatcacaggaaactagattatyggcaaagtcagcaaaagacagaaacacaaattcaagaatcccaagagaaatacaagtgcagacatatcctgtatcacacgtattagtcatacatcataat

SEQ ID NO: 133338 - DNA, 201 bp, Homo sapiens
atgcctctggagagtcattctagttttgtgaaaatagaacatcaaactgggatgatcggtaggtttttgatgggaagacggctggtaatacttgcctagarctctgtgatggaaaggggccatctcagggatccatagaaagtgtgaatctgccacatgcgaaccacgtattcagcttttctagccaagctgaaagtatgg

SEQ ID NO: 133339 - DNA, 201 bp, Homo sapiens
gggagcccgaggtgggtggatcacctgaggtcgggagttcgagaccagcctgacaaacatggagaagccctgtctctactaaaaatacaaaattagctggrcatggtggcacatgcctgtaatcccagctactcgggaggctgagcaggagaattgcttgaacccgggaggcggaggttgcagtgagccaagatcgtgcca

SEQ ID NO: 133340 - DNA, 201 bp, Homo sapiens
tcacttgagcctgggaggtggaggttgcagtgagccaagatcatgccactgcaccccaacctgggtgacagagaccctgtctcaaaaaaaaaaaaaaaaaagaaaaagaaaaaattgagtccgtgaggtgagaaaatatttaaaaagatgaacgaagaattaaggaacgaaaacttgtaaagattttccagctttaggaaa

SEQ ID NO: 133341 - DNA, 201 bp, Homo sapiens
tgctgttgtaagaaaacttgaatattttgtatggttttccatttcagaatgaatttatatttttttctatttttctgaatatatttctattattttcaccrttctgtaatattctataattcatttaaccaatcttttattgctaaacatttgatttgttcatagttttttatttttacaaacagtgctgcagtgagcatc

SEQ ID NO: 133342 - DNA, 201 bp, Homo sapiens
taaaatttctgcctcattggccagtaatcacatcacttttgggaggctgaggcgggcagatcacgaagtcaagagatggagaccatcccggccaacacagkgaaatcccgtctctactaaaaaacaaaaaattagccgggcatggtggtgcgcgcctgcagtcccagctacttgggaggctgaggcaggggaatcccttga

SEQ ID NO: 133343 - DNA, 201 bp, Homo sapiens
agctactcaggaggctaaggtgggaggatcacttgagcctgggaggtggaggttgcagtgagccaagatcatgccactgcaccccaacctgggtgacagaraccctgtctcaaaaaaaaaaaaaaaaaagaaaaagaaaaaattgagtccgtgaggtgagaaaatatttaaaaagatgaacgaagaattaaggaacgaaaa

SEQ ID NO: 133344 - DNA, 201 bp, Homo sapiens
acacattctgtgtaatgttctgcttcttgctttattcaccatatctacatatctacatatcaccatatcttctctacgtatctatgtagagaactgtttttccccccatgcctggactgttagatttttttttttaagcagaattgtgttctgatagttcaaacagtgctgctataatgaataaccatgcttatgtacagt

SEQ ID NO: 133345 - DNA, 201 bp, Homo sapiens
ggattacaggcgtgagccaccgcgcctggccgtatttctgaatatatttcttattttaatgaatgtgtgttgctttcagcattttttgtaggtttttttttctttttttttttgagaaattctcctaaggaacagtgtcttctttataataacctttgttgctcctaattgtgctaactttcttcatgagtagaaggaaca

SEQ ID NO: 133346 - DNA, 201 bp, Homo sapiens
tttagggaacatgggtggagctggaggctattatccttagcaaacttatgcagaaatagaaaaccaaatgccgcatgttctcacttataaggaagctaaaygataagaacttatgaacacaaagaaggaagcaacagacactggagcctacttgagggtgaagcggggaggagggagaagagcagaaaaggtaactgttgg

SEQ ID NO: 133347 - DNA, 201 bp, Homo sapiens
ctttctctccactttttcttcatgtgcccaccctatctaaaaaaattcagatgtttagccaaccaggattagtttagattgtacaacccaaccccagccartggggaaagaatgcagaggcaggacttgcgtcaggaataaaggctgtcgtgcccctttgttcaggtgtgctctcatggcaactggccaaggaggcacccc

SEQ ID NO: 133348 - DNA, 201 bp, Homo sapiens
atacatgcggccaacaagcatatgcaaaaaagcttaatgtcactgatcattagagaaatgcaaatcaaaaccacaatgagataccatctcacaccagtcgsaatggctattgttaaaaagtcaaaaaataagagatgctggtgaggttgtggagaacacatacacactgctggtgggagtgtaaattagttcaaccattgt

SEQ ID NO: 133349 - DNA, 201 bp, Homo sapiens
taagttttgtgatgggtagctttgtctttaaatcttatgcatctccataccatatttaggaatgaaatagactaaacttctttttttttttttttttttttgcgacggagtttcgctcttgttgcccaggctggagtgccatggtgtgatcttggctcactgcaacctctgcctcccaggttcaagcgattctcctgcctc

SEQ ID NO: 133350 - DNA, 201 bp, Homo sapiens
tgggacaatttttataaaatttcatgtgatacaaatttagaggatggattttgttactgctttttctgaaaacaaaaacttctttttttatgcttcttttytttttattgggagattctaaattcagagaacaaaatttttagcatcattataaagttgggtcttttttcctactcttgtttctttttaacgatttgtcaa

SEQ ID NO: 133351 - DNA, 201 bp, Homo sapiens
aaatttttatcctttaagaaaaagttaatcactttttctgcattttttgagatgatttgtatattttaattcattggttttcttttttttttttttgagayggagtctcactctgccacccaggctggagtgcagtggctcaatctcggctcactgcaagctccccctcccgggttcatgccattctcctgcctcagcctc

SEQ ID NO: 133352 - DNA, 201 bp, Homo sapiens
agtcagatgggttgtttgcctcaggcatgcggaccctgcatcaatacctgttagtgattttcttctcacttagtcgtcttcacatcttggaaagcaattaytggtatctttcttgtcagaaacttgaaaaagtacaccactttgcttgattcccaagctttttttttctagcctagctatttcttcaggtctcattttcta

SEQ ID NO: 133353 - DNA, 201 bp, Homo sapiens
gtaagttggaatcagggtgggaagtggttggaaactgagatgtaataattagtgatttggaggtgctagggtgtggtgaagtcaaattcagggtggcatcrtgagattgtgtggctgaagggaaggagagaagtacctagttggagatatttaggtcaaggaactcaggagtcagatgggttgtttgcctcaggcatgcgg

SEQ ID NO: 133354 - DNA, 201 bp, Homo sapiens
ctgtgactacaggtgcacgccaccacacctgactaatttttgtatttttttgtagagatgggcttttgccatgttgcccaggctggtcttgaactcctgcrctcaagggatctgcctgccttggcttcccaaagtgctgggattacaggtgtaagccacctcacccagcctgaaatagtaattttacatttgaaaacagtc

SEQ ID NO: 133355 - DNA, 201 bp, Homo sapiens
attatggttagtcagcttctaaggtagatttttgtttgagtttgatctgagagagacttgcacaggtttatagcctgctggaggaagatttttccaatgcrgaggagcaaaggagtaacatctcagtacttggggagctggagcaatatgggaccaggggacttgaaggattacgcctttttctggagttgaagggaatta

SEQ ID NO: 133356 - DNA, 201 bp, Homo sapiens
aaaaacaaaaaaaacaaaaaaacaaaagttagttttctggtgggctcacacatgtaatcctaacactttggaagccaaggtgggtggatcacttgaggtcrggagttcgagaccagtctggccaacattagcaaaactctgtccctactaaaaataccaaaaattagccgggtgtggtgatgtgtgcctgtaatctcagct

SEQ ID NO: 133357 - DNA, 201 bp, Homo sapiens
agcgagtgccttttattcttacctatgatttcatccatgtcattcaacaaggaaaaacaggaaatacagaaaagtttggccggtgagtactgcccttgtgycaaggctgaacacttctaacattttcttatctgaccaggtggaccagcatttcttagctgagatatatttggatctgggagatattcagtctgattatag

SEQ ID NO: 133358 - DNA, 201 bp, Homo sapiens
tcccaggacgtttgaatatctaaggcccagttatttaatgtctttgaaggcagctctctcagcccagcccctgtgaagaccacccacactccccttggctkatccacatgttctctcatacggttttggcagctctgtgttctcctcacaattaaaaaggaaacagaggtatggtttgggtctcactctacacgcttggag

SEQ ID NO: 133359 - DNA, 201 bp, Homo sapiens
ccaagtgggactcttctaagtctgactcttctgcagacctgacaggaataggtgaggagttttcccaagcctagtatatagtggtaaaattataatcttckgtatcattacactgaagttgactaattttccccacttgatttcagtgttgaaaagtgcaaatacatggattccaaaatgaagcctttgtggctggtatac

SEQ ID NO: 133360 - DNA, 201 bp, Homo sapiens
attgatttttagggaagctaaaatatttgttaatccaaaaagtaccacagagtaggccatgttctttttgatttttttttcttttttaaatagggtctctytctgtcacctaggctggagtgcagtggtgcgatctcagctcactgcagcctcaacctcccaggcttaagtgatcctcctacctcagcctcccgagtagtt

SEQ ID NO: 133361 - DNA, 201 bp, Homo sapiens
gcagtcatgggatccagtcccatagtgtgaatcgagtgcagcctgctaggccaagtgggcagactgagcctagtgggccctgtcaaaactaaggcaaaggygccactggccacagatgtttctggccagaaaaacaacaccccaaggatcctgtaacagtaggaattattttagggcagtgattctgaaagtggactgtgt

SEQ ID NO: 133362 - DNA, 201 bp, Homo sapiens
agttattcctttgttttctaaggaaattgtattaatagatttctcatttctgactctgtactcagacattttttttccctcccaatctggacttcatagtrctgaaactaatgcttgtcagaaaaaaaaactaccttttttctttctttctctctttctccttccttccttttcttttctttttcttcttttcttcttttt

SEQ ID NO: 133363 - DNA, 201 bp, Homo sapiens
cagcttttttaaagcctagttttaaagacattttttaagaaccaaaattatttgcatgttttagatgaactcgaagaaatgttgaatccaatgggaactgktcaaacaaatccatatactgaaaatgcaacagctttgcatgttaaatttccagagaataaaaaacaaccttattattaccctcccttcgataaggtaagc

SEQ ID NO: 133364 - DNA, 201 bp, Homo sapiens
ggcatcagcagagggggcagagatgatgaccctttcggtttctccttttaaatgagccccagccttctacaaggtagtgaagatgccagtggtctccacartgtaattgtggtggcatcacccaatttgattttggtgggaatttgctcctagaaaatggttatggtattttcattgatgacaagcttgccattctcagcc

SEQ ID NO: 133365 - DNA, 201 bp, Homo sapiens
cttcctagtttgctgaaaatttttatcctttaagaaaaagttaatcactttttctgcattttttgagatgatttgtatattttaattcattggttttcttytttttttttttgagatggagtctcactctgccacccaggctggagtgcagtggctcaatctcggctcactgcaagctccccctcccgggttcatgccatt

SEQ ID NO: 133366 - DNA, 201 bp, Homo sapiens
aactatagatctcatgtttttatgcaagcttactctcctctctcagccttgcctagagctgcactgaacccctctttcagtctttttttttttttttttttcttttctttccttttaaactgagcacagagaacatgtaataccatttcctggaagaaaatagattactacgttatggaccacaagttgttaacacatggg

SEQ ID NO: 133367 - DNA, 201 bp, Homo sapiens
aataatatagtaatggcaagtatatcaataataataaaactttttttaaaaagtaaagggaaaatcttaccaaattaatgtttcattttaaggaaaatatractctatgcccatttttttccttccaggatgttgccttatggctgtttagcaacaggagatcgctctggcctcattgaagttgtgagcacctctgaaaca

SEQ ID NO: 133368 - DNA, 201 bp, Homo sapiens
gtttcaccatgttggccaggctggtcatgatctcctgacctcattatctgcccacctcggcctcccaaagtgctgggattacagatgtaagccagcgtgcrcggcctctggggtctcttttataaggacactaatcccattcatgaggactctgccctcatgacctaatcacatcccaaagttttcacttccaaatatcat

SEQ ID NO: 133369 - DNA, 201 bp, Homo sapiens
atgtccttacatggcagaagaggagatgaagctctctggggtcttttttatttattttattttattttatttatttttttgagtcggagtctcgctctgtygccaggctggagtgcagtgacacaatctcagctcactacaacctccgactccctggttcaagtgattctcctgcctagcctcccaagtagctgggactac

SEQ ID NO: 133370 - DNA, 201 bp, Homo sapiens
aagaacatatatataccttttcatttggctattcatttctatcctttgtaatatcctttataataaatgggtaaatgtgtttccctgagttttgtgagccrttagagcaaattgaacctgaggagggcatttgtgggaacccttgattgatcacaagtacaaataataacctgagatttgcaattgtcacctgaattggaa

SEQ ID NO: 133371 - DNA, 201 bp, Homo sapiens
gtcttagtctgtttgggctgctgtaacagaataccatagactgggtggcttataaacaacagaaatttatttctcacaattgtagggttttttgtttgttytgttctgttttgttttgagacggagtttcactttgtcgtccaggctgcagtgcagtagcatgagctaggctcactgcaactgccccgtttcaggttcaag

SEQ ID NO: 133372 - DNA, 201 bp, Homo sapiens
ctcagcctactcagtgtgaagatgatgagttatgaagacatttatggtgatccacttcctttttttttttttttttttttttttttttttttttttttggkggagtctcgctctgtcacccagtctggagtgcagtgacacaatctcggctgactgccagctccgcctcccgggttcacgccattctcctgcctcagcctc

SEQ ID NO: 133373 - DNA, 201 bp, Homo sapiens
tccttgccctcctgggctcaagtgatcctcccacctcagcctcctgagtagctgggactacaggcatgcaccaccatgcccagctaatttttaattttttrtagagatgaggtctcactatgttgcccaggctggtctcgaacccctgacctcaaggaatcctcccacctcggcctcccaaaatgttgggattataggtgt

SEQ ID NO: 133374 - DNA, 201 bp, Homo sapiens
cgtgatctcggctcactgcaagctccacctcccaggttcatgccattctcctgcctcagcctcccgaggagctgggactacaggtccccgccaccactctyggctaatttttttgtatttttagtagagatggggtttcaccatgttagccaggatggtctcaatctcctgacctcgtgatccgccctcctcggcctccca

SEQ ID NO: 133375 - DNA, 201 bp, Homo sapiens
tcaatcccatacatttaaataaagacttaacaaagcattttgtctcagagtataaagcatttattttccctaatttgctgggtaggaaattaagtgaatamtttttgtgatccaagaaagagatttggtttgtttgaaatgtttgttgcttgaagatatattcaggagccccttgccaaaaattaccaatgtcttgctttt

SEQ ID NO: 133376 - DNA, 201 bp, Homo sapiens
gaggcaagaggattgcttaagcccaggagttctaggtactagtgtgctgtgattgtgcctgcaaatgccatatatatatatatatatatatatatatatataaggctgaatagcttgatatgtactgtagatggaggtctgcagctgtggttgcctgccatttcgagataaatcaatccagtataagtaccattgtgaaaa

SEQ ID NO: 133377 - DNA, 201 bp, Homo sapiens
aattaaaaagttaagtgtcattaatgcatgatatgtatgtatcatttactaccataaaatacacataaatctattataaaaagttaaaatttcaaaacttacatacacagacatttagacaaccatacatggtgccatttgcagttgaaagaagtgcaaacaaatgtaaagatacagtattaaatcataactgcataaaat

SEQ ID NO: 133378 - DNA, 201 bp, Homo sapiens
tgctttagcccaggagattgaggctgcagtgagctgtgatcgtgtcactgcattccagcctgggcaacatagaccctgtctcaaaaaaaaaaaaaaaaaawtttttttttttaatttcttgatattctgctgtggtttaagacatactttcacagtgcatttgatatagtgttgttcagcttcattttattctattgattt

SEQ ID NO: 133379 - DNA, 201 bp, Homo sapiens
ttctgatagtaagctgttgaactctagtccataagaagaaacaagatgaaaaatgcttggtgggcaacatagaagtactgacttttcttcatgttctgccrtcattcaagtagatttctgtttctttaatttaacatttctttttaccttaagaggtgtaaaggagaatgtatattttaccagcattatcctctattatta

SEQ ID NO: 133380 - DNA, 201 bp, Homo sapiens
gctcacacatgtaatcctaacactttggaagccaaggtgggtggatcacttgaggtcgggagttcgagaccagtctggccaacattagcaaaactctgtcyctactaaaaataccaaaaattagccgggtgtggtgatgtgtgcctgtaatctcagctacttggaaggctgaggcaggagaattgtttgaacctgggaggt

SEQ ID NO: 133381 - DNA, 201 bp, Homo sapiens
ttttggagtaaagtggagtttaaatatgctatgtgcagtgcagcacccctctccctataaggtatactgtttaaagactaggtccttggctttgccttcargtaacttgaagatgtttttgttgaaatatcttggagactaaaaaatagtcattatgtaaggaatattattataagtgcccagttagaggttagtagttac

SEQ ID NO: 133382 - DNA, 201 bp, Homo sapiens
tctgtcgcctaggctggagtgcagtggcatgcagtcttggctcactgcaaccttcatctcccaggttcaagcaattcttgtgcctcagccacccgagtagytgggattacaggtgtgcgccaccatgcccagcttctttttgtatttttagtagagatggggtttcaccatcttggccaagctggtctcaaattcctggcc

SEQ ID NO: 133383 - DNA, 201 bp, Homo sapiens
ctataatgaataaccatgcttatgtacagtgtatatctgagataaattccttagaggtgggtttattgattcaaagaatagataaatttataattcttatmattacaaattgttcctcaatagcgtgtatcaatttttgctctccatgtgtagtatatatgaatgccttttttttttgccacatatggtggttcacatgta

SEQ ID NO: 133384 - DNA, 201 bp, Homo sapiens
caggaaatgagcttgacaaagtagtcattgagaacaataccagctccaacattgaaggtggaaaagttgttatcactgttagttggcagagacaacctggyactcagagtagcccaggatgcctttgaggggtcctcccacgcctgcttcacctccttcatgatgtcattgtatttggcaggtctctccagatggcaggtc

SEQ ID NO: 133385 - DNA, 201 bp, Homo sapiens
tggcaattataagacagtgcacgttagccttcataattttgagggaaaatgatttctaacctaaaattcgataaccaaacttttttttttttttctgagayggagacttgctctgtcgcccaggctggagtgcagtggcgtgatcccggctcactgcagcctccgcctcctgggttcaagtgattctcctgcctcagcctc

SEQ ID NO: 133386 - DNA, 201 bp, Homo sapiens
atatgtatgcatataatttatgtatttgagggcactactgcaaaaagttataggagctgtggaatgcttgcgcatattataaagtttaaaaatacaagttkattatggagagtaagcctcttatcccctgcctagaatctgcaatattccagtttcttgtattttaagggtggtattcttcaacgtccagctgtgtacagt

SEQ ID NO: 133387 - DNA, 201 bp, Homo sapiens
ctcatatttataacagtagttaacacatccatatgtatgcatataatttatgtatttgagggcactactgcaaaaagttataggagctgtggaatgcttgygcatattataaagtttaaaaatacaagtttattatggagagtaagcctcttatcccctgcctagaatctgcaatattccagtttcttgtattttaagggt

SEQ ID NO: 133388 - DNA, 201 bp, Homo sapiens
tgtacatttgtacatattattacataatgattgtaatgtgatttttcagcataaatataacatttactgcttttttccccatctccctcccccttcaggaygtgtttagctttcaagtgtctcctaatatgaatcctatcaaagtaaatgaattggcaatccaaaaacgtttgactattcatgggaaggaagatgaagtta

SEQ ID NO: 133389 - DNA, 201 bp, Homo sapiens
tcatattaatgtagtttctcaacaaaactatactagaatgcctttttctctctgccccttccagcacagggtattatcaaattttaaaatatgtgccaacytgataggtaaaaataaatgcacacataaacatttatgtatgttgattcattcttttagatttctaaaattatttactggaataatcataagtttttgaaa

SEQ ID NO: 133390 - DNA, 201 bp, Homo sapiens
tttgatcattccacaatgtatacatgtgtcaaaacatcacattggccgagcttgggggcttattcctataatcccagtactttgggaggataaggtgggtrgatcacttgagcccaggatttggagaccagtctgggcaacatagcaaaaccccatctctacaaaaagtacaaaaaattactcaggcatggtggtgtgtgc

SEQ ID NO: 133391 - DNA, 201 bp, Homo sapiens
agttttgcccttgttgcccaggctggagtgcaatgtgcaatcttggctcactgcaacctccgcctccccggttcaaacaattcttctgcctcagcctcccragtagctgggattacaggcacccgccaccacgcccagctaattttttgtatttttaggggtttctccatgttggccaggctggtcttgaactcctgacct

SEQ ID NO: 133392 - DNA, 201 bp, Homo sapiens
acctgccaccatgcctggctaattttttatatttctagtagagatggggtttcactgtgttagccaggatggtctcaatctcctgacctcgtgatccgccygcctcggcctcccaaagtgctaggattacaggcgtgagctactgcgcccggcctaaaatttctgtatttaagagatctttatggtggttcccaaatttag

SEQ ID NO: 133393 - DNA, 201 bp, Homo sapiens
gcatgactacacccagctaatttttatattttttgtagagatggggttttgccacattggctaggctggtctcgaactcctgacctcaagcgatctgcctrccttaagccttccaaagtgctgggattacaggtgtgagccaccatgtccgacctagtctgtaggattttaacaccctctttagtatgaataaattgttca

SEQ ID NO: 133394 - DNA, 201 bp, Homo sapiens
gacttaacagtcgttgttctgtgttgagcacttattctgcataattcctggtatggcttatttttcatatattctccagttcccacaccaaccttacaagygttgttgtctttcccccatcttacagtgaagagactgaaaggaagacaagtttagtgttttgtgccagtcctcatagctggtcagtggtagagccaggat

SEQ ID NO: 133395 - DNA, 201 bp, Homo sapiens
ctcccaaagtgctaggattataggtgtgagccattgtgctggcctttttatttttatttgtatttatttatttgatacagagtctcactctgttgcccagrctggagtgcagtggtgcaatcttgactcactgcaacctctgcctcccaggttcaagagattctcctgcctcagccttctgagtagctgggattacaggca

SEQ ID NO: 133396 - DNA, 201 bp, Homo sapiens
ccagtctcaagcaattctcttgccgcagcttcctgagtagctggaattacaggcgcctgccatcacacctggctaatttttgtatttttagtagagatggrgtttcatcatgttggcaggctagtctcaaacttctgacctcagatgatccacccacctcagcttcccaaagtgctgggattacaagcatgagccactgca

SEQ ID NO: 133397 - DNA, 201 bp, Homo sapiens
tacattatttctttcctttttttgtttgtctaagagatacgatcttgtttgccatattttctgtgtgtgtgtgtgtgtgtgtgtgtgtgtgtgtgtgtgtgtgtgtttaatagtatccatcctaatggatgtgaagtggtatctcattgtgggtttttttttgttttttgttttgtttttttgagacggagtctcgctctg

SEQ ID NO: 133398 - DNA, 201 bp, Homo sapiens
caccatgcccagctagtttttgtatttttattagagacagggtttcaccatgttggacaggctggtctcaaactcctgacctcagatgatccgcctgcctyggcctcccaaagtgctgggattacaggtgtgaaccactgcgcccagctgtttttgtttttatttttaaattgagacagggtcttgccctgtacccaggct

SEQ ID NO: 133399 - DNA, 201 bp, Homo sapiens
aggctggagtgcaatggcacaatctctgctcactgcaacctccacctcttgggttcaggcgattctcctgcctcagcctcctgagtagctgggattacagkcttgaaccaccatgcctggctaatttttttgtatttttagtagagacagggtttcgccatgtcagtcaggcttgtctcaaactcctgacctcaggtgatc

SEQ ID NO: 133400 - DNA, 201 bp, Homo sapiens
tcaaggagcttataatgaatccatatttaaatttcccagattatttcaaagataggttttgtttgtttgttttttgttttttttgagatggatttttgctyttgttgcccaggctggagtgcaatggcacaatctctgctcactgcaacctccacctcttgggttcaggcgattctcctgcctcagcctcctgagtagctg

SEQ ID NO: 133401 - DNA, 201 bp, Homo sapiens
gtcacctgggatggagtgcaatggcacgatctcggctcactgcaacttccgcctcccgggatcaagcgattctcctgcctcagcctcctgagtaaatgggrttacaggcacccgttaccacactcagctaattttttgtatttttagtagaaacaggatttcaccatgttggccaggctggtcttgaacccctgaccttgt

SEQ ID NO: 133402 - DNA, 201 bp, Homo sapiens
atattctggatattaatatcttgtcagatatatatgatttgcaaatattacctcccattttgttggttgccttttcattctcttgataatgtcttttgctrtacagaagttttaagttttggtgaagttcagtttacctttttttcttaatgttactattttgagcctttagaatgaaaagtttacctatcattattatta

SEQ ID NO: 133403 - DNA, 201 bp, Homo sapiens
aaatggagtcttgctctgtcatccaggccggagtgcagtggcatcatcttggcttactgcaacttccgtctctcagtttcaagcaattctcctgcctcagsctcctgagtagctgggattacaggcagccatcacgcccagctaatttttgtatttttagtagagacagggtttcgccatgttggccaggctggtctcgaa

SEQ ID NO: 133404 - DNA, 201 bp, Homo sapiens
aaaataaagatgtttttagtgtagaaacaaacaaacaaacaaaaagagatgtttttcgtggtacagtattcatgactttgtttttgtttttgtctgcttcrttacaggttcatgtcagggctggtctttttcatggtactgagctcctgtgtaaaaccatcgtaagctcagaggtatcagggaaaaatgatcatatttgga

SEQ ID NO: 133405 - DNA, 201 bp, Homo sapiens
agagcttctgcagagccaaagaacctatcaacagagtaaacagcctacagaatgggagaaaatatttgcaaactatgcatcagacaaagatctattagccagtatctataaggaatttaaacaaatttataagaaaaaaaacattaaaagtgggcaaatgacatgaacagacacttttcaaaagaagacatacatgcggcc

SEQ ID NO: 133406 - DNA, 201 bp, Homo sapiens
cccacactccttaggggcccaagaaggcccactctgccctctcaggctcggaaatgcctgctcccactgtctggcttttccctattgtcggcacccagtcygaccttggagcagagtcagggccaagcccaagtgttgtcacatcccagccaggtgtgcacatgctcagggtagtgctgacacgccagccccctgccacct

SEQ ID NO: 133407 - DNA, 201 bp, Homo sapiens
gcacccagcccagctggaattggctcagagctggaaggaacttgccattactaggaaaaggtaagggggagattcccaatagtccacattcccaccagggwtgcctgcagtcctagccaccagagagccccttggccctaacaggccctgagcctagtataggttgctgcttggagttcacaaaactgcattgttcaagaa

SEQ ID NO: 133408 - DNA, 201 bp, Homo sapiens
ccaccgtgcccagctaatttttgtatttttagtagagaccgagttttaccatgttggccaggatggtcttgatctcttgacctcatgatccgcctgcctcrgcctcccaaagtgctgggattacaggcatgagccaccgtgcccagcctgtaaactacttttatttgtattcttcacacagtttacaaggtgaacatgctt

SEQ ID NO: 133409 - DNA, 201 bp, Homo sapiens
aaataaagtttggagaaaaatcacctgtcaagtgctggttaactaaatttcttaggaccctgtaatccttaagcatgcagtttattcagatgtcaaatatytatgttgaatttgaatcaatgtggtgtgtgtgtgtgtacatatgtatgtgtatatatttttatttatatgtatataagaataatttttttcctttagttg

SEQ ID NO: 133410 - DNA, 201 bp, Homo sapiens
agtgattcttttgcctcagcctcctgagtagctgggactacaggcacgtgccaccacgcctggctagtttttgtatttttagtagagacggggttttaccrtgttagccaggatggtctcgatctccagaccttgtgaaccacccaccttggcctcccaaagtgctgggattacaggcgtgagccactgcgcccggcccgg

SEQ ID NO: 133411 - DNA, 201 bp, Homo sapiens
tacaggcgtgagccactgcgcctagcactatttttaattttaatttaatttaattttattttattttattttatttatttgagacggagtctcactctgtygcccagcctggagttcacacctcctgggttcacgccgttctcctgtctcagcctccccagtagctgggaccataggtgcccgccaccacgcctggctaat

SEQ ID NO: 133412 - DNA, 201 bp, Homo sapiens
tcttttcctagccctcaatctgattgagggaacatgacatatataataaaaataatcagcactaaaggcaacatgtggtgtagtgcttaattgtgtttttwaaaaaaaccctcgagtttatgaggagatcaaggtcagtgtgagctggactagtaagagaaggcatcttggaagccagaccttttttttttttttgagaca

SEQ ID NO: 133413 - DNA, 201 bp, Homo sapiens
caagagctcaaactccattttgatacatttgtactttacttgcttaaatgaatgagctcttgtgatttaagtaatcagtatttcagatgatcagaattatracccgatttgaagttttcctttactgtttaataagttagcctactgatagtttttttattttaaaaaaattttttcattattattttttgagacagagcc

SEQ ID NO: 133414 - DNA, 201 bp, Homo sapiens
acagagcaagactccgtctcaaaaaaagaaaaaaaaaattaggcgtgtgtggtggcgggtgcctgtaatcccagctactctggaggttgaggcaagagaaytgcttgaacctgggaggtggaggttgccatgagctgagatggtgccactgcactccagcctgggcaacagaatgagactgtctcaaaaaaaaattttttt

SEQ ID NO: 133415 - DNA, 201 bp, Homo sapiens
ggtcttgaactcctgacctcaggtgatctggccgcctcggcctcccaaagtgctgggattacaggcgtgagccactgcgcctagcactatttttaattttwatttaatttaattttattttattttattttatttatttgagacggagtctcactctgttgcccagcctggagttcacacctcctgggttcacgccgttct

SEQ ID NO: 133416 - DNA, 201 bp, Homo sapiens
tggagttcacacctcctgggttcacgccgttctcctgtctcagcctccccagtagctgggaccataggtgcccgccaccacgcctggctaattttttgtattttttttttagtagagacggggtttcaccgtgttagtcagggcggtcttgatctcctgacctcgtgatccgcccgccttggcctcccaaagtgctgggac

SEQ ID NO: 133417 - DNA, 201 bp, Homo sapiens
ttttttttttcttgagacagggtctcactatgtcacccaggctggagtgcagtggcgtactctcggctcactgcaacctctgtctcctgggcttaggtggycctccgacctcagcctcctgaatagctggggccacaggcatgcaccaccacacgcagctaatttttgtttgtttgtttgtttgttttaagagacggaggt

SEQ ID NO: 133418 - DNA, 201 bp, Homo sapiens
ttttgatgggtctcaaaattctgtgaccgatttttggtccagttgtttccattaaaaactactgattttaaaagttaataatttaaaactgccacatgccaaaaaaaaaaaaaaaaaaaaaacccaaatggtccataacacattctccttttcttctgaggggtttacagtgcattgttatcattaaccagtcatttacta

SEQ ID NO: 133419 - DNA, 201 bp, Homo sapiens
cgagagaattccaggatggagatggctgcatggctgtgtgcaggctggaggcagtgaataatagggagtcatgaagtcaggacctccatgattttattctstggtcaaactgaatcactaaatatgagtttccatcttgactattattttaaatagagacagggtcttactatgttacccaggctggacttgaactcctag

SEQ ID NO: 133420 - DNA, 201 bp, Homo sapiens
cttgactagtatttttagtaaaaattacaatttttggtggtgttaacttggcataatactatgaacctgacttcctctctgagaaaatgtatgataaaaartaataaatgaacacattagttctgcatgtgtcagctctagaattgttacatttaacccagtaggggcaaacaagaagcaaagaaactacaaataatctac

SEQ ID NO: 133421 - DNA, 201 bp, Homo sapiens
ttaattaattaatgctcttctctaccagcatattttaattattctactttttttttgagatagagtttcactcttgttgcccaggctagagtgcaatggcrtgatctcagctcaccacaacctctgtctccttggttgcagtgattctcctgcctcagcctcccaagtagctgggattacaggcatgcgccaccaggcccg

SEQ ID NO: 133422 - DNA, 201 bp, Homo sapiens
tgtctccttggttgcagtgattctcctgcctcagcctcccaagtagctgggattacaggcatgcgccaccaggcccggctaatttttttttgtttttgttkttgtgttttttgagatggagtctcgctgtcgcccaggctggagtgcagtggcacgatctcggctcactgcaggctccgccccccggggttcatgccattc

SEQ ID NO: 133423 - DNA, 201 bp, Homo sapiens
tactgtggtgagaaacagtactttaaaaagcatgttgacaatacctgaattctgtgatcaatcttagcatggctaaaagtaagaccactagacattatatytcctcaaggagcttataatgaatccatatttaaatttcccagattatttcaaagataggttttgtttgtttgttttttgttttttttgagatggattttt

SEQ ID NO: 133424 - DNA, 201 bp, Homo sapiens
acggggtttcactgtgttagccaggatggtctcgatctccagacctcgtgatccgcccgcctcggcctcccaaagtgctgggattccaggcgtgagccacygcgcccggccttttttttttgtatttttagtagagacggggtttctccatgttggtcaggctggtcttgaactcccgacctccagcgatccacctgcctt

SEQ ID NO: 133425 - DNA, 201 bp, Homo sapiens
tacaccagatcttcaaaggctgctctgaagtgatttgcttaattttaggactagtgccttaataacatgtgtagtgactgtgtagttttgttcgtgtttayggaagtttattggttaagagttcctgagtatagagacctttccatatactgtggtgagaaacagtactttaaaaagcatgttgacaatacctgaattctg

SEQ ID NO: 133426 - DNA, 201 bp, Homo sapiens
gctagaactagaaaagagcttttattattatttttttctgagatggagttttgctcttattgcccacgctggagtgcaatggtgcaatctcagctcgctgyaacctccgcctcctgggttcaagcgattctcctgcctcagccccccaagtagctgggactataggagcacaccaccacgtccagctaatttttgtatttt

SEQ ID NO: 133427 - DNA, 201 bp, Homo sapiens
gggcacggtggctcacgcctataatcccagtactttgggatgcctaggtgggtagattacctgaggtcaggaggtccgagaccagcctggccaacatggcraaaacccatctctactaaaactataaaaattagctgggcgtggtggcacacacctgtaatcccaggtactcaggagactgaggcagtagaatcacttgaa

SEQ ID NO: 133428 - DNA, 201 bp, Homo sapiens
ttgcctgttcactctgatggtagtttcttttgctgtgcagaagctctttagtttaattagatcccatttgtcaattttggcttttgttgccattgcttttrgtgttttagacatgaagtccttgcccatgcctatgtcctgaatggtaatgcctaagttttcttctagggtttttatggttttaggtctaacgtttaagtc

SEQ ID NO: 133429 - DNA, 201 bp, Homo sapiens
gcctcaagggatcctctgcctcgccctctcacagtactcgaattacaggcataagccaccactcccggccttagattcttaaagctttctttccttgctartgttttatccaaaacatttttaatcccttgagagtattcccatagtttccagaagaaaaaggtatgggttggttttagtagctacgttcagtcaggaaac

SEQ ID NO: 133430 - DNA, 201 bp, Homo sapiens
tctgattataggaagcttttgggggaatttgcctgtcagattattgtgctggttcagaaattcccagataggagaaacagaatgctagaaatttaaaatarttattatattttattccaataatatactaccttttacctgtttcagaacattctctgaaactattaagacagttgataggaagatgctgaaaagacatct

SEQ ID NO: 133431 - DNA, 201 bp, Homo sapiens
cagcagtgctgttgatcgtgtaatcacaatttttttaagctacttttcaatactttgttagattatttagattctttttttttttttttttttttgaggtrgagtctcactctgtcaccaacattggagtgcagtagcatgatctcagctcactgcaatgtccgcttcccaggctcaagtgatcctcctacctcagcctcc

SEQ ID NO: 133432 - DNA, 201 bp, Homo sapiens
tcaaggagggatacagaaagaggctgaaacagaactagttggcagcttatatatggaacagttaggcactcaagtccccttccctatgccaagaaggagayagatttattctctgaagaaactggttctgactcaagcacacttatttctacagagactacaagaaagggtcccatattaaaaatggagatggagtgaaag

SEQ ID NO: 133433 - DNA, 201 bp, Homo sapiens
aattagctgggcatggtggtacacacctgtaatcccagctacttgggaggctgaggcaggagaatcacttgaaccctggaggcggaggttgcagtgagccragattgcaccactgcactccagcctggcaacagagcaagacgccgtctcaaaaaaacaaaaaaaacaaaaaaacaaaagttagttttctggtgggctcac

SEQ ID NO: 133434 - DNA, 201 bp, Homo sapiens
aattagccaggcgtggtggtgggcacctgtaatcccagctgctcgggagtctgaggcaagagaatcacctgaacccgggagtcggagtttgcagtgagccragattgcaccactgcactccagcctgggtgacagagtgggactccatctcaaaaaaaaaaaaaatttctgtagagatgggggtctcactatgttgtccag

SEQ ID NO: 133435 - DNA, 201 bp, Homo sapiens
catgaaattgtagtcagtctttggtcaaaactaactaaaatgttcccaacccctagcatgatctagcaaagccatggtctcttctaagtactgtgaacatkagtctactcacagccccaccgaaacacagctcccaggacgtttgaatatctaaggcccagttatttaatgtctttgaaggcagctctctcagcccagccc

SEQ ID NO: 133436 - DNA, 201 bp, Homo sapiens
tgggaggctgagataggaggatcatttgagctccagaggttgacgatgcagtgaactatgattacactactgcattccagcctgggtggcagagtgggacyctgtcccaaaaaaaattaaaaaaaaaaaaatcaccctctttatctgcctcaaattaacatgttttaacctctacatttgtttatgaaaataaaataattc

SEQ ID NO: 133437 - DNA, 201 bp, Homo sapiens
aatacttttaaatacaaaaacaagtggaaagtctttcccacctatatccctcagctaccttgtttctattcacaccattcctccaatgctccaccccaccyaggaaactattgttcaatttctcatgtaaccttctagagtttctttatataaataaagacaataaaaatacagattcctggccaggcacagtggctcacg

SEQ ID NO: 133438 - DNA, 201 bp, Homo sapiens
cacactcttttaaggtcaatcccaaatcttgaggtaccttctgtacattactgttttagtacttgtaacagtgccatgtttgcatgaatgaaaatacatawtgctcattttcatttttctatgacgttccaaaatactcttttgatacctttcatgtcagcttagatcatttataagacattgatgtgttaggactccctg

SEQ ID NO: 133439 - DNA, 201 bp, Homo sapiens
gtgtcgtgaacttggctgaacctcccaggttccagctgttctcctgcctcagcctcctgagaagctggaactacaggtgcatgccaccatgcccggctaayttttgtattttttagtagagacagggcttcaccgtattggccaggctggtctcgaactcctgatctgcccttcctgaccttgtgatctgcctgcctcggc

SEQ ID NO: 133440 - DNA, 201 bp, Homo sapiens
tgaaaccactccaattctaggcaaccactaattaatggtctatagatgtaccttttttggacattttatataaatggaaacacaatatggggcctttgtcrctggcttctttctctaagcgtaatggcttcaaagtgtattcatgttttaacagtaaccagtatttcatttcattgtcaaacaatattcttttgcaaggat

SEQ ID NO: 133441 - DNA, 201 bp, Homo sapiens
attttgagacaaactctcactcttgtccccaggctagagtacaatggcatgatcttggctcactgcaacctctggcctcctgggttcaagtgattctcctrcctcagcctcctgagtagctgggattacaggtgcttgccaccatgcccggttaatttttgtatttttagtagagatggggtttcaccatgttggccaggc

SEQ ID NO: 133442 - DNA, 201 bp, Homo sapiens
ttattagtcatgtgatcttgggcaagttgtcttttctttctgtccctccatgtcctcttaaaaatgggagaaatgggattatacctcatcatctcatcatrtgttgattcatgtagagctgttagtatagtatccacattgagaaagctttctgctcctttccctgtccccaacttggctcttaattcagcctttttcagc

SEQ ID NO: 133443 - DNA, 201 bp, Homo sapiens
ccacctgagcctccagagtagctgggactgcaggaatacaccaccacaccagaccaatttttgtatttttttgtatatatatatatgtatatatatatatattttttttttttttttttttttttgagacggagtctcgctctgttgcccaggctggagtgcagtggcgcgatcacggctcactgcaagctccgcctccta

SEQ ID NO: 133444 - DNA, 201 bp, Homo sapiens
tgaccaatgtggtgaaaccccatctctactaaaaatacaaaaattagccaggagtggtggcgcgtgcctgtagtcccagctacttgggaggctgaggcagragaatcgcttgaacccaggaggcggaggttgcagtgagccaagatcgcaccatttgcactccagcctgggtgacagcgagactctgtccccccaaaaaaa

SEQ ID NO: 133445 - DNA, 201 bp, Homo sapiens
ctctactaaaaatacaaaaattagccaggagtggtggcgcgtgcctgtagtcccagctacttgggaggctgaggcaggagaatcgcttgaacccaggaggyggaggttgcagtgagccaagatcgcaccatttgcactccagcctgggtgacagcgagactctgtccccccaaaaaaaaaaaaacctctcattctaccttt

SEQ ID NO: 133446 - DNA, 201 bp, Homo sapiens
gcttgaacccaggaggcggaggttgcagtgagccaagatcgcaccatttgcactccagcctgggtgacagcgagactctgtccccccaaaaaaaaaaaaamctctcattctacctttttatagccccagtcacctccctcccaccctttctaacctctggcaaccactaatctgttttttatgattttgtcgtttcgagaa

SEQ ID NO: 133447 - DNA, 201 bp, Homo sapiens
gacagtgtcaggacctgctctgcagaaattttttctttttctgtgaccttgtacctcctcctgaggtttgctgatctgtctgcttctttccacagggattracttgcatggtttccaagacaatgaaaatcaaaccaggatacatgggaacggctgcttcctgttatgatgtacaggtttgctcgggacactgaggaggga

SEQ ID NO: 133448 - DNA, 201 bp, Homo sapiens
ttaataattgcatagacagccaagttgaaggatggaggatgtttcttaagtccacctccccaggaaatcagagactagagtttttcaaggatgctttggcwtccaaggggctaaggaatagtaaatgctgattggtttggctggggatgaaaacatgggttgaagctgtcttcttgtgttgagtcaactcctcagagatca

SEQ ID NO: 133449 - DNA, 201 bp, Homo sapiens
tcccagaaaagccaaacactgaaaacagtaggagttgcagtagagaagagtttaataattgcatagacagccaagttgaaggatggaggatgtttcttaartccacctccccaggaaatcagagactagagtttttcaaggatgctttggcatccaaggggctaaggaatagtaaatgctgattggtttggctggggatga

SEQ ID NO: 133450 - DNA, 201 bp, Homo sapiens
cccagtctaggcctgagtggactttggttccagggaggctgagggcaaacatttatttctcttcttcagttacaagttcccccatctacagaactgcgtcrctgtaggggagtcccttcttccagaaactctggagaactggagggcccagacaggactggacatccgagaatcctatggccagacagaaacggtacctgt

SEQ ID NO: 133451 - DNA, 201 bp, Homo sapiens
gctatattctcacatggttgagagagacagtgctggtatatcttcctttttacaaataaaggcactcatgctatcactggggcacctgcttcattaccttkcataattacccctaaaagccctgcctccaaataccatcaagttgagggttagagctttaatatagggatttaggtggggacacaacatccaattcatatc

SEQ ID NO: 133452 - DNA, 201 bp, Homo sapiens
tgtggtgagaaactgtgctcctcctcctctgttccccagtgaggatgggagcactaaacgggatgagggaggacaaatgttctgaaacttccaagaggcaytagatgtggagacaaagactgtccagttttcaagaatgtatgctttgccagtggaagaaaagtggctattcagccttgccatcctcagcctatcactgtg

SEQ ID NO: 133453 - DNA, 201 bp, Homo sapiens
gtctaggcctgagtggactttggttccagggaggctgagggcaaacatttatttctcttcttcagttacaagttcccccatctacagaactgcgtcactgkaggggagtcccttcttccagaaactctggagaactggagggcccagacaggactggacatccgagaatcctatggccagacagaaacggtacctgttccc

SEQ ID NO: 133454 - DNA, 201 bp, Homo sapiens
ttcatctcctgttgatacaggatgtgtggatagaacaacttttcttcccccttcctacttatacatagacatatgcctataaacctgcaggcagatacacrcacacctctgcacacacacctccctttcctcccctacaccttagtgtcccacgcatcctaagcatgcacccacctatatgtacatgtgttttgtctgtgt

SEQ ID NO: 133455 - DNA, 201 bp, Homo sapiens
tagttacaagctgagcttctagtaaggcaaagcaataaggaatatgggatcattttcatagcttatatctgtgtatcaagcacacttgaaggaaattattkcatgatactcacatttgtcattttttctagaccttttgcttaaaccattgccatggtttgaatatttgtgccccccaaaactcatgatgaaacttgtaaa

SEQ ID NO: 133456 - DNA, 201 bp, Homo sapiens
tcaggcctataggcatcttctctggctatgtggtgagaaactgtgctcctcctcctctgttccccagtgaggatgggagcactaaacgggatgagggaggmcaaatgttctgaaacttccaagaggcactagatgtggagacaaagactgtccagttttcaagaatgtatgctttgccagtggaagaaaagtggctattca

SEQ ID NO: 133457 - DNA, 201 bp, Homo sapiens
acaacatccaattcatatcagacacccctgtaaacaccaccagataaagacatgaaacattcccaccactgcagaaggtgttcataccccttctctgacarcatctgccccccataagttaatcattcatttgatacctatcaccatagattaattttatctcttcttggaatttcatgtaaatggagccaaattatatgt

SEQ ID NO: 133458 - DNA, 201 bp, Homo sapiens
tactgctatattctcacatggttgagagagacagtgctggtatatcttcctttttacaaataaaggcactcatgctatcactggggcacctgcttcattaycttgcataattacccctaaaagccctgcctccaaataccatcaagttgagggttagagctttaatatagggatttaggtggggacacaacatccaattca

SEQ ID NO: 133459 - DNA, 201 bp, Homo sapiens
ctttaagtctgattaaaaaaaaaagattacaacctgttctgtctaaagcctagtgccagtacctaaaagcttcctctgcaaataagaacttgggtctccayaattatttatcttaactaaggcattcctttctattgatcccaggtctttagataaactcaaccaattgtcaaccagaaaaatttaaatctacctataagc

SEQ ID NO: 133460 - DNA, 201 bp, Homo sapiens
ttctggttgttgttttcagtctccactagagcaagagggtctttcatttgaccaattcagcaatctcatgatgccattgaagccatctcctgctgtgtgcmtcattcttccaatctgcttctttctccagatcatagatgataagggcaacgtcctgccccccggcacagaaggagacattggcatcagggtcaaacccat

SEQ ID NO: 133461 - DNA, 201 bp, Homo sapiens
tatcatatgagagttttgaatacagcaaactcctgtagaaaattttttttgaggggtgagagtgggtgaggagaattgtatgtgtcttagactatcaacartgtgacattagcaattcaatttcttttctttgtctcagtagggcccttaagactctgacaacccagggaatcctaggtttcattcactcccttgtcctta

SEQ ID NO: 133462 - DNA, 201 bp, Homo sapiens
ttggtaaatcagatatggtagtcagaaaattcctctgtgatggggaaacattttagcagagaccaaagtttatcaaacatgtcaagcactgtacaaagctrcttagactgaagtgaggaatgggaagaagaacccaccatgactttactgcacctcctgacatatcttcttggaactcttgaggtctcatgtgcacaatgt

SEQ ID NO: 133463 - DNA, 201 bp, Homo sapiens
gccaagcaaagggaacagcatatgtgaagatgtaattatctgatgatttcttcttgtccacttcccagaaaagccaaacactgaaaacagtaggagttgcrgtagagaagagtttaataattgcatagacagccaagttgaaggatggaggatgtttcttaagtccacctccccaggaaatcagagactagagtttttcaa

SEQ ID NO: 133464 - DNA, 201 bp, Homo sapiens
ctttaattatcatatgagagttttgaatacagcaaactcctgtagaaaattttttttgaggggtgagagtgggtgaggagaattgtatgtgtcttagactrtcaacaatgtgacattagcaattcaatttcttttctttgtctcagtagggcccttaagactctgacaacccagggaatcctaggtttcattcactccctt

SEQ ID NO: 133465 - DNA, 201 bp, Homo sapiens
ctccctcacatacattcatgcctatctatctgaatctctcgcacacagagagccccatgaagccatttgcatcatcaaagcacccagaaacccagtctagkcctgagtggactttggttccagggaggctgagggcaaacatttatttctcttcttcagttacaagttcccccatctacagaactgcgtcactgtagggga

SEQ ID NO: 133466 - DNA, 201 bp, Homo sapiens
tgccaagcaaagggaacagcatatgtgaagatgtaattatctgatgatttcttcttgtccacttcccagaaaagccaaacactgaaaacagtaggagttgyagtagagaagagtttaataattgcatagacagccaagttgaaggatggaggatgtttcttaagtccacctccccaggaaatcagagactagagtttttca

SEQ ID NO: 133467 - DNA, 201 bp, Homo sapiens
gctggaaacaatctattataaagctggctacagaaagttaaggaacttaaccaagacagctgctgtgctcaggcagctgatcttcccttagttgctggggrgtgatctactcctaggggtgtgttaacgagggcaagtcttaaactggcaggaacagacatccaggatttgacaaaaatgtttcaaattagccttagactt

SEQ ID NO: 133468 - DNA, 201 bp, Homo sapiens
gcagagtaaatttgagttttgatctgcccgatttctaagtccacaggtgaggcaggtctcaaagataagaggaggctattactttatctgagctcctagarccaaaagcatctccccaggctcatctgggccagtctcaataaaaggattcacctaaactattccaggcagatagatcagagatctgagtttaagactctt

SEQ ID NO: 133469 - DNA, 201 bp, Homo sapiens
aataagctgtcagtatctgttttatgggcgaaagcactgaagcacagagtttaagtagttcaaagtcagctagtaaggtagcagagtaaatttgagttttsatctgcccgatttctaagtccacaggtgaggcaggtctcaaagataagaggaggctattactttatctgagctcctagagccaaaagcatctccccaggc

SEQ ID NO: 133470 - DNA, 201 bp, Homo sapiens
accatttgctaagcccctttcttagtatcttatttcattcctataaaaatcctgtgaaataagctgtcagtatctgttttatgggcgaaagcactgaagcmcagagtttaagtagttcaaagtcagctagtaaggtagcagagtaaatttgagttttgatctgcccgatttctaagtccacaggtgaggcaggtctcaaag

SEQ ID NO: 133471 - DNA, 201 bp, Homo sapiens
tttcatcaacaaactcaatccccagtgtaacagtagtaagcggtggggcatttaagagatgattgggcctcatgagggattaatggattaatgggttatcmtgttagtgggttagttttggagagtgggtctgttatataaaaagccagttttgctctacctcgtgagcccctttacaatgtgatgccccgaccctccttg

SEQ ID NO: 133472 - DNA, 201 bp, Homo sapiens
caagcacttaggtgcaggtgctttattgaggaggtgcagaaagaacagcatgggactaggaagagtgaagctgggaagaaataaaagctaacacaagggtatttttttttttttttttttttttcaaatcattgcaaggactaaatggggcttgatctgcctggaccttctgagcagcatatagaatgcctcccaggattg

SEQ ID NO: 133473 - DNA, 201 bp, Homo sapiens
actcacttttaaacaaccagatcttatgatctcatttatcaccaaggggatggtgctaagccattcatgagggtcccacccccatgatccaatcacctccyaccaagccccacctctgacattggggattgcatttcaacatgagacttggagaggacaaatattcagacaatatcatgtatctagaatagtcaaattcat

SEQ ID NO: 133474 - DNA, 201 bp, Homo sapiens
gttagcttggactatgtccagggatgagcaaagatagatagcttgtgaggttggaaacaagatgaagtcagctatgtcagatttccctcagtgtcataatwtttccaaaggcagtttcaaagccacagaggagggaaacttgaaaattataaaagaacctaaaaggatatctatgtgcctgaagtccaggccataaaagaa

SEQ ID NO: 133475 - DNA, 201 bp, Homo sapiens
atattctggggacaatgggctgagcatgagaaagcaatgggtaaagagaaagacatgaatgcagccaggaattagaaactatcagaggcgaccaaaccaaytgcaggaacttggaagcctgtggaaagagagaacaagccagagagaaaggtgacatactgaaattatagccagaaggaaaggagaacccagaggaagaga

SEQ ID NO: 133476 - DNA, 201 bp, Homo sapiens
aggtcatgagggaaaacccaagagatggctgatataccaagtttctgggctcttctttccacctcttgtatctctaagagaggctgatcaagggcagaggwctttccatgtgttgatagcatggaaagaccttgatagtccttccaaaagccgatagcaagactggctggattaatgattttctctgtcaacatgtctgaa

SEQ ID NO: 133477 - DNA, 201 bp, Homo sapiens
catccaggatttgacaaaaatgtttcaaattagccttagactttttcactacaataatatgtattcatttccctgttatttgtgtcttcagggtgcatgakagttgtggggctcatttaacctgaatcagacatagtaaacaagctagggttttcatccagacctctacaactccatagctcacaattgtaaccactgtgc

SEQ ID NO: 133478 - DNA, 201 bp, Homo sapiens
atggtttccaagacaatgaaaatcaaaccaggatacatgggaacggctgcttcctgttatgatgtacaggtttgctcgggacactgaggagggaggaagtwaggggaaacactgattttcagtgatttatgttttccattgtttattgagtcaaaaataatagaaagtactgatattaagataacataagaaaaaaaggag

SEQ ID NO: 133479 - DNA, 201 bp, Homo sapiens
cctctcttgtgaggtgggtccatcaacttgcccttttcagcacagtgggtggtgggaaaagatgggtcactttgatatctggtgtccagtctagctctgaraaaatgacaatctgtgtctctgtcagtgaggcatccaccactcatcactgtgtggagactggaagccaggaagcatctgccatctacttcactagtggga

SEQ ID NO: 133480 - DNA, 201 bp, Homo sapiens
ccaagatggatgctgggtaagctgagctctttctctctacagagaattacatgagttttggagttagaaggagaatgagacccaattatatattaagtcakgtcaaccggggtcccaccttctgaacattcatctcctgttgatacaggatgtgtggatagaacaacttttcttcccccttcctacttatacatagacata

SEQ ID NO: 133481 - DNA, 201 bp, Homo sapiens
ccccctgactccctcacatacattcatgcctatctatctgaatctctcgcacacagagagccccatgaagccatttgcatcatcaaagcacccagaaaccmagtctaggcctgagtggactttggttccagggaggctgagggcaaacatttatttctcttcttcagttacaagttcccccatctacagaactgcgtcact

SEQ ID NO: 133482 - DNA, 201 bp, Homo sapiens
tccccatttgatagaaaaggaaacagactcagaagcgtctgtggggcagactcctaaggccacagaggctccatgatgcccatgagaaagtcaatccagtrgccaagaaacctggcttctggtctcagttctaccttctgtaatggctgtttagcttcagactaacctcttgatgtctctggtcatcagtatccctatatt

SEQ ID NO: 133483 - DNA, 201 bp, Homo sapiens
catgatactcacatttgtcattttttctagaccttttgcttaaaccattgccatggtttgaatatttgtgccccccaaaactcatgatgaaacttgtaaamcaaaaataaaatcctaaggccccatcccgccagccatctgaatggacttcctccttagccagggttcttttaaaatttaacctgagagactgtttcaggc

SEQ ID NO: 133484 - DNA, 201 bp, Homo sapiens
accaacttggcaatcccaagacttggaatttatcctacctgcttgtgtaccaatgccccctgatcaacagggcttctctttcctcaggctggcaagcgacycccaagcccagccctgtggtgggtgaatgggaaggggaagaaattaatgtggaatttcagagaactgagtgaaaacagccagcaggcagccaacgtcctc

SEQ ID NO: 133485 - DNA, 201 bp, Homo sapiens
tggtcacaactatttaaccagtgcctaagacgttccgaacttttcctcatctttctgtctcttctaagccctccaaactcttcgatttcttcccatgaccwagttccagagttagttctacattttcaggtatctttacagcaatatcccacttctggtaccaattttcggtctcagactgttcttgtgttgctgtaaagg

SEQ ID NO: 133486 - DNA, 201 bp, Homo sapiens
cttgtgtaccaatgccccctgatcaacagggcttctctttcctcaggctggcaagcgactcccaagcccagccctgtggtgggtgaatgggaaggggaagraattaatgtggaatttcagagaactgagtgaaaacagccagcaggcagccaacgtcctctcgggagcctgtggcctgcagcgtggggatcgtgtggcagt

SEQ ID NO: 133487 - DNA, 201 bp, Homo sapiens
aagatgaagtcagctatgtcagatttccctcagtgtcataatttttccaaaggcagtttcaaagccacagaggagggaaacttgaaaattataaaagaacytaaaaggatatctatgtgcctgaagtccaggccataaaagaaagtagtggcaatagaatgaacatgtagaggtggccaggtgctaaactggcagtgcctt

SEQ ID NO: 133488 - DNA, 201 bp, Homo sapiens
attgaggaggtgcagaaagaacagcatgggactaggaagagtgaagctgggaagaaataaaagctaacacaagggtatttttttttttttttttttttttcaaatcattgcaaggactaaatggggcttgatctgcctggaccttctgagcagcatatagaatgcctcccaggattgtcctctaaaggattgaaaagcact

SEQ ID NO: 133489 - DNA, 201 bp, Homo sapiens
ataaaatcctaaggccccatcccgccagccatctgaatggacttcctccttagccagggttcttttaaaatttaacctgagagactgtttcaggccatgayaggaagtgggagtgggacatgcctcattatacctctctggtattaacatcaatacagactttaagtctgattaaaaaaaaaagattacaacctgttctgt

SEQ ID NO: 133490 - DNA, 201 bp, Homo sapiens
tttaggtaaggatcttttcagttcaattaatgccaacctgcagcatgatttttaatgatgtagtaaatagtatatatccactgctgtttatgccttttatyggaccaagggatgatgtcccagttttcactagtaaaaatacactataatgaatgtgtagtagctaaagttttattgctttctcttgttgttttttgagaa

SEQ ID NO: 133491 - DNA, 201 bp, Homo sapiens
ctcatatattccataaatagatacacctatgtacccacaaaaattcaaaataaaaataaaagtagtatattttaggccttacagattgcatattggtgatyccatatagtttgaaagggctttgggtatccatagtgtcgtattaaaatgtggttccccctaaaagagattataatgtgattgttaggtcctcttcctggg

SEQ ID NO: 133492 - DNA, 201 bp, Homo sapiens
aagttgaaggatggaggatgtttcttaagtccacctccccaggaaatcagagactagagtttttcaaggatgctttggcatccaaggggctaaggaatagkaaatgctgattggtttggctggggatgaaaacatgggttgaagctgtcttcttgtgttgagtcaactcctcagagatcacagaactagttgagttagttt

SEQ ID NO: 133493 - DNA, 201 bp, Homo sapiens
agagacagtgctggtatatcttcctttttacaaataaaggcactcatgctatcactggggcacctgcttcattaccttgcataattacccctaaaagcccygcctccaaataccatcaagttgagggttagagctttaatatagggatttaggtggggacacaacatccaattcatatcagacacccctgtaaacaccacc

SEQ ID NO: 133494 - DNA, 201 bp, Homo sapiens
caagacttgctcaagctcacaaccattagaaagtggacagagaagaccccaagggcatgccttctgatccctgagagaattgattaataaactaaataaayaataaatcaaataataatagtttctaccatttattgaatgcatatcatgaggcaagcattgtcctataaacacatttaatctttaaactttaaactcatt

SEQ ID NO: 133495 - DNA, 201 bp, Homo sapiens
cctcctcctctgttccccagtgaggatgggagcactaaacgggatgagggaggacaaatgttctgaaacttccaagaggcactagatgtggagacaaagastgtccagttttcaagaatgtatgctttgccagtggaagaaaagtggctattcagccttgccatcctcagcctatcactgtgatctcattggaagacttat

SEQ ID NO: 133496 - DNA, 201 bp, Homo sapiens
gagaaactgtgctcctcctcctctgttccccagtgaggatgggagcactaaacgggatgagggaggacaaatgttctgaaacttccaagaggcactagatrtggagacaaagactgtccagttttcaagaatgtatgctttgccagtggaagaaaagtggctattcagccttgccatcctcagcctatcactgtgatctca

SEQ ID NO: 133497 - DNA, 201 bp, Homo sapiens
tgatggtacagccattaagtaagacccacagactgcagctatgcattatcctgtagcaacaaagcaatgaaaatgacctcattttgcttatgaagatacaycctatgttggactctatgatagagggattgggttatttccctgctgtgcccccagatctctaatggcccatccagacatctatttggctgcagcaaaggt

SEQ ID NO: 133498 - DNA, 201 bp, Homo sapiens
atcttcctttttacaaataaaggcactcatgctatcactggggcacctgcttcattaccttgcataattacccctaaaagccctgcctccaaataccatcragttgagggttagagctttaatatagggatttaggtggggacacaacatccaattcatatcagacacccctgtaaacaccaccagataaagacatgaaac

SEQ ID NO: 133499 - DNA, 201 bp, Homo sapiens
tagccataagttggcatttgacctggtgaccaatgtctcacctggctcttgtcttccagacactctccagttatccaatcaagagtatgatgggtgccccyattgtttaccggatgttgctacagcaggatctttccaggtgatggggctttgaggattggtaagagagtctggccccatccccctgactccctcacatac

SEQ ID NO: 133500 - DNA, 201 bp, Homo sapiens
cagaaactctggagaactggagggcccagacaggactggacatccgagaatcctatggccagacagaaacggtacctgttcccaggggaaccatgggctgkgtgcactttttgggcttcaaaattctctttgacaataaaaattgttagccaccatgtatcattcatctattcgagaagtatttattgagcctctatgaag

SEQ ID NO: 133501 - DNA, 201 bp, Homo sapiens
aaacccagtctaggcctgagtggactttggttccagggaggctgagggcaaacatttatttctcttcttcagttacaagttcccccatctacagaactgcstcactgtaggggagtcccttcttccagaaactctggagaactggagggcccagacaggactggacatccgagaatcctatggccagacagaaacggtacc

SEQ ID NO: 133502 - DNA, 201 bp, Homo sapiens
gcactgatccattagcatctggtccccacaggttcagggttgtcctgggggtgttattgcctccacacttctgggctgcgcactcatgcgtgaagagtggstcagagttccatgctatggtaaaacagagaaactatggggcacaaagtgaatcacttgtgatgcacactggaaacaacatgatgttaacaccaagtgggt

SEQ ID NO: 133503 - DNA, 201 bp, Homo sapiens
cattacttcctcatcctctccttccccacttgctcgctgcttgatgtttatctcaggcttctctagggacaaagaaaatcatcctttccaattctctaaaytgttggcttctttaggtctcatctttatgcctggaaccatccagatgaaatccactgacatactgtataggttgcagatgtctaaggccaaggctattgt

SEQ ID NO: 133504 - DNA, 201 bp, Homo sapiens
ctcaggtgagactgtacagaggtcgggggctgcacccctggcctcaacaggaggcgggggaaggcgggggacggtgtcagatgagaagcaccgagccacasttgagcttaggtgaggcctcggcgggtgcgaggtgagggcagggatccacgaactcagagtcagatgctgttggcccgaatcccatggggagcgccaagg

SEQ ID NO: 133505 - DNA, 201 bp, Homo sapiens
catggttctggggttgacagggctcagctgggcagtcctcccctggggtctcctgggtagctgtactcacagagtggtggcgctgggacctgggggaggcrcccattcacatgtctgggagttggtgctggctgtggcttgggctttttcccaacatggcagctgggctctaagggccagtgtcccctgagacgtgagagc

SEQ ID NO: 133506 - DNA, 201 bp, Homo sapiens
gcgatgtggaggctttggggagtgcccacatctaaggggcatcccaaaagaggagccagtgctggtggtgctgcaataggaggaggaggcagcagggcagraatgccaggggagggagtggccagccacaggtccctgcccagggcaaggacgggcatgctaggtggcagctggggccagtcgtgcagaagccatgcccac

SEQ ID NO: 133507 - DNA, 201 bp, Homo sapiens
gggacctgggggaggcacccattcacatgtctgggagttggtgctggctgtggcttgggctttttcccaacatggcagctgggctctaagggccagtgtcmcctgagacgtgagagccaggcagaagctgggtgaccttttcctgcctcgcctcagaagtcacacggtgtcttttctggcaagttctgtttgttagaagca

SEQ ID NO: 133508 - DNA, 201 bp, Homo sapiens
aggccagcctgtatacagcggggagaggaatgagactcatctgcctgtgggaggggggcccaggacctggcagactgcttgaaaccacagcttaaactggrattcaaagaaagaacagaagcaccttcagaaaacatcctgcagaggcagctttccatgacacatctagccccagtccactaagggcccagcctcaaactt

SEQ ID NO: 133509 - DNA, 201 bp, Homo sapiens
agagaggtttagcctgggcctcagggtggcactttcccgcccttgctgtggcctgaccgcgtgttgcacccccagacaggacagctggagcccctgctgtcccggttcactgaggaggaggagctacagatgaccaggatgctacagcggatggatgtcctggccaaggtgagctgtcccgctcgggcagagggtacctgg

SEQ ID NO: 133510 - DNA, 201 bp, Homo sapiens
tttagcctgggcctcagggtggcactttcccgcccttgctgtggcctgaccgcgtgttgcacccccagacaggacagctggagcccctgctgtcccggttyactgaggaggaggagctacagatgaccaggatgctacagcggatggatgtcctggccaaggtgagctgtcccgctcgggcagagggtacctgggactcgt

SEQ ID NO: 133511 - DNA, 201 bp, Homo sapiens
acaatgtgaccctggacgtggagctggctcgccgtgagggctggtgttttggggccaagctggtgcggggcgcatacctggcccaggagcgagcccgtgcrgcagagatcggctatgaggaccccatcaaccccacgtacgaggccaccaacgccatgtaccacaggtgcgcagctctcccacccctctgtcttctcaggg

SEQ ID NO: 133512 - DNA, 201 bp, Homo sapiens
ttagcctgggcctcagggtggcactttcccgcccttgctgtggcctgaccgcgtgttgcacccccagacaggacagctggagcccctgctgtcccggttcrctgaggaggaggagctacagatgaccaggatgctacagcggatggatgtcctggccaaggtgagctgtcccgctcgggcagagggtacctgggactcgtg

SEQ ID NO: 133513 - DNA, 201 bp, Homo sapiens
tcccgcccttgctgtggcctgaccgcgtgttgcacccccagacaggacagctggagcccctgctgtcccggttcactgaggaggaggagctacagatgacsaggatgctacagcggatggatgtcctggccaaggtgagctgtcccgctcgggcagagggtacctgggactcgtggagaagagggcacctgcctcacttga

SEQ ID NO: 133514 - DNA, 201 bp, Homo sapiens
ggagcgccaaggtcagcctaggacccgtggtggcgggagtgcggaggatggtggaggaagaaggagctgaactggacagatggagggctctgggagggcaytgctgtgtgtgcacacaaggatgtcttaaggtcaagttttggtcatagagagccccggccaaggagacaggagggcgagaagggacatcccaggtagagg

SEQ ID NO: 133515 - DNA, 201 bp, Homo sapiens
gttgcacccccagacaggacagctggagcccctgctgtcccggttcactgaggaggaggagctacagatgaccaggatgctacagcggatggatgtcctgsccaaggtgagctgtcccgctcgggcagagggtacctgggactcgtggagaagagggcacctgcctcacttgagcaacagttgctcccactctcccacccc

SEQ ID NO: 133516 - DNA, 201 bp, Homo sapiens
ccccagacaggacagctggagcccctgctgtcccggttcactgaggaggaggagctacagatgaccaggatgctacagcggatggatgtcctggccaaggygagctgtcccgctcgggcagagggtacctgggactcgtggagaagagggcacctgcctcacttgagcaacagttgctcccactctcccaccccctgcgcc

SEQ ID NO: 133517 - DNA, 201 bp, Homo sapiens
gtcccggttcactgaggaggaggagctacagatgaccaggatgctacagcggatggatgtcctggccaaggtgagctgtcccgctcgggcagagggtaccygggactcgtggagaagagggcacctgcctcacttgagcaacagttgctcccactctcccaccccctgcgcctctcagaaagccacagagatgggcgtgcg

SEQ ID NO: 133518 - DNA, 201 bp, Homo sapiens
gtcctcactgcaggagggccgtactgctcgggcttcctggtgcaccgggatgcccacccccactgtgccctacagggacctgcttcccttttatttccttkcagggccaggggtgcactgtacgatccctccccagacgcaaagctgtgtctgtcatgaggcttatgggcatgtttgggctggtccccagagtcacagcac

SEQ ID NO: 133519 - DNA, 201 bp, Homo sapiens
agctcctgtgcccactgctgtcccacacctgcatggaaacagaaaccccgccacggagccccctcccatctccacagggcctctagagcgccatgtgcaasgacttcatgggcggggtggggtggggtcaggagcctgctgtgggctggccaggccctggccctccctgtcgcaccctgcgctgcctccatgcacctctca

SEQ ID NO: 133520 - DNA, 201 bp, Homo sapiens
cacccaggatgtcacatgtattcagggagcccaccctagcctttgggccccaaactgctcagggatgttagcaggtccagagctctcaggggtgagccggrtgcccagaggacacagggtggcatggggaggggtccaggcaggagcatgcagtatgcacccctcccggtcggcctgggagtctggagcacatgatggctg

SEQ ID NO: 133521 - DNA, 201 bp, Homo sapiens
tgtctaaggagcaggaggaagacaacaatctttatgagggtccactagatgtacccgacaccccaaacttggaaggcatcacatgaccatttcctccagcrtgttttcagttcagcgcccctaagaacctcctgaaagctttgggccctccccggaaagactcacccaggatgtcacatgtattcagggagcccaccctag

SEQ ID NO: 133522 - DNA, 201 bp, Homo sapiens
tgctacagcggatggatgtcctggccaaggtgagctgtcccgctcgggcagagggtacctgggactcgtggagaagagggcacctgcctcacttgagcaayagttgctcccactctcccaccccctgcgcctctcagaaagccacagagatgggcgtgcggctgatggtggatgccgagcagacctacttccagccggcca

SEQ ID NO: 133523 - DNA, 201 bp, Homo sapiens
gccaaggtgagctgtcccgctcgggcagagggtacctgggactcgtggagaagagggcacctgcctcacttgagcaacagttgctcccactctcccacccyctgcgcctctcagaaagccacagagatgggcgtgcggctgatggtggatgccgagcagacctacttccagccggccatcagccgcctgacgctggagatg

SEQ ID NO: 133524 - DNA, 201 bp, Homo sapiens
gggttgttggggtcttctgcagcacagctcacccagcgggccccagggtccaggaaagagccccttaggtggtggccacagccaggcctgcagaggaggcygaggccagggtgactgcctcagagtagcaagaaagacccgctgcccgcaacctctcccctggttctcagaaccagccaagagtgtctaaggagcaggagg

SEQ ID NO: 133525 - DNA, 201 bp, Homo sapiens
caggaaagagccccttaggtggtggccacagccaggcctgcagaggaggccgaggccagggtgactgcctcagagtagcaagaaagacccgctgcccgcarcctctcccctggttctcagaaccagccaagagtgtctaaggagcaggaggaagacaacaatctttatgagggtccactagatgtacccgacaccccaaac

SEQ ID NO: 133526 - DNA, 201 bp, Homo sapiens
gctgtgtaggagaccgctcttgttctagagcacttgctcccaatccaaggccaaggttgaccccaccacccaggttgtctggaggcattcttggttttcasgactagggagggtacccctgccatcctgcaatgcgcaagacagcatctcaccataaagacttacccagccacaaatgtcagcatggctgggttgaaaatc

SEQ ID NO: 133527 - DNA, 201 bp, Homo sapiens
ctggttctcagaaccagccaagagtgtctaaggagcaggaggaagacaacaatctttatgagggtccactagatgtacccgacaccccaaacttggaaggyatcacatgaccatttcctccagcatgttttcagttcagcgcccctaagaacctcctgaaagctttgggccctccccggaaagactcacccaggatgtcac

SEQ ID NO: 133528 - DNA, 201 bp, Homo sapiens
cttggcaggggacaggcagctcctgtgcccactgctgtcccacacctgcatggaaacagaaaccccgccacggagccccctcccatctccacagggcctcyagagcgccatgtgcaaggacttcatgggcggggtggggtggggtcaggagcctgctgtgggctggccaggccctggccctccctgtcgcaccctgcgctg

SEQ ID NO: 133529 - DNA, 201 bp, Homo sapiens
tggttctcagaaccagccaagagtgtctaaggagcaggaggaagacaacaatctttatgagggtccactagatgtacccgacaccccaaacttggaaggcrtcacatgaccatttcctccagcatgttttcagttcagcgcccctaagaacctcctgaaagctttgggccctccccggaaagactcacccaggatgtcaca

SEQ ID NO: 133530 - DNA, 201 bp, Homo sapiens
tttcagttcagcgcccctaagaacctcctgaaagctttgggccctccccggaaagactcacccaggatgtcacatgtattcagggagcccaccctagcctktgggccccaaactgctcagggatgttagcaggtccagagctctcaggggtgagccggatgcccagaggacacagggtggcatggggaggggtccaggcag

SEQ ID NO: 133531 - DNA, 201 bp, Homo sapiens
cgaagtcgggatacctggatatagtaagctggagatgaaacttgagaactgccactgcgtggatatttcagaccctgagaatctttgtaagacgctatacsgggtggtgtgaagcaggacagagtggaggccccaccccagtatctgagcagtgctaatagatatataatgcaagccacatctgtaatttaaaatttagta

SEQ ID NO: 133532 - DNA, 201 bp, Homo sapiens
gttagcaggtccagagctctcaggggtgagccggatgcccagaggacacagggtggcatggggaggggtccaggcaggagcatgcagtatgcacccctccyggtcggcctgggagtctggagcacatgatggctgctggcgcctgggctgcacccacagggccgtccacaggccacacaggaagttgcagacgtccccact

SEQ ID NO: 133533 - DNA, 201 bp, Homo sapiens
ggtggcatggggaggggtccaggcaggagcatgcagtatgcacccctcccggtcggcctgggagtctggagcacatgatggctgctggcgcctgggctgcmcccacagggccgtccacaggccacacaggaagttgcagacgtccccactgccattgctccttggggacagaggttggaggcccatcctcacccacacctg

SEQ ID NO: 133534 - DNA, 201 bp, Homo sapiens
gaggggtccaggcaggagcatgcagtatgcacccctcccggtcggcctgggagtctggagcacatgatggctgctggcgcctgggctgcacccacagggcygtccacaggccacacaggaagttgcagacgtccccactgccattgctccttggggacagaggttggaggcccatcctcacccacacctgctccaggtgcc

SEQ ID NO: 133535 - DNA, 201 bp, Homo sapiens
gaggatggtggaggaagaaggagctgaactggacagatggagggctctgggagggcattgctgtgtgtgcacacaaggatgtcttaaggtcaagttttggycatagagagccccggccaaggagacaggagggcgagaagggacatcccaggtagaggaactggcaaggtgagggacggcgatgtggaggctttggggagt

SEQ ID NO: 133536 - DNA, 201 bp, Homo sapiens
catgaaactgaccctgaaagcccagtcgccaagagaccatatcgaggccccatggctggggtgaagtgtggtcggggatgagcagcggtgccttgctgggraaggagagttcaggcagcccaggacagcggcttccctttgcctttcagctgctgtatgtttccaggaaacttctaggacagaggctattcaacaagctca

SEQ ID NO: 133537 - DNA, 201 bp, Homo sapiens
gagcatgcagtatgcacccctcccggtcggcctgggagtctggagcacatgatggctgctggcgcctgggctgcacccacagggccgtccacaggccacasaggaagttgcagacgtccccactgccattgctccttggggacagaggttggaggcccatcctcacccacacctgctccaggtgccctgagctgcacctcc

SEQ ID NO: 133538 - DNA, 201 bp, Homo sapiens
cagtatgcacccctcccggtcggcctgggagtctggagcacatgatggctgctggcgcctgggctgcacccacagggccgtccacaggccacacaggaagytgcagacgtccccactgccattgctccttggggacagaggttggaggcccatcctcacccacacctgctccaggtgccctgagctgcacctccccaggca

SEQ ID NO: 133539 - DNA, 201 bp, Homo sapiens
aaggaaaaagataaaatgaatttcaagaataattttaattaacccaaaatattcaaaatattacttcaaattgtattccagttgcttttagaaaagcaacrcggcatcgtgcattatttttctacaaagtctcctaaatcccgtgtgtatttgacatttgcaacacatctcgattcagagcagccgccttccgaggactcg

SEQ ID NO: 133540 - DNA, 201 bp, Homo sapiens
cacccctcccggtcggcctgggagtctggagcacatgatggctgctggcgcctgggctgcacccacagggccgtccacaggccacacaggaagttgcagaygtccccactgccattgctccttggggacagaggttggaggcccatcctcacccacacctgctccaggtgccctgagctgcacctccccaggcagctgctg

SEQ ID NO: 133541 - DNA, 201 bp, Homo sapiens
ctggagcacatgatggctgctggcgcctgggctgcacccacagggccgtccacaggccacacaggaagttgcagacgtccccactgccattgctccttggrgacagaggttggaggcccatcctcacccacacctgctccaggtgccctgagctgcacctccccaggcagctgctgcccagccctggtgactgcacctggg

SEQ ID NO: 133542 - DNA, 201 bp, Homo sapiens
gctgctggcgcctgggctgcacccacagggccgtccacaggccacacaggaagttgcagacgtccccactgccattgctccttggggacagaggttggagrcccatcctcacccacacctgctccaggtgccctgagctgcacctccccaggcagctgctgcccagccctggtgactgcacctgggcccaggaaggcccca

SEQ ID NO: 133543 - DNA, 201 bp, Homo sapiens
ctgctggcgcctgggctgcacccacagggccgtccacaggccacacaggaagttgcagacgtccccactgccattgctccttggggacagaggttggaggmccatcctcacccacacctgctccaggtgccctgagctgcacctccccaggcagctgctgcccagccctggtgactgcacctgggcccaggaaggccccat

SEQ ID NO: 133544 - DNA, 201 bp, Homo sapiens
tccctgtgacttttggccctggccccacaggatgcctatgacaatgtgaccctggacgtggagctggctcgccgtgagggctggtgttttggggccaagcyggtgcggggcgcatacctggcccaggagcgagcccgtgcggcagagatcggctatgaggaccccatcaaccccacgtacgaggccaccaacgccatgtac

SEQ ID NO: 133545 - DNA, 201 bp, Homo sapiens
tggacgtggagctggctcgccgtgagggctggtgttttggggccaagctggtgcggggcgcatacctggcccaggagcgagcccgtgcggcagagatcggmtatgaggaccccatcaaccccacgtacgaggccaccaacgccatgtaccacaggtgcgcagctctcccacccctctgtcttctcagggcagggcgccaag

SEQ ID NO: 133546 - DNA, 201 bp, Homo sapiens
caatgtgaccctggacgtggagctggctcgccgtgagggctggtgttttggggccaagctggtgcggggcgcatacctggcccaggagcgagcccgtgcgkcagagatcggctatgaggaccccatcaaccccacgtacgaggccaccaacgccatgtaccacaggtgcgcagctctcccacccctctgtcttctcagggc

SEQ ID NO: 133547 - DNA, 201 bp, Homo sapiens
gagggctggtgttttggggccaagctggtgcggggcgcatacctggcccaggagcgagcccgtgcggcagagatcggctatgaggaccccatcaaccccaygtacgaggccaccaacgccatgtaccacaggtgcgcagctctcccacccctctgtcttctcagggcagggcgccaagaaaccaggcctgagggagaggct

SEQ ID NO: 133548 - DNA, 201 bp, Homo sapiens
ggtcagaactggtatttcctcagcttttatgtcatgtgttactttttcaaaagcattaaggttattcttttataaatatagaaaagcctattgaacaaagyaaaattggccacagttccctgagcttgctcctgcagacacttagatccagagatgtgcatgaacacccggtcctccccaccctgcaggctcagcctgttt

SEQ ID NO: 133549 - DNA, 201 bp, Homo sapiens
gtgggtcagggcccgaggaagggctgcacctccaagaagggagctagaggagaggtgagagaggagaggggagggaaagcaggtgggaggccttgttggcyaagggctgaggcctccccagggagacgagtagggcagcccagcagagtcctgctgggaagaggcctcactggggcagggccaggcagagcccatacccca

SEQ ID NO: 133550 - DNA, 201 bp, Homo sapiens
gggagcctttacggagcttcctggcctgaaacgggtgcctcccaagcatctcctggagcaagggaagccaggaagggaggcgtttcctgcagtccctctcrgacctcgcaaattttcctatttgtcgatgtctaccaactaaaaacaatggtcgttttcatatttacgatatataccacttgtgggaatacagagttatca

SEQ ID NO: 133551 - DNA, 201 bp, Homo sapiens
ctggcccgcgctgctggcgcgccacgagcaggtgcgcggggtgcaggcgggggcgcgggggcttctgccggtcccgggagcctttacggagcttcctggcstgaaacgggtgcctcccaagcatctcctggagcaagggaagccaggaagggaggcgtttcctgcagtccctctcggacctcgcaaattttcctatttgtc

SEQ ID NO: 133552 - DNA, 201 bp, Homo sapiens
cgcggagcctgctggtgctgcgcttgtgcgcctggcccgcgctgctggcgcgccacgagcaggtgcgcggggtgcaggcgggggcgcgggggcttctgccsgtcccgggagcctttacggagcttcctggcctgaaacgggtgcctcccaagcatctcctggagcaagggaagccaggaagggaggcgtttcctgcagtcc

SEQ ID NO: 133553 - DNA, 201 bp, Homo sapiens
gaggtgggtcggccacggcagtgcggccgccggtgcccgccgtggacttcggcaacgcgcaggaggcgtaccgcagccggcgaacctgggagctggcgcgsagcctgctggtgctgcgcttgtgcgcctggcccgcgctgctggcgcgccacgagcaggtgcgcggggtgcaggcgggggcgcgggggcttctgccggtcc

SEQ ID NO: 133554 - DNA, 201 bp, Homo sapiens
tgccctggatgggaactggagtgatggacagggtggagaagcaagcggctttagctggtcttcaccatgaaactgaccctgaaagcccagtcgccaagagrccatatcgaggccccatggctggggtgaagtgtggtcggggatgagcagcggtgccttgctgggaaaggagagttcaggcagcccaggacagcggcttcc

SEQ ID NO: 133555 - DNA, 201 bp, Homo sapiens
ccgaggaggcagagcacaaggagatggagtaaggcctgcccggtgtctgcgggctttctgatcatgaccctggagcacccagtgggagcaggtgggatgtrtccagctgctgggcttcagcctcagctgggcagaggccaaggctaggagagcttggtcagcccaactaccgatgaccctcctgggctctgcctggagttc

SEQ ID NO: 133556 - DNA, 201 bp, Homo sapiens
aaaattggccacagttccctgagcttgctcctgcagacacttagatccagagatgtgcatgaacacccggtcctccccaccctgcaggctcagcctgtttrcttttcagttcacacagtgggatcgcccatcagctgttctgcacctgcttttactgctctagtttcttggtgatcttttcatgtagcacaggctggccaa

SEQ ID NO: 133557 - DNA, 201 bp, Homo sapiens
tttatgtcatgtgttactttttcaaaagcattaaggttattcttttataaatatagaaaagcctattgaacaaagcaaaattggccacagttccctgagcytgctcctgcagacacttagatccagagatgtgcatgaacacccggtcctccccaccctgcaggctcagcctgtttacttttcagttcacacagtgggatc

SEQ ID NO: 133558 - DNA, 201 bp, Homo sapiens
gtgggcttgcagagtggtgctgtcaacagccagcatggagtgcccggggctatgtgtccagcatctttgatcttattggtttttagtctggttattgtaayggactcgctggacataccgtcaccctctgtggtacacacgggccgtcaggggttttgtgtctgaggatgcagctgtcctaggttgctggaaatggaattg

SEQ ID NO: 133559 - DNA, 201 bp, Homo sapiens
accctctgtggtacacacgggccgtcaggggttttgtgtctgaggatgcagctgtcctaggttgctggaaatggaattgctgggtcagagagaacgtgcgygtggtcaagcctgctgagtgtcctcactgcaggagggccgtactgctcgggcttcctggtgcaccgggatgcccacccccactgtgccctacagggacct

SEQ ID NO: 133560 - DNA, 201 bp, Homo sapiens
ccgtcaggggttttgtgtctgaggatgcagctgtcctaggttgctggaaatggaattgctgggtcagagagaacgtgcgcgtggtcaagcctgctgagtgwcctcactgcaggagggccgtactgctcgggcttcctggtgcaccgggatgcccacccccactgtgccctacagggacctgcttcccttttatttccttgc

SEQ ID NO: 133561 - DNA, 201 bp, Homo sapiens
aggggttttgtgtctgaggatgcagctgtcctaggttgctggaaatggaattgctgggtcagagagaacgtgcgcgtggtcaagcctgctgagtgtcctcrctgcaggagggccgtactgctcgggcttcctggtgcaccgggatgcccacccccactgtgccctacagggacctgcttcccttttatttccttgcagggc

SEQ ID NO: 133562 - DNA, 201 bp, Homo sapiens
tggtgcaccgggatgcccacccccactgtgccctacagggacctgcttcccttttatttccttgcagggccaggggtgcactgtacgatccctccccagamgcaaagctgtgtctgtcatgaggcttatgggcatgtttgggctggtccccagagtcacagcacgtttgatgcagggactctgcccccccagctggttctg

SEQ ID NO: 133563 - DNA, 201 bp, Homo sapiens
tgtgccctacagggacctgcttcccttttatttccttgcagggccaggggtgcactgtacgatccctccccagacgcaaagctgtgtctgtcatgaggctyatgggcatgtttgggctggtccccagagtcacagcacgtttgatgcagggactctgcccccccagctggttctgcgtgaattgtctggtcccagacatcg

SEQ ID NO: 133564 - DNA, 201 bp, Homo sapiens
tccctccccagacgcaaagctgtgtctgtcatgaggcttatgggcatgtttgggctggtccccagagtcacagcacgtttgatgcagggactctgcccccmcagctggttctgcgtgaattgtctggtcccagacatcgcttttgcttggttgctggtctttctttttcatgaggtgctgggaggggcagatgctgctcct

SEQ ID NO: 133565 - DNA, 201 bp, Homo sapiens
gttctgcgtgaattgtctggtcccagacatcgcttttgcttggttgctggtctttctttttcatgaggtgctgggaggggcagatgctgctcctgttcctyctgatcctgtggatacccttggaaagagccagctcactggatggatctgggtctgccctcggcctcctctctgtgcagctggtaatgagaggtgcaggca

SEQ ID NO: 133566 - DNA, 201 bp, Homo sapiens
gcttggttgctggtctttctttttcatgaggtgctgggaggggcagatgctgctcctgttccttctgatcctgtggatacccttggaaagagccagctcamtggatggatctgggtctgccctcggcctcctctctgtgcagctggtaatgagaggtgcaggcagccacaggcctggaactgggctcacatggcactctcc

SEQ ID NO: 133567 - DNA, 201 bp, Homo sapiens; identical to SEQ ID NO: 23333

SEQ ID NO: 133568 - DNA, 201 bp, Homo sapiens
caaaatgccttaaagtcagattctgcttggaggctgcaggaaggcaggggtgagtgcctgggaaaccctggtccttggggctgccccatggcgtgcccagrggtgatggtcaggaggcgtctccatggggcaccaatgttcagggtaaggctgtggggctatgtctgcctgtgggcaggcgtgtgggtgctcagggctggc

SEQ ID NO: 133569 - DNA, 201 bp, Homo sapiens
tcagggcagctgtgggcatccaccaaaaacacaggtgcccatgccttagaggcctgagctggccacaggggctgtgtgggggactggggtgggcaggggcrtgtgcagatggcattcaggcctgcgtttgcagctgcagttctcagaggtgctggccaagtggaggtgcttctttcaccaaatggctgtggagcaagggca

SEQ ID NO: 133570 - DNA, 201 bp, Homo sapiens
tcctgaaactacggtctcaagagatgctccccacataaaaggagttctagtatcctttgggtttgagaaaccccaggctcttcctgtgttggggctgagtyggcaggggcagcagacacaacgcggaggtgtgcttctgagcatcacactcggccctcctctccaagtagcctctcgttgtccctgtcctttctgcccttg

SEQ ID NO: 133571 - DNA, 201 bp, Homo sapiens
ctgtatccctgcaccggggacagtgtcctggaactggccctcagttcctggcttcacctgcacaggatggaggagctgggcctgcatcctgctgaccaccrggtgtactttggacagctgctaggcatgtgtgaccagatcagcttcccgctgggtgagtggggccctccctggtgcgatggggtacggtgctgggcctgg

SEQ ID NO: 133572 - DNA, 201 bp, Homo sapiens
agatcagcttcccgctgggtgagtggggccctccctggtgcgatggggtacggtgctgggcctgggcctcatggtgtatctgcccccatgcaggccaggcyggctaccccgtgtacaagtacgtgccctatggccccgtgatggaggtgctgccctacttgtcccgccgtgccctggagaacagcagcctcatgaagggca

SEQ ID NO: 133573 - DNA, 201 bp, Homo sapiens; identical to SEQ ID NO: 23340

SEQ ID NO: 133574 - DNA, 201 bp, Homo sapiens
ctccttgtgacttatccatgatgcctgttggagagtgtggccctgtccttgctgcgtagccatccactctgagacctggctgcccctctggccactgcacrtgctgtgtggtcatcttggccactgcttggctgtgtcagcctggtctgtgctctggaagttcacggagaggagcagcggtagcctatggtgttctgcctc

SEQ ID NO: 133575 - DNA, 201 bp, Homo sapiens
ccacagggcctctagagcgccatgtgcaaggacttcatgggcggggtggggtggggtcaggagcctgctgtgggctggccaggccctggccctccctgtcscaccctgcgctgcctccatgcacctctcagggctgtcatggcttttcctgtggcttctgacaggtagagtcagcgatgacggcttcatagccattaagct

SEQ ID NO: 133576 - DNA, 201 bp, Homo sapiens
gcactctccacaggtgcctggactacgtgttggaggagctgaagcacaacgccaaggccaaggtgatggtggcctcccacaatgaggacacagtgcgcttygcactgcgcaggtaggtgtgccccaccctgcaccgaaaccccaacctgagccgttgtctcctccggctggggagaggtggcagcagcgcagagctcaggg

SEQ ID NO: 133577 - DNA, 201 bp, Homo sapiens
tttcaccaaatggctgtggagcaagggcaggcgggcctggctgccatggacaccaagctggaggtggcggtgctgcaggtggggcagccttccccttcccyactcctgtggcttgtgagggggtgggcaccgtggggtcacacggggcatggtgggcagtggtcggaggtggttttgggaactcacccagggcatgtggct

SEQ ID NO: 133578 - DNA, 201 bp, Homo sapiens
caaatggctgtggagcaagggcaggcgggcctggctgccatggacaccaagctggaggtggcggtgctgcaggtggggcagccttccccttccccactccygtggcttgtgagggggtgggcaccgtggggtcacacggggcatggtgggcagtggtcggaggtggttttgggaactcacccagggcatgtggctcactct

SEQ ID NO: 133579 - DNA, 201 bp, Homo sapiens
cttcagtgggcaggcccaggcccgctggcgttctggacatcggactgtgagagcacaatggctttttgcagttacgttggtttttaaaattaacttttttytttttttgagatagaatctcgctctgtcacctatgctggagtgcagtggcgtggtctcggctcactgcaacctccgcttcccaagttcaagcaattcttc

SEQ ID NO: 133580 - DNA, 201 bp, Homo sapiens
ggaggcgtaccgcagccggcgaacctgggagctggcgcggagcctgctggtgctgcgcttgtgcgcctggcccgcgctgctggcgcgccacgagcaggtgygcggggtgcaggcgggggcgcgggggcttctgccggtcccgggagcctttacggagcttcctggcctgaaacgggtgcctcccaagcatctcctggagca

SEQ ID NO: 133581 - DNA, 201 bp, Homo sapiens
ccgtgttggccagactggtctcaaactcctggcctcaagtgatcctcccttcttggcctcccaaagtgctgggattacaagcatcagccactgtacccagmcttttaaaaattaacatctgacttattaaacttcacaattaaaaaactaaatttcatcagggtattcggatggctcctgaaaggtacaaatgcagtgttg

SEQ ID NO: 133582 - DNA, 201 bp, Homo sapiens
gggtttggtgcccagtctgctgcggggaatgccaggtgctgttccgtgactgtgggaggaaactgttggctccgctgtcccttgggtgccttcttgaggcragtgccagggctcagggatggtgctgtgagtacctggaagaggcagggcatccagaggtgacctctcccaggctcccctagggtcccacctgtgccctgg

SEQ ID NO: 133583 - DNA, 201 bp, Homo sapiens
ccagggctcagggatggtgctgtgagtacctggaagaggcagggcatccagaggtgacctctcccaggctcccctagggtcccacctgtgccctgggaagyccctcagtggggtctgtactgttgtcttgctagtggtcccatgggtgtcggcagcctcagcactggaagaaggcagaggccaggtcctgggcttgtgagc

SEQ ID NO: 133584 - DNA, 201 bp, Homo sapiens; identical to SEQ ID NO: 23335

SEQ ID NO: 133585 - DNA, 201 bp, Homo sapiens
gctaggagttcaagaccagcctgagcaacatcgtgaaaccctgtctctacaaaatatttttaaaagttagctggggccaggtgcggtggctcatgcctgtmatcccagcactttgggtggccgaggcgggtggatcacctgaagtcaggagtttgagaccagcctggccaacatggagaaaccccatctctactaaaaata

SEQ ID NO: 133586 - DNA, 201 bp, Homo sapiens
agccccaccttgcaggggatgaagtctggagagtgcagatggggcacctgggatggcaggacaggctcagagctgggacaggagccctgtatccctgcacyggggacagtgtcctggaactggccctcagttcctggcttcacctgcacaggatggaggagctgggcctgcatcctgctgaccaccaggtgtactttggac

SEQ ID NO: 133587 - DNA, 201 bp, Homo sapiens
cagcccgggcccagtcccccagccccccatctttgtgaataagcatccctggagtcagtgcagcctgggctcccgccccttcatttagtgctggccgtgcrgaggcgagcagttaggtagagggagactgcgtggccccgtgcggcagtcgacagttgcccaccctccctcctgttgttttctgatggttctctcagagcg

SEQ ID NO: 133588 - DNA, 201 bp, Homo sapiens
gtaagtgtttgactcgctaatggttttgcttagactagaagttgttcctgaaactacggtctcaagagatgctccccacataaaaggagttctagtatccwttgggtttgagaaaccccaggctcttcctgtgttggggctgagtcggcaggggcagcagacacaacgcggaggtgtgcttctgagcatcacactcggccc

SEQ ID NO: 133589 - DNA, 201 bp, Homo sapiens
tcggcaggggcagcagacacaacgcggaggtgtgcttctgagcatcacactcggccctcctctccaagtagcctctcgttgtccctgtcctttctgccctkgctgtcccccgtgctggagctcccacagttgtccatgccatctcctcgccttggcaagccccactcctggatctgggttagtaaacacccctgccctacc

SEQ ID NO: 133590 - DNA, 201 bp, Homo sapiens
aggcacccactgtgtgctgctggagtgactcatgggtggggccctgaaggggcagagtccaggtgggaacagtgtcctcaggccaagcaggcagcacctcstgtggtctctctgccctggatgggaactggagtgatggacagggtggagaagcaagcggctttagctggtcttcaccatgaaactgaccctgaaagccca

SEQ ID NO: 133591 - DNA, 201 bp, Homo sapiens
ggccaggggagcccagcccctgccttgcgattggctgttttgaaggtggggtactacagccccagcaccccactgtgttcctagcaggccccgtgggcctygcagctgcctgagctcttggctgcagcctttgctgagctgcctgttgaataaccaatggcctgtgtgttctcagaaggagtctgggtggggacttggttt

SEQ ID NO: 133592 - DNA, 201 bp, Homo sapiens
atgtcccagcctgagcggacccctgggctcatggaggtgccggtgggtgaacactaagctggggcaggagccagagggctgggttctgaccacacttgggyccctcactgttcagccccttcctgaggggccccactgcctcccagaaggcatctcctctcctgccccagctccctgttccctgatcccgcctcatgcccc

SEQ ID NO: 133593 - DNA, 201 bp, Homo sapiens
tggtgtgtgggtgctgggggtgggtgtttggagctgtgctcaggccgtgcattcgctattccaggcacgaataagcgggacaagcaataccaggcccactrggccttcggggaccgcaggaatggtgtcatcagtgcccgcacctacttctacgccaatgaggccaagtgcgacagccacatggagacattcttgcgctgc

SEQ ID NO: 133594 - DNA, 201 bp, Homo sapiens
ttaggagcttgagtcctttgccctgcaagggattcacctgtcttgctgctggtggctgctgtctgcaggggtcctgctccagctctgggaagtgaacaggkttccctcctgtcctcacaggggtgcatgctgaggacacctaccgagctcagctgctttgtgctttcagaggggcctgagccatgggggtagggctgggtc

SEQ ID NO: 133595 - DNA, 201 bp, Homo sapiens
ttggtgtgtgggtgctgggggtgggtgtttggagctgtgctcaggccgtgcattcgctattccaggcacgaataagcgggacaagcaataccaggcccacygggccttcggggaccgcaggaatggtgtcatcagtgcccgcacctacttctacgccaatgaggccaagtgcgacagccacatggagacattcttgcgctg

SEQ ID NO: 133596 - DNA, 201 bp, Homo sapiens
cctgtgcttgcatcagagctgcctgggagaccctggctctggggtggaggcctgagtaagggggcctcgctggggatttggggacctctgtgtgctggtgycttcccgcctccgttcctctcagccctgactggctctgtcttggaaccaggtaactacctttatttgagaacctgctgcaagccctgggctgttctgaga

SEQ ID NO: 133597 - DNA, 201 bp, Homo sapiens
gtgccatgcggggacatcagtgacaccaggatggtgttaaagtggttgctttgctgtggagtcagctttaaaattacaagccctaggctcatgcctaggcrtggtggctcatgcctgtaattctagcacttaaggaggtcaaggcaggaggatcatttaaggctaggagttcaagaccagcctgagcaacatcgtgaaacc

SEQ ID NO: 133598 - DNA, 201 bp, Homo sapiens
ctcctgtttcttggcattctgtacacacctcgacgatggtatttaccaaaagcccccctcaagacagctccataacacagggaagcagggaaatgtcatcwtcttcactctactgatcaaacattgctacaagtgccaggtccactacgagattccactagatagacaaccaaaaggcaagaagagagccacgccggctgc

SEQ ID NO: 133599 - DNA, 201 bp, Homo sapiens
caccaagctggaggtggcggtgctgcaggtggggcagccttccccttccccactcctgtggcttgtgagggggtgggcaccgtggggtcacacggggcatrgtgggcagtggtcggaggtggttttgggaactcacccagggcatgtggctcactctgcagctgctggggttggcctggtggggaggaggaggtcagaggg

SEQ ID NO: 133600 - DNA, 201 bp, Homo sapiens
tcctggcctcatgaggaggcttagccagggggatgcagcactccaggtggaagagccgcggtgtagacaggagggtgggcttggggatgggaaccatgggrcagcgcagtgccagggccaggctggcaaggccactatgcttggagccctcctgagggcaggggccctgggctattggtgtgtgggtgctgggggtgggtg

SEQ ID NO: 133601 - DNA, 201 bp, Homo sapiens
ggtgggcttggggatgggaaccatggggcagcgcagtgccagggccaggctggcaaggccactatgcttggagccctcctgagggcaggggccctgggctrttggtgtgtgggtgctgggggtgggtgtttggagctgtgctcaggccgtgcattcgctattccaggcacgaataagcgggacaagcaataccaggcccac

SEQ ID NO: 133602 - DNA, 201 bp, Homo sapiens
tgccgcatcttctgtccttccctgacacagcctctgggggccagcggtgggggcagcaggtgtttccagggatagagaagccagaggtcagcaaggcccartgtccttcagtgttagaaacatccgacctgcacagccccatgctggccccagcagccctccgtcaggggcagcgggtcccaggcctgtttatgtttttgt

SEQ ID NO: 133603 - DNA, 201 bp, Homo sapiens
aatttttaaacagaaaacaatatttatatttcctctgtcttttaaaactgaacaccgaggtgggttttgtggtgggtggtgaacggacaggtttgggcctygatcccccacccgaccctagcacccacaggtgggggtgccccctctgctgatgcgcctcctccctcagcaccatggacctgctggactggagcagcctca

SEQ ID NO: 133604 - DNA, 201 bp, Homo sapiens
tatttaattaatttattttttatagagaccaggtctcaccatgttgcccaggctggtttcaaacccctgggctcaagtgacctgcccgccgcagcccccamagtgctgggattataagtttgagcccccgcatgccactggttttaaatttttaaacagaaaacaatatttatatttcctctgtcttttaaaactgaacac

SEQ ID NO: 133605 - DNA, 201 bp, Homo sapiens
ggcgtgtgtgcatgctgcaaattcagagagaccccaagtgtctcctggttggctcccctcctgcagccgctgtgcatgtcgtgccacagcgcacacatctscgccattgttttttgcgttgtagcgtgtcctctgcccgatgtgtttttcatttcgcgttccatctgggtcctcttgtgtgggcttgcagagtggtgctgt

SEQ ID NO: 133606 - DNA, 201 bp, Homo sapiens
cctgtgctcggcccctccacaagcccaaaacagccctagggtactcagtgttttcagagccgcctagatgcaggactgtttgtgttttggttttaaatttwtttaattaatttattttttatagagaccaggtctcaccatgttgcccaggctggtttcaaacccctgggctcaagtgacctgcccgccgcagcccccaaa

SEQ ID NO: 133607 - DNA, 201 bp, Homo sapiens
agctgtgtccgcctcctgcctggctgcctgtgctcggcccctccacaagcccaaaacagccctagggtactcagtgttttcagagccgcctagatgcaggrctgtttgtgttttggttttaaatttatttaattaatttattttttatagagaccaggtctcaccatgttgcccaggctggtttcaaacccctgggctcaa

SEQ ID NO: 133608 - DNA, 201 bp, Homo sapiens
aaatcactgcacactatggccccacagaccccctgtggtccagggggaagaagacaagcccactagtgtccacagagtgcttggcgggacagagacccacrcggagccttaagacaccacaaggagagggggtctgggggccttccccaagtcatctgtcttgtgcatcaggtcaccccaaacttcagaggcctgaaacgg

SEQ ID NO: 133609 - DNA, 201 bp, Homo sapiens
aacagcgcacacttaagcggcccgggcgggtaccgccgtcccgccatggctctgaggcgcgccctgcccgcgctgcgcccctgcattccccgcttcgtccmgctgtccacggcgccggcctcccgcgagcagcccgcagcgggcccagcggccgtgccaggaggtgggtcggccacggcagtgcggccgccggtgcccgcc

SEQ ID NO: 133610 - DNA, 201 bp, Homo sapiens
tgcggccgccggtgcccgccgtggacttcggcaacgcgcaggaggcgtaccgcagccggcgaacctgggagctggcgcggagcctgctggtgctgcgcttstgcgcctggcccgcgctgctggcgcgccacgagcaggtgcgcggggtgcaggcgggggcgcgggggcttctgccggtcccgggagcctttacggagcttc

SEQ ID NO: 133611 - DNA, 201 bp, Homo sapiens
agggtatctggtggtgttgatttctcaggtgagactgtacagaggtcgggggctgcacccctggcctcaacaggaggcgggggaaggcgggggacggtgtsagatgagaagcaccgagccacagttgagcttaggtgaggcctcggcgggtgcgaggtgagggcagggatccacgaactcagagtcagatgctgttggccc

SEQ ID NO: 133612 - DNA, 201 bp, Homo sapiens
ctacagcacgacccagtaggatggaattcaagtgactgtaattcactgtagtaatagaaaatgattcaccacgtgatcatctcaagagctgccaaaaaggraactgccaaaatccaacatccattcttgatagaaacacaccaatcctggagcagatggacactgcctgccttctggggaagggggccttgcaccgctagg

SEQ ID NO: 133613 - DNA, 201 bp, Homo sapiens
gccctggtctcaggtagtgccatgcggggacatcagtgacaccaggatggtgttaaagtggttgctttgctgtggagtcagctttaaaattacaagccctrggctcatgcctaggcatggtggctcatgcctgtaattctagcacttaaggaggtcaaggcaggaggatcatttaaggctaggagttcaagaccagcctga

SEQ ID NO: 133614 - DNA, 201 bp, Homo sapiens
ctgcgggtcaggaatccctgcaaaagagaggctgtagcagagcctcctccatcaggtcagcaagtttgtgtaaacagccaggtagcacagactctcagtcrggccacaccctccctgccacaacggcttcactctgcctcagtagggccatagtaattagaatttcatataattttcttgtgtcacaaaatattattcttg

SEQ ID NO: 133615 - DNA, 201 bp, Homo sapiens
tcccacaggccagcccaggcttgagcacgtggtgggctcaggcttccagaaggcctggagagggcaagcctctgcttgtgtcacctttggtacctccctgytggccaaagtgcctcacgaggccaagcccagatgccaggtggagtgagccactgtcctgtgctgggaggagccgcagtcacatggcagaggctgtgcaca

SEQ ID NO: 133616 - DNA, 201 bp, Homo sapiens
catggcctgctacgacagggtggaatctgagcttctgcccccagcagggccactcggaatctgagcctctgcccccagcagggccactcggaatctgagcytctgcacccagcagggccacttggaatggcatgcgggaggggagcagaagagggccctgtggggcacagcaggcctggggagggtgggcagtgcccatgg

SEQ ID NO: 133617 - DNA, 201 bp, Homo sapiens
acgtgtgtctcttgttgcctaccctgggaacttaacatgaccaaaatcactgcacactatggccccacagaccccctgtggtccagggggaagaagacaarcccactagtgtccacagagtgcttggcgggacagagacccacgcggagccttaagacaccacaaggagagggggtctgggggccttccccaagtcatctg

SEQ ID NO: 133618 - DNA, 201 bp, Homo sapiens
gtgggggtgccccctctgctgatgcgcctcctccctcagcaccatggacctgctggactggagcagcctcatcgacagcaggaccaagctgtccaagcacytggtagtccccaacgcacaggtaacacctccgctcctcagtgaggcccagctcagcagggcgctgcgctaagaagggaattcagcctgccacgtgtgtct

SEQ ID NO: 133619 - DNA, 201 bp, Homo sapiens
tgcctgccctggggcttggagaccccacaggaggggctcctctcatctgagctccctggcatttggctggttttacactcagcacccaccagggagctcaygggatggaggagggagtgggccgtgcccccaaggggttgttggggtcttctgcagcacagctcacccagcgggccccagggtccaggaaagagcccctta

SEQ ID NO: 133620 - DNA, 201 bp, Homo sapiens
ggccaagctggtgcggggcgcatacctggcccaggagcgagcccgtgcggcagagatcggctatgaggaccccatcaaccccacgtacgaggccaccaacrccatgtaccacaggtgcgcagctctcccacccctctgtcttctcagggcagggcgccaagaaaccaggcctgagggagaggcttggagactgaacttgtc

SEQ ID NO: 133621 - DNA, 201 bp, Homo sapiens
cagctcctgtgcccactgctgtcccacacctgcatggaaacagaaaccccgccacggagccccctcccatctccacagggcctctagagcgccatgtgcamggacttcatgggcggggtggggtggggtcaggagcctgctgtgggctggccaggccctggccctccctgtcgcaccctgcgctgcctccatgcacctctc

SEQ ID NO: 133622 - DNA, 201 bp, Homo sapiens
gcagctcctgtgcccactgctgtcccacacctgcatggaaacagaaaccccgccacggagccccctcccatctccacagggcctctagagcgccatgtgcaaggacttcatgggcggggtggggtggggtcaggagcctgctgtgggctggccaggccctggccctccctgtcgcaccctgcgctgcctccatgcacctct

SEQ ID NO: 133623 - DNA, 201 bp, Homo sapiens
gggagaccccagtttctggtaagtgctagaaccttccacctgcagagtctggtgctgtgcgagatctcagggcagctgtgggcatccaccaaaaacacagrtgcccatgccttagaggcctgagctggccacaggggctgtgtgggggactggggtgggcaggggcgtgtgcagatggcattcaggcctgcgtttgcagct

SEQ ID NO: 133624 - DNA, 201 bp, Homo sapiens
catggggaggggtccaggcaggagcatgcagtatgcacccctcccggtcggcctgggagtctggagcacatgatggctgctggcgcctgggctgcacccayagggccgtccacaggccacacaggaagttgcagacgtccccactgccattgctccttggggacagaggttggaggcccatcctcacccacacctgctcca

SEQ ID NO: 133625 - DNA, 201 bp, Homo sapiens
ctgagtgcatggcaaagtgagtcccagcagtgctcccgagaaagaaagaggaggtgggagcctggaggtgcaggagggcaatgcccacccggggggggggkggaccatgcttcccagaggccagggccccacccaaccccaggagaggagtcccagggatccccgaagcaggctgagggcttggggatggggaaggggcca

SEQ ID NO: 133626 - DNA, 201 bp, Homo sapiens
gagcaagggcaggcgggcctggctgccatggacaccaagctggaggtggcggtgctgcaggtggggcagccttccccttccccactcctgtggcttgtgagggggtgggcaccgtggggtcacacggggcatggtgggcagtggtcggaggtggttttgggaactcacccagggcatgtggctcactctgcagctgctggg

SEQ ID NO: 133627 - DNA, 201 bp, Homo sapiens
ggagtcccagggatccccgaagcaggctgagggcttggggatggggaaggggccaaggcatcttcctgatgattgggctgtgagggaacacctagggggtrgatgggggcattggtctggctgtgcaggcccagggctggctggaggcaggatatgtgtgcagtgagtgtcctgagcgaggggctggggaggcagagggtt

SEQ ID NO: 133628 - DNA, 201 bp, Homo sapiens
ttcactctgcctcagtagggccatagtaattagaatttcatataattttcttgtgtcacaaaatattattcttgttttgatttctttcaaccagttttttwaaagtagggtcttgctctgttgcccaggctagagtgcagtggtgccattgttcactgcagccaaccttctgggctcaagtgatcctcccatctgagcccc

SEQ ID NO: 133629 - DNA, 201 bp, Homo sapiens
tgtgttcctagcaggccccgtgggccttgcagctgcctgagctcttggctgcagcctttgctgagctgcctgttgaataaccaatggcctgtgtgttctcrgaaggagtctgggtggggacttggtttcacaatgggattttcctctcaggcgcctctggtatgaaaagactcctttcccagggtggtcctgcctggcttc

SEQ ID NO: 133630 - DNA, 201 bp, Homo sapiens
gggtacaggtaggaagcggcttgccaggcttccctccaggagagagttggacaagggcggggtgtggacccccatgctctgcttgtttcaataggcatcaygtccccagggacagccacccagagctgaggtggaggctgagggggtggtcagggtcttcctgctgtctctgaagaccccctggggacacgtgcttgtcct

SEQ ID NO: 133631 - DNA, 201 bp, Homo sapiens
ggtcagggtcttcctgctgtctctgaagaccccctggggacacgtgcttgtcctcctctgccctatgtccccttgtcgctcttccctcctctgttgtcccrggtcgtgcccatgtgtgcgatcatgtgcccttcaacagactatgccctgggcatgatgaggggtgggactgggggagcacgaggcaggtcctggctttaa

SEQ ID NO: 133632 - DNA, 201 bp, Homo sapiens
tcctctgccctatgtccccttgtcgctcttccctcctctgttgtcccaggtcgtgcccatgtgtgcgatcatgtgcccttcaacagactatgccctgggcmtgatgaggggtgggactgggggagcacgaggcaggtcctggctttaaggaggcattgggatgtggtccccaccctgatcagggccccacatccactggtt

SEQ ID NO: 133633 - DNA, 201 bp, Homo sapiens
ggcctcatgaggaggcttagccagggggatgcagcactccaggtggaagagccgcggtgtagacaggagggtgggcttggggatgggaaccatggggcagygcagtgccagggccaggctggcaaggccactatgcttggagccctcctgagggcaggggccctgggctattggtgtgtgggtgctgggggtgggtgtttg

SEQ ID NO: 133634 - DNA, 201 bp, Homo sapiens
ttggttacatgccggtctctggttgtccctgtgctcccggggagaaggatgggccccttcctggctggccccatcaccccaccattgcctttgtacccccygaggccacctgctctgcggagaccccaacccacgaggggcactaatggactccaggggagcactggtgggttctcaccctccacccagtcccagcacacc

SEQ ID NO: 133635 - DNA, 201 bp, Homo sapiens
tctgagggcttcagggcccccgtggccacaggccataggacatctactcaagtgttggagaccacctcaggcaaaggcatgggaaaggagcaggaggagcygggtcgctgaccctgagcgtggggcctctgcctaccaggtgtgtggttggcccctccaccctttgtgctgcccttcagggtgggcagccccctcccccat

SEQ ID NO: 133636 - DNA, 201 bp, Homo sapiens
cctcaggcaaaggcatgggaaaggagcaggaggagctgggtcgctgaccctgagcgtggggcctctgcctaccaggtgtgtggttggcccctccacccttkgtgctgcccttcagggtgggcagccccctcccccatttgcagctcccagcccctacacagcaccagagggagaagggtgagctgacctgggaggcccaag

SEQ ID NO: 133637 - DNA, 201 bp, Homo sapiens
ccttccccaatctcctgtttcttggcattctgtacacacctcgacgatggtatttaccaaaagcccccctcaagacagctccataacacagggaagcaggraaatgtcatcttcttcactctactgatcaaacattgctacaagtgccaggtccactacgagattccactagatagacaaccaaaaggcaagaagagagcc

SEQ ID NO: 133638 - DNA, 201 bp, Homo sapiens
catcctgctgtcacttgggcttgcccaggctccctgtgacttttggccctggccccacaggatgcctatgacaatgtgaccctggacgtggagctggctcrccgtgagggctggtgttttggggccaagctggtgcggggcgcatacctggcccaggagcgagcccgtgcggcagagatcggctatgaggaccccatcaac

SEQ ID NO: 133639 - DNA, 201 bp, Homo sapiens
ccagcctcaagtcttcattttatctaagcaagtttatgaaaggaaaatgagtttaagtttaagaaaaggagttgaacctggcttaaagaaggtggaagagratttcaggattgaaacagttttccattgtctatcaagagatgggttacattgtctctgaaattaatcaggtggcagtggcaggtggttttgttttttaac

SEQ ID NO: 133640 - DNA, 201 bp, Homo sapiens
tgtgacaaagaccaatacatgaattgcattaaaacacgaggccaacggtcttttaaagcttcaggaagctgctcaggcacctattccctcatacattctaygttttatatgctagagatcttaaacagggcacaatcagttcctgttttgtgataacattctcaaggatgagactcatccctgtaaaaattgcttgtgatg

SEQ ID NO: 133641 - DNA, 201 bp, Homo sapiens
cccagcctcaagtcttcattttatctaagcaagtttatgaaaggaaaatgagtttaagtttaagaaaaggagttgaacctggcttaaagaaggtggaagaraatttcaggattgaaacagttttccattgtctatcaagagatgggttacattgtctctgaaattaatcaggtggcagtggcaggtggttttgttttttaa

SEQ ID NO: 133642 - DNA, 201 bp, Homo sapiens
atttctgaagcttctgtgtccccagcttaccctgttctgaaatgttgtattccattggacagggctgctatttttagtcagccatgcatttggattttacrcttaatctagtaagtaaaaatgagaagaaaatttggcatttaaaaattgattttaagggttggcaaaagtattttttccagtaagcctttcactggatat

SEQ ID NO: 133643 - DNA, 201 bp, Homo sapiens
tttacttgaagtcatctcatccagtcccctgctttagggcaggacttcagttccactgttcatttctgaagcttctgtgtccccagcttaccctgttctgraatgttgtattccattggacagggctgctatttttagtcagccatgcatttggattttacacttaatctagtaagtaaaaatgagaagaaaatttggcat

SEQ ID NO: 133644 - DNA, 201 bp, Homo sapiens
atagtagtggccaaattctcattattttgtacaagataaaggttatgcatcacttttatggtattttgtgaactcagctaagggaatgcctgttcagagcytggagttgttacctttacttgaagtcatctcatccagtcccctgctttagggcaggacttcagttccactgttcatttctgaagcttctgtgtccccagc

SEQ ID NO: 133645 - DNA, 201 bp, Homo sapiens
agtgtcagtggcaaccttttcatttagagaagtttttcttgttccaggcccttcaggacaggatctgactgcaagactccccaaaatgggtacccatcttytaagttcccttttgtagctactgtacttttgacttgatgcatgtgcctctcatgcatcaagatggggctgatgtggttctcctgggtggttgggaatgtg

SEQ ID NO: 133646 - DNA, 201 bp, Homo sapiens
tgagctgcttggaagctgttgtggtcagaccttattggcctttgctgtacccaggtgacccccttccattgggctctctggctacaatacttcctgttttwgcctgcgtggaaggatctaagatggccttatttccttccttagccactcagaaggttgggtggctttgtggtctggggtttaagggaggagttgtacaac

SEQ ID NO: 133647 - DNA, 201 bp, Homo sapiens
aagtagctgctaactgggagaaacaggactgaacctgcctcttggcccagggtgtttttacttataccacacggatccaatgcactgactttttttaagtkatgtcttctttcttccccttcccttttttacattctacttctctgtttcagacatctgaagagctgccatgtctggggcatcttcctcagaacagaacaa

SEQ ID NO: 133648 - DNA, 201 bp, Homo sapiens
aagtgtgcataactgtatttgaaatgtgtttttgtgtgcgtgtgtgtagaatgggtaaataaaattgttgagtaacttgaacctatcagaaggcttctggrttttttgtttagtattttcagttgtgtttcccatcccttccccacccctaaaactttgcctcatgctgcacaaggattcagactcagacaagccaacaga

SEQ ID NO: 133649 - DNA, 201 bp, Homo sapiens
tccccaagtgttggaattccaggagtgagccaccgtgcccggcctcactgtttgcaaaactgagtcctaccgttagattggagttaatttcctggtaatgwacttcgtctatacataacccaccccaccccaactgctgccactactctgcccagattcttaaaactagaatctgaggtcatgaaaccttgagcaggacac

SEQ ID NO: 133650 - DNA, 201 bp, Homo sapiens
ggattgttgaatcataaacatgcctgtgtccaccttatgcttaatactgactcagaatctctgggatctgggtctggacatgcatgtatttaagtagcttcccggatgattctgattcatagctcgggttaagaactccaccttaggaagttaggtggaaaaatactggatagtagtttctcagacaaaagtgtcagccta

SEQ ID NO: 133651 - DNA, 201 bp, Homo sapiens
aggattgttgaatcataaacatgcctgtgtccaccttatgcttaatactgactcagaatctctgggatctgggtctggacatgcatgtatttaagtagcttcccggatgattctgattcatagctcgggttaagaactccaccttaggaagttaggtggaaaaatactggatagtagtttctcagacaaaagtgtcagcct

SEQ ID NO: 133652 - DNA, 201 bp, Homo sapiens
tttaccacctcagcgctccggcgttctttagactgagtcccgggggtaactagggagagggtgcggagcagggcttgagaatgcactagaggagaaatgamgacgtgctagggctgtcttggggtccagttactgtttttccttcagggaatatgttcgagattttcccacgtccctcacttttttcttttctttctttct

SEQ ID NO: 133653 - DNA, 201 bp, Homo sapiens
tgccgcttttttcatccccttggtcactccgacattaggccaagaaacaagtcccatttggtggggccatcatattattttgctgctgaaggatttgggtrtcttctacagtgtttaatcttggggtgtatcggcgtgaagcagtcaagtcctataagtcctacgacttctttcggcatgacaatgaggaggccatgaaga

SEQ ID NO: 133654 - DNA, 201 bp, Homo sapiens
cttccgtcctcaccagccccctgttgtctgaattgggggcatgagctcaggactttcccactccagtttgaatcagggcttacccctcttcctgaggtgamcttggggaagtcatttaccacctcagcgctccggcgttctttagactgagtcccgggggtaactagggagagggtgcggagcagggcttgagaatgcact

SEQ ID NO: 133655 - DNA, 201 bp, Homo sapiens
aaacaattacatttcactgcactgtgcagtaattcccattagcaacatgtaactcatattatgtattataaagaaaacttttggagattttttagcacttrgtggactgttgttcctaaaatgtgatttgcccatttctaaagagattatggtcaagggtataaaacagcatttaattttttttgagacaggaaatacaga

SEQ ID NO: 133656 - DNA, 201 bp, Homo sapiens
ctcttgaaggcgcaggatcttccgtcctcaccagccccctgttgtctgaattgggggcatgagctcaggactttcccactccagtttgaatcagggcttamccctcttcctgaggtgaccttggggaagtcatttaccacctcagcgctccggcgttctttagactgagtcccgggggtaactagggagagggtgcggagc

SEQ ID NO: 133657 - DNA, 201 bp, Homo sapiens
agaaggagttagctattttccaagggtgttttcatttggtaatggaagactttttgctgtggttctcatccaggagtattccttagaattgcctttaggaktgttgaatcataaacatgcctgtgtccaccttatgcttaatactgactcagaatctctgggatctgggtctggacatgcatgtatttaagtagcttcccg

SEQ ID NO: 133658 - DNA, 201 bp, Homo sapiens
aggtttatgaagataaaatgagattatgactatgaagttcgtagctcagtgtataaaccttactagaccccagcggggctgggcgcctcacgcctgtaatmccagcactttgggaggctgaggtgggtggatcatgaggtcaagaaattgagaccatcctggccaacatggtgaaaccccatctctactgaaaatacaaaa

SEQ ID NO: 133659 - DNA, 201 bp, Homo sapiens
agaagcagctggctggatgtgatactggggttggcagagttagggtctacaattagggtctcttttctctgccagggcaagaagccaggtgctaagggcaraataccccatgagagataactagtatagcatgatgtttgagtatagcctctggagtcagactgcctgagtttgaatcccgggtttatgacttcttagctc

SEQ ID NO: 133660 - DNA, 201 bp, Homo sapiens
gctatagagctgtactttggagctggttcacctggcagcttagtgttcacatcagcggctgctttattaatagcttaaccgttgttcccttgctgctcatwacacctgtgttggctaactttgactccgggaagtgactgggcttgaggatttcagggctgaagaatgactttagggagccaaaacctccgaaggagcatt

SEQ ID NO: 133661 - DNA, 201 bp, Homo sapiens
tggtgtaactgtgtgtttccctccagccctggcctcctgcccttgtcactaatcaccaaggagtcattaacttcctccctctatgcccacccctgacacttcaccattaatcttaacacagaacatgaggttatgtgtttataggacaacttaagctgttcttcagtttgaaacatcttttcacccaggggcaagttagca

SEQ ID NO: 133662 - DNA, 201 bp, Homo sapiens
gactggggtttcttttatgtacaaaagggaaacagattcagaacttacgtccaaacgtagtttgctacgtctgaaactgatgttggaattattttttttttaaattagtacccctttcatgagtcttaaccttgaatgttggctcctggaaatccaattaaatatggaaagtgtttggctgaagtgaaatgcaaattacta

SEQ ID NO: 133663 - DNA, 201 bp, Homo sapiens
gtgggaccatgggcaaagctcttaatttctccaggcttgagtttttccatttacacgagggaagttatcaagtcctcattttttttgtaaatctttttttyaaaatacatttatttatttattttgagaccgggttatgagactggctaatttttatatttttagtagagatagtgtttcaccatgttgccaaggctggtc

SEQ ID NO: 133664 - DNA, 201 bp, Homo sapiens
ccttgactgtctattgtgggaccatgggcaaagctcttaatttctccaggcttgagtttttccatttacacgagggaagttatcaagtcctcattttttttgtaaatcttttttttaaaatacatttatttatttattttgagaccgggttatgagactggctaatttttatatttttagtagagatagtgtttcaccatg

SEQ ID NO: 133665 - DNA, 201 bp, Homo sapiens
tgcacatttgtgacagcaacttttcctacagaaataatagaaaagatagacacattggaaatgttcatcagtattactaatttgctctcctaagaagttcyatattgtaagctgttttcaatattttaagatatttgatggaaattgggcagcatcaactatagccatagtggttaactgaaacatcagctttcttagtgt

SEQ ID NO: 133666 - DNA, 201 bp, Homo sapiens
acctgccaccacgcctggctaatttttgtagttttaggggagatggggtttcaccatcttggccaggctggtcttgaactcctgaccttgtgatccacccrccttggccacccaaagtgttgggattacaggcatgagccaccgtgcccggccgacatttctttttctttccttccttctacccttttatttttcatgcaa

SEQ ID NO: 133667 - DNA, 201 bp, Homo sapiens
aatcctggactctgctgcttggtgggagtgataaataattatttgacatggaaatttaatgcaaagtctccagggtagaatgtcctgtctaaaacaagtaracttagtgaaatgtctgttcttggggcttgactactggtgtagtccagcagtttcttactgctttcttaaactgaatctctgtctcctgggatgtttgca

SEQ ID NO: 133668 - DNA, 201 bp, Homo sapiens
tgttaagattcccagggataagggtgacaaggcatcctctgttcagtatgttttagaatcaacacaatcatttttacttctttttttccttgtactctctsaatcccacccccacataagtaagtggagtcaccaagtaaatatatgggataggaattatttccctgtcatcttgagtgttttaggctatttccttgtcta

SEQ ID NO: 133669 - DNA, 201 bp, Homo sapiens
ttcttagcattctctgtccacatgggtaaacaagagcagctggttccctggttgccttcagagcagctcccaagtatcagttcattttaaactttagggarggtaataggaccttcgggggaagtgcctaatgggctggaaggtgcggacaaagcaggcctagaagtgcaggtaatgagccaaatcatgggggattgagag

SEQ ID NO: 133670 - DNA, 201 bp, Homo sapiens
tgcacgttgtcccttacagaccaagttagcaggctttgtgtatgtgtgtgttgagtgtgtgtgtgtgtgtgtgtgtctgtgtgttttctttttacccttamttttcatttttaaaccccagtttgcccaagctctaaggaaatttctggaggaacaggaaataacagacctcaaagtgtggacaagccagttgaagaggac

SEQ ID NO: 133671 - DNA, 201 bp, Homo sapiens
cttgtgatctctctggttccgacttccagccgccttcccgagccagttaggcgattgcgaccctgccccgccccctgggtcctgcaggcgcccgattggtrgatgattctctccaggtgaggacctacgcgcgagggggcggggccagacgggctcacatgatttgccggcgactgtagcgccggtcccggccacaagctg

SEQ ID NO: 133672 - DNA, 201 bp, Homo sapiens
accttatggattttgaccatggttatgcacgttgtcccttacagaccaagttagcaggctttgtgtatgtgtgtgttgagtgtgtgtgtgtgtgtgtgtgtctgtgtgttttctttttacccttaattttcatttttaaaccccagtttgcccaagctctaaggaaatttctggaggaacaggaaataacagacctcaaag

SEQ ID NO: 133673 - DNA, 201 bp, Homo sapiens
atgtttgtgtctctgactgtttgagcttagctctccttgctggtttcatttgctcttatggcagacagtgtgctctggtggcgctggaagatgttaaggcrtatctcactgaggagaatggtcagattgcggtaagctttatctgctgcttcttctttctggtccccacccttgcagcagcctggctacccagccccacct

SEQ ID NO: 133674 - DNA, 201 bp, Homo sapiens
caccttatggattttgaccatggttatgcacgttgtcccttacagaccaagttagcaggctttgtgtatgtgtgtgttgagtgtgtgtgtgtgtgtgtgtgtctgtgtgttttctttttacccttaattttcatttttaaaccccagtttgcccaagctctaaggaaatttctggaggaacaggaaataacagacctcaaa

SEQ ID NO: 133675 - DNA, 201 bp, Homo sapiens
ctgaacctttgctccacaggtttatgaagataaaatgagattatgactatgaagttcgtagctcagtgtataaaccttactagaccccagcggggctgggygcctcacgcctgtaatcccagcactttgggaggctgaggtgggtggatcatgaggtcaagaaattgagaccatcctggccaacatggtgaaaccccatct

SEQ ID NO: 133676 - DNA, 201 bp, Homo sapiens
ctcaaggtgtgttcttgctcactgcgtctagctctgtgttaaagagtagataactttgacccatttctgctgtgatcattcaaccatcagatattcattgrgcacaacttgtgtacttagcaatgtacagggtgctccagttaaagttcatttccttttgggtttatattaactatgtagcaccttatggattttgaccat

SEQ ID NO: 133677 - DNA, 201 bp, Homo sapiens
ggtttgggcattttctggaagcctgcataaccttttaactctatttcaggaggcctgcctgatatctccttatttgtcttcccagacttgctgaacctttsctccacaggtttatgaagataaaatgagattatgactatgaagttcgtagctcagtgtataaaccttactagaccccagcggggctgggcgcctcacgcc

SEQ ID NO: 133678 - DNA, 201 bp, Homo sapiens
actgaggtcatatattttatctccttacttaaatcccatttggacgtaggctgtggtttcatagtcaggcaagtgctcaaggtgtgttcttgctcactgcrtctagctctgtgttaaagagtagataactttgacccatttctgctgtgatcattcaaccatcagatattcattgggcacaacttgtgtacttagcaatgt

SEQ ID NO: 133679 - DNA, 201 bp, Homo sapiens
tctgcctgctttctgattgtatccattgaagtgtatgtacattatggtaattctctgtctattaaatgtgtctaacaaaggaaggaattaagcactccacrtgttttctttataggggagttctgtacactatgattttaaatagatatttcttatatagtagtggccaaattctcattattttgtacaagataaaggtta

SEQ ID NO: 133680 - DNA, 201 bp, Homo sapiens
actgactcagaatctctgggatctgggtctggacatgcatgtatttaagtagcttcccggatgattctgattcatagctcgggttaagaactccaccttargaagttaggtggaaaaatactggatagtagtttctcagacaaaagtgtcagcctaggaattctgaattcctcatagtcctgaaaggacagttctttgggt

SEQ ID NO: 133681 - DNA, 201 bp, Homo sapiens
ctgtgtgtttccctccagccctggcctcctgcccttgtcactaatcaccaaggagtcattaacttcctccctctatgcccacccctgacacttcaccattwatcttaacacagaacatgaggttatgtgtttataggacaacttaagctgttcttcagtttgaaacatcttttcacccaggggcaagttagcaaattgagt

SEQ ID NO: 133682 - DNA, 201 bp, Homo sapiens
gtgagaaggagttagctattttccaagggtgttttcatttggtaatggaagactttttgctgtggttctcatccaggagtattccttagaattgcctttargattgttgaatcataaacatgcctgtgtccaccttatgcttaatactgactcagaatctctgggatctgggtctggacatgcatgtatttaagtagcttc

SEQ ID NO: 133683 - DNA, 201 bp, Homo sapiens
gcaggtgcctttgagggaggggctgggagacacatccagtgggagagggctggacttgcagtggcaccaggattcctgggaaacagacctccctgtctccrctcaaattagagtactttctccagacagcagtgtggggctcccagcagccactgagtcaatgacttgctgagttcactctgctgctacgaaagcttccaa

SEQ ID NO: 133684 - DNA, 201 bp, Homo sapiens
atattacatattgcatatttttatatctatctctctctatatataacatgcaaagccctcaagaacatgcctgactcagagaaatgtctgatcaatgccarctgttgttactatggaagcatttgttggcagtatggtgtagactatagattaacttgtcatgtgtgaggtatatgagccataacaaaaccaagtctatgt

SEQ ID NO: 133685 - DNA, 201 bp, Homo sapiens
aagccatgttgtgttcattgttaagaaatttgatagatttacccagcttttctatgtattttgacttattgaaaatatgtaacaactgagtcgggttgcarcactggtggggtagaatcgactttccctgaaggtgacacagatgtcagaattgtgtccagggatttaatttagacccatactgtccaggagactgtctct

SEQ ID NO: 133686 - DNA, 201 bp, Homo sapiens
atacaaaaaaactacaaaaaaaaaaaaaaaaaaaaaaaaaactagccgggcatggtggcgggcgcctgtagtcccagctactcgggaagctgaggcaggaraatggcttgaacccgggaggcggagcttgcagtgagccgagatcgcgccactgcactacagcctgggtgacaaagtgagactccatctcagggggaaaaa

SEQ ID NO: 133687 - DNA, 201 bp, Homo sapiens
tcagtttgaaacatcttttcacccaggggcaagttagcaaattgagtcttttaggacagattctcagatgggatgatctggaggaggaggaaaaagatacrctcccttggggctgagcatgccccacactcttggatcttctctctgttccctggtgtcttcactaatgtcctcatgttggtgaagtgttgggggatggag

SEQ ID NO: 133688 - DNA, 201 bp, Homo sapiens
aaagagaacaatctcatgttggcctcaaagcaagcaatgtctgaaagtgtctttgagagaagcatgattaggtagatgcagggagtatatagacatttctktctgtgcttctgctgcctcttcccttcccctcgttgctcgtcgtgccatattctggccaggtcttaactgcctcaaaaggggcctattcttctcaccaaa

SEQ ID NO: 133689 - DNA, 201 bp, Homo sapiens
gccacacttatgacttttataaagagaacaatctcatgttggcctcaaagcaagcaatgtctgaaagtgtctttgagagaagcatgattaggtagatgcakggagtatatagacatttctgtctgtgcttctgctgcctcttcccttcccctcgttgctcgtcgtgccatattctggccaggtcttaactgcctcaaaagg

SEQ ID NO: 133690 - DNA, 201 bp, Homo sapiens
aagaaggtgccgttgccttcttccatacttcgcttcccgatcttcgggagctcctgggaagcctgcattgtggatgctgagctcagcatcctgagctgctkggaagctgttgtggtcagaccttattggcctttgctgtacccaggtgacccccttccattgggctctctggctacaatacttcctgtttttgcctgcgtg

SEQ ID NO: 133691 - DNA, 201 bp, Homo sapiens
gcataaaagtattcttcagttggaacaaagtcccacctagaaaaacatacagaagatctacatatatatacatgtgtatgtttgtatatgttatctctggkagtagggtgatgcgtgatttgcatccttccatcattttttctgattttttgatttaaaataagcacttatgactttttttttgagatggagtctctcgct

SEQ ID NO: 133692 - DNA, 201 bp, Homo sapiens
aatctcttctacctgctttcctaactcttctgtagttcctttgccttgagggctttcaagtcagggaagcagtaatccctggtttctttcctgtcttctaractctaattcctgctctgggctctaatctctttttttccatactctagtttctctaaatgcctttttcttctctaagaagaagaaggtgtcctaaagcca

SEQ ID NO: 133693 - DNA, 201 bp, Homo sapiens
ctcattcagagtttttaaaaagactcagttactggagacactgtggtaaatgtccagtggactcacaggaggccttccacattacccaaaatgtgatgctktcttctacaagttaaagctgctgggtgctagtttataatactcaatctcaatcgtatgcccagtggactcacaggaggccttccacattacccaaaatgt

SEQ ID NO: 133694 - DNA, 201 bp, Homo sapiens
gcctcaaaaggggcctattcttctcaccaaattttgggcttagcaaaatcttcaggtcacctagtctagcccctgatgggaaggctgaattctgtttatcytatttatctacattacttgtcacactacaggcactgaggaaatggtacaaacttactagaagttcaggaaattgtacttcatcttggttttaaggagtaa

SEQ ID NO: 133695 - DNA, 201 bp, Homo sapiens
taggaatctcttctacctgctttcctaactcttctgtagttcctttgccttgagggctttcaagtcagggaagcagtaatccctggtttctttcctgtctyctagactctaattcctgctctgggctctaatctctttttttccatactctagtttctctaaatgcctttttcttctctaagaagaagaaggtgtcctaaa

SEQ ID NO: 133696 - DNA, 201 bp, Homo sapiens
aaaagaagacgtcctgggtcctgaaaaggctgggaaccattgctctcctagaccatccttcaggattagaatggagagcaagttgtgtttaccgtgagggwacctttgtcaagtgctgacatgaggcacaggagctggcagctgggactgaatgggcagtcatgagatcaggagactggtcagaaccctgaccttgactgt

SEQ ID NO: 133697 - DNA, 201 bp, Homo sapiens
tgtgtcagtccttctagctttgcttttttctccatggtaggaatctcttctacctgctttcctaactcttctgtagttcctttgccttgagggctttcaaktcagggaagcagtaatccctggtttctttcctgtcttctagactctaattcctgctctgggctctaatctctttttttccatactctagtttctctaaat

SEQ ID NO: 133698 - DNA, 201 bp, Homo sapiens
tcagtttactccttttaaaagtgggaatactaacagtgtctcccccaagagtgatgtgaggattaaatgactaaatgtaggaaggcgcttagaagagtgtkgggcatatatctaatgtgtgttatttttcacaggtgactcaatctgcctgttgtatttattcctgaaatgtttatattgaatcatactcaaatgctgtat

SEQ ID NO: 133699 - DNA, 201 bp, Homo sapiens
cattaattgttaagattcccagggataagggtgacaaggcatcctctgttcagtatgttttagaatcaacacaatcatttttacttctttttttccttgtrctctctgaatcccacccccacataagtaagtggagtcaccaagtaaatatatgggataggaattatttccctgtcatcttgagtgttttaggctatttcc

SEQ ID NO: 133700 - DNA, 201 bp, Homo sapiens
ggcacgatctcggctcactgcaacctcccccttcctgggttcaagcaattctcctgcctcagcctcctgagtagctgggattacaggcacccgccaccackcccggctaatttttttatttttagtagagatggggattcaccatgttggccaggctgttctcaaactcctgatctcctgatctacccaccttggcctccc

SEQ ID NO: 133701 - DNA, 201 bp, Homo sapiens
ggaagttacgctgaagtggatcatagtggatgccatcataaataagcagaacccttttggtatatcctgcatcttccccaaaacgatcaattcttactgtstgtgtatccactacacatatttcacattggtaaaacttggacaaaatcgatatctctattgctcctccccaagtgtcatcccttttgatccagtcacagt

SEQ ID NO: 133702 - DNA, 201 bp, Homo sapiens
gggtttatgacttcttagctcttgaacaagttgcttgttctctccatgcctcagtttactccttttaaaagtgggaatactaacagtgtctcccccaagartgatgtgaggattaaatgactaaatgtaggaaggcgcttagaagagtgttgggcatatatctaatgtgtgttatttttcacaggtgactcaatctgcctg

SEQ ID NO: 133703 - DNA, 201 bp, Homo sapiens
ccgggtttatgacttcttagctcttgaacaagttgcttgttctctccatgcctcagtttactccttttaaaagtgggaatactaacagtgtctcccccaaragtgatgtgaggattaaatgactaaatgtaggaaggcgcttagaagagtgttgggcatatatctaatgtgtgttatttttcacaggtgactcaatctgcc

SEQ ID NO: 133704 - DNA, 201 bp, Homo sapiens
ctcttttctctgccagggcaagaagccaggtgctaagggcagaataccccatgagagataactagtatagcatgatgtttgagtatagcctctggagtcaractgcctgagtttgaatcccgggtttatgacttcttagctcttgaacaagttgcttgttctctccatgcctcagtttactccttttaaaagtgggaatac

SEQ ID NO: 133705 - DNA, 201 bp, Homo sapiens
gtcagtttcatgattgacaatgataatctctcttcacctagcacccatggagcctgctggacagaagcagctggctggatgtgatactggggttggcagarttagggtctacaattagggtctcttttctctgccagggcaagaagccaggtgctaagggcagaataccccatgagagataactagtatagcatgatgttt

SEQ ID NO: 133706 - DNA, 201 bp, Homo sapiens
ttgtcagtttcatgattgacaatgataatctctcttcacctagcacccatggagcctgctggacagaagcagctggctggatgtgatactggggttggcaragttagggtctacaattagggtctcttttctctgccagggcaagaagccaggtgctaagggcagaataccccatgagagataactagtatagcatgatgt

SEQ ID NO: 133707 - DNA, 201 bp, Homo sapiens
aatgctaactcttgcctctgcttctggatggcaccattcctgcagaatcctgtcagtcagttcttctcacttcagtggttatatatatatatatatatatwgccagttagtcaaggaatatatatatctcagcaggtggaaacagccgaccagcatgagaccaggaattatctcatgttcaaagcttttcccagagcctcg

SEQ ID NO: 133708 - DNA, 201 bp, Homo sapiens
gaactgggtaattctttgttgtaggacctgtcctgtgcattgtaggatgttcagcagcttccctgggctttgcccactagatgccagtaacacctccaacmtgtgacaaccaaaatgtctccagacatgtcagaggttccccggggggcacagttatccctggttgagaatcactgctccatatctgaatgggggtgttgt

SEQ ID NO: 133709 - DNA, 201 bp, Homo sapiens
tgtccccaagcatctgtatttctaagcatcataggctgcatagcttcccaaaagatctgggactctgttccccacatattttggggaacttcaaggaatgmtaactcttgcctctgcttctggatggcaccattcctgcagaatcctgtcagtcagttcttctcacttcagtggttatatatatatatatatatatagcca

SEQ ID NO: 133710 - DNA, 201 bp, Homo sapiens
tgaactgggtaattctttgttgtaggacctgtcctgtgcattgtaggatgttcagcagcttccctgggctttgcccactagatgccagtaacacctccaasctgtgacaaccaaaatgtctccagacatgtcagaggttccccggggggcacagttatccctggttgagaatcactgctccatatctgaatgggggtgttg

SEQ ID NO: 133711 - DNA, 201 bp, Homo sapiens
catgagcattttcatttctatgcctgtcttttagatagaaacagcaggagggtttgcgaggagatgaagcatcatttcctgtccccaagcatctgtatttmtaagcatcataggctgcatagcttcccaaaagatctgggactctgttccccacatattttggggaacttcaaggaatgctaactcttgcctctgcttctg

SEQ ID NO: 133712 - DNA, 201 bp, Homo sapiens
tgctcctttacctaccttggaggggctcctgctgagactcaggaattttccatgtgtgcagtgggtaaaggactaaaagccaagccctctgaccccaggtstgggcctccatttctccctcctcaccactagggtcactctgagtacttcttgccaaacacccttaggaaacttttccttccgagggtggttctctacctg

SEQ ID NO: 133713 - DNA, 201 bp, Homo sapiens
gggtaaacaagagcagctggttccctggttgccttcagagcagctcccaagtatcagttcattttaaactttagggagggtaataggaccttcgggggaartgcctaatgggctggaaggtgcggacaaagcaggcctagaagtgcaggtaatgagccaaatcatgggggattgagagcaggcattgagccgagctggaga

SEQ ID NO: 133714 - DNA, 201 bp, Homo sapiens
tccacatgggtaaacaagagcagctggttccctggttgccttcagagcagctcccaagtatcagttcattttaaactttagggagggtaataggaccttcsggggaagtgcctaatgggctggaaggtgcggacaaagcaggcctagaagtgcaggtaatgagccaaatcatgggggattgagagcaggcattgagccgag

SEQ ID NO: 133715 - DNA, 201 bp, Homo sapiens
tgggaggtcccagtggatgcagttttttgttgttgttgttcttagcattctctgtccacatgggtaaacaagagcagctggttccctggttgccttcagarcagctcccaagtatcagttcattttaaactttagggagggtaataggaccttcgggggaagtgcctaatgggctggaaggtgcggacaaagcaggcctag

SEQ ID NO: 133716 - DNA, 201 bp, Homo sapiens
cttgggaggtcccagtggatgcagttttttgttgttgttgttcttagcattctctgtccacatgggtaaacaagagcagctggttccctggttgccttcaragcagctcccaagtatcagttcattttaaactttagggagggtaataggaccttcgggggaagtgcctaatgggctggaaggtgcggacaaagcaggcct

SEQ ID NO: 133717 - DNA, 201 bp, Homo sapiens
caggagctacgtaatactgtccatactctcttgtccatttctctcctttaacatgtaaaagaaaaaataatccagtgacatgcatttgatactatttaagyggaggaggggaatatatgatgtactggaatttttttactgcacactgggatatttaagaacgtggtttttaatgagatagcatcactgtaatcatggaga

SEQ ID NO: 133718 - DNA, 201 bp, Homo sapiens; identical to SEQ ID NO: 23361

SEQ ID NO: 133719 - DNA, 201 bp, Homo sapiens; identical to SEQ ID NO: 23362

SEQ ID NO: 133720 - DNA, 201 bp, Homo sapiens
agcctgtcccagggcccctagcggggtgggcctccggggagggagggagggagggagggcgggcgctggggcgcggctcaacccttcagtgccccgcaggyggctgtgcgtggcgagcagtggacgcccatcgagcccaagccccgggagcggccgcagatcggaggcaccatcaagcagccgcccagcaaccccccgccg

SEQ ID NO: 133721 - DNA, 201 bp, Homo sapiens
ccatggggaataaaccagcattgctgcctccggcctccgccgtttttctgtttcgtaaaccagcatcccggggttcctgctctgagtgaccctggcacctstcagggagtccaggtgtgccccatgagggcctgggggaggggcaggctgggcagagccacagaggggctcccctcaaaccccacattggctcaggtggga

SEQ ID NO: 133722 - DNA, 201 bp, Homo sapiens; identical to SEQ ID NO: 108236

SEQ ID NO: 133723 - DNA, 201 bp, Homo sapiens
caggcggctgtgcgtggcgagcagtggacgcccatcgagcccaagccccgggagcggccgcagatcggaggcaccatcaagcagccgcccagcaacccccmgccgcggcccccggccgaggcccgcaagaagcccagcgaggaggaggctgcggcggcggcggggggacccccgggaggtccccaggtcaaccccatcccg

SEQ ID NO: 133724 - DNA, 201 bp, Homo sapiens
gctggaggacggggccctgcagcctgtcctgtgcccaggaaagtgaccgcctgcttcgagtcagcggccaagaagtcggtgggtcagttcagacagctctycccagagctgccccgtgagactcaccctgcctgccccgcactccctacaggaagtagacggactgagggcacccagctgggagccaggagacctgggctc

SEQ ID NO: 133725 - DNA, 201 bp, Homo sapiens
cgaccctgtcactgtgctgtggggatgggtagggggcagctctgggtggcctggtggcccacagtaggtagagaaggggggtggcccaggcccccgggacrggagccccacagtgcctgacccacttctccccgcagtcctcatcaccgggggcatcgtggccacagctgggcgcttcacccagtggtactttggtgccta

SEQ ID NO: 133726 - DNA, 201 bp, Homo sapiens; identical to SEQ ID NO: 108250

SEQ ID NO: 133727 - DNA, 201 bp, Homo sapiens; identical to SEQ ID NO: 108249

SEQ ID NO: 133728 - DNA, 201 bp, Homo sapiens
ggggaggcatataaataacaataaatacacataaatagggggtgccctctggggagcacacgtgtccagtctaggggccccacggcctcggcggtcacacygaacggggcagcacgcaggtgcagccgacggggacgtggatgaactcggtgtggaaggcaaaggccccaggtgtggggagccccgagccgtcgcgggagc

SEQ ID NO: 133729 - DNA, 201 bp, Homo sapiens; identical to SEQ ID NO: 108253

SEQ ID NO: 133730 - DNA, 201 bp, Homo sapiens; identical to SEQ ID NO: 108254

SEQ ID NO: 133731 - DNA, 201 bp, Homo sapiens
tctggagggtgcgtggcagctggagtgggagcagagacctcagggtgggagggctggaggacggggccctgcagcctgtcctgtgcccaggaaagtgacckcctgcttcgagtcagcggccaagaagtcggtgggtcagttcagacagctctccccagagctgccccgtgagactcaccctgcctgccccgcactccctac

SEQ ID NO: 133732 - DNA, 201 bp, Homo sapiens; identical to SEQ ID NO: 23387

SEQ ID NO: 133733 - DNA, 201 bp, Homo sapiens; identical to SEQ ID NO: 23386

SEQ ID NO: 133734 - DNA, 201 bp, Homo sapiens; identical to SEQ ID NO: 23372

SEQ ID NO: 133735 - DNA, 201 bp, Homo sapiens; identical to SEQ ID NO: 23389

SEQ ID NO: 133736 - DNA, 201 bp, Homo sapiens; identical to SEQ ID NO: 108258

SEQ ID NO: 133737 - DNA, 201 bp, Homo sapiens; identical to SEQ ID NO: 23390

SEQ ID NO: 133738 - DNA, 201 bp, Homo sapiens; identical to SEQ ID NO: 23392

SEQ ID NO: 133739 - DNA, 201 bp, Homo sapiens
ttaaccacatggcttcagtgtggcgggcgtgtttgtgtgcctgctggagtacccccgggggaagaggaagaagggctccaccatggagcgctggtgagtcycctcctgctctggggtctctccgggggttgcggggcccaggcagggctcacagggttgggtggagcttggtttctcacttggaggctccggaaccaaccc

SEQ ID NO: 133740 - DNA, 201 bp, Homo sapiens; identical to SEQ ID NO: 108267

SEQ ID NO: 133741 - DNA, 201 bp, Homo sapiens; identical to SEQ ID NO: 108268

SEQ ID NO: 133742 - DNA, 201 bp, Homo sapiens; identical to SEQ ID NO: 23364

SEQ ID NO: 133743 - DNA, 201 bp, Homo sapiens
ggctgggggcggggcctgggcggggcggggttcggccgggagcgcaggggcggcagtgcgcgcctagcagtgtcccagccgggttcgtgtcgccatggggyagatcgagtgggccatgtgggccaacgaacaggcgctggcgtccggcctgagtgagtgcacgtcagggacggtggaggctgcagcctggaggggtgtccc

SEQ ID NO: 133744 - DNA, 201 bp, Homo sapiens; identical to SEQ ID NO: 23377

SEQ ID NO: 133745 - DNA, 201 bp, Homo sapiens; identical to SEQ ID NO: 23378

SEQ ID NO: 133746 - DNA, 201 bp, Homo sapiens; identical to SEQ ID NO: 23379

SEQ ID NO: 133747 - DNA, 201 bp, Homo sapiens
caggcctgggccccctttccacgactggggctgctccccccggggccccttaactaaaatctccaacagagcctgggtcccgaagcgtggctagttcaccwtcagggagggcgcttggccttggatgttgatccgaaccacgaaggctgggggccctgccttgagccgacagccctgcagttcatcctcagagacttgcct

SEQ ID NO: 133748 - DNA, 201 bp, Homo sapiens; identical to SEQ ID NO: 23380

SEQ ID NO: 133749 - DNA, 201 bp, Homo sapiens
actcggtgtggaaggcaaaggccccaggtgtggggagccccgagccgtcgcgggagcagggccggcggcgcagcaccagcaggctctggagcagccgcacrgagttgagcgcagctgtctcgcggcccgtccgtgcatcgatacagcctctgcacaggcactcggcgaaggccagcttctgtggatagcggtcctcatccg

SEQ ID NO: 133750 - DNA, 201 bp, Homo sapiens
gcagggcacggccagccgcaagcagcagctcagccgtccaggtcaggagggccggagggagggagctcaggtggccacgcccacttgacaggtgagaaccrccaaggcccagagagctctccgggcagtcagggccccgccaggggaggggcagccccacgccacagcggaatccccaggtcctcaccggtatctccaggg

SEQ ID NO: 133751 - DNA, 201 bp, Homo sapiens
gaggcaggagaatcgcttcaacctgggaggtggaggttgtagtgagctgagatcacgccacggaactccagcctgggtgacagggcaagactctgtctccaaaaaaaaaaaaaaaaagaaataaaatagtaggaaggaccaggcgccgtggctcatgcctgtaatcccaacactctgggaggccaaggcgggcggattccc

SEQ ID NO: 133752 - DNA, 201 bp, Homo sapiens
agatgcagaaaccacactcggcctgttagctttcagtgcatcaaacaaagactcatggtgacaagggggtccatttgggggtcccagagcccactggggcytgcaggtcgggctgtccttggccactcctgggacccagagcccgggcatgtccagcaccccctccgccagcccgtgcgccacaggctctgctcttcacca

SEQ ID NO: 133753 - DNA, 201 bp, Homo sapiens; identical to SEQ ID NO: 23381

SEQ ID NO: 133754 - DNA, 201 bp, Homo sapiens
gtgcacctggccatgcacctggcagcagccgctcttatacctgaggccacacctgggggaaattccggcaccacttcctcctcgggaagtgcccagctggkgcgcttcttccttctctggtccccgcagcccccgcctgctgtgcatcaggacacagacatgcaaggaggccccgggaggcgctgtcctgttacccccctc

SEQ ID NO: 133755 - DNA, 201 bp, Homo sapiens; identical to SEQ ID NO: 23382

SEQ ID NO: 133756 - DNA, 201 bp, Homo sapiens
cttcccctcacttgtgcggaggctgtggctggctgcacacacacctgcccacaggtcctcaccaccaccccagcccggtgcccccaaagctttgcccggcrtcagccacgtcccccacctttgggctctcgccaaggcacccactcccctgaggccggagaagcccttgcctgctgcttgtccacctgctctcccagcaac

SEQ ID NO: 133757 - DNA, 201 bp, Homo sapiens; identical to SEQ ID NO: 23383

SEQ ID NO: 133758 - DNA, 201 bp, Homo sapiens
agggcagaggcaccactgcagcagctccaggaaggacctgcaccgggggaggagtgcctgggaagggcctgggggctgagggtgaggaggaggggcccgcygccaccactcccctggggctctgagcgccctccctgttgtctggagggtgcgtggcagctggagtgggagcagagacctcagggtgggagggctggagga

SEQ ID NO: 133759 - DNA, 201 bp, Homo sapiens; identical to SEQ ID NO: 23384

SEQ ID NO: 133760 - DNA, 201 bp, Homo sapiens; identical to SEQ ID NO: 108279

SEQ ID NO: 133761 - DNA, 201 bp, Homo sapiens
cagtgtggcgggcgtgtttgtgtgcctgctggagtacccccgggggaagaggaagaagggctccaccatggagcgctggtgagtctcctcctgctctgggktctctccgggggttgcggggcccaggcagggctcacagggttgggtggagcttggtttctcacttggaggctccggaaccaaccctttggtgcttgtggg

SEQ ID NO: 133762 - DNA, 201 bp, Homo sapiens
tgagacccccagtaattcccttgcagaccctgcggagcgcggcgcccctcccccattcccttctctcggtcccccgactccgcgaaggaggaagttgcagygcaggggaagaggcggttcagccccggtggtttccggggtcaccgccccgaagcccccgagtgggggctccggcctgggcatcgggagaagctcccctgc

SEQ ID NO: 133763 - DNA, 201 bp, Homo sapiens
ctgtggcccctcaggctgagctgggctgttccttaaccacatggcttcagtgtggcgggcgtgtttgtgtgcctgctggagtacccccgggggaagaggamgaagggctccaccatggagcgctggtgagtctcctcctgctctggggtctctccgggggttgcggggcccaggcagggctcacagggttgggtggagctt

SEQ ID NO: 133764 - DNA, 201 bp, Homo sapiens; identical to SEQ ID NO: 23358

SEQ ID NO: 133765 - DNA, 201 bp, Homo sapiens
gtaggtagagaaggggggtggcccaggcccccgggacaggagccccacagtgcctgacccacttctccccgcagtcctcatcaccgggggcatcgtggccrcagctgggcgcttcacccagtggtactttggtgcctactccatgtatccttccacctgaggctggggtgggcggggaacgcccagggcagagctggggag

SEQ ID NO: 133766 - DNA, 201 bp, Homo sapiens
cccctgtaggttcttcgtatggtgcgctccgctggatcacgtgagccagttccaaaatggcggcaggggtggccgggtggggggttgaggcagaggagttygaagatgctcctgatgtggagccgctggagcctacacttagcaacatcatcgagcagcgcagcctgaagtggatcttcgtcgggggcaagggtggtgtgg

SEQ ID NO: 133767 - DNA, 201 bp, Homo sapiens
cagactcagtcagctgaaccttacctctctagtccacatagaggggtcaggagataaatcagagagggttcctttgtagggactgaggctcaatcccaccrtaacccatactctcctctcaaggcccctgctgattcgggtcacctgctccagggaacctaccactccccttgcagacccagggaacagagcccatcccct

SEQ ID NO: 133768 - DNA, 201 bp, Homo sapiens
ggaccaggtgtgcccacccacccagcactggctcagcagaggcacctctgcccctttattctctgatcttttgctccaccatctggccctctgccctctarcctcctgccctttgcccccacatttcagatccttcacccttattccggccatagaggactgtggctggcctggcctaggtccctgtgaccctggagagca

SEQ ID NO: 133769 - DNA, 201 bp, Homo sapiens
agggtgaacatctgccagtctgggaacacggcgtcccagcctgctgggcttggaacctcgggcggggctatgtagaatgcacgaggggctcctgagcactmtaggatgcccatcccagggtttgacccctgaacttctgcccctcccacaccaatctgtgtgttaatgttcttcaggctgggcaatggagggggagtgggt

SEQ ID NO: 133770 - DNA, 201 bp, Homo sapiens
ccactgggcgaaggggaggccaaggaccggcttttccaccacgaccggggcatgggggctggcgggggtctttgggtttcactctctggaagttacctggmgcaaatgagaaagacctcaatgcagccctagcaccctctgagttggaccatccgtgttggggctcaagtgccgaaccacagtgaactcagcgcccggggg

SEQ ID NO: 133771 - DNA, 201 bp, Homo sapiens
cccctcggggcagagtttgcacaaagtcccccccataatacagggggagccacttgggcaggaggcagggaggggtccattccccctggtggggctggtgrggagctgtagttgccccctacctctcccacctcttgctcttcaataaaatgatcttaaactgctgtattgttgacattgggaggtgagggtaagcacctt

SEQ ID NO: 133772 - DNA, 201 bp, Homo sapiens
ctggacaagcagactgaaccatcctgtgcttactagggaatgcaggagaccccttagcttattaaggaagggggcacggagtcaagctatgctggctggaycgctgggccatgccactgtgcccagcaaaaaagaagcaggcactaggccagacagactcagtcagctgaaccttacctctctagtccacatagaggggtc

SEQ ID NO: 133773 - DNA, 201 bp, Homo sapiens
gctctccaaggggcgtgagagtgttctgatcatctccacagacccagcacacaacatctcagatgcttttgaccagaagttctcaaaggtgcctaccaagktcaaaggctatgacaacctctttgctatggtgagtggaacagggcttagcccccacttctgggaaaagcctcttccagcctttcttgtgcgcacacacca

SEQ ID NO: 133774 - DNA, 201 bp, Homo sapiens
aaaatggcaaagctgaggccggccgcagtggctcatgcctgtaatcctaggacttcgcaaggccgaggcaggtggattgcctgaggtcaggagttcaagaycagcctggccaaaatggtgaaaccccaccagtactaaaaatacaaaaattagccgggcatggtggtgcgcgcctgtaatcccagctactcaagaggctga

SEQ ID NO: 133775 - DNA, 201 bp, Homo sapiens
aagatccaggccaagtatctggaccaggtgtgcccacccacccagcactggctcagcagaggcacctctgcccctttattctctgatcttttgctccaccrtctggccctctgccctctagcctcctgccctttgcccccacatttcagatccttcacccttattccggccatagaggactgtggctggcctggcctaggt

SEQ ID NO: 133776 - DNA, 201 bp, Homo sapiens
aaaaagaagcaggcactaggccagacagactcagtcagctgaaccttacctctctagtccacatagaggggtcaggagataaatcagagagggttcctttktagggactgaggctcaatcccaccataacccatactctcctctcaaggcccctgctgattcgggtcacctgctccagggaacctaccactccccttgcag

SEQ ID NO: 133777 - DNA, 201 bp, Homo sapiens
tgatggacataaagttgagcctatggagtcaggccaaggaggaccgggaatctaacttcaccgaaagggcatggactgggtgtttggctggttgctaaggwgaggttggcgctaccggaacataagagtgattggtgtaagtaagaaaagacatagccaatgaaaggagagctgcaagacctagggcccaatcagtgaaag

SEQ ID NO: 133778 - DNA, 201 bp, Homo sapiens
tgagggtaagcacctttatgtacagttgcacaggttgtgcactggacagaagtgtcacatctagaggggcccattcacaacagagacctaatagagatgcrtgtttattgtggcaactttggaaggagggtgtcttgggtgagagatacctttgtctcattctgtgtgggttaaggtgtccctgttgggcctgtgaagcct

SEQ ID NO: 133779 - DNA, 201 bp, Homo sapiens
tcctccatcttccgcttgaacagctccaggaagctgccgtcgttggcgaacaagttcacgccgcccgacaccgggctcgaacccgcgcccgacacctcctmgtccccgctctcgggcgacgtccccgatcccgactcagcccaacggctcccgccaccgccaccgcccgcggggcccggagcctcccggccctgaggctcc

SEQ ID NO: 133780 - DNA, 201 bp, Homo sapiens
tcagctgaaccttacctctctagtccacatagaggggtcaggagataaatcagagagggttcctttgtagggactgaggctcaatcccaccataacccatmctctcctctcaaggcccctgctgattcgggtcacctgctccagggaacctaccactccccttgcagacccagggaacagagcccatcccctcatccccta

SEQ ID NO: 133781 - DNA, 201 bp, Homo sapiens
cagctctccaaggggcgtgagagtgttctgatcatctccacagacccagcacacaacatctcagatgcttttgaccagaagttctcaaaggtgcctaccamggtcaaaggctatgacaacctctttgctatggtgagtggaacagggcttagcccccacttctgggaaaagcctcttccagcctttcttgtgcgcacacac

SEQ ID NO: 133782 - DNA, 201 bp, Homo sapiens
agacagagaggctgatccaggagctggccaagtgcaagattgacacacacaatataattgtcaaccagctcgtcttccccgaccccgagaagccctgcaaratgtgtgaggcccgtcacaagatccaggccaagtatctggaccaggtgtgcccacccacccagcactggctcagcagaggcacctctgcccctttattct

SEQ ID NO: 133783 - DNA, 201 bp, Homo sapiens
cccgagtggcgaacgcccgcttcggtggcttctcccagctgctgctactgtggcgtgggagcatctacaaactcctgtggcgagagctgctctgcttcctygggttctacatggcgctgagtgctgcctaccggtgaggctgccctgaggtgctcatgttctagcggagggggggcagctattatatatatataatatata

SEQ ID NO: 133784 - DNA, 201 bp, Homo sapiens; identical to SEQ ID NO: 23399

SEQ ID NO: 133785 - DNA, 201 bp, Homo sapiens
agtcccccccataatacagggggagccacttgggcaggaggcagggaggggtccattccccctggtggggctggtggggagctgtagttgccccctacctmtcccacctcttgctcttcaataaaatgatcttaaactgctgtattgttgacattgggaggtgagggtaagcacctttatgtacagttgcacaggttgtgc

SEQ ID NO: 133786 - DNA, 201 bp, Homo sapiens
ggacagcgaaggcatgggtcacagggtgaccagcccaggcgggttcctaattactccgggcagggtgaacatctgccagtctgggaacacggcgtcccagmctgctgggcttggaacctcgggcggggctatgtagaatgcacgaggggctcctgagcactctaggatgcccatcccagggtttgacccctgaacttctgc

SEQ ID NO: 133787 - DNA, 201 bp, Homo sapiens
agtcagggtagaagcagggaaactaacaaggagattgggggtgtaaccagttgagagatgacaacatcctggactctggtggaggcagaatgttgggggaraagtagtcagacttgaggttttttttttttttagacactcaagactcctctgtctcccaggctggagtgcagtaacccgatctaggctgactgcaacctc

SEQ ID NO: 133788 - DNA, 201 bp, Homo sapiens
ctgctgaagaggaataactgtgggaaagccctggacatcgcccgccaggcccgagacatgctgggggggaatgggatttctgacgagtatcacgtgatccrgcacgccatgaacctggaggccgtgaacacctacgaaggtaggagctggacctcagagggctcactgaggcctcagtgtctggggagggggtacagggag

SEQ ID NO: 133789 - DNA, 201 bp, Homo sapiens
ctacagggtcccttcggctgcctgaacaacgcccggtacggcatcgcgtggggcgtgcttggagcttcggagttctgcttgcacacagcccggcagtacgmcctcgacaggtgtgtgagggctgcagtgagattctctgggggtgtggggcagcttgggtttcactctctataccatgggtgactccccagcccccaccca

SEQ ID NO: 133790 - DNA, 201 bp, Homo sapiens
caggcagccttgtgactttgtcttgtgcctgcagccaagggggagctcctgggctgcttcgggctcacagagcccaacagcggaagtgaccccagcagcayggagaccagagcccactacaactcatccaacaagagctacaccctcaatgggaccaagacctggtaagggttctgggtggtgggcaggtggtgaacaggg

SEQ ID NO: 133791 - DNA, 201 bp, Homo sapiens
tctgctgaagaggaataactgtgggaaagccctggacatcgcccgccaggcccgagacatgctgggggggaatgggatttctgacgagtatcacgtgatcyggcacgccatgaacctggaggccgtgaacacctacgaaggtaggagctggacctcagagggctcactgaggcctcagtgtctggggagggggtacaggga

SEQ ID NO: 133792 - DNA, 201 bp, Homo sapiens
gtttggtgtcccactggccaggaaccagctgattcagaagaagctggcagacatgctcactgagattaccctgggccttcacgcctgcctgcagctcggcygcttgaaggaccaggacaagtaggggctgtgtggtgggggcggggggatggcagcggtggctggaggaccttgtgtccttcctggagagaaaggtccttc

SEQ ID NO: 133793 - DNA, 201 bp, Homo sapiens
gtgactttgtcttgtgcctgcagccaagggggagctcctgggctgcttcgggctcacagagcccaacagcggaagtgaccccagcagcatggagaccagarcccactacaactcatccaacaagagctacaccctcaatgggaccaagacctggtaagggttctgggtggtgggcaggtggtgaacaggggcaaaggggca

SEQ ID NO: 133794 - DNA, 201 bp, Homo sapiens
ggtttctctgctgaagaggaataactgtgggaaagccctggacatcgcccgccaggcccgagacatgctgggggggaatgggatttctgacgagtatcacrtgatccggcacgccatgaacctggaggccgtgaacacctacgaaggtaggagctggacctcagagggctcactgaggcctcagtgtctggggagggggta

SEQ ID NO: 133795 - DNA, 201 bp, Homo sapiens
tttggtgtcccactggccaggaaccagctgattcagaagaagctggcagacatgctcactgagattaccctgggccttcacgcctgcctgcagctcggccrcttgaaggaccaggacaagtaggggctgtgtggtgggggcggggggatggcagcggtggctggaggaccttgtgtccttcctggagagaaaggtccttcc

SEQ ID NO: 133796 - DNA, 201 bp, Homo sapiens
atcagggaatccccaccccgggctaggtttgcttggagcatcgggatgccaggatccccagtccttgttaccctcatgtgccactcccagggctgcccccragatggtttctctgctgaagaggaataactgtgggaaagccctggacatcgcccgccaggcccgagacatgctgggggggaatgggatttctgacgagta

SEQ ID NO: 133797 - DNA, 201 bp, Homo sapiens
gtgaacaggggcaaaggggcactggtcagacccctcaccgactgttccatccccaggatcacgaactcgcctatggccgatctgtttgtagtgtgggctcsgtgtgaagatggctgcattcggggcttcctgctggagaaggggatgcggggtctctcggcccccaggatccagggcaagttctcgctgcgggcctcagcc

SEQ ID NO: 133798 - DNA, 201 bp, Homo sapiens
acatcgcccgccaggcccgagacatgctgggggggaatgggatttctgacgagtatcacgtgatccggcacgccatgaacctggaggccgtgaacacctamgaaggtaggagctggacctcagagggctcactgaggcctcagtgtctggggagggggtacagggaggtgggacggggacaggtctgagtccaactccacc

SEQ ID NO: 133799 - DNA, 201 bp, Homo sapiens
cagacccctcaccgactgttccatccccaggatcacgaactcgcctatggccgatctgtttgtagtgtgggctcggtgtgaagatggctgcattcggggcytcctgctggagaaggggatgcggggtctctcggcccccaggatccagggcaagttctcgctgcgggcctcagccacaggcatgatcatcatggacggtgt

SEQ ID NO: 133800 - DNA, 201 bp, Homo sapiens
catcgcccgccaggcccgagacatgctgggggggaatgggatttctgacgagtatcacgtgatccggcacgccatgaacctggaggccgtgaacacctacraaggtaggagctggacctcagagggctcactgaggcctcagtgtctggggagggggtacagggaggtgggacggggacaggtctgagtccaactccacct

SEQ ID NO: 133801 - DNA, 201 bp, Homo sapiens; identical to SEQ ID NO: 23421

SEQ ID NO: 133802 - DNA, 201 bp, Homo sapiens
ttctgaagcagtggcctggggatacatgaaaattgattttaaagggaagttgtgagctatgaaaactccaaaccgactctgtattaatcttgtccaggtayacatgacattcacgccctgatccttgggagagctatcacgggaatccaggcgttcacggccagcaagtgagccgctccatcaggggcccgaaactctcaa

SEQ ID NO: 133803 - DNA, 201 bp, Homo sapiens
ctggctatttttttttttttttttttttaagtagagatggggtttcaccatgttggccaggctggtctggaactcctgacctcaattgatccacctgcctyggcctcctaaagtgctgggatgacaggcgtgagccactgcaccccgccacgaggataatttttgagtaaggggatgtatcagggaccaggcagccttgtg

SEQ ID NO: 133804 - DNA, 201 bp, Homo sapiens
cctggggatacatgaaaattgattttaaagggaagttgtgagctatgaaaactccaaaccgactctgtattaatcttgtccaggtacacatgacattcacrccctgatccttgggagagctatcacgggaatccaggcgttcacggccagcaagtgagccgctccatcaggggcccgaaactctcaagcccctttctggag

SEQ ID NO: 133805 - DNA, 201 bp, Homo sapiens
ggctatttttttttttttttttttttaagtagagatggggtttcaccatgttggccaggctggtctggaactcctgacctcaattgatccacctgccttgrcctcctaaagtgctgggatgacaggcgtgagccactgcaccccgccacgaggataatttttgagtaaggggatgtatcagggaccaggcagccttgtgac

SEQ ID NO: 133806 - DNA, 201 bp, Homo sapiens
ctggggatacatgaaaattgattttaaagggaagttgtgagctatgaaaactccaaaccgactctgtattaatcttgtccaggtacacatgacattcacgycctgatccttgggagagctatcacgggaatccaggcgttcacggccagcaagtgagccgctccatcaggggcccgaaactctcaagcccctttctggaga

SEQ ID NO: 133807 - DNA, 201 bp, Homo sapiens
ctcagccggactcgctgacgtgctgaaaactgcccccatttggtgaccgtctcgctcatcccggctctgcccgggacacatgggcctgaaccagctcagtyatttgactcacagtgcatcttctggcatccgtcagcctcctggctctgagcatcgaacccagatgccaggctgggtgggactgtgtgcaaaccgagtgag

SEQ ID NO: 133808 - DNA, 201 bp, Homo sapiens
ctcaccgactgttccatccccaggatcacgaactcgcctatggccgatctgtttgtagtgtgggctcggtgtgaagatggctgcattcggggcttcctgcyggagaaggggatgcggggtctctcggcccccaggatccagggcaagttctcgctgcgggcctcagccacaggcatgatcatcatggacggtgtggaggtg

SEQ ID NO: 133809 - DNA, 201 bp, Homo sapiens
agtgtgggctcggtgtgaagatggctgcattcggggcttcctgctggagaaggggatgcggggtctctcggcccccaggatccagggcaagttctcgctgygggcctcagccacaggcatgatcatcatggacggtgtggaggtgccagaggagaatgtgctccctggtgcatccagcctgggggtaagtggcagccactt

SEQ ID NO: 133810 - DNA, 201 bp, Homo sapiens
gtgtgggctcggtgtgaagatggctgcattcggggcttcctgctggagaaggggatgcggggtctctcggcccccaggatccagggcaagttctcgctgcrggcctcagccacaggcatgatcatcatggacggtgtggaggtgccagaggagaatgtgctccctggtgcatccagcctgggggtaagtggcagccacttt

SEQ ID NO: 133811 - DNA, 201 bp, Homo sapiens
ggctcggtgtgaagatggctgcattcggggcttcctgctggagaaggggatgcggggtctctcggcccccaggatccagggcaagttctcgctgcgggccycagccacaggcatgatcatcatggacggtgtggaggtgccagaggagaatgtgctccctggtgcatccagcctgggggtaagtggcagccactttgggaa

SEQ ID NO: 133812 - DNA, 201 bp, Homo sapiens
cattcggggcttcctgctggagaaggggatgcggggtctctcggcccccaggatccagggcaagttctcgctgcgggcctcagccacaggcatgatcatcrtggacggtgtggaggtgccagaggagaatgtgctccctggtgcatccagcctgggggtaagtggcagccactttgggaatgggtgttgggtcacctgcgg

SEQ ID NO: 133813 - DNA, 201 bp, Homo sapiens
ttggctcactgcaacctctcctgcccgggttcaagcgattctcctgcctcagtctcctgagtagctgggattacaggcacccaccaccacatctggctatttttttttttttttttttttaagtagagatggggtttcaccatgttggccaggctggtctggaactcctgacctcaattgatccacctgccttggcctcct

SEQ ID NO: 133814 - DNA, 201 bp, Homo sapiens; identical to SEQ ID NO: 23430

SEQ ID NO: 133815 - DNA, 201 bp, Homo sapiens
gaattccccttcccagcctcgcgtcccgagtttgactggcaggacccgctggtgctggaggagcagctgaccacagatgagatcctcatcagggacacctyccgcacctactgccaggagagactcatgcctcgcatcctgttggccaatcgcaacgaaggtgggcgggctggtgggtgccctgagactgctcctccgcct

SEQ ID NO: 133816 - DNA, 201 bp, Homo sapiens
ccgttctgtgcttgcagagaaaggcgggagaacacagagccaactggctaagtgtaaggacctctggtcgcaccgtgtgtctgctgcccctgttcagctgyctgtctgccgcaggtggactctgtcccagaatccgagagctgcccgagcggggtggcagggtcgtggccagggtcagaggcactaaggcagtgagtgcgc

SEQ ID NO: 133817 - DNA, 201 bp, Homo sapiens
agtgggcctcccctcgctcttaccctgccattgcccatgtaggatgcagtttggtgtcccactggccaggaaccagctgattcagaagaagctggcagacrtgctcactgagattaccctgggccttcacgcctgcctgcagctcggccgcttgaaggaccaggacaagtaggggctgtgtggtgggggcggggggatggc

SEQ ID NO: 133818 - DNA, 201 bp, Homo sapiens
acagggacggggtgggagagtgggcctcccctcgctcttaccctgccattgcccatgtaggatgcagtttggtgtcccactggccaggaaccagctgattsagaagaagctggcagacatgctcactgagattaccctgggccttcacgcctgcctgcagctcggccgcttgaaggaccaggacaagtaggggctgtgtgg

SEQ ID NO: 133819 - DNA, 201 bp, Homo sapiens
ggtgctggaggagcagctgaccacagatgagatcctcatcagggacaccttccgcacctactgccaggagagactcatgcctcgcatcctgttggccaatygcaacgaaggtgggcgggctggtgggtgccctgagactgctcctccgcctggagccatagccaccccacctcaaggcccctctgtccttggggctggggc

SEQ ID NO: 133820 - DNA, 201 bp, Homo sapiens
ggaggagcagctgaccacagatgagatcctcatcagggacaccttccgcacctactgccaggagagactcatgcctcgcatcctgttggccaatcgcaacraaggtgggcgggctggtgggtgccctgagactgctcctccgcctggagccatagccaccccacctcaaggcccctctgtccttggggctggggcttcctg

SEQ ID NO: 133821 - DNA, 201 bp, Homo sapiens
ctgtcaccttggtcttcaggctgttcctgaagttggtcatgagtgcatggtccttttgccggctcttgttgatgttttcgatcagctcctgggctctcttmtgcaggatgtcaatgcttgagtccagagaggagaagtagagtcccgacttcccttccaggaccgtcagctggcaactggcactggaggtggcgacacaag

SEQ ID NO: 133822 - DNA, 201 bp, Homo sapiens
gccaccccacctcaaggcccctctgtccttggggctggggcttcctgtggcctaggcctgggcctgaatttgggcactggtccctttgcagtttttcatckggagatcatttcggagatgggggagttgggtgtgctgggccccaccatcaaaggtaggaacaagtatctctccacacactgcagaaccctctgtattctg

SEQ ID NO: 133823 - DNA, 201 bp, Homo sapiens
agcctcgcgtcccgagtttgactggcaggacccgctggtgctggaggagcagctgaccacagatgagatcctcatcagggacaccttccgcacctactgcyaggagagactcatgcctcgcatcctgttggccaatcgcaacgaaggtgggcgggctggtgggtgccctgagactgctcctccgcctggagccatagccac

SEQ ID NO: 133824 - DNA, 201 bp, Homo sapiens
tgggcagggccctgttctctattgtcctgctttcccctcctactaccaccaggatatggctgtgctggggtttcgtctgtggcctatgggctcctggcccragagctggagcgggtggacagtggctacaggtcggcgatgagtgtccagtcctccctcgtcatgcaccctatctatgcctatggcagcgaggaacagcgg

SEQ ID NO: 133825 - DNA, 201 bp, Homo sapiens
ggcctatgggctcctggcccgagagctggagcgggtggacagtggctacaggtcggcgatgagtgtccagtcctccctcgtcatgcaccctatctatgccyatggcagcgaggaacagcggcagaagtacctgccccagctgggtgagtggctgcccatggggcctggtggaaggaagacagtctctgaggtctggaactc

SEQ ID NO: 133826 - DNA, 201 bp, Homo sapiens
gcagtgagtgcgctgtgcctgcggggccggagaaaagtcacctgatcagtctcgcttgcagctcgcactagccggggggcgacatgggtgttggggggtasggctgatgagggtccgagaagggagggcacagtgatcttgcggactggaccgaggcgaattccccttcccagcctcgcgtcccgagtttgactggcagga

SEQ ID NO: 133827 - DNA, 201 bp, Homo sapiens
actaaggcagtgagtgcgctgtgcctgcggggccggagaaaagtcacctgatcagtctcgcttgcagctcgcactagccggggggcgacatgggtgttggkgggtagggctgatgagggtccgagaagggagggcacagtgatcttgcggactggaccgaggcgaattccccttcccagcctcgcgtcccgagtttgactg

SEQ ID NO: 133828 - DNA, 201 bp, Homo sapiens
tctcttgggtgggcctgaggcgccatctcaaccctacagggtcccttcggctgcctgaacaacgcccggtacggcatcgcgtggggcgtgcttggagcttyggagttctgcttgcacacagcccggcagtacgccctcgacaggtgtgtgagggctgcagtgagattctctgggggtgtggggcagcttgggtttcactct

SEQ ID NO: 133829 - DNA, 201 bp, Homo sapiens
ccgctctgacacccccgctcctgtaggtcgccgtcgttgctccgctcgctctgagagagcatggccctgagaggcgtctccgtgcggctgctgagccgcgracccggcctgcacgtccttcgcacgtgggtctcgtcggcggcgcagaccggtcagtgtggggtcgggagtgtggagggaaggagggaggaactgggggtt

SEQ ID NO: 133830 - DNA, 201 bp, Homo sapiens
tgttctctattgtcctgctttcccctcctactaccaccaggatatggctgtgctggggtttcgtctgtggcctatgggctcctggcccgagagctggagcrggtggacagtggctacaggtcggcgatgagtgtccagtcctccctcgtcatgcaccctatctatgcctatggcagcgaggaacagcggcagaagtacctg

SEQ ID NO: 133831 - DNA, 201 bp, Homo sapiens
tgcctccttgtgtgtccttattcagccctgtctcttgggtcttagctgggcagggccctgttctctattgtcctgctttcccctcctactaccaccaggayatggctgtgctggggtttcgtctgtggcctatgggctcctggcccgagagctggagcgggtggacagtggctacaggtcggcgatgagtgtccagtcctc

SEQ ID NO: 133832 - DNA, 201 bp, Homo sapiens
ttctctattgtcctgctttcccctcctactaccaccaggatatggctgtgctggggtttcgtctgtggcctatgggctcctggcccgagagctggagcggrtggacagtggctacaggtcggcgatgagtgtccagtcctccctcgtcatgcaccctatctatgcctatggcagcgaggaacagcggcagaagtacctgcc

SEQ ID NO: 133833 - DNA, 201 bp, Homo sapiens
ttgtgtgtccttattcagccctgtctcttgggtcttagctgggcagggccctgttctctattgtcctgctttcccctcctactaccaccaggatatggctrtgctggggtttcgtctgtggcctatgggctcctggcccgagagctggagcgggtggacagtggctacaggtcggcgatgagtgtccagtcctccctcgtc

SEQ ID NO: 133834 - DNA, 201 bp, Homo sapiens
ctttcccctcctactaccaccaggatatggctgtgctggggtttcgtctgtggcctatgggctcctggcccgagagctggagcgggtggacagtggctacrggtcggcgatgagtgtccagtcctccctcgtcatgcaccctatctatgcctatggcagcgaggaacagcggcagaagtacctgccccagctgggtgagtg

SEQ ID NO: 133835 - DNA, 201 bp, Homo sapiens
attcagccctgtctcttgggtcttagctgggcagggccctgttctctattgtcctgctttcccctcctactaccaccaggatatggctgtgctggggtttygtctgtggcctatgggctcctggcccgagagctggagcgggtggacagtggctacaggtcggcgatgagtgtccagtcctccctcgtcatgcaccctatc

SEQ ID NO: 133836 - DNA, 201 bp, Homo sapiens
tttcccctcctactaccaccaggatatggctgtgctggggtttcgtctgtggcctatgggctcctggcccgagagctggagcgggtggacagtggctacargtcggcgatgagtgtccagtcctccctcgtcatgcaccctatctatgcctatggcagcgaggaacagcggcagaagtacctgccccagctgggtgagtgg

SEQ ID NO: 133837 - DNA, 201 bp, Homo sapiens
accccgccacgaggataatttttgagtaaggggatgtatcagggaccaggcagccttgtgactttgtcttgtgcctgcagccaagggggagctcctgggcygcttcgggctcacagagcccaacagcggaagtgaccccagcagcatggagaccagagcccactacaactcatccaacaagagctacaccctcaatgggac

SEQ ID NO: 133838 - DNA, 201 bp, Homo sapiens
ctgggcagggccctgttctctattgtcctgctttcccctcctactaccaccaggatatggctgtgctggggtttcgtctgtggcctatgggctcctggccbgagagctggagcgggtggacagtggctacaggtcggcgatgagtgtccagtcctccctcgtcatgcaccctatctatgcctatggcagcgaggaacagcg

SEQ ID NO: 133839 - DNA, 201 bp, Homo sapiens
cccctcctactaccaccaggatatggctgtgctggggtttcgtctgtggcctatgggctcctggcccgagagctggagcgggtggacagtggctacaggtyggcgatgagtgtccagtcctccctcgtcatgcaccctatctatgcctatggcagcgaggaacagcggcagaagtacctgccccagctgggtgagtggctg

SEQ ID NO: 133840 - DNA, 201 bp, Homo sapiens
ctggtaagggttctgggtggtgggcaggtggtgaacaggggcaaaggggcactggtcagacccctcaccgactgttccatccccaggatcacgaactcgcytatggccgatctgtttgtagtgtgggctcggtgtgaagatggctgcattcggggcttcctgctggagaaggggatgcggggtctctcggcccccaggatc

SEQ ID NO: 133841 - DNA, 201 bp, Homo sapiens
aggtgggcggatcacaaggtcaggagttcgagaccagcctggcaacatggtgaaacctcgtctctagtaaaaacaaaaaaacaaaaaattagccaggcacsgtggcacgtgcctgtagtcccagctacttgggaggctgaggcaggagaattgcttgaacccaggggatgaagttgcagtgagccgagatcacgccactgt

SEQ ID NO: 133842 - DNA, 201 bp, Homo sapiens
ggatccccagtccttgttaccctcatgtgccactcccagggctgcccccgagatggtttctctgctgaagaggaataactgtgggaaagccctggacatcrcccgccaggcccgagacatgctgggggggaatgggatttctgacgagtatcacgtgatccggcacgccatgaacctggaggccgtgaacacctacgaagg

SEQ ID NO: 133843 - DNA, 201 bp, Homo sapiens
ctgtgctggggtttcgtctgtggcctatgggctcctggcccgagagctggagcgggtggacagtggctacaggtcggcgatgagtgtccagtcctccctcrtcatgcaccctatctatgcctatggcagcgaggaacagcggcagaagtacctgccccagctgggtgagtggctgcccatggggcctggtggaaggaagac

SEQ ID NO: 133844 - DNA, 201 bp, Homo sapiens
aagggttctgggtggtgggcaggtggtgaacaggggcaaaggggcactggtcagacccctcaccgactgttccatccccaggatcacgaactcgcctatgrccgatctgtttgtagtgtgggctcggtgtgaagatggctgcattcggggcttcctgctggagaaggggatgcggggtctctcggcccccaggatccaggg

SEQ ID NO: 133845 - DNA, 201 bp, Homo sapiens
tccccagtccttgttaccctcatgtgccactcccagggctgcccccgagatggtttctctgctgaagaggaataactgtgggaaagccctggacatcgccygccaggcccgagacatgctgggggggaatgggatttctgacgagtatcacgtgatccggcacgccatgaacctggaggccgtgaacacctacgaaggtag

SEQ ID NO: 133846 - DNA, 201 bp, Homo sapiens
tctctcggcccccaggatccagggcaagttctcgctgcgggcctcagccacaggcatgatcatcatggacggtgtggaggtgccagaggagaatgtgctcyctggtgcatccagcctgggggtaagtggcagccactttgggaatgggtgttgggtcacctgcggatgcggctttgtcaggcaggctccgtgctggggacg

SEQ ID NO: 133847 - DNA, 201 bp, Homo sapiens
ccccagtccttgttaccctcatgtgccactcccagggctgcccccgagatggtttctctgctgaagaggaataactgtgggaaagccctggacatcgcccrccaggcccgagacatgctgggggggaatgggatttctgacgagtatcacgtgatccggcacgccatgaacctggaggccgtgaacacctacgaaggtagg

SEQ ID NO: 133848 - DNA, 201 bp, Homo sapiens
atccagggcaagttctcgctgcgggcctcagccacaggcatgatcatcatggacggtgtggaggtgccagaggagaatgtgctccctggtgcatccagccygggggtaagtggcagccactttgggaatgggtgttgggtcacctgcggatgcggctttgtcaggcaggctccgtgctggggacgcggctccctgtgcctg

SEQ ID NO: 133849 - DNA, 201 bp, Homo sapiens
tccttgttaccctcatgtgccactcccagggctgcccccgagatggtttctctgctgaagaggaataactgtgggaaagccctggacatcgcccgccaggyccgagacatgctgggggggaatgggatttctgacgagtatcacgtgatccggcacgccatgaacctggaggccgtgaacacctacgaaggtaggagctgg

SEQ ID NO: 133850 - DNA, 201 bp, Homo sapiens
atctcaaccctacagggtcccttcggctgcctgaacaacgcccggtacggcatcgcgtggggcgtgcttggagcttcggagttctgcttgcacacagcccrgcagtacgccctcgacaggtgtgtgagggctgcagtgagattctctgggggtgtggggcagcttgggtttcactctctataccatgggtgactccccagc

SEQ ID NO: 133851 - DNA, 201 bp, Homo sapiens
cttgttaccctcatgtgccactcccagggctgcccccgagatggtttctctgctgaagaggaataactgtgggaaagccctggacatcgcccgccaggccbgagacatgctgggggggaatgggatttctgacgagtatcacgtgatccggcacgccatgaacctggaggccgtgaacacctacgaaggtaggagctggac

SEQ ID NO: 133852 - DNA, 201 bp, Homo sapiens
catctcaaccctacagggtcccttcggctgcctgaacaacgcccggtacggcatcgcgtggggcgtgcttggagcttcggagttctgcttgcacacagccyggcagtacgccctcgacaggtgtgtgagggctgcagtgagattctctgggggtgtggggcagcttgggtttcactctctataccatgggtgactccccag

SEQ ID NO: 133853 - DNA, 201 bp, Homo sapiens
ttgttaccctcatgtgccactcccagggctgcccccgagatggtttctctgctgaagaggaataactgtgggaaagccctggacatcgcccgccaggcccragacatgctgggggggaatgggatttctgacgagtatcacgtgatccggcacgccatgaacctggaggccgtgaacacctacgaaggtaggagctggacc

SEQ ID NO: 133854 - DNA, 201 bp, Homo sapiens
tccgctcctcccacttcttgctgaggtcaaaggcctgcgtcagttgcactgtagcctcggcagtgaaccgggaggtactaccaggtaaggaaggtgcggtrgccccagccgtgggtgagaggagctccgctctgacacccccgctcctgtaggtcgccgtcgttgctccgctcgctctgagagagcatggccctgagaggc

SEQ ID NO: 133855 - DNA, 201 bp, Homo sapiens
atgtgccactcccagggctgcccccgagatggtttctctgctgaagaggaataactgtgggaaagccctggacatcgcccgccaggcccgagacatgctgsgggggaatgggatttctgacgagtatcacgtgatccggcacgccatgaacctggaggccgtgaacacctacgaaggtaggagctggacctcagagggctc

SEQ ID NO: 133856 - DNA, 201 bp, Homo sapiens
gagaaaggcgggagaacacagagccaactggctaagtgtaaggacctctggtcgcaccgtgtgtctgctgcccctgttcagctgtctgtctgccgcaggtsgactctgtcccagaatccgagagctgcccgagcggggtggcagggtcgtggccagggtcagaggcactaaggcagtgagtgcgctgtgcctgcggggccg

SEQ ID NO: 133857 - DNA, 201 bp, Homo sapiens
tgtgccactcccagggctgcccccgagatggtttctctgctgaagaggaataactgtgggaaagccctggacatcgcccgccaggcccgagacatgctggbggggaatgggatttctgacgagtatcacgtgatccggcacgccatgaacctggaggccgtgaacacctacgaaggtaggagctggacctcagagggctca

SEQ ID NO: 133858 - DNA, 201 bp, Homo sapiens
gagaagtagagtcccgacttcccttccaggaccgtcagctggcaactggcactggaggtggcgacacaagggcaagaaacctgacttctcagagtacaggragcggccaggtgtagtcgctcatgcctgtaatctcagcactttgtaggccgaggtgggcggatcacaaggtcaggagttcgagaccagcctggcaacatg

SEQ ID NO: 133859 - DNA, 201 bp, Homo sapiens
aggggatgtatcagggaccaggcagccttgtgactttgtcttgtgcctgcagccaagggggagctcctgggctgcttcgggctcacagagcccaacagcgsaagtgaccccagcagcatggagaccagagcccactacaactcatccaacaagagctacaccctcaatgggaccaagacctggtaagggttctgggtggtg

SEQ ID NO: 133860 - DNA, 201 bp, Homo sapiens
ggcactaaggcagtgagtgcgctgtgcctgcggggccggagaaaagtcacctgatcagtctcgcttgcagctcgcactagccggggggcgacatgggtgtkggggggtagggctgatgagggtccgagaagggagggcacagtgatcttgcggactggaccgaggcgaattccccttcccagcctcgcgtcccgagtttga

SEQ ID NO: 133861 - DNA, 201 bp, Homo sapiens
cactcccagggctgcccccgagatggtttctctgctgaagaggaataactgtgggaaagccctggacatcgcccgccaggcccgagacatgctgggggggratgggatttctgacgagtatcacgtgatccggcacgccatgaacctggaggccgtgaacacctacgaaggtaggagctggacctcagagggctcactgag

SEQ ID NO: 133862 - DNA, 201 bp, Homo sapiens
gtccacttgctactgagtaaggggcattcctattacagaccaaggagaactggagaaagaaagagaagatcagttcatggttgcatcgtggatgccaatctgagtgttctcaacttggttattgtaaaaaaaaggagagaagggtattcctggactgactgagactatgatgcctcgtcacctggggcccagtacagctag

SEQ ID NO: 133863 - DNA, 201 bp, Homo sapiens
tttgtagtgtgggctcggtgtgaagatggctgcattcggggcttcctgctggagaaggggatgcggggtctctcggcccccaggatccagggcaagttctygctgcgggcctcagccacaggcatgatcatcatggacggtgtggaggtgccagaggagaatgtgctccctggtgcatccagcctgggggtaagtggcagc

SEQ ID NO: 133864 - DNA, 201 bp, Homo sapiens
cgtgaagagacgcagactgtcctctctgcgagcttccacttctaagtctgaatccagtcagaaataagattttttgagtaacaaataagatcagattcgcaaaaaaaaaaaaaaacccacaaggccctgtgtgaccaggcctctgctgacctttccacctcatctctggccactcatgtgatcctcccagccagacttagc

SEQ ID NO: 133865 - DNA, 201 bp, Homo sapiens
ggtgtctcttgggtgggcctgaggcgccatctcaaccctacagggtcccttcggctgcctgaacaacgcccggtacggcatcgcgtggggcgtgcttggarcttcggagttctgcttgcacacagcccggcagtacgccctcgacaggtgtgtgagggctgcagtgagattctctgggggtgtggggcagcttgggtttca

SEQ ID NO: 133866 - DNA, 201 bp, Homo sapiens
gtgagctatgaaaactccaaaccgactctgtattaatcttgtccaggtacacatgacattcacgccctgatccttgggagagctatcacgggaatccagghgttcacggccagcaagtgagccgctccatcaggggcccgaaactctcaagcccctttctggagagatgcctggctggaccgtaggagcgctgtgctctga

SEQ ID NO: 133867 - DNA, 201 bp, Homo sapiens
taaagggaagttgtgagctatgaaaactccaaaccgactctgtattaatcttgtccaggtacacatgacattcacgccctgatccttgggagagctatcaygggaatccaggcgttcacggccagcaagtgagccgctccatcaggggcccgaaactctcaagcccctttctggagagatgcctggctggaccgtaggagc

SEQ ID NO: 133868 - DNA, 201 bp, Homo sapiens
catgaacctggaggccgtgaacacctacgaaggtaggagctggacctcagagggctcactgaggcctcagtgtctggggagggggtacagggaggtgggayggggacaggtctgagtccaactccacctatcactaagtgacagtgtgacctggggcgagccttacccctctgtccctcatctggagttactcacatgggg

SEQ ID NO: 133869 - DNA, 201 bp, Homo sapiens
ccactcccagggctgcccccgagatggtttctctgctgaagaggaataactgtgggaaagccctggacatcgcccgccaggcccgagacatgctggggggkaatgggatttctgacgagtatcacgtgatccggcacgccatgaacctggaggccgtgaacacctacgaaggtaggagctggacctcagagggctcactga

SEQ ID NO: 133870 - DNA, 201 bp, Homo sapiens
gaagtaagagggctgcgtgttggaggcaggagggcatccaacgccccgctccctcagcctggctctctcgtcaggcaaatcattcatttccaagccttatytatatcatgggtccaatctcttctctgtaggactattctaagggtaaattgagatacagatggtcccaacttactacagttcaacttactacatttttga

SEQ ID NO: 133871 - DNA, 201 bp, Homo sapiens; identical to SEQ ID NO: 23474

SEQ ID NO: 133872 - DNA, 201 bp, Homo sapiens
aattaatgaatttttgttttgttttgttctcactatgttgcccaggctggtctcaaactcctgatctcaaacagttttgcctcagcctcccaaagtgctgrgattacaggcatgagcccccacaccctgcctgcccccatgtcttctttgggcattccaggccgtgcacacctcagggcctttgcttatgttccgtcttta

SEQ ID NO: 133873 - DNA, 201 bp, Homo sapiens
ccgctcccagttccgacagatcttcctggagatggggtgagcacagggctgggggcggtgcctggtgcttctgctgggtacaggcagggcagtcaggctgygtctcccaccaggttcaccgagatgccgactgataacttcattgagagctccttctggaactttgacgccctcttccagccccagcagcacccagcccgt

SEQ ID NO: 133874 - DNA, 201 bp, Homo sapiens
catgaagcccatcgcccctagtcttcatctttggtgcttgttcatttctttcactgtccttagtgtggtccaaagtttaatgaacacacaccagacaggcytctggaacctagatgggctaggggccgtcctctcacaggacaaatgtcccctttgagcagacacagagtggcagagagaagagactagagctgggatgcc

SEQ ID NO: 133875 - DNA, 201 bp, Homo sapiens
agcaaggggaagtctttcccttgagaccacttggctgtaaagttgtatagctgggatgtgaacctagctttaagggctgtgctttcaacctgggacccagygctgcagaaagggggtgcctggctctgagcctcacccctgcctggacaccctccccacatttccctctaggtcatcgaggctgaacttcggtccaccaag

SEQ ID NO: 133876 - DNA, 201 bp, Homo sapiens
tccaccaagcactgggagcttactgcggagggcgaggagattgcccgggagggcagccatgaggcccgtgtgtttcgaagcattcccccagagggcctggyccagagcgagcttatggtaggagctgcggggtgaatggggagtgagtgatgggatgaaggtggccctcgtgccccactcactgcagcctctcttttccag

SEQ ID NO: 133877 - DNA, 201 bp, Homo sapiens
gatgaaaccctgtctctactaaaaatacaaaaaaaaattagccaggcgtgttggtgggcacccgtaatcccagctacttgggaggctgaggcagagaattktttgaatcgggaggtggaggttgcagtgagccgagatcgcactccagcctgggcgacagagcgagactccgtctcaaaaaaaaaaaaaaaaaaaatttat

SEQ ID NO: 133878 - DNA, 201 bp, Homo sapiens
gccacccagaaggctagatccatggggccaggatctgggctgtttatccgtagagctcatgttctgtgccccactttggtctcagcttgtttgtccaatcyattccataatcctggctgatggccatgttattcccattttgcagatgtgacaactgatggtcagtaacataatcagtgtgaatagaagaggccgatgagc

SEQ ID NO: 133879 - DNA, 201 bp, Homo sapiens
gatgacgacacattgagccctgttctacagttagacacattcaagatggcggtacacactccggttccggttccggtggctcagctccccccgcccaccckggcccggacacgctgagcacactggaaggagtcatggcggatggtcaggtggcggaactgctgctccggcggctggaggcgtctgatggcggcctggaca

SEQ ID NO: 133880 - DNA, 201 bp, Homo sapiens; identical to SEQ ID NO: 23607

SEQ ID NO: 133881 - DNA, 201 bp, Homo sapiens
cgggctggtcagggggcaggtggacgggcacatgggcccctggccctcatacccctcacactccttatcctggcaggtggacagcatggaggatgaggtgmagcggcggctccagctggtccgggggggacaggctgagaagctgggggagaaggagaggagcgagctgaggaagaggaagctgttggctgaagtgtgagt

SEQ ID NO: 133882 - DNA, 201 bp, Homo sapiens
tggacagcatggaggatgaggtgcagcggcggctccagctggtccgggggggacaggctgagaagctgggggagaaggagaggagcgagctgaggaagagraagctgttggctgaagtgtgagtgggtgccccctgcaggctcaggcccccaccacctgcgaagcatggtggaggcatggtgggagggagacatcttgccc

SEQ ID NO: 133883 - DNA, 201 bp, Homo sapiens
ctctaccgccttgcccagaaggtgcggttggcccaggcgggggccccagtggggagagggtgctgtcaaagggaccttctgacccatacctgggcctggcycggttgtcacccctagaagcccttcactccggtcaagtacttctccatcgaccgcgtattccggaatgagaccctggacgccacgcacctggctgagttc

SEQ ID NO: 133884 - DNA, 201 bp, Homo sapiens
agcacatcgaggtgaccagggttgaagggtcggcaggagggcgatctgttcactcctcattctccctccttggcctccgtcctgactgtgcttgcaggtgracgtgccccatgtgaaatgcaaagaccaggaaccgcagcccttgggggagagcaaggagcatccgcggtgggaagagaactgcgaggaggaagctggtgg

SEQ ID NO: 133885 - DNA, 201 bp, Homo sapiens
ggaggccaaggcaggaggatcgcctgagccaggagtttgagatcagcctgggcaatagagcaagtctccgcctctacaaagaataaaaacaggccaggcgyggtggcacatgcctgtaatccaagcactgtgggtggctgaggcaggtgcatcacctgaggacaggagttcgaggccagcctggccaacatggcgaaacct

SEQ ID NO: 133886 - DNA, 201 bp, Homo sapiens
ggtggtgcacttctgtaatcccagctacttgggaggctgaggcaggagaattgcttgaacctgggaggaggaggttgcagtgagccaagatcatgccactrcactccagcctgggcaacagagcaagactccatctcaaaatacatacatacatacgtacatacataaataaagcccaggtgcagtggctcatgcctgtaa

SEQ ID NO: 133887 - DNA, 201 bp, Homo sapiens
catcgccaaaatgaccatctctggagcccaccacccaccgcctctcctagggcaagagagaataccagaagggcagagggttctgtaacccagagacgggraagtccaaggtcacacagcccgctcgaagtgaggctagataaaactcaaaacagggcggtgcttctgaccttgagataatcaattttacccctctggtca

SEQ ID NO: 133888 - DNA, 201 bp, Homo sapiens
ctgggcatggtggcgtgtgcctgtagtcccatctattcaggaggctgaggcaggagaatcactcgaacctgggaggcagaggttgcagtgagccgagatcrcgccactgcactccagcctgggcgacagagcgagactccgtctcaaaaaaaaagaaaaaataaaaaggtcgggcgcggtggcatgatcccagcactttgg

SEQ ID NO: 133889 - DNA, 201 bp, Homo sapiens
tgaaggtacaagtataactggaagctggacgaggcccggaaaaacctactgcgaacccacaccacatcagccagcgcccgtgcgctctaccgccttgcccrgaaggtgcggttggcccaggcgggggccccagtggggagagggtgctgtcaaagggaccttctgacccatacctgggcctggctcggttgtcacccctag

SEQ ID NO: 133890 - DNA, 201 bp, Homo sapiens
agctctgttctcattatgccacctgcagtcttttttttttttttttttttttttgagacagggtctcactctgtcgcccaagctggagtgtgcagtggcaygatcttggctcgctgcaaactttgcctcccaggttcaagcgattctcctgcctcagcctcccgagtagctgggattacaggtgcataccaccatgcccag

SEQ ID NO: 133891 - DNA, 201 bp, Homo sapiens
ccgcccgccttgcacttttatacccacccgcctctcaaaccaacctgacccagcccttgggcccgcccctgccactttgtcattggtctatgcccatggccgtctttttccattggaccttcgtcggttcactatgttaggctgcgcctcggaacgctgggttcccagatggccgatttctattggcctcaccaccgacca

SEQ ID NO: 133892 - DNA, 201 bp, Homo sapiens
atcagcctgggcaatagagcaagtctccgcctctacaaagaataaaaacaggccaggcgcggtggcacatgcctgtaatccaagcactgtgggtggctgargcaggtgcatcacctgaggacaggagttcgaggccagcctggccaacatggcgaaacctcatctctactaaaaatataaaaattagcctggcgtggtagc

SEQ ID NO: 133893 - DNA, 201 bp, Homo sapiens
cccgtcttttctgtcctgcctctgcaggcctgaagaagtgggtggaggtcggaaactcgggggtcttccgtccagagatgctgctgcccatggggcttccygagaacgtgtcggtcattgcctggggcctctccctggagcggtaagtgcccaagtggaaactcggggtgtccagctgcctcaaataactctccaggtata

SEQ ID NO: 133894 - DNA, 201 bp, Homo sapiens
cggaccgcgaaactgctgcttaacggtcggccccgcccagttggccgcgcaagttctcaaagagggcggggccgggagcacgcgtcacaacacactcgtcygcgggagcgcagctggccaggggcggggtcggcgcatgcgcagagggtgcgagcttgaaggcgggaaaatacggaatggagcgacagggagtacgcggcg

SEQ ID NO: 133895 - DNA, 201 bp, Homo sapiens
tcaaaccaacctgacccagcccttgggcccgcccctgccactttgtcattggtctatgcccatggccgtctttttccattggaccttcgtcggttcactakgttaggctgcgcctcggaacgctgggttcccagatggccgatttctattggcctcaccaccgaccaatgatggtcgaccacgcgtgggggggacgcccac

SEQ ID NO: 133896 - DNA, 201 bp, Homo sapiens
aacctgacccagcccttgggcccgcccctgccactttgtcattggtctatgcccatggccgtctttttccattggaccttcgtcggttcactatgttaggmtgcgcctcggaacgctgggttcccagatggccgatttctattggcctcaccaccgaccaatgatggtcgaccacgcgtgggggggacgcccactggtggg

SEQ ID NO: 133897 - DNA, 201 bp, Homo sapiens
aattagccaggcatggtggcgggcacctgtagtcccagttactcgggaggctgaggcaggagaatggcgtgaacccggaaggtggagcttgcagtgagtcragatagtgccactgcactccagcctgggtgacagagtgagactgtgtctcaaaataaataaataaataaataaatacaaataaataggccaggcacagtg

SEQ ID NO: 133898 - DNA, 201 bp, Homo sapiens
gggtcacttgagcccaggagttcaagaccagtctggccaacatggtgaaactccatctctactaaaagtacaaaaattatctgggcatggtggagggcgcyggctgattacacggtcaggagtttgagaacagcctggccaacatggtggaaccccatctctactaaaagtacaaaaattagccgggtgtggtggcgggca

SEQ ID NO: 133899 - DNA, 201 bp, Homo sapiens
gagattacaccactgcactccagcctgggcgacagagtgagactctgtctcaaaaacaaatttgggaagggcaattaatattaatgtcatcattcccaggrctgggaattgacaactgagctcagaaatatggaaactgtggcagggcgcggtgacacacacctgtagtcccagcattttggaagaccgaggtgggcggat

SEQ ID NO: 133900 - DNA, 201 bp, Homo sapiens
actccttttttggtcaggcctgctgggggcacagcttcagcagggcaccgggaggtcagccccacttgaggcttggtgcctgagcccaagagggatgcgggtgggactggggtcactgcactgctgggtgcactgcacttcgctggggctagggagggtgtctggggctccggggagagctttggggaggcgggcttggag

SEQ ID NO: 133901 - DNA, 201 bp, Homo sapiens; identical to SEQ ID NO: 23629

SEQ ID NO: 133902 - DNA, 201 bp, Homo sapiens; identical to SEQ ID NO: 23630

SEQ ID NO: 133903 - DNA, 201 bp, Homo sapiens
aatctcagctcactgcaatctccatctccccagttcaagcgattcttctgcctcagcctctggagtagctgggattacaggtgtgcgccaccatgcccagmtaaatgttgtatgttttagtagagatggggttttaccaggttggacaggctgatattgaactcctgacctcaggtgatccacctgccttggcctcccaaa

SEQ ID NO: 133904 - DNA, 201 bp, Homo sapiens
ttgaacctcggaggcagaggttgcaatgagcctagattgcaccaatgcactctagcctgggcgacagagcaagactccatgtcaaaaaaaaaaaaaaaaaaggaaatatggaaactgagctgagagaggggaagtggactagggactccctcgcagtggccctgaccctacctgtgccctctctccatcctttgcagacct

SEQ ID NO: 133905 - DNA, 201 bp, Homo sapiens
tttgctctgtggcccaggctggagtgcagtggtggatctcagctcactgcaacctccacctcctgggttcaagcgattctcctgcctcagcctcctgagtmgctgggattacaggcgtccaccaccacgctcagctaatttttgtatttttagtagagatggggtttcgccatgttggccaggctgatttctaactcctga

SEQ ID NO: 133906 - DNA, 201 bp, Homo sapiens
gtgatccgccctcctcggcttcccaaagtgctgggattacactgcgtggggcctgccttctttttttaaatttttatttatttatttatttatttatttahttacttacttacttacttatgtttgagatgaaattttgctctgtggcccaggctggagtgcagtggtggatctcagctcactgcaacctccacctcctgg

SEQ ID NO: 133907 - DNA, 201 bp, Homo sapiens; identical to SEQ ID NO: 23625

SEQ ID NO: 133908 - DNA, 201 bp, Homo sapiens
cttttggtccaggtgtcctgctccttgaccacgatgggggcttctggctggtccacagtgtacctaacttccctccaccggcctcctctgctgcatacagytggcctcatagcgcctgtacctacgggcagaccctgctctgtgtgtcttttcccttcgctcagttctcgaagatgggtaagtcgagtcagggacacagga

SEQ ID NO: 133909 - DNA, 201 bp, Homo sapiens
atagagggatgttgccggccgacttgcatcgcgcagagcggtactggcgatggagctttggcgacagtccgtgcagcgtgctgggccgaatgtggtgcgaygccgacgacgcaggcgagttgggcgtgctcgaggctggggagctgctctgggatgaggcgcctgcgggagacaggaggtgaagcgagtgagtacagccca

SEQ ID NO: 133910 - DNA, 201 bp, Homo sapiens
gagggtcgcttgttcctccgagccattttagccttgtagctgctgcgccttgcgggaccaatgcggatagaggtattttcgaagggcgttgtggtcactgmtaccttgttgccactctgggggaagaatgcgggaaaatgctctgctaggggctgctcaggcctcccccaccctccgcccagggtgcctccttccctgcac

SEQ ID NO: 133911 - DNA, 201 bp, Homo sapiens
tccaaaacgcagcatcgcgtctcgggggaggagtctgtaccctcgtgatgtccccgccccggttcccaggcaagtttagggaagtgaaaggcgccaggtgmcagtcctggcctctgatgtaacccagcgccccgcagtcccgacacagattcctggatctcagccccatagcagctatgatcccgctgctgctggcagcgc

SEQ ID NO: 133912 - DNA, 201 bp, Homo sapiens; identical to SEQ ID NO: 23627

SEQ ID NO: 133913 - DNA, 201 bp, Homo sapiens
tacctcctcggggaaccctggggtgccttctcttccctctctcctatttctgtgcattctccgacctccaggttcgtggtctacaagctgccagctcttakagggtccggggaggcggcgcagagagggctgcagtacaagtatctggacgagagctccggaggctggcgggacggcagggcactcatcaacagcccggag

SEQ ID NO: 133914 - DNA, 201 bp, Homo sapiens
gctttggggaggcgggcttggagcgaggaccgctcagcgtggtgcgctcctccaccacctccaacacccagcgctcccggccccggggggcctcgggcacrgaaggcgccaggggtgcgggttcctgcaaccccttggagtccgcgcccagaggctgaggcaccacagccttagccccgggccgcgcaggctctacgacaa

SEQ ID NO: 133915 - DNA, 201 bp, Homo sapiens
gaggctagggttattcaagaacagtttggtgggcaggagggctagggaatgggtgccttgctgcaatcctggagctgtggaaaacagttgctgagtcagcytctgggtggggaccatagagtcgctagtctgggtggagtcatccagttgtcagatatgcaaaaagcctaaaaagacatctaaaaaggccagcgttaggtt

SEQ ID NO: 133916 - DNA, 201 bp, Homo sapiens
cgtgggcccagccctggctccagccccggcccccgagcccaaggcgctggcgctgcaaccggtgtacccggggcccggcgccggctcctcgggtggctacytcccgcggaccgggctttcagtgcctgcggcgtcgggcgccccctacgggctactgtccgggtaccccgcgatgtacccggcgcctcagtaccaagggca

SEQ ID NO: 133917 - DNA, 201 bp, Homo sapiens; identical to SEQ ID NO: 23631

SEQ ID NO: 133918 - DNA, 201 bp, Homo sapiens
cgcggacgccacctgggacctggatctcctcctcaccaacttctcgggcccggagcccggtggcgcgccccagacctgcgctctggcgcccagcgaggccyccggggcgcaatatccgccgccgcccgagactctgggcgcatatgctggcggcccggggctggtggctgggcttttgggttcggaggatcactcgggttg

SEQ ID NO: 133919 - DNA, 201 bp, Homo sapiens; identical to SEQ ID NO: 23622

SEQ ID NO: 133920 - DNA, 201 bp, Homo sapiens
ccgggggtgcgggactggacactccttttttggtcaggcctgctgggggcacagcttcagcagggcaccgggaggtcagccccacttgaggcttggtgccygagcccaagagggatgcgggtgggactggggtcactgcactgctgggtgcactgcacttcgctggggctagggagggtgtctggggctccggggagagct

SEQ ID NO: 133921 - DNA, 201 bp, Homo sapiens
cagcagggcaccgggaggtcagccccacttgaggcttggtgcctgagcccaagagggatgcgggtgggactggggtcactgcactgctgggtgcactgcayttcgctggggctagggagggtgtctggggctccggggagagctttggggaggcgggcttggagcgaggaccgctcagcgtggtgcgctcctccaccacct

SEQ ID NO: 133922 - DNA, 201 bp, Homo sapiens
actgcactgctgggtgcactgcacttcgctggggctagggagggtgtctggggctccggggagagctttggggaggcgggcttggagcgaggaccgctcakcgtggtgcgctcctccaccacctccaacacccagcgctcccggccccggggggcctcgggcacggaaggcgccaggggtgcgggttcctgcaaccccttg

SEQ ID NO: 133923 - DNA, 201 bp, Homo sapiens
acaaagtgtcttcccgggcgcactgaccgggcgggggtctcagctttcagtcatggcctccggtaacgcgcgcatcggaaagccagcccctgacttcaagkccacagcggtggttgatggcgccttcaaagaggtgaagctgtcggactacaaaggtgagcgccgcccggagggggcccaggtagaagcggggccgtgcat

SEQ ID NO: 133924 - DNA, 201 bp, Homo sapiens; identical to SEQ ID NO: 23647

SEQ ID NO: 133925 - DNA, 201 bp, Homo sapiens
ccctcagcccggctcagggagcgccctgccccccattcctgtgatgctgggaccactcctgtacaatgtcttctctgcccccagccctgtggctagcagcrggtggttggtagtcccttccttgtctctggcagtgggagctatcagctcctcactgggaaccctgatgtcttcaggggcctctttatcatcgatggcaag

SEQ ID NO: 133926 - DNA, 201 bp, Homo sapiens
cccctgaacatccccctgcttgctgacgtgaccagacgcttgtctgaggattacggcgtgctgaaaacagatgagggcattgcctacaggtactgtgggamcctcagcccggctcagggagcgccctgccccccattcctgtgatgctgggaccactcctgtacaatgtcttctctgcccccagccctgtggctagcagcg

SEQ ID NO: 133927 - DNA, 201 bp, Homo sapiens; identical to SEQ ID NO: 23649

SEQ ID NO: 133928 - DNA, 201 bp, Homo sapiens; identical to SEQ ID NO: 23648

SEQ ID NO: 133929 - DNA, 201 bp, Homo sapiens
aggctggggagtagctgctgaggttggtgtaaacgggaggtggctccgggccggcgtagacgcccccgggcccagccgggggccccccggtagcgcccagkgacacgttggggggtgtcacgtggttcatcttgtgcagatcgtccagggctttgacaaagccgtcggcgaagccctcctgctcctcggtgacgccgcccc

SEQ ID NO: 133930 - DNA, 201 bp, Homo sapiens
aggagcgctgcccgcccaccgcgggcgctctggacccaggcctggggctttccgtgcccgggcagccgcctgcccgggaaaatcccggcccccttcccggygccgcggccctgcccggcagagcgggggaggggattcccggaatctgcccagagaccgcggtcgcgtcactgggcagaatcggtccttgtatgggcagcg

SEQ ID NO: 133931 - DNA, 201 bp, Homo sapiens; identical to SEQ ID NO: 23642

SEQ ID NO: 133932 - DNA, 201 bp, Homo sapiens
cctgggtgccctatgctgacccaggaaaggccagacctgcccctccaaactccacagtatgggaccctggagggctaggccaaggccttctcatgcctccmcctagaagctgaatagtgacgccctcccccaagcccacccagccgcacacaggcctagaggtaaccaataaagtattagggaaaggtgtgagtctgtgtt

SEQ ID NO: 133933 - DNA, 201 bp, Homo sapiens
ccacagcggtggttgatggcgccttcaaagaggtgaagctgtcggactacaaaggtgagcgccgcccggagggggcccaggtagaagcggggccgtgcatragagaagctgggccctaactcctctgtgtccctcctccccagggaagtacgtggtcctctttttctaccctctggacttcacttttgtgtgccccaccga

SEQ ID NO: 133934 - DNA, 201 bp, Homo sapiens
tcttgaaggtggcacaggggtggctcccggagcccaggagcgctgcccgcccaccgcgggcgctctggacccaggcctggggctttccgtgcccgggcagycgcctgcccgggaaaatcccggcccccttcccggcgccgcggccctgcccggcagagcgggggaggggattcccggaatctgcccagagaccgcggtcgc

SEQ ID NO: 133935 - DNA, 201 bp, Homo sapiens
gagttcgagacaagcttgaccgacatggagaaacccagtctctactaaaaatacaaaattagcccagcctggtggtgcatgcctgtaatcccagctacttsggaggctgaggcaagagaatcgtttgaagctgagaggcggaggttgcagtgagctgagatcgtgccattgcactccagcctgggcaacgagtgaagcgaa

SEQ ID NO: 133936 - DNA, 201 bp, Homo sapiens
gcgcggtggctcacgcctgtaatcccagcactttgggaggccgaggcgggcagatcatgaggtcaggagtttgagaccagcctggccaacatagtgaaacygcgtctctgctaaaaatacaaaaaaattagctgggtgcggtggcaggtgcctgtaatcccagctacttgggaggctgaggcaggagactcccttgaaccc

SEQ ID NO: 133937 - DNA, 201 bp, Homo sapiens
cagggtgaggaccctgctgtgccaggcatcctgaggccccaactctgtctcccctactcccaggatcaacaccccccggaaagagggaggcttgggccccytgaacatccccctgcttgctgacgtgaccagacgcttgtctgaggattacggcgtgctgaaaacagatgagggcattgcctacaggtactgtgggaccct

SEQ ID NO: 133938 - DNA, 201 bp, Homo sapiens
cctggcagtcgccccgctcctggcctggcacccgtgaggggaaactggcaggcgggcgccgcccttcctggagggggtgggggtagaggggacggcgtcgscaaagcagcggaggcagcagcaaccctccgccccggtcaggtcagacggagggggcgtgggcgcggcggggcctaggcgccagtgtcttgaaggtggcac

SEQ ID NO: 133939 - DNA, 201 bp, Homo sapiens; identical to SEQ ID NO: 23645

SEQ ID NO: 133940 - DNA, 201 bp, Homo sapiens
actaagtgcgtgtttcttttccacagtacggtgcagagaggggagggcagggggcgggggtccccttcccaatgtccccgcgggcttgagtaccaggcggsggggccagctccgccgcgatcgccccctcttcccctccctgttaaatacacaaatatattatattcaatatgaatcgagtctgtttccagcagaaaaaaa

SEQ ID NO: 133941 - DNA, 201 bp, Homo sapiens
atagattcaataaaaagaacaaacacacacaaacacaaacacgtcttaaaataaactctttagagactaagtgcgtgtttcttttccacagtacggtgcaragaggggagggcagggggcgggggtccccttcccaatgtccccgcgggcttgagtaccaggcggcggggccagctccgccgcgatcgccccctcttcccc

SEQ ID NO: 133942 - DNA, 201 bp, Homo sapiens
ttaaatagattcaataaaaagaacaaacacacacaaacacaaacacgtcttaaaataaactctttagagactaagtgcgtgtttcttttccacagtacggkgcagagaggggagggcagggggcgggggtccccttcccaatgtccccgcgggcttgagtaccaggcggcggggccagctccgccgcgatcgccccctctt

SEQ ID NO: 133943 - DNA, 201 bp, Homo sapiens
cgggcgcattacccacgcgggcaggtgcagtggtcccggccgaaggcaacgcgtctccccccgccgcccgcaggcgcatggacccggccgcacgctccccygcacctgcgggcgcagtggacccgaccgctccgctcgtccgctccctcccccgcgccgtgcacgtcttggttcgggccgggcataaaaggcttcgcggcc

SEQ ID NO: 133944 - DNA, 201 bp, Homo sapiens
tgccctccttctctagaagtcgaggactcaatccttggcccgtggggaaagtggcggtgtctctgcgacctgggcaagcaggagcgcagccgcgaggtagkgggcacagcgccgggcccggttttcatggacccggagaagctgatccagttacggccctgccggcaacgggattgtccatcctgcaagcccttcgactgc

SEQ ID NO: 133945 - DNA, 201 bp, Homo sapiens
accaaagggaaggagggagattccaggtgcctgttttgcccacaggtggcccgggaccaggccgtgaagaaatggcagttcgtggagaaactgcaggactyggatactgattatggctcaggctaccccaatggtgagcagacacgtgaccatggtactaatgttgaaatggccagggctgagcacacttctgaggttttc

SEQ ID NO: 133946 - DNA, 201 bp, Homo sapiens
atgcacggccccgcttctacctgggccccctccgggcggcgctcacctttgtagtccgacagcttcacctctttgaaggcgccatcaaccaccgctgtggmcttgaagtcaggggctggctttccgatgcgcgcgttaccggaggccatgactgaaagctgagacccccgcccggtcagtgcgcccgggaagacactttgt

SEQ ID NO: 133947 - DNA, 201 bp, Homo sapiens
gcaaggtagaccctgctgaggagggacctgaggaccaggcccaaatgcagagctggcgatacagtaactggtgtagacagacaagggccctacccgtaggsgttcagggcctagcctgggcagaaagatggtcagctggaggttgggcgcagtagctcacgcctgtaatcccagcactttgggaggccgaggcgggcggat

SEQ ID NO: 133948 - DNA, 201 bp, Homo sapiens
aaggtcagtaccctactagccatggctggcttccaccatcccactatataggggccaggcatggccaccaaagggaaggagggagattccaggtgcctgtyttgcccacaggtggcccgggaccaggccgtgaagaaatggcagttcgtggagaaactgcaggacttggatactgattatggctcaggctaccccaatggt

SEQ ID NO: 133949 - DNA, 201 bp, Homo sapiens
ggggtccccgggaggggcagccagcatgggctgaccaagctttgttcctagaatgagattaactgggctctgttccccaccacagggtcaaatacaacctkaactccctgtcacatgatacagccactgggcttatacagtatgcattggaccagggcgtgaacgtcacccaggtgagttaactgtaagttgtccccattt

SEQ ID NO: 133950 - DNA, 201 bp, Homo sapiens
caaaaagaagaagaaagaaaggaattatagcaaggtagaccctgctgaggagggacctgaggaccaggcccaaatgcagagctggcgatacagtaactggygtagacagacaagggccctacccgtaggcgttcagggcctagcctgggcagaaagatggtcagctggaggttgggcgcagtagctcacgcctgtaatccc

SEQ ID NO: 133951 - DNA, 201 bp, Homo sapiens
cattaaattaccagagaaaaacataaatcagcattgcctcgaatgctctcaatgaaagaatggaccgttctgagagaataacaaggcaaaataaccttgaygtaggaattgtatgctgggtatggtggctcacgcctgtaatcccagcactttgggaagctgaggtgagcaaattggttgaggctaggagttccagaccag

SEQ ID NO: 133952 - DNA, 201 bp, Homo sapiens
gaaaacgcgcgccgagacccgctcctgcagtattagttcttgcagctggtggtggcggctgaggcggcatggatctcagcgagctggagagagacaatacrggccgctgtcgcctgagttcgcctgtgcccgcggtgtgccgcaaggagccttgcgtcctgggcgtcgatgaggcgggcaggggccccgtgctgggtgcgc

SEQ ID NO: 133953 - DNA, 201 bp, Homo sapiens
aggtgacggtcaaggccaaagcagatgccctctacccggtggttagtgctgccagcatctgtgccaaggtcagtaccctactagccatggctggcttccaycatcccactatataggggccaggcatggccaccaaagggaaggagggagattccaggtgcctgttttgcccacaggtggcccgggaccaggccgtgaaga

SEQ ID NO: 133954 - DNA, 201 bp, Homo sapiens
attaaatcaggaaaattcacagtcgagtggggcagaattacattaaattaccagagaaaaacataaatcagcattgcctcgaatgctctcaatgaaagaayggaccgttctgagagaataacaaggcaaaataaccttgacgtaggaattgtatgctgggtatggtggctcacgcctgtaatcccagcactttgggaagct

SEQ ID NO: 133955 - DNA, 201 bp, Homo sapiens
gcattggtacagttgtttgttcaattaatatgtgtctgttgctgtggcaggtattcgtggacaccgtagggatgccagagacataccaggcgcggctgcarcaaagttttcccgggattgaggtgacggtcaaggccaaagcagatgccctctacccggtggttagtgctgccagcatctgtgccaaggtcagtaccctac

SEQ ID NO: 133956 - DNA, 201 bp, Homo sapiens
gttctgcccgcggattggccggaagcaggcgccgcttcgaggcccgcggaaaacgcgcgccgagacccgctcctgcagtattagttcttgcagctggtggyggcggctgaggcggcatggatctcagcgagctggagagagacaatacaggccgctgtcgcctgagttcgcctgtgcccgcggtgtgccgcaaggagcctt

SEQ ID NO: 133957 - DNA, 201 bp, Homo sapiens
tggtggctcatgcctgtaatcccagcactttgggaggccgaggggggtagatcacgaggtcaagcaattgagaccatcctggccaacatggtgaaacctcrtcactactaaaaacacaaaatttagctgggcatggtggcatgcgcctgtagtcccagctacttgggaggctgaggcaggagaatcgcttgaatccgggag

SEQ ID NO: 133958 - DNA, 201 bp, Homo sapiens
gtggcccgggaccaggccgtgaagaaatggcagttcgtggagaaactgcaggacttggatactgattatggctcaggctaccccaatggtgagcagacacrtgaccatggtactaatgttgaaatggccagggctgagcacacttctgaggttttctttttttcctttctgtcatttatcattttattttgcttatttttt

SEQ ID NO: 133959 - DNA, 201 bp, Homo sapiens
gggacttagaatgtgtacagaagcagggaccgcaagtacagggcctgaatccaagtggcagttggggacccagtgatgcggtgacccgtgtcctgggagtsgggtgatatttgactctctagttccccgttaggctgggtcttcgaagctacgtctcagtttccctcttatttccccctcttcccaccgggccacgcaggc

SEQ ID NO: 133960 - DNA, 201 bp, Homo sapiens
aggagggagattccaggtgcctgttttgcccacaggtggcccgggaccaggccgtgaagaaatggcagttcgtggagaaactgcaggacttggatactgawtatggctcaggctaccccaatggtgagcagacacgtgaccatggtactaatgttgaaatggccagggctgagcacacttctgaggttttctttttttcct

SEQ ID NO: 133961 - DNA, 201 bp, Homo sapiens
ctactaaaaatacaaaaattagccaggtatggtggtgggtggctgtagtcccagctacttgggaggctgaggcaggagaatcgcttgaacctgggaggcgsaggttgcagtgagccgagatcgcaccattgcactacagcctgggtgacagagcaagactccatttcaaaaaataagtaaataaaataaaaatgtttaatg

SEQ ID NO: 133962 - DNA, 201 bp, Homo sapiens
tcggtggggcacacaaaagtgaagtccagagggtagaaaaagaggaccacgtacttccctggggaggagggacacagaggagttagggcccagcttctctyatgcacggccccgcttctacctgggccccctccgggcggcgctcacctttgtagtccgacagcttcacctctttgaaggcgccatcaaccaccgctgtgg

SEQ ID NO: 133963 - DNA, 201 bp, Homo sapiens
cgggaaacgggagtcgggattgcactgcaccaagggaggggatgtggtcgtggtgatggcacctaaagaagcagtgatgatagaacagggatgaatggcawctttcacgggctcagtgattggaccccggctgccagaaaactgacaccccttctccccaggccccatggtctacgccatctgttattgtcccctgcctcg

SEQ ID NO: 133964 - DNA, 201 bp, Homo sapiens
cgatgaggcgggcaggggccccgtgctgggtgcgcccctagggccagggaggggaggggcgtggtacggaggatgcgggaaacgggagtcgggattgcacygcaccaagggaggggatgtggtcgtggtgatggcacctaaagaagcagtgatgatagaacagggatgaatggcaactttcacgggctcagtgattggacc

SEQ ID NO: 133965 - DNA, 201 bp, Homo sapiens
taggaggtgccccaggtactcaggaggaagccttagaagagcggcaaggaggccgggcgtggtggctcatgcctgtaatcccagcactttgggaggccgakgggggtagatcacgaggtcaagcaattgagaccatcctggccaacatggtgaaacctcgtcactactaaaaacacaaaatttagctgggcatggtggcat

SEQ ID NO: 133966 - DNA, 201 bp, Homo sapiens
gaggtgccccaggtactcaggaggaagccttagaagagcggcaaggaggccgggcgtggtggctcatgcctgtaatcccagcactttgggaggccgagggrggtagatcacgaggtcaagcaattgagaccatcctggccaacatggtgaaacctcgtcactactaaaaacacaaaatttagctgggcatggtggcatgcg

SEQ ID NO: 133967 - DNA, 201 bp, Homo sapiens
cctggccaacatggtgaaacctcgtcactactaaaaacacaaaatttagctgggcatggtggcatgcgcctgtagtcccagctacttgggaggctgaggcrggagaatcgcttgaatccgggaggtggaggttgcagtgagctgagatcgcgccactgcactccagcctggctacagagtgggactccatctcaaagaaaa

SEQ ID NO: 133968 - DNA, 201 bp, Homo sapiens
gaacagtatgtggcatgcagtaggtgctaaataagttagagtaaaagcagcgtgatagagaaagcctcttcaggaggtgagttttttctttattttattgkatttattttatgtttttataaagatggggtctcactgtgttgccaagcctggcctcaaactcccaggatcaagcgatcctcccgcctcagcctcccaaag

SEQ ID NO: 133969 - DNA, 201 bp, Homo sapiens
cgtggggaaagtggcggtgtctctgcgacctgggcaagcaggagcgcagccgcgaggtagtgggcacagcgccgggcccggttttcatggacccggagaasctgatccagttacggccctgccggcaacgggattgtccatcctgcaagcccttcgactgcgactggaggctctgagcccgggtgagagagcagggccggg

SEQ ID NO: 133970 - DNA, 201 bp, Homo sapiens
ctacttgggaggctgaggcaggagaatcgcttgaatccgggaggtggaggttgcagtgagctgagatcgcgccactgcactccagcctggctacagagtgrgactccatctcaaagaaaaaaaaaagagtggcagggagcttgaatgttatggtgcaacttggactgtcaccattgcccaccctaccccagatcccaagac

SEQ ID NO: 133971 - DNA, 201 bp, Homo sapiens
ggccgcgaagccttttatgcccggcccgaaccaagacgtgcacggcgcgggggagggagcggacgagcggagcggtcgggtccactgcgcccgcaggtgcrggggagcgtgcggccgggtccatgcgcctgcgggcggcggggggagacgcgttgccttcggccgggaccactgcacctgcccgcgtgggtaatgcgcccg

SEQ ID NO: 133972 - DNA, 201 bp, Homo sapiens
caagctgagggcggattttagagtaacacccgaggccctcgcatttccgttcctcatgacagaggcttggactccccttacccagagaacggagatttagsagaagccagaagtcttcctttcaaagggaaaatggggaaaagaacctgaaagcgggcttcaatagttccaacccgatcaccgaaatgccaaaatgatgaa

SEQ ID NO: 133973 - DNA, 201 bp, Homo sapiens
tgcgagccgtacgatttaatggtgagcgccttcgtcttcattccgggtcctcctcccgcctcctgagatcgacggcccagtaacccccgcctggtgttccmcagtggatggcaattactgcctgacgtgcggcagtgacaagacgctgaagctgtggaacccgcttcgggggacgctgctgcggacgtacagcggccacgg

SEQ ID NO: 133974 - DNA, 201 bp, Homo sapiens
ccattgcactccatgctgggtgaaagacagactgtctacaaaataataataatctggccgggcacggtggctcacacctgtaatcccagcactttgggagrccaaggtgggcagatcacttgaggtcaggaggttgagatcagcctggccaacatggtgaaaccccgtctctactaaaaatgcaaaaattagccaggtgtg

SEQ ID NO: 133975 - DNA, 201 bp, Homo sapiens
aaattagccaggtgtggtgacgggagcctgtaatcccagccactcgggaggcggaggcaggagaatcgcctgaacccgggagttggaggttgcagtgagcygagattgtgccactgcactccagcctgggcgacaaagtgagactccatctcaaaaaaaaaaagataaaatgatttctaaaaataaataaaaataggccgg

SEQ ID NO: 133976 - DNA, 201 bp, Homo sapiens
gatcgagatcattctggctaacacggtgaaaccccgtctctactaaaaatacaaaaaattagccgggcatagtggcaggcgcctgtagtcccagctactcrggaggctgaggcaggagaatggagtgaacccaggaggcagagcttgctgtgagccgacatcgcaccactacactcctgggcgatagagcaagactccgtc

SEQ ID NO: 133977 - DNA, 201 bp, Homo sapiens
tatgaagacggaatgcctcttaatgccggaattccaagacggaatgcctcttaatgccggtaggagcagaagtgcttttcctaagggggccgggttttccyagccggtgtagtgtgtccatgggaatccagggtgtccgtcccatggaccttcagcgctagggtcctggaaggacctagcttgcctaagaggaggatctga

SEQ ID NO: 133978 - DNA, 201 bp, Homo sapiens
aggtttcaacgagaaagcaaatgaatacccctagaaacatggacagcatctcccccagcagcaggcaggggaagggaggcaggaggggtaagcctagggtkttccctaggaaagggccaggttccctctatccagctgggggcaccgagacggcctcattcagggaagtccaggatggcagctgaaggcagcaggtttagc

SEQ ID NO: 133979 - DNA, 201 bp, Homo sapiens
ggatggcagctgaaggcagcaggtttagcagccaaagcccaggcctagtggatagacagggtccaaaatgtgacccttctaggctggtatcaccatggggscgtcatgggctgaggattctgcagataggacatcaccacggcagagatggacagcctgagacaggagagaggtgtcagtctaggatggccaggctggggt

SEQ ID NO: 133980 - DNA, 201 bp, Homo sapiens
ttcagggaagtccaggatggcagctgaaggcagcaggtttagcagccaaagcccaggcctagtggatagacagggtccaaaatgtgacccttctaggctgrtatcaccatgggggcgtcatgggctgaggattctgcagataggacatcaccacggcagagatggacagcctgagacaggagagaggtgtcagtctaggat

SEQ ID NO: 133981 - DNA, 201 bp, Homo sapiens
agaaacatggacagcatctcccccagcagcaggcaggggaagggaggcaggaggggtaagcctagggtgttccctaggaaagggccaggttccctctatcmagctgggggcaccgagacggcctcattcagggaagtccaggatggcagctgaaggcagcaggtttagcagccaaagcccaggcctagtggatagacaggg

SEQ ID NO: 133982 - DNA, 201 bp, Homo sapiens
gtagcgaatggtctcacggatgcctgaactgatgaggttggatgtatatcccaggaaaatggtgcagctggtaagtgggcggcggctctgggtcaggtccscgtgctggtcttcatcctgtgacagtggttccagcttcttctcgatctgtgagtaagggccaagtcaagttaagcactggccttaaatcccagactcagg

SEQ ID NO: 133983 - DNA, 201 bp, Homo sapiens
gcactgagagctatgcacataacccaaggcccccggatgcaagcgcacatgtgcacaagggtaccacagggtaggcgcactgacctgcgcatttaccagcyggatgagcttgtcaaggttcttgaaccacatgttggcattctcatattggaagtccgagcccatggtcatcacagtgtggttggtgcggtaataccggcc

SEQ ID NO: 133984 - DNA, 201 bp, Homo sapiens; identical to SEQ ID NO: 23665

SEQ ID NO: 133985 - DNA, 201 bp, Homo sapiens
cgcactgacctgcgcatttaccagccggatgagcttgtcaaggttcttgaaccacatgttggcattctcatattggaagtccgagcccatggtcatcacartgtggttggtgcggtaataccggccctgcaggcaagaggggagtcctgaagccagaggatcctgggccatccctgtgtatagctgtgttttgatgtatat

SEQ ID NO: 133986 - DNA, 201 bp, Homo sapiens
ccctgagccaaagccgcggcctccagagctgccgcagaaacggttgaagacgctggactgcgggcagggggcagtgcgagccgtacgatttaatggtgagygccttcgtcttcattccgggtcctcctcccgcctcctgagatcgacggcccagtaacccccgcctggtgttccccagtggatggcaattactgcctgacg

SEQ ID NO: 133987 - DNA, 201 bp, Homo sapiens
tttagagtaacacccgaggccctcgcatttccgttcctcatgacagaggcttggactccccttacccagagaacggagatttaggagaagccagaagtctycctttcaaagggaaaatggggaaaagaacctgaaagcgggcttcaatagttccaacccgatcaccgaaatgccaaaatgatgaacccggaagtgataaac

SEQ ID NO: 133988 - DNA, 201 bp, Homo sapiens
tcctccagaaagcgcagcccaagtgtcatctggtccacgatggcaccgtagtgggtggctgcctcatcgttcatcacccagccaccattggcgaactccargcgccctgtgccaggacaggcaaggtcagggtcagcggtcagagccaggagtgggagtagggtgggtgatactgggaatgtgaaagcctgcctgtgtaca

SEQ ID NO: 133989 - DNA, 201 bp, Homo sapiens
attgccaaatgtgtcctccagaaagcgcagcccaagtgtcatctggtccacgatggcaccgtagtgggtggctgcctcatcgttcatcacccagccaccaytggcgaactccaggcgccctgtgccaggacaggcaaggtcagggtcagcggtcagagccaggagtgggagtagggtgggtgatactgggaatgtgaaagc

SEQ ID NO: 133990 - DNA, 201 bp, Homo sapiens
tcctgggaccgcagccgctcagtcctcgttcttctcatgcatgaaggcatccatcttctgggcaaaggtttcagccacaagcagggggaagaccagggagrcgtcagcatagacctgggtaggggggaacctgggtaagccatgggacccacactcatcgtcccagagaccctatgccccacccagccagcgcttaccttg

SEQ ID NO: 133991 - DNA, 201 bp, Homo sapiens
agtgacaacagagcagatatcaagcccagggcccttctgagtgtgtggcaccatggctggccctgccctcaccaagccccctaccagtgaagaggtccgcrgtcgggggcttcaggctggtgctggcccgccacacctgctccatctccagcttctgcatccgtacccacttatcttgataatcaaggcgcccaaagaaga

SEQ ID NO: 133992 - DNA, 201 bp, Homo sapiens
tcaccatgggggcgtcatgggctgaggattctgcagataggacatcaccacggcagagatggacagcctgagacaggagagaggtgtcagtctaggatggscaggctggggtccccccaccccttactcaagagtcacttgttctgtagggcaagtctcacatgaagctactcatcatttgcttcgtgtcctccgagctcc

SEQ ID NO: 133993 - DNA, 201 bp, Homo sapiens
ggccccgatccacacccacaacccgaacccgtgcccacgacgctggggtcctcacctcagcactttgttcggcctccgtgggtccgacatattgttagtgsacatagcgagtcgaaggccagatcacgcctcttccgctgcaggaatcgcagcttccggcgtgcaagctgagggcggattttagagtaacacccgaggccc

SEQ ID NO: 133994 - DNA, 201 bp, Homo sapiens
atatcccctccactggaaacgctgcccccgtctagtaccgcgttggttctacaagccacgcccctccgcgtccctagaaattccgcccggtcctcaccatrgcattgacttgctgtacagcgcgcccgaagttggttgcttggaagccggtggtgccgaaggcctccagcagtgcgcggtaattcacaccgcggttgaagt

SEQ ID NO: 133995 - DNA, 201 bp, Homo sapiens
tggaaacgctgcccccgtctagtaccgcgttggttctacaagccacgcccctccgcgtccctagaaattccgcccggtcctcaccatggcattgacttgcygtacagcgcgcccgaagttggttgcttggaagccggtggtgccgaaggcctccagcagtgcgcggtaattcacaccgcggttgaagtcgtagccccggac

SEQ ID NO: 133996 - DNA, 201 bp, Homo sapiens
aatccccaggaggctggaaagatgaaataagttaacacatgccaaagtctggctactttgctcccgcttaggtcctcaccttctgggcccagtaatacacsgactctgggttgttgatctccttgcccagccgggcgatcatcttagaaggcgtccactttacaccctaggagaggatgtgaccttcaggccatgcctccc

SEQ ID NO: 133997 - DNA, 201 bp, Homo sapiens
gatggcctgtgtgttgatgagcctcaggtctgggggaagagcgccgaagtcaggccttggactcagccagccctccttcccctctcctctgtggccctagmgcctcaccctcaacgatgtccaggaccaggcccgggttcttgtaggaatggaagaagatcatgtcgcccagcgagccgtctgtaagtgcgggactaaaca

SEQ ID NO: 133998 - DNA, 201 bp, Homo sapiens
tggtgagcgccttcgtcttcattccgggtcctcctcccgcctcctgagatcgacggcccagtaacccccgcctggtgttccccagtggatggcaattactscctgacgtgcggcagtgacaagacgctgaagctgtggaacccgcttcgggggacgctgctgcggacgtacagcggccacggctacgaggtgctggatgcg

SEQ ID NO: 133999 - DNA, 201 bp, Homo sapiens
atggtgagcgccttcgtcttcattccgggtcctcctcccgcctcctgagatcgacggcccagtaacccccgcctggtgttccccagtggatggcaattacygcctgacgtgcggcagtgacaagacgctgaagctgtggaacccgcttcgggggacgctgctgcggacgtacagcggccacggctacgaggtgctggatgc

SEQ ID NO: 134000 - DNA, 201 bp, Homo sapiens
gggattacagggaccatggggatcccagggaccagtccccatcctctactcacttccataaaagtactggtccacggttttgagccagcccacgtcatcawgtgtgtgaggcagcaggtgcacgttcagcatgttcggctgcactgtggggcatgtctgcacagggaccccaaacacacataccttgtcaataacccccga

SEQ ID NO: 134001 - DNA, 201 bp, Homo sapiens
ccgatcaccgaaatgccaaaatgatgaacccggaagtgataaacaggaagtaggtcaggaagaacaataataaggttacacccaagcgtgggtttctaagscgcggaattttccgtacagaccgatttaaggctgcaaggaaggagtcctgggagcatggctttccctgagccaaagccgcggcctccagagctgccgcag

SEQ ID NO: 134002 - DNA, 201 bp, Homo sapiens
gaccaacatggagaaaccccgtctctactaaaaatacaaaattagcagggcgtggtggtgcatgcctgtattcccatctactcgggaggctgaggaaggasaatctcttgaacccgggaggcagaggttccggtgagccaagatcatgccattgcactccagcctgagcaacaagagcaaaactctgtctcaaacaaaagg

SEQ ID NO: 134003 - DNA, 201 bp, Homo sapiens
tacacccatagaagctcaaccccgcccaccttaagcatgaggccgcacatgctgaagatcatgcccagcaggttcatgtagtccggcgtcgggtcgtccarggccgggttacattcgctcggcgggggcttgtacctgcgacaggctcgagggtcaggggcgctcaggtcctgcccccgggatagacaggcgcttcccagg

SEQ ID NO: 134004 - DNA, 201 bp, Homo sapiens
cgtccactttacaccctaggagaggatgtgaccttcaggccatgcctcccctgactcccactgaactggcccctccaggttgccccagccccacctctgtrttctgctccatcaccatctggtccagaatgggcatcagccagtcctcaaacttgcagtaattctcattgggcaccagcaggtttccgatcctgagaacag

SEQ ID NO: 134005 - DNA, 201 bp, Homo sapiens
tgggcccagtaatacacggactctgggttgttgatctccttgcccagccgggcgatcatcttagaaggcgtccactttacaccctaggagaggatgtgacyttcaggccatgcctcccctgactcccactgaactggcccctccaggttgccccagccccacctctgtgttctgctccatcaccatctggtccagaatggg

SEQ ID NO: 134006 - DNA, 201 bp, Homo sapiens
aaggttctggacaccagggttacctgggcagtggccacatttaggaagtaatcgaccagctccttggcgttgtactcggggctgcgagggtcctccaccascggctgatcgacacacagcacatcccagcacagattccttggcgggttgtaaccattgggaagcacacctgcaggtcacaccaagttcaaggggtggccc

SEQ ID NO: 134007 - DNA, 201 bp, Homo sapiens
cgtgcccacgacgctggggtcctcacctcagcactttgttcggcctccgtgggtccgacatattgttagtggacatagcgagtcgaaggccagatcacgcytcttccgctgcaggaatcgcagcttccggcgtgcaagctgagggcggattttagagtaacacccgaggccctcgcatttccgttcctcatgacagaggct

SEQ ID NO: 134008 - DNA, 201 bp, Homo sapiens
agaggccaaggccacggcctcaccaggtccccaccatgttgtgctgcacaaggtagcgaatggtctcacggatgcctgaactgatgaggttggatgtataycccaggaaaatggtgcagctggtaagtgggcggcggctctgggtcaggtccgcgtgctggtcttcatcctgtgacagtggttccagcttcttctcgatct

SEQ ID NO: 134009 - DNA, 201 bp, Homo sapiens
accccacagggcagctctcattcacactccgggaaaataataatagaagtagctgatgtttgttcagcatttgccgacagcagacggccaccgtgggaggkggggtgatgttatccccagtttccagatgaaggcactgaggcttagagaggataggtgacttgcccaacgtcacacactcaggaagtgtaagagctaggc

SEQ ID NO: 134010 - DNA, 201 bp, Homo sapiens
caaggccacggcctcaccaggtccccaccatgttgtgctgcacaaggtagcgaatggtctcacggatgcctgaactgatgaggttggatgtatatcccagraaaatggtgcagctggtaagtgggcggcggctctgggtcaggtccgcgtgctggtcttcatcctgtgacagtggttccagcttcttctcgatctgtgagt

SEQ ID NO: 134011 - DNA, 201 bp, Homo sapiens
cagtgacaacagagcagatatcaagcccagggcccttctgagtgtgtggcaccatggctggccctgccctcaccaagccccctaccagtgaagaggtccgmggtcgggggcttcaggctggtgctggcccgccacacctgctccatctccagcttctgcatccgtacccacttatcttgataatcaaggcgcccaaagaag

SEQ ID NO: 134012 - DNA, 201 bp, Homo sapiens
aacaggaccaaggaccgagacacagacatggaaggacttcagataccatcttattctagagacgtagctgaccaaaaagtaggggaggggctgggtctgcmaattaataaatagaagagggggtaagaccttcctgggaccgcagccgctcagtcctcgttcttctcatgcatgaaggcatccatcttctgggcaaaggtt

SEQ ID NO: 134013 - DNA, 201 bp, Homo sapiens
ctcaccaggtccccaccatgttgtgctgcacaaggtagcgaatggtctcacggatgcctgaactgatgaggttggatgtatatcccaggaaaatggtgcarctggtaagtgggcggcggctctgggtcaggtccgcgtgctggtcttcatcctgtgacagtggttccagcttcttctcgatctgtgagtaagggccaagtc

SEQ ID NO: 134014 - DNA, 201 bp, Homo sapiens
ccaccatgttgtgctgcacaaggtagcgaatggtctcacggatgcctgaactgatgaggttggatgtatatcccaggaaaatggtgcagctggtaagtggscggcggctctgggtcaggtccgcgtgctggtcttcatcctgtgacagtggttccagcttcttctcgatctgtgagtaagggccaagtcaagttaagcact

SEQ ID NO: 134015 - DNA, 201 bp, Homo sapiens
tcttctcagactacgtgggcagtgagtgtggctggggatgtgggacaggcagggaagatggggggccaaccaggggcaccccaccctcactcacctacccrcccttcccccaaggccccatcacctgcacctgcttcagccgggatgggcagtgcaccctggtgtccagcctggactccacattgcggctcctggacaaag

SEQ ID NO: 134016 - DNA, 201 bp, Homo sapiens
gctgttcccccaaaacctttcacctccccttcgcccttgctttaaccgacactgggaaccctgcctttatcccagtcctccaaagtccagcctcctctgartggcaataactttctcagaaggtgaacacggtgcagtttaatgaagaggccacagttatcctgtccggtgagtctggggcctaagcacgggggcccaggg

SEQ ID NO: 134017 - DNA, 201 bp, Homo sapiens
ccagagtgagtgaagaagtgggcccaagagaggtcccgggtcgcacctgcgcaaacagcgaggcctgctcccgagagtggccgaaggggtcaatgtgccargccacacggggtcgcccatcattgccaaatgtgtcctccagaaagcgcagcccaagtgtcatctggtccacgatggcaccgtagtgggtggctgcctcat

SEQ ID NO: 134018 - DNA, 201 bp, Homo sapiens
aactggcccctccaggttgccccagccccacctctgtgttctgctccatcaccatctggtccagaatgggcatcagccagtcctcaaacttgcagtaattstcattgggcaccagcaggtttccgatcctgagaacaggaggcatgtaggcatcaggccccaggacccttggtccagctcccctgcccaacaccactcagg

SEQ ID NO: 134019 - DNA, 201 bp, Homo sapiens
gacaacagagcagatatcaagcccagggcccttctgagtgtgtggcaccatggctggccctgccctcaccaagccccctaccagtgaagaggtccgcggtygggggcttcaggctggtgctggcccgccacacctgctccatctccagcttctgcatccgtacccacttatcttgataatcaaggcgcccaaagaagaagc

SEQ ID NO: 134020 - DNA, 201 bp, Homo sapiens
agtctggctactttgctcccgcttaggtcctcaccttctgggcccagtaatacacggactctgggttgttgatctccttgcccagccgggcgatcatcttrgaaggcgtccactttacaccctaggagaggatgtgaccttcaggccatgcctcccctgactcccactgaactggcccctccaggttgccccagccccacc

SEQ ID NO: 134021 - DNA, 201 bp, Homo sapiens
catttaccagccggatgagcttgtcaaggttcttgaaccacatgttggcattctcatattggaagtccgagcccatggtcatcacagtgtggttggtgcgrtaataccggccctgcaggcaagaggggagtcctgaagccagaggatcctgggccatccctgtgtatagctgtgttttgatgtatatggggtcaaggatgt

SEQ ID NO: 134022 - DNA, 201 bp, Homo sapiens
ccagggacctcagaaaccagggtacagcccagccacagataaccactccctacccctcgctccacagggtgcgctggctctggccctgcctgtgggttccrgtgtggtgcagtcgctggcctaccacccaacagagccctgcctgctgaccgccatgggaggcagcgtccagtgctggcgagaggaggcctatgaggcaga

SEQ ID NO: 134023 - DNA, 201 bp, Homo sapiens
tagtccctccgggctttccgttctccaggcccggctgacagagttagccgaggccgccatattgaataagcgacccggcctcctagggggtcgtcgtggtscagacagtttagcagaacagcctccgcggctccggggagaaggtgaggtcttgtatggatgggaagggtgaggtgcgtcggccagaggcttatttattga

SEQ ID NO: 134024 - DNA, 201 bp, Homo sapiens
cggccagaggcttatttattgacgggactgtttcctttggcccacgcgacgtagtcttctgttgtccttgactgggcgccgcctcccgccccgccgcctcrgaagcccctgagagccggcagatggggggcttttagccacggtctctggtctgatgaagcagaaaagaagatgaggatcagggggtcctcgggaacgctg

SEQ ID NO: 134025 - DNA, 201 bp, Homo sapiens
gacgcgggtggatcactgaggtcaggagtttgagaccagcctggccaacatggcgaaaccccttctctactgaaaatacaaaaattagccgggcgtgatgrcaggtgcctgtaatcccagctacttgggaggcaagagaattgcttgaacttgggaggcggaggttgcagtgagtcaagatcacaccattgcactacaacc

SEQ ID NO: 134026 - DNA, 201 bp, Homo sapiens
aattaatgtgaatattttctgaggaccattcagcaacttttgatcattcggtattgttaaaagttacaattttctttattttttgaaacgaggtctcactrtgttgtccaggctggtcttgaactcctggcctcaggtgatcatcctgcctcagcctccctcccatagttctgggattacagacgtgagccaccaaacctg

SEQ ID NO: 134027 - DNA, 201 bp, Homo sapiens
gtgaatattttctgaggaccattcagcaacttttgatcattcggtattgttaaaagttacaattttctttattttttgaaacgaggtctcactatgttgtycaggctggtcttgaactcctggcctcaggtgatcatcctgcctcagcctccctcccatagttctgggattacagacgtgagccaccaaacctgaccaaaa

SEQ ID NO: 134028 - DNA, 201 bp, Homo sapiens
atgatactttattctaggctcctctaagcattttccagattgtgtgtttaatactaccagaatgatactcgggaggatcacttgagcccaggagctcgagkccagcctgggcaacatagcaagaccccgtctcttaaaaaaaatattaccacaatgatagataattggcatttctgatattaaatgtaaaattactattaa

SEQ ID NO: 134029 - DNA, 201 bp, Homo sapiens
ataaaataagttcactttcatttagtaccaacttcaggtggatttaaaaattaaaatctataagcatttgctttcactcataacttggtgagttgtacacrtatgatttgtacaagtttctgcctgtgtgttacacctcaattaaatgcaaacatttcattattttttattctaggactgtgctcacctttaaaaatatac

SEQ ID NO: 134030 - DNA, 201 bp, Homo sapiens
tgcttgccgcaattaccactacaaacttaggctggtaaaatcttggctatcctcagctacgatgacctccaaagtatcacctccacaaacaagtttgcctmgtgctccaagttaagtgagttgtctccatctgtaccaaagaagttctcatcttcacagcctgccccggcctcgaagaaattccattttgagggggtggag

SEQ ID NO: 134031 - DNA, 201 bp, Homo sapiens
gaggatagtttgagcccaggagttctaggctgcagtgaattatgatcatgccactgtagcctgggcaacagagtgagaccccagggcaaaaaaaaaggtgrggggttcttttatttaattgcagttcctctaagcttcattttttaaagtaattcagaaagggaattaattgtaaaaaaaattttttggtaaaccaggtaa

SEQ ID NO: 134032 - DNA, 201 bp, Homo sapiens
atagtcctaggtcaatccctggatattgtatttactttgagaaagatattttttcctcccacatggagaaattcaagtagattgatacattctcaacttayttcagtttgttcattagagaaaagaagctaggctgggcgcagtgactcacacctgtaatcccagcactttggaaggccgaggtgggatgattgcttgaaa

SEQ ID NO: 134033 - DNA, 201 bp, Homo sapiens
cctggccgatatgttctttatagaagacgccatacctcctcatcatcagatccaaagaggtcaatgtcatcatcatctttactatctgtagctccacttcytgtagtgtcttccacatcggcaggaccatatttgcccaaagctttcttcactcctggcaggcttgaaaaacatttaaattcaaccactattgagctagta

SEQ ID NO: 134034 - DNA, 201 bp, Homo sapiens
tttctagatttgcctatgatgggctaaaacgtcaaagacttaccgagccaatggtcagaaatgaaaaagggcttttaacctatacttcttgggaggatgckctctctcgcgtagctggaatggtaaaatttgaaataaatagtgttaaatagtgtttgtgattatcaagaaacatctttgccatgaagggggggatgtata

SEQ ID NO: 134035 - DNA, 201 bp, Homo sapiens
tttatatgttacaattttcatacagggaaggtgtgatggagttcttattagcaaatcacccattggactgtcctatttgtgaccagggaggtgaatgtgayctgcaggtatgtagtagaattctgtcaatctttttggttgtctcagattttaattttattagcagcatgagattgactctttcataatctacttaaggac

SEQ ID NO: 134036 - DNA, 201 bp, Homo sapiens
acaatatcccaacaaaactaaagtagcctgggtccagttttgtcatgtgaacatcctgataaacttcgagagcagtcttattcttcagctctatacaaagrtgattttacctggccttttccttttcgtaagacttgatgtgattataccaacgtagggcatgacacaagtcggcaggcggtgggctggacacggcttcaa

SEQ ID NO: 134037 - DNA, 201 bp, Homo sapiens
cttgcagcaaactttatttagaatcaatatcgtagtggagaacctagccctctttacttctatctataaatttaattcttttgtacaattgattctcttcrtttcaaaactggaaacacatagatagaagtgctttacaaacacatgtgtcatataattgtaacatatctagaaattaaaggtgatttatagttgtcagta

SEQ ID NO: 134038 - DNA, 201 bp, Homo sapiens
ggatgtatatttcttcccttttttacttttaccaagattatgatttaatctccttccattttacagacatctactgaggacatatgctagatattatgctrttaagggatataaagaccagagacacatcattcctgcatcctacaatcttgtagtagagaaagttgcacaattcagcaattattatatgcagctatgagt

SEQ ID NO: 134039 - DNA, 201 bp, Homo sapiens
atagatagatagatagaagtaataagatgctgtatgtgtgtgtttcagcaataacagcagtgaagtcaggttattctaatgcttttttttttttttttttyttttttacttctaggcttgtgagaaggttggcatgcagatccctcgattctgttatcatgaaaggttgtctgttgctggaaactgcaggatgtgccttgt

SEQ ID NO: 134040 - DNA, 201 bp, Homo sapiens
cacatacattgaaaagatgttcatgtctgaactgtctgggaatatcattgatatctgccctgtaggtgccctaacctctaagccctatgcctttactgccyggccttgggaaacaaggtatcttttattttatgacaatttgtttttttgtccttaattcattactattcaaaaaaatattaaggttcattttcttcctgg

SEQ ID NO: 134041 - DNA, 201 bp, Homo sapiens
aaaaaaattttttggtaaaccaggtaacagaaactttctttattcccaaaagcaccatagtaaacaccgtatgtgtttctcagaaagacagaatccattgrtgtaatggatgcggttggaagtaatattgtggttagcacaagaactggagaagtgatgaggattttgccacgtatgcatgaggacatcaatgaagagtgg

SEQ ID NO: 134042 - DNA, 201 bp, Homo sapiens
tttaatttagaaatacttcataaaattttttgtttgagaaggcaatgggtttgatgataggagaatatttcatggattctctgtatgtcttaattttaaaktaaatttgcattttatatattgtatttctagcacagatttgcgttccaattatcttcttaatactacaattgctggtgtggaagaggcagatgttgttct

SEQ ID NO: 134043 - DNA, 201 bp, Homo sapiens
aaactgtaggcaaattccagatgttagtttcaaaaaaaaaaaggcaaagcctaaactcacatgagccccagactaagccgtctgcttgaatgcttctgacrcactcctctaatttcgccatatctgtctcatcatcccaaggtttcacatctagtaagatggaagacttggcaacaagtgcaggttctaaaaacaataaac

SEQ ID NO: 134044 - DNA, 201 bp, Homo sapiens
attatcttcttaatactacaattgctggtgtggaagaggcagatgttgttcttctggttggtacaaacccacgttttgaggcaccactgtttaatgctagrattcgaaagaggttggtaatagtatttattcaaggtttaaaaatatttatgtaatttttttgttttatatgtgaaaaatggcatcttcctaatagtgtta

SEQ ID NO: 134045 - DNA, 201 bp, Homo sapiens
agactccaaaagataactggaagacaatttttttttttttttttggtgggacggagtctcactctgtcacccaggctggagtgcagtggcaggatctcggytctgcaagctccgcctcgagatggggtttcaccatgttagccaggatggtctcgatttcctgacctcgtgatccgcccgcctcagcctcccaaagtgctg

SEQ ID NO: 134046 - DNA, 201 bp, Homo sapiens
catgcagtttttatttgccagagtttaattttcttgaaattatctgaaaagaaatcaaagtaaacctgaaagaattgcacttttaacttcatttaaatctwtctttattacaaaaggagttattccttaaaattttaccagtccttctatttttgtttctgaggtacatgtttttttcatttgagttctttctttaattca

SEQ ID NO: 134047 - DNA, 201 bp, Homo sapiens
agcaacttgattgaagtatttgttgatggtcagtctgtcatggtggaaccgggaacgaccgtcctccaagtaggcatacattctaactattttgtgtgtgygttctgatttttttaaaaatactaatttatttcctttatactgattattagtaaataattctttaaaataactatacacagcaaagttatattaaaatta

SEQ ID NO: 134048 - DNA, 201 bp, Homo sapiens
tcaaaagaaaaaaaaacaactcttgacaatgcagttgtcgaatcttcttttctatatatgtatttttaaggtctcactatgttgcccaggctgcagtgcartggcagaattgtagctgactgtagcctcaaactcctgggcttaagcagtcctcccacctaagcctcccctgtagctgggtctgcaggcatacaccaccat

SEQ ID NO: 134049 - DNA, 201 bp, Homo sapiens
gcttaactgcttccttcataaatgtatgtctactaatggacaccaataggtttttcagtagtgctgcattatttcaccatagttacaattatctattattkgatatttttaagtattaaagctttttgttgtttttggggacctgacatgttgtagattgctggaatgactcttccatatgatactctggatcaagtaagg

SEQ ID NO: 134050 - DNA, 201 bp, Homo sapiens
cactgcagccaccactgggaccacaggtgcacaccaccatgcctggccaattttttgtagagacgaggttttgccacgttgcccaggctgtacttgaaccygtgggctcaagtcatccacccacttcggcctcccagagtgttgcgattacaggcctgagccactgcacctggcctgtttagttttttattgtttctggaa

SEQ ID NO: 134051 - DNA, 201 bp, Homo sapiens
aaacgtgttttagctgatactcaggcatatttcacagtagcattggcaagatgctttggattaaactaaatctggttgtatatgtgtgtctgtatgttggrctaacaaattgaagacattcatgttacacctaagacttgggacaacctatattatagaggcaaatatggtttggtgttcagcttacttgtaatattttaa

SEQ ID NO: 134052 - DNA, 201 bp, Homo sapiens
gcctgtaatcccagctacttgggaggcaagagaattgcttgaacttgggaggcggaggttgcagtgagtcaagatcacaccattgcactacaacctgggtracagagtgagactctgtctcaaaacacacacacatactgattgtcagtggccagtattgcctaagttgaattcagctttaactggcatttgttgagcccc

SEQ ID NO: 134053 - DNA, 201 bp, Homo sapiens
aaattcctcttgtgattaatgtattcctctttataatatatcagcataatttccatgctgattctttgattgtggccagctatttattgaagaatgacacmaaggatgggtgggagaatgagacgtgtattctataactttacacgttttgttttgttttgtttttgagacagagtctcactctgttgcccagacggagtg

SEQ ID NO: 134054 - DNA, 201 bp, Homo sapiens
agtggcacaatcttggcccactgcaacctccgcctcccaggttcaagcaattctcgtgcctcagcctcctgtgtagctggggctacaggtacataacaccrcacctggttaatttttttgtatttttagtagagacggggtttcgccgtgttggccaggctggtctcgaactcctgtcctcaagtgatccacccacctcag

SEQ ID NO: 134055 - DNA, 201 bp, Homo sapiens
agccaccacccctggcctatatattttttagtgaaacagaaggtgagattaggcctggtgcagtggctcatgcctgtaattccagcattttgggaggctgaggggggcagatggcttgaatccaggagtttcagaccagcctgggcaacatagtcagatctggtctctttaaaaaaaaaaaagtgagattattcacttggg

SEQ ID NO: 134056 - DNA, 201 bp, Homo sapiens
attttactctgtcacccaggctgaagtgcagtggcacaatcttggcttgctgcaacctctgcctcctgagctgaagtgatcctcccacctcagcctcctcrgtagctaggactataggcgcataccaccacatccagctaatttttgtattttttgtagagatggggtttcgccatgttacccaggcagatctcaaactcc

SEQ ID NO: 134057 - DNA, 201 bp, Homo sapiens
atcgcttgaacccagaagacggaggttgcagtgagctcagatcatgccactgcactccagcctgggcgacagagcgagactccatctcaaaaaaaaaaaaacaaaaaaaaaaccaacaactaaaaactaaggagtttctgtttgtcacacaagggggtctggaggtaggcacattgaaagctgatgcaggctgggtgcggt

SEQ ID NO: 134058 - DNA, 201 bp, Homo sapiens
caaagtgctgggatttcaggtgtgagccactgcaccgagcctttttttttttttaatttttttaattttttagatttttaaaaaattatttttatttttawtttttatttttttgtctttgagacagagtctcgctttgtcgcccaggctggattgcagtggtgcgatctcggctcacttcaagctccgcctcccgggttc

SEQ ID NO: 134059 - DNA, 201 bp, Homo sapiens
ggatggtctcgatttcctgacctcgtgatccgcccgcctcagcctcccaaagtgctgggatttcaggtgtgagccactgcaccgagcctttttttttttttaatttttttaattttttagatttttaaaaaattatttttatttttattttttatttttttgtctttgagacagagtctcgctttgtcgcccaggctggat

SEQ ID NO: 134060 - DNA, 201 bp, Homo sapiens
aggatggtctcgatttcctgacctcgtgatccgcccgcctcagcctcccaaagtgctgggatttcaggtgtgagccactgcaccgagcctttttttttttttaatttttttaattttttagatttttaaaaaattatttttatttttattttttatttttttgtctttgagacagagtctcgctttgtcgcccaggctgga

SEQ ID NO: 134061 - DNA, 201 bp, Homo sapiens
aaccattaatgataagctcactgttagtcttgcagtttattttactgtgtggtagtgctttaagtttgatcctttctatgtcatttttttttaaatggcaraactgctctctgcatagaattagaaagtccaaatgtatacaatagctgctgctgcttagctctttgacattgtacaagtcagtatctctgagactgagaa

SEQ ID NO: 134062 - DNA, 201 bp, Homo sapiens
tttaaatagaaggtaagtagttagaatggattgaacctgtgcaaattaactgtagttttcttggaaattaattctaaagtactcaaccacaaaattatttytttcatgtgttcttccaaagagtttaatagtgttgacattttaaatgtatagtctcccatgttgttgtttattaagttttcaactatgaggaatgtcatt

SEQ ID NO: 134063 - DNA, 201 bp, Homo sapiens
tgcgcatcgtggcgcgcacctgtaatcccagctactcgagaggctgaggcaggagaattgcttgaacccaggaggcggaggttgcagtgagccgagattgygccactgcactccagcctgggcaacagagcaagactctgtctcaaaaaaaaagaaaagaaatttgaagtaacttaaattagttactataggtaagtttgt

SEQ ID NO: 134064 - DNA, 201 bp, Homo sapiens
gaggctgagctgactggatcatgaggtcaggagatggagaccatcatggctaacacgatgaaaccccgtctctactaaaaatacaaaaaattagcctggcrtggtggtacacacctgtcccggttactcaggaagccaaggcaggagaatcgcttgaacctgggaggcggaggttgcagtgagctgagatcgcgccacagc

SEQ ID NO: 134065 - DNA, 201 bp, Homo sapiens
gggctcaggcgatacttctgcctcagcctcccaaactgctgggattataagcgtgagccactgcacctagcctttatttcaaaccatatcaataatgcaggtttaatttaggtaagttgaaaagagacagatatgtgcagaaatggaactgatccttattctacaatgtgtagataattattactattttcatgcattttc

SEQ ID NO: 134066 - DNA, 201 bp, Homo sapiens
tatgcctataatcccagcactttgggaggccaaggtgggtggatcacctgaggtcaggagctcgagaccagcctgaccaaaatggtgaagccccgtatgtwctaaaaatagaaaaattagccaggcatggtggcgcatgcctgtaatcccagctactcagggggctgaggcaggagaattgcttgaacctgggaggccgag

SEQ ID NO: 134067 - DNA, 201 bp, Homo sapiens
ggaggcagaggttacagtgagccgagatcacgccactgcgctccagcctgggcgacaaagtgagactctatcgccgagaaaaaaataaaataaaataaaawgggttttttgacattgttgaaaggaaattattccaaaaatcacatttaattttttacattgaaaatactgcagttatggtaaaattccataattgctttg

SEQ ID NO: 134068 - DNA, 201 bp, Homo sapiens
gcttgtggtgaacaatcataatctctaaaaaataccttgtctggaccgggcgcggtggctcacacctgtaatcccagcactttggcaggctgaggcgggcrgatcattgaggtcaggagtttgagaccagcctggccaacgtggtgaaaccctgtctctactaaaaatacaaaaattagccaggcatggtggcacatggct

SEQ ID NO: 134069 - DNA, 201 bp, Homo sapiens
tgagaccagcctgaccaccatggtgaaaccccgcttctgcttaaaaaaaaaaaaatacaaaaattagccggttgtagtggcctgtaatcccagctacttgrgaggctggggcaagagaatcacttgaacccaggaggcagaggttgcagtgagctgagattgcgccattggactccagcctgggtgacagagtgagactcc

SEQ ID NO: 134070 - DNA, 201 bp, Homo sapiens; identical to SEQ ID NO: 23689

SEQ ID NO: 134071 - DNA, 201 bp, Homo sapiens
tttaatacttttctataattttttaatggctgcatactggtgcactgtctagctgctctatagttatttgattgtttccagggatagttattgaaagcatktggccagtaaggggtttatcgttggaatctgttggttacatataattatatatacttgcatagggccttataatcttttttcctcctgaatatgtgcacc

SEQ ID NO: 134072 - DNA, 201 bp, Homo sapiens
gccaacatggttaaaccccgtctctactaaaaatacaaaaattagctgggtatggtgatgggcacctgtaatcccagctactcgggagcctgagggtggaraatcgcttgaacccagaagacggaggttgcagtgagctcagatcatgccactgcactccagcctgggcgacagagcgagactccatctcaaaaaaaaaaa

SEQ ID NO: 134073 - DNA, 201 bp, Homo sapiens
atgacttaggccttaagactaagcctttccccccagatttttacacgcctgatacagtgcatgattgtttggtcgctgttgtgttagcaatggctcacgcytctgtttgttgtccttgtttgtttggtccattgaccacgttggacagcatttttttattcctttaactaacgggaaattgagaaaaacgacttttgaaaa

SEQ ID NO: 134074 - DNA, 201 bp, Homo sapiens
tttccccccagatttttacacgcctgatacagtgcatgattgtttggtcgctgttgtgttagcaatggctcacgcttctgtttgttgtccttgtttgtttkgtccattgaccacgttggacagcatttttttattcctttaactaacgggaaattgagaaaaacgacttttgaaaagttagcccaggattgcattgcaaat

SEQ ID NO: 134075 - DNA, 201 bp, Homo sapiens
agaagttccccaatttttctgggacctgcccatagttattctgaccacaggataatttgctaggctttttattctgaataattacttttagaaaacgtgtyttagctgatactcaggcatatttcacagtagcattggcaagatgctttggattaaactaaatctggttgtatatgtgtgtctgtatgttgggctaacaaa

SEQ ID NO: 134076 - DNA, 201 bp, Homo sapiens
ggtagctctcaaagatttgcttaatagagtggactctgacaccttatgcactgaagaggtcttccccactgcaggagctgggtgagaaatatgaagctagratctaggctttcctttctttttttagttacaagttatgtataaaatgtgacaacctggattctccaacatatcccccagtttattttcatatatagacca

SEQ ID NO: 134077 - DNA, 201 bp, Homo sapiens
tccttgtttgtttggtccattgaccacgttggacagcatttttttattcctttaactaacgggaaattgagaaaaacgacttttgaaaagttagcccaggrttgcattgcaaataacaaaacgttgtttacaggttattgggatccagtgcttgaactgtaaggtcttggatcagacacaactctgttcacacacgaattg

SEQ ID NO: 134078 - DNA, 201 bp, Homo sapiens
tgagaagagcccgagatgataaggaatatttaaaatatttgaaataacagtgagtgttgagaaaaaaagtgaagtactataaaaattgttatattagttayaccttggttcaaaaattgcaacaagttctttaattaaatgataaaaatgtaagctaatatgagaattcagctaaaggatttctttctttctttttttttc

SEQ ID NO: 134079 - DNA, 201 bp, Homo sapiens
gcattttcttctagtttttttctttaccctgcgtaatattttattttatttttttgagaccagagtctcactctgttgcccaatctgaagtacagtggcaygatcttggcttactgcagcctccccctcccaggttcaagcgatcctcctgcctcagcctcccaagtaagctgggactattggcatgtgccaccacacctg

SEQ ID NO: 134080 - DNA, 201 bp, Homo sapiens
tcctggactcaagcagtccacccacctcagcctcccaaagtgctgggactacagatgtgagccaccacccctggcctatatattttttagtgaaacagaargtgagattaggcctggtgcagtggctcatgcctgtaattccagcattttgggaggctgaggggggcagatggcttgaatccaggagtttcagaccagcct

SEQ ID NO: 134081 - DNA, 201 bp, Homo sapiens
tgtttctggttttagcatctattttaaatgggtaagaatgggattttttggccaggtgtggtggctcacacccgtaatcccagcactttgggaggccaagrcaggtggatcacctgaggtcaagagttcaagaccagcctggccaacatggtgaaaccccatctctactgaaaatacaaaaattagccgggtgtggtggca

SEQ ID NO: 134082 - DNA, 201 bp, Homo sapiens
ttgggaggccaagacaggtggatcacctgaggtcaagagttcaagaccagcctggccaacatggtgaaaccccatctctactgaaaatacaaaaattagcygggtgtggtggcatgtgcctgtagtcccagctacttgggaggctgaagaaggagaatcgcttgaatccaggaggcagaggttacagtgagccgagatcac

SEQ ID NO: 134083 - DNA, 201 bp, Homo sapiens
gggtgtggtggcatgtgcctgtagtcccagctacttgggaggctgaagaaggagaatcgcttgaatccaggaggcagaggttacagtgagccgagatcackccactgcgctccagcctgggcgacaaagtgagactctatcgccgagaaaaaaataaaataaaataaaatgggttttttgacattgttgaaaggaaattat

SEQ ID NO: 134084 - DNA, 201 bp, Homo sapiens
tagtcccagctacttgggaggctgaagaaggagaatcgcttgaatccaggaggcagaggttacagtgagccgagatcacgccactgcgctccagcctgggygacaaagtgagactctatcgccgagaaaaaaataaaataaaataaaatgggttttttgacattgttgaaaggaaattattccaaaaatcacatttaattt

SEQ ID NO: 134085 - DNA, 201 bp, Homo sapiens
actgcaaaataaaaattacagattaattctaaaattaaaatttttttaggccgggcacagtggctcatgcttataatcccagcactctgggaggctgaggygggtggatcacctgaggtcaggagttcaagaccagtctggccaacatggtgaaagcctgccttctactaaaaatacaaaaattagctgggcgtagaggca

SEQ ID NO: 134086 - DNA, 201 bp, Homo sapiens
ctatgaggaatgtcatttagccagtttctgctaatagacatttagcttgtatatttctttatgattacaaatctgtaaaaaatattgctgtttacacatttctgtgtatatctctcattctcctgattaaaccaagaaatggagtagatagatgcaagaggtgtgattatttttaaggttcttaaaacataacaaattatc

SEQ ID NO: 134087 - DNA, 201 bp, Homo sapiens
tgttatcaaatgtataatttaatgtttttatataatttaacatttttatatattgagttgcttgtaatcacaaataaatacaaatacacatttttttttttcattgaaatcccaggttgtagctgcttgtgccatgccagtaatgaagggttggaatatcctaacaaactcagaaaaatccaaaaaagccaggtactttat

SEQ ID NO: 134088 - DNA, 201 bp, Homo sapiens
tgaaccggggaggtggaggttgtagtgagccaagatggcgccactgcactccagcctgggtgacagggcaagactccctctcaaaaaaaaaaaaaaaaaaagaagaagaaagaagtttcagtttaaactactctgctatcaaaagtagacaaccataagtttgcatccagagcaatacagaggaataataaggaatgaaaa

SEQ ID NO: 134089 - DNA, 201 bp, Homo sapiens
caggaggcagaggttacaatgagctgagatcgtgccactgcactcactccagcctgggcaacagagtaagactctatctcaaaaaaaaaaaaaaaaaaaaagggccgggcacggtggctcacgccttaaccccaacactttgggaggtcaaggtgggcggatcatgaagtcaggagttcgagaccagcctggccaacatgg

SEQ ID NO: 134090 - DNA, 201 bp, Homo sapiens
ttcacttaaccgttattgaacatttactacgagccagaaatgagtccgtaaagaagaataaaatggatgatatgctgggggaatcgtaaatgttagatagsctggtcaatgaaactgagaaaaggcttttaagccaagatttgaaggataaggaggggccagggaagagcatttcagtctgaggtcacagccggtggcaag

SEQ ID NO: 134091 - DNA, 201 bp, Homo sapiens
atagtgtggaagcttggtgacctgttaagctattgaaggccggaggcggtggctcactcctgtaatcccaccactttgggaggccgaggcgggcggatcaygaggccaggagatcgagaccatcctggctaacacggtgaaaccctgtctctactaaaaatacaaaaaattagctgggcgtggtggcgggcgcctgtagtc

SEQ ID NO: 134092 - DNA, 201 bp, Homo sapiens
aggcgggcggatcacgaggccaggagatcgagaccatcctggctaacacggtgaaaccctgtctctactaaaaatacaaaaaattagctgggcgtggtggygggcgcctgtagtccagctacttgggaggctgaggcaggaggctggcgtgaacccgggtggcggggcttgcagtgagccgagatcgctccgctgcactcc

SEQ ID NO: 134093 - DNA, 201 bp, Homo sapiens
gctttaactggcatttgttgagcccctactaatagctcattgtctaggaagtattgttttcctcctgctctataagtaaagaaccagaaactcatttaccmaacattactcactagcaggaaacagattggatatttgcaatttcagtatcacatattcttaattaatgaaatttatgaatgaaatttcctgttgtacatc

SEQ ID NO: 134094 - DNA, 201 bp, Homo sapiens
aaataaaaaaattggccaggcgtattggctcacacctgtaatcccagcactttgggaggccaaggcaggtggatcacctgagatcaggacttcaggaccascttggccaacgtggcgaaaccctgtctctactaaaaatacaaaaatttgccgggcatgttgatgggcgcctgtaatcccaactactcgggaggctgagaa

SEQ ID NO: 134095 - DNA, 201 bp, Homo sapiens
aaacacataattggaaatctgtaagataagtgtaccagaaaatagcaatcaagacacctcaaaggcttgggctggtgagctatctcagaatatctcaggarcatttagtagacagctatgcttagaacatgaaatgatagaatgggtattggtaggaaataaaagcagaaaagacaactttattttacataaccattaatg

SEQ ID NO: 134096 - DNA, 201 bp, Homo sapiens
taaagctttttgttgtttttggggacctgacatgttgtagattgctggaatgactcttccatatgatactctggatcaagtaaggaacagattggaagaaktctctcctaatcttgttcgatatgatgatattgaaggggctaattacttccagcaagcaaatgagctctcaaaggtaacagctcgcctatgagcagtttt

SEQ ID NO: 134097 - DNA, 201 bp, Homo sapiens
tagaccagcctggccagcactgtgaaaccccttctctactaaaaatacaaaaaattagctgcgcatcgtggcgcgcacctgtaatcccagctactcgagargctgaggcaggagaattgcttgaacccaggaggcggaggttgcagtgagccgagattgtgccactgcactccagcctgggcaacagagcaagactctgtc

SEQ ID NO: 134098 - DNA, 201 bp, Homo sapiens; identical to SEQ ID NO: 23680

SEQ ID NO: 134099 - DNA, 201 bp, Homo sapiens
gatgatcatttggagaatagcaagactggaataagagacaaggaaaaagcattttgtattattgggacaggatactacaaaagccctaaaatagatagtgkcaatgggaatgaaaacaagagagtagattcaagggagaatgaaatgtagacaggccttcaggaatgatgaagacccgagggattttttcccccgtcgtac

SEQ ID NO: 134100 - DNA, 201 bp, Homo sapiens; identical to SEQ ID NO: 23682

SEQ ID NO: 134101 - DNA, 201 bp, Homo sapiens
ttgcctatgatgggctaaaacgtcaaagacttaccgagccaatggtcagaaatgaaaaagggcttttaacctatacttcttgggaggatgcgctctctcgygtagctggaatggtaaaatttgaaataaatagtgttaaatagtgtttgtgattatcaagaaacatctttgccatgaagggggggatgtatatttcttccc

SEQ ID NO: 134102 - DNA, 201 bp, Homo sapiens
tgagactctatcgccgagaaaaaaataaaataaaataaaatgggttttttgacattgttgaaaggaaattattccaaaaatcacatttaattttttacatygaaaatactgcagttatggtaaaattccataattgctttgcaggattgcaagtcaagtagctgctttggaccttggctataagcctggggtggaagcaat

SEQ ID NO: 134103 - DNA, 201 bp, Homo sapiens
gaaataatcattgttgagttttgatatgcgtacttcataacatcttcatacgcatatacaaatgtgcacaaattatattaaactatatattattctacgaytttcttacacttgattcagatgtttctaaaggtcttcttttctgaataacttttttcttctgccagttgttattaatgggtggcagtgtttccaaatttt

SEQ ID NO: 134104 - DNA, 201 bp, Homo sapiens
gccaaggtgggaggattgcttgagaccagtagttcaagaccagcctggtcagcataatgagacaccggctctacaaaaaatttttaaaatgtggtgagagratagtttgagcccaggagttctaggctgcagtgaattatgatcatgccactgtagcctgggcaacagagtgagaccccagggcaaaaaaaaaggtggggg

SEQ ID NO: 134105 - DNA, 201 bp, Homo sapiens
agaaaagacaactttattttacataaccattaatgataagctcactgttagtcttgcagtttattttactgtgtggtagtgctttaagtttgatcctttcyatgtcatttttttttaaatggcaaaactgctctctgcatagaattagaaagtccaaatgtatacaatagctgctgctgcttagctctttgacattgtaca

SEQ ID NO: 134106 - DNA, 201 bp, Homo sapiens
gaaaccctgtctctactaaaaatacaaaaaattagctgagtgtggtggcaggcacctgtagtcccagctacttgggaggctgagacagaagaatggcatgracccaggaggcagagcttgctgtgagccaagattgcaccactgcactccagcctgggcgacagagcgagactccatctcaaaaaaataataataattttc

SEQ ID NO: 134107 - DNA, 201 bp, Homo sapiens
ggggaagcgtgctgtggaagacaagaacattgggccattggtaaagaccatcatgacaagatgtatacagtgtactcgctgcatcaggtaactttttttcmttttttttctattatagaatataattgtatacttaatagtcacaatttgatgaataataacattggaaagaatggctactttttttgggtgggagaagag

SEQ ID NO: 134108 - DNA, 201 bp, Homo sapiens
tattttagcctgttagaatgattttcaaagtcaaggaagatgccagtctgaaatgcagagatgatttgaataatttctatagaaaacatgtattcagaaayaggaattcaaggttacagtgagctctcattgcaccgctgcactccagcctgagggacagagcaagaccctgtctcttaaaaaataaaggaacttgaaatt

SEQ ID NO: 134109 - DNA, 201 bp, Homo sapiens
tttctgaaatgtaagcaaagtttgaaaatccaagcaattaatagattttaaatataaaattttgctgttgtaaggaaagtcactgtgtagcaatttatggygaattttccaaagtggcaaataactgcaggtttttctgagaattataggtggaagaatcaaaacatttaaatgtgaaacatgttaaacagtgcttctgat

SEQ ID NO: 134110 - DNA, 201 bp, Homo sapiens
cggtgatgaagtattctgtacaacaaatccctgtgacatgagtttactggtgtaaaaagccttcacatgtacccctgaacctaaaagtttttttttttttwaaaaaagaaaaatcactaccctcccactatcaagaaataactataattatttttaacattttagtcactcttcctccagggacatacatatgcattatac

SEQ ID NO: 134111 - DNA, 201 bp, Homo sapiens
ttctagtgctaaagaaaagatttaagcaccttgtcaagctgggtaaataggaaaaatacataatcatgctcagatatgtatctaggataattataattaawaataatcatagtaacaatggctaatgataatttagctttattatatgtgctaagcactctggttttacatgcattatcttcttttgttcttgctacaacc

SEQ ID NO: 134112 - DNA, 201 bp, Homo sapiens
gaggtcaggagtttgagaccagcctgaccaacatggcgaaaccccgtctctactaaaaatacaaaaaaattagccgggcgtggtggtgcatgcttgtaatyccagctacttgggaggctgaggcaggagaattgcttgaacccgggaggcagaggttgcagtgagccgagatggcgccactgcactccagcctgggcaatg

SEQ ID NO: 134113 - DNA, 201 bp, Homo sapiens
gggaggcaccaaggcaggtgaggccacctctgagtctgattctgggtgggaagcgggtgcctggtggtgtgctatccgctgctgcctgggctgggggcggyggggacctggagcggcgcccctcatgcacgcgttgatcaatttgctgaggctccattttcctccctgcagttaaagatccctgacctgttccgtgacctg

SEQ ID NO: 134114 - DNA, 201 bp, Homo sapiens
tgcacctgcggggaactgtccggagcaggaaccgcggccgccccacacctcctgttctccgtgaactttctctcgggggcgctacgtgaaatggggcgggwctggctgctgcagtcttgctcccggggttcctgccctgcggtgctggttaagtggggtcgttctagccggggaagctgcttaagtcctcagcttaagtga

SEQ ID NO: 134115 - DNA, 201 bp, Homo sapiens
atcctcgcgcggactcatgtttgcccgctcggccgccgtctctcgagtctccgccagatccggggcgggtccgcggccgcggcgggaacatggaggagctsctgaggcgcgagctgggctgcagctctgtcagggccacgggccactcggggggcgggtgcatcagccagggccggagctacgacacggatcaaggacgag

SEQ ID NO: 134116 - DNA, 201 bp, Homo sapiens
tccttcactgttgtagtaaagagacatatttcatgaatggcattgatgctaataaatcctttgcacaaaaatttgaataaacttccagtggtttcgataaygtacaagattgtatatttccctcatttattgtaattcaatatcttagttgtttgctgaaaaacttgtaatattttgtgacaaacaggtacaactagtgtt

SEQ ID NO: 134117 - DNA, 201 bp, Homo sapiens
ctgacatctgctggagcaggctctgttaggggtgttgtgtgagctggtggagacccaggccctgtttgtctctggcaggggcataagctggtaggagctcrctgaggtcgtgtctgaaggtgactcagtttcgagagtgggcgctgggatcccttggaactaatttcctttcttttacttttgcttgcaagggagaggagg

SEQ ID NO: 134118 - DNA, 201 bp, Homo sapiens; identical to SEQ ID NO: 23717

SEQ ID NO: 134119 - DNA, 201 bp, Homo sapiens; identical to SEQ ID NO: 23718

SEQ ID NO: 134120 - DNA, 201 bp, Homo sapiens
tcccgttggccaggactgcagcttgttactttgaccctgggaagaaggtaagtgttcccaagaaaagggacgtcccaaagcggcgccatcccgatggcacstgtgctgctcgactccctgccgggtaggtccatcctgacggcgcatgtgcccctcagctcccccgactgggtaggtccatcccgacagcacctgtgctgc

SEQ ID NO: 134121 - DNA, 201 bp, Homo sapiens
catcctcccctttgtttcctgacacagtgtggtcttcccccacacccccgcgtgttgggatgtgagacaggtcccctgagaggtgcccgcaggctgcctgycctgtgtgtgtcctctggtgcccctgctcgggagcagctagtgtctttgatgctgacgtctgctggaggccacaggctcctagtgtttttgatgctgaca

SEQ ID NO: 134122 - DNA, 201 bp, Homo sapiens
tgtggtggggctctgaggctgaggaggtggggactctgaagaactgaaagaaggatgaagacagctggaagtcaggagcacgaggagagtgtgtgtgtctrtgtgtatgttgtgtgtgtgtacgttgtatgtgtgtatgtttgtaatgtttgtatgttgtgtgtatgtattgtgtgtctgtgtgtgtgtaagggtggagcc

SEQ ID NO: 134123 - DNA, 201 bp, Homo sapiens
gcaggaaccgcggccgccccacacctcctgttctccgtgaactttctctcgggggcgctacgtgaaatggggcgggtctggctgctgcagtcttgctcccsgggttcctgccctgcggtgctggttaagtggggtcgttctagccggggaagctgcttaagtcctcagcttaagtgactctggaggtgtccatcccccgtg

SEQ ID NO: 134124 - DNA, 201 bp, Homo sapiens
cctgtgctgctcgactccccccactgggtaggtccatcccgacagcacctgtgctgctcagactacccgccgggtaggtccatcccgacagcacctgtgcycctcacctccctgccagacggtgcgtgtgccgcttggctccccaccaggtaggtccatcccgacagcacctgtgccgctcacctccccaccgggtaggtc

SEQ ID NO: 134125 - DNA, 201 bp, Homo sapiens
catatctatgcagagactgctgcagacaggccgccgccatctgtgggcgtcgcatgcccatgcagagactgctccagacaggccgccgccatctgtgggcrtcgcatgcccacgcagtgactgctccagacgggccgccgccatctgtgggcgtcgcgtgcccacgcagagactgctccggactggccgccgccatctgtg

SEQ ID NO: 134126 - DNA, 201 bp, Homo sapiens; identical to SEQ ID NO: 23710

SEQ ID NO: 134127 - DNA, 201 bp, Homo sapiens
agggacgtcccaaagcggcgccatcccgatggcacgtgtgctgctcgactccctgccgggtaggtccatcctgacggcgcatgtgcccctcagctcccccsactgggtaggtccatcccgacagcacctgtgctgctcgactccccccactgggtgggtccatcccgacagcacctgtgccgctcgactccccccactggg

SEQ ID NO: 134128 - DNA, 201 bp, Homo sapiens; identical to SEQ ID NO: 23707

SEQ ID NO: 134129 - DNA, 201 bp, Homo sapiens
tttcccaggacatcctggaatcagcagccccaccctgggccgggtcagcgcgtgccatcggagcccccacgtcagcctctctctccgatcggcacctggcrtcccagtgcgcaagccccacgtcatcacgggggccgctgggcccggcctggtctgcagtgtgggaagccggccaggcctgtgaccagcgcccgggccgag

SEQ ID NO: 134130 - DNA, 201 bp, Homo sapiens
ggaatctcccaaagtgagatgctgaccaaaggcctcgctgcacgccggccgcggtggctcacgcctggaatcccaacacttcgggaggctgaggcgggtgmatcacttgaggtcaggagtttgagaccagcctggccaatatggtgaaaccccatgtctaccaaaaatccaaaaattagctggatgtggtggcaggcgcct

SEQ ID NO: 134131 - DNA, 201 bp, Homo sapiens
tgatgcgtctgttgtgtcctaaatgcatttgaaagatgaaaacatttgctggacacaagacacccctagtgttacagttacttttacctctcgttccccasaagagtgtaagcagaggctctctggctgtctgtaaaaggcaagacctttaacccagggtctgttcctgtaaaacagtcatacttgaggctcagaattaca

SEQ ID NO: 134132 - DNA, 201 bp, Homo sapiens
catgtgtgtgtgtgcatatgtgtatttgtgtgcacgcacgtctgtgcgcatatgtgtatgtgtgtgcatgtgtgtgcatatgtgtgcatgtgtatgtgcaygcatgtgtgcatatgtgtatgtgtgcacacgtgtgtgcatgtgtgtacgcgtgtgtgcgcacatgtatgtgtgcaggcgtgtgtgcgcatgactgtgtgc

SEQ ID NO: 134133 - DNA, 201 bp, Homo sapiens; identical to SEQ ID NO: 23719

SEQ ID NO: 134134 - DNA, 201 bp, Homo sapiens
tctctgcggccacgcccgccccttcccgccacccaatcctagcgcttgtctctgcggccgggccccgcccccacccgccccccgcccaatcctcgcgcggwctcatgtttgcccgctcggccgccgtctctcgagtctccgccagatccggggcgggtccgcggccgcggcgggaacatggaggagctgctgaggcgcgag

SEQ ID NO: 134135 - DNA, 201 bp, Homo sapiens
atggcactgcgcgggccacgggtgctcccgcctagaggaggacgttcagccggtgtgggctcagagcgggggccgtgcagcagccgtgggagggtcggacrtgggctgatggcagagcaagggaatgtcggccttgagccgcatctcacggtgcactgaacacagtgactgtgatgcgtctgttgtgtcctaaatgcattt

SEQ ID NO: 134136 - DNA, 201 bp, Homo sapiens
ccaggcggcgggagcgtgctggtgatggagcacatggacatgaggcatctgagcaggtgcatcttcacaccaccccccaccccccacctggctttattacstgagcaggtgtgtcttcacaccttgttttattacgtgtgtcttcacaccacccactggctggctttattatctgagcaggtgtgtgttcacaccaccccc

SEQ ID NO: 134137 - DNA, 201 bp, Homo sapiens
tatgtgtgtgcatgtgtgtgcatatgtgtgcatgtgtatgtgcatgcatgtgtgcatatgtgtatgtgtgcacacgtgtgtgcatgtgtgtacgcgtgtgygcgcacatgtatgtgtgcaggcgtgtgtgcgcatgactgtgtgcctgatgcatgatgttggcgtcgtgtgctactccagtcgtgtgtgtctgtcttgctt

SEQ ID NO: 134138 - DNA, 201 bp, Homo sapiens
ccatcccgacagcacctgtgctgctcgactccccccactgggtgggtccatcccgacagcacctgtgccgctcgactccccccactgggtaggtccatccygacagcacctgtgctgctcgactccccccactgggtaggtccatcccgacagcacctgtgctgctcagactacccgccgggtaggtccatcccgacagca

SEQ ID NO: 134139 - DNA, 201 bp, Homo sapiens
tcgactccccccactgggtgggtccatcccgacagcacctgtgccgctcgactccccccactgggtaggtccatcctgacagcacctgtgctgctcgactmcccccactgggtaggtccatcccgacagcacctgtgctgctcagactacccgccgggtaggtccatcccgacagcacctgtgcccctcacctccctgcca

SEQ ID NO: 134140 - DNA, 201 bp, Homo sapiens
ctgtgccgctcgactccccccactgggtaggtccatcctgacagcacctgtgctgctcgactccccccactgggtaggtccatcccgacagcacctgtgcygctcagactacccgccgggtaggtccatcccgacagcacctgtgcccctcacctccctgccagacggtgcgtgtgccgcttggctccccaccaggtaggt

SEQ ID NO: 134141 - DNA, 201 bp, Homo sapiens
tggacatgaggcatctgagcaggtgcatcttcacaccaccccccaccccccacctggctttattacctgagcaggtgtgtcttcacaccttgttttattaygtgtgtcttcacaccacccactggctggctttattatctgagcaggtgtgtgttcacaccaccccccagctggcttcatgccccgccccggctggctttg

SEQ ID NO: 134142 - DNA, 201 bp, Homo sapiens; identical to SEQ ID NO: 23722

SEQ ID NO: 134143 - DNA, 201 bp, Homo sapiens
tggatttcaaggtgggtaaaaatgagggaatttaacaaatgttttattttaggtatactaaactctcaaagagggtggaatgacaagggtttgtcactttyggttgtgtgattttatggtggcttccctccgcatttccaccgggggagttctgcttgacgcccagcacatgtgcagtggacagggctcctgtcctgtcct

SEQ ID NO: 134144 - DNA, 201 bp, Homo sapiens
tttattttaggtatactaaactctcaaagagggtggaatgacaagggtttgtcacttttggttgtgtgattttatggtggcttccctccgcatttccacckggggagttctgcttgacgcccagcacatgtgcagtggacagggctcctgtcctgtcctcgggaggagggtacagatgaacccagaaaacttgccagggtt

SEQ ID NO: 134145 - DNA, 201 bp, Homo sapiens
actgctcttgggataggatctgaggtctcagcatgtccatgagactccggttcctcctgggatgtggttcccccctcaggctcctgtgactgccacccctsccacgtgccgctcctgcagccctctccactttgagatgcttgtgggtagctgagctctcccttggttctggcattttccagtgaactgtgcttttgctgt

SEQ ID NO: 134146 - DNA, 201 bp, Homo sapiens
cggcctcccaaactgctgggattacaggcacaagccactgcacctggctggcagacactttctgagtgcaccaggctctgcggcggtgtcgtgggggcgcygggctctgggtgggggcaccaggctcggtggcaatgtcacgggatccttggggtgttgcttcgccagctggaaacctctgtggccagtcgcacctttgcc

SEQ ID NO: 134147 - DNA, 201 bp, Homo sapiens; identical to SEQ ID NO: 23715

SEQ ID NO: 134148 - DNA, 201 bp, Homo sapiens; identical to SEQ ID NO: 23708

SEQ ID NO: 134149 - DNA, 201 bp, Homo sapiens
ctgccagacggtgcgtgtgccgcttggctccccaccaggtaggtccatcccgacagcacctgtgccgctcacctccccaccgggtaggtccatcccgacarcacctgtgccgctcacctccctgccgggtaggtccatcccgacggcgcgtgtgccgcttggctcaaggccctgacatcgttccactcagcacagcatcag

SEQ ID NO: 134150 - DNA, 201 bp, Homo sapiens
ccgcccacctcggcctcccaaactgctgggattacaggcacaagccactgcacctggctggcagacactttctgagtgcaccaggctctgcggcggtgtcrtgggggcgctgggctctgggtgggggcaccaggctcggtggcaatgtcacgggatccttggggtgttgcttcgccagctggaaacctctgtggccagtcg

SEQ ID NO: 134151 - DNA, 201 bp, Homo sapiens
gccacgggtgctcccgcctagaggaggacgttcagccggtgtgggctcagagcgggggccgtgcagcagccgtgggagggtcggacgtgggctgatggcakagcaagggaatgtcggccttgagccgcatctcacggtgcactgaacacagtgactgtgatgcgtctgttgtgtcctaaatgcatttgaaagatgaaaaca

SEQ ID NO: 134152 - DNA, 201 bp, Homo sapiens
ggtgctgcccagttatatcagttgacatcggctgttgggtggagcctcagttctgcgcccgttaccctccaacacccagggtgtgcgcattacccaagccygcagagttttgtttaatttttggtgattgcagcacggtagccaaactcatcctactcattagcatatcctgggcatctcagggagccacaagaggaaagt

SEQ ID NO: 134153 - DNA, 201 bp, Homo sapiens
cgcctagaggaggacgttcagccggtgtgggctcagagcgggggccgtgcagcagccgtgggagggtcggacgtgggctgatggcagagcaagggaatgtyggccttgagccgcatctcacggtgcactgaacacagtgactgtgatgcgtctgttgtgtcctaaatgcatttgaaagatgaaaacatttgctggacacaa

SEQ ID NO: 134154 - DNA, 201 bp, Homo sapiens
tgcaggtgaatgactggcaggaggactgggtcgtgttctatgcccggcagcgcattcagccccagatggacatggtggagaaggagtctggggacagggargccctccagctttggtctgctctgcaggtgagtggggccccactgcatgcccagcacctgccacacaccccacttgcctgaggtaggggaggcaccaagg

SEQ ID NO: 134155 - DNA, 201 bp, Homo sapiens
catatctacagaaccttccggaagtaaccttgcctccctgtatttccacttcctctcgtatttttctgacaggccagaagaatgtttgaaggtgagatggyaagtttaactgccatcctgaaaacaaacacggtgaaagtgcccaagcccatcaaggttctggatgccccaggcggcgggagcgtgctggtgatggagcac

SEQ ID NO: 134156 - DNA, 201 bp, Homo sapiens
ccacttcctctcgtatttttctgacaggccagaagaatgtttgaaggtgagatggcaagtttaactgccatcctgaaaacaaacacggtgaaagtgcccawgcccatcaaggttctggatgccccaggcggcgggagcgtgctggtgatggagcacatggacatgaggcatctgagcaggtgcatcttcacaccacccccc

SEQ ID NO: 134157 - DNA, 201 bp, Homo sapiens
gaagtgagccatggggttggggcaggtcagccagctctggcctcagtactccagtgtgattgtaaattaagaggaaatgttagccagttgctttagcagcaaaaaaaaaatttttttttttaaataaaaaagccctggtggttcatgcctgtaattccagcactttgggaggccgaggtgggaggattgcttgagcccagc

SEQ ID NO: 134158 - DNA, 201 bp, Homo sapiens
gtgtctgtgtgtgtaagggtggagccccagatgaggatgggagagcaggcagggcagtggtgtgtgtagcaggaggaaaggaaaggccgctggctctgacytctactctagggatcactgctgtgtggtgagcagggggacccaagggaggagttgctgtggtcccggggagttggatggaaacggcatctcaagatgagg

SEQ ID NO: 134159 - DNA, 201 bp, Homo sapiens
ctgttgtgtcctaaatgcatttgaaagatgaaaacatttgctggacacaagacacccctagtgttacagttacttttacctctcgttccccagaagagtgkaagcagaggctctctggctgtctgtaaaaggcaagacctttaacccagggtctgttcctgtaaaacagtcatacttgaggctcagaattacagccatcat

SEQ ID NO: 134160 - DNA, 201 bp, Homo sapiens; identical to SEQ ID NO: 23723

SEQ ID NO: 134161 - DNA, 201 bp, Homo sapiens
ttggtactatgacaaggaaaatccagaggagcactgggtgaagtcctggtgcatcatctcatgaactattgtcagctgctacaaaacaacgtaaagaaagygggagcagggccaggtgcagtggcccacgcccgcccgtaatcccagcactttgagaggctgaagcgggcagatcacctgaggtcaggagtttgagaccag

SEQ ID NO: 134162 - DNA, 201 bp, Homo sapiens
tgggatgtgagacaggtcccctgagaggtgcccgcaggctgcctgccctgtgtgtgtcctctggtgcccctgctcgggagcagctagtgtctttgatgctkacgtctgctggaggccacaggctcctagtgtttttgatgctgacatctgctggagcaggctctgttaggggtgttgtgtgagctggtggagacccaggcc

SEQ ID NO: 134163 - DNA, 201 bp, Homo sapiens; identical to SEQ ID NO: 23724

SEQ ID NO: 134164 - DNA, 201 bp, Homo sapiens
ttttaatttatttaatttatttttttgaaatggagtctcgctgtcacccaggctagagtgcagtggtgcgatcttggctcactgcaacctccagcttccgrgttcaatcagttctcctgcctcagcctcctgtgtgactgggattacaggcgcccaccaccacgtccggctaatttttgtatttttagtacaagcatgagc

SEQ ID NO: 134165 - DNA, 201 bp, Homo sapiens
ttgtgtgattttatggtggcttccctccgcatttccaccgggggagttctgcttgacgcccagcacatgtgcagtggacagggctcctgtcctgtcctcgrgaggagggtacagatgaacccagaaaacttgccagggtttcctggcgggcgcgggggcagtagaaagactttgaaatgttgaagtttgttcagaaacctg

SEQ ID NO: 134166 - DNA, 201 bp, Homo sapiens; identical to SEQ ID NO: 23726

SEQ ID NO: 134167 - DNA, 201 bp, Homo sapiens
tgcaaaatggcacagacacaagggtatttgctgtgccactcttggtactatgacaaggaaaatccagaggagcactgggtgaagtcctggtgcatcatctsatgaactattgtcagctgctacaaaacaacgtaaagaaagcgggagcagggccaggtgcagtggcccacgcccgcccgtaatcccagcactttgagaggc

SEQ ID NO: 134168 - DNA, 201 bp, Homo sapiens
catgagccaccacacctggcccccctttcaaaattttaaatggacttatgctctgacccagtaattatcctttaggatttattctacaggcatatttacaygtatgcaaaatggcacagacacaagggtatttgctgtgccactcttggtactatgacaaggaaaatccagaggagcactgggtgaagtcctggtgcatca

SEQ ID NO: 134169 - DNA, 201 bp, Homo sapiens
ttctggtgctgggagggtgtacccagacccctctccttggaccaacatctgccctaaacagtgcactgacatatttccccaactacttggcatcttagccycaggtgcaggtcaggtggaaggtgtgggcaggtctctaactacaagtcatctgtgctgccagtaccccatcctatgctcatggcagacatcaccaatcaa

SEQ ID NO: 134170 - DNA, 201 bp, Homo sapiens
tcagtgtgggtgcctctggagtctttagtcactaattataattgttgtgataatagcaccatgaggaaattgattgctgccaatggcaaggcgtgggcaaycaggcacctcctattcttgtccttgaattggtcctcaagctgggaactcagtggctttgctcttgaccataccccatggaggaagaagatgggatctgga

SEQ ID NO: 134171 - DNA, 201 bp, Homo sapiens
ggtggcagtgctggagtctcagttgcacacccttcattccactctctccctgtgctgacacaggttgcctgtgcccctctacaaagagcacagctcctatsagggtccatcgaccactcccttctctcgcccttcaggctcaggggtggtcacagcacccagtgtttctagccccaggtgctgaactgatattactggttt

SEQ ID NO: 134172 - DNA, 201 bp, Homo sapiens
gacctatcctcccttactcaggctgagtgtatgcccttctcattcttgctgggacaacttgctggttgaaacaggcaggttattgcacctctttcaacctygtttctctttttatgatggagataatgatgtctgtccacagccgtggaaactaaggtactatgcccagtgtcggggataaaacccgtatctttcttctac

SEQ ID NO: 134173 - DNA, 201 bp, Homo sapiens
ggccaaggccttgccctaagacacttttagacagagcccttagaatccaggtgagctcccaggtgtgggtggtgcctctggcagtgctcaggatgctggarctctgtctgcacttcagtccctgcagctccatgagtctctatgctccatcatgctaaccgtgtgggaagaccagccttgcgggtggcagtcactgcaatt

SEQ ID NO: 134174 - DNA, 201 bp, Homo sapiens
caggggtggtcacagcacccagtgtttctagccccaggtgctgaactgatattactggtttctccaaaggctggcaagacctttgaaaacaggtctcccaygacctatcctcccttactcaggctgagtgtatgcccttctcattcttgctgggacaacttgctggttgaaacaggcaggttattgcacctctttcaacct

SEQ ID NO: 134175 - DNA, 201 bp, Homo sapiens
gcttcatcagctgggacccctgtaactaaagacagattaatgagagaaaagcatccacgtgtatttactataagttttatgtgacatgtgagccttcttayggaaatgacctgaagaaacagttctccctgagtatatttgatgaagaatggagagtcatggagaaatgagataagacaaaaagcaggagtatgtaaggtg

SEQ ID NO: 134176 - DNA, 201 bp, Homo sapiens
tgtgggaagaccagccttgcgggtggcagtcactgcaattggttctgggagcttgttgggtaatgagaaagaagtggctgcctaccaagcccctgctcttygggtcctttctctggaaatgggggtgcagcttgtgaactttcttgcatggtatctatgcacgttcatctgaggggtgggagctggtttcaggatataatt

SEQ ID NO: 134177 - DNA, 201 bp, Homo sapiens
gtcacaaggatctggcatgcaatagggctccatgaatgacagtgccttcctaattggccatggtgctcacctggacagaacatcccatgaggaactggatrcaggaggccagtggaagaacaacgatagtagctgccattaattgagtgcttacctgtgtgccaggcagtgtcctgagcactttatatgtattagctcatg

SEQ ID NO: 134178 - DNA, 201 bp, Homo sapiens
acctggaggtaaaatgtgatgttgaatcaacagtgggagctgtcttcaatgccgtgacatcctttgccaacctcgaggaactcacctactttggcttggcrtatatgaaaagtaagcatctcttgggcagctcacagctggcctggtgcctctggtaacccaggtatctgggtacctgagctctgtttcttctgggaaaac

SEQ ID NO: 134179 - DNA, 201 bp, Homo sapiens
aggtactaaatgcaggcactgcatttgccttgccttctgaacacttctgcatgcatgctctctcactcttgtacctgtacacagtgccatgcagctccccygtccagaagctatgggtggtggaaggtggccatgctggggtctcagccccacacccttcatcctggggttgaagccttctcagggactggcctcagtaca

SEQ ID NO: 134180 - DNA, 201 bp, Homo sapiens
cttcgttgttcagcttcctccagcttgtctattttcctgcgtgtcgttagaattttctaacattcatggtgattagaaagcactaagtaaagggggcagayaggacaaaagaccccatcttctaggcagagggacagcagaacatgaacagtgacccaagcattctctgcctagaagtggcatcagcccagcccatcactc

SEQ ID NO: 134181 - DNA, 201 bp, Homo sapiens
tgactgctggctgttccgaagtgaacaggaataggccacagtctgtatgttccaggagctcacattccaggggaaaggccaagtgagaccccctgagtgaytggatacaatgacaagctacgcaggtgaacttgagtgaaaggctgacctctggtttgatttggggtgcttggcacaggtggaaatccatcttgtcaaagc

SEQ ID NO: 134182 - DNA, 201 bp, Homo sapiens
caatgccgtgacatcctttgccaacctcgaggaactcacctactttggcttggcgtatatgaaaagtaagcatctcttgggcagctcacagctggcctggkgcctctggtaacccaggtatctgggtacctgagctctgtttcttctgggaaaactgtttgagacttgggtgcctccctttgtatgcctagacattagtca

SEQ ID NO: 134183 - DNA, 201 bp, Homo sapiens
aggctgctgttaaggcagctgggctagattggagatcaggatcagacagataaaatgtccatcatgagcatctgtcatggtctacaataaattgagtttcmtttaccaaaaaaggtctcccagctcatatgtctactaggcaggacaccagttgcagcatggtttgacttttcatttcaatcgtaagtcccatcctcacct

SEQ ID NO: 134184 - DNA, 201 bp, Homo sapiens
acaagatgtccgtctagaacctggtggccattccacccagatggcaacctctgacagtgtgcttagtttgcacaaatgtaaggggtaaataaaaaagccartgggggcctgcactgggggatgagttcagagacaaacagaggtactggggaacctcaggatgagcagggcatgcactaggggactccaaactcatgagga

SEQ ID NO: 134185 - DNA, 201 bp, Homo sapiens
acaatgacaagctacgcaggtgaacttgagtgaaaggctgacctctggtttgatttggggtgcttggcacaggtggaaatccatcttgtcaaagcatctakttttcatgagcattccaagcatgtgcttgggcagaaggatgttctggtttagaaagcagcagacaacacagaattgctgcagagatgattgctccgcact

SEQ ID NO: 134186 - DNA, 201 bp, Homo sapiens
aggacaccagttgcagcatggtttgacttttcatttcaatcgtaagtcccatcctcacctctcatggaggatgtggaagagaatgagccgatgcttatgayactgccagaaggacaatgatgacagaatctgtgaatgaaagggccagaaatacagcattatgaaacagtggccctgccactccctgctggatacctttag

SEQ ID NO: 134187 - DNA, 201 bp, Homo sapiens
tttccatttggtttctgagctctgcctggtagacccttgtgaaaggagattacccatataactgtgtttacccaaggggttggggaatggcacacacaaarctggtgaaaatccagaggtcagaggttggaaggtgctgcttttattactgagtattgaaagtgatccattacaggctgggctcggtggctcatgactgta

SEQ ID NO: 134188 - DNA, 201 bp, Homo sapiens
actaacataaacctgaaatttgcaacttagggcataggcattcactgagtagcctcactggggaaggctctatgggggacgctgtataagatgtagggttraagatgctgggtcccaccctagaggaagccaccggtgcgcagggtggtggcagagcgtgctacatgattcgagaactgacaaggcagaatgtgtttggaa

SEQ ID NO: 134189 - DNA, 201 bp, Homo sapiens
taatcccagaactttgggaggccgaggcgggtggatcgcaaggtcaggagattgagactatcctggctaacatggtgaaaccccatctctactaaaaaataaaaaaaaaaattagctggatgtgatagcgggcacctgtagtcccagctactcgggaggctgaggcaggagaatggcgtgaacctgggagggggagtttgc

SEQ ID NO: 134190 - DNA, 201 bp, Homo sapiens
cacgagtcagacacagggtgagcaggaatcagtggcctagctttcactcacaggggcctgcagtttggttattaccaagcctcccaaaaggacctgatacrttggtttttggatcacatggtggctgcagatgtgctcagtggggtgtccaggagaggctgggtttaagacagttcccacatgctggctgtagcatttggg

SEQ ID NO: 134191 - DNA, 201 bp, Homo sapiens
ctaaaaaataaaaaaaaaaattagctggatgtgatagcgggcacctgtagtcccagctactcgggaggctgaggcaggagaatggcgtgaacctgggaggkggagtttgcagtgagccgagatcacaacactgcactccagcctgggcgacagagtgagactctgtctcaaaaaaaaaaaaaaaaaagtgatccattacct

SEQ ID NO: 134192 - DNA, 201 bp, Homo sapiens
ggtgggagccactgtgcccggacaaatcttagatcagcattccagacactttcctccaagcagggagaccacatttcttatagttgacacataggacaacrgaagtacaagatcagcgcttgagccagagaaaagccatcacaagaccctaagtttgcagccctgcaggcagcagtcctcaacatagcacagctgctgtgg

SEQ ID NO: 134193 - DNA, 201 bp, Homo sapiens
caggaggagctaaattcatattgtacccgagcagctataaacgatcactctgtcactggaggaaaacgctgtgcccacatagagatgccaccaagaaaccrgcctttttaagctgttgactttttcttggcttgtttttataggtgttggtggaaataacccagatgaagaaaagaatagcacagccaattctggggtctc

SEQ ID NO: 134194 - DNA, 201 bp, Homo sapiens
ggaggctgaggcaggagaatggcgtgaacctgggagggggagtttgcagtgagccgagatcacaacactgcactccagcctgggcgacagagtgagactcygtctcaaaaaaaaaaaaaaaaaagtgatccattaccttcagaccctggaatgggtctggatttcaggaatgtcattgttggatttaactgttgatgggaa

SEQ ID NO: 134195 - DNA, 201 bp, Homo sapiens
tgctcagaatccatcttgagggactggctctttcaggttcacatttgttcacactattgggcacttcaaaggtggcaaaaagaactgggggattaaatttycaatgttatttaattttcttccatttatatttaaatttaaatggccacatgtgcctactgtattgaatagcatagttatagatagacacacaacactaat

SEQ ID NO: 134196 - DNA, 201 bp, Homo sapiens
tctggatgaaagagaacagactgtgaagcccaacagcctggcccctaggcccttcctgttctctgttttccatgtcaggtggatggaagttacttagcccstttgagccacagcttcctcatttgcatacagaagcaaatgcctgcatggcatggttgttgagaaaaacgcatagaagaaggcagagttctaggacagtgt

SEQ ID NO: 134197 - DNA, 201 bp, Homo sapiens
gaaacagttctccctgagtatatttgatgaagaatggagagtcatggagaaatgagataagacaaaaagcaggagtatgtaaggtgggaggaactcagcarggcctgcttgttcagattcctctctcagtccctgtgtcttcccacataagatgctccatttttccagatatagggagggcattctcacttgagggtcttg

SEQ ID NO: 134198 - DNA, 201 bp, Homo sapiens
caggcagtgtcctgagcactttatatgtattagctcatggaagctccatggtaacccaatgagatcattcctattatcaaccccttttatgggtggggtayctgagacagaaagagcaaaggagcacacccaagctctctcagggagcaggggacagagctgggattcggattggcctccagagcagaaaccttcacccca

SEQ ID NO: 134199 - DNA, 201 bp, Homo sapiens
tcctattatcaaccccttttatgggtggggtatctgagacagaaagagcaaaggagcacacccaagctctctcagggagcaggggacagagctgggattcrgattggcctccagagcagaaaccttcaccccaggccttcctctggtaggtcctctctggcaggaagcagagcagagaggccttcacgctggggcttcttt

SEQ ID NO: 134200 - DNA, 201 bp, Homo sapiens
cagagctgggattcggattggcctccagagcagaaaccttcaccccaggccttcctctggtaggtcctctctggcaggaagcagagcagagaggccttcaygctggggcttctttggtggcaaacctgagagttggtttcctggggctgggggccgttgaggggagcaagggagctctaaggccacgttgaccatggtgca

SEQ ID NO: 134201 - DNA, 201 bp, Homo sapiens
cctaattggccatggtgctcacctggacagaacatcccatgaggaactggatgcaggaggccagtggaagaacaacgatagtagctgccattaattgagtrcttacctgtgtgccaggcagtgtcctgagcactttatatgtattagctcatggaagctccatggtaacccaatgagatcattcctattatcaaccccttt

SEQ ID NO: 134202 - DNA, 201 bp, Homo sapiens
tggctccagttagggcagtaccctctgtcccctccaccctgacacccacatgctcctgtctgtgctgtgaaacatggaacttctcaagaacagcaatgtgyctggtatatccttggctctgaggctggcagggaaagctttcagtaaatggatttttttaaagttcacgtttaaaatgtttttaaatggtggtaaaataca

SEQ ID NO: 134203 - DNA, 201 bp, Homo sapiens
ttctggtgtccccagcgtcaaccatgcctccctgacctttttttgaaataaaaaaaatacatgctggagatataaatatctaagtgacttgaaaatacttycaaaaatggtttcacaggaaaacaggaggaaggataaggttgaacagagctggctcaaccattctgtgagccaataatagaaaggcttttatatccctga

SEQ ID NO: 134204 - DNA, 201 bp, Homo sapiens
aacatggctgttaggatgatccagaattcccctgacaacatagaattaattatttctcagtcaaaaggtatgttttaacccactcttgggagcttaagagsctcccctgttttcaggagtacatgattactgtgaggtactagaccttgaagtccacgtaggtcttctatattgctttcctcatggtgttggcttgcaaag

SEQ ID NO: 134205 - DNA, 201 bp, Homo sapiens
cgtaggtcttctatattgctttcctcatggtgttggcttgcaaagaagcagtgtagtggcacaaattaataagctttgcaatttcaggggcagaatgggcrttaccatgcttgtcttgctgaaagggagtaacctactctaattttgttagacacggctggatacaaccagtctttttttttctgtcaactctccttgcat

SEQ ID NO: 134206 - DNA, 201 bp, Homo sapiens
gctcctatgaattgagccagaggatttggtgggggaaatggactatatttatttgaaagatactgaggtctaccatccactggtgtgccattgtccttggrtagacagtgtactgacctgcaacatttccgtcagggatctgcaaggtagatgtcagtcacgtattcaacattcattgggcactgcattaggtgtgctacg

SEQ ID NO: 134207 - DNA, 201 bp, Homo sapiens
tcccccataggtgggggagaaggtgacatgcatcagtgggtgcaccctgcccaactgagcccctgtgcgggtggtctttcatgccatggaagcccttgccrttgctaagtgcttcaccccttctcaacccctggccagcgctcttccaggagcagatccccaggaccagcaggcgggccggaggctcagctctggatctgt

SEQ ID NO: 134208 - DNA, 201 bp, Homo sapiens
tgaccataccccatggaggaagaagatgggatctggagtaggtgtatggagggctgtgtgcttcagtcccagctctgctgtcctctgccgtctctttggaytcccagtggtgttgtcttctcaggccccgccagacccatgccccagcctctccattctgctctgggccctgcacagctggtgctcatggactgagtcacc

SEQ ID NO: 134209 - DNA, 201 bp, Homo sapiens
taaggtagcggtatccaaggatgactatggggctcctaggcattaaggtccagaacaaatgctgagtacccacactcaggtgtcaactcacaggtcacacrtgcttgggggcttcagtgcatacagcagaggctcctggagtgaaacattacacatgttctgtgagggcgatgggtcccagcatgggcctatggaggaggc

SEQ ID NO: 134210 - DNA, 201 bp, Homo sapiens
ttaaacacatgaaaaacactcaaacccgtgaaaagccacaggaatacaaattaaattaaaataaaattttaaactttatgtctaccagcttggccaaatayagctggtggaatgtagaaaaatggtactgtcatacaaagctggtagaaatgtgaataagtatatccatattcacatagggatgcaatctggcaacatgta

SEQ ID NO: 134211 - DNA, 201 bp, Homo sapiens
tcagaatccatcttgagggactggctctttcaggttcacatttgttcacactattgggcacttcaaaggtggcaaaaagaactgggggattaaattttcamtgttatttaattttcttccatttatatttaaatttaaatggccacatgtgcctactgtattgaatagcatagttatagatagacacacaacactaatttg

SEQ ID NO: 134212 - DNA, 201 bp, Homo sapiens
aaaacactcaaacccgtgaaaagccacaggaatacaaattaaattaaaataaaattttaaactttatgtctaccagcttggccaaatatagctggtggaaygtagaaaaatggtactgtcatacaaagctggtagaaatgtgaataagtatatccatattcacatagggatgcaatctggcaacatgtattataatgaaaa

SEQ ID NO: 134213 - DNA, 201 bp, Homo sapiens
tatagctggtggaatgtagaaaaatggtactgtcatacaaagctggtagaaatgtgaataagtatatccatattcacatagggatgcaatctggcaacatstattataatgaaaaatgcacatatcctttggcccatcaaagcacacaagacgtgccaggcacaagccttcaggcccacagccatatccacctacgctggt

SEQ ID NO: 134214 - DNA, 201 bp, Homo sapiens
tagggatgcaatctggcaacatgtattataatgaaaaatgcacatatcctttggcccatcaaagcacacaagacgtgccaggcacaagccttcaggcccayagccatatccacctacgctggtcactacctatatagagatagtggtgcatcccacgtgagcagttgctgagcacccgccttgtaccagtgcttgggctgg

SEQ ID NO: 134215 - DNA, 201 bp, Homo sapiens
gccaggcacaagccttcaggcccacagccatatccacctacgctggtcactacctatatagagatagtggtgcatcccacgtgagcagttgctgagcaccygccttgtaccagtgcttgggctggggacatgcccagatctctcacatagttgctattgttaagcttatgaacacctaatcttattgctcagtggagaata

SEQ ID NO: 134216 - DNA, 201 bp, Homo sapiens
gaggaaagatgggtggtgagttttttgttgtgtttttcagggtggcattaacaccagtgtgccatatggtggtatctatgtgaaatccattgttcctggargaccagctgccaaggaagggcagatcctacagggtgagagatggggatgggtcctcattgggaactctgtgctccatggtgtaaagagccctgcactggg

SEQ ID NO: 134217 - DNA, 201 bp, Homo sapiens
gtggccagatgatcctctgtggtatggtggactttagattctcacttcaggtctcaacctcagcagttgaggcttcgttgttcagcttcctccagcttgtytattttcctgcgtgtcgttagaattttctaacattcatggtgattagaaagcactaagtaaagggggcagacaggacaaaagaccccatcttctaggcag

SEQ ID NO: 134218 - DNA, 201 bp, Homo sapiens
gggcctcggtaaactcactcgcacatccggggaggacacctgagccttctgtttgcccttgctcagctcccacttctctgatggaagggggtgatttttaytggtctccaaaactgccagaattgagccaaaaggggaacctaggatcttacttatctccatttcccctagaattctggtgtccccagcgtcaaccatgcc

SEQ ID NO: 134219 - DNA, 201 bp, Homo sapiens
ggaacctaggatcttacttatctccatttcccctagaattctggtgtccccagcgtcaaccatgcctccctgacctttttttgaaataaaaaaaatacatsctggagatataaatatctaagtgacttgaaaatacttccaaaaatggtttcacaggaaaacaggaggaaggataaggttgaacagagctggctcaaccat

SEQ ID NO: 134220 - DNA, 201 bp, Homo sapiens
ggcttgcctgaattctggaatcagacagcggaatggagaagatggagtgaagagactgctctagcctggctctggctgccccagccccgctggccctgtgwccatgggccttcttacctccctacgtttgcatgggatgaccccactccattccctgttcatgccattccccctcaccctgtgttgtacccaccggggcgt

SEQ ID NO: 134221 - DNA, 201 bp, Homo sapiens
gcatcagcccagcccatcactccctcatcttcctcctgctttgtctgaggtcacatgcagaaggcctgataaagctggaaatgaatcccctgctggcccartccaaaactcatgatctttctgaggtgcaatgctgcctgctcctgagagcagtatgagccaagaggtgacatcttccttcatcccatctttatttttgtt

SEQ ID NO: 134222 - DNA, 201 bp, Homo sapiens
tggagaagatggagtgaagagactgctctagcctggctctggctgccccagccccgctggccctgtgtccatgggccttcttacctccctacgtttgcatrggatgaccccactccattccctgttcatgccattccccctcaccctgtgttgtacccaccggggcgtgggtcagagtgtcctgggattcttttcctcaca

SEQ ID NO: 134223 - DNA, 201 bp, Homo sapiens
cccagcccatcactccctcatcttcctcctgctttgtctgaggtcacatgcagaaggcctgataaagctggaaatgaatcccctgctggcccagtccaaarctcatgatctttctgaggtgcaatgctgcctgctcctgagagcagtatgagccaagaggtgacatcttccttcatcccatctttatttttgtttgtttgt

SEQ ID NO: 134224 - DNA, 201 bp, Homo sapiens
aaggcctgataaagctggaaatgaatcccctgctggcccagtccaaaactcatgatctttctgaggtgcaatgctgcctgctcctgagagcagtatgagcyaagaggtgacatcttccttcatcccatctttatttttgtttgtttgtttatggcagggtgctggttcttcttgtcctccatcacctccagaaatcagtgc

SEQ ID NO: 134225 - DNA, 201 bp, Homo sapiens
agggtgctggttcttcttgtcctccatcacctccagaaatcagtgctggtgaaatctactttgtggaactggttaaagaagatgggacacttggattcagygtaactgtaagagtttttaggagagcttgaaaagcagttaacaagatgtccgtctagaacctggtggccattccacccagatggcaacctctgacagtgt

SEQ ID NO: 134226 - DNA, 201 bp, Homo sapiens
taacaagatgtccgtctagaacctggtggccattccacccagatggcaacctctgacagtgtgcttagtttgcacaaatgtaaggggtaaataaaaaagcmaatgggggcctgcactgggggatgagttcagagacaaacagaggtactggggaacctcaggatgagcagggcatgcactaggggactccaaactcatgag

SEQ ID NO: 134227 - DNA, 201 bp, Homo sapiens
aaaaaaaaaaaggcagacctactctgtgttctaaacaggggaggttaatagaaagaattactaaacagtgtttgaagagcaactgtaaggcataagaaaaygctggtgtggtggcttactcatgtaatcccagcactttgggagaccgaggcgggtggatcacctgaggtcaagagttcaataccagcctggccaacatgg

SEQ ID NO: 134228 - DNA, 201 bp, Homo sapiens
cagacccatgccccagcctctccattctgctctgggccctgcacagctggtgctcatggactgagtcaccttgctgtgttctgcttggttctgcccagtcraagcctcagcaggagcccgcagttgtgggatgagtgaggacagggtggcagtgctggagtctcagttgcacacccttcattccactctctccctgtgctg

SEQ ID NO: 134229 - DNA, 201 bp, Homo sapiens
atagcaatcagctggggaggagacaagcactgttctttgttaatcttttgttttgggtttagggctacatgtgtaggtttgttattacaggcaaactcgtrtcacaggggttgctatacagaccatttcatcacctaggtgctcagcatagtgcccaatagttatttttcctgatcctctctctcctcccatcctcctccc

SEQ ID NO: 134230 - DNA, 201 bp, Homo sapiens
atagagatgccaccaagaaaccggcctttttaagctgttgactttttcttggcttgtttttataggtgttggtggaaataacccagatgaagaaaagaatrgcacagccaattctggggtctcctctacagacatcctgagcttcgggtaccagggaagtttgttgtcacacacacaagaccaggacagaaatactgaaga

SEQ ID NO: 134231 - DNA, 201 bp, Homo sapiens
cctgtgtccatgggccttcttacctccctacgtttgcatgggatgaccccactccattccctgttcatgccattccccctcaccctgtgttgtacccaccrgggcgtgggtcagagtgtcctgggattcttttcctcacaatgaggtaggaattcagggtgccaagagcagagccattcatcctttatgtcccctttattc

SEQ ID NO: 134232 - DNA, 201 bp, Homo sapiens
ggcaactaaaaagtcaacagagacaggagggattcctgaaggcccttccagcaagcttggggcaatgttctggccacttttcgctttctttcccaaagcgkttttctggtgtctggtgaaatttgcttatattagtgactttggttgacctatcttgagaacagagccataatttattggcaccttctgatatttagacct

SEQ ID NO: 134233 - DNA, 201 bp, Homo sapiens
caaatcacaattcagcatagtccaaggatggcctgctgtgatggaggttgtcaaaaagcagtactcgaggtctgctattctcaaaccacaacctcacattwgaattccagacaatgagtttcccacaatggctgggaataaaatgtcctttcactgtggcaccccagccaccttttggcaatgctgccttcatcatggtgg

SEQ ID NO: 134234 - DNA, 201 bp, Homo sapiens
agcaatgtggaaggaggcaggtgggtgacactggtgaaggcagggagcggagaggaggttactgcaatattacagatgagaggttcccagaacccaagctrcacaaaggtgatgcacagcccagcatcttgcatcaactttgtggaagctgcaggccactgaccttggttccttgcactttgaaaagtcaggcccacagca

SEQ ID NO: 134235 - DNA, 201 bp, Homo sapiens
aaatgtgggaaatcacattggaaagaaaggggagggcaggtggtacagacctggggtgccatgggtttgggtcttaggtgatgggaagcattggagacttyaaatcaagaatgttgcatgttcagtttttgtcttagaccaattcactggcagccatgatggggtggaccaagaagggtgcagacagggtccagtgagcca

SEQ ID NO: 134236 - DNA, 201 bp, Homo sapiens
gtgatgggaagcattggagactttaaatcaagaatgttgcatgttcagtttttgtcttagaccaattcactggcagccatgatggggtggaccaagaaggktgcagacagggtccagtgagccaaggtaaccagagcttgccacggcccagcgggtcactggcagtgagagaggaggtggaggggagggggcactgaggag

SEQ ID NO: 134237 - DNA, 201 bp, Homo sapiens
agactttaaatcaagaatgttgcatgttcagtttttgtcttagaccaattcactggcagccatgatggggtggaccaagaagggtgcagacagggtccagygagccaaggtaaccagagcttgccacggcccagcgggtcactggcagtgagagaggaggtggaggggagggggcactgaggagctgttcttgatggggaa

SEQ ID NO: 134238 - DNA, 201 bp, Homo sapiens
ggacacaagctaaaggtaagaagggcagtccactgtcatctggccaaggatgggtggggcagtccactgtcatccagcatagaatcagtgtggagcctctkgctcagacatcccagggccaggcctccatcaggactgacactttccatttggtttctgagctctgcctggtagacccttgtgaaaggagattacccatat

SEQ ID NO: 134239 - DNA, 201 bp, Homo sapiens
tagaaaccagatgggggagagctggaccactccaaatgtggcccttggcaggttaatggtggggtgagccaatgcgaggggaggagtgttttaggaagaaygaggaggggaagtgagggtgagtgaggggaggaagatgagtgtggcactgcatgtgtgaagtggaggtacatgtgttgctttcaggtgcacttgtctaat

SEQ ID NO: 134240 - DNA, 201 bp, Homo sapiens
agccaatgcgaggggaggagtgttttaggaagaacgaggaggggaagtgagggtgagtgaggggaggaagatgagtgtggcactgcatgtgtgaagtggasgtacatgtgttgctttcaggtgcacttgtctaataagcactgagaaatctgggtctagatcccaatatataggctagttgagagattcaaatgagtctgc

SEQ ID NO: 134241 - DNA, 201 bp, Homo sapiens
agcggtgatggcaggagatatgtatcctgagagatgaaagcccatgctgcagtgctcacaccagtgagccaggaaagaagtgcaccccttggaagtcctgygtggctgaagcagggactggggagtgtcttgatcagcagttcttaagcagagattatttccttctcatgggatatttgattaagtccagagacatttgtg

SEQ ID NO: 134242 - DNA, 201 bp, Homo sapiens
gcaactgttttgtcttatggtcagcctacatgggtaaacaaaatggcagctaaagcattgtccatagaattggccataattttctccatggtctaattatkcaaaatttagtttcaagtatactacaaatgactagagttctaaaggagtaataggaatgtatgtgatacaagttttattaaatgccaagagcatgttgtg

SEQ ID NO: 134243 - DNA, 201 bp, Homo sapiens
attggacagcactaatctataacatacataatgtactctgtcataaaattagcaaaggaattatttgaacgtaaaagaaataattcatctacttgacaatytgcattttgagactggtcaatttcacttgtaatctactgaagaatttatttttatcaacatcccacactacaggtcctaagtttgaagtcaaactaaaaa

SEQ ID NO: 134244 - DNA, 201 bp, Homo sapiens
ccacggaaggcctcatcttccaggtgccgggggtcatgggcaatgcagctctctgtgcaggctggccccagctttgcctcttactagcctgctgccgtggkgaaaactctgggctctcaaaaatcataccagcagcccggattttaatcacacaaagagagtaattagtggtacatgctcacatttaatttaaaatctctg

SEQ ID NO: 134245 - DNA, 201 bp, Homo sapiens
aaaaaaaaaaaaaaagtgatccattaccttcagaccctggaatgggtctggatttcaggaatgtcattgttggatttaactgttgatgggaaatagaatgrcatctcccaccaaagtaaggacactctatggctgatgaaaattttcagaggaaattcaagagatatgtgaatggagggcattctttgctttcccctgtga

SEQ ID NO: 134246 - DNA, 201 bp, Homo sapiens
ctctatggctgatgaaaattttcagaggaaattcaagagatatgtgaatggagggcattctttgctttcccctgtgataatgctatgtacctagagcaagratatgtgttttcttggaccctaagcctgcaatgaatttgtcatcagtagatgattttaagggaccaagtaagaaaccaagcaataaggctcatgaatcca

SEQ ID NO: 134247 - DNA, 201 bp, Homo sapiens
aggagaatggggccattgcagctggtgacattatcctggccgtgaatggaaggtccacggaaggcctcatcttccaggtgccgggggtcatgggcaatgcrgctctctgtgcaggctggccccagctttgcctcttactagcctgctgccgtggggaaaactctgggctctcaaaaatcataccagcagcccggattttaa

SEQ ID NO: 134248 - DNA, 201 bp, Homo sapiens
ggaaggcctcatcttccaggtgccgggggtcatgggcaatgcagctctctgtgcaggctggccccagctttgcctcttactagcctgctgccgtggggaaractctgggctctcaaaaatcataccagcagcccggattttaatcacacaaagagagtaattagtggtacatgctcacatttaatttaaaatctctgtttt

SEQ ID NO: 134249 - DNA, 201 bp, Homo sapiens
ccgggggtcatgggcaatgcagctctctgtgcaggctggccccagctttgcctcttactagcctgctgccgtggggaaaactctgggctctcaaaaatcayaccagcagcccggattttaatcacacaaagagagtaattagtggtacatgctcacatttaatttaaaatctctgtttttaaatatctgaccttgagtcag

SEQ ID NO: 134250 - DNA, 201 bp, Homo sapiens
atgcatgcaggtatgggccaggccacgaccaggtcttgggtggaggaacccctacgcaggaagcttgctttgagtcttttaccaccacttatttttgcttyccacacaatgtttgtaaccttcttgttttttgaattgttttctttttaaactacttgtgattgggaagaggcgtttagctttggctgggtatgaggatct

SEQ ID NO: 134251 - DNA, 201 bp, Homo sapiens
gtcagccttgcttctcactgggttcatgagagaagctgaagataaagccctggcctttgtgctggctgacgtctcttcacacacatcctgggaggtgggcrtggggctgaagggactagagtgggtccctttctgctctccttcccatttctcaacacatttacagcttttcatacattattacactgattgtcctgtcta

SEQ ID NO: 134252 - DNA, 201 bp, Homo sapiens
agttacccctatcctgaggccaaaggggaagggaaagagcagttattccaccccaggaatggagagctgttggaggggactcgctggcatgagctctcacyttggctgaggttgtagtcgtcccatggcaacctgaagggaggaatttggaaggagcaatgacctccgctcctccctgtctctggtctcttgccgtgttcc

SEQ ID NO: 134253 - DNA, 201 bp, Homo sapiens
ctcatgggatatttgattaagtccagagacatttgtgattgtcacaactgatgagtgcttctggcatctagtgagtagagatcagagatgctgctaaacamcctacaatgcacaggacaggcattcgcataaggaattgtccagcctgagaggtcaacagtgccaagagtttgagaaatcctggtctaaataggaaatagg

SEQ ID NO: 134254 - DNA, 201 bp, Homo sapiens
tacaggtgagaggttcccagagcccaagccgagccctgataggaagctcagagccaagggtcaggctttagagattcagatggtggaggctgcaaaattgstggcccaagatgagggcaggttgggaggaaagggcaattgagatgaacagctatttgttggagtcattctttctctctctgaagaaaaggcattggtatt

SEQ ID NO: 134255 - DNA, 201 bp, Homo sapiens
caaggtgcagggaggaggagctagtgcctgggacgcagtggggagaacatcactgcatccccagcaatgcaagcccaaatctaacagtgaatcttggtttytcgcaggaggtgctgcatttactgagaggggccccacaggaagtcacgctcctcctttgccgaccccctccaggtgcgctgcctgagctggagcaggaat

SEQ ID NO: 134256 - DNA, 201 bp, Homo sapiens
gaatcttggtttttcgcaggaggtgctgcatttactgagaggggccccacaggaagtcacgctcctcctttgccgaccccctccaggtgcgctgcctgagmtggagcaggaatggcaggtaggctgcagtgtcttctactctctctacctggctctggttgggccccccttttccagactctagggtcctaagagggttgt

SEQ ID NO: 134257 - DNA, 201 bp, Homo sapiens
ttggggtaacagccttatcagacaccaaacatagctatttttcatctgaaaaactgactaaattttgggttattcacaaatatatatttgctgagaagagkttgatgatttcctttggctggcaaaaacttggattttctttgcagatatttaatttcaaaaataattcttgaaatgtctcactcaaatccaaatggccat

SEQ ID NO: 134258 - DNA, 201 bp, Homo sapiens
tattaaatagccctggaagcacctgtaccaatcaggaagctatttgctgctgcttagcaattacagtgagaaatgtaactcatcacattctcctacttttkgttgcttagcagatcttttgcttactgtgcttctaaattcaaaaactataaatacccttgttttaccaggaccatatcttaaaaatttaaggtaccttgt

SEQ ID NO: 134259 - DNA, 201 bp, Homo sapiens
tctgcccagtcaaagcctcagcaggagcccgcagttgtgggatgagtgaggacagggtggcagtgctggagtctcagttgcacacccttcattccactctytccctgtgctgacacaggttgcctgtgcccctctacaaagagcacagctcctatgagggtccatcgaccactcccttctctcgcccttcaggctcagggg

SEQ ID NO: 134260 - DNA, 201 bp, Homo sapiens
aggtccacggaaggcctcatcttccaggtgccgggggtcatgggcaatgcagctctctgtgcaggctggccccagctttgcctcttactagcctgctgccrtggggaaaactctgggctctcaaaaatcataccagcagcccggattttaatcacacaaagagagtaattagtggtacatgctcacatttaatttaaaatc

SEQ ID NO: 134261 - DNA, 201 bp, Homo sapiens
ggggtctcctctacagacatcctgagcttcgggtaccagggaagtttgttgtcacacacacaagaccaggacagaaatactgaagaactagacatggctgrggtgcagagcttagtgcccaggctgagacatcagctttcctttctgccgttaaaggtaatcatcccttggtttactttctagatctggatgaaagagaac

SEQ ID NO: 134262 - DNA, 201 bp, Homo sapiens
caagaggtgacatcttccttcatcccatctttatttttgtttgtttgtttatggcagggtgctggttcttcttgtcctccatcacctccagaaatcagtgytggtgaaatctactttgtggaactggttaaagaagatgggacacttggattcagcgtaactgtaagagtttttaggagagcttgaaaagcagttaacaag

SEQ ID NO: 134263 - DNA, 201 bp, Homo sapiens
aaatcctggaagtcactctggcatccaggcccacataccttcttacactgccaggaccccaggggtgaatcactgattcctggattggacacagacttgcrtgcctctcaggtctgtttgggactcttggctccacctacactgagttgcctcttatgccctggactcagctaagatgtcacatattgacccctgggactg

SEQ ID NO: 134264 - DNA, 201 bp, Homo sapiens
tggccagcgccctacaggtcaggggtgaagctctgtctgaggaggaaatctggtccctcctgttcctggccgctgagcagctcctggaagacctccgcaayggtaagagagtgtttgggggcagtcaaatcacagggagttgtatgtgaagcttcccacacaaacacagttctggctgctgctgcttttttaaatcaacct

SEQ ID NO: 134265 - DNA, 201 bp, Homo sapiens
ggattgactgggcagctgtctaggggacagggacccaagggttcttcctgggtgggggggcagggagcagatgcgagctttgcccttgattaaaaccatcyccacttacaggactggtgaagatcagataagctaaggtgtttgcagtcagccctctggaactctcccttccttctagttaatactcagccacaggccagt

SEQ ID NO: 134266 - DNA, 201 bp, Homo sapiens
cacctcaaaatgacccaacacgtcctcaactaggaatttattctaaggcacaagtaaagataaatttagctgcagcaatgctgattgttgtattgctgacrttagtgataaattgaaaacaagctaaatagtgagtgggagaggacatgagacaaaacaccattaaaatgaggctgtagaagcttatttaatgtattgaaa

SEQ ID NO: 134267 - DNA, 201 bp, Homo sapiens
gatataatttcaaacaaagatgagagctaatgagttgtcacaggtgacattgaacacatcttgaccttgagatgtgaacaaccaaaaccaaaaactaaaaycacttgtattaaaccaagtggggggctcaaataactgtgtgtttttacatgcaatgtttcattacctcattgtttccttctaaaatcccaaaaatcattt

SEQ ID NO: 134268 - DNA, 201 bp, Homo sapiens
gtccccagcgtcaaccatgcctccctgacctttttttgaaataaaaaaaatacatgctggagatataaatatctaagtgacttgaaaatacttccaaaaayggtttcacaggaaaacaggaggaaggataaggttgaacagagctggctcaaccattctgtgagccaataatagaaaggcttttatatccctgatctgtga

SEQ ID NO: 134269 - DNA, 201 bp, Homo sapiens
tgtttaatgttgacaagtctccaaacatgactattttaattgaaccaaaaaacttaaactagcttctatatttaccaaaaattataccagatcacctgaamtcaaaaaacatttaggttagttctgtttttctgagaaaacagttaatttataaaagtgtttattttcttccttcaagccaaatcttctcgcatgtaccaa

SEQ ID NO: 134270 - DNA, 201 bp, Homo sapiens
gctgaccctggcatttttatatcttctattatacctggaggaccagcagaaaaagcaaaaacgatcaaaccaggtacatctttttaaattactagagatgytgttttaagaaaccactcttttttatttccttgaaggattattgagatgttttatttttctaggagggcagatactagccctgaatcacatcagtctgga

SEQ ID NO: 134271 - DNA, 201 bp, Homo sapiens
tttaatgttgacaagtctccaaacatgactattttaattgaaccaaaaaacttaaactagcttctatatttaccaaaaattataccagatcacctgaactmaaaaaacatttaggttagttctgtttttctgagaaaacagttaatttataaaagtgtttattttcttccttcaagccaaatcttctcgcatgtaccaata

SEQ ID NO: 134272 - DNA, 201 bp, Homo sapiens
tactagccctgaatcacatcagtctggagggcttcacattcaacatggctgttaggatgatccagaattcccctgacaacatagaattaattatttctcartcaaaaggtatgttttaacccactcttgggagcttaagaggctcccctgttttcaggagtacatgattactgtgaggtactagaccttgaagtccacgta

SEQ ID NO: 134273 - DNA, 201 bp, Homo sapiens
agcgagtctgatcgagaggatgaccgctctacgggtccaggttgaagtctcagagatgcaccggctcagctctgcactgtggggagaggatgctgagctgragttcttgagggtaaggccttcctgacctggagagaggtgttggtcttcaagggaatgcagccagcaatcccctccagagccttctcaaggggcccaggt

SEQ ID NO: 134274 - DNA, 201 bp, Homo sapiens
aatttgtttactaagtaagtttagcctcatcaagtttggccttgatgcataagtgcatcaagaatagtggttgaccacgtaggctcctttgaagcttgttytgctagaacttttgataagaatctcagcctgacttttaaaagtctctcaaggctaggaggccaaatcaagacaaacctcagtttggctgaagtaacttta

SEQ ID NO: 134275 - DNA, 201 bp, Homo sapiens
ttctccaagtatcatggtaaagtagaaaagatcctctatttgaggatcagaagacctgactgtaactatcagctaatgccacttggtagctgtgtgatatsagggaaataacctaacctctctgaacagcaaaatcactaagtatcatcttatcatggactatcatcttggattacagggtttgtcattaatgagggagag

SEQ ID NO: 134276 - DNA, 201 bp, Homo sapiens
tcccatttccagtaggaaaagctcacgaacttgtatgattattctttgtaccaagcagggctggtgagagcatgttcttatccccatagttctcatcagaycttctaaagatctctctcacaaataagaacaactgttatatgctttgatgtgatcaattgatatttgctcgacctttcataacctgtgaatacaggtgtc

SEQ ID NO: 134277 - DNA, 201 bp, Homo sapiens
gtcggaggtaaggtcatgggatagagtggtgggcaggtggggattcccttagctggggaggttggggaggcttcctggaggaggaaagatgggtggtgagytttttgttgtgtttttcagggtggcattaacaccagtgtgccatatggtggtatctatgtgaaatccattgttcctggaggaccagctgccaaggaaggg

SEQ ID NO: 134278 - DNA, 201 bp, Homo sapiens
ctgtgcccctctacaaagagcacagctcctatgagggtccatcgaccactcccttctctcgcccttcaggctcaggggtggtcacagcacccagtgtttcyagccccaggtgctgaactgatattactggtttctccaaaggctggcaagacctttgaaaacaggtctcccatgacctatcctcccttactcaggctgagt

SEQ ID NO: 134279 - DNA, 201 bp, Homo sapiens
catactcagaaatgccaagaagttgcctccctgagccaccttatctaacctcactgtccttccccgtgggccaccttatctaacctcattttcttttccckgcagcccctgcactggccgggagcagctgaagagtgcctgtgtgatccagaagccaatgacctgggactctctctctggaccacctgttcagagcatgca

SEQ ID NO: 134280 - DNA, 201 bp, Homo sapiens
cccggacatgttcctggacattgcagaggccctgtcacatgcatgtctttattgtaggcatgagcctgtcctctgtgacgctggccagcgccctacaggtmaggggtgaagctctgtctgaggaggaaatctggtccctcctgttcctggccgctgagcagctcctggaagacctccgcaacggtaagagagtgtttgggg

SEQ ID NO: 134281 - DNA, 201 bp, Homo sapiens
ctaagatgtcccccacaccaaaagcttgttatcatgcattgcctattcttacttcattagtctatcactctacagaattattttatttgcttaccttctcrttggctgtctccctctgcccatccccatgactctcagggtaggttgttaacattgttcctcattctactggtagtacagagcttgaaatataccagatcc

SEQ ID NO: 134282 - DNA, 201 bp, Homo sapiens
ccttaaactctccagaaggggcaggcatctgctctggtgcttgtgggaacacccgtttccatgtctccaaggcctgcctgacaaggtgctggcctcgtagyggcagctctggctgctctctcctctcaccggccctgtctgcctccagcccctgcagctctgcgagcccctgcactccatcctgctgaccatgtgtgaaga

SEQ ID NO: 134283 - DNA, 201 bp, Homo sapiens
tgcaaagctgggaggatttaggaagagagtggctgcagtgctatgggtgtctaacagcacatgggctgtctctgggcataaccagagatgagaggcagggkgtggtcacccaggacacccctacactctgtccaccagatgttgcactagtctgtgccccatcagaaggcagacctggctgggcacggtggctcacacctg

SEQ ID NO: 134284 - DNA, 201 bp, Homo sapiens
atttttaccttcttctcttagctaggcactatccatagatatttgggaaagctggctttggaaagaatccccccaccttttgcaggcttttgtcaggcctytcagcatctcatccataggctggagtgagtggggtgtccagcctcttagggtcccatcctcattgccagaaactgtaaggaaggaaaacttctacttcca

SEQ ID NO: 134285 - DNA, 201 bp, Homo sapiens
aacatatctgtccatgttcaggcccatatctctgttgtccagggcccagttggggccgagagcttctcagtcaatgttgagtatttggatgtgagcctttcccatctccccaacccccagggctggaagcgcacacattgtcaacttggctttctgggcctctgctcagggcctcttggaggcagggcttgagtggggcat

SEQ ID NO: 134286 - DNA, 201 bp, Homo sapiens
gagttgtcaattaaatgagacaatgtgtgtaaagtgcttagtacagtaaccagcacacactaaaggctcaatgacttataattgtagtataattgatactrttgttgttttcagaccaaaaaagggaaatcctatttggctctcagggacctctgtgtggtcctgctgaacgggcagcacctggaggtaaaatgtgatgtt

SEQ ID NO: 134287 - DNA, 201 bp, Homo sapiens
cggaggtaaggtcatgggatagagtggtgggcaggtggggattcccttagctggggaggttggggaggcttcctggaggaggaaagatgggtggtgagttytttgttgtgtttttcagggtggcattaacaccagtgtgccatatggtggtatctatgtgaaatccattgttcctggaggaccagctgccaaggaagggca

SEQ ID NO: 134288 - DNA, 201 bp, Homo sapiens
gggcagcctctaggccttgccctgctcccattctgaaaactcatgcaaatgattgcctccccaggtcatacttttctcacctggaaaggaggtgatagaayctgccctgcccatttgataggttggggggtctgcagtggcacactgggaagcataggtgatagaaaaatagtagaagacttaaaagacttgtgttgctct

SEQ ID NO: 134289 - DNA, 201 bp, Homo sapiens
catgacatgacatctatccctttcccaggtgaccgactcctgcaggtggatggagtgattctgtgcggcctcacccacaagcaggctgtgcagtgcctgamgggtcctgggcaggtgagtggactgttgctgaccagcttcccctccttccggaactttcctgaacaacatcagaagctgaaatcgcctctgggtgggagg

SEQ ID NO: 134290 - DNA, 201 bp, Homo sapiens
tctgtgaccccaaaatgccccctcacccccaacacacaactcagcagcccagtcatgagggttggaggacagagacatgggtttgcagtttgatccctgcktctttatttctttgtttattagaaacaccaccgaactggttattagcttcctcactcaaaccagagcaagaaacacctctgtaagtttgtatgaagtgac

SEQ ID NO: 134291 - DNA, 201 bp, Homo sapiens
caggtgagtggactgttgctgaccagcttcccctccttccggaactttcctgaacaacatcagaagctgaaatcgcctctgggtgggagggaggcaggcargaaacaagactttttctttgttagttttttttttctcttccatttcttcttaccctcacttttctatggggatgtgaaacccaggagatagcagatagat

SEQ ID NO: 134292 - DNA, 201 bp, Homo sapiens
gtacacagcagtgtccttctgctaatgacagcatgggagatgaacgcacggctgtttccttggtaacagccttgcctggcaggccttcgagctgtgtctcrgtgacagatggtgagaggggagagaattgagtgttactattgtcatgttattgtgtgccgcttttgaattgtcaagtcaaaagggaaaggcaggaaggct

SEQ ID NO: 134293 - DNA, 201 bp, Homo sapiens
gcgtgtcgttagaattttctaacattcatggtgattagaaagcactaagtaaagggggcagacaggacaaaagaccccatcttctaggcagagggacagcrgaacatgaacagtgacccaagcattctctgcctagaagtggcatcagcccagcccatcactccctcatcttcctcctgctttgtctgaggtcacatgcag

SEQ ID NO: 134294 - DNA, 201 bp, Homo sapiens
tgttactattgtcatgttattgtgtgccgcttttgaattgtcaagtcaaaagggaaaggcaggaaggcttcctctgggtcctgaaaagaaagcgagccatrgtgatcatgctgagatcggctttttcatgccatggaagcccatctcatggaataggtttctggaaacaaatgcattttccccaaatgatttctaggcatc

SEQ ID NO: 134295 - DNA, 201 bp, Homo sapiens
tttggtggcaaacctgagagttggtttcctggggctgggggccgttgaggggagcaagggagctctaaggccacgttgaccatggtgcaggctgtaggacscaacccagatgctgcaggctcttctgggtctcttggccaactttgtggccagatgatcctctgtggtatggtggactttagattctcacttcaggtctca

SEQ ID NO: 134296 - DNA, 201 bp, Homo sapiens
attgtgtgccgcttttgaattgtcaagtcaaaagggaaaggcaggaaggcttcctctgggtcctgaaaagaaagcgagccatggtgatcatgctgagatckgctttttcatgccatggaagcccatctcatggaataggtttctggaaacaaatgcattttccccaaatgatttctaggcatctttctgcccccagccttc

SEQ ID NO: 134297 - DNA, 201 bp, Homo sapiens
gaaagcgagccatggtgatcatgctgagatcggctttttcatgccatggaagcccatctcatggaataggtttctggaaacaaatgcattttccccaaatkatttctaggcatctttctgcccccagccttcctcagtcctttgatcagctgccagaatgttaatgtttgtgtgaatatttaggatgaaattgactgaaag

SEQ ID NO: 134298 - DNA, 201 bp, Homo sapiens
caagtcatttgtaacaaagttatttgaggaatgactaggcaggttgggagagaaggttcaggaatctagccttgttattagcatcattttaaaaggcaaaygaaagatcgtttagagggacaaaactgcacgttttccgatgggctgcccctctgcaattcccttgtgattttggtatttgccaggaacacgctgatttcc

SEQ ID NO: 134299 - DNA, 201 bp, Homo sapiens
gaactggattaaagagcaaggacaagcccaacagttaaaacagtgagaacagtgggttgtaaaattttttttgccatgtcccatggataaatggacattaraacccaacacctacacatgtatatagaacagaactgaagcaaaaacctcaggaaataaggagcatcctttctatatgcaatgcacattgatatctcctat

SEQ ID NO: 134300 - DNA, 201 bp, Homo sapiens
tcatttgtaacaaagttatttgaggaatgactaggcaggttgggagagaaggttcaggaatctagccttgttattagcatcattttaaaaggcaaacgaamgatcgtttagagggacaaaactgcacgttttccgatgggctgcccctctgcaattcccttgtgattttggtatttgccaggaacacgctgatttcctcag

SEQ ID NO: 134301 - DNA, 201 bp, Homo sapiens
ttgtaaaattttttttgccatgtcccatggataaatggacattaaaacccaacacctacacatgtatatagaacagaactgaagcaaaaacctcaggaaayaaggagcatcctttctatatgcaatgcacattgatatctcctattatattctcattcgttttaaaaatgctgattatgggcccctaaattgattcatagc

SEQ ID NO: 134302 - DNA, 201 bp, Homo sapiens
tgccatgtcccatggataaatggacattaaaacccaacacctacacatgtatatagaacagaactgaagcaaaaacctcaggaaataaggagcatcctttytatatgcaatgcacattgatatctcctattatattctcattcgttttaaaaatgctgattatgggcccctaaattgattcatagctcaccaattggttac

SEQ ID NO: 134303 - DNA, 201 bp, Homo sapiens
tttaagatgaagaaactgagggtcagagatgtcaaacaatgctcttcccatgacatcattttgcttcttgacaagatatggtgctttgtaatcaggctgamctgtaatgtgtcatggaaacagaaggcctaaaatacaatggccagggccaaagatatggttgttagttactaaacaagaggtctagggattggtcagcag

SEQ ID NO: 134304 - DNA, 201 bp, Homo sapiens
gacagagattaaaaaacaaaaaaaaagagcgatttctgttagaacctagaaccaaattcacaagagtcacaattcagagaacaaccttacaaatgtttttytcctgccaattcaaatttagaaaagaagggacaagaaaaaatttttaccttcttctcttagctaggcactatccatagatatttgggaaagctggctttg

SEQ ID NO: 134305 - DNA, 201 bp, Homo sapiens
ggtccctgggtaccctcccctctgctattttatacctgtggggtgtcctttgttgtgcttgtcacactgtgctgcttgctgccctgtgcactccacagagygcagcaaggggcctggcacatgggaggcatttggcttaggttggattccctccaagctaacccagagacagggattcttgtgcaagttatttactgggga

SEQ ID NO: 134306 - DNA, 201 bp, Homo sapiens
tgagcagtgtacactgcacccaacatgtagtcttttatccctcatcctcccaaccctttccccaagtccccaaagtccattgtatcattcttatgttttcrcattctcatagcttagctcgcacttatgagtgagaacatatgatgtttggtttcccattcctgagttacttcacttagaataatggtctctaattccacc

SEQ ID NO: 134307 - DNA, 201 bp, Homo sapiens
catgccattccccctcaccctgtgttgtacccaccggggcgtgggtcagagtgtcctgggattcttttcctcacaatgaggtaggaattcagggtgccaaragcagagccattcatcctttatgtcccctttattccctgccccgcagtgactcgatgttatcccactgtgccgagtcctctgcctgaggttaggagcctc

SEQ ID NO: 134308 - DNA, 201 bp, Homo sapiens
ggcctcctatagtgtctcttcagagccctctaatgagaaagctgcacactgtgctctcagtaataaggcctcctatagtgtctcttcagagccctctaatragaaagctgcacactgtgctctcagtacaggagagacctaaggtagcggtatccaaggatgactatggggctcctaggcattaaggtccagaacaaatgc

SEQ ID NO: 134309 - DNA, 201 bp, Homo sapiens
ataatcacaggagacaaaatagcagcagaaaaagaaaggaggaggagagcgggggcccagtgatatgttacaaccaccagagcaatggatccagcatcatycttgtgtgtgtgtatgtctatgtttttctccccaaattcagaccatgataagtttgtgcaaatggccaatttgagtcctgcacaccaggcccggtctaag

SEQ ID NO: 134310 - DNA, 201 bp, Homo sapiens
aaaactacaagaaggcttaaagcttagaaacttaactttatcctggctggccatggtggctcacgcctatagtcccagcactttgggaggctgaggtgggsagaccacttgagctcaggagttcgagacaagcctggccaacatggcaaaaccctgtctctactacaaataaaaaaattagctgggtgtggtggtgtatgc

SEQ ID NO: 134311 - DNA, 201 bp, Homo sapiens
agtgcttgggctggggacatgcccagatctctcacatagttgctattgttaagcttatgaacacctaatcttattgctcagtggagaatacaatctaaacraacaggtgaatacagaagacagtgccagtcggaggtaaggtcatgggatagagtggtgggcaggtggggattcccttagctggggaggttggggaggctt

SEQ ID NO: 134312 - DNA, 201 bp, Homo sapiens
gtcccagcactttgggaggctgaggtggggagaccacttgagctcaggagttcgagacaagcctggccaacatggcaaaaccctgtctctactacaaatamaaaaattagctgggtgtggtggtgtatgcctatagtcccagctacttgggaggctgaggcatgagaatcgcttaaaccccgggggccgggaggggaaggt

SEQ ID NO: 134313 - DNA, 201 bp, Homo sapiens
ctactacaaataaaaaaattagctgggtgtggtggtgtatgcctatagtcccagctacttgggaggctgaggcatgagaatcgcttaaaccccgggggccgggaggggaaggttgaagtgagtggagatcaaaccactgcactccagcctgggcaacagagcaaaaccctgtctcaaaaaagaactacataaaaatatcct

SEQ ID NO: 134314 - DNA, 201 bp, Homo sapiens
ggcacctgctgggcacagtcccatgctggcaccccagatggaagctctgtctctacagccccatcactggcttggtttcagattcctcggactatgtggtytgcccctggtcagccctgctttctgcagctggaagcctttctttccaaggccgtgtttctcatatagaggctgctcctttcaaggcccctgaactgctac

SEQ ID NO: 134315 - DNA, 201 bp, Homo sapiens
ccaaagtgtctgcggtgattgtttctggatggcaacatcagtggaggtttttggtttttcaacaatggacatgttttgcttctgaacagcagaagtttccmgtaaacatcatttttaatttcaaagagaattttaattctctcaaaggagagaatggtgcaaggcagccacacaacactggatggggcatggtgggtgttt

SEQ ID NO: 134316 - DNA, 201 bp, Homo sapiens
ttaattttgttcacaagagtatactttattatattgttgtaaactatagataacatacaaggaaaaagtttccttaaatctagaaaacaaaacatttaaaraaccagtgaaatttcaagtaaaaattataaaaacccattattctttttcatccgttcgttcagcctcatgtaattaattcttgttctgcttgatctttgt

SEQ ID NO: 134317 - DNA, 201 bp, Homo sapiens
taaaacccttgatcaaagtagaatcactggtcactgtaaaataattgtcattcatttaaccagagtgataattaaaattcttcaaaaggcaaatacataayggtcaaaacttagctctttgaatattgagaagatcacttttttaagtaataaaagagctaataaaatacagcacagagcacaagaaactattctgataaa

SEQ ID NO: 134318 - DNA, 201 bp, Homo sapiens
tgctaccctcgggaggcattctggaatgggagctgctttccctccaggctctgaaaggcagagaatggggatgtggtggtttccagatttggtttgtctgrgtccacatgtctgtaagtcagcccacaaaagtgaaagcataagagttccagttccagtgaccccagctccagcaccccctcccccctgaaatcctggaag

SEQ ID NO: 134319 - DNA, 201 bp, Homo sapiens
tatcttgatcacacaaaaatttctttcataatattcatcttccataaaccttttgcaattttctcaaaccatttataatgttcttattcagttttattgayatcacttttttctttatttatttgttttgaagcaatcctcaactagcctccaactagagaaaattacttttttaaacgacaacaaataaaaacacattct

SEQ ID NO: 134320 - DNA, 201 bp, Homo sapiens
gctccacctacactgagttgcctcttatgccctggactcagctaagatgtcacatattgacccctgggactgggatttctgtgtgactgctaaaggaccaygccaatgcaacctgagaatgcaggggagttaccttcttatgggggacacttagccagtggtaaatgagagtctggaggggacctaagaggatacgttttc

SEQ ID NO: 134321 - DNA, 201 bp, Homo sapiens
tgagctcaaaaccagcatgggccagcaccaacctgaggattcttggtccatggccacatggggacatgctacatcaggagtgtgggaggtagtggacactrtgctcttctcttcagataccccactcaggccaactcattcacccccagccccagtgaggccagattctcccagctcccacttgccttcctcatgagtaac

SEQ ID NO: 134322 - DNA, 201 bp, Homo sapiens
agatgtgttggcgtccatgtgtggtttgattgttcaatcaaaaacctgttccttctagaacaataaacctatgcatgctagtaactgtccatagttatcascactagttaaatctctgaagagaaatgcatggaaacagaagcagacacacgctatttagggccctctttatgaaaaagaatacaaagttacaaaagatgg

SEQ ID NO: 134323 - DNA, 201 bp, Homo sapiens
aatcacggtgggaggtgaaaggcacttcttacatgatggcagcaagagaaaaatgaggaagaaacaaaagcggaaaccccggataaacccatcagatctcrtgagacttattcactatcacgagaatagcatgggaaagaccagcccccgtgattcagttacttccccctgggtccctcccacagcatgcaggaattctgg

SEQ ID NO: 134324 - DNA, 201 bp, Homo sapiens
tcttatgccctggactcagctaagatgtcacatattgacccctgggactgggatttctgtgtgactgctaaaggaccacgccaatgcaacctgagaatgcmggggagttaccttcttatgggggacacttagccagtggtaaatgagagtctggaggggacctaagaggatacgttttccctcctctttctcttgtggatg

SEQ ID NO: 134325 - DNA, 201 bp, Homo sapiens
gtgggaggtagtggacactgtgctcttctcttcagataccccactcaggccaactcattcacccccagccccagtgaggccagattctcccagctcccacytgccttcctcatgagtaactgccctcaactggagggaaatggcttgcccagggttaggctgggaaaggcttcctgagaccaggacatgttgatctgggaa

SEQ ID NO: 134326 - DNA, 201 bp, Homo sapiens
gctgtgcgtgtctgtgtgtgtgtgtgtgtgtgtgtgtgtatgagagccatatatatatatatatatatgagggaatatatattctttcatatatacatatrtatttttatctttcttaacatatgtaaaatcttttctgtacgtataatctctaagcctcaccaactctacaatattattgatattgatattatctctact

SEQ ID NO: 134327 - DNA, 201 bp, Homo sapiens
gagctaacacagatttgagtgctcctgaccatcccagtactcactggttaggatcaggcatcaccctcctgattgcaggttggcctccattgagtaccttrtgaaggcccagtcacttctctgcccagagcgtctttgagctggaaaataatatgttccttcctcctgcacactttcctccaggcagaggcacgaggactc

SEQ ID NO: 134328 - DNA, 201 bp, Homo sapiens
tgagcctacgcattcatagttgggtcacgtaagctctatctaggtttctaaatcccatgtagaatcttccctttctctaatctaaatgtaacatctttcargaggagctaaattcatattgtacccgagcagctataaacgatcactctgtcactggaggaaaacgctgtgcccacatagagatgccaccaagaaaccggc

SEQ ID NO: 134329 - DNA, 201 bp, Homo sapiens
cacagatttgagtgctcctgaccatcccagtactcactggttaggatcaggcatcaccctcctgattgcaggttggcctccattgagtaccttatgaaggyccagtcacttctctgcccagagcgtctttgagctggaaaataatatgttccttcctcctgcacactttcctccaggcagaggcacgaggactccagtaga

SEQ ID NO: 134330 - DNA, 201 bp, Homo sapiens
gaacaccttcatgtgcagcaatgatgccaaagctaagacctccttggtgagaagagacaatgttctgggagtgcatgtagacagaaatgctaaatgaattaaaaaaaaaacaacatagagttttagggccagggttttgctatgccttttggtaaggtgtggcatcgtggaaagtgtgagggtttgaggtgaacacatctt

SEQ ID NO: 134331 - DNA, 201 bp, Homo sapiens
agaatggtccctggacaggctgtgctcagaatcctcccccagtcctgggcctcgttctggtgctgggagggtgtacccagacccctctccttggaccaacrtctgccctaaacagtgcactgacatatttccccaactacttggcatcttagcctcaggtgcaggtcaggtggaaggtgtgggcaggtctctaactacaag

SEQ ID NO: 134332 - DNA, 201 bp, Homo sapiens
cggcagatgtctgcaggatggacgctaccttctggcctctgcccagaccctgactttgagtgctgatctcactgtcagggtccctcgcttcctggttgaaygatgaaaaatgattgtaaaagaaactaccaggctgagaagcaaaaatacagaaaaccatttttttccccattcacagaaagcactgaatagatttgattc

SEQ ID NO: 134333 - DNA, 201 bp, Homo sapiens
aagagactgctctagcctggctctggctgccccagccccgctggccctgtgtccatgggccttcttacctccctacgtttgcatgggatgaccccactccrttccctgttcatgccattccccctcaccctgtgttgtacccaccggggcgtgggtcagagtgtcctgggattcttttcctcacaatgaggtaggaattca

SEQ ID NO: 134334 - DNA, 201 bp, Homo sapiens
tgagtctgccctaccacttactggctttgggaccatgagcaaataattaacacactcttagccccaagttccatgatctttaaattgggtataataatatytaccccatagggttattgtgaggattaaatgagacaatgcagataatgtgcttcccaccacgcctggcacatagtaagcattcagcaaatattagtagtt

SEQ ID NO: 134335 - DNA, 201 bp, Homo sapiens
aggagccacaccactaccatgtgtctgaccgttctttccttcttggttttagcaaggcgcagatggtcagaatgtagtcatcattttcctgtcttaaaatrctaacttggctttatgtaaagcctcattaacttaaaagctctatttttcaaatcccattttttttatgatcaatgtgaatagtgaagtggggagttaatc

SEQ ID NO: 134336 - DNA, 201 bp, Homo sapiens
gctatggagggtgtgttcagaaaaaggcaccattcactgtagatatgcttctttatgcaggccagaacatcacctcccagtattcaccagaaaacatacayagagtagatggcagtcccttcagccatgcatcctcctggccagttccctgttgaatgtgaggacaaagagatccgacacttggaaaaatatctctactca

SEQ ID NO: 134337 - DNA, 201 bp, Homo sapiens
acagggtttgtcattaatgagggagagtattcaggccaagctgaccctggcatttttatatcttctattatacctggaggaccagcagaaaaagcaaaaaygatcaaaccaggtacatctttttaaattactagagatgctgttttaagaaaccactcttttttatttccttgaaggattattgagatgttttatttttct

SEQ ID NO: 134338 - DNA, 201 bp, Homo sapiens
tgcgttttcacgctgctgataaagacatacccaagactgggaagaaaaagaggtttaattggacttacagttccacatggctggggaggcctcagaatcayggtgggaggtgaaaggcacttcttacatgatggcagcaagagaaaaatgaggaagaaacaaaagcggaaaccccggataaacccatcagatctcgtgaga

SEQ ID NO: 134339 - DNA, 201 bp, Homo sapiens
tgctcagagaggcaggattcctgctgactccagggggacacctggcacctcagcttcctttcccacttctccaggctgcatggaggggtgccgggcagggkcctcctggaagggaacctcctgcagcctcaagcaccaggtcatgacatgacatctatccctttcccaggtgaccgactcctgcaggtggatggagtgatt

SEQ ID NO: 134340 - DNA, 201 bp, Homo sapiens
ctttaagctggaacttgagcaacactgagtgacactccagagaggctcatgtgagtgtgtgttcaggtgtccattcccagcactgctgggagattaaataygagctacttttgttttcaggattgtgtgcgtgtgaatgtgtgtgcgcgcatgtgtgtgaaatgctgtttactccttttgtattagctcccaaataatttg

SEQ ID NO: 134341 - DNA, 201 bp, Homo sapiens
aaactaaaaaagaatgccaatggtttgggattcagtttcgtgcagatggagaaagagagctgcagccatctcaaaagtgatcttgtgaggattaagaggckctttccggggcagccagctgaggagaatggggccattgcagctggtgacattatcctggccgtgaatggaaggtccacggaaggcctcatcttccaggtg

SEQ ID NO: 134342 - DNA, 201 bp, Homo sapiens
tgtaacaaagttatttgaggaatgactaggcaggttgggagagaaggttcaggaatctagccttgttattagcatcattttaaaaggcaaacgaaagatcrtttagagggacaaaactgcacgttttccgatgggctgcccctctgcaattcccttgtgattttggtatttgccaggaacacgctgatttcctcagtaaga

SEQ ID NO: 134343 - DNA, 201 bp, Homo sapiens
agaaggttcaggaatctagccttgttattagcatcattttaaaaggcaaacgaaagatcgtttagagggacaaaactgcacgttttccgatgggctgcccmtctgcaattcccttgtgattttggtatttgccaggaacacgctgatttcctcagtaagaacgatttggaccttagccatgttttagtcccttcatagaga

SEQ ID NO: 134344 - DNA, 201 bp, Homo sapiens
ccagaggcctctttggtggacagaccatgtaggttgccagctctgttcatccttggtgcccagaggcaactgttttgtcttatggtcagcctacatgggtwaacaaaatggcagctaaagcattgtccatagaattggccataattttctccatggtctaattattcaaaatttagtttcaagtatactacaaatgactag

SEQ ID NO: 134345 - DNA, 201 bp, Homo sapiens
gaagccaccggtgcgcagggtggtggcagagcgtgctacatgattcgagaactgacaaggcagaatgtgtttggaaggggccttctgcacaggtgaaaggygggagcatagatccagggccgcagggagggcttctatagggaggagagagttatccttccagctggctaaccctaagagggtaatagggttaggcggaat

SEQ ID NO: 134346 - DNA, 201 bp, Homo sapiens
tgtttggaaggggccttctgcacaggtgaaaggtgggagcatagatccagggccgcagggagggcttctatagggaggagagagttatccttccagctggstaaccctaagagggtaatagggttaggcggaatgtgcctgtctgtctgtcaaagttagttaaggtcccttgactgagctgagctccaaatagcctcagga

SEQ ID NO: 134347 - DNA, 201 bp, Homo sapiens
  misc_feature (1)...(201): n = A,T,C or G
catgaaagaaatatttattcagaatgagaaaagaaatcacaaaaactttatgaatttttaaaagctgaacaaatcctgcagatatcaaaaaagccagcaantaatatttttattaacttcctgacaatgcctataatacttttttcctttcaaatttttaatggcgtaccctgattatttttctgtatgatggcgcttttg

SEQ ID NO: 134348 - DNA, 201 bp, Homo sapiens
aaccctaagagggtaatagggttaggcggaatgtgcctgtctgtctgtcaaagttagttaaggtcccttgactgagctgagctccaaatagcctcaggatrtccctcttcctgtttggcctatggttcccatacgctggcctggcccgcactgtcctccttggcccttctctggcctccatgaacttggtggagggcgtga

SEQ ID NO: 134349 - DNA, 201 bp, Homo sapiens
acagaaacatttttgctctttctagtgctgcaacagagttatttgctgcaaatgcaggaaacctgacaaattctatttcatgggattcccataaaaaaaawcgtgtcatgtgttgataatgcggtatacacaattatagagtatatccctgatagggaagcatttcaattagatgagtatttttgagaactaaattatagt

SEQ ID NO: 134350 - DNA, 201 bp, Homo sapiens
tctactttgtggaactggttaaagaagatgggacacttggattcagcgtaactgtaagagtttttaggagagcttgaaaagcagttaacaagatgtccgtstagaacctggtggccattccacccagatggcaacctctgacagtgtgcttagtttgcacaaatgtaaggggtaaataaaaaagccaatgggggcctgcac

SEQ ID NO: 134351 - DNA, 201 bp, Homo sapiens
tgccgtgaggtacagctcctgcctgccctcccactcctgagaggtggcctctgacttcacatcactgcttttctgaagcctttcgccactgcctcaggtgraggtgtggctcctccacatcgctggctccagttagggcagtaccctctgtcccctccaccctgacacccacatgctcctgtctgtgctgtgaaacatgga

SEQ ID NO: 134352 - DNA, 201 bp, Homo sapiens
ctcagcagcttggctgtacacagagataggtgctcacagctgatgctccccagcaagaagcggtagtgcagcctttatctggaaagtgacctgcagtgtgkgttgagcttgagaaaaagtctgattttgaatctgaatttgaggactttctcctatgaattgtggtcatttaaatgcatgagggaaatgcttataagatgc

SEQ ID NO: 134353 - DNA, 201 bp, Homo sapiens
tcaggcctctcagcatctcatccataggctggagtgagtggggtgtccagcctcttagggtcccatcctcattgccagaaactgtaaggaaggaaaacttytacttccatcctttatcctcacaggctccagctgtgtctgagaaataaactaacataagaaagatcaacaggagaaaagcataataaatgttttatgtgg

SEQ ID NO: 134354 - DNA, 201 bp, Homo sapiens
tggtggcacacgcctgtaatcccagctacttgggaggctgaggcaggagaattgcttgaacccaggacgtggaggttgcagtgagccgagatccatctcaaaataataataataataataatagtaataataatataaatgtggaatctaattagtatatgagtgttcattatactgttcttttaacttttgtagatgttt

SEQ ID NO: 134355 - DNA, 201 bp, Homo sapiens
tttttatatgaaatgatttgtattaatttggcaaattaatattaaatttaacttactctattaattaattaattaattaattattgagacagagtctcacrctgttgcccagccaggctggagtgcagtggcacgatctcagctcactgcagcctcccaggttcaagtgattcttgtgcctcagcctcccaagtagctggg

SEQ ID NO: 134356 - DNA, 201 bp, Homo sapiens
tggcacacgcctgtaatcccagctacttgggaggctgaggcaggagaattgcttgaacccaggacgtggaggttgcagtgagccgagatccatctcaaaataataataataataataatagtaataataatataaatgtggaatctaattagtatatgagtgttcattatactgttcttttaacttttgtagatgtttaaa

SEQ ID NO: 134357 - DNA, 201 bp, Homo sapiens
ggcgtttacttttaaaagaagtatacattagacaaatatatttttttaaaatcaagtaaagatttaagccacatgtgtttgggtttatttctgaactataytctgtttcattgatctacatgtcttgtctttaccccaaagcctacactgtcttgattactgtagcttcatagtaagtcttgcaattgagtagcataagtt

SEQ ID NO: 134358 - DNA, 201 bp, Homo sapiens
ccaggctggagtgcagtggcacgatctcagctcactgcagcctcccaggttcaagtgattcttgtgcctcagcctcccaagtagctgggactacatgtgcrcaccaccatgcccggctaatttttgttattttttgtagagatagggttttgtcatgttggctgggctggtctcaaactcctgatgacctcaagtgatcta

SEQ ID NO: 134359 - DNA, 201 bp, Homo sapiens
gcccaggctcaagtgcagtggcccaatcatagtcgaattcctgggctcaagcatgcctccctgctcaacctcccaagtagctgggattacaggcatgagcrtcatccatgcttggctgaaaagttttaaattgccttttttttgtttgttttatggcgtttacttttaaaagaagtatacattagacaaatatattttttt

SEQ ID NO: 134360 - DNA, 201 bp, Homo sapiens
atctgtggtcagtttgctcagaatgtttaaaagaaagaagattctatgatgggcagctagtacttacttctgatatttggttgtgcctcaagtgtggcttccaggtaagaaaagtattatttatatgtgagtttgtctgaaatgttttccttaaatgcttattgtgagttggactgttggtcatgcataggagttaagata

SEQ ID NO: 134361 - DNA, 201 bp, Homo sapiens
gacaataaatttcatatggtctattttcttttttggtcctaattaagaagtgtcattttagagagagggagaaggaagaaagagggcaaattaatttatgytaagcaacaggactaggctgcttgctttttgtacactgataaaaatacattaaatccaagagagaacctaaatgtaaaaattctgactcttacttgggaa

SEQ ID NO: 134362 - DNA, 201 bp, Homo sapiens
gattaatttttttctctctcaaaacagattattctgctgcttttgcaaagtaatttaaaatcttaaagtttaaaagttattgatatctgtaataaaggaatttttttaatgaaattaaaagtatatacttttttaaaaaaataagagaaatctttattatttcacacaaaatgtccagaagtaaggccacttcaggattag

SEQ ID NO: 134363 - DNA, 201 bp, Homo sapiens
cagaacagagccccattgtattataattaatctgagcacatggattatatggtaagttaaattttgttagttcttgtgtccactaaccacagccccccaatttttttttttctttaagcttttaaggtaaaatatttaaagatgttctatcagcttatggttttttaacctgaacacaatctatgggatacttcaagaaaa

SEQ ID NO: 134364 - DNA, 201 bp, Homo sapiens
tcctcatgtggatacaaaggtagctttctagcctcttattataagaggccagtctcattcatgagggctccacctacatgacctaattacctctcaaaggsttcacctccaagtatcatcactttggggattagagttcaacatatcaatttggagtggggacacaaacatttagtccataatggtatagttggcaaaagc

SEQ ID NO: 134365 - DNA, 201 bp, Homo sapiens
atacaaaataaaattctgttcatcttcagggatgtggtaaaaactcagaaagccaacattcattgaagcactttaagagttccagaacagagccccattgkattataattaatctgagcacatggattatatggtaagttaaattttgttagttcttgtgtccactaaccacagccccccaatttttttttttctttaagc

SEQ ID NO: 134366 - DNA, 201 bp, Homo sapiens
tttcacacgtaagtgtgataataactatagagttttcatacatgccttttatcaggttgaggaaattcccaattattcttagtttttcttttttctgagagttcttattaagaaatggattttttaaaaatgctttttctgtatccaaataatctttttttttttttttttttgtctgttggaatagtaaattgtattggt

SEQ ID NO: 134367 - DNA, 201 bp, Homo sapiens
caccccccaaagttttgttgggcccctttataatccctttctctagaacctctcccctaaactccatccctgggtggtataccccttacctgttttttttkttgttgttgcaatagattagtttgcattttggggaattctatagaaatggaatcatacagggtgtactctttttttatctgacttccttcacttggcata

SEQ ID NO: 134368 - DNA, 201 bp, Homo sapiens
gtgttcttagattaaaagcatgttataatggcagaaggggatgttggtgttgacaatatttctgattcataagtctcattgctccaatctgggttctttayctctcatatctgatgtacaggtgtcactctggaattcctcctaaccatgctcctgggagatccctttgcctctcttgtgttttgactttgccattgttta

SEQ ID NO: 134369 - DNA, 201 bp, Homo sapiens
tgctattattaaaaagtcaaaaaataaatgctggcgaggctgcagagaaaaggaatgcttatactctgttggtagaagtataaattagttcaaccgttgcrgaaagcagtgtggctattcctcaaagagctaaaaacagaactaccatttgacccagcatttccattactgggtatatacctgaaggaatataaatcattc

SEQ ID NO: 134370 - DNA, 201 bp, Homo sapiens
ttaaaatcttaaagtttaaaagttattgatatctgtaataaaggaatttttttaatgaaattaaaagtatatacttttttaaaaaaataagagaaatcttyattatttcacacaaaatgtccagaagtaaggccacttcaggattagttaatttaatggaaagaacattaaaaactgaggtttattctgttttctgctgtg

SEQ ID NO: 134371 - DNA, 201 bp, Homo sapiens
tttaattttgaagactaaaatgtatgaatttttttccctcaatcccttcagtaaataacagatgcgggtgaaagatccaactaaagctttacctgagaaarccaaaagaagtaaaaggcctactgtacctcatgatgaagactcttcagatgatattgctggtaaattgtgatatatggcatcccaaatagtgttgagaag

SEQ ID NO: 134372 - DNA, 201 bp, Homo sapiens
ggtcaggagtttgagaccagcctggccaacttgatgaaaccccatctctactaaaaaatacaaaaagttaggcatggtggcgcatgcctgtaatcccaackacttaggagactgaggcacgagaatcacttgtacctgggaggcggaggttgcagtggagctgagatcacaccactgcactccagcctgggagacagagca

SEQ ID NO: 134373 - DNA, 201 bp, Homo sapiens
ttttattttaagtaaaacacttaaatagctcttagaaatgttattctggccaagtgcggggcctcactcctataatcccagtgctttgggaggccaaggcrtgcagatcacttgaggtcaggagtttgagaccagcctggccaacttgatgaaaccccatctctactaaaaaatacaaaaagttaggcatggtggcgcatg

SEQ ID NO: 134374 - DNA, 201 bp, Homo sapiens
ttgctatgctagatgaaatttgagagtgtattccataaaatcagaggcatattttaactgaatctgaagactttaattttgttttcttttagaacttggcrcagacttatactcttactgatctgatgaatgagatcaaagaaagtagtacaaaactcaagatttttccttcctcagactctcagctggtgagtaataact

SEQ ID NO: 134375 - DNA, 201 bp, Homo sapiens
agtggggacacaaacatttagtccataatggtatagttggcaaaagccaatggaatataccatgtgtatactgatttaacaaagatttatttcatttcaartgatgttcccctcttcttcctctgttgatttcccggaccagttgaaattgaagtcatttcagttttaatacacattaaataaaatataaaattttaattt

SEQ ID NO: 134376 - DNA, 201 bp, Homo sapiens
gaaatttaattttctcttaatattccagtgctagttgtacaacacaggtatagagtggctttactatgcttggcttacagctatccatttttgatccagtrtggctcatccagctcctactatttccttgctagcagaagggaggaaagggtaaagagaactcattatccagaagcaatacttactccgttgatgaaaact

SEQ ID NO: 134377 - DNA, 201 bp, Homo sapiens
tagtagcttaaaaagatagaaatttaattttctcttaatattccagtgctagttgtacaacacaggtatagagtggctttactatgcttggcttacagctrtccatttttgatccagtatggctcatccagctcctactatttccttgctagcagaagggaggaaagggtaaagagaactcattatccagaagcaatactt

SEQ ID NO: 134378 - DNA, 201 bp, Homo sapiens
tcaggagactgaggcaggagagttgcttgaactcgaggtggaggttgcagtgagctgtgatcgcggcactgcactctagactgggtgagggagtgagacaygttctcaaaaaaaaaaaaaaaattagtaagtgaagttaaaagtcatgtgaatggattaaaattatgtcttggggttttttttctgttgatattataaaaa

SEQ ID NO: 134379 - DNA, 201 bp, Homo sapiens
ggcactcatagataaaaattcaaactcctctctatctttactcctcagaagtaactattatctgattctttccaaaagtgatcatacatacacagacataygcaaattttttgcaacttgcttgatatattttatacatctttccatgttagcacatgtgtgtataacttactcagttttgtatgaatacactgtacttgc

SEQ ID NO: 134380 - DNA, 201 bp, Homo sapiens
ctaagaaatacaaaaaaattatctgggcattgtggtgtgcacctgtagtcctagctacttgggaggctgaggtgggcgtatcacctgagcctggggaggtygaggctgcagtgagctgaaatcaggccactgcactccagcctgggccatcagagtgagactttgtctcaaaaaataataatagccgggcacggtggctca

SEQ ID NO: 134381 - DNA, 201 bp, Homo sapiens
tatgctttagaaatttgtttctgactttgccagaaataacttgttttgtatagttttcttcctggttataaaggtttattaacattttaaaaattactatyaaaataatgggcactcatagataaaaattcaaactcctctctatctttactcctcagaagtaactattatctgattctttccaaaagtgatcatacatac

SEQ ID NO: 134382 - DNA, 201 bp, Homo sapiens
caacatggggaaatcccatctctactaagaaatacaaaaaaattatctgggcattgtggtgtgcacctgtagtcctagctacttgggaggctgaggtgggmgtatcacctgagcctggggaggttgaggctgcagtgagctgaaatcaggccactgcactccagcctgggccatcagagtgagactttgtctcaaaaaata

SEQ ID NO: 134383 - DNA, 201 bp, Homo sapiens
ctggctactcaggagactgaggcaggagagttgcttgaactcgaggtggaggttgcagtgagctgtgatcgcggcactgcactctagactgggtgagggartgagacacgttctcaaaaaaaaaaaaaaaattagtaagtgaagttaaaagtcatgtgaatggattaaaattatgtcttggggttttttttctgttgatat

SEQ ID NO: 134384 - DNA, 201 bp, Homo sapiens
aagtatttctcttgagttgtttgaaatgttatgattatctgaaatatttgcgagtgaacattggtatttattggaatttttcatttaagttcattaaatayttctcctgcatggaatttacacaattccaatttgcttactttagttcaataaattcttttttcaaggtgtaaaagccaactttagcttagacaatgtctg

SEQ ID NO: 134385 - DNA, 201 bp, Homo sapiens
cccccaaagttttgttgggcccctttataatccctttctctagaacctctcccctaaactccatccctgggtggtataccccttacctgttttttttgttkttgttgcaatagattagtttgcattttggggaattctatagaaatggaatcatacagggtgtactctttttttatctgacttccttcacttggcataatt

SEQ ID NO: 134386 - DNA, 201 bp, Homo sapiens
ataggctgaatattttcatatgtttggtgatttttatcttttaatcctttaataggtttgaaagtctctcttgatatgggtagctcagataggctccatcrtagagtctagaaatcatcctatgatttttttttgcccattcctaggttaaaaaaaaaaaaaaaaaaaacaaatctaagtttattaaattttcttcagtgg

SEQ ID NO: 134387 - DNA, 201 bp, Homo sapiens
ggcgcatgtcaccacacccggctaatttttgtatttttagtagagaccaggtttcaccatgttggtcaggctggtctcgaaatcctgacctcatgatccasccgcctcagcctcccaatgattgccatgtctcttaaatctcttttcatctacagattccctctccctctttttcctcctttgcagtttatttgctgaaga

SEQ ID NO: 134388 - DNA, 201 bp, Homo sapiens
taataggtttgaaagtctctcttgatatgggtagctcagataggctccatcatagagtctagaaatcatcctatgatttttttttgcccattcctaggttaaaaaaaaaaaaaaaaaaaacaaatctaagtttattaaattttcttcagtggtttagaaggcagtaaatagtttttgcattggttgagaaggagctatagg

SEQ ID NO: 134389 - DNA, 201 bp, Homo sapiens
attgcttgaacccaggaagcagaggttgcagtgagcggagatcccgctactgcactactccagcctgggtgacagagtgagactctgtctcaaaaaacaarcaaacaaaaaacaactaagtaagtaatttctattacaatttaaaagtacagttgagaaataatttaattttttagagtaaatattctagatattttttct

SEQ ID NO: 134390 - DNA, 201 bp, Homo sapiens
aggctgaggcaggagaatacttgaaccccaagggtggaggttgcagtgagccgagatcgtgccactgcactccagcctgggtgacggagtgaaacgctgtaaaaaaaaaaaaaaaaaaaggaatcttaagatgcagggagatattattcctgggcgatagggggatataggaacaggaaagctgtcaggaatccagaaagc

SEQ ID NO: 134391 - DNA, 201 bp, Homo sapiens
aggtggtggcatgtatacttccatcagctagatgcacataatgttttatgtctctctatgatattaccagtcactgataaccattgtctagatctattatkttactagggacatacctggttgttgaattatcccatgaaaatggaaaattattccatgaaatggtgatcattgtaaccattgtctagacctattatttca

SEQ ID NO: 134392 - DNA, 201 bp, Homo sapiens
ggctgaggcaggagaatacttgaaccccaagggtggaggttgcagtgagccgagatcgtgccactgcactccagcctgggtgacggagtgaaacgctgtaaaaaaaaaaaaaaaaaaaggaatcttaagatgcagggagatattattcctgggcgatagggggatataggaacaggaaagctgtcaggaatccagaaagca

SEQ ID NO: 134393 - DNA, 201 bp, Homo sapiens
aatcctatttttaattgtctgtttattgactttcttattaagctaattgaattcagcttttagaggtgtcattccttttctgccacctctctacttttacrtatttgatcataaaccctaccactttctatttagatttatgtccctatctgtcagctttcttagattgtgatctctttgaggaatggtactatgtattgt

SEQ ID NO: 134394 - DNA, 201 bp, Homo sapiens
cggctcactgcaacctccaacctcctgggttcaagtgattctcctgcctcagcctcctgaatagctgggattacagacacatatcaccaagcctggctaattttttttttttttcgtatttttagtagagacagggttttaccactttggccaggcttgtttcgaactccggacctcaagtaatctgcctgcctcggcctc

SEQ ID NO: 134395 - DNA, 201 bp, Homo sapiens
ggctcactgcaacctccaacctcctgggttcaagtgattctcctgcctcagcctcctgaatagctgggattacagacacatatcaccaagcctggctaattttttttttttttcgtatttttagtagagacagggttttaccactttggccaggcttgtttcgaactccggacctcaagtaatctgcctgcctcggcctcc

SEQ ID NO: 134396 - DNA, 201 bp, Homo sapiens
ctccaacctcctgggttcaagtgattctcctgcctcagcctcctgaatagctgggattacagacacatatcaccaagcctggctaattttttttttttttcgtatttttagtagagacagggttttaccactttggccaggcttgtttcgaactccggacctcaagtaatctgcctgcctcggcctcccaaagtgctggga

SEQ ID NO: 134397 - DNA, 201 bp, Homo sapiens
tttaccactttggccaggcttgtttcgaactccggacctcaagtaatctgcctgcctcggcctcccaaagtgctgggatcacaggcatgagctgccactcygggctccctgtgaatgttttttgaatgagttgtatgtgcttaaccttaaacgcaacttttttttgagaatttgaattgggaagaaatcaaaataattatt

SEQ ID NO: 134398 - DNA, 201 bp, Homo sapiens
ctttgtgatttgcaattattttgaatatgttgtatttgaataaactaataaaccgacaggataatactgtgttgttttacctacattgtgtctaaaaaagaaaaaaaaaaagagatttataattagttaaccattgaggatattagcgtagtcccctagctagtatttgatcacattttcttagagctaggaactgatact

SEQ ID NO: 134399 - DNA, 201 bp, Homo sapiens
gggaactgaaatccacagtgtaccttgctgtttgaaagtacttttattaggaggatgaggcctgagttaactattattagaccagaatctattaactttgktttacagcgaatacaagctagcattctaaaagcatttaacaacccaactactaaaactgctgatgatgaaactagaaaaaaagtcaaaggtatgttgact

SEQ ID NO: 134400 - DNA, 201 bp, Homo sapiens; identical to SEQ ID NO: 23743

SEQ ID NO: 134401 - DNA, 201 bp, Homo sapiens
acctggacatcatatatttaggggttgtgtcttggttcagcctggtatagcaaattattatagactgggtggtttaaacaacacagacttatttctcacartactgggagctgggaagtacagggtcaagatgctggcaaatctagtatctggtgagggccttcttcctggtttatagatggccatcttctcgtatatcct

SEQ ID NO: 134402 - DNA, 201 bp, Homo sapiens
aagtaactaaataccaactttgttatctgatgtgcaaaattattgagaatattttcataatattttcttaaattttatactttttcaggtgttatgaatgygatgaaaaattatcaacgcattgtaataagaaggttttggctcagatagttgattttctccagaaacatgcttctaaaacacaaacaagtaagttaagcg

SEQ ID NO: 134403 - DNA, 201 bp, Homo sapiens
gtggcttcagttagaagctttttaggtaggtagaatctcaggtcttgtgccagacttgttgcatcagaactttcattttaacaagaccctcaaggtgactyatgcactggcctgatctctttaaaaagctaaagtcttaggcaagtaacaggttggaagaactgttctgttaatagattaaaagatactaaagagacataa

SEQ ID NO: 134404 - DNA, 201 bp, Homo sapiens
taaacaacacagacttatttctcacaatactgggagctgggaagtacagggtcaagatgctggcaaatctagtatctggtgagggccttcttcctggtttrtagatggccatcttctcgtatatcctcatgtggatacaaaggtagctttctagcctcttattataagaggccagtctcattcatgagggctccacctaca

SEQ ID NO: 134405 - DNA, 201 bp, Homo sapiens
ttatataactttgctgtcgaaagagtattctatgggcccccagcagtggcttcagttagaagctttttaggtaggtagaatctcaggtcttgtgccagacwtgttgcatcagaactttcattttaacaagaccctcaaggtgactcatgcactggcctgatctctttaaaaagctaaagtcttaggcaagtaacaggttgg

SEQ ID NO: 134406 - DNA, 201 bp, Homo sapiens
gaatttttaataaatataagggatagaggtaaataacactatgaagaaagagacaaattcagtgtgagacattatataactttgctgtcgaaagagtattstatgggcccccagcagtggcttcagttagaagctttttaggtaggtagaatctcaggtcttgtgccagacttgttgcatcagaactttcattttaacaag

SEQ ID NO: 134407 - DNA, 201 bp, Homo sapiens
gtgaattatggaatgaataaatcaagatttggaatttagtactgaattgaaagattcattaccttgatcattgagaagtaagtcagcaaccatgaaaattrcgatgttgcttagccaccaggcaggagagtaaaaggtaggccaagctactctaacagagactccaaaatatagtagttttaaaaaatgcttagcttgtat

SEQ ID NO: 134408 - DNA, 201 bp, Homo sapiens
gcagtgtctgaaaaatactttagtggaacatagaaaatgctagaatgtattcatgtgaatttataagaataaagctataccaagtatacagattgacactratacctttatgtgaggtcttctaagggaaacttgaaaggttgttgaaagtagcaaccacacttggaagttcatatgtatcatattgtatcatttgacatg

SEQ ID NO: 134409 - DNA, 201 bp, Homo sapiens
gatcaggcaagttggaagaactgggaagttgctatcagagaaggggatacttaaattagtgattttataaggtggaactgtaggggagagtagatgaggargtttggagggagaaggtagagatgaagtgctcaaggaactcagaggctttttacatgttcctaacccggaagcccttaatttattgcaacttagttcagt

SEQ ID NO: 134410 - DNA, 201 bp, Homo sapiens
tgcagtgtctgaaaaatactttagtggaacatagaaaatgctagaatgtattcatgtgaatttataagaataaagctataccaagtatacagattgacacygatacctttatgtgaggtcttctaagggaaacttgaaaggttgttgaaagtagcaaccacacttggaagttcatatgtatcatattgtatcatttgacat

SEQ ID NO: 134411 - DNA, 201 bp, Homo sapiens
tcatggaaggacttgttgagatgcagcctcttgtcagcctggacactataggaaaatatgagtggctgatcaggcaagttggaagaactgggaagttgctrtcagagaaggggatacttaaattagtgattttataaggtggaactgtaggggagagtagatgaggaggtttggagggagaaggtagagatgaagtgctca

SEQ ID NO: 134412 - DNA, 201 bp, Homo sapiens
tcaaaataattattcttatatgttatactagctagtttctttgtgatttgcaattattttgaatatgttgtatttgaataaactaataaaccgacaggatratactgtgttgttttacctacattgtgtctaaaaaagaaaaaaaaaaagagatttataattagttaaccattgaggatattagcgtagtcccctagctag

SEQ ID NO: 134413 - DNA, 201 bp, Homo sapiens
tcctgacctcatgatccacccgcctcggcctcccaaagtgctgggattacaggcgtgagccaccgcgcccggccggaagataacattctttaatgtcccargtttatatttgggatctgctttctattccttgtcctttaggagaaagtgttattggtggggatagtactttagaaaccagatttcgaggggaaaaaaatt

SEQ ID NO: 134414 - DNA, 201 bp, Homo sapiens
aggaagagagaaggataggtaagacaacagcaatgggggaaaaaccacaataatgtatgacgaatgttagatgtgactttaagagttcagggggcggcggsggtgtgggggcggagccgggcgcggtggctcaagcctgtgatcccagcactttgggaggccggggcgggcggatcacaaggtcaggagatcgagaccatc

SEQ ID NO: 134415 - DNA, 201 bp, Homo sapiens
tccttcctcagactctcagctggtgagtaataactgtttgaataatagctgctttcagatgagccactgatgttaccaaaatctcttttcctaattcgcasatcagtcaactaagatagtagtcagggggcttaaaaataatttaaaagcattctgtgaaaataatcagatttaaaatttctaaaatcataactttaaggt

SEQ ID NO: 134416 - DNA, 201 bp, Homo sapiens
acaattagccaggcatggtggtgggtgcctatagtcccaatgactcgggaggctgaggcaggagaatcacttgaacccagcaggcagggttgcagtgagcygagatcgcactactgcactatagcctgggtgacagagcgagactcagtttcaaaaaaaaaaaactaattccaatagaaataacttaatgtattaacataa

SEQ ID NO: 134417 - DNA, 201 bp, Homo sapiens
agctccgcctcccgggtttatgccattctcctacctcagcctcctgagtagctgggactataggcgcccggctaactttttttttttttttttttttttgkatttttagtagagacggggtttcaccatgttagccaggatggtcttgatctcctgacctcgtgatccacccgcctcggcctcccaaagtgctgggattac

SEQ ID NO: 134418 - DNA, 201 bp, Homo sapiens
gctttgaggaggtataggtgtatttcaagaaatgtactatctagctaggaagagagaaggataggtaagacaacagcaatgggggaaaaaccacaataatrtatgacgaatgttagatgtgactttaagagttcagggggcggcgggggtgtgggggcggagccgggcgcggtggctcaagcctgtgatcccagcactttg

SEQ ID NO: 134419 - DNA, 201 bp, Homo sapiens
aagaaattacattttttaaaaaatttggtcattttattttcaaactagggaactgaaatccacagtgtaccttgctgtttgaaagtacttttattaggagsatgaggcctgagttaactattattagaccagaatctattaactttgttttacagcgaatacaagctagcattctaaaagcatttaacaacccaactacta

SEQ ID NO: 134420 - DNA, 201 bp, Homo sapiens
gtttcaaatttttattaaagtagagagaatagcataatgcagccctttatatctgtcacccaacttaaactgcgttcatggtttatgtttaatccattttstcccaacctcaggttattttaaactaagtcattggcatttttttaatttataaatatttcctgagcagaataattttaacttttaaaaatataaccatgt

SEQ ID NO: 134421 - DNA, 201 bp, Homo sapiens
actgaggcaggagagttgcttgaactcgaggtggaggttgcagtgagctgtgatcgcggcactgcactctagactgggtgagggagtgagacacgttctcaaaaaaaaaaaaaaaattagtaagtgaagttaaaagtcatgtgaatggattaaaattatgtcttggggttttttttctgttgatattataaaaaaagtaaa

SEQ ID NO: 134422 - DNA, 201 bp, Homo sapiens
ctgtagttaataactttaggtttgtatcattctaacagggtaattttgaatcttatatcttaggtttttagggcataaagttgacctgagctgtggcactrttctttgagttggttactgccctttgaatcaccagtttatctttgtcttttgtctatataccgtttatttttttatttttatttttttaccttattgtgc

SEQ ID NO: 134423 - DNA, 201 bp, Homo sapiens
ggggtttctccatgttggtcaggctggtcttgaactcccaacctcaggtgatctgcccaccttggcctcccaaagtgccagggttacaggcgtgagccacygcgcctggccggtcctttgcttttttatgtaaattatagaatcagattgtcagttgggattgttttgaatgtgtagatcaatttggggagaatcaacatc

SEQ ID NO: 134424 - DNA, 201 bp, Homo sapiens
tatttgtatttttttctaacttttgtttttgtggttttataatgtatgtactacaggtctataatttgcaaacatacacacattgttactgtgcactttaytgtaattaagggttcaagatttttaaaaaacgtagctgctcaaatatgccttgttcttttgtgttgagatagtgccatctcgtggatgtttagaataaca

SEQ ID NO: 134425 - DNA, 201 bp, Homo sapiens
tgtagtttctggtgacatttgtttaaatttagcatttttgttctttaaagaaagatgaaattttaatagtgagcatctaaaggttttttttttgagacggrgtctcgctctgtcgctggagtgcaggctggagtgcagtggcgcgatctcagctcactgcaagctccgcctcccgggtttatgccattctcctacctcagc

SEQ ID NO: 134426 - DNA, 201 bp, Homo sapiens
gacacgttctcaaaaaaaaaaaaaaaattagtaagtgaagttaaaagtcatgtgaatggattaaaattatgtcttggggttttttttctgttgatattatwaaaaaagtaaaatatatccctgtcacttttttctgttttacctctataatttgatagcagtctttgttataattaaattattgtttagtcgtaatggtgc

SEQ ID NO: 134427 - DNA, 201 bp, Homo sapiens
gtgagtaataactgtttgaataatagctgctttcagatgagccactgatgttaccaaaatctcttttcctaattcgcagatcagtcaactaagatagtagycagggggcttaaaaataatttaaaagcattctgtgaaaataatcagatttaaaatttctaaaatcataactttaaggtatgttatggttccaatatgcca

SEQ ID NO: 134428 - DNA, 201 bp, Homo sapiens
tgggttaagaatcagccttttcccctagacgtccttatttcttttcatgggtaatggtatttagaagttagaccttttctacttgttctcgactgttcttytacatttagttttttaattcatctgcaatttattctgtaatatagtgtgaggtgcagatctgtatactaaagtttaaattaattcctctagcaataaaat

SEQ ID NO: 134429 - DNA, 201 bp, Homo sapiens
aggcagtaggatcacttgaacccagagaagtcaaagctgcagtgggcagtgattacaccactgcactccagcctgggcaacaaaacaagactctcaaaaawatatatatatatatatatattatatatatattaattatatatatattttttggaaagataattaaacttttccctcatcctactgtcataatctgaatta

SEQ ID NO: 134430 - DNA, 201 bp, Homo sapiens
attctgactcttacttgggaaaatttgacattagagcaatctattcatggaatttgagacctggaagaaattacattttttaaaaaatttggtcattttawtttcaaactagggaactgaaatccacagtgtaccttgctgtttgaaagtacttttattaggaggatgaggcctgagttaactattattagaccagaatct

SEQ ID NO: 134431 - DNA, 201 bp, Homo sapiens
agtaggtttaacttgccaacatgtaagtcatgctatcagcgtgaatcatgtaaagagagcaatagctgagaatctgtggtcagtttgctcagaatgtttaraagaaagaagattctatgatgggcagctagtacttacttctgatatttggttgtgcctcaagtgtggcttccaggtaagaaaagtattatttatatgtga

SEQ ID NO: 134432 - DNA, 201 bp, Homo sapiens
ccccaaatgatgattacctaatcaaagttggttatttatcattatcaatactatatagggtttatataccttgccctaaatgtatattctgcattgagatactaactaatgttagcatgaagtgatttttagaagacatttaaaaatattatttgtatttttttctaacttttgtttttgtggttttataatgtatgtact

SEQ ID NO: 134433 - DNA, 201 bp, Homo sapiens
ttattatttattataatatttggaggacaggaaaagagacctatcttgctagttcttttctgctttacctcaggattctggagttgggagttaaaaatagytccttaatatctgaacacattccaataacaaccaataacatttaaagaataaaaaaaacaggaatgggggaaaccagttaatagcgtttataaaaactat

SEQ ID NO: 134434 - DNA, 201 bp, Homo sapiens
cccaaatgatgattacctaatcaaagttggttatttatcattatcaatactatatagggtttatataccttgccctaaatgtatattctgcattgagatactaactaatgttagcatgaagtgatttttagaagacatttaaaaatattatttgtatttttttctaacttttgtttttgtggttttataatgtatgtacta

SEQ ID NO: 134435 - DNA, 201 bp, Homo sapiens
atttgaaaactacctggcctcttcccccttttcttttttccatgcctggtgtttgtacttcagtgacccacttcattgattgtgctggcctttgcccccamgctctagtgtggggtttattatttattataatatttggaggacaggaaaagagacctatcttgctagttcttttctgctttacctcaggattctggagtt

SEQ ID NO: 134436 - DNA, 201 bp, Homo sapiens
tctactaaaaacacaaaaattagccaggcgtggtggtgcacacctgtaatcccagcttcttgggtggctgaggcatgagaattgcttgaacccgagaggcrgaggttgcagtgagctgtgatcgcaccactgcactccagcctgggcaacagagcagagcctacctcaaaaaacaacaaaaatcctgttttaattgtagtg

SEQ ID NO: 134437 - DNA, 201 bp, Homo sapiens
ccaaatgatgattacctaatcaaagttggttatttatcattatcaatactatatagggtttatataccttgccctaaatgtatattctgcattgagatactaactaatgttagcatgaagtgatttttagaagacatttaaaaatattatttgtatttttttctaacttttgtttttgtggttttataatgtatgtactac

SEQ ID NO: 134438 - DNA, 201 bp, Homo sapiens
actaaaaatacaaaaattagccaggtgtggtagcgtgtgcctgtaatcctagctacttgggaggctgaggcaggagaatacttgaaccccaagggtggagkttgcagtgagccgagatcgtgccactgcactccagcctgggtgacggagtgaaacgctgtaaaaaaaaaaaaaaaaaaaggaatcttaagatgcagggag

SEQ ID NO: 134439 - DNA, 201 bp, Homo sapiens
caaatgatgattacctaatcaaagttggttatttatcattatcaatactatatagggtttatataccttgccctaaatgtatattctgcattgagatactaactaatgttagcatgaagtgatttttagaagacatttaaaaatattatttgtatttttttctaacttttgtttttgtggttttataatgtatgtactaca

SEQ ID NO: 134440 - DNA, 201 bp, Homo sapiens
atcatgtattctcttcaagaagaggatacaaaactaagggattattggggggccaaggcggggtggatcatctgaggtcaggagtttcagaccagcctagmcaacatagtgaaacctcgtctctaataaaaattagccgcgcatggtggtgcatacctgtaattccagctacttggcaggctgagacatgagaattgcttg

SEQ ID NO: 134441 - DNA, 201 bp, Homo sapiens
ttgctatgtgctgctagttagcaagaatgtctggagtggtgtttcctcttacaggctggattgatgaccggttaatgttttagcagtcagggactcacttyctttgtattattaggattaatatttatcctgagataatgaagaataatgctgaaagtactgcacttggccgggcgtgatggctcatgcctgtaattccag

SEQ ID NO: 134442 - DNA, 201 bp, Homo sapiens
gaaagaaatcaatctgaacttatacttcagcaaaaaaaacttttttatatgaaatgatttgtattaatttggcaaattaatattaaatttaacttactctattaattaattaattaattaattattgagacagagtctcacactgttgcccagccaggctggagtgcagtggcacgatctcagctcactgcagcctcccag

SEQ ID NO: 134443 - DNA, 201 bp, Homo sapiens
aaagaaatcaatctgaacttatacttcagcaaaaaaaacttttttatatgaaatgatttgtattaatttggcaaattaatattaaatttaacttactctattaattaattaattaattaattattgagacagagtctcacactgttgcccagccaggctggagtgcagtggcacgatctcagctcactgcagcctcccagg

SEQ ID NO: 134444 - DNA, 201 bp, Homo sapiens
ttcatagacaataaatttcatatggtctattttcttttttggtcctaattaagaagtgtcattttagagagagggagaaggaagaaagagggcaaattaayttatgctaagcaacaggactaggctgcttgctttttgtacactgataaaaatacattaaatccaagagagaacctaaatgtaaaaattctgactcttact

SEQ ID NO: 134445 - DNA, 201 bp, Homo sapiens
aaccccatctctactaaaaaaatacaaaacaattagccaggcatggtggtgggtgcctatagtcccaatgactcgggaggctgaggcaggagaatcacttgaacccagcaggcagggttgcagtgagccgagatcgcactactgcactatagcctgggtgacagagcgagactcagtttcaaaaaaaaaaaactaattcca

SEQ ID NO: 134446 - DNA, 201 bp, Homo sapiens
ctccatccaccgcttactggctttgggacctctgcaagtcacttcacttctctttctcagtttcaagtgtaaaatgcggaaaataatagcaacttatctcstaaggtggttgtgagggttgcgtgggttaatatttgtgaagtgcttagaactgagcgtgatacacagcaaaaccataagtgctgctcatctttttgagct

SEQ ID NO: 134447 - DNA, 201 bp, Homo sapiens
caaccatgaatctcttctcattctataattatgttatttcatgaacattatataaatggaattatatagcatatatcttttgagttattttgtgtgttcartctctgtgctttttagttaacagcatttaatacttttgaggtttgctcagtaatggtagcactttggtgtagcaaagaaaatgttgagattttgttttat

SEQ ID NO: 134448 - DNA, 201 bp, Homo sapiens
tcttaacaatgttgaatcttttcatgtatgatatcttaccagttttctaggtctttgatttttctcatcaagggtgtatagttttcagcatacaaatcccrcacatattttgttagatttatcttaagaatttcatgtttttatgctatttattgtaaatggtactctttttaaagaattcaatttccaattgttcattgt

SEQ ID NO: 134449 - DNA, 201 bp, Homo sapiens
gctttgtataaccaccaccaatcaagatacttgactgtgtcatcaccactctatgtgctgtccatttatagcaacaccctctgccttgcgtccattgctcyctacaaccatgaatctcttctcattctataattatgttatttcatgaacattatataaatggaattatatagcatatatcttttgagttattttgtgtgt

SEQ ID NO: 134450 - DNA, 201 bp, Homo sapiens
agtcatctgctacttcactggccttccttggagtatacagcataagtatagggttctgcagtttctgcctctcctgatgccagctgtggaggtccaaatargattagaatatgtgtccatcttggtttctgtcctcatctctaatctaggaggtgggttctgtccaccaagtgcaggtagggaagcccatcaaggtaataa

SEQ ID NO: 134451 - DNA, 201 bp, Homo sapiens
tcatagagtctagaaatcatcctatgatttttttttgcccattcctaggttaaaaaaaaaaaaaaaaaaaacaaatctaagtttattaaattttcttcagkggtttagaaggcagtaaatagtttttgcattggttgagaaggagctataggcagagacatggtggaggcagtttctctttgttcaggaatgatttcctcc

SEQ ID NO: 134452 - DNA, 201 bp, Homo sapiens
tgctgctcatctttttgagcttggtatataaaaggagatagtgaccttttcttctctttccaacccccataaataattgcccaagagtaggaaaaaaggattttttttcttaaggatatgggctttttgcatagcctgtttaaaaacaaagctttctaaacaacttagttgcacatcctactttagagaaaagacaagtgt

SEQ ID NO: 134453 - DNA, 201 bp, Homo sapiens
aggaaaatatgagtggctgatcaggcaagttggaagaactgggaagttgctatcagagaaggggatacttaaattagtgattttataaggtggaactgtaggggagagtagatgaggaggtttggagggagaaggtagagatgaagtgctcaaggaactcagaggctttttacatgttcctaacccggaagcccttaattt

SEQ ID NO: 134454 - DNA, 201 bp, Homo sapiens
tatataggagaatgtgcttatttttaagagatacatgctgaagtatttagggatgaactgtcaagatctctacaactttcaaatagttcaactatgtgtawatatatatatatatatatatatatatatatatatatatatacacacactcacatacatatatgtgtctctctatacacacatattgatatttagataaaa

SEQ ID NO: 134455 - DNA, 201 bp, Homo sapiens
aagaaatcaatctgaacttatacttcagcaaaaaaaacttttttatatgaaatgatttgtattaatttggcaaattaatattaaatttaacttactctattaattaattaattaattaattattgagacagagtctcacactgttgcccagccaggctggagtgcagtggcacgatctcagctcactgcagcctcccaggt

SEQ ID NO: 134456 - DNA, 201 bp, Homo sapiens
ctggtggcacacgcctgtaatcccagctacttgggaggctgaggcaggagaattgcttgaacccaggacgtggaggttgcagtgagccgagatccatctcaaaataataataataataataatagtaataataatataaatgtggaatctaattagtatatgagtgttcattatactgttcttttaacttttgtagatgtt

SEQ ID NO: 134457 - DNA, 201 bp, Homo sapiens
agaaatcaatctgaacttatacttcagcaaaaaaaacttttttatatgaaatgatttgtattaatttggcaaattaatattaaatttaacttactctattaattaattaattaattaattattgagacagagtctcacactgttgcccagccaggctggagtgcagtggcacgatctcagctcactgcagcctcccaggtt

SEQ ID NO: 134458 - DNA, 201 bp, Homo sapiens
aaaagtttcaagcacatctaaaagtagagaacatagtgtaataaactctcatgtacccattttttggcttcataattatcaacttggctacttgtatactmactatatatatcccacatcctccccttcctcccatcccagactatttttggataatcccagattatttttgaaataaatcccaaatatatcatatacttc

SEQ ID NO: 134459 - DNA, 201 bp, Homo sapiens
ttttctgagcacaccattgtgggcagcccttgtcagtcataattggagtaataggtgaaaacctgttttccattcaaggcaaatatacttcttaatctatrtggtaatatgtaataaaagcagccaagtgttcagtgaagtgcatatgtgcttgtgataagtagtgctaggcaagatggaccttccttttttaaaaaaaat

SEQ ID NO: 134460 - DNA, 201 bp, Homo sapiens
cgcgatcttggctcactgcaacctctgcctcctgggttcaagcgattctcctgcctcagcctcctgagtagctgggagtacaggcgcatgtcaccacaccyggctaatttttgtatttttagtagagaccaggtttcaccatgttggtcaggctggtctcgaaatcctgacctcatgatccacccgcctcagcctcccaat

SEQ ID NO: 134461 - DNA, 201 bp, Homo sapiens
tgcctcagcctcccgagtagctgggactacaggcgcccgccaccgcgcccggctaattttttgtatttttagtagagacagggtttcaccttgttagccargatggtctcgatctcctgacctcatgatccacccgcctcggcctcccaaagtgctgggattacaggcgtgagccaccgcgcccggccggaagataacatt

SEQ ID NO: 134462 - DNA, 201 bp, Homo sapiens
ctattttctagttaaattatctgtttgatagcgtagttaatttttaatattttctcacagacttacatgtaaaagtcaacaaacagacccttgccacttgygtgaagtggctatttaaccatgaaataaactctttttattgccactgccctgtgggtatgttctttctggcagtgctgtccatatttggtggctatgcat

SEQ ID NO: 134463 - DNA, 201 bp, Homo sapiens
gatcttggctcactgcaacctctgcctcctgggttcaagcgattctcctgcctcagcctcctgagtagctgggagtacaggcgcatgtcaccacacccggytaatttttgtatttttagtagagaccaggtttcaccatgttggtcaggctggtctcgaaatcctgacctcatgatccacccgcctcagcctcccaatgat

SEQ ID NO: 134464 - DNA, 201 bp, Homo sapiens
gcgcatgtcaccacacccggctaatttttgtatttttagtagagaccaggtttcaccatgttggtcaggctggtctcgaaatcctgacctcatgatccacycgcctcagcctcccaatgattgccatgtctcttaaatctcttttcatctacagattccctctccctctttttcctcctttgcagtttatttgctgaagaa

SEQ ID NO: 134465 - DNA, 201 bp, Homo sapiens
ctgcctcccgggttcaaacgattctcctgcctcagcctcctgagtagcttggactacaggcaagcgccaccatgcccagctaatttttgtatttttagtaragacgaggtttcaccatgttggccaggctggtctcgaactcctgactttaagtgatcctgccaccttggctcccaaagtgctgggattacaggcatgagc

SEQ ID NO: 134466 - DNA, 201 bp, Homo sapiens
gtctctctatgatattaccagtcactgataaccattgtctagatctattatgttactagggacatacctggttgttgaattatcccatgaaaatggaaaattattccatgaaatggtgatcattgtaaccattgtctagacctattatttcactagggacatacctggctgttgtattatcccatgaaaatggaaagaaat

SEQ ID NO: 134467 - DNA, 201 bp, Homo sapiens
tgtatggctcatgcctgtaatcccagcactttgggaggctaaggtgggaagattgcttgagaccagttcttcaggacgagcatagacaacataacatgacyctatctctatttatttttgtctgtttttttaagaggtaatacagttctctaaagtgacagtcatgtttctaagaaatttgcattttcaaaaataagcact

SEQ ID NO: 134468 - DNA, 201 bp, Homo sapiens
ataggcaaagcacagagaattttttagggcaataaaactactctgtatgatactataatgctggatccatgtcattctgcatctgtccaaatccatagaakgtacactgccaagagtgaaccctgatgtaaactaggaactttaggtgataatgatgtgtcagtgcaggttcatcagttacaataaatgaagcattctggt

SEQ ID NO: 134469 - DNA, 201 bp, Homo sapiens
ggaatagtatctaacattcgactggaggagtcaggccaattctatttagaagaataatccgacttagttggaagcagaagaatatctagaaattatctggkcaaaaagggaacagattgtgtgttccaggcaaagaaaatagctcattgacgagagctcgataggttcaggcaagtctagacagctgaaaagttgagtttt

SEQ ID NO: 134470 - DNA, 201 bp, Homo sapiens
ttgagggatatagacaaattgcacttagttatacttgcctgtttaaatagtgctgtgatggagcaagtacgagggaccgtgagaacaatttggaatagtayctaacattcgactggaggagtcaggccaattctatttagaagaataatccgacttagttggaagcagaagaatatctagaaattatctggtcaaaaaggg

SEQ ID NO: 134471 - DNA, 201 bp, Homo sapiens
ttgcttagtaggtggcatcagaaactgaaaagctatataaaaatatagttgccaactgtgttttctatagcccagtgtacagctgtttttgttagccatcrccctaatgagacagtaatggtgaaggaactggaggaggaaccagagaaggtaaactcaggctcctggacagcagtagaagtgattcatttgatcacttat

SEQ ID NO: 134472 - DNA, 201 bp, Homo sapiens
tcccatgtaatttaaagacaaaagtaactaaataccaactttgttatctgatgtgcaaaattattgagaatattttcataatattttcttaaattttataytttttcaggtgttatgaatgtgatgaaaaattatcaacgcattgtaataagaaggttttggctcagatagttgattttctccagaaacatgcttctaaaa

SEQ ID NO: 134473 - DNA, 201 bp, Homo sapiens
cttcccctttgtattccctcccatgtaatttaaagacaaaagtaactaaataccaactttgttatctgatgtgcaaaattattgagaatattttcataatrttttcttaaattttatactttttcaggtgttatgaatgtgatgaaaaattatcaacgcattgtaataagaaggttttggctcagatagttgattttctcc

SEQ ID NO: 134474 - DNA, 201 bp, Homo sapiens
ggatttcactttagtggtctcaaactctaggtgcatcagaatctcagggagatcttgttatgacagattgcaggatcccagtcttagaaattctaatttartagttctggggtggaggagccagagaatttgcatttaacaagctcccaagtgttgccagtgctgctggtctgtagaccacagtttaagaattactgaatt

SEQ ID NO: 134475 - DNA, 201 bp, Homo sapiens
ggagcctctgagtcctctattcctgaggcctttcttcagccctcccaatagtcctgccatgatttcattgcagggctgtgaccatctatgacaagccggcrtctttctttaaagagacacctctggacctgcagcaccggctcttcatgaagctgggcggcacgcactctccgttcagggcccggtaggcctcccatcctc

SEQ ID NO: 134476 - DNA, 201 bp, Homo sapiens
ccgtgttcctaacattttgattcctgtcttgaaaaaagcacctgctgcactgtaagcccagggatgtggcagctgcagtgggcttggctttgtgaagaacygagtgtgtccacggatgtggcagctgcagcgggcttggctttgtgaggaaccaaatgtgtccagggatgtggcagctgcagcgggcttggctttgtgggg

SEQ ID NO: 134477 - DNA, 201 bp, Homo sapiens
catccaggggttggcacactaaggctacaggccagtctcctgcttttgtaagtcaagtttcattgggacacaacacactcattgccttctgagttgtctayagccgcctttgagctacaatagcagaatcgcgttttgcaacagagaacccgtggcctgcaaagcctgaagtatttactctctggccctttaagaaatgtt

SEQ ID NO: 134478 - DNA, 201 bp, Homo sapiens
gccagtctcctgcttttgtaagtcaagtttcattgggacacaacacactcattgccttctgagttgtctacagccgcctttgagctacaatagcagaatcrcgttttgcaacagagaacccgtggcctgcaaagcctgaagtatttactctctggccctttaagaaatgtttgtggacccctgcgctatcttactctcctg

SEQ ID NO: 134479 - DNA, 201 bp, Homo sapiens
gtttgctgttgtaaccttagcacccagcaacaatattagagaaagcaagcccaggcctcggatggcaggggtggcctggtgctgctgatgtggccgggcaycccaacctttgggagcctgcaggccttgccacggcaggagatgcccgtcctgggtcctgggcctgctctgtggcctctcacaggcttttttcctgctctt

SEQ ID NO: 134480 - DNA, 201 bp, Homo sapiens
tcctgctctttcagttcagaacctgaggaaccagccacagagccgtcggccttcatggagtgggatgctgggagcgggctggtgatgcttctccgcgagcwgccagccctgctggtcagcagcacaggctggacaggtctgcaagacccctggaacacttgggcttggtgtgacgggcacctggccaatctgtgttctcac

SEQ ID NO: 134481 - DNA, 201 bp, Homo sapiens
acttcaagtggtaggagcagaacccgaatctttctggggatagcttcacagatccaccgctgagggggaagcagtgtagagtgagctgcccacagtgaggycctgcccctcggtcagtccagcacacactggaggccacgaggaggagccctgcggttactgtggctgggctgagcctcactgaagtagttgcttccattt

SEQ ID NO: 134482 - DNA, 201 bp, Homo sapiens; identical to SEQ ID NO: 23763

SEQ ID NO: 134483 - DNA, 201 bp, Homo sapiens
tagaactctgggaggccaaggcaggcagatcacctgaggtcaggagtttgaggccaacatggcaaaacctgtctctactaaaaatacaaaaattagctggrtatggtggtgggcgcctgtaatcccagctacttgggaggctgatgcatgagaattacttgaacccgggaggcagaggttgcagtgagctgagatcatgcc

SEQ ID NO: 134484 - DNA, 201 bp, Homo sapiens
ctctgcagtactcctcatcctgcgtttgctctccaggtgtcatctttccgccgtgttcctaacattttgattcctgtcttgaaaaaagcacctgctgcacygtaagcccagggatgtggcagctgcagtgggcttggctttgtgaagaaccgagtgtgtccacggatgtggcagctgcagcgggcttggctttgtgaggaa

SEQ ID NO: 134485 - DNA, 201 bp, Homo sapiens
agagctcatgttatatttaggttggtacaaaagtaatcaccgtttttgccattaaagatggcaattacttttgcaccaacctaatatgaaaaaaaagcatsttaaatactagaactccactcggggcttttgctcctagagtagaattggcgggaattgcctgcaggcttacatggttttctttgtttctttctctcccac

SEQ ID NO: 134486 - DNA, 201 bp, Homo sapiens
ctcctgacctcaggtgatccacccaccttggcctcccaatatgctcgaattaataggcatgaaccactgtgcctgaccatgtcattggtgccttaaccaarcctcttttaagttttcaaatggaagagcccctgtcccacagttactgctgctgagccctttcaaggtgactcagtgaggagggagaaaagcggaagtggt

SEQ ID NO: 134487 - DNA, 201 bp, Homo sapiens
ttctttttttaaacacagagtttgagcagctgactgttgatggacacaaccttccttctctcgtctgtgtgataacaggtaccgcctgggaccctaggtgkctgtttggttgggggatggtggagggggagaggcacgcagcctttaccctgtgcttcccacgatcttgtctccttaatcttcactgcagctctctgcata

SEQ ID NO: 134488 - DNA, 201 bp, Homo sapiens
ttgcagggcgttgggactgaagaggagtttaactccattcctgtcttctggaagttcccagcctagctggggctggaggtggggtagggtggggaacatakacatcagtaaccgtgataaggcagggtggattaagtgaccagaagaggtatgaacagtttttgtatggtgggcctgctattaagatacctgtttctacct

SEQ ID NO: 134489 - DNA, 201 bp, Homo sapiens
gaactatcttatcttagattgctgaagaggaggaaatccaggctttcctagagatcatgagctggcaaacttcatctgttaaggatattttgggctttgcmggcaaatggtctgtcagaactactaatctctgcaacagaagcatgagagcagccataggaaataaacaaacaatgggcttggctttgaccccaggctaga

SEQ ID NO: 134490 - DNA, 201 bp, Homo sapiens
catgaagtagaactatcttatcttagattgctgaagaggaggaaatccaggctttcctagagatcatgagctggcaaacttcatctgttaaggatattttrggctttgcaggcaaatggtctgtcagaactactaatctctgcaacagaagcatgagagcagccataggaaataaacaaacaatgggcttggctttgaccc

SEQ ID NO: 134491 - DNA, 201 bp, Homo sapiens
tgctgtaggtgtaagatcatacacccccatgagagcatgaagtagaactatcttatcttagattgctgaagaggaggaaatccaggctttcctagagatcrtgagctggcaaacttcatctgttaaggatattttgggctttgcaggcaaatggtctgtcagaactactaatctctgcaacagaagcatgagagcagccat

SEQ ID NO: 134492 - DNA, 201 bp, Homo sapiens
ttagaagtgaaattacaggaagaaagaagatgaagtatataaagcttttgatgtcaacaaatcgttttccatgttgttagactctcttatgatacttgacrtttagaaaacatcatttaataagtagaagagtcaatataattatttcccaaagtgcttatgagctacttagcatatttatcttgaaatggaaaagctatt

SEQ ID NO: 134493 - DNA, 201 bp, Homo sapiens
ggcctggatggcggtgcgcatgcgcgagcgcctagctgcgcgcagccacccacgcgaccccagtctgaggtgcggggtcctggggcccggcgcgggtggcygccgcggcccctcgggctgcgtggggagggggcttccgcccctgttgtcattgctcctgcagccttttcgctgggactgcgcgacaccgccccccgaccg

SEQ ID NO: 134494 - DNA, 201 bp, Homo sapiens
cagtgtatgtggttggaaatgctactgcttctctaggtaaggagtcaaggtaaaaataaaacaacaaaaaatggcttagccttttcagttttaaaaaacastttaactcagtttaaaaatattattttttgcttattaaatttgcaaaaattaattaagtatacgatactactgataagaatgcagtgaaacaaatataat

SEQ ID NO: 134495 - DNA, 201 bp, Homo sapiens
gcatttatatgcagtaaaacacctccctttcctctcccagggcaagcttctgaatgtcttgcctggtattgggagggcctgataggacaaaccaaatgcaraaaggccaggcaggcttgtctgcttgctctgcttccagagggagggagcattgacagggagccagcactgcctcacaccactgcctcatgtgatcagtgc

SEQ ID NO: 134496 - DNA, 201 bp, Homo sapiens
ctcattccgtggcctggatggcggtgcgcatgcgcgagcgcctagctgcgcgcagccacccacgcgaccccagtctgaggtgcggggtcctggggcccggygcgggtggccgccgcggcccctcgggctgcgtggggagggggcttccgcccctgttgtcattgctcctgcagccttttcgctgggactgcgcgacaccgc

SEQ ID NO: 134497 - DNA, 201 bp, Homo sapiens
tcgaagatacatacaaccctgaggtaaatagtggccttgatgttatcattgctattcatcatacggggatgctggtggagctggaggggcagacactggaragggaggctgagcccatagtgggaagagctgacagtggccaccaaggagtctggattgaatttgggagtccgtggggactgttggaggactcaggcagga

SEQ ID NO: 134498 - DNA, 201 bp, Homo sapiens
agataatttacgcaaagctttttgtacagcatcgaagatacatacaaccctgaggtaaatagtggccttgatgttatcattgctattcatcatacggggaygctggtggagctggaggggcagacactggagagggaggctgagcccatagtgggaagagctgacagtggccaccaaggagtctggattgaatttgggagt

SEQ ID NO: 134499 - DNA, 201 bp, Homo sapiens
agggtgggtgcccaggtggggaagcagagggtgaagggcacgagctgatagatgttggttctatatgtggtttcactgtccccagctgtcacctgcatgcsttttcctgtcacatagttggtctgggattctagaattaggaatggaaacaattttgtggttgtttcatgaaatgtctattgcaagctggtttgaaatcag

SEQ ID NO: 134500 - DNA, 201 bp, Homo sapiens
acacccaggaatccaagggaacctgaacagctactattcccagcaggtacgtggcgtttgggggcggttctggcagggtgggtgcccaggtggggaagcasagggtgaagggcacgagctgatagatgttggttctatatgtggtttcactgtccccagctgtcacctgcatgccttttcctgtcacatagttggtctggg

SEQ ID NO: 134501 - DNA, 201 bp, Homo sapiens
tgccatggaaagcataactgtgtatcagacagttgcacacccaggaatccaagggaacctgaacagctactattcccagcaggtacgtggcgtttgggggyggttctggcagggtgggtgcccaggtggggaagcagagggtgaagggcacgagctgatagatgttggttctatatgtggtttcactgtccccagctgtca

SEQ ID NO: 134502 - DNA, 201 bp, Homo sapiens
gtcccttcagtgcctagcgcctcatcaccagccctgaaaacccctgggaatattcagagtcgctgaatggcacagggaggaatgtgggaaagtccacggcytaatcagttcttgtacaagtggacacactgaggcccagagaggggacgcgtggccatgtggaggcacagctggagtgcagccggggatctggactccagg

SEQ ID NO: 134503 - DNA, 201 bp, Homo sapiens
tcacaggggagtcctcagcactgcctcttctatttccctgtggaaacctcaaaagagaaatcctgccaaaagcgctcaaggacaaaggcgagtagaatgcwttgactgcatcccttaccactttgggatccaccaggagcctttgcagtgatagaagtgggtggccctgcagagagcacacaagggagagcagggctgggt

SEQ ID NO: 134504 - DNA, 201 bp, Homo sapiens
agggctgggttggataagccaggccaggagacacagagaccatgctcatgggaagagtggacgtgcagtctgcactttcctttctttggatccactcttcycagcttgttagctcaagctaggagcacacagtgtgtctccagtccttcaccaagaggacaggagatcgagatgtggaggtggcccctgggcagataactg

SEQ ID NO: 134505 - DNA, 201 bp, Homo sapiens
ttcctcttcctcgtcgcgctggactgggggatccggcggctgcggaaccccactttccacggcacgccgcttagacctggacgccatgttgccgctcacastgcgcctgcgcagcttccccttgcctgaccttccggaccagcccatagtagccaagggggtgaggaactacgaagaagctcggcgctgagtgcacgtcaa

SEQ ID NO: 134506 - DNA, 201 bp, Homo sapiens
ttaaaagaatgtggctaacttgtttgtgtggatgttcattttctgagcacctccacacacattacctcttatgatcttcatataacaacccttcaagttcrgcaaggtagcaggtgctcttcctgtttacagatgctgaaactgagtcctagaagcagagccaggcctggagcccagggctgcttcccccttcccaaagct

SEQ ID NO: 134507 - DNA, 201 bp, Homo sapiens
tcactcctcccaaagcttcccctccccttcccgtagtggttcaacccatctaacctctggcctcattccgtggcctggatggcggtgcgcatgcgcgagcscctagctgcgcgcagccacccacgcgaccccagtctgaggtgcggggtcctggggcccggcgcgggtggccgccgcggcccctcgggctgcgtggggagg

SEQ ID NO: 134508 - DNA, 201 bp, Homo sapiens
gcctcattccgtggcctggatggcggtgcgcatgcgcgagcgcctagctgcgcgcagccacccacgcgaccccagtctgaggtgcggggtcctggggcccrgcgcgggtggccgccgcggcccctcgggctgcgtggggagggggcttccgcccctgttgtcattgctcctgcagccttttcgctgggactgcgcgacacc

SEQ ID NO: 134509 - DNA, 201 bp, Homo sapiens
aagatacataggcaaaaattcttggagcaagagggatgggaaggctgaccgtctacttgtagggcagccccacctctaaggtgcatctcccttcctctctsttccctgaatgtccagtacaaccgcaagctcttacacccttgtcatttgactcctctgctgtaggtgtaagatcatacacccccatgagagcatgaagta

SEQ ID NO: 134510 - DNA, 201 bp, Homo sapiens
gtctccttgaaagatctggctgaaaggcatttgggctccccgtctctgatctccattcctcataaccctgaggagtggacattcctattgttccatttttytggtgaggaaacagactctggtgaggtgaaatgatttgtcagggtcacatgctagtgagtggcagaaccagaacaaaattaaaaggcatggacgagcata

SEQ ID NO: 134511 - DNA, 201 bp, Homo sapiens
ctcacaaccactacctagggaaaagaatatttcctcagtgcattcttggtggtgagattgattggtgagcatcgtataacccactctgggagcatagcctrtttgtatttgtgtatgtctatactttgtgaggtttagcccacttccttctaccccctgtaccaaagaacttgacttgaacataacacaaaataaaacatt

SEQ ID NO: 134512 - DNA, 201 bp, Homo sapiens
cccatcggaaattgcttaggaagagtctttgagatctaattaagatctgtttccttgctctgtcgcagtgccctataaggactgccaggcaataatgaagkttcttttactgaaggatgcgaaggaagatgactgtggccaggatccgtatatcagggtaagtggcctgagactccttatcccacagtgtcctttctactg

SEQ ID NO: 134513 - DNA, 201 bp, Homo sapiens
atcggaaattgcttaggaagagtctttgagatctaattaagatctgtttccttgctctgtcgcagtgccctataaggactgccaggcaataatgaaggttyttttactgaaggatgcgaaggaagatgactgtggccaggatccgtatatcagggtaagtggcctgagactccttatcccacagtgtcctttctactgagt

SEQ ID NO: 134514 - DNA, 201 bp, Homo sapiens
tttccttgctctgtcgcagtgccctataaggactgccaggcaataatgaaggttcttttactgaaggatgcgaaggaagatgactgtggccaggatccgtrtatcagggtaagtggcctgagactccttatcccacagtgtcctttctactgagtcaaggggcctggagcaggcagggatgggttttgcaaaacctcagag

SEQ ID NO: 134515 - DNA, 201 bp, Homo sapiens
tgaagcatttggaattctgagtcttagctccttggaagatgttgaacatagccatcgtataaaatgtctttattgctttttggtgtgcagctttctcatcytgaagattacgggggactcatttttaccagccccagagcagtggaagcagcagagttatgtttggagcaaaacaataaaactgaaggtgagggtgggtct

SEQ ID NO: 134516 - DNA, 201 bp, Homo sapiens
gcagctttctcatcctgaagattacgggggactcatttttaccagccccagagcagtggaagcagcagagttatgtttggagcaaaacaataaaactgaakgtgagggtgggtctgctgtggattccactggacatttatttactcttatttctcctgctgggagactaaattccagaagcagctgcacttctaagagaag

SEQ ID NO: 134517 - DNA, 201 bp, Homo sapiens
tcttctgtctttatagtttgcagccatcggccccactacggctcgcgcgctggccgcccagggccttcctgtaagctgcactgcagagagccccacgccayaagccctggccactggcatcaggaaggctctccagccccatggctgctgctgagtcagccacctagcgctggccccatgcagcctccctgggctgggctg

SEQ ID NO: 134518 - DNA, 201 bp, Homo sapiens
atttgcaattcacatatcatttcatgttttacagtctgggaaaggtctctgaaagaaaaatggaatgccaagtcagtgtatgtggttggaaatgctactgyttctctaggtaaggagtcaaggtaaaaataaaacaacaaaaaatggcttagccttttcagttttaaaaaacagtttaactcagtttaaaaatattatttt

SEQ ID NO: 134519 - DNA, 201 bp, Homo sapiens
ttttgattgtgcccagggattgccatggaaagcataactgtgtatcagacagttgcacacccaggaatccaagggaacctgaacagctactattcccagcmggtacgtggcgtttgggggcggttctggcagggtgggtgcccaggtggggaagcagagggtgaagggcacgagctgatagatgttggttctatatgtggt

SEQ ID NO: 134520 - DNA, 201 bp, Homo sapiens
accactcctgtgctaaaaccgccttggtggcctgtggcttgaggtcttgatgcggatgaagccggaggaatgttgtctctcctcagtctcatggcaaggaytgatcttgttttctgttccccacagggggttccagccagcatcacattttttagtccctctggcctcacatacagtctcaagcacattcaggagttatct

SEQ ID NO: 134521 - DNA, 201 bp, Homo sapiens
tgtagaaatggggtctcgctatgttgtccaggctgatcttggactcctgctctcaagcaatcctcctgcctcagcctgccaaagtgctgagattaccaggyatgaaccactgtcctggcctaattttatattagaaatgctttcagtgtttgggaatgattgtatacaggattaaaaaagaagacaaatgctttcagtgac

SEQ ID NO: 134522 - DNA, 201 bp, Homo sapiens; identical to SEQ ID NO: 23795

SEQ ID NO: 134523 - DNA, 201 bp, Homo sapiens
tggatccccaggaagagctttggcccctaacatcttccaccctgcattccccaacacacacatagacacacagaaacggggaagaaaattgcctctgaacwtggctttgaaaatatgtctctagggatgcagagcatgaaaacatttcctcgcactggaagagagaaatcagcaggcatctattaacgaatttaacaatct

SEQ ID NO: 134524 - DNA, 201 bp, Homo sapiens
aatatttcctcagtgcattcttggtggtgagattgattggtgagcatcgtataacccactctgggagcatagcctgtttgtatttgtgtatgtctatactktgtgaggtttagcccacttccttctaccccctgtaccaaagaacttgacttgaacataacacaaaataaaacatttgggagataaaaacagtggagagat

SEQ ID NO: 134525 - DNA, 201 bp, Homo sapiens
tttttggttttcttaatattttgtgcatttttccagtcttgagtctatttattcttcttaaagcataaaatgtaaatagtaatcattaaaaattaacattragcattttaaatacttaaaacaatgcttagcaattgtcataaattagcctgtaactttgtttcagaacagttcaatttgtccagtgaatttgaaaatatt

SEQ ID NO: 134526 - DNA, 201 bp, Homo sapiens
gtagaagagtcaatataattatttcccaaagtgcttatgagctacttagcatatttatcttgaaatggaaaagctatttatctccttaaaacataagataycaatttctctgtttgttgttgatacaaccctaaatttacatcagttctctttccggaaccataaacgtttggcataggacacttggctttcactaatggt

SEQ ID NO: 134527 - DNA, 201 bp, Homo sapiens
gtggcctgtggcttgaggtcttgatgcggatgaagccggaggaatgttgtctctcctcagtctcatggcaaggactgatcttgttttctgttccccacagdgggttccagccagcatcacattttttagtccctctggcctcacatacagtctcaagcacattcaggagttatctggtgacaatatcgatcaaattaaggt

SEQ ID NO: 134528 - DNA, 201 bp, Homo sapiens
acctacataagcctgggaacaaaaggcattctgggtacaaatgaaggctttggtttctgggcctttgttctttttctgccgtctcagcctcctcttccacmggaccactccacagcgtttagcaggctgcagaggactgttcaaggcctctctgctgagtctggcctctcagcttccaagcagctcgttccaggagggtgg

SEQ ID NO: 134529 - DNA, 201 bp, Homo sapiens
tttcatatcttttaaagggtttacattctcacttactagggactgtatttattatgagtctacaaataaccacaactcttgtgtctgtaatagaaacaccyttgaactggctccagagggactgaggagagggtgcaggatgtgacccagagcccaaggacagacactgccactcactgcagtcaggaagagcaaaaggct

SEQ ID NO: 134530 - DNA, 201 bp, Homo sapiens
tctccagcttgcagacagcagatcatgggacttctcagcctccataactgcatgagctaataccttataacaaatccctttctagatgtaaatatatgccrttggttctgtttctctgaagaactctaatacacccagtaattaacatgagtaaatgctcagtaaaagggtgactgttgttattgctgatacccagaacac

SEQ ID NO: 134531 - DNA, 201 bp, Homo sapiens
agtgaggattgcagtcttgcatgtaaaatgcttagcccagtgtgatagttacttttacatgtcatcttgactggatcacggatgcccagatatctggttaracattatttcttggtgtgtctgtgaagttgttttcagaaaagatgagcatttgaatggatagactgagtaaagtggattgccctccccaaagtaggtggg

SEQ ID NO: 134532 - DNA, 201 bp, Homo sapiens
agtttctctgagaaggtaaggcctgttgtgactgagcaccatgttagtgtttgatttctcccttgccagctgaagccagagagggactattttactgtctycttattttattcccaaactttaaaacatggcagcataacttcacctggctccaggaggctgctgctgttgggaggttctgactgagcctctatcagcccc

SEQ ID NO: 134533 - DNA, 201 bp, Homo sapiens
aaagtaccaaatgcccatcatctccttcctgactgaagagaaaacagcctttgttgagcaccttctagatggcaagcactttgctcttattatctgacacratccttaaaacagttccatgtggttggtttttccccctcttgtagatgagctatgtggggctcagggaagctagttaaggccttacttacccagcctaca

SEQ ID NO: 134534 - DNA, 201 bp, Homo sapiens
tggtttacatcttttgagaaccacttggtcagtatgtatgcaaaagctttattaaaatgtttgtaccctttggctgactaattccattgtgaatgtacatmatgccactgaattatgcacttagtgattaaaatgacaaattttatgttatatttttactataatttttttaaaagcctaaatctccagatagtgatatca

SEQ ID NO: 134535 - DNA, 201 bp, Homo sapiens
ccttcccgtagtggttcaacccatctaacctctggcctcattccgtggcctggatggcggtgcgcatgcgcgagcgcctagctgcgcgcagccacccacgmgaccccagtctgaggtgcggggtcctggggcccggcgcgggtggccgccgcggcccctcgggctgcgtggggagggggcttccgcccctgttgtcattgc

SEQ ID NO: 134536 - DNA, 201 bp, Homo sapiens
tgttgaacatagccatcgtataaaatgtctttattgctttttggtgtgcagctttctcatcctgaagattacgggggactcatttttaccagccccagagyagtggaagcagcagagttatgtttggagcaaaacaataaaactgaaggtgagggtgggtctgctgtggattccactggacatttatttactcttatttct

SEQ ID NO: 134537 - DNA, 201 bp, Homo sapiens
ccactacctgcaccccactctaatcccaggctgcgtcaggcttcccctctgtgctgcagtgcacttatcaccctgtgtttcactgtctctgccctagactstgagcttcctgagggaaatactgggaataaggaattcacctgtgtaccctaaaagtcctagaataaatagttccaggcacatagtaagcactcagtaagt

SEQ ID NO: 134538 - DNA, 201 bp, Homo sapiens
aggagaatcgcatgcccccaggagacggaggttgcagtgagccgagatcgcgccaccgcactccacactccagcctgggcgacagaggtagaccctatctaaaaaaaaaaaaaaatgcttcggggccagtggggtagtctaggttaaagacccgagcctatttggagagaagagtggaggggactgcggccaactgcagag

SEQ ID NO: 134539 - DNA, 201 bp, Homo sapiens
atctgtgcacgcttctcaattgatttctttcccaatcagcctgataatatgtgactctagcacagcaaagaatcatcaacaacagaaccttttaattttawattattattattattattattatttagacaagatccttctctgtcacccaggctggagtgcagtggcacgattatagcccacagcaaccttgaactcctg

SEQ ID NO: 134540 - DNA, 201 bp, Homo sapiens
tgtgacaccatacttccttccttatattatcaccttagagaagggagaaggtaaaagggcaagcagaaatgaggaaaagagaggagaaatacatctataargctgggtgcagtggctcactcctgtaatcccagcattttgggaggccgaggcaggtagatcacctgagctcaggagttcgagactagcctgggcaacatg

SEQ ID NO: 134541 - DNA, 201 bp, Homo sapiens
ctgaattatgcacttagtgattaaaatgacaaattttatgttatatttttactataatttttttaaaagcctaaatctccagatagtgatatcatagttgtttttttttggttttcttaatattttgtgcatttttccagtcttgagtctatttattcttcttaaagcataaaatgtaaatagtaatcattaaaaattaac

SEQ ID NO: 134542 - DNA, 201 bp, Homo sapiens
tctcttctgtctttatagtttgcagccatcggccccactacggctcgcgcgctggccgcccagggccttcctgtaagctgcactgcagagagccccacgcmacaagccctggccactggcatcaggaaggctctccagccccatggctgctgctgagtcagccacctagcgctggccccatgcagcctccctgggctgggc

SEQ ID NO: 134543 - DNA, 201 bp, Homo sapiens
acctgtcacctcatttgatccccacagcagcccagtgaagagtcctgttatcttttcggtttgacagatgaggagatggaggccagagaggatgggccacsggccaaggtcattgtcctgtggagctgggatttaaatcccaaccctgtgcccacagagccctgaccttgatggctctactttcttggggattcagtcact

SEQ ID NO: 134544 - DNA, 201 bp, Homo sapiens
ctcagccggaggaaggagcctcagtcccgcagcatccgaggttatgcagaggtacaggtggcttgttacctccactaccacctggcctgctgctcacttgstgggagggaggatgaagcggagtgctgggcaggggctgccaatgttggatgctcacttgctcccaaacaggtttggggtccacagtctcaatgcagagga

SEQ ID NO: 134545 - DNA, 201 bp, Homo sapiens
agtacagagggggtttcaccatgttggccaggctggtctcgaactcctgacctcaggtgatctgcccacctcggcctcccaaagtactgggattacaggcrtgagctaccatgcctggcctctaaatacaaactttttatcagacatacgatttgtaaaaattttctcccattctgcgagttgtctttttacttttttgat

SEQ ID NO: 134546 - DNA, 201 bp, Homo sapiens; identical to SEQ ID NO: 23876

SEQ ID NO: 134547 - DNA, 201 bp, Homo sapiens
gggatggtagcaagtggttaggagactgagcatgggcttcagaccaggatccaaattccatctctcccacttactgtgctgtgtgacctgggacaagttastcaaacctcccagggacttggtttcacctcctgcaaataaggctaacaccacctaccttgcaggtttaagtgaggattgcagtcttgcatgtaaaatgct

SEQ ID NO: 134548 - DNA, 201 bp, Homo sapiens; identical to SEQ ID NO: 23782

SEQ ID NO: 134549 - DNA, 201 bp, Homo sapiens
ggatccactcttcccagcttgttagctcaagctaggagcacacagtgtgtctccagtccttcaccaagaggacaggagatcgagatgtggaggtggcccctgggcagataactgaggtgacaaaccatagaattggttccacatgtagaagaaagtctacaaatgtagccgatcttataatagcatgcagcaccctccagc

SEQ ID NO: 134550 - DNA, 201 bp, Homo sapiens
agtcttcccccactacctgcaccccactctaatcccaggctgcgtcaggcttcccctctgtgctgcagtgcacttatcaccctgtgtttcactgtctctgycctagactctgagcttcctgagggaaatactgggaataaggaattcacctgtgtaccctaaaagtcctagaataaatagttccaggcacatagtaagcac

SEQ ID NO: 134551 - DNA, 201 bp, Homo sapiens
atcctctttgaaaatcaggacttcagcattgatatcaccccctgaatattcccatttttattacagattcgggtcaagtcttcccccactacctgcacccyactctaatcccaggctgcgtcaggcttcccctctgtgctgcagtgcacttatcaccctgtgtttcactgtctctgccctagactctgagcttcctgaggg

SEQ ID NO: 134552 - DNA, 201 bp, Homo sapiens
taaatttatgcttctctgtaaacttatggccacagaatacatatttttttttttggaaagcactgtcactttggccctaaaggaacataagcaatataaagggccccagaggccaaggaaattgaagagaagtcagaagaagggatataaaatggaatgtgttaacggattttagtccctttaagtttgcacttttgtgag

SEQ ID NO: 134553 - DNA, 201 bp, Homo sapiens
gtaatcccaacactttgggaagccaaggtgggtggatcacctgaggtcaggagtttgaaactagcctggctaacatggcgaaaccccgtctctactaaaartacaaaaattagccgggcatgctggcacatgcctgtaatcccagctacttgggaggctgaggcaggagaatcgcttgaacccaggaggcagaggttgcag

SEQ ID NO: 134554 - DNA, 201 bp, Homo sapiens
aagccaaggtgggtggatcacctgaggtcaggagtttgaaactagcctggctaacatggcgaaaccccgtctctactaaaagtacaaaaattagccgggcrtgctggcacatgcctgtaatcccagctacttgggaggctgaggcaggagaatcgcttgaacccaggaggcagaggttgcagtgagccaagatcgtgccac

SEQ ID NO: 134555 - DNA, 201 bp, Homo sapiens
gtgggtggatcacctgaggtcaggagtttgaaactagcctggctaacatggcgaaaccccgtctctactaaaagtacaaaaattagccgggcatgctggcrcatgcctgtaatcccagctacttgggaggctgaggcaggagaatcgcttgaacccaggaggcagaggttgcagtgagccaagatcgtgccactgcactcc

SEQ ID NO: 134556 - DNA, 201 bp, Homo sapiens
tcgagatcacgccattgcactccagcctggggacagagtgagactccatctcaaaataaataaataaataaataaataaataaataaataaataaataataataaataaaggggaggtggagcccagccgggatgagaaggatgctggctaggtgggcaggggctgaggggaccctggagctgtgtctcctgacctctcac

SEQ ID NO: 134557 - DNA, 201 bp, Homo sapiens
gccgcacctccagctgcaaggagcccaggttgcccctggaatgggcagcctgtgacctctccaccagggactcaggccaccctggaccacaccactcccayggcctccagttttttcccttggggccggcttcccatctctctgctcatgccctccatccgggtgccctgcatagctctgcctcccaggctctgcccgggc

SEQ ID NO: 134558 - DNA, 201 bp, Homo sapiens
gtcgagatcacgccattgcactccagcctggggacagagtgagactccatctcaaaataaataaataaataaataaataaataaataaataaataaataataataaataaaggggaggtggagcccagccgggatgagaaggatgctggctaggtgggcaggggctgaggggaccctggagctgtgtctcctgacctctca

SEQ ID NO: 134559 - DNA, 201 bp, Homo sapiens; identical to SEQ ID NO: 23903

SEQ ID NO: 134560 - DNA, 201 bp, Homo sapiens
tgccactacactccagcctgggtgatagagtgagactctgtctcaaaaaaaaaaaaaagaaaaaaagaaatacctgaaggctggatgaggtggcccatgcytgtaatcctagcactttgggaggctaaggcaggtggatggcctgagctcaggagttcaagaccagcctgggcaacatggcaaaaccccagctctaccaaa

SEQ ID NO: 134561 - DNA, 201 bp, Homo sapiens
agtcgagatcacgccattgcactccagcctggggacagagtgagactccatctcaaaataaataaataaataaataaataaataaataaataaataaataataataaataaaggggaggtggagcccagccgggatgagaaggatgctggctaggtgggcaggggctgaggggaccctggagctgtgtctcctgacctctc

SEQ ID NO: 134562 - DNA, 201 bp, Homo sapiens
tggcccatgcctgtaatcctagcactttgggaggctaaggcaggtggatggcctgagctcaggagttcaagaccagcctgggcaacatggcaaaaccccakctctaccaaaaatagaaaaaattagacaggcatggttcttggcatgtgcctatggtcccagctactcaggtggctgaggtggaaggatcgcttgagccag

SEQ ID NO: 134563 - DNA, 201 bp, Homo sapiens
agctctgggagtcctaggcagttattgcatcttgggtggtttggggaaccccagtcttgcagttggtgtcagaagtgagtgcatcttgtgtagacagtgcvctgtaatttagcagtgcgttttcagtagaatgacatgtttcttggggggtctcttacatgcccgtctctcttttgttttgtagtgttccactggcaggcc

SEQ ID NO: 134564 - DNA, 201 bp, Homo sapiens
gaaggaggccagaggggtacggatggccccaggagtagggtctgcacgccgttgtggggatcgccacaccgacacaatcactctgctgccttgtggagaaraggctggggttcaagtgattctcctgcttcagcctcctgagtagctgggactacaggcactcgccaccacatgtggctaatttttgtgttatttttagta

SEQ ID NO: 134565 - DNA, 201 bp, Homo sapiens
atagagaaagtcaaatcagccctttggggtttgtggtaaaaattcactcacccattgaagcctaaggtggctttgtaccttccagatctctcagcaaatcycctgggcagaaatgtcacctgcttgccatgtctttgaggggttcaggtcagcctggagaacaggctccttaggtcaaaaaccttgttttaagagccactg

SEQ ID NO: 134566 - DNA, 201 bp, Homo sapiens
gtcatgaagtctttgggcctgagcttttctgctgatacatcaacaaaacatcactgctttttgcataaaacttcctgggcttttgagtcctttccaccacscttgttattcctcagagcatactgctttcagggagatggtatcaatccccctatgttcagaatgagaatccagcagggaatgggtcagggaacttctggg

SEQ ID NO: 134567 - DNA, 201 bp, Homo sapiens
ctcccctccccaccccttcttcccctgcttccattccccatggctctctcctctgactgtgaaacacttcctctccagcagtgttgggaaagttctggacytctactggatctagccataaatggtggtcttcagaaaaatggagattgtggctgccagcacccacaagacagcagcctcatgccatgcaggcagcaagcc

SEQ ID NO: 134568 - DNA, 201 bp, Homo sapiens
agaagtatttctaattctatcactttactatttgttaacattttagcatacctaccttcagttttttttctatatttaaaacaattatactgcattttgtrttccacttattcacataatagtaaatgtaagcatgttgtgaagtagtatttataactttttttttttttttttttgaggtcttgctctgtcgcccaggct

SEQ ID NO: 134569 - DNA, 201 bp, Homo sapiens
tggggtttacacatgaggggttcacccagctgggggtttacagccatgtctgatgtgctcctgctccagggaaagcctttattccactcacccatcagccrtagatgtttgacaagcagcagcagcagcattccccacatcagtcctgttctctgcagcacattgaagggaagtgaccatttcaagtgagggtgtcacttc

SEQ ID NO: 134570 - DNA, 201 bp, Homo sapiens
tgacatgtttcttggggggtctcttacatgcccgtctctcttttgttttgtagtgttccactggcaggccaccatcatgggcccggtaggtagtagctgckgagcgcaccactccagttttgcttcttgcactttgggcttagcacatgcactgatctctttctgtgtctcatccttccagaatgacagtccttaccaagg

SEQ ID NO: 134571 - DNA, 201 bp, Homo sapiens
caggaggatgtcgcttgagttcaataccagcctgggcaacagagcaagaccactagctctaaaaaaaaaaaaaaaaagctgggcctcgtggcatgtgcctktagtcccagctactcgggaggctaagacatgagggttgtttgagttcaggagttgaaggctgcagctgagttatgattgccactgcactacaacctgtgt

SEQ ID NO: 134572 - DNA, 201 bp, Homo sapiens
aacaagaccttgtctctaaaataaattttgtaaaatgaatttaacaaaaacaagatccagctatatgctgcctataaggaactcactaaaaagatgcatayagactaagtgatgggatgaaaaaagatattccactcaaatgtaaactaaaagcatgcaggactagctatacttatatcagacaaaatagactttaagtca

SEQ ID NO: 134573 - DNA, 201 bp, Homo sapiens
aaggaaattgaagagaagtcagaagaagggatataaaatggaatgtgttaacggattttagtccctttaagtttgcacttttgtgagagggttcaatggaragctttaatgcagatgagacttgaagcttttgaagaagatctaagtcttgatgaggttattcaaactcagatcttgaacgcataatgatgataggccatg

SEQ ID NO: 134574 - DNA, 201 bp, Homo sapiens
ttaaaaaaaggaaaggaaaaaaatttttcaagaggaagaaagtaacaaaggacatataaaacatcagaaaccaattaacaaaatgacaggaataagtcctmactcatcaataacaaccttgaatgtaaagagttcaaacttcccaattaaaatatatagccttgtttagccgggcatggtgccacatgcctgtaatctcag

SEQ ID NO: 134575 - DNA, 201 bp, Homo sapiens
gaatgagactctgtctcaaaaaaaaaaaaaaaaaaaaaattagtgccgggcgcggtggctcacgcctgtaatcccagcactttggaaggtcgaggcaggcrgatcacgagttcaggagttcgagaccagctgatcaacatagagaaaccccatctctactaaaaatacaaaattagccaggtgtggtggcgcatgcctgta

SEQ ID NO: 134576 - DNA, 201 bp, Homo sapiens
ctgtacacagcctgataaaagtaatttttaaatacaattaaagtttatgtgcaaagaaagcatttgtgttagtttatttgccagcatgttttttttttcctaattgtatgtaaagtaaaattgtgtcttataaaggatggagtcttggagttgacgaaacaccgtaaaggaataactgagtgtgtaccatggtttgcttaa

SEQ ID NO: 134577 - DNA, 201 bp, Homo sapiens
gccccctgcctgccaaactattctttaaaaatcttagcctccaaattttcggggaggctgatttgagtaataataaaactctagtctcccatttagctggytctatgtgtattatactctttctctgatcttgatagatcagctgtatctgagcaacaggaaagaagaacccattgagtggttacaggacagccaacagga

SEQ ID NO: 134578 - DNA, 201 bp, Homo sapiens
gagtgtttgggccatactgggctagccttgctgatacacaggagcttttctgggaatgggtagagcagtgaaagtcacctgagatgctggagagggtgtgmtgtgcagcaagagggggctctaaactctcaccaaatggtggtgacctggaagggaagcatgagaggggctcatcgtgaccttgttactgagtgcctagag

SEQ ID NO: 134579 - DNA, 201 bp, Homo sapiens
aaggaagtagccaaacaaactctgactacaaacagaggtcccagtgggtagggggctgggacaaagcttttgggggagggggaggacagaggaccttgggkctgggggatctaagctggcccctcaataaagggcctcctcgccacctcccagcccactgtcccacctctgcccttggctctgttccttgcctccctcctg

SEQ ID NO: 134580 - DNA, 201 bp, Homo sapiens
ctgtcccacctctgcccttggctctgttccttgcctccctcctgtctgaccccatctgcctcctacaggaggagcccacccacccccaaacacctcccagygttctgggcccagctccttcccaggcctcactggtgcgactcagctccagctggaagagcaggtccaggaagtccttggccagcccctgccccaggaaga

SEQ ID NO: 134581 - DNA, 201 bp, Homo sapiens
gtgagccaccacgcttggccaggttgtgcattttgtcaagacttactcgaaagtcctgcatctgcatcagaccccttagctgaggggttgtgatattgctrtgtcttactaccttgacttggccttgatgcctcaatttgagtcagaggcttagctgctgttttgcatgttgtttatctgagtcaatgtgaagaagcccct

SEQ ID NO: 134582 - DNA, 201 bp, Homo sapiens
ctacttccttcctgtccttcttatcttctcccttgccccagacaggtgtgcttgcaggcatccagctgcctgcatcagagctccccttgaaggcaggtgcrcagctgggctccacgttggagggcaacagcagagctgccacttatagccggtctttcaaccctgctgtcccccagcccacccacaatggctcaaaaggct

SEQ ID NO: 134583 - DNA, 201 bp, Homo sapiens
gcagctctgtccagacatcgccaccagaggctacctggtgcctgagcattttaaatctttgttaaatatgcttaggatcccagagaccttttaagcttttrgcaagggagtggagtgtgctgagcaggacaatgacagatgctaaaatagcttcaccacattggagtacaactgctgttcaagggagtttggttgaaaaat

SEQ ID NO: 134584 - DNA, 201 bp, Homo sapiens
aatccccatgctttgggaagctgaggcaggaggatgtcgcttgagttcaataccagcctgggcaacagagcaagaccactagctctaaaaaaaaaaaaaawaagctgggcctcgtggcatgtgcctgtagtcccagctactcgggaggctaagacatgagggttgtttgagttcaggagttgaaggctgcagctgagttat

SEQ ID NO: 134585 - DNA, 201 bp, Homo sapiens
ctgctttttgcataaaacttcctgggcttttgagtcctttccaccacccttgttattcctcagagcatactgctttcagggagatggtatcaatccccctrtgttcagaatgagaatccagcagggaatgggtcagggaacttctgggtgatcactcactcccatatcccattagagtttgggagtgggggtctggcttag

SEQ ID NO: 134586 - DNA, 201 bp, Homo sapiens
tctctgggaccccaagaatccaggcaccacaattccttctgctcctcaccacagccctagtgggtgattcccttcccctagggttgctgagagccacattragtgcacatcttagagacggtgctggcacagaggaggatgcatctgctttgcagttagaaggacctggttcagaatttctttattttttttttgagatcg

SEQ ID NO: 134587 - DNA, 201 bp, Homo sapiens
tccaggcaccacaattccttctgctcctcaccacagccctagtgggtgattcccttcccctagggttgctgagagccacattgagtgcacatcttagagayggtgctggcacagaggaggatgcatctgctttgcagttagaaggacctggttcagaatttctttattttttttttgagatcgagttttgctcttgttgcc

SEQ ID NO: 134588 - DNA, 201 bp, Homo sapiens
ccccgtctctactaaaagtacaaaaattagccgggcatgctggcacatgcctgtaatcccagctacttgggaggctgaggcaggagaatcgcttgaacccrggaggcagaggttgcagtgagccaagatcgtgccactgcactccagcctgggcaacagactctgtctgaaaaacaaacaaacacaaacaaaaccaaacaa

SEQ ID NO: 134589 - DNA, 201 bp, Homo sapiens
tgcatctgctttgcagttagaaggacctggttcagaatttctttattttttttttgagatcgagttttgctcttgttgcccagggtggagtgcaatggcgygatctcggctcactgcaacctccacctcccaggttcaagagattctcctgcctcagcctcctgagtagctgggattacaagcatgcaccactatgcctgg

SEQ ID NO: 134590 - DNA, 201 bp, Homo sapiens
gtcacccaggctggagtgcagtggcgtgatctcggctcactgcaacctctgcctcctggattcaagcaattctcctgcctcagcctcccaagtagctgggmttacaggcatgtgccacatgcccggctaatttttttgtatttttagtagagacgaggtttcaccatattggccaggctggtctcgaactcctgaccttgt

SEQ ID NO: 134591 - DNA, 201 bp, Homo sapiens
tccagttatgttaagtggcatcagagcattgattagcacttacggtatgcaagatatggtaggaggaaaagggaattatagacagaaaccatgtgaaagtwtaaaagtcactgatagactagatacacgaatgagaaacaaatcaagcattatcatcacagaaaaccaccaaatcgcaaaagataagaaagggatcaggca

SEQ ID NO: 134592 - DNA, 201 bp, Homo sapiens
tcacccaggctggagtgcagtggcgtgatctcggctcactgcaacctctgcctcctggattcaagcaattctcctgcctcagcctcccaagtagctgggaktacaggcatgtgccacatgcccggctaatttttttgtatttttagtagagacgaggtttcaccatattggccaggctggtctcgaactcctgaccttgtg

SEQ ID NO: 134593 - DNA, 201 bp, Homo sapiens
agaggacattttcccaaggggtggctggggatggggccctggacactggccagctcctcacatccccagacctcaggtttctgctctgcagaatgggtttrgaaggacaggcgcacaggcctactgccactggaccctcccaccctgcccaggccccctcacctgcatgcccagcttgacctcgtggcacagcaggtgcac

SEQ ID NO: 134594 - DNA, 201 bp, Homo sapiens
gccattctaactgctgtgagatagtatctcattgtggttttgatttgcatttctctgatgaccagtgatgatgagcattttttatgtgtctgttggctgcrtaaatgtcttcttttgagaagtgtctgttcatatcctttgcccactttttgatagggttgtttgattttttcttacaaatatgtttaagttctttgtaga

SEQ ID NO: 134595 - DNA, 201 bp, Homo sapiens
cgaatgagaaacaaatcaagcattatcatcacagaaaaccaccaaatcgcaaaagataagaaagggatcaggcatggtggctcatccctgtaatcccagcmctttggaaggctgaggtgggagaactgcctaaggtcaagagtttgagaccagccaaggcaacatagtgagaccctgtctcttattaaaaaaaggaaagga

SEQ ID NO: 134596 - DNA, 201 bp, Homo sapiens
ctcctcacatccccagacctcaggtttctgctctgcagaatgggtttagaaggacaggcgcacaggcctactgccactggaccctcccaccctgcccaggycccctcacctgcatgcccagcttgacctcgtggcacagcaggtgcaccagtggctggtagtagctggagggcagcaccgtctcgtcccgcagccgcacct

SEQ ID NO: 134597 - DNA, 201 bp, Homo sapiens
ttgctgagagccacattgagtgcacatcttagagacggtgctggcacagaggaggatgcatctgctttgcagttagaaggacctggttcagaatttctttwttttttttttgagatcgagttttgctcttgttgcccagggtggagtgcaatggcgcgatctcggctcactgcaacctccacctcccaggttcaagagatt

SEQ ID NO: 134598 - DNA, 201 bp, Homo sapiens
gtgctggacacacagccgtccacctgctcctaccctgttaaggatgggaactgggggagtgggggtctggggccttccacagagacacaaagctgaaccaytgagggctgtgggccacagcaaacaagccagagggcttcctagacaggctgccagatttagcaaaacgacccaagacacccagttaaatgtgaatatttt

SEQ ID NO: 134599 - DNA, 201 bp, Homo sapiens
gtaaagagttcaaacttcccaattaaaatatatagccttgtttagccgggcatggtgccacatgcctgtaatctcagctactcaggaggctgaggcaggasaatcacttgaacccgggaggtggaggttgcagtgagccaagatcatgccactgcactccagcttgggtgacagagtgagactctatctccaaaaaaatac

SEQ ID NO: 134600 - DNA, 201 bp, Homo sapiens
tgcctgtaatcctagcactttgggaggctaaggcaggtggatggcctgagctcaggagttcaagaccagcctgggcaacatggcaaaaccccagctctacmaaaaatagaaaaaattagacaggcatggttcttggcatgtgcctatggtcccagctactcaggtggctgaggtggaaggatcgcttgagccagacagagg

SEQ ID NO: 134601 - DNA, 201 bp, Homo sapiens
agaatcacttgaacccgggaggtggaggttgcagtgagccaagatcatgccactgcactccagcttgggtgacagagtgagactctatctccaaaaaaatmcaattaaaaaaatatatatatacacacacataatacccttgctgagtgggttagaaaaacaagatccaggcgaggcatggtgactcacaactgtaatccc

SEQ ID NO: 134602 - DNA, 201 bp, Homo sapiens
gcgcggtggctcacgcctgtaatcccagcactttggaaggtcgaggcaggcggatcacgagttcaggagttcgagaccagctgatcaacatagagaaaccscatctctactaaaaatacaaaattagccaggtgtggtggcgcatgcctgtaatcccagctactcaggaggctgaggcaggagaatcacttgaacccagaa

SEQ ID NO: 134603 - DNA, 201 bp, Homo sapiens
aattagccaggtgtggtggcgcatgcctgtaatcccagctactcaggaggctgaggcaggagaatcacttgaacccagaaggcggaggctgcagtgagccragattgtgccattgcactccagcctgggcaaccagagcaaaactccatctcaaaaaaacaaaaaacaaaaaaaacacacaaacctaaactgcctctgtaa

SEQ ID NO: 134604 - DNA, 201 bp, Homo sapiens
ctactcgggaggctgaggcataagaatcgcttgaacccaggagatggaggttgcagtgaaccaagatggcgccacggcactccaacctgggtgacagagcraaatcctgtctcaaaaaaataataaaaataaaatacataataaaaaaataataatagaaaaaaagaaaattaaagaaaatttggaaaatgcccccaaaat

SEQ ID NO: 134605 - DNA, 201 bp, Homo sapiens
aacgacccaagacacccagttaaatgtgaatattttatttacttattttttttttttagagatggggtcttgctatgttgcccaggctggtcttgaactcstgggctcaagtgatcctcctgccttggcctcccaaagtgctgagattataggcatgcgccaccatacccggcctaaatttgaatatttttagtataggta

SEQ ID NO: 134606 - DNA, 201 bp, Homo sapiens
caggaggatcgcttgaggtcaggagtttgagaccagcctggccaacatggtgaaactcatctctactacaaatacaaaaattagctgggcatggtggtgcrttcctgtaatcagtcccagctactctggagggtgagacaccagaattgcttgaacccagtaggcagaggttgcagtgagccgagatggtgccagtgtact

SEQ ID NO: 134607 - DNA, 201 bp, Homo sapiens
gagaattctgaatacggaggctccagtgagcattcctgattgggtgttctgtgtgtgttgccatacagcaatgccaggagagtaacacatcctgactccayggagagagaagaatagaaactctgcgtttggaccctcctgatgttaacctatgttgtttccctgtgataaccagcaatcttaagcacaaccactttcagt

SEQ ID NO: 134608 - DNA, 201 bp, Homo sapiens
gaggtgaaagtgatttcctcagtgacggagcttggattcagacctgagtcttctaaccctgaggtgagcacaggaattcgatgtgtgagtggactagtttstttcaagtcacaccattcttccttgaaatgccagttagtattcgaaactcctgggtgctggttggagtctaacaatagggatccacacgtggcctttcag

SEQ ID NO: 134609 - DNA, 201 bp, Homo sapiens
caggttgcccctggaatgggcagcctgtgacctctccaccagggactcaggccaccctggaccacaccactcccatggcctccagttttttcccttggggmcggcttcccatctctctgctcatgccctccatccgggtgccctgcatagctctgcctcccaggctctgcccgggctatttattttctgtttttggaaagc

SEQ ID NO: 134610 - DNA, 201 bp, Homo sapiens
aactttgggaggccaaggcaggcagatcacttgaggtcatgagttcaagaccagcctggctgacacggcaaaaccccatctctattaaaatatatatatawaaattagccaggcattgtggcaggtgcctgtaatcgcagctactcgggagactgaggcaggagaagcgcttcaacccaggaagcagaggttgcagtgagc

SEQ ID NO: 134611 - DNA, 201 bp, Homo sapiens
agatggcaagatgggccttggctggttctatggaaacaccttgtgctggacacacagccgtccacctgctcctaccctgttaaggatgggaactgggggartgggggtctggggccttccacagagacacaaagctgaaccattgagggctgtgggccacagcaaacaagccagagggcttcctagacaggctgccagatt

SEQ ID NO: 134612 - DNA, 201 bp, Homo sapiens
caacttaggccaggtgcggtggctcacgcctgtaatcccaacactttgggaagccaaggtgggtggatcacctgaggtcaggagtttgaaactagcctggmtaacatggcgaaaccccgtctctactaaaagtacaaaaattagccgggcatgctggcacatgcctgtaatcccagctacttgggaggctgaggcaggaga

SEQ ID NO: 134613 - DNA, 201 bp, Homo sapiens
atccccatgctttgggaagctgaggcaggaggatgtcgcttgagttcaataccagcctgggcaacagagcaagaccactagctctaaaaaaaaaaaaaaawagctgggcctcgtggcatgtgcctgtagtcccagctactcgggaggctaagacatgagggttgtttgagttcaggagttgaaggctgcagctgagttatg

SEQ ID NO: 134614 - DNA, 201 bp, Homo sapiens
tatatgtggcagcatttcaattttttaatggttttttttctctttgatacgtgtattagtccattcttgcattgctgttaggaaatacctggccaggcacwgtggctcatgtctgtaatcccagcattttgggaggctgaggcgggcagatcatctgaggttaggtcctggtcaacatggtgaaaccccatatccactaaa

SEQ ID NO: 134615 - DNA, 201 bp, Homo sapiens
aatcccaacactttgggaagccaaggtgggtggatcacctgaggtcaggagtttgaaactagcctggctaacatggcgaaaccccgtctctactaaaagtmcaaaaattagccgggcatgctggcacatgcctgtaatcccagctacttgggaggctgaggcaggagaatcgcttgaacccaggaggcagaggttgcagtg

SEQ ID NO: 134616 - DNA, 201 bp, Homo sapiens
ttttttttagagatggggtcttgctatgttgcccaggctggtcttgaactcctgggctcaagtgatcctcctgccttggcctcccaaagtgctgagattayaggcatgcgccaccatacccggcctaaatttgaatatttttagtataggtatgtctcaaatagtgcatggtcattcttcttctttatttatttatttttt

SEQ ID NO: 134617 - DNA, 201 bp, Homo sapiens
gggggtctggcttagcctgcactgtggggccaggtatgcagcacactccaggtactgcccagcagcagctgcttctgctttacttggttcatttcccacaygtccctgtggtttgtctgattggggatctcttgtctttgcaggttgctttcacaaccaaaatttatcaccctaatatcaacagcaatggcagcatctgcc

SEQ ID NO: 134618 - DNA, 201 bp, Homo sapiens
atccgggtgccctgcatagctctgcctcccaggctctgcccgggctatttattttctgtttttggaaagcccttcctgtctctgcactcaaggcacctctmtctgtcttcgaggtctggctccctgccacctccaagcttgggtatgtggagctgccagccttgaatcgatcaactcccagataatggcaccatcatgggt

SEQ ID NO: 134619 - DNA, 201 bp, Homo sapiens
cttggggggtctcttacatgcccgtctctcttttgttttgtagtgttccactggcaggccaccatcatgggcccggtaggtagtagctgctgagcgcaccmctccagttttgcttcttgcactttgggcttagcacatgcactgatctctttctgtgtctcatccttccagaatgacagtccttaccaaggaggtgttttc

SEQ ID NO: 134620 - DNA, 201 bp, Homo sapiens
aacgggggacaagtcccctcactctgagagaggcctggacattcctctcccctgctaggactcactagaaggccaaccactgtggccccagaggatgggasaggggagattcctggagagaggggagggccagggagacatgcttccatgcctcccatctccgtgggtgacgatgggtgcctgggagaagtggccccgagg

SEQ ID NO: 134621 - DNA, 201 bp, Homo sapiens
atgggtgcctgggagaagtggccccgaggtcccagagcccggccacgtgtgtgagcgggtgcacacgtgtgcatgcctgtcccccagacagcctggtgccyagaaaggataaggatggaagaagcaggtgagttggggtggggcgggggggaatgaatggcagggccagagagtgagcgagtgtgggggcgtggctgaggc

SEQ ID NO: 134622 - DNA, 201 bp, Homo sapiens
tgggtgcctgggagaagtggccccgaggtcccagagcccggccacgtgtgtgagcgggtgcacacgtgtgcatgcctgtcccccagacagcctggtgcccrgaaaggataaggatggaagaagcaggtgagttggggtggggcgggggggaatgaatggcagggccagagagtgagcgagtgtgggggcgtggctgaggct

SEQ ID NO: 134623 - DNA, 201 bp, Homo sapiens
  misc_feature (1)...(201): n = A,T,C or G
cagtccctattattttctcccacttccactcttccctggcggagactgaagcagcagctctgggcagcttcttgggagagagagggagaagcagcactgcntgttccaggcctctgctgtccctcacaggtgctggccgaggctgagctgcccagcactagggtttccaggtctgtcctctgcccactcaccttgcctcca

SEQ ID NO: 134624 - DNA, 201 bp, Homo sapiens
ggccccgaggtcccagagcccggccacgtgtgtgagcgggtgcacacgtgtgcatgcctgtcccccagacagcctggtgcccagaaaggataaggatggargaagcaggtgagttggggtggggcgggggggaatgaatggcagggccagagagtgagcgagtgtgggggcgtggctgaggctcggcccaagcccagacat

SEQ ID NO: 134625 - DNA, 201 bp, Homo sapiens
gaggtcccagagcccggccacgtgtgtgagcgggtgcacacgtgtgcatgcctgtcccccagacagcctggtgcccagaaaggataaggatggaagaagcrggtgagttggggtggggcgggggggaatgaatggcagggccagagagtgagcgagtgtgggggcgtggctgaggctcggcccaagcccagacattttcca

SEQ ID NO: 134626 - DNA, 201 bp, Homo sapiens
gccatacagcaatgccaggagagtaacacatcctgactccacggagagagaagaatagaaactctgcgtttggaccctcctgatgttaacctatgttgttyccctgtgataaccagcaatcttaagcacaaccactttcagtgagctctgggagtcctaggcagttattgcatcttgggtggtttggggaaccccagtctt

SEQ ID NO: 134627 - DNA, 201 bp, Homo sapiens; identical to SEQ ID NO: 23901

SEQ ID NO: 134628 - DNA, 201 bp, Homo sapiens
ccccttagtttccaatccacagccctttctaaccaacttcaaccctttaaaaaaatgttttcaaatgaatgtttcaaattgaatatttttagatgcacttkttagttagttagttagttagttagttttttgagacagggtcttgctctgttacctaggctgtagtgcagtggctcaatcatagctcactgcagccttgac

SEQ ID NO: 134629 - DNA, 201 bp, Homo sapiens; identical to SEQ ID NO: 23899

SEQ ID NO: 134630 - DNA, 201 bp, Homo sapiens
gagtggactagtttctttcaagtcacaccattcttccttgaaatgccagttagtattcgaaactcctgggtgctggttggagtctaacaatagggatccayacgtggcctttcagggatcattaagtgctggtgtaactgttcatcacacctctaaagggggaacatggattctgcatataggcagtgcaaaagcatagag

SEQ ID NO: 134631 - DNA, 201 bp, Homo sapiens
tagttagttagttagttttttgagacagggtcttgctctgttacctaggctgtagtgcagtggctcaatcatagctcactgcagccttgacctcctgggcycaagcagtcctcccacttagctttcccagtagctgggattacaggtgcctgccaccacatctggctaatttaaaattttttgtagagagtggatttcacc

SEQ ID NO: 134632 - DNA, 201 bp, Homo sapiens
aggttcgtggccacgtcctggcgacactcggtgctggttgtctcctcgatgagtgggatcagctgccctgggccctgcagggagaggcacgggggatcccraacctttccctctgaggacctcagagcatcccagggaaagaggacattttcccaaggggtggctggggatggggccctggacactggccagctcctcaca

SEQ ID NO: 134633 - DNA, 201 bp, Homo sapiens; identical to SEQ ID NO: 23898

SEQ ID NO: 134634 - DNA, 201 bp, Homo sapiens
ggttttatgctctgctgtcactatcaggaaattcttaataattatcgaacttgagaccctacattttcacattcacaaggccctgcaaattctgtagcaaktcctggggaaaaacaacagaattgtaggaaatacaactttaaaagtgtgtcaagcctgccgtggtgagatggcaccattgggccaccactagttaggatg

SEQ ID NO: 134635 - DNA, 201 bp, Homo sapiens
ggttgcccctggaatgggcagcctgtgacctctccaccagggactcaggccaccctggaccacaccactcccatggcctccagttttttcccttggggccrgcttcccatctctctgctcatgccctccatccgggtgccctgcatagctctgcctcccaggctctgcccgggctatttattttctgtttttggaaagccc

SEQ ID NO: 134636 - DNA, 201 bp, Homo sapiens
actctgactacaaacagaggtcccagtgggtagggggctgggacaaagcttttgggggagggggaggacagaggaccttggggctgggggatctaagctgscccctcaataaagggcctcctcgccacctcccagcccactgtcccacctctgcccttggctctgttccttgcctccctcctgtctgaccccatctgcctc

SEQ ID NO: 134637 - DNA, 201 bp, Homo sapiens
gctgggggatctaagctggcccctcaataaagggcctcctcgccacctcccagcccactgtcccacctctgcccttggctctgttccttgcctccctcctstctgaccccatctgcctcctacaggaggagcccacccacccccaaacacctcccagtgttctgggcccagctccttcccaggcctcactggtgcgactca

SEQ ID NO: 134638 - DNA, 201 bp, Homo sapiens
ggccctgcagggagaggcacgggggatcccgaacctttccctctgaggacctcagagcatcccagggaaagaggacattttcccaaggggtggctggggayggggccctggacactggccagctcctcacatccccagacctcaggtttctgctctgcagaatgggtttagaaggacaggcgcacaggcctactgccactg

SEQ ID NO: 134639 - DNA, 201 bp, Homo sapiens
cagggtcaacctccgtcaggtgggcccacccgctgaaacctgtggggtcagctcagccagggacacggccctgaacccccataccctccaccctcagcccyaccaggcaccttgaggcacctccataatctcctgggaatcccctaggcacccgtgaagcaggggctggtatccccaatgacagatggggaaactgaggct

SEQ ID NO: 134640 - DNA, 201 bp, Homo sapiens
ccaggcaccttgaggcacctccataatctcctgggaatcccctaggcacccgtgaagcaggggctggtatccccaatgacagatggggaaactgaggctcmgcaggtgaagaaacagcagttggaagagctgggattagaatctaagtcagtgacctggggcctgtgccctcactattgtgtcatttttgtcgttgttgtt

SEQ ID NO: 134641 - DNA, 201 bp, Homo sapiens
caccccttgaggccggctgcccagctccatgcacttactcgtcatgctgccggctcttggactggtcgggctgcagccggaaccagccctcctcctgctgygccacccgcagtctctggacatcgatcaccacctggggacatagtggcagttttcctggagctgggagacttaggtctcctccttgccaactactgttct

SEQ ID NO: 134642 - DNA, 201 bp, Homo sapiens
tgcaacctccaccttctgggttcaagcaattctcctgcctcagcctccctagtagctgggattacaggtgtgcaccaccacgcctggctaattttttgtakttttagtagagacgagacttcactatgttggctaggctggtctcaaactcctgacctcaggtgatctgcctgcctcggcctcccaaagtactgggattac

SEQ ID NO: 134643 - DNA, 201 bp, Homo sapiens
tgtcagcccccaccccaccccttgaggccggctgcccagctccatgcacttactcgtcatgctgccggctcttggactggtcgggctgcagccggaaccarccctcctcctgctgcgccacccgcagtctctggacatcgatcaccacctggggacatagtggcagttttcctggagctgggagacttaggtctcctcctt

SEQ ID NO: 134644 - DNA, 201 bp, Homo sapiens
agctaaaaggaactgttccacagagatttctgtagctcttgcatttctgagcctgtccttggtccccttgtatgacctcacttgttccccaagttaaattmtcttttggccactcctaatgctgcttcctgagtgcttgccaagtataattcattttacttatgaggaaatgggttcagatatattagatactaatcgaga

SEQ ID NO: 134645 - DNA, 201 bp, Homo sapiens
ctgcactccagcctgggtgacaagcgagactgtatctcaaaaaaaataaaaaagaaagaaaaaagagagggtctggggaggttttctggacttgaagatgyttcttgggtgatttccactcaaggggatatgtcccttaagggacagtctaatgttctcatggaggaactggagccatcacagaggagtggagtagggggt

SEQ ID NO: 134646 - DNA, 201 bp, Homo sapiens
aataaataaataaataaataaataaataaataaataataataaataaaggggaggtggagcccagccgggatgagaaggatgctggctaggtgggcagggkctgaggggaccctggagctgtgtctcctgacctctcacccctgagcagcccccctgccctgcctgcctgtagccaattcccaaatgtcagcccccacccc

SEQ ID NO: 134647 - DNA, 201 bp, Homo sapiens
aaccccctcccaccctcctctgggcagatcgtgaagaagtcatgctacccacgctggaatgagacgtttgaatttgagctgcaggagggggccatggaggsgctgtgcgtggaggcctgggactgggaccttgtcagccgaaacgacttcctgggcaaagtgagcaccaccgccccgccccccctcctcccccggcaggct

SEQ ID NO: 134648 - DNA, 201 bp, Homo sapiens
cgagatcacgccattgcactccagcctggggacagagtgagactccatctcaaaataaataaataaataaataaataaataaataaataaataaataataataaataaaggggaggtggagcccagccgggatgagaaggatgctggctaggtgggcaggggctgaggggaccctggagctgtgtctcctgacctctcacc

SEQ ID NO: 134649 - DNA, 201 bp, Homo sapiens
ctactttcaactaacgattagcatgaattggaataaaaacagtcaaaagcaaaaaaaagtgatatttttattaactcaggcaggcttattacaggtaaagktgttcttttcagcaccatttctttgaaatattgaaaagggctcatgggccaccttgactacttttgaacacctctaggggcttgggaaacttctgcttta

SEQ ID NO: 134650 - DNA, 201 bp, Homo sapiens
aactggagccatcacagaggagtggagtagggggtacgggtgaggagaccccgaactctgatcacacagcctcagtcccccagtgctaaggccggcttccyaatgtttaacgccagtgtgaacttggcctggtgggagtgtgtgtaagtgggtccctcgtggggctgggggggtgaaaagagttgctgaaaatctcccgat

SEQ ID NO: 134651 - DNA, 201 bp, Homo sapiens
gatgagtgggatcagctgccctgggccctgcagggagaggcacgggggatcccgaacctttccctctgaggacctcagagcatcccagggaaagaggacaktttcccaaggggtggctggggatggggccctggacactggccagctcctcacatccccagacctcaggtttctgctctgcagaatgggtttagaaggaca

SEQ ID NO: 134652 - DNA, 201 bp, Homo sapiens
actggagccatcacagaggagtggagtagggggtacgggtgaggagaccccgaactctgatcacacagcctcagtcccccagtgctaaggccggcttcccwatgtttaacgccagtgtgaacttggcctggtgggagtgtgtgtaagtgggtccctcgtggggctgggggggtgaaaagagttgctgaaaatctcccgatg

SEQ ID NO: 134653 - DNA, 201 bp, Homo sapiens
gccaccccccaacccccagggtatttttagctgcaggctgcactcccgtctgggcctgggtctgagtcacactctgtccgtgagaagcgtcttcccttccrgctccaaagccacctccccaagtcgctccctgcctgtgaggcaggagggtggcccccagccaggcagccctatggagccagtgttccccccacccttgag

SEQ ID NO: 134654 - DNA, 201 bp, Homo sapiens
aggagcccaggttgcccctggaatgggcagcctgtgacctctccaccagggactcaggccaccctggaccacaccactcccatggcctccagttttttccsttggggccggcttcccatctctctgctcatgccctccatccgggtgccctgcatagctctgcctcccaggctctgcccgggctatttattttctgttttt

SEQ ID NO: 134655 - DNA, 201 bp, Homo sapiens
caacccccagggtatttttagctgcaggctgcactcccgtctgggcctgggtctgagtcacactctgtccgtgagaagcgtcttcccttccggctccaaasccacctccccaagtcgctccctgcctgtgaggcaggagggtggcccccagccaggcagccctatggagccagtgttccccccacccttgaggggtcagcc

SEQ ID NO: 134656 - DNA, 201 bp, Homo sapiens
ttttagctgcaggctgcactcccgtctgggcctgggtctgagtcacactctgtccgtgagaagcgtcttcccttccggctccaaagccacctccccaagtygctccctgcctgtgaggcaggagggtggcccccagccaggcagccctatggagccagtgttccccccacccttgaggggtcagcctgtctaagaggaaga

SEQ ID NO: 134657 - DNA, 201 bp, Homo sapiens
ttgggcttagcacatgcactgatctctttctgtgtctcatccttccagaatgacagtccttaccaaggaggtgttttcttcctgaccatccactttcctayagattacccgttcaagcccccaaaggtgaggtccctctcccaactcccctgatgtttggatgaaggacagcatgtgacaaggggcccttcaagtcaggta

SEQ ID NO: 134658 - DNA, 201 bp, Homo sapiens
ctccaccagggactcaggccaccctggaccacaccactcccatggcctccagttttttcccttggggccggcttcccatctctctgctcatgccctccatycgggtgccctgcatagctctgcctcccaggctctgcccgggctatttattttctgtttttggaaagcccttcctgtctctgcactcaaggcacctctatc

SEQ ID NO: 134659 - DNA, 201 bp, Homo sapiens
ttgtttattttttgtagagacagtgtctcgatatgttgcccaggctggtctcatactcctgggcttaagcggtcctcttgcctctgcctcctaaagtggcrggattacaacgtgagacaccatgcccagtcctataactaatttttaacattaactttccacaagtacatgactagtaacttatttagtcattacctgtag

SEQ ID NO: 134660 - DNA, 201 bp, Homo sapiens
ctgggcttaagcggtcctcttgcctctgcctcctaaagtggcgggattacaacgtgagacaccatgcccagtcctataactaatttttaacattaactttycacaagtacatgactagtaacttatttagtcattacctgtagtaggtaaaagtatggacttgggtgtcagacagacctgggttagagaatgtgaggtcac

SEQ ID NO: 134661 - DNA, 201 bp, Homo sapiens
tggcatttgtgtagtaaagaatttaatcttggctaagcacagtgtctcacgcctgtaatcccagcactttgggaggctgaggctagcagatttcttgagcmcagcctgggcaacatggtaaaaccccatctctacaaaacaataacaacaaaaagaatttaatcttgtccccaaaagatctggccttcatccttaacacgt

SEQ ID NO: 134662 - DNA, 201 bp, Homo sapiens
tgaggtcaggagtttgagaccagcctggccaacatggtgaaactcatctctactacaaatacaaaaattagctgggcatggtggtgcgttcctgtaatcartcccagctactctggagggtgagacaccagaattgcttgaacccagtaggcagaggttgcagtgagccgagatggtgccagtgtactccagtctgggcaa

SEQ ID NO: 134663 - DNA, 201 bp, Homo sapiens
caaattcttcatagccacagaaaggaaggtaccacctaccctcaagttggtgagactgggtcatttttttttttctggaatacgtgcaaatagattgtgtrtcatgggcctttgcagaataagtattcatggcttgaaagaaaactccaggaagagtagtagaggactctaagaattgccacattaccattgttttggaag

SEQ ID NO: 134664 - DNA, 201 bp, Homo sapiens
ttcatctaccatgcagaaaaaggttgggggtgggggttgcaaaggaagtagccaaacaaactctgactacaaacagaggtcccagtgggtagggggctggsacaaagcttttgggggagggggaggacagaggaccttggggctgggggatctaagctggcccctcaataaagggcctcctcgccacctcccagcccactg

SEQ ID NO: 134665 - DNA, 201 bp, Homo sapiens
tgagactgggtcatttttttttttctggaatacgtgcaaatagattgtgtatcatgggcctttgcagaataagtattcatggcttgaaagaaaactccagraagagtagtagaggactctaagaattgccacattaccattgttttggaagacacagaggatgatattgtgtagacatcaatgactcagtgttgggctctg

SEQ ID NO: 134666 - DNA, 201 bp, Homo sapiens
tgaggctcagcaggtgaagaaacagcagttggaagagctgggattagaatctaagtcagtgacctggggcctgtgccctcactattgtgtcatttttgtcrttgttgtttttagagacagggtctcaccctgtgagccaggtgtggtggcgcatgcctgtaatcccagctcctcaggaggctgaggcaggagaattacttg

SEQ ID NO: 134667 - DNA, 201 bp, Homo sapiens
tgggattacaggtgcaggccaccatgcccagctaatttccgtttttgtttgtttgtttgagagtgggtctcgcactgtcacccaggctggagtgcagtggygcgatcttggctcctggcaacctccacctcccaggttcaagcgattctgcctcagcctcccgaatacctgggattacaggtgtgcaccatcacacttgga

SEQ ID NO: 134668 - DNA, 201 bp, Homo sapiens
tttttttttttcccacaagaagaaaaagtacattttatttaatgaccaagtacacacacacattcacacacatgcatatgtacatataactaaaaaaaatwttttttctcatcacatgggatgcattgtgaaatattctacattctttcatttaaagaaaaatgctggtcacgttttagtaaaaatctttcacaaatcact

SEQ ID NO: 134669 - DNA, 201 bp, Homo sapiens
cggctgagccggcagcgggccgcctcaggcagccccggccgggccgcccgggtccccggcagcggggtaggatggcgctaaagcggatccagaaggtacgmactttcccaccctccaactctttgggtgtccgaagcgtcgaggtgtgggcggggcgccgctgccgtgaagtgaaaggtgacggaggctccgcgagtcgcg

SEQ ID NO: 134670 - DNA, 201 bp, Homo sapiens
gcgaaactgttggggattggaggctcccaaaagaccccagatgctctgccctgcccatggcatcaccctctaaagcgattcttgtgcctcagcctcctgartagctggttataggcacatgccaccaagcccagctaagttttgtatttgtagtagagacagggtttcaccatgttggccaaactggtctcgaactcctga

SEQ ID NO: 134671 - DNA, 201 bp, Homo sapiens
tgggggggacaaatatccaaaccagatcaaccatcattgtacaatgagccttttccttaattcacattactgggtttgattgccagaggtggaattacagratctctgagagtatgactcttttttttttttttaaataaatagctgtccaaaagagagataattctgatgagttattctctgaaaggggtcatctgtcat

SEQ ID NO: 134672 - DNA, 201 bp, Homo sapiens
tggatgaggtggcccatgcctgtaatcctagcactttgggaggctaaggcaggtggatggcctgagctcaggagttcaagaccagcctgggcaacatggcraaaccccagctctaccaaaaatagaaaaaattagacaggcatggttcttggcatgtgcctatggtcccagctactcaggtggctgaggtggaaggatcgc

SEQ ID NO: 134673 - DNA, 201 bp, Homo sapiens
gatgaggtggcccatgcctgtaatcctagcactttgggaggctaaggcaggtggatggcctgagctcaggagttcaagaccagcctgggcaacatggcaaraccccagctctaccaaaaatagaaaaaattagacaggcatggttcttggcatgtgcctatggtcccagctactcaggtggctgaggtggaaggatcgctt

SEQ ID NO: 134674 - DNA, 201 bp, Homo sapiens
ctggtgttcctcagcttgtagacacatcacgcccgtccctgcctccgtcttcatgtggcatcctcccttctgtgtctctgtatgtctcaatttccctcttkctctcataaggacacaggtcattagatctagggcccaatctaaagccaagatgatatcatttaaagaaccctaattagatattaatttaaaattttaaaa

SEQ ID NO: 134675 - DNA, 201 bp, Homo sapiens
agagagagtccatttcatgcctgtctcccagcccctggccgttgctggcaattcctggtgttcctcagcttgtagacacatcacgcccgtccctgcctccrtcttcatgtggcatcctcccttctgtgtctctgtatgtctcaatttccctctttctctcataaggacacaggtcattagatctagggcccaatctaaagc

SEQ ID NO: 134676 - DNA, 201 bp, Homo sapiens
cttcaggccatggggacagctggtgattagttacagagtttattttttaggttttgtttttgttttgaaattatgaagtaattcatccttgctatttaaamaagtcctgtgttgtgtaaagtaaaaagctgaatcgccctttgcccatcaacgagctactaatagctactactaatagtctggtatttcccagacattttt

SEQ ID NO: 134677 - DNA, 201 bp, Homo sapiens
gtgtccatgtggtctctcagggctggattaatcatcctgactgcaactcggatccaccctcccttcttctgagacgccctcatggttttcttggttcttasagcaccaaattcagactcaggtcccttcatgtctaggctccccactgcctttctgttgttatttcccaacatattccattccatgcttggcttctagcca

SEQ ID NO: 134678 - DNA, 201 bp, Homo sapiens
gcaacccccatcctgctttttttttttttttttttttttttttgctagggctgtgtcttatatagcaccttcagctgctacctacagcagacgtgctgtaractgtgtgtcctggcccctggcaacccccatcctgcttttttctctatgaattggactcctctagggacctaatgtaagtggaatcacaatatttgtctt

SEQ ID NO: 134679 - DNA, 201 bp, Homo sapiens
cttgattgttttagggagtggctgaggctgaactggaacagaacctgagtcggactttcaaaagcctcttcagagcaagcgatgaggtgaggggtggggaygggtgcagaagaacaggagggggcagttgtgaaggaagtagggtacctagtgtgtggcagggaccaggagtagcaatctggcctccttttctttcatttc

SEQ ID NO: 134680 - DNA, 201 bp, Homo sapiens
gagggaagcaaagagggagtatccgcctaggactgatgggaccatgctggagtgtgcctgtttgttttctagatccctgctctggcccaggcaggttaccrggtcctagctatggacatgaaaggctatggagagtcatctgctcctcccggtgggtgtgctgtcttgcagctgtcttatgctggtcttgccttctacctg

SEQ ID NO: 134681 - DNA, 201 bp, Homo sapiens
ggttaaactcctctgaccctgcaggccatgctcttgtcactgctcaaagaacatctcccttccctcccccacacccacattcccttattccttcacaccgwctgtcactcattcattcacccattcattcattcctcaaatgctgtgagcacaggctgggtatgaagctggggctgcatgctcagctacccagacacacga

SEQ ID NO: 134682 - DNA, 201 bp, Homo sapiens
ttgtggtatttaatgggggttcccctggaggttaggaaccccctttccatattgcagcattgggcatgtaggattagataagcatacttgttatctgtatrcacatttatttttttttctttcccagttctaaggctcaggtaagcaccactagttctgctaactgggtgcaggtccctggggaaagaggcttactttcaa

SEQ ID NO: 134683 - DNA, 201 bp, Homo sapiens
gggcagacttctttaagacactccatgccccctgctgggaagtctctgtaatgagtatagaaagctgcaagagctttgccagggaagatgctgtcttagatgtggcatttctcccgtgccccaccaccgtccacagcagccctgtataaatgggcttatttcagctccatggcaaagttaccgggtagtgccctgtggctc

SEQ ID NO: 134684 - DNA, 201 bp, Homo sapiens
tgtgcctgaaaaagccggcaactgtggttggtccaggagctgtgataatagcccgtgaagtcgtggctaggtgggagggaacatcaggctccagtgtgacygtgagatcacagctttgagctttcgaggagatgggatcactctggcaaaggataagggaacaaaagatggaggcactcataaggccttgcgcaagttcag

SEQ ID NO: 134685 - DNA, 201 bp, Homo sapiens
agaaaaggcttttctgggacttaaagctactgctcagcgccactgacatcccttctataactctgggttctcctgaaggggtgagtgtttaatcagggccytctggtctcatctctctggtggtaaagaggagtgaggggcttttcgcccagggctgggggctggattgtaaccgtggacagggttattctcataattccc

SEQ ID NO: 134686 - DNA, 201 bp, Homo sapiens
gtgtggacagttcagtgatgttaagaaaatgtacactgtcgtgcagtcatcaccaccactcacctccagaactttttcatctccctcacatgaaactctgsaccatcaaacaccaactttccattcaatggcatgccctggcccctggcaacccccatcctgctttttttttttttttttttttttttttgctagggctgt

SEQ ID NO: 134687 - DNA, 201 bp, Homo sapiens
gaggagtcttagagcttgtccagggcaaaatccaccctctactgataaggaccccaggattgagagcttacctctatgggggtcacctcgtgtatgcaggyggagtggagtggggcccctgcccaggtctcctccattgcagtccactggcccctctccatccaggcgccatgtttccaattcccccacctggagctcatc

SEQ ID NO: 134688 - DNA, 201 bp, Homo sapiens; identical to SEQ ID NO: 23928

SEQ ID NO: 134689 - DNA, 201 bp, Homo sapiens
aagatcttaagcagtaagagcttggaggagtcttagagcttgtccagggcaaaatccaccctctactgataaggaccccaggattgagagcttacctctaygggggtcacctcgtgtatgcaggtggagtggagtggggcccctgcccaggtctcctccattgcagtccactggcccctctccatccaggcgccatgtttc

SEQ ID NO: 134690 - DNA, 201 bp, Homo sapiens
tctaaaaaaaataaaaataaaaaaagtaacctctcaacgtgtgcaagcactgaggactgcaggtcgctggaacgaaagctttgtggatgtggctttaggawcttcctgtcctctgactctatctcaaaggcagccacagatgctgctgagaacaggatgagtccccaccactaaggggatcccaggagagcacattcaagg

SEQ ID NO: 134691 - DNA, 201 bp, Homo sapiens
gaccatcaaacaccaactttccattcaatggcatgccctggcccctggcaacccccatcctgctttttttttttttttttttttttttttgctagggctgkgtcttatatagcaccttcagctgctacctacagcagacgtgctgtagactgtgtgtcctggcccctggcaacccccatcctgcttttttctctatgaatt

SEQ ID NO: 134692 - DNA, 201 bp, Homo sapiens
cttgcctctttctctgcagtcagtgaacagggagacaagaatttatactagtgttagtgccagggccggggaactggcagcaagagtgggatgttcaaggycatcctgacctcacttttgagagtaagtatggagaacgtttaccctaaggatcagggcccctacctggcatgtcgagcatgccgctggcactcaggtgca

SEQ ID NO: 134693 - DNA, 201 bp, Homo sapiens
cattggcaccattataattgaatcttacaaaacggagggaactgtcattaacaggcagacatagctttcatcagaaaatctccaaccctagatccagcacygccagatgatcaatgtctccattcttctgtgctgccactgcacagatccagagctctcgtgaggagtgatgagcagaacaaaaaagagtaacgtctcact

SEQ ID NO: 134694 - DNA, 201 bp, Homo sapiens
ctcatgaacagcagctgtttctgggatgaggactgctctcagtaaataagaatgatgaccgacagccacacacacagacctgaccagggcttccatccatsacctaaatgtgcttcttcccatggctatttctcactgtggcattcatcatcatgttgcggaaggccgccattggcaccattataattgaatcttacaaaa

SEQ ID NO: 134695 - DNA, 201 bp, Homo sapiens
ggttagttacatatgtatgtatacatgtgccatgctggtgtgctgcacccactaactcgtcatctagcattaggtatatctcccaatgctattcctccccyctccccccaccccacaatagtccccagagtgtgatgttccccttcctgtgtccatgtgttctcattgttcaattcccacctatgagtgagaatatgcggt

SEQ ID NO: 134696 - DNA, 201 bp, Homo sapiens
ctagatggtgtggtccgacgtggactgtcgtgaggaagctgaaacctgacagtggagcattgtctccaaagtgtgaccaggttggggcaggagggtgactycagacctcagggctatgttaggccacgaggcacttttgcagattagaaaagggcagacttctttaagacactccatgccccctgctgggaagtctctgta

SEQ ID NO: 134697 - DNA, 201 bp, Homo sapiens
aaaattcaaatggatgctattctgatgaaacttgggctggatggggcacaggtagggtgcttgttgctttcagtcagatgaaggaggggtacagtttccaygatttctagggggtccttcattttgctttcttgattgttttagggagtggctgaggctgaactggaacagaacctgagtcggactttcaaaagcctcttc

SEQ ID NO: 134698 - DNA, 201 bp, Homo sapiens
cactgcacagatccagagctctcgtgaggagtgatgagcagaacaaaaaagagtaacgtctcactgggcatggtggctcatgcctgtaatcccagcacttygggaggccgaggcaggcggatcacttcaggtcagaagctcgagactagcccgaccaacatgatgaaaccccgtctctactaaaaataccaaaaattagcc

SEQ ID NO: 134699 - DNA, 201 bp, Homo sapiens
tttcttccttcagagtgttttatccatgcataaagtctgtgaagcgggtaagagacatgcttgggagagccatatctggaaccagctgaatgttaaagggrtgtttctgtctctgactgctatgggcagaagccctgagctctccagctctgaactttaagttgcccaaccagggtcccctcggcatgcatagggctgact

SEQ ID NO: 134700 - DNA, 201 bp, Homo sapiens
ttaaaactagagagagattcgtgtctccatattctatccagggttgctacagtatgtgtactgtgtgtgtgtgtgtgtgtgtgtgtgtgtgtgtgtgtgtkcgcgcgcgcgcgcgcacctatgtgtctaaggcaagttggtgagaaatactgcagtttagtaggaaaaaaaccaatggactaggaatcgaaaatcctgagt

SEQ ID NO: 134701 - DNA, 201 bp, Homo sapiens
ttgttacagtctgcgtggtactcagaggtcatttgtcataacagggttttcagatgagcatatttcctttgtcatttgtcgtaacagggttttcagatgarcatatttcctttgtatcacccatgacatcatttgtaactcttttcttttcttccttcagagtgttttatccatgcataaagtctgtgaagcgggtaagag

SEQ ID NO: 134702 - DNA, 201 bp, Homo sapiens
atattttattcattttacattttctctcctctagtatatgccatagaattatgctcaatccagaggagacacaatgagtgaataaagggagggaaaaaaaatgaatgtatattttaaaactagagagagattcgtgtctccatattctatccagggttgctacagtatgtgtactgtgtgtgtgtgtgtgtgtgtgtgtgt

SEQ ID NO: 134703 - DNA, 201 bp, Homo sapiens
aaacatggaaaggaactggaagtgggcttgcaaaagcttgggacggaaggtgagtgccaggttcagtgtagtctcatccacaccccaggacccgcccgcgrggcttcccattggcctgagctgatatgacctgggccagagctggttgtggacagatctgctggccacctcctttccctttggggtttgggaagtgactcc

SEQ ID NO: 134704 - DNA, 201 bp, Homo sapiens
ctcaagtgatccacccccatcagcctcccaaagtgctgagattacaggcatgagccactatgcttgtccgtcttttctattccttttgctagcatcctattccctcttcaggtgataagtcagtggtctactggctggattcccaggttctggcctctctgtctgcttccatatggtctctcagtgcttgattaatcttcc

SEQ ID NO: 134705 - DNA, 201 bp, Homo sapiens
cctcaagtgatccacccccatcagcctcccaaagtgctgagattacaggcatgagccactatgcttgtccgtcttttctattccttttgctagcatcctattccctcttcaggtgataagtcagtggtctactggctggattcccaggttctggcctctctgtctgcttccatatggtctctcagtgcttgattaatcttc

SEQ ID NO: 134706 - DNA, 201 bp, Homo sapiens
gcaaccgtgactgtaccttcctttcccctgcatggatgtggggtctcattcattcattattcccttcctaaatcatgcagggtttgggcagggtggcctgmggggagcagagagaaggcgtccattgcccattgcactagctagagacacacccatctgccttcttccatttacctttctgcctggggtttcctttcagat

SEQ ID NO: 134707 - DNA, 201 bp, Homo sapiens
gcctcaagtgatccacccccatcagcctcccaaagtgctgagattacaggcatgagccactatgcttgtccgtcttttctattccttttgctagcatcctattccctcttcaggtgataagtcagtggtctactggctggattcccaggttctggcctctctgtctgcttccatatggtctctcagtgcttgattaatctt

SEQ ID NO: 134708 - DNA, 201 bp, Homo sapiens
tggcctcaagtgatccacccccatcagcctcccaaagtgctgagattacaggcatgagccactatgcttgtccgtcttttctattccttttgctagcatcctattccctcttcaggtgataagtcagtggtctactggctggattcccaggttctggcctctctgtctgcttccatatggtctctcagtgcttgattaatc

SEQ ID NO: 134709 - DNA, 201 bp, Homo sapiens
ctggcctcaagtgatccacccccatcagcctcccaaagtgctgagattacaggcatgagccactatgcttgtccgtcttttctattccttttgctagcatcctattccctcttcaggtgataagtcagtggtctactggctggattcccaggttctggcctctctgtctgcttccatatggtctctcagtgcttgattaat

SEQ ID NO: 134710 - DNA, 201 bp, Homo sapiens
tgtttttattgagtaggttggccagggcctcttctcagccattttcatgtaacactggggtctttcactgagaaatctgggtcatgcacaatccagcaacsgactgaaacggccctggcattctgcagacgctgtggggcctgggtccactgggcctggtgcttggtcgctgccctctcctctttcccttccacagcccag

SEQ ID NO: 134711 - DNA, 201 bp, Homo sapiens
caggaaactttgttctgcttcactcctggctcaaatgataggattatatcaaagaataaaaagaatcaaatgttcctaaaatattgttaaagttttcatgstattgttgtgttcatctctctagctttttaaattttttaaaaaaatttcttgtgggtacatagcatattctagcttcttcctctctctttctctgtcccc

SEQ ID NO: 134712 - DNA, 201 bp, Homo sapiens
tgcactggggtggagcctcaggaagttcttgccctttgcagcagggaggagcctggcccctcctcctcctgtgtggaaactgggattccaacagcgaggcrggaagtgctgtggcagggaactctggccttgcagagagtccctgttccccgtttttttccttttcaccaagaaaaccctgctctttactcatgcttcaaa

SEQ ID NO: 134713 - DNA, 201 bp, Homo sapiens
ggctcaggatggagtggaaaaggtgatttccaaggcctcccctggcaccagtattcaggagagcctctcacggaaggaggctgctgctgtctctctcactrtacctttcctgcttacagcttctcaataccccggcccctctgccgacctcttgcaatccaagtgacatgagccatgggtacgtgacagtaaaggtgagtc

SEQ ID NO: 134714 - DNA, 201 bp, Homo sapiens
tctggtgagtttctttctgagattctcccatgctgttttgggctcaggtcgtttttttggatgacatcggggctaatctgaagccagcccgtgacttgggmatggtcaccatcctggtccaggacactgacacggccctgaaagaactggagaaagtgaccggaatccaggtaacttgacttctgagcgagccaagcttcc

SEQ ID NO: 134715 - DNA, 201 bp, Homo sapiens
gtgaatataatacaatctatccattctgctgttagtgggcatttgggtcgtttctggtttgggactcctaggaagagtatagctatgaacatttttggccmtgtctcttggagaacatatgttggcatttccagtgggtatgtgtccaggagtggaattgcttggtcacagggaatgtatatgtttagatttagtagaccc

SEQ ID NO: 134716 - DNA, 201 bp, Homo sapiens
tatcttcaaaaacagtcccattctgaggccctgggggttaggacttcaacacagcagttttggggaggacgcagttcagcccatcataaaggctgaggcasgcgggtgtggttgctgattttgcctgtgtgtgtcttcttccttaggagatggtaaccttcctggataaactggtaagtcattattttgaactgatatctt

SEQ ID NO: 134717 - DNA, 201 bp, Homo sapiens
cctgcagtggtctctcccctgccctgcttccagccccagagtcctggagcagcagcctcctcacgggtcttgccgcccacatggttggatcctgaaactckcagggcctcccccaactgcccctgcccacccccagcccggccccatcaccctccaattcctaaccgccctccagcagcacacttgcaggtgctgatcctc

SEQ ID NO: 134718 - DNA, 201 bp, Homo sapiens; identical to SEQ ID NO: 23930

SEQ ID NO: 134719 - DNA, 201 bp, Homo sapiens
tcctttcccctgcatggatgtggggtctcattcattcattattcccttcctaaatcatgcagggtttgggcagggtggcctgcggggagcagagagaaggygtccattgcccattgcactagctagagacacacccatctgccttcttccatttacctttctgcctggggtttcctttcagattccccacctgaaaagggg

SEQ ID NO: 134720 - DNA, 201 bp, Homo sapiens; identical to SEQ ID NO: 23932

SEQ ID NO: 134721 - DNA, 201 bp, Homo sapiens
tgtggggtcatatgtgcctttgttttcatgcgtatgttgtgtaattaaatgctttccattttagcagtagatggttataaaagaaaaagagtttttaatcycctcatcataaaatagcccctgtttgcattctggtgagtttctttctgagattctcccatgctgttttgggctcaggtcgtttttttggatgacatcggg

SEQ ID NO: 134722 - DNA, 201 bp, Homo sapiens; identical to SEQ ID NO: 23934

SEQ ID NO: 134723 - DNA, 201 bp, Homo sapiens
tgccctctcctctttcccttccacagcccagggtccgtctgcattttgtggagctgggctccggccctgctgtgtgcctctgccatggatttcccgagagktggtattcttggaggtaccaggtgagaaagctggggaagatgcagccagtcagggtgaggttgggggagtctagatggtgtggtccgacgtggactgtcg

SEQ ID NO: 134724 - DNA, 201 bp, Homo sapiens
gacatgaaaggctatggagagtcatctgctcctcccggtgggtgtgctgtcttgcagctgtcttatgctggtcttgccttctacctgcctgagcgctccaygcctcggtgctttccctggtcccagatcagagtagccttccccttaagagagtctgacttcacctctttcctctcctacggtgccctgtgtctctgcact

SEQ ID NO: 134725 - DNA, 201 bp, Homo sapiens
tcctggcctcaagtgatccacccccatcagcctcccaaagtgctgagattacaggcatgagccactatgcttgtccgtcttttctattccttttgctagcatcctattccctcttcaggtgataagtcagtggtctactggctggattcccaggttctggcctctctgtctgcttccatatggtctctcagtgcttgatta

SEQ ID NO: 134726 - DNA, 201 bp, Homo sapiens
ctcctggcctcaagtgatccacccccatcagcctcccaaagtgctgagattacaggcatgagccactatgcttgtccgtcttttctattccttttgctagcatcctattccctcttcaggtgataagtcagtggtctactggctggattcccaggttctggcctctctgtctgcttccatatggtctctcagtgcttgatt

SEQ ID NO: 134727 - DNA, 201 bp, Homo sapiens
actcctggcctcaagtgatccacccccatcagcctcccaaagtgctgagattacaggcatgagccactatgcttgtccgtcttttctattccttttgctagcatcctattccctcttcaggtgataagtcagtggtctactggctggattcccaggttctggcctctctgtctgcttccatatggtctctcagtgcttgat

SEQ ID NO: 134728 - DNA, 201 bp, Homo sapiens
caacacgaagaattctctcctatcttctcagctgagcaaaccgaggctcagagggcttaaccccaactggcccaagaccaggtacatgattgggtcaggayatcgacctaggcctgtttgactccaaagcccatgcctccaactaagccatgctggaggggagcttgggctttgttctgtgcgctatggggagtcaagcag

SEQ ID NO: 134729 - DNA, 201 bp, Homo sapiens
gctggtctagaactcctggcctcaagtgatccacccccatcagcctcccaaagtgctgagattacaggcatgagccactatgcttgtccgtcttttctattccttttgctagcatcctattccctcttcaggtgataagtcagtggtctactggctggattcccaggttctggcctctctgtctgcttccatatggtctct

SEQ ID NO: 134730 - DNA, 201 bp, Homo sapiens
catggtgaaacctcatctctactaaaaatacaaaaactagccgggcatggtggcgtgcacctatactcccagctactctggaggctgaggcaggagaatcrcttgaacccaggaggtggaggttgcagtgagccaagatcatgccattgccctccagcctgggtgacaagagtgaaactccgtttccaaaaaaaaaaaaaa

SEQ ID NO: 134731 - DNA, 201 bp, Homo sapiens
aggtctcagagggttaagtaacttgtccgaagtggctgagctggggttaaactcctctgaccctgcaggccatgctcttgtcactgctcaaagaacatctyccttccctcccccacacccacattcccttattccttcacaccgtctgtcactcattcattcacccattcattcattcctcaaatgctgtgagcacaggct

SEQ ID NO: 134732 - DNA, 201 bp, Homo sapiens
gaccagccctggccaacatggtgaaacctcatctctactaaaaatacaaaaactagccgggcatggtggcgtgcacctatactcccagctactctggaggytgaggcaggagaatcgcttgaacccaggaggtggaggttgcagtgagccaagatcatgccattgccctccagcctgggtgacaagagtgaaactccgttt

SEQ ID NO: 134733 - DNA, 201 bp, Homo sapiens
atgacatcaaaagcacaggcaacaaaagcaaaagcaaacactcgagtctacctcagtctaaggatttagtaagtttttgtgggtttttgttgttgttgtttggtttttggttttctttgcaaaaaggtccttttgatgtgttgatatattttaagtaacgtgaattaaatatgtttcttttatttttaattgcagaaatag

SEQ ID NO: 134734 - DNA, 201 bp, Homo sapiens
tatgacatcaaaagcacaggcaacaaaagcaaaagcaaacactcgagtctacctcagtctaaggatttagtaagtttttgtgggtttttgttgttgttgtttggtttttggttttctttgcaaaaaggtccttttgatgtgttgatatattttaagtaacgtgaattaaatatgtttcttttatttttaattgcagaaata

SEQ ID NO: 134735 - DNA, 201 bp, Homo sapiens
gatatgacatcaaaagcacaggcaacaaaagcaaaagcaaacactcgagtctacctcagtctaaggatttagtaagtttttgtgggtttttgttgttgttgtttggtttttggttttctttgcaaaaaggtccttttgatgtgttgatatattttaagtaacgtgaattaaatatgtttcttttatttttaattgcagaaa

SEQ ID NO: 134736 - DNA, 201 bp, Homo sapiens
gccaccacacctggctaatttttgtatttttagtagagacccactttgctggatacatttatctttcagttcttgtaacttttcatgaattatttctttgwtaattttttcttgtattttctctatttttgttgttctttttctttttgctttctggaattgctattgttaaaatattgttattgttaaaattgctattat

SEQ ID NO: 134737 - DNA, 201 bp, Homo sapiens
aagaaatggagatcctgggagacttgcaaggccacaagactagtagtcaggttcatccccacaaagggtgagtgaggacaggctccggtattgccatgctytcccaccagacaccctgtgccctgagcctgtctccagagatcacctgtcctaaagctcttttctctttgtgtgtctctactttaatctacaaaaggtgat

SEQ ID NO: 134738 - DNA, 201 bp, Homo sapiens
tctgaatggaggtgtttgggtgactcaggagttactatgatcagttggggcttgaagttatagggtgtaattacactgatgggatagtaggtgccccaggrgcaggcctgataacaggttgtgttggatgcataaaagggcttggaaagttaagatggtattcggtattcgtggtcacaaggtcttgtatgggcttttcct

SEQ ID NO: 134739 - DNA, 201 bp, Homo sapiens
gggggtccttcattttgctttcttgattgttttagggagtggctgaggctgaactggaacagaacctgagtcggactttcaaaagcctcttcagagcaagygatgaggtgaggggtggggatgggtgcagaagaacaggagggggcagttgtgaaggaagtagggtacctagtgtgtggcagggaccaggagtagcaatct

SEQ ID NO: 134740 - DNA, 201 bp, Homo sapiens
cctcctttctcagcagtgaggaggtctagaccttagcggttttggagagtcactgttgccaaatagtctatttgggattgtagagtaaggatagatttatytattgcaaactgtctgagaaatcctttgagagtgtatggtagtaggataatgaagtagttaaactggctattctggttcctgtagcagtgggcattccta

SEQ ID NO: 134741 - DNA, 201 bp, Homo sapiens
agctgcgtgtccgggtgctaggctgcagacccgccgccatgacgctgcgcgcggccgtcttcgaccttgacggggtgctggcgctgccagcggtgttcggmgtcctcggccgcacggaggaggccctggcgctgcccaggtaagggggcccagcgccgccgccgcagtgggtcggggcctcaggaggcagaccgcgctggg

SEQ ID NO: 134742 - DNA, 201 bp, Homo sapiens
ctagcttgctgtactcccttctctgcctatctttcagtcttcaaatccagagtaatccagtttctaccataaagggcccacaaaaagtgttctgaaacatycggtgtcatccaagtccaaaattggacagcttttttttcagttcttcctgtaacatttggcagtgttggccactctctgcttctttggcaagaatctcag

SEQ ID NO: 134743 - DNA, 201 bp, Homo sapiens
tggggtttcctttcagattccccacctgaaaaggggacacattgaggactgtgggcactggacacagatggacaagtaaggaggttgggggctcctggggwcggggagagcagggccccccgttcaccttccataaaagctttcctggtttcattgtgctggctttggcctggcttagccactcatgtcactcacctctgc

SEQ ID NO: 134744 - DNA, 201 bp, Homo sapiens
tgtttgttttctagatccctgctctggcccaggcaggttaccgggtcctagctatggacatgaaaggctatggagagtcatctgctcctcccggtgggtgygctgtcttgcagctgtcttatgctggtcttgccttctacctgcctgagcgctccacgcctcggtgctttccctggtcccagatcagagtagccttcccct

SEQ ID NO: 134745 - DNA, 201 bp, Homo sapiens
gttctcactcacacacatctgcacacataagacccatattggcctctgcactgctgaagctgttattttaaagatctccagtaataaccacgagtctgttrtgcaaagttcggcagatacaacgtcaggaccacagcagggtggcgagcaggggtctttcagaggaggagggagggcttcctttgtggagtgctggccact

SEQ ID NO: 134746 - DNA, 201 bp, Homo sapiens
tgtgtaaggatgaaatggttgaaggcatgtgacctgttacaagcagtactgggaacctattagctccattagtgttccttgtcattatcatcatatgaccratgaaaatgaccaaactgcagttggacagacaaaatctctcaaagcgtggaggaaaatattgacaaaggcgctgggaaggtgaatcccaatggtgctaag

SEQ ID NO: 134747 - DNA, 201 bp, Homo sapiens
tgttccccagtgtgactgcacaggtagctaggccttcatcagctcactcagtagccatggttaccttgttggttcactctgtaagtgaacacactgctacrtgccagacttcctgccagaccctgggataccatggtgtgtaaacagaccaggtcttgacctcccaaaattaagtcttgaggcactagagtatataacatc

SEQ ID NO: 134748 - DNA, 201 bp, Homo sapiens
ggagcgttaggtgctctcagagatgtgactttagccttcggttgtgtcaccttgcacaagtcaatctctgagtctcagtttcctcatttgtcaagcagaasatgagtttccaatctctgggtctgcagaaggagtaatggaggttcccagtttacattcaaaatgtttaaaaatctaagggaaatctgttccccagtgtga

SEQ ID NO: 134749 - DNA, 201 bp, Homo sapiens
gtgtggcagggaccaggagtagcaatctggcctccttttctttcatttctatagtcagggtaattgaggtcctcactctactgggaaaatttacatcctcrttgacacacaaggtcagagaatgattataataatgatggcttggaaattatgctattaccattaccattttaacatgcataattggcttacccaagtaca

SEQ ID NO: 134750 - DNA, 201 bp, Homo sapiens
ctactttatggtgctcagcctgctctagtttgggatagctcagcttgttcttccttatgcttatggggcccccatagggcagagggttttcactacttttyagtcatggctcctcagagaatcagatggcaactctgggctctttcttcagaaaaacataaaaatccacataaactcaaaaagtgcatacattttggtgca

SEQ ID NO: 134751 - DNA, 201 bp, Homo sapiens
acattttggtgcatttgccctacttcctgatgtcatattaggagggggcatctttgctccacctcccaatgtccctctcaagtgggctccctggggcaggygagtggcctctggatggtgaggctgctaaaccaagttccccaccatcagcaacctccccagcctccaaggtgacacgatgacattccctggagggtcctg

SEQ ID NO: 134752 - DNA, 201 bp, Homo sapiens
gggttaaactcctctgaccctgcaggccatgctcttgtcactgctcaaagaacatctcccttccctcccccacacccacattcccttattccttcacaccstctgtcactcattcattcacccattcattcattcctcaaatgctgtgagcacaggctgggtatgaagctggggctgcatgctcagctacccagacacacg

SEQ ID NO: 134753 - DNA, 201 bp, Homo sapiens
tcagatgagcatatttcctttgtatcacccatgacatcatttgtaactcttttcttttcttccttcagagtgttttatccatgcataaagtctgtgaagcrggtaagagacatgcttgggagagccatatctggaaccagctgaatgttaaagggatgtttctgtctctgactgctatgggcagaagccctgagctctcca

SEQ ID NO: 134754 - DNA, 201 bp, Homo sapiens
catgtttgttacagtctgcgtggtactcagaggtcatttgtcataacagggttttcagatgagcatatttcctttgtcatttgtcgtaacagggttttcakatgagcatatttcctttgtatcacccatgacatcatttgtaactcttttcttttcttccttcagagtgttttatccatgcataaagtctgtgaagcgggt

SEQ ID NO: 134755 - DNA, 201 bp, Homo sapiens
gcagactgtgtgctccattgaatacagctgcaagctttgcccccttctagaatttgctcaggctaccttatgttgttcccctcccaggccttgttctcctycccagctctccccattctgaaaagccaagttcaaatgctcccttttccacagggtcctccatgatgcccagttcaggaattccttatctccttccaactc

SEQ ID NO: 134756 - DNA, 201 bp, Homo sapiens
aattaaaattgtcctcttatgctccaaaaagccatgaaccaggctacccccactaggagagtaggatccatggatggatctcttgtcaccttccagccatkcccctgttcttggtgtctgctttgctgaagtgctcctggagagggttggggtaggaaggagaggggaagcaggagaggaagactccacaccctgagcctc

SEQ ID NO: 134757 - DNA, 201 bp, Homo sapiens
tcatcactgccagatggaattttctcttcttctctactctactcttctcttctcttctcttctcttctcttctcttctcttttctcttctcttctcttctyttttcttttctttcttttgacagagtcttgctctgttgcccaggctgcgagtgcagtggcatgatcttggcttactgcaacctctgcctcccgggttcaa

SEQ ID NO: 134758 - DNA, 201 bp, Homo sapiens
gagacagagcctcactctgtcacctaggctagagtgcagtgaagcgatcatagctcactgcagcctcaaactcctgagctcaagtgatcgtcctgcctcarcctcccaagtagctatgaccacaggttcataccaccatgcatggctaattttttacattctgttgtaacgggggtctcactatattgttcatgctaatct

SEQ ID NO: 134759 - DNA, 201 bp, Homo sapiens
aacttctgtcattgcttgtgagtcagcctcgggtctaacctcctatacattaattgtcttagccaattaattgtcctggacactgcagtgtctgatctgcrgtttaacctgtctttgaagttttaatttcaataaatagttttttttaatttgtgaaagttttatttggttctttttcaaatcattctgatctcttttgat

SEQ ID NO: 134760 - DNA, 201 bp, Homo sapiens; identical to SEQ ID NO: 23957

SEQ ID NO: 134761 - DNA, 201 bp, Homo sapiens; identical to SEQ ID NO: 23958

SEQ ID NO: 134762 - DNA, 201 bp, Homo sapiens
gtgtatatgtgccacatcttcttaatccagtctatcattgatggacatttgggttggttccaagtctttgctattgtgaatagtgccacaataaacatacrtgtgcatgtgtctttatagtagcatgatttgtaatcctttgggtatatacccagtaatgggatcactggttcaaatggtatttctagttctagatccttg

SEQ ID NO: 134763 - DNA, 201 bp, Homo sapiens; identical to SEQ ID NO: 23959

SEQ ID NO: 134764 - DNA, 201 bp, Homo sapiens; identical to SEQ ID NO: 23960

SEQ ID NO: 134765 - DNA, 201 bp, Homo sapiens; identical to SEQ ID NO: 23961

SEQ ID NO: 134766 - DNA, 201 bp, Homo sapiens; identical to SEQ ID NO: 23962

SEQ ID NO: 134767 - DNA, 201 bp, Homo sapiens; identical to SEQ ID NO: 23963

SEQ ID NO: 134768 - DNA, 201 bp, Homo sapiens; identical to SEQ ID NO: 23964

SEQ ID NO: 134769 - DNA, 201 bp, Homo sapiens; identical to SEQ ID NO: 23965

SEQ ID NO: 134770 - DNA, 201 bp, Homo sapiens; identical to SEQ ID NO: 23966

SEQ ID NO: 134771 - DNA, 201 bp, Homo sapiens; identical to SEQ ID NO: 23967

SEQ ID NO: 134772 - DNA, 201 bp, Homo sapiens; identical to SEQ ID NO: 23968

SEQ ID NO: 134773 - DNA, 201 bp, Homo sapiens; identical to SEQ ID NO: 23969

SEQ ID NO: 134774 - DNA, 201 bp, Homo sapiens; identical to SEQ ID NO: 23970

SEQ ID NO: 134775 - DNA, 201 bp, Homo sapiens; identical to SEQ ID NO: 23971

SEQ ID NO: 134776 - DNA, 201 bp, Homo sapiens; identical to SEQ ID NO: 23972

SEQ ID NO: 134777 - DNA, 201 bp, Homo sapiens; identical to SEQ ID NO: 23973

SEQ ID NO: 134778 - DNA, 201 bp, Homo sapiens; identical to SEQ ID NO: 23974

SEQ ID NO: 134779 - DNA, 201 bp, Homo sapiens; identical to SEQ ID NO: 23975

SEQ ID NO: 134780 - DNA, 201 bp, Homo sapiens; identical to SEQ ID NO: 23976

SEQ ID NO: 134781 - DNA, 201 bp, Homo sapiens; identical to SEQ ID NO: 23977

SEQ ID NO: 134782 - DNA, 201 bp, Homo sapiens; identical to SEQ ID NO: 23978

SEQ ID NO: 134783 - DNA, 201 bp, Homo sapiens; identical to SEQ ID NO: 23979

SEQ ID NO: 134784 - DNA, 201 bp, Homo sapiens; identical to SEQ ID NO: 23980

SEQ ID NO: 134785 - DNA, 201 bp, Homo sapiens; identical to SEQ ID NO: 23981

SEQ ID NO: 134786 - DNA, 201 bp, Homo sapiens; identical to SEQ ID NO: 23982

SEQ ID NO: 134787 - DNA, 201 bp, Homo sapiens; identical to SEQ ID NO: 23983

SEQ ID NO: 134788 - DNA, 201 bp, Homo sapiens; identical to SEQ ID NO: 23984

SEQ ID NO: 134789 - DNA, 201 bp, Homo sapiens; identical to SEQ ID NO: 23985

SEQ ID NO: 134790 - DNA, 201 bp, Homo sapiens; identical to SEQ ID NO: 23986

SEQ ID NO: 134791 - DNA, 201 bp, Homo sapiens; identical to SEQ ID NO: 23987

SEQ ID NO: 134792 - DNA, 201 bp, Homo sapiens; identical to SEQ ID NO: 23988

SEQ ID NO: 134793 - DNA, 201 bp, Homo sapiens; identical to SEQ ID NO: 23989

SEQ ID NO: 134794 - DNA, 201 bp, Homo sapiens; identical to SEQ ID NO: 23991

SEQ ID NO: 134795 - DNA, 201 bp, Homo sapiens; identical to SEQ ID NO: 23990

SEQ ID NO: 134796 - DNA, 201 bp, Homo sapiens; identical to SEQ ID NO: 23992

SEQ ID NO: 134797 - DNA, 201 bp, Homo sapiens; identical to SEQ ID NO: 23993

SEQ ID NO: 134798 - DNA, 201 bp, Homo sapiens; identical to SEQ ID NO: 23994

SEQ ID NO: 134799 - DNA, 201 bp, Homo sapiens; identical to SEQ ID NO: 23995

SEQ ID NO: 134800 - DNA, 201 bp, Homo sapiens; identical to SEQ ID NO: 23996

SEQ ID NO: 134801 - DNA, 201 bp, Homo sapiens
cgtgaatcctgaaaggaaagtataatcatttgaaaagacaagtattatgtgcatgaaataattgccaaaactgctattgccccacatataccagtctcctrtccctctggccattgaagtcccttcttcgctcacagatatttactaaacatctcctctgtgctggcccaggatatacaaagagcccaagaacctgcaact

SEQ ID NO: 134802 - DNA, 201 bp, Homo sapiens
ttagctcaggagtagagcatggtaacctgagagagctggcacttgcaagaatgaaagacctcggaatacaggtaagagcaaatatggcggtcaggccacamctgttgagaaaaagagaaatctgaaacacgaaagactttgccactaccacccctaaaaccagacttgcgggtcaggtcagaaagctcccagatgttgaaa

SEQ ID NO: 134803 - DNA, 201 bp, Homo sapiens
tgtggacaatgctttagtattcactaattcagtattcacaacagcacaactatcatgaataacaagaattaaatgtatttgtcatgtaatgggcgctaacwctggttgccactgactttatcagattaattttgtgctgtgtatgatgttttaaattttaagttttatatatttcttatatgtgtatatatgagatgtata

SEQ ID NO: 134804 - DNA, 201 bp, Homo sapiens
atgttaatgaatcagctatatgttaaataaggtgcctttaaacagaaacatgcatcaaacaaggttatgcattgatcagttgaagatgttttaggggctcrcaggaacctaaccctgtatatcccctgtggacaatgctttagtattcactaattcagtattcacaacagcacaactatcatgaataacaagaattaaatg

SEQ ID NO: 134805 - DNA, 201 bp, Homo sapiens
ggtaggggtccagtttcattcttttgcctatttgttgaaaagactattattttctcatagaattgtcttggtaccataaatgatttttaatgtgtaggtcytacatcctacctttgaaaccattactgaacatccaggtagctctgactatggtgttttaccagatgtcatatcctagaaaatccttgtggggtttacatg

SEQ ID NO: 134806 - DNA, 201 bp, Homo sapiens
tgcctctctgtctctccagccccggggcagtagtttaccttgtgtcttcccctcttataggtccagaagagttgtgacttttcagagtgttgaccttctayttgttcaagtagagtagcaacttacaagctccttaaatgcagaaccagaaactggaagtcccttctctgcctgtttttcacttgggttgtctttttgttg

SEQ ID NO: 134807 - DNA, 201 bp, Homo sapiens
tttatcctgtttggtattctctgagcttcctggatctgtggtttggtgtctgatattaattctgggaatttctcagtcacttgtttcaaatatttcttatrttattttgtttcttctctttctggtgttcttattacacatgttacaccttttatttattttagagacagggtctcactcttacccaagccgttctcccac

SEQ ID NO: 134808 - DNA, 201 bp, Homo sapiens
ttctaaagccactctccactaaaagaaatcagtgcttagaaaaatggccatttccagggctgggcagcaaacatacaggatgaacacagaacatcttgtcwttccagagagtaagtaaataatcaaagaatgacaggtcatgtcagaaggacccagaaaccagcctgaatgcatacccactggcaaaaatctaatgtcagc

SEQ ID NO: 134809 - DNA, 201 bp, Homo sapiens
tgctaagtgaaataagccagttataaaaggacaaatattacatgattccacttacatgtggtatctacaggagtcaaattcatggagacagaaagtagaaygggggttgtcaggggctgggagagggggagcaagtagggttggtgtttagtgggtacagagtttcagctttacaagataaagagttctggagatggatgg

SEQ ID NO: 134810 - DNA, 201 bp, Homo sapiens
tttatgaagcagcatcctaatagaagattctgtgttccagccctgaagggtgcagtcaatgattaaatgtaaaattctgtccagacacatgatggagccayattaaactgttgctgccctcaggctatttgacagctgtctgctgatgtgatatttaaatcatcatgaaacattagaataggaataccaattcacaaccca

SEQ ID NO: 134811 - DNA, 201 bp, Homo sapiens
ttttgtctaatattttcattgtctttggctggagcgttattcttaattttgtctgccataatcaagcctgaagtcatctgttcactaagcttaaatactcrcgactcttctgccctgcctctagcttccatcattgaaccttctttgttgttttcctccaaactctgtattgtagtgcttgtcattttagaaatggtgact

SEQ ID NO: 134812 - DNA, 201 bp, Homo sapiens
aaatcattggccaaactgcaggatctgaattgcctatatggtctctatttttaaaaatacacctaagaatactaaggagattttaatagaaaaatcaactsttgaaattgcttgtgtggcccttccccttgttgttcaacccttctgaagcaattcagtccaaaggacattaggtggtgcggagcagtgtaggtatccaca

SEQ ID NO: 134813 - DNA, 201 bp, Homo sapiens
gagactgcaaatgcattacaatcagctgctagagcaggactccactgagcacagaaactgtgtgactgatcatgtaaagcaatgaacactgaaaacaagcygaattaactacttaaggagaattatgaaggatataaagtaactgacttgcttgaaggtcaaaggacatttacatgatacttctgctgcatactgatttct

SEQ ID NO: 134814 - DNA, 201 bp, Homo sapiens
atacaaccgaaaggtcatatgataagaaaggcatgacattattaataagcaacatatgaggcctgttaaggaaacctggctgttctcagttcttctgataygaccccgttacacttatcctatggagaattggcccataggagagtccacaagctctaatttcaggaggcccaactgtcacatatgtttctctatcaatac

SEQ ID NO: 134815 - DNA, 201 bp, Homo sapiens
gccaaaatatatctagttcctataggcaacatcttgagcagaaaataagcacacaccaatctctgcctttaaaaaaagcatgccaaaaaaaaaaaaaaaaacagaaacagcatgcagatgttcattaagaacatggaacagtaatacattcccatgctagctactatatagaactattgtagtgaaaggacagcagctaca

SEQ ID NO: 134816 - DNA, 201 bp, Homo sapiens
gatcatgccactgcactccagcctgggtgacagagcgagactccatctcaaaacaaaaaaataaatgtgctcagcagcatgaagtttacttctgtgttttrttctaacagttgtgtagttttagctcttactgcatttaggtctatgatccattttgagtaaatttcgtatatggtatgaggtaggggtccagtttcattc

SEQ ID NO: 134817 - DNA, 201 bp, Homo sapiens
gtgcctgtaatcccagctactcaggaggctgaggcaggagaatcacttgaacctgggaggcggaggttgcagtgagcagagatcatgccattgcattccarcctgggtgacaaaagtgaaactccatctcaaaaaaaagtaatctagaggtgatttaaagtatacaggaggatgtgcataggttatatgcaaatactacac

SEQ ID NO: 134818 - DNA, 201 bp, Homo sapiens
acatgtagaaataagtgtaaatgtaatgaataacaacacaggtggcccttcatatcttcggattctgcattctacaaattcaaccaactgcagatggaaaatattcagaaaaaacagtgggtggttattgcatctgtactgaacatgtatagatttttttttcttgtcattactccctaaacaatacagtataacaactag

SEQ ID NO: 134819 - DNA, 201 bp, Homo sapiens
ggtatatgcagaagaggagacagcaagaaaagaccagttacttacagggagttgatctaatcagcagatatattaaggatactgggtgctaggttttttttgttatcttagaagtcaattacaaaagttgaaaaaggagaaaattagtgtgagcactgtggtgttttggaacaggagatagtggtgtgaactcatggtttc

SEQ ID NO: 134820 - DNA, 201 bp, Homo sapiens
gagattatggactcattggtttttatatttgttttaaatattttccttaacctattgttgaccttttacttgtgcttccattaagtcgatcttttttttccttttttttttttttcttcaaatgcctctaagcttagaactgcctttctgttctttgaattttaactctgggttgttttattgttgttattttaactctca

SEQ ID NO: 134821 - DNA, 201 bp, Homo sapiens
ttttcccagtgatgtaagctactattatgccaccacgcttgctaacttaatggtatcacttttaagaaatactgcaggttttttaaaaataccagttggartgcctcattctaggatattctcatttacttttaaaaacgtcatttagagctttttgctttctggggttttttggtacttttttttcaacctttgtatggt

SEQ ID NO: 134822 - DNA, 201 bp, Homo sapiens
taagccttttgtaaacaaattctttcaaaatatttgtatgtgttttggtgctacagtaaatgaaatgtaaatttcatttttaaattttattattattattwttttttttttttttttgaatcggagtcttgctctgtcgcccaggctggaatgcagtgacgtgatctcagctcactgcaacctgtaccttctgggctcaag

SEQ ID NO: 134823 - DNA, 201 bp, Homo sapiens
atcttttccagtgaaaataatcctttcactgaaataatccttttaaagaaaaaatgaatacagtttgttgacatagtagtattctcaaatagagagattckccaaatatggtccatgaatgtcttttcagccttaggctggtctaaatgacagtagttttgattggcctgattgagtttttcagcccacccaagaaggggg

SEQ ID NO: 134824 - DNA, 201 bp, Homo sapiens
tttttaaaaattagaatcttggcttattgtagtcaacaaaatgaaagatttgtatcattctctccactagtagaggagacctaattttattattattattwttttttttttaaacagagtgtcactcttgttgcccaggctggagtgcagtggcacaatcttgggtcactgcaacctccgcctcctggttcaagcgattct

SEQ ID NO: 134825 - DNA, 201 bp, Homo sapiens
ggcaagttattttgtagcacgtccctcagtgtgggttcatcagctgttttctcatcatgagattcaggttacgcgtctttggcccgtgcctcatagaagcrgcactacgttcttctcgtcatctcccatccagtggtgcgcaggtttggttttcctatcactgatgttcctcattttgatcaaggtgctgtccaccagact

SEQ ID NO: 134826 - DNA, 201 bp, Homo sapiens
tatttgttttaaatattttccttaacctattgttgaccttttacttgtgcttccattaagtcgatcttttttttccttttttttttttttcttcaaatgcytctaagcttagaactgcctttctgttctttgaattttaactctgggttgttttattgttgttattttaactctcacagtttcttgatccatgttaacttt

SEQ ID NO: 134827 - DNA, 201 bp, Homo sapiens
gcaattttaatttgtcttttttagtaaactgttcgccttgttagaaatttaggtcgcttccaggtttctttgctttcttcttccttttttaaatgtaattrtcctggcctccactacagctaaacttcatagaactttctactgctgttgaagtaatctcttagagtagtataatctgggagaaggattacgcatggtaaa

SEQ ID NO: 134828 - DNA, 201 bp, Homo sapiens
ttctctgtaaaactactaaaccactttcaatatatgtattaataacaagttaacattatttttccaaaaatttccttacaaagttggagtgcatctttacrtatcagtatattttatacactagcaaatttgctgttagcactttcatgttccatttcctaaggatttagaataatcttcatggttataaacttaatggca

SEQ ID NO: 134829 - DNA, 201 bp, Homo sapiens
tgaagtgctggctattgctcctgagtgcaggaaggctgtgacgtgccttctggagagaatacatgttatgtaagctttgttcaggcatgagtgatgtgccrttggccatgagttcagtgttcatgaatcaacaatatatatcagataaggtgtgtttaaacagaaacacacataaaacaaggttatgtattaaacagtcga

SEQ ID NO: 134830 - DNA, 201 bp, Homo sapiens
atgtaatgaataacaacacaggtggcccttcatatcttcggattctgcattctacaaattcaaccaactgcagatggaaaatattcagaaaaaacagtggrtggttattgcatctgtactgaacatgtatagatttttttttcttgtcattactccctaaacaatacagtataacaactagttatagtacttacagtgtat

SEQ ID NO: 134831 - DNA, 201 bp, Homo sapiens
  misc_feature (1)...(201): n = A,T,C or G
atcaaaaaattttcatgagaatacagtaagcctatgggaaaaattcattgttttgtcattcaaatttgatacaaatttctgtttaattgcttttcagatgnaaatacaattctggaaagaggaaatatagtgaaagcctttttataaatataaaatattttttcaaaacttgagttgtttttttcttccaccatttctgtt

SEQ ID NO: 134832 - DNA, 201 bp, Homo sapiens
aaagtaactgacttgcttgaaggtcaaaggacatttacatgatacttctgctgcatactgatttctcagttttaaaatcattggccaaactgcaggatctraattgcctatatggtctctatttttaaaaatacacctaagaatactaaggagattttaatagaaaaatcaactgttgaaattgcttgtgtggcccttccc

SEQ ID NO: 134833 - DNA, 201 bp, Homo sapiens
caagttaccttagattaagtcttgtcatatttgcatgccctaaattaatttgttatctcactctaacttgctccttctcaatctaccaggattcttttagyttcttctgtcaccaagtcatgttgattcttacttagaaattacttcttgatatagtttattcctcttcattctggccgccaacctcctaacccaccttca

SEQ ID NO: 134834 - DNA, 201 bp, Homo sapiens
gagcctggagacagagccatgacggtcaataggcatggtgcttgcttccgagcagcttatggtctagttcagtgtttcctcttccaggtctgcttccatckagatgcagtaatgggtatgagcataagaagtgtggccgtgtgtgcaatctctgttctagagcctctgaaagaaaaagtagcaacaatcactctttacaga

SEQ ID NO: 134835 - DNA, 201 bp, Homo sapiens
ctgccttctcatttcagcgctcacactgggagccaatgtccttcttgcagtctgtttcatgccatgtttttcaaagttttgtgcagttttttgaggattcrccatttagtatggcccccaagcatagtactgaagtgctggctattgctcctgagtgcaggaaggctgtgacgtgccttctggagagaatacatgttatgt

SEQ ID NO: 134836 - DNA, 201 bp, Homo sapiens
gcctggtgtctcattgctacatcccaaaataaagaaagaaagcagccagctggggtgatgtagtataagaaatgacttgccaaaagtagttgagttagatstattgctcagtgtccagataacaaatggacaaggtgtagcccaggataggaatggtgccagttggtttagggacagagtagtcatatccagggatcagca

SEQ ID NO: 134837 - DNA, 201 bp, Homo sapiens
agatgtcaatgagagatggaaaagtctattgttatatttctttgtaaagcaagttaaacaatgaagagctttggaagactaatgtggcaaagataaaaagkatttttccagtttacaagatagagccctgccagctgagtagatactcccaccaaggtgggagtgagaggggactgtgagtccactttcatttctccaaaa

SEQ ID NO: 134838 - DNA, 201 bp, Homo sapiens
gattcagactgggtgaacaatggcttccatacgtgctctttgtgggatggctgcagaatatttattaaagacctgatgattctttaaaatataaatgttayaggaaaatcacacaattacagaagaagatctctgaaactaaatagtacataaagaatacagcatttaagaacgtgacagatgtcaatgagagatggaaaa

SEQ ID NO: 134839 - DNA, 201 bp, Homo sapiens
atgtagattcagactgggtgaacaatggcttccatacgtgctctttgtgggatggctgcagaatatttattaaagacctgatgattctttaaaatataaaygttacaggaaaatcacacaattacagaagaagatctctgaaactaaatagtacataaagaatacagcatttaagaacgtgacagatgtcaatgagagatg

SEQ ID NO: 134840 - DNA, 201 bp, Homo sapiens
gaatattcaaatagccaataaacctatcaaaaagttctcaaagtaattaatcttcaaaaaagcgaaatttaaaactacatttggtctcagttttctacagsaccttggtcttgtattgtggatataatttatcttttcttatctctctgaagaaatttattacagattttttttatacattttatttttctgtatgcattg

SEQ ID NO: 134841 - DNA, 201 bp, Homo sapiens
cacttgaacctgggaggcggaggttgcagtgagcagagatcatgccattgcattccaacctgggtgacaaaagtgaaactccatctcaaaaaaaagtaatctagaggtgatttaaagtatacaggaggatgtgcataggttatatgcaaatactacaccattttatatgagggacttgagcatccatggattttggtgtct

SEQ ID NO: 134842 - DNA, 201 bp, Homo sapiens
taggtatttctcctaatgctgtccctccgcctgccccccaccccacgacaggccccggggtatgatgttccccaccctgtgtcccagtgtgaaacacactkttctttagcacagctcctagggagaccagtaggatagccagaactcataaagtttaagtgctcctgaaaaatatagtatgtttcatactgtaggaagcca

SEQ ID NO: 134843 - DNA, 201 bp, Homo sapiens
gggagacaattgagagtttattaggcagctgagatgattgaccgagaattctaacggtgggctttggaggaaggatgtgttgagttggatgttaaaggccyctttattctgtaggatttgggtaggtgtgattggtgttgtgccaggagaaggaagcaaaggggaactagggaaacaagcactgatcagcatcttagaaac

SEQ ID NO: 134844 - DNA, 201 bp, Homo sapiens
ggatcatttgaggtcaggagttcgagaccagcctggccaacaaagtgaaaccccgtctctactaaaaatacaaaaaaattagctgggtgtggtggcacgcrcctgtaatcctagctactcgggaggctgaagcacaagaaatgcttgaacccaggaggtagaggttgcagtgagccaagatcgcgccactgtactacagcc

SEQ ID NO: 134845 - DNA, 201 bp, Homo sapiens
  misc_feature (1)...(201): n = A,T,C or G
ttccctcaaacccaataattgatgctggaggaaggtgtgttacgtctctcctgtggcatcatgtactgttactgcgtgccttagtacccacctgtttaagnggcacaggacctgatgattctattgtttcagagaagccaaattagtttggatcctgtcttaggcaagatttgataagatctgagccctttttctgtctca

SEQ ID NO: 134846 - DNA, 201 bp, Homo sapiens
tgtccacacagggaatattctgtaagccattcagcaacttgagccttgagttcttgtgagagtttaagcaggactagactcaggcacatccagttgcagtraggacagaggttttgaaagaggagctgccacgaattatttgtaatgagaggtgcccacctctttgataccacagcttcttggagtgaaacaaaagatagt

SEQ ID NO: 134847 - DNA, 201 bp, Homo sapiens
gactaacgaaaatgaatatttcatctctgtaccattttttactgtgcaatttggtttgaacaggttgagtatgaggttgcagcatgtccacacagggaatrttctgtaagccattcagcaacttgagccttgagttcttgtgagagtttaagcaggactagactcaggcacatccagttgcagtaaggacagaggttttga

SEQ ID NO: 134848 - DNA, 201 bp, Homo sapiens
cattttctataatgtttttatgtatataacccttaaatttcaatgtggatataatattaaaagaatgcaatatctgtgattctttttttcttttctattartaatgtgttgctgctggttctttagctacacgaggggactacaaaatgatagtttttgtcagccatgaaaaaaatcaaacctcaaacaaaatgttataag

SEQ ID NO: 134849 - DNA, 201 bp, Homo sapiens
gtgagactccttctcaaaaaaagagaaaaaaagcttggccatcattttagacattttcctcaaagcactgctttagctgaatcccacacattttgatatgktgtattttaattattattcaattcaaaatattttttcataccctttatatatatgtatttgatccatggaatgtataggaatggggtgtttaatttccaa

SEQ ID NO: 134850 - DNA, 201 bp, Homo sapiens; identical to SEQ ID NO: 24001

SEQ ID NO: 134851 - DNA, 201 bp, Homo sapiens
tatgcagagatcacagtttgtttaccatccttctattgatagacgcctgagctgttttgtttgtggccattatgaataaaacttcagcgtacgttcttgtrtaagtctttttgtggctatatgtatttatttctcttgggggaataaatagacatagaattgctatgtaagtttagttttacaagaaaccgccagtcattt

SEQ ID NO: 134852 - DNA, 201 bp, Homo sapiens
attttaatagaaaaatcaactgttgaaattgcttgtgtggcccttccccttgttgttcaacccttctgaagcaattcagtccaaaggacattaggtggtgyggagcagtgtaggtatccacatgcaggaggcagggagccacagggtccagagcagggtgagaaggtcactcattcacatgcaggaggcagaggcgtggtg

SEQ ID NO: 134853 - DNA, 201 bp, Homo sapiens
gcaacacaatcacacctcacactttcctaggtagagcttggcaggtccaacaatactcagcctgcacctgaccctttgtgtgccatctctcttccgtgagkacatgcctctctgtttccctttgcaaccctattttatacctgatgctttaggtgcgcgtgctggccatttatctttttcttctaggtaatggaacataga

SEQ ID NO: 134854 - DNA, 201 bp, Homo sapiens
acatctctaacaaggctgtagtcaaggtgtcagctggggccataatcatctcaagagtccattggagctgaaggatcccctcccaagttcactgtgcactytttggcaggcatcggttcctcacaagctgttggtcttggggctgtggttcctcgccatccctcgtgggcccatttatagggctgcttgtcacatgatgtg

SEQ ID NO: 134855 - DNA, 201 bp, Homo sapiens
tctgttctgtgatgtcaagggcctcagctggggtggcttaaatggcagccagttggctgggatggtgtgtctgaagtttcagttctgactggggctgtccmtatgagcagcttggttcttgtccacctgtctgctccatgtggcttgggctttttaatagcacaatagctggggttctaagagggaggagcaaaggcctgg

SEQ ID NO: 134856 - DNA, 201 bp, Homo sapiens
ccagccatatgattttggttatggaacttctgttacctgtctcagagattgttttccccttgttccttgtgttaactttgtcacccatttatttgtgtaayagatgttacacaaataggtagtgattttcacaggtagtgattttctttccttaggggccacactgtgaaggcagtgtgtgagtcatttcacctggccaaa

SEQ ID NO: 134857 - DNA, 201 bp, Homo sapiens
tttactacaggaattcaatttcaacatcattattaatcagactggaattgatgatatggaatactactttgctagataatgtattagctaggtgtttgctwattggtgtctgttgtagctgcactgtggcagcattgttttgtagctcctcccaggaatctgtattccatgacttgacatttactcatttgaaggtgaatc

SEQ ID NO: 134858 - DNA, 201 bp, Homo sapiens
agaaccactgattaataaaatcatatgtgggcagaaaatagcagttgttttgttgaagcatttaaactacaaatggctgagatttacttattcgaccttcrcctgtctctcaggctactacacatctccctcagtttcaggagaagatagttttattccttgcattgtactctagttgaaaagaagggtacattcataact

SEQ ID NO: 134859 - DNA, 201 bp, Homo sapiens
tgtgtaagagtaatgcatttaggtagaattttttaattgcattttgattcattatgacttcccttcatcttgccagattttctctgtaacttgggtttatratcttggattcagcctctagacaatattatgaactacacagtagatctgatttgagtcactatagaaagactctgggtattcttttttctgtatttaaaa

SEQ ID NO: 134860 - DNA, 201 bp, Homo sapiens
tgtgttatatatattctcgtggatggataaattggaaagttgagtgaacagagagttcaaggacaaaacaggtatggcttttgtgaaggctcattaaatcragcaaagtgctaatcactcagtactatcagctggactgagattcttcagtagtctccagagagcaacaattactggtgactgtcatcgtgtaacaatcag

SEQ ID NO: 134861 - DNA, 201 bp, Homo sapiens
ttactgctcgttcaaaactgatcaagaggccgggcgtagtggctcacgcctgtaatcccagccctttgggaggccaaggcgggcagatagcttgaggccakgagtttgagaccagcctgaccaacatggtgaaacttcttctctactaaaaatgtaaaaattagctgggcatggaggctggtgcctctagtcccagctact

SEQ ID NO: 134862 - DNA, 201 bp, Homo sapiens
ggttttggatttttcttaatggaaataagataactggaatgctatctgtaaatagggagggatggaaatcatagcatgtctaagccactttgccaataacrtatttatttatctacccattcattcatgagcctggagacagagccatgacggtcaataggcatggtgcttgcttccgagcagcttatggtctagttcagt

SEQ ID NO: 134863 - DNA, 201 bp, Homo sapiens
tgcaattggtgtctgaagttgggggcagtctctggactgagctcagaactggggggccttgcgctcatcagagtaggtagggtccaaattgagttaaattrtagaacacccagttggtgtcaacagagaactggacagttgcttggtatggaaaacctacacttctcttcacaaaccacacttcatgagccagggccatcc

SEQ ID NO: 134864 - DNA, 201 bp, Homo sapiens
tttggcagctgggagagtttgtgtggacagcagcccacttctgtttgattgactctagggaatgcaacaggtgaattctgtgtccgtgaatctggacctgyagcattgtgatttcttcgtcttacaggggctttagtaatagaggagatggcgactgcattgttactgctcgttcaaaactgatcaagaggccgggcgtag

SEQ ID NO: 134865 - DNA, 201 bp, Homo sapiens
tagatcatcctcttggtagcttgtccttaaataaccgtaatcttgataatgtgagatgctttactttcagggtgaaaaccaagacagctgccaaatatggmctttctgcccagccccgcctggtggatatcattgctgccgtccctcctcagtatcgcaaggtcttgatgcccaagttaaaggcgaaacccatcagaactg

SEQ ID NO: 134866 - DNA, 201 bp, Homo sapiens
atgaattttgaatgaacagttagctaatgacctgggtagggttgcctcttggaattgggggcagccacatctttttgtgccctcgctactccccctacccscttaacttcctttgttctccttgggtttgtaaaagtgaaaagaagagaggagctttttcataaaatttaataccaagggtagctcaaagagcccatgtga

SEQ ID NO: 134867 - DNA, 201 bp, Homo sapiens
catatagctaattataaggttgttcaaatagtgccacctcttaagattttttgtgtaggacaaaattttggatagacctaagagtggtttttattaccctstaagtaaagcagttcttggcacatagtaagcacaagtaaatgcgtgaatgaattttgaatgaacagttagctaatgacctgggtagggttgcctcttgga

SEQ ID NO: 134868 - DNA, 201 bp, Homo sapiens
tgagttaagtgttcagattatctctgttttatgggtgaggaagctgaggcacagagagataagcaatttgcccaaagttgcagaggtggttggtggtagartgggatataaatcccaggtagctttgctttcagagcctaactttgcaagctgtgctaggtgtcagaatgtgagtgtgtctgtatgtatgtgcacatgtgt

SEQ ID NO: 134869 - DNA, 201 bp, Homo sapiens
acatccatccctgctcagatgggggcggcagcagtggtgatggagaggagattgagatgggggtaagagaaaagaagggatcaagcctgacactaaggttytggctgtcagaaatggtaggaaggtagggtagggctgtatactgaggtgggaaagatagcgggaagagcagagaaaatctcagagggagaaaatcaagag

SEQ ID NO: 134870 - DNA, 201 bp, Homo sapiens
agacggggttgaagtgttaggtaagggccaagatacatgcttttaaggagttgaaattttatttgaaatgcagtagggagcagatgaaggggaagtggcawgttctggttaacaggtagggtcattccggctactgtctggctaatggattagaggagtaccagggtgaaagtgggaaaccagataggaggccatctgatt

SEQ ID NO: 134871 - DNA, 201 bp, Homo sapiens
aaaattaatgcgggtacaagccacgttttcagtgttcggaaccatggagagttttttttaaaatacagtccttttgaaactactttttagttttaattcartgtgggcataacaatatttttctcttctagccaacctccatgagagctatccgtgccagatatgaccctttcctacagacaagacaccgaatagaacagg

SEQ ID NO: 134872 - DNA, 201 bp, Homo sapiens
agaatacaatccagaagagggggtgctatgcttgggtccctgtctgtgccaggctctgaattcagacccatgttgcatctccttgagcctcctcaaggtayggaagcaactctgcctctcagttgcttccacacctcctaaacagcagggcactgggggagtgttatgactgcttctctgcttctggtggccgcaagacac

SEQ ID NO: 134873 - DNA, 201 bp, Homo sapiens
tcttccttcccagtatcctaacttttttggtattttcttcgtaagtatgtatcccttaactacatggtctagttttgttgttgcatatttttgttctggtyacttttgctcaacattgctgtaagattgagtcaacgttgtagtagctgtatttcattccttttcattgatatatgggattccattatgctgatagttcac

SEQ ID NO: 134874 - DNA, 201 bp, Homo sapiens
acctagacttaaaattattgtttaatgaatttgccttttaaataatataggaagaaaagaggagttacaaaccaaaagtgcaataatactagcttttatgyttacttatgtaattatctttattaatattctttatttcttcatatggttccaagttactgcctattctttcaattcaggttgaatgacttcctttagcat

SEQ ID NO: 134875 - DNA, 201 bp, Homo sapiens
taggttgggtgtttgctgatgaaaatggcgatagtttcccataggtagttaatcctatgctttgtgaatgcctgttaacttaggtcacaactggtgatacygtttgacctaagtgtttacttttcttccgaccttgtcctcagtttgtaaatccatccttgttccaggtctgtaggcttttgtataagttgtacacagtgg

SEQ ID NO: 134876 - DNA, 201 bp, Homo sapiens
tttcatcaataatagatctcggtctcgttgtaggttgggtgtttgctgatgaaaatggcgatagtttcccataggtagttaatcctatgctttgtgaatgyctgttaacttaggtcacaactggtgataccgtttgacctaagtgtttacttttcttccgaccttgtcctcagtttgtaaatccatccttgttccaggtct

SEQ ID NO: 134877 - DNA, 201 bp, Homo sapiens
catatttatcttatttacttcttggtagaaaatacattatttacagatactgcaaaggtagattcttctgttaggatttgaaaaggaagctcatttgttaycaggattctttggagatggtagatgcttggaactagctgattgaactcagttttgcatctgacattcttgttcttttgttgtactggcagatactgccct

SEQ ID NO: 134878 - DNA, 201 bp, Homo sapiens
ttagtagtaataagcttctttagcttttcttaatctggaaatgtcctaatttctcttttatccttgaaggatagttttgttggatatagaattcttgattrgcagatttacttttttctttcagccagcactttaaatgtgccatcccattgccttctgacctccatagtttctaatatcagttgttagtctaattgagga

SEQ ID NO: 134879 - DNA, 201 bp, Homo sapiens
cttctatgtgatgactcattttgcctcttgctgctttcaagattctctcaggttttcaacagtttgactcatattgtgatcattgtggatctctttgaggytatcctgcttggaatttgctgagcttcttgaatgtatagattcatgtctttcaacaaatttgggaagtattcagccatttctttaaacatttttttctac

SEQ ID NO: 134880 - DNA, 201 bp, Homo sapiens
gtaacctttagatttctcaaactcacctatttgaaagaattagcggaagagtttgcatgattctgggtaggaagataaaaggggggaaagattttcttgartgtggttcccaagagaacactgagtattgattcaaacttaggaaaacttcatttctgttatttgcccctaaaagcttaaacctctgaaataaacacaact

SEQ ID NO: 134881 - DNA, 201 bp, Homo sapiens
tatgtgtggaattttccagttatggcatcatgttggcactcaaaaaattatgaggtttggagcatttttgatttttggattagggatgctcaacctggacrtattctttatttgactgattccatataaggtagcatatcagagtcctctttcactttgccttttattttacaatatcttagtgaacattttatgtcagta

SEQ ID NO: 134882 - DNA, 201 bp, Homo sapiens
tttcattgtctttggctggagcgttattcttaattttgtctgccataatcaagcctgaagtcatctgttcactaagcttaaatactcgcgactcttctgcmctgcctctagcttccatcattgaaccttctttgttgttttcctccaaactctgtattgtagtgcttgtcattttagaaatggtgactgcaatttatcaag

SEQ ID NO: 134883 - DNA, 201 bp, Homo sapiens
atttttgtatttttagtagagacaaggtttcatcatgttggccagcctggtctcgaactgctgaccttaagtgatccgcctgccttggcttcccaaaatgytgggattacaggcgttagccactgtacccagcctggaatttatattttaataatggaaggtagacagtaaagaaacaagaaaaagtatcaggcactcaaa

SEQ ID NO: 134884 - DNA, 201 bp, Homo sapiens
gagtctcgctgtgtcccccaggctggagtgcagtggcacgatctcagctcactgcaacctctgcctcctgggttcaagcaattctcacccctcagcctcasgagtagctgggattacaggcactcaccaccacacccagctaactttttgcatttttagtagagacagggttttgccatgttgcccaggctggtctcgaac

SEQ ID NO: 134885 - DNA, 201 bp, Homo sapiens
ctccatatcaaaataaataaataaaattagaacatatgaatattttaatttattgcaatatacaattctaaaaatgtaggttatggaactcacaacagtasacattgggatatgcaactcaaaacagcacattctgttaaactcataaatgaaacatgggaatatgagctgcctaaattccacgtcagaaatttaaaatga

SEQ ID NO: 134886 - DNA, 201 bp, Homo sapiens
atatgtatagctgcatacataacatgcacacatacatgtaacacatttccatttgtatttatttatcagtctaccatatgttgaacactctgattggccayaatacctttaattccacccagcccacagagttcattctgcttctctctctttccatgtttatagctacttctctgatagtaagaagcctggcttgctttc

SEQ ID NO: 134887 - DNA, 201 bp, Homo sapiens
ctctgtttcttcctctgtctctgatcatttctgtcctatcttggctaccttattgtgcttacctctaaaagttgatgttttctgttgtcctgggctcattrtgtttggtattttacatgctttctttggtaacctcatccatttgatgattttagtattgatgtatgctgactcccagcatgaaccattccctgagcttca

SEQ ID NO: 134888 - DNA, 201 bp, Homo sapiens
ggcgaaacccatcagaactgctagtggggtgagtgattcgactcatgaggtatcgacacactgggtatctgttctggcagaagtccctgctccatgtgacrcccgtgtagtgaggtagaggttggggattctgaactaatgaagtccctgtattaggatatgtgctggagtggagacctgtgctgaatgcaaggagagcag

SEQ ID NO: 134889 - DNA, 201 bp, Homo sapiens
aaaactatccttgtcacgtggtgaagggattggagagtgacagttgttaatgatgttgtttatagatcatcctcttggtagcttgtccttaaataaccgtratcttgataatgtgagatgctttactttcagggtgaaaaccaagacagctgccaaatatggcctttctgcccagccccgcctggtggatatcattgctgc

SEQ ID NO: 134890 - DNA, 201 bp, Homo sapiens
tctaggtaatggaacatagaagcctggttttgggctgaggatacatggtttccctctggagctttcctacccttaaatacttattttccccctacaaacasatggagaaattttatgcattgtaagaaaatttttttcatttggggagttgataaatcataggtaaagtagaatttgccattttaaccatttttaagtgta

SEQ ID NO: 134891 - DNA, 201 bp, Homo sapiens
tacgcctgtctgcaaacatgtaaacatagaacatgaaaggactgtgccttgcacatttgaacatagcaggtattcaggcagcctcttgtacgtgttaggtmctcagttaatatttgttgacaaatatgtgagcacttcacagatatttctagatggattaaagttagaagacagggtgactgttaagagtttggctaggag

SEQ ID NO: 134892 - DNA, 201 bp, Homo sapiens
ccacttctgtttgattgactctagggaatgcaacaggtgaattctgtgtccgtgaatctggacctgtagcattgtgatttcttcgtcttacaggggctttmgtaatagaggagatggcgactgcattgttactgctcgttcaaaactgatcaagaggccgggcgtagtggctcacgcctgtaatcccagccctttgggagg

SEQ ID NO: 134893 - DNA, 201 bp, Homo sapiens
gattctgtgggtcagaaattcagcagggcatagaggggatggttcctgtctgttctgtgatgtcaagggcctcagctggggtggcttaaatggcagccagytggctgggatggtgtgtctgaagtttcagttctgactggggctgtccctatgagcagcttggttcttgtccacctgtctgctccatgtggcttgggcttt

SEQ ID NO: 134894 - DNA, 201 bp, Homo sapiens
atgcacatattagtaattacacctctggagataaagggaagagaattactttggtcctttcctgtgtgattaagttctttctcctcacattgtttctactyctgtatcctttcctgtatttatttttaataatctcatagagtatgtgcttctaaagggagcttttcccatatatatgtaaagccacgtttgttttaaaga

SEQ ID NO: 134895 - DNA, 201 bp, Homo sapiens
ttgtatataccacattgaaaaatgattcagatttattttatattggaacttgctttttattcttaacagccactgaaatcactgaaattttagactaggcrtatgcagtgctgaggtagcttatgagatttcacgttctagtcaatgtattacatcttgtgtttctgctgtgtagcaccactcccatgatctcatacactt

SEQ ID NO: 134896 - DNA, 201 bp, Homo sapiens
gcaaaagccactattgggattttgatagggattgcattgaatctttatatggctttgggtggtatcatcatcttaacaatgttaagtcttccaggccatgracacaggatatccttccatttatttagtcttctttaatttcttttagcaaagttttgtagttttcagtgtgccagtcttgcacctctttgcttaaattta

SEQ ID NO: 134897 - DNA, 201 bp, Homo sapiens
taattatttcattacatataacaatgcagtaataaaaataaagtgcacaataaatgtaatgcacttgaatcatcctaaaaccaccctgctcccctggtctrtggaaaaatcatcttccataaaaccagttccttttatcaaaaaggttgggaaccactgctctacaggtgagaagcttgcttgctgacagcttccaagctg

SEQ ID NO: 134898 - DNA, 201 bp, Homo sapiens
ttatattcagatagaactagaatttggtaactagaattttggaattcagacattatctaaaatgtctagacttttagaaagaaacttgtatcaggctgggygtggtggctcacgcctgttttcccagcagtttggaaggccaaggcgggcagatcacctgaggtcaggagttcaagaccagcctggccaacatggcaaaac

SEQ ID NO: 134899 - DNA, 201 bp, Homo sapiens
ggaggtttgactaatatttctgtaatgattaatgatgttgaatgtctttgtcatttttatcttctttagagagatgtctatttgggtctgttgcccatttyttaactggattgtttgtctttttgttgttgagttgtaggagttcttcatattttctgaatattagaccataaaatatttgcaaatgttttcttccattct

SEQ ID NO: 134900 - DNA, 201 bp, Homo sapiens
aatcggagtcttgctctgtcgcccaggctggaatgcagtgacgtgatctcagctcactgcaacctgtaccttctgggctcaagacattctcctgcctcagyctcccgagtagctgggattacaggcatccaccaccatgcctggctaatttttgtatttttagtagagatggggtttcaccatgttggccaggctggtctc

SEQ ID NO: 134901 - DNA, 201 bp, Homo sapiens
ttaacaatggaaatagccaccatgtttgtttcatctaatgagttatcaaaggacattgaaaaactggacacagatacaggaggtgaggtgatcaagacaartggcaagttctttctttaccagaaaagaagggatgtgctttcccacgaagactagaggtgcaagaccagagtcaggggagttgagtgggcctaccccatc

SEQ ID NO: 134902 - DNA, 201 bp, Homo sapiens
tagtagagatggggtttcaccatgttggccaggctggtctcaaactcccggcctcaggtgatccgcccacttcggcctcccaaagtgctgggattacaggygtgagccaccacgcccggccataaatttcattttttcaaatttttgctgctaatatatatacatacggttgatttttatatattaatgttatgtcataag

SEQ ID NO: 134903 - DNA, 201 bp, Homo sapiens
acgcacatctagtattgcttccacctggagctagatgtgtgcattccatcctcccttttaactaatgttaaagagagatgagggcctagcacagtgactcwcggtgactccccacacttggggaagccagagtgggagaattgcttgagcccaggagtttgagaccagcctgggcaacatagcaagaccctatctctacaa

SEQ ID NO: 134904 - DNA, 201 bp, Homo sapiens
ggcacctttgtagaactctggaagtgctgagttacatggtttggaaagcatttagcctttgagtatagatggactttatttctctcaaaaattgttgtgtmtatgttagccttgcctcattaaattagatgcagtgtgttacagtgaaaaaagcatggaagttgtggtgaaaagagctggatttgagtcttggctctgctg

SEQ ID NO: 134905 - DNA, 201 bp, Homo sapiens
tgctttttgaagcaccctacccttcctctcttcctctttggcagtcacgtggtgtcttgtttgaatggcagggaaaccattattccaatatatgccctccraggagttaacgtcgatttaacgggttgtaggacttttcatttgttaagatttgtttcacgacacatttgacgtgttagagagtttcttttaaagccttat

SEQ ID NO: 134906 - DNA, 201 bp, Homo sapiens
cggggcgtggctttgtgcacgtcggcttccgggaagagctttacgatacattgaccgacattttacgacaggcgggattgttttgtggctgtcagctttcyccgtggtctgagtttgtggctgcatttttatctctggtggctctgctacggcggcgcagaaatgaggcagaagcggaaaggtgcgaaaggggaaggagat

SEQ ID NO: 134907 - DNA, 201 bp, Homo sapiens
gaatcatgatgagaaatgcttagatgtaccccagtaaagcagctcttttaaccagcatgcttaagaaatcagggcactcttgattgttgaactttctggtyatccaaggactgtccagtcctgtgttagatgtaaggaactcttctctctcacctctgcagccatttatggtagacaaatataggttgatgcatatttttg

SEQ ID NO: 134908 - DNA, 201 bp, Homo sapiens
tcttgattgttgaactttctggttatccaaggactgtccagtcctgtgttagatgtaaggaactcttctctctcacctctgcagccatttatggtagacaratataggttgatgcatatttttggaagtaaagcactttgaccaacaattacacatcttccatcttaaaattaggccatcattttcatttgacagaggaca

SEQ ID NO: 134909 - DNA, 201 bp, Homo sapiens
taaataccctggagtcgccttggctcccgtcacaccccacatccgttggcagattcttttcgctctgccttccacatatgcccaggctctgggtacttttmaccactgtgactcagcccgagccaccaccatctcccacctggattattgtcatcgcttcctacctgatctccctatttctgcccttggtcacatatccat

SEQ ID NO: 134910 - DNA, 201 bp, Homo sapiens
catgtttgttttcccattagactactacattcctaaagctaaaatacgccttctgagaaaatcatctcttctgaaaatgaaagttgaaatgaggttttttwaaaaaaaataagttgttgccaatcagtaaatcaatacccatgcttgggttttaatgattataattatgaaaatgtaatgactcaggctcacttataatca

SEQ ID NO: 134911 - DNA, 201 bp, Homo sapiens
aaatctgaggaggggcttgtaggaaccctccatttgtagccaacttggacagcagttgtaggcaacctgcagcccctctgcttgcaattggtgtctgaagytgggggcagtctctggactgagctcagaactggggggccttgcgctcatcagagtaggtagggtccaaattgagttaaattgtagaacacccagttggtg

SEQ ID NO: 134912 - DNA, 201 bp, Homo sapiens
gtgtctttttacactgttgcatgcagagaggacccctggcttgcctgaggtcatatccaattgctcataagagcctcagtttctgctttttatgagcgggktgatttccattttctaagtggaaatcagcatctgccctctttctgccatatctatctccctagctttttatcataatctaaataatagctcaatttcaga

SEQ ID NO: 134913 - DNA, 201 bp, Homo sapiens
attttttcccccactcttctctctttaaaacttctgggaaaccgtctatcgtttggcctcatctggagcataggcagctcagacagtaaatccacctcttstccttcacctgtagcacctaaggtggtgcctggtgttgccagtagggtagtgaatacgcaggctccaacacacgggtgcacacgtttgctgttgcctgtg

SEQ ID NO: 134914 - DNA, 201 bp, Homo sapiens; identical to SEQ ID NO: 24002

SEQ ID NO: 134915 - DNA, 201 bp, Homo sapiens
ctgctttcatttcttttgcatatatacccagaagtgtaattgctgagtcaaattgtaactctatgtttaactttttgaggaaccaccaaactattttccayagtaactgcactgtttttcattcccacccacagtgcacaaggatttcaatttctctacatctttgccaacacttgagatttttctttttttttttttata

SEQ ID NO: 134916 - DNA, 201 bp, Homo sapiens
atcgcttgaacctgggaggcagaggttgcagtgagccaagatcacgccactgccctccaggctggataacagagtgagactccttctcaaaaaaagagaaraaaagcttggccatcattttagacattttcctcaaagcactgctttagctgaatcccacacattttgatatggtgtattttaattattattcaattcaaa

SEQ ID NO: 134917 - DNA, 201 bp, Homo sapiens
ctccaaaagtggcccaacctatgctactcactaccagctgtctatcagaaagtctgttttaatagtttgttgcaatgttgactccttatcaatgtaacttkaatatgaatagtactgttcttttctctaaatatttgacattgccttaattcattcaatttgataaagcttttctattttagatctgttagaggcagagat

SEQ ID NO: 134918 - DNA, 201 bp, Homo sapiens
tttgtactatctttgtgacaaattatcccctaaatgtcccctaattaaatgtacattttctgggttctgtatattcctctgttccattttggtattctaayaaagatcatatatgtttcttttttggtgcatgttccagtagtatttttaaaatcattattaatatcttcttaaagacaatggatacaatataaagtattt

SEQ ID NO: 134919 - DNA, 201 bp, Homo sapiens
ttggccatcattttagacattttcctcaaagcactgctttagctgaatcccacacattttgatatggtgtattttaattattattcaattcaaaatatttyttcataccctttatatatatgtatttgatccatggaatgtataggaatggggtgtttaatttccaaatttccagacaatgaggtttttcttgatatctta

SEQ ID NO: 134920 - DNA, 201 bp, Homo sapiens
gtttgccagaaccactgattaataaaatcatatgtgggcagaaaatagcagttgttttgttgaagcatttaaactacaaatggctgagatttacttattcraccttcacctgtctctcaggctactacacatctccctcagtttcaggagaagatagttttattccttgcattgtactctagttgaaaagaagggtacatt

SEQ ID NO: 134921 - DNA, 201 bp, Homo sapiens
cattttcctcaaagcactgctttagctgaatcccacacattttgatatggtgtattttaattattattcaattcaaaatattttttcataccctttatatmtatgtatttgatccatggaatgtataggaatggggtgtttaatttccaaatttccagacaatgaggtttttcttgatatcttattaatttctaatttatt

SEQ ID NO: 134922 - DNA, 201 bp, Homo sapiens
tcaatttccaggctcctagtacatactgagcaaatacttgatcaattaaacttatttcttcctctgttacatcacattaataattccacgttcattctttrtccagttggaatcacaaccctggctcacttgtttttccatagatgtgaagaattgatttcattccccatttaagcagtcacatagttgagattatttaat

SEQ ID NO: 134923 - DNA, 201 bp, Homo sapiens
caccgtgtattgagggctcacgtatgaaatgaagagacatatgaaaaaagaagatgtgtgaaatgtcaccctgccctgcgtgaatgttcgtgttgggctayaggaaactcacccaccttcccctcgttgattgtctttgactgcagaggaagataagttttctccctacttagactccagattagttcataactcaagatt

SEQ ID NO: 134924 - DNA, 201 bp, Homo sapiens
tcatcagcatcaaagtcaccgtgtattgagggctcacgtatgaaatgaagagacatatgaaaaaagaagatgtgtgaaatgtcaccctgccctgcgtgaaygttcgtgttgggctataggaaactcacccaccttcccctcgttgattgtctttgactgcagaggaagataagttttctccctacttagactccagattag

SEQ ID NO: 134925 - DNA, 201 bp, Homo sapiens
cagtggtggcctagatactctgtcctggcataactagtaagcttgagtaagggaaagatagaatcatttatcattttggttactgttgtgtaagagtaatrcatttaggtagaattttttaattgcattttgattcattatgacttcccttcatcttgccagattttctctgtaacttgggtttataatcttggattcagc

SEQ ID NO: 134926 - DNA, 201 bp, Homo sapiens
cccgcttaacttcctttgttctccttgggtttgtaaaagtgaaaagaagagaggagctttttcataaaatttaataccaagggtagctcaaagagcccatstgaaaggtttggcagctgggagagtttgtgtggacagcagcccacttctgtttgattgactctagggaatgcaacaggtgaattctgtgtccgtgaatct

SEQ ID NO: 134927 - DNA, 201 bp, Homo sapiens
ctaagtgtttacttttcttccgaccttgtcctcagtttgtaaatccatccttgttccaggtctgtaggcttttgtataagttgtacacagtggtggcctaratactctgtcctggcataactagtaagcttgagtaagggaaagatagaatcatttatcattttggttactgttgtgtaagagtaatgcatttaggtagaa

SEQ ID NO: 134928 - DNA, 201 bp, Homo sapiens
taatctgaattcactttcaaataacactataccacttcacttcacaggtaatgtgatacctttataataacaaaataatcctaattcctccctcctgtccygtgtgtcattgctgtcattcatttcacttaaatacatgcataagtaagcatttgtatatatgtatgtatatacacacacataagctatctatagcagcat

SEQ ID NO: 134929 - DNA, 201 bp, Homo sapiens
ttaattttgaataatattttttgtggctttttactaaataggttgaattggtaaggagagattatgttgcaaatggtggctgggaaacattcttgtcataygaagacccagatcaagacattttgattggcctcctacgattacgcaagtgttcagaagaaactttccgtttcgaattgggtggaggtgtctccatagtac

SEQ ID NO: 134930 - DNA, 201 bp, Homo sapiens
atgtgttagtctgaattgttcaccttgctctgggtaccatctccccatctaccgagtgtttctgcgtgtggccatgtccatatgtatacttttctctgtgygtgcaatattgttacatatggcttctatttaagaaaagtacaagagccatttgtacaatgagctgaagagccaaaagcctgtgcagactgctaccacaaa

SEQ ID NO: 134931 - DNA, 201 bp, Homo sapiens
atgttccagaaaaatagcaaaggacaccaaacaagattgtgtgcctgctttgcctccaaggctccagctgtttgtgttctccatctcctctcgcctccaaraaggccactgaccttcaagaaggccaaggtgactgacctggcctggttatcccaacaatctcgttatccatccatcttctttaaccctcacccctcataa

SEQ ID NO: 134932 - DNA, 201 bp, Homo sapiens
ttcagatttgggccacactttgaaagacatggttccaaggattgcatatggtgtttgtggacttaacctaagacattttattctctcactcaaattattakggagaaaatgtttcagaagattgttcaggggagagtttgtgaatattattggcatattctaccaaaaaaaaagtgaacaattttatgttccagaaaaata

SEQ ID NO: 134933 - DNA, 201 bp, Homo sapiens
agtttttttcttctggcagttttggctaggtatcagatccaatcgtgtgactgtttcagtttgccaagctaattgctatgcagcaagatgaccagctattycccaagctcgtctgactaccttcatcataagcagtattctatttgtgtcctttcaagtagaaaattaatatggccattggccaagaatcgtacaaggccg

SEQ ID NO: 134934 - DNA, 201 bp, Homo sapiens
tgattggcatttgaagtacagcatttggcaaatgctgttgctaatcccaggtccatgcagtccagcctcttacatttcagagtgtgcatgttgagatcttraagtccagccttgccagtgtagacacaacagcacatttgtagactttttgtccccattcttgttcctcttagtttatggatatagggaatcatggtctta

SEQ ID NO: 134935 - DNA, 201 bp, Homo sapiens
ctttcccagaccaaaattatacttagatatggagctggctggtcaggctgtatctgtgacctcaaaaaacataaaatgaaaaataaatacatcgttaatcmctatgcttcttgacattaactgttatttttctttcttccaagcaacaattctaagtgtccaagttaccttagattaagtcttgtcatatttgcatgccct

SEQ ID NO: 134936 - DNA, 201 bp, Homo sapiens
tcatgttccttgaatgttgagacatcataaaaaatataatttggtctctgttcctggttcctgacatagagctcctaaaacccttgtaattttctgagctkcaggggttcaacctggtgactcttggtgggctcctgggtggggacctgtcaccagaaaaatgaagccatgaggagagggttgaaccttcagccccaccct

SEQ ID NO: 134937 - DNA, 201 bp, Homo sapiens
cgtgatctgttgcctcactgcaaatcctaataattagtgtttgttctggttatttattataacataccaccccaaagtttagtgacttaaaacaacaaccytcttatttccttaatgattctgtgggtcagaaattcagcagggcatagaggggatggttcctgtctgttctgtgatgtcaagggcctcagctggggtggc

SEQ ID NO: 134938 - DNA, 201 bp, Homo sapiens
ttcatgttccttgaatgttgagacatcataaaaaatataatttggtctctgttcctggttcctgacatagagctcctaaaacccttgtaattttctgagchgcaggggttcaacctggtgactcttggtgggctcctgggtggggacctgtcaccagaaaaatgaagccatgaggagagggttgaaccttcagccccaccc

SEQ ID NO: 134939 - DNA, 201 bp, Homo sapiens
ctcaaaacagcagtcagatcatgtccctcctttgaccagcatcctctcattcttccatctcactcagaataaaagccagattccttaggagacctgcatgwtggtgcctccttgttccttgagtaagttgagtgcacgcccgtctcaggactttcacatttgtttttcctgctccctagaatcctgtcccccccatgtagc

SEQ ID NO: 134940 - DNA, 201 bp, Homo sapiens
atgggaggcagtgacagatcatcaggcattagattcttataaggagcacacaacctaggtcccttgcatgcgtagttcacaataggatttgtgctcctttsagaatctaatgccactgctgacctgacaggaggtggttactgctcctcaggcagtaatgtgagcaatggggagtggctgtaaatgctgtgtggcctgggg

SEQ ID NO: 134941 - DNA, 201 bp, Homo sapiens
taccttggggatcataattaacattttaagcctccagtcagtttgaataataccaagtgagttttaatagtatgcaaacactctgctcctatacatctctktccctccccctctgtattgttattgtcacagattacatctttttacctgtgtatccattaacctagacttaaaattattgtttaatgaatttgcctttta

SEQ ID NO: 134942 - DNA, 201 bp, Homo sapiens
ccacagtaactgcactgtttttcattcccacccacagtgcacaaggatttcaatttctctacatctttgccaacacttgagatttttctttttttttttttatagccatcctagtggtataaaatggcattctgtgggaggtttgactaatatttctgtaatgattaatgatgttgaatgtctttgtcatttttatcttct

SEQ ID NO: 134943 - DNA, 201 bp, Homo sapiens
ttttccacagtaactgcactgtttttcattcccacccacagtgcacaaggatttcaatttctctacatctttgccaacacttgagatttttcttttttttyttttatagccatcctagtggtataaaatggcattctgtgggaggtttgactaatatttctgtaatgattaatgatgttgaatgtctttgtcatttttatc

SEQ ID NO: 134944 - DNA, 201 bp, Homo sapiens; identical to SEQ ID NO: 23997

SEQ ID NO: 134945 - DNA, 201 bp, Homo sapiens
agttgttcagagatgttttctctccaaattgtatccttttgggaggaaaggataaactgagattcagtcagttggaacataacagattgaaccacatggawttggttttttttgagacagagcctcactttgtcacccaggccagagtgcagtggcgtgatcttggctcactgcaacctccgcctccctggttcaagtgat

SEQ ID NO: 134946 - DNA, 201 bp, Homo sapiens
ctccctccctctcttccttccttccttctttccttccttccttccttcctcctttcctttcttccacagtgcccttcttgcaaaaaaaaaaaaaaaaaaaagccatcttcaacatgtaatttttggatattcctaaaatgatacaaatatggggatgctaaaaatgttaactgccgtaaaatggaggttttaaacatttag

SEQ ID NO: 134947 - DNA, 201 bp, Homo sapiens
ttcatttagatttactgataaaattgacccttaaacaacacaggtccacttatactcggatttctttcaaccacacacagattgaaaacagtgtttgtggrttgtgaaacctgcgtatacagaaggctgacttttcatagacgcagcttctgcagggccaactgcaacacttgagtgtgtgcagattttggtatataaggg

SEQ ID NO: 134948 - DNA, 201 bp, Homo sapiens
tatgtttctctatcaatacatcacttatggagcttgtgagtgaggagtggtacaggtggatgtaggcttaagatttcgaagtgacactcttacttcacacwtaggtgggtggattaaaatgtaatggaatactgtaaaacaagaggcagtggtgcaatctctttcaaaatgtggaattagtaatgtcctcgatgagtctga

SEQ ID NO: 134949 - DNA, 201 bp, Homo sapiens
ttttaatagaaaaatcaactgttgaaattgcttgtgtggcccttccccttgttgttcaacccttctgaagcaattcagtccaaaggacattaggtggtgcrgagcagtgtaggtatccacatgcaggaggcagggagccacagggtccagagcagggtgagaaggtcactcattcacatgcaggaggcagaggcgtggtgc

SEQ ID NO: 134950 - DNA, 201 bp, Homo sapiens
tcgcaaggtcttgatgcccaagttaaaggcgaaacccatcagaactgctagtggggtgagtgattcgactcatgaggtatcgacacactgggtatctgttytggcagaagtccctgctccatgtgacgcccgtgtagtgaggtagaggttggggattctgaactaatgaagtccctgtattaggatatgtgctggagtgga

SEQ ID NO: 134951 - DNA, 201 bp, Homo sapiens
atgttccttgaatgttgagacatcataaaaaatataatttggtctctgttcctggttcctgacatagagctcctaaaacccttgtaattttctgagctgcaggggttcaacctggtgactcttggtgggctcctgggtggggacctgtcaccagaaaaatgaagccatgaggagagggttgaaccttcagccccaccctcc

SEQ ID NO: 134952 - DNA, 201 bp, Homo sapiens
ataagtatttcctttacaatgaggaagaatacaggagtgctcacaattactgcctttatttagctggtaaataaaatttattttagccaatgcagtgtgakaagaaaaattagtaaaagataatatttgaggattgaaaagaagggaacaaagcatattcatgaaatatccacagataatatcattacctatttttgaaac

SEQ ID NO: 134953 - DNA, 201 bp, Homo sapiens
catattcagaagtgggcatggacactagggccacaaagggtggcttgggtcctagggctgtaggaactggactggaacctaagtccacagaggcagtactmgatactgggtctgtaggcacctgcccaatactggagtcaactgtgatgggcctggaccctgggtctgctggaggatgggaccataggaactggcctggag

SEQ ID NO: 134954 - DNA, 201 bp, Homo sapiens
gttctctgttattccatggtggccagagtagaagctcaggatgctgctttaaaaaaaaatttttttccaaagtctttagttttaattagtggaaataatgkgctataaagggcttactttatcttggctgcccctattactatcaaatatataagtataaacataccagaaggtttcttaggcagattaagggcaacttca

SEQ ID NO: 134955 - DNA, 201 bp, Homo sapiens
attagaaaactactgttgaaaccctcaataagatgccctattacacccacagaattggcaaacattaaaatatggataataccaagcttcaagctttgatraagacatagaataatgagaactctcatttctcactggttgaggtgcaaggtggtacaaccattttgtaaaataatagggcaatatctattataataaggg

SEQ ID NO: 134956 - DNA, 201 bp, Homo sapiens
ggtgacgggagagcatcaagataaaaaggaaatcactattcctataatctcagctcattccattgtacctacctactaaatgatccaagcccagctgtccytcctgattttactccctccaggcttattcctctatttatatagattagatccaatacttcaggcttcacaatgatttccttctgagttatgaatatgtat

SEQ ID NO: 134957 - DNA, 201 bp, Homo sapiens
tattcagaagtgggcatggacactagggccacaaagggtggcttgggtcctagggctgtaggaactggactggaacctaagtccacagaggcagtactagrtactgggtctgtaggcacctgcccaatactggagtcaactgtgatgggcctggaccctgggtctgctggaggatgggaccataggaactggcctggagag

SEQ ID NO: 134958 - DNA, 201 bp, Homo sapiens
actggaacctaagtccacagaggcagtactagatactgggtctgtaggcacctgcccaatactggagtcaactgtgatgggcctggaccctgggtctgctrgaggatgggaccataggaactggcctggagagtggggtggcagaaactggcttaggcctcgggaggcctggagcctgggtctgcagatgcttgccagata

SEQ ID NO: 134959 - DNA, 201 bp, Homo sapiens
ctggagtcactggggctggcctggtcccaaagactgtctgacatccaaggcactggggtagacctggcatgaggatatacccagaaaccaagtccaccagrcaagcctggagcctgggctgtgtgatctggtctggcttagtgtgcaggtactagcctggagtttcgggcaatagtcgcatacccattactggattttact

SEQ ID NO: 134960 - DNA, 201 bp, Homo sapiens
gtgatagtttcatgagtatgtatgtattcacctctatattcatcaaggtttatatattaaacacatacagctttttgtatgtcaattatacctccataaaktagttctacaaaaaaataaataaacaccatagaggaaaaatacttttggcctctttctccatgaagtatgacttctatttcaggtttctggtggttactg

SEQ ID NO: 134961 - DNA, 201 bp, Homo sapiens
ccaagtccattaaaggatgatctattaagatgagaagcaataattgaccactggatttaataacacagagatccctgatggttttaaaaagtgtttcagtmgaatggtagcagcaaaaacccaattagatgaggttaggagggggattggagatagcatgtatagacaatcctttcaataaattttgctacaaactgttga

SEQ ID NO: 134962 - DNA, 201 bp, Homo sapiens
cttaaccacagttttgggacatggctttagagaatgcattagcagggactaagcaaataatgaaagctgaatttggggtagaaaaatggggaacaggagaygaaagaatcagaaagaaaatattaaggagcaacaaagagtcccctattgatttgtagtatagccaaagttttgtttttctcttccttagactcttagagg

SEQ ID NO: 134963 - DNA, 201 bp, Homo sapiens
tcagtagaatggtagcagcaaaaacccaattagatgaggttaggagggggattggagatagcatgtatagacaatcctttcaataaattttgctacaaacygttgaaacaaactaattacagcctgagaaggactctgtacttcttcatttgagtccttgtgggtaaactgtaacgtagcttaatcatcagacaaaattga

SEQ ID NO: 134964 - DNA, 201 bp, Homo sapiens
tattaaggagcaacaaagagtcccctattgatttgtagtatagccaaagttttgtttttctcttccttagactcttagaggactagaagacatcagagagytttaaaatgttctaggatgccaaagccaagaaagcatgtcctgtggatccgacaccttctcagttccctgatctagctaaaaccaaataccacttgctga

SEQ ID NO: 134965 - DNA, 201 bp, Homo sapiens
tatgaggagaggccctcaacaaaggtcattgcaaggggatggagtagggaatgcacaggaggggtattttggacaaagattggcagctgataggtgtgggkattgttctcatgtatcagcccaggatataatgttcccagggcaaatggaacacaagtttttttgcggggagtgatatagcatggtagatcttgaattaaa

SEQ ID NO: 134966 - DNA, 201 bp, Homo sapiens
ggggtcacaagagcaatattaagtatgaggagaggccctcaacaaaggtcattgcaaggggatggagtagggaatgcacaggaggggtattttggacaaakattggcagctgataggtgtgggtattgttctcatgtatcagcccaggatataatgttcccagggcaaatggaacacaagtttttttgcggggagtgatat

SEQ ID NO: 134967 - DNA, 201 bp, Homo sapiens
gccttccaaaaaggtttgtaaactattccctgttgctttccctaatgtttccctttaatatttctggcaccattctgagtgaatcccaacatttccccgtytttgttttcggtatcatgtctttttgatttcagattgcagatatgtacagccataggattgtcaggtgaggtggtcactgctcttattccggctttgcat

SEQ ID NO: 134968 - DNA, 201 bp, Homo sapiens
tcttcacgactttcacagacaatttttgacatgccttaactttttaactctgttttgtaatcttccttactaagggtgcattcttatattaataacttttwaaatatttccttttccttcttcccactttctttccttagtctttctttttgtgtctctttctgatctgtttcttctagtttctttttaaatcattctttc

SEQ ID NO: 134969 - DNA, 201 bp, Homo sapiens
gtcttgccaccagccaccagtcagttaaaacagctttcttttgctacagagaggtgcagccacatctaaagccaccagcagtgcaaggtcctctgactgcwttaacaacccctccctgagtgtccagatatgaagaatctgctcaatcaccaaagctcctgaattaagagttaggatgctcctttggaccttcaggaggaa

SEQ ID NO: 134970 - DNA, 201 bp, Homo sapiens
tgaattaagagttaggatgctcctttggaccttcaggaggaacttcattaggaattctgagatagagcaagcattgctggggaaccacaggtcccagtgtyctcctgtcatctcagaagccagtaaagaaaccttcttccctagaaagacttctggagagaaaaaaattccccaagatttgagagcatgagagtctcatgg

SEQ ID NO: 134971 - DNA, 201 bp, Homo sapiens
ctagagagactccagagctggtctgaaaggctgatgcaaaggagtctgctctggaactgaagtgttataagaaactggcaagctcagcagccctacagatrggtgaggagcccagagatgggagaggaagctattctcctggccaaggtcctgattcagtttgccagaatcataggcagacttgaggccgactggagctag

SEQ ID NO: 134972 - DNA, 201 bp, Homo sapiens
cgtccctcaaaaagtatcaaagaattgaaactcaccagatgatcccatccagacaatgggacaccagacccctcataaattatgattgcttccttaggtckcctgagttcctgtttttctacacattgttacatttcttcactgctatgaaaactcataattttagttgatcagcaagatggatttgagaccgagcttgca

SEQ ID NO: 134973 - DNA, 201 bp, Homo sapiens
ttatgattgcttccttaggtcgcctgagttcctgtttttctacacattgttacatttcttcactgctatgaaaactcataattttagttgatcagcaagayggatttgagaccgagcttgcatctcctctgctacagcatccaactcagccttcttccttggcaattggttatattgattggctttctgtgtggtgagctg

SEQ ID NO: 134974 - DNA, 201 bp, Homo sapiens
ttgtcaccaggagttggagataagcctgggaaacagagaccccctcccccatctctataaaataaaaattaaacaattagccaagcacagtgattcatgcytgtagttccagctactcaggagactgagattggaggattgcttgagcctgaatgatcaaggcttcagtgagtcttgattcagccactgcactccaaccta

SEQ ID NO: 134975 - DNA, 201 bp, Homo sapiens
aaaattaaacaattagccaagcacagtgattcatgcttgtagttccagctactcaggagactgagattggaggattgcttgagcctgaatgatcaaggctkcagtgagtcttgattcagccactgcactccaacctaggtgaaagagcgagaccctgtcaaaaagacaaatagaggcagagaatgacaatggggcacagaa

SEQ ID NO: 134976 - DNA, 201 bp, Homo sapiens
acaaaatctggcttttgttttaaaaggagcatcctcatttgttattgacggaagactaaaggcattctccatccagaaaagactgctaagaactgtgaagyatataaaagtttaccctacttggggcaatgtttcatgaatgctgacagataacacaagctttctgggtcaaagacagagttttatgactcattcaacagg

SEQ ID NO: 134977 - DNA, 201 bp, Homo sapiens
agtgaaataagccagacccaaatggaccaatatcatcggattccatgatatatgaagtacccagaataggcaaattcctagagaaataaagtaaaagttaytttatatacatatataaaatatatatattatatataggggtatatatatatatatacccctagccaggggctagggagagagggaatgagtaattgtgat

SEQ ID NO: 134978 - DNA, 201 bp, Homo sapiens
caggtagattgattttaaagctatgggaccagatgggatcaccgggaactctgaagtgatccaaaattaagaaactggggaggaaagaagggtccacagakgagactgagaaaaagtagtcagtaaagttaaagaaaaaacaagagagtgtgttgtcttggaaaccaagtccattaaaggatgatctattaagatgagaag

SEQ ID NO: 134979 - DNA, 201 bp, Homo sapiens
gtttcagtagaatggtagcagcaaaaacccaattagatgaggttaggagggggattggagatagcatgtatagacaatcctttcaataaattttgctacamactgttgaaacaaactaattacagcctgagaaggactctgtacttcttcatttgagtccttgtgggtaaactgtaacgtagcttaatcatcagacaaaat

SEQ ID NO: 134980 - DNA, 201 bp, Homo sapiens
gttgtatgtgcctctcgcccctcccctgcaggctagctccaatggtggcttagctcttcgttgcctctgctgccatgtgggcggagttttagttttttctyactgcttgcttggcaatgcagctctagcttctaatgcccttttttaaccctttaggtatctgatcgctttgccaattttgcgttactgggcaggctaaga

SEQ ID NO: 134981 - DNA, 201 bp, Homo sapiens
gaaccaactttccccagaacttggtaaccttgagtgggcaccaatgacttactagttactcactgacttgaccacgcggtttttcttcacctttgtttccygggggcccgtcgcattcctcaggcttcctttgcagctttcctcatgaaagcggtccttacacttccttcatagcttgccttacaaggggctccaactgcg

SEQ ID NO: 134982 - DNA, 201 bp, Homo sapiens
ccacgcggtttttcttcacctttgtttcctgggggcccgtcgcattcctcaggcttcctttgcagctttcctcatgaaagcggtccttacacttccttcawagcttgccttacaaggggctccaactgcggaaggtctgtttctgcagacccctgactgtcctcacacagctctcctcacatggggcaccaattgaggtat

SEQ ID NO: 134983 - DNA, 201 bp, Homo sapiens
acaacagggcagtagctacctgtgtctgcccgcagaccctgacccaaacgacggatgaataaaatgtacactgacacacagataatctgttttgccagtcmtgctgagtgtctgaccgcctgtaaaccaaaagaggtttgtcactgcagcttgccctgagtagctcagactctaggagtttatttagtgtagaattaacaa

SEQ ID NO: 134984 - DNA, 201 bp, Homo sapiens
catggttaagagagtagttctaggaatgattaaaactcaggtaccctggtttaaagtaaataccattagggggcaatatccttggtcaaactacccccaaragggccatctgtctcaaaggttacttaatggaggtagggtaaacagatctaactggggaagcctgtgttgtccctagtatttaccctatgacctaatgct

SEQ ID NO: 134985 - DNA, 201 bp, Homo sapiens
gagtttaaagtagtaaacgggctaggtttaagaatgatatttacaaaacattggatttagcttagtcaacaatatcagaaaatgtaataccccccaaattrttttataatgcctagaaaaatattatttacctagaaataaatgtaaaaatgatttgttaaccttttatggagaaaattattttgttgaagacacaaaaat

SEQ ID NO: 134986 - DNA, 201 bp, Homo sapiens
gattagatccaatacttcaggcttcacaatgatttccttctgagttatgaatatgtattatttttctgattatttttagtcatctatctgggttgtcttakagctcaccaagctattcaatgacaattattttaaattcattatgagacagttcataaactattatttttttaggttcagctattggttattttttttttc

SEQ ID NO: 134987 - DNA, 201 bp, Homo sapiens
tgtagagttgggcctgaagcctggatcaactggggtggatcttttcattgggtatgtggggatgaacgtaaagccaatttctataagggcaggtacagagsctgttaacagtaggtgctggactgagcatgggtccacaggggctaacatggctctgaggcgtgcattgagcctgtgtctgcaggggctggccagattttg

SEQ ID NO: 134988 - DNA, 201 bp, Homo sapiens
cattgccttccatgtttttttcaatcttgcataaaaataaaaacatctcaatggtacaaactaaaattctcaaataagaaataaatcacacatactttcaycacccaaaaacaattttcatgtttatttattcccttcaagtccttgtccacatgcaaacataatttgggtacatatgtaaaagttatatattttgatatt

SEQ ID NO: 134989 - DNA, 201 bp, Homo sapiens
tttgtgttatgtgtcctttacaacgatttttttaaagaaggtggggaggggtctccccaggtttttagcagcttcctgatttagaaaagaaatgttgatgktaggaatacaggtagagaacacttttatttgggtagatgttagaagctgaggccagggtggggtcacaagagcaatattaagtatgaggagaggccctca

SEQ ID NO: 134990 - DNA, 201 bp, Homo sapiens
cccaggatataatgttcccagggcaaatggaacacaagtttttttgcggggagtgatatagcatggtagatcttgaattaaaacttttaaaatcttgaccmaaagctcaaaggagaagacaatagtgaaacacatgggtatgggcaattttagttaaatcaggtgagaaacagagcaaagaaagcacttggagatgggggg

SEQ ID NO: 134991 - DNA, 201 bp, Homo sapiens
atatgatactaacagtacctacatcacgagtgttacttgaatggagatgtataaagtgcattttaaattcatttgtttccttaacattttcccttcatttmttatcttttcagagtttcttcttcaaggtctcaaggtctgaagcatcccacagaatgatcctactgaataactcccataagctgctggccctatacaaat

SEQ ID NO: 134992 - DNA, 201 bp, Homo sapiens
aaaaagttcaagggaatgacctgatcttatatcatccaatacaggagatgactgatgacatggattcatacacaaacgtatatcgtatgttctccaaagascctcaaaaatcagaagaagttttgaaaaattgtgagatcgtaaactggaaacagagactccaaatccaaggtaacgagtctgaagaaatgggcaagcagc

SEQ ID NO: 134993 - DNA, 201 bp, Homo sapiens
gggcaaatggaacacaagtttttttgcggggagtgatatagcatggtagatcttgaattaaaacttttaaaatcttgaccaaaagctcaaaggagaagacmatagtgaaacacatgggtatgggcaattttagttaaatcaggtgagaaacagagcaaagaaagcacttggagatggggggaagaaaaagaccattttttt

SEQ ID NO: 134994 - DNA, 201 bp, Homo sapiens
ttaacttcatggataaaaaatttcaaaaatctgtgttaactgatttgcaaatgattgtttcaaatatctgattcgtgggttccttctcttacattaatttkgttgtaagttcttcacatttttaattatttttacatcattgaatataattgctaaatctctatatgacatgttgattaatatgaagtcaattaaaaaaac

SEQ ID NO: 134995 - DNA, 201 bp, Homo sapiens; identical to SEQ ID NO: 24014

SEQ ID NO: 134996 - DNA, 201 bp, Homo sapiens
acttcatggataaaaaatttcaaaaatctgtgttaactgatttgcaaatgattgtttcaaatatctgattcgtgggttccttctcttacattaattttgtkgtaagttcttcacatttttaattatttttacatcattgaatataattgctaaatctctatatgacatgttgattaatatgaagtcaattaaaaaaactaa

SEQ ID NO: 134997 - DNA, 201 bp, Homo sapiens; identical to SEQ ID NO: 24011

SEQ ID NO: 134998 - DNA, 201 bp, Homo sapiens; identical to SEQ ID NO: 24010

SEQ ID NO: 134999 - DNA, 201 bp, Homo sapiens
aggtttgaaatatttggccctgagaaactaaagaaaatctatgcctactcctgctccaagttttttagtcatacctgttcttagagggctgatattttctrttgcagatgaaagaagaattctcaggcatataatgaccaaaatacaggaaaaaacttatgatggtagtggtggagtgttctgttacaggcatttgggaag

SEQ ID NO: 135000 - DNA, 201 bp, Homo sapiens
tggttattatccggcctcaaaagcaggtaggcacacagacagggactggtggagccaggcaggtccacagggcctgaggaactgaccagttcagacaccakggctgcttttatagggtgaaaggaaacgtgagtattttaaaacactccttcagtactgggcaccttgcatgagtgccacgtgttcccacccttcgtgtaa

SEQ ID NO: 135001 - DNA, 201 bp, Homo sapiens
cattttctagtcagatggctttgtggatgtttctttccctttctctgactttacgtttggtttttccatcaatgagatgggaataacgttagcacctacckcttaaagttgctatggacactgaataaatctatacaatataaatgctaagagcattgccaagtgcccagctagtacacagtagctctttggtatcacaag

SEQ ID NO: 135002 - DNA, 201 bp, Homo sapiens
atttcttataaacttaatagctatatgaacataactaattcttccagttccccaccaactatcccaaataactattcgagttgtgattggtattggaggascatttttcgacaattttggaagaattaatatttttgtgacactaaattttttcatcaagaaatatggtctttttctcactttttttcagtttgcattcta

SEQ ID NO: 135003 - DNA, 201 bp, Homo sapiens
tcaccaatctttttttactttcctatttcttataaacttaatagctatatgaacataactaattcttccagttccccaccaactatcccaaataactattsgagttgtgattggtattggaggaccatttttcgacaattttggaagaattaatatttttgtgacactaaattttttcatcaagaaatatggtctttttct

SEQ ID NO: 135004 - DNA, 201 bp, Homo sapiens
tcaacatattcaagccagtaccaggctagagtgagagaaagtttccagatcaaatatttgtgtaaactaattcaactaaagtctcaagaggaagagattcrtgatgagatatctggagtcacaatgtgcaaaattcatcacaaagtggaaaccagcatcttacaatacaaagaacaatggcttgggattctgagcatctgg

SEQ ID NO: 135005 - DNA, 201 bp, Homo sapiens
gagggggattggagatagcatgtatagacaatcctttcaataaattttgctacaaactgttgaaacaaactaattacagcctgagaaggactctgtacttyttcatttgagtccttgtgggtaaactgtaacgtagcttaatcatcagacaaaattgaaaacctaatttagtagtgtgcacctgtaacaatactccagtgt

SEQ ID NO: 135006 - DNA, 201 bp, Homo sapiens
tccctaggaagttttcagattttatgaataggtgccaacagctatcagatgtcttccaacgatggctgctgcatcccagtttcacattgctaagggttaawgaaggacattgatatgaaagaagcatcccagagacccttgacacattgtgagagtacacagagggtggggctccatcaacctcccacagacactcagcca

SEQ ID NO: 135007 - DNA, 201 bp, Homo sapiens
catgttcatgtcagaatccaagctgccacgagtgtttcatgaagtcacttatgactaatactgagtacaatgggactgatatcagaactaagctaggcccrgagagccctgaggttgtgacacataaggctaaacctttgagttttgatccacagagtagatacatcagagaagtggacttggagaatcccctgctggagt

SEQ ID NO: 135008 - DNA, 201 bp, Homo sapiens
tcagctggcataagctggtccattatcagctttaatctttgtgggctatcctataaatgcaaaagttaaaagatgtttaatgacatcttgagtagactctrcaggcagagcatgtgcattaattaaatgagtgttattatcaatggatacacacacatatcttagttttccaaatttaggcatgtgtgtaatatgtttgcc

SEQ ID NO: 135009 - DNA, 201 bp, Homo sapiens
gcaggctaagagatcttcttttaattcagcctgcttaagacgggaactgataactgtagtgtatcctctgccttttttcttatctattggaggaagctcargtaagacctccttttcctctctgttaattccgcctggtgattagggcccagggaagacgaggtgataaggcaggtaatgtttcctcttcctgcccctttt

SEQ ID NO: 135010 - DNA, 201 bp, Homo sapiens
caaactacccccaagagggccatctgtctcaaaggttacttaatggaggtagggtaaacagatctaactggggaagcctgtgttgtccctagtatttaccytatgacctaatgctctaaggtaagaaatggctgccttcagcctgttcaattattacaagctttataacctttcaacctttcaaaaaggtttgtgactatt

SEQ ID NO: 135011 - DNA, 201 bp, Homo sapiens
ggtctcaaggtctgaagcatcccacagaatgatcctactgaataactcccataagctgctggccctatacaaatccttggccaggagcatccctgagtccytgaaggtcagggaacagtgggaggtcagggtatgggagtaggggtgttgaggatgagaaaatagcaggcttgtgattctagtccttcctgactgtttgca

SEQ ID NO: 135012 - DNA, 201 bp, Homo sapiens
tccatggtggccagagtagaagctcaggatgctgctttaaaaaaaaatttttttccaaagtctttagttttaattagtggaaataatgtgctataaagggyttactttatcttggctgcccctattactatcaaatatataagtataaacataccagaaggtttcttaggcagattaagggcaacttcaaaatctcacaag

SEQ ID NO: 135013 - DNA, 201 bp, Homo sapiens
taatgtttccctttaatatttctggcaccattctgagtgaatcccaacatttccccgtttttgttttcggtatcatgtctttttgatttcagattgcagawatgtacagccataggattgtcaggtgaggtggtcactgctcttattccggctttgcatcctagaattagcaaataatacaagacaattatgagtacaatt

SEQ ID NO: 135014 - DNA, 201 bp, Homo sapiens
atagggtgaaaggaaacgtgagtattttaaaacactccttcagtactgggcaccttgcatgagtgccacgtgttcccacccttcgtgtaaagcataggacycttctgggaaagggggtggaggaggaaagggaggaaaaggacaaggctgacactcacagattaagggccctatgaggtggcaggggtcacctgcaggggc

SEQ ID NO: 135015 - DNA, 201 bp, Homo sapiens
ttgccataactgcttaggttccaatcctctagggttaacacttgttgaaggaggggacgtgcctgtgagctggcaatctggacattgtaggataattgttktagccagcctctgagtaagttgaaattgtttagataagtttctccaattttggtggaaaaattgatgcgattgggtggctaggcctagcagtgatgtcat

SEQ ID NO: 135016 - DNA, 201 bp, Homo sapiens
ggctgacactcacagattaagggccctatgaggtggcaggggtcacctgcaggggctgaaaggaggccaatttacagggaaagttgggtgtctgagatatyagaacagtggcttagaaacagaaaccaaggcataagtctaccagtaaaattacctctcagggccaggcatggtgtcttctacctgtaatcccagcatttt

SEQ ID NO: 135017 - DNA, 201 bp, Homo sapiens
ttcatgtatgcattgctttgaacaaagttagtttttacagtgagtcaataaacaaaaatatgaaaatataaaagtcccacaccacacatataagaccaaamaaaaaacaaaaaggaaagaatgaaatacgctgcaatttacttggaagtgcattcacctagtctgattccatagcataccatgtttctttcagtattgaaa

SEQ ID NO: 135018 - DNA, 201 bp, Homo sapiens
caaactgttcatacttctttgccactacaaacaagcttcaataaacatcttcatatacatatctttatatcctggaaatttttctcagtacaactgatttycaaaaggaatatctgcaagttacagtttatcttattctaagcaggcaatgccaaattaccttcccaaaggattccacaattttatttttattagcaatgt

SEQ ID NO: 135019 - DNA, 201 bp, Homo sapiens
aacattcttttatattaatcttccttatggctggctaattatgttagtaccatttcttaaataagtcattccctactgaaatataaatgtctattttgtcrtataacatgttatatatttttgtatctgtttctgtattttttctagtcttttctcatgctatttcattgtttctgtggtaaattttaatatctaataaag

SEQ ID NO: 135020 - DNA, 201 bp, Homo sapiens
agcattattattttgttattgctttgtgtttgtagtcttgatttccaaatatgtcccactgttgtttaaaatcctgtttgtgtggggcattatttgttttktttttttgtcgaagtctcttggattttctaaatgtgtaatactgtaatctacaaacaaagtaatttgctgctgctttgccagtatttgtatgggttttta

SEQ ID NO: 135021 - DNA, 201 bp, Homo sapiens
gttatttaatttttgtcttttctatttggcaatttatacactcatgtaatttttttctcctctaatttattacactaaaagaccttccaatcaaagccatyctggcctttctaaaaccaactgttcatattcacattttttgtatatgctactgaatattttattcataatttttgtatctgcatgcataagggaatgttg

SEQ ID NO: 135022 - DNA, 201 bp, Homo sapiens
gtggtggagtgttctgttacaggcatttgggaagctcacagaactcttaatattcacttttaattctttccacaagggaggaagggcatgggttttggagmcagtcatatatggtttcaaaatctgactctggcatttatctctaagaacttgagaaatttacttagtccctctgagatttggtgtattcagaatgaatat

SEQ ID NO: 135023 - DNA, 201 bp, Homo sapiens; identical to SEQ ID NO: 24012

SEQ ID NO: 135024 - DNA, 201 bp, Homo sapiens
ctctccaggaccatactgctcatctcaccatcactgacttggtctcagtaccttctcttaatctccatttttctcttcctcttcacaaccagatcctcatytctggggatctcaacctctcctggtccctttcatccctccttcaggtgtatggctctgtgtatcacatcaatcacgggaaccccttcaacatggaggtgc

SEQ ID NO: 135025 - DNA, 201 bp, Homo sapiens
attgattggctttctgtgtggtgagctgcaggacctagaccacacccctggtgtttcagtaacagcttttggtttcccgaccaggaacactttggctcagytgccatgggccaggagtctcacagaactactaagcagctgcttacccaattttggctggagagataagtaccctctggggccaccacagctggccccaac

SEQ ID NO: 135026 - DNA, 201 bp, Homo sapiens
acttgctttatgaatctgagtgttcccatattcggtatatatatatatatatatatatatatatatatatgtgtgtgtgtgtgtgtgtgtgtgtatatatatgtatatatatgtacaacaagaagagctatcatatatgtgtatatatatgtatatatgtatgtatatgtatacatatacatacatatatatgtgtatatg

SEQ ID NO: 135027 - DNA, 201 bp, Homo sapiens
gacaaattagattaggaggacaaattgaaattgaaattaaaattaattaatttaattgattatttaataatcaaataatcaattaaataattaattaattmaattaattaaattaattaaaattaggcatgagaacacattgaaagatgtagattaaaattaaaattaggcatgaggacacatcgaaaggtggaatttatt

SEQ ID NO: 135028 - DNA, 201 bp, Homo sapiens
cagggagtcacttgcttatagtcacacagttagtggcaacatccaaagcaagactgtctcactctaaattccatctacttccatcaggcaacttcctgtakcttctaaatgggcatttacttcactcctgtctaggctcacagtccagactgaatgaggtaatacaaagtcttgtagctgctaaattggtcaaagtcaaaa

SEQ ID NO: 135029 - DNA, 201 bp, Homo sapiens
gcctcatctgtgtccctacaaaggacatgaaatcatccttttttatggctgcatagtattccatggtgtctatgtgccacattttcttaatccagcctaayattgatggacatttgggttggttccaagtctttgctattgtgaatagtgccacaataaacacacatgtgcatgtgtctttatagcagcatgatttataat

SEQ ID NO: 135030 - DNA, 201 bp, Homo sapiens
gagtctaaatctctttgtatgtttctaaggacttgctttatgaatctgagtgttcccatattcggtatatatatatatatatatatatatatatatatatrtgtgtgtgtgtgtgtgtgtgtgtatatatatgtatatatatgtacaacaagaagagctatcatatatgtgtatatatatgtatatatgtatgtatatgta

SEQ ID NO: 135031 - DNA, 201 bp, Homo sapiens
gtttttcaaagatcagttggttgtatatgtgtggtgttatttctgaagcctctgttctgttccattgtctatatatctgtttcagtaccagtaccatgctstttcggttactgtagccttgtagtatagtttgaagtcaggtagcatgatgcctccagctttgttctttttgcttaggattgtcttgggtatgtgggctct

SEQ ID NO: 135032 - DNA, 201 bp, Homo sapiens
tctaaattccatctacttccatcaggcaacttcctgtagcttctaaatgggcatttacttcactcctgtctaggctcacagtccagactgaatgaggtaawacaaagtcttgtagctgctaaattggtcaaagtcaaaagatcacaatgccagctttatgaaatgcctgagacagcaaagaaactggttccctttctgcta

SEQ ID NO: 135033 - DNA, 201 bp, Homo sapiens
catgcttttcctttctgtgtgttagttttccttctaacagtcaggtccctcagctgcaggtctgttggagtttgctggatgtccactctgtgctctgtttkcctgggtatcaccagtggaggctgcagaacagcaaatattacagaacaacaaatattgctgcctggtccttcctcaggaagatttgtcccagaggggcac

SEQ ID NO: 135034 - DNA, 201 bp, Homo sapiens
tggtataagcaatttgatttattccatgttgcccaaacaggagatgacagatgactttgatcactacaccaacagctaccatatctattctaaagatcccragaactgtcaagaatgccttgacatgtcaggtatcatcaactggaaacaacatttgcagatccaaagtaagatgactaagatatattctggtttctggga

SEQ ID NO: 135035 - DNA, 201 bp, Homo sapiens
aaccaggtacttcagttggaaatgccaaaatcacccatcttctgtgttgatcacactgggagctgcagactggagatattcctattcggccatcttgaaayagacctctatggagttgttattaatatatccatgttatgtcagaagaaatggtggcagagagattctaagttacctgttcaagatcacacagacagtcat

SEQ ID NO: 135036 - DNA, 201 bp, Homo sapiens
aaaaactgccattttctcatcagatctcataagaattcactcgctatcactagaacagtgcgggggaaactgcccccgtgacccaatcactttcctccccytacatgtggggattacaattcgagatgagatttgagtggagacacagagccaaaccatatcgcatgatatgcaaaagagttatctgacccatctgtttga

SEQ ID NO: 135037 - DNA, 201 bp, Homo sapiens
cagctattgaagcttgtgcatgcatcacgaagttctcgtgccacggttttcagctccatatggtcatttgaggtcttctctacactgtttattccacttasccattcacctaaccttttttcaaagcttttagcttccttgtgatgggttagaacatgaccctttagcttggagaagtttgttattaccgaccttctgaag

SEQ ID NO: 135038 - DNA, 201 bp, Homo sapiens
cttgctttatgaatctgagtgttcccatattcggtatatatatatatatatatatatatatatatatatgtgtgtgtgtgtgtgtgtgtgtgtatatatatgtatatatatgtacaacaagaagagctatcatatatgtgtatatatatgtatatatgtatgtatatgtatacatatacatacatatatatgtgtatatgt

SEQ ID NO: 135039 - DNA, 201 bp, Homo sapiens
taaaaactgtagattgcttacttgcattgattcgacttttgattggcagcacagtattctgctggtgagggcaagagagggcgtgtagatccctgtgtccwtggactgactgcaggaggcttccccatctgtccatcttttagcagaagtattaaaacgatttctaactagatccaaaggattcatttttactttgattgc

SEQ ID NO: 135040 - DNA, 201 bp, Homo sapiens
taagaaactccattttgacctgtaccgtgaacaattgttttgccttgagatgctgttagtctgtaactttagccccaaccttgagctcacagaaacatgtrttgtatggaatcaaggtttaagggatccagggctgtacaagatgtgccttgttaacaatatgtttacaggcagtatgctgggtaaaagtcatcaccattc

SEQ ID NO: 135041 - DNA, 201 bp, Homo sapiens
aatcattactattatccacattttatagagcaggaaattgacatagagatagcacaaatagattgctcaaaattacacaagatgaaaatagccgactcagstttaaggccacagaacttgtgccaagagctctcacgtgagatatacaaacaaagattccttttctaattgccatcagctatttgagaccatattatctgc

SEQ ID NO: 135042 - DNA, 201 bp, Homo sapiens
ttctgctacaggcatgtgggaggctcacagaactcttaatattcacttttaattcattccaccagagaggaaatgcatgggttttggataggactctgtcrtttatccctgtaagaacttgagaaatttatttagtctctctaagctttggcgtattcaaaatgaagacgatactaacagtacctacatcatgagtgttac

SEQ ID NO: 135043 - DNA, 201 bp, Homo sapiens
gtggtgaagaatggtggctacgaacatcggtttggggccagattcaataaatatgcattgcaaggctgccattttttagtcagatatcattgtgcctgtgyctttagctttctatgcctttatctttggtcttttcattaataaaatgggaataatattagtagccacctattaaagttgttgtggacactgaatgaatcc

SEQ ID NO: 135044 - DNA, 201 bp, Homo sapiens
gtggacactgaatgaatccatacaatataagtgctaagtgcattgtcaagtgcccagctactgcacagtagctctgtggtatcacaaggacacctccctgkgagttctgcctgtttgctggtgacttcacgtccatcagtatggtcctggagatgctgctcatcacactatcaccaacttggtcccagtgctgtctcctga

SEQ ID NO: 135045 - DNA, 201 bp, Homo sapiens
agtgctaagtgcattgtcaagtgcccagctactgcacagtagctctgtggtatcacaaggacacctccctgggagttctgcctgtttgctggtgacttcaygtccatcagtatggtcctggagatgctgctcatcacactatcaccaacttggtcccagtgctgtctcctgacttccatttttctcttcctcttcacatac

SEQ ID NO: 135046 - DNA, 201 bp, Homo sapiens
ataagcttttgttcagtgaatgaacaaatagagtcagtgaaggttagaaatgtggtttttagaatgcttttcctcaaagactgagcattaagtctctttgytcctggcatagccaagtttctgagaaaacacgtggctgctaacagaaactttcaaagcagaagaaaatgctttatagtaggtttttttgcaatgaatatt

SEQ ID NO: 135047 - DNA, 201 bp, Homo sapiens
gtggtatcacaaggacacctccctgggagttctgcctgtttgctggtgacttcacgtccatcagtatggtcctggagatgctgctcatcacactatcaccracttggtcccagtgctgtctcctgacttccatttttctcttcctcttcacatacagacccccatctctggggatctcaacctctcctattccctttcatc

SEQ ID NO: 135048 - DNA, 201 bp, Homo sapiens
agtatactgttacatttggtcctcacaacaattctatgcggtaatcattactattatccacattttatagagcaggaaattgacatagagatagcacaaayagattgctcaaaattacacaagatgaaaatagccgactcaggtttaaggccacagaacttgtgccaagagctctcacgtgagatatacaaacaaagattc

SEQ ID NO: 135049 - DNA, 201 bp, Homo sapiens
tttctctggataatcccatttcctctcacatctcaaaaatgtgtacattagtatattgacatgtctaaattttcacaggatgagtgtgtttgtgtgtgtgwgagagagagagtgtgtatgtgtgtgtgtgcacgtgtgtccccaggatggaagggtttccagtccagggtgggttcctgccttgtgctctgagctaccagg

SEQ ID NO: 135050 - DNA, 201 bp, Homo sapiens
caagtgagcactcatagtacccggtttggacttcatatccctaaaagaggcactgaagagatggaaaaaaacagtcctgaatcaccaacccccctccctcycaacctcagtagcagtcatgtggtgcacagtctatctctgggcacgggggggaaggaagaacacagcaattatgaggcactgaactcattgttgttatgt

SEQ ID NO: 135051 - DNA, 201 bp, Homo sapiens
tcctattccctttcatccctccttcaggtgtatggctctctgtttcacatcaatcacgggaaccccttcaacatggaggtgttggtggactcctggcccgrgtatcagatggttattatccgacctcaaaaacaggtaggcacacagacagggactggtggagccaggcaggtccaaagggcctgaggaactgtccaattc

SEQ ID NO: 135052 - DNA, 201 bp, Homo sapiens
aatgagcagcttgcatgaatgccacatgttaacactcttcccgtaagcataagactaatttgggaaaggggttcaagggggaaggggaggaaaaggacaargctgacactcacagattaagggccctttgaggtggcaggggtcacctgcaggggctgaatggaggccaatttacagggaaagttgtgtgtctgagatatc

SEQ ID NO: 135053 - DNA, 201 bp, Homo sapiens
cctccctcccaacctcagtagcagtcatgtggtgcacagtctatctctgggcacgggggggaaggaagaacacagcaattatgaggcactgaactcattgytgttatgttagacacaaaggaaaactagatcaaactcagctgacacctgcccctggaggcagagggagcatttaagccagtcctaacctgagaggaatca

SEQ ID NO: 135054 - DNA, 201 bp, Homo sapiens
ttgaacgtcagctcgactgcaatataatagaacaccaggtactcgtctaatgtttttgactctagtccctgacttctggacagcacctctgtatccacccmgggcctgggggatctcactgccctgatgggaaggacacaggcctggccggctttgctgcctgctgattgcagatctccagggccttgagcaaacataggc

SEQ ID NO: 135055 - DNA, 201 bp, Homo sapiens
ggtggcaggggtcacctgcaggggctgaatggaggccaatttacagggaaagttgtgtgtctgagatatcagaacagtgatttagaaacaaaaaccaaggsagtagtctaccagcaaaattacctctcatggccaggcatggtgtcttttacctgtaatcccagcattttgggaggccaaggcaggaggatcgcttgaggc

SEQ ID NO: 135056 - DNA, 201 bp, Homo sapiens
gtgggcctcaggcctgatgtagtgcagtcataatggtggtggccacagaagtgcttatgtcactccacccccagttttaggtggcacagacaagagagagaaatttttttttttttttcaagaaattaagggaagaaaacagagcagtctctgcctggcaatccagagaattctcctgaatcatgtccaaggccattgagg

SEQ ID NO: 135057 - DNA, 201 bp, Homo sapiens
gaaatagtaatacaaacctaggtctattttttggccctaaaggcttcccctttttgtatctgtttcatgcacatctggttagtgaactgaagcctcatggmcagcccagcttcaggtgggtatagacgctgagcccccacataataataagctgagcctaacaccttcccagggatgttcttttgatctcaaggtttcctg

SEQ ID NO: 135058 - DNA, 201 bp, Homo sapiens
ggcctcaggcctgatgtagtgcagtcataatggtggtggccacagaagtgcttatgtcactccacccccagttttaggtggcacagacaagagagagaaatttttttttttttttcaagaaattaagggaagaaaacagagcagtctctgcctggcaatccagagaattctcctgaatcatgtccaaggccattgaggcag

SEQ ID NO: 135059 - DNA, 201 bp, Homo sapiens
aatttgttgtttggtgtagccacctccatcaattatcttagctagatattctggataacctgctaccgtttctacatcagcacttgctgcttcccttttgyacttttatgttatgaaaatgggccaggcacggtggctcatgcctgcaatcccagcattttaggagactgaggttggtggatcacctgaggtcatgagctt

SEQ ID NO: 135060 - DNA, 201 bp, Homo sapiens
caaaaaaatggaaagaatgaaatatgctgcaatttacttggaaatacattcacctagtctgattccatagtataccacgtttctttcagtattgaaaatcratgcaattttgaagaagacctttttaaggtgagatgcaggagaatttctctagaaaaaaattaattttttctttcttggtttttaatcagaaagataata

SEQ ID NO: 135061 - DNA, 201 bp, Homo sapiens
gcctcaggcctgatgtagtgcagtcataatggtggtggccacagaagtgcttatgtcactccacccccagttttaggtggcacagacaagagagagaaatwtttttttttttttcaagaaattaagggaagaaaacagagcagtctctgcctggcaatccagagaattctcctgaatcatgtccaaggccattgaggcagt

SEQ ID NO: 135062 - DNA, 201 bp, Homo sapiens
taaaatgaggtgtgcctgtactgatttcatttcctttaaacatatatgcagtagggattgctggatcatatgttagctctatttttagctttttaaggaayctctgtactgttttgcataaggctgcaatagcttacgttcccaccaacagtacacaagggttcccatttcctcacattctccccaacagttgtgatcttt

SEQ ID NO: 135063 - DNA, 201 bp, Homo sapiens
cataatggtggtggccacagaagtgcttatgtcactccacccccagttttaggtggcacagacaagagagagaaatttttttttttttttcaagaaattargggaagaaaacagagcagtctctgcctggcaatccagagaattctcctgaatcatgtccaaggccattgaggcagtacttttatgagtcttcaaaaacca

SEQ ID NO: 135064 - DNA, 201 bp, Homo sapiens
aattgaccaagcagaaaaaagaattagtcagcctgaagacaggctatttaaaaagacactgtcaaaagatacaaaagaaaaataataaaaacaacaaagcrcatctaccgaatatagaaaatagccttgaaagggcaaatctaagaattgttggccttaaagagaaggtagggaaagagacaggggtagaaaatttattta

SEQ ID NO: 135065 - DNA, 201 bp, Homo sapiens
ttttgaataacaatgacctacacttattgagagattaacaatacgccaggtaccttctaacttctaagtatactgttacatttggtcctcacaacaattckatgcggtaatcattactattatccacattttatagagcaggaaattgacatagagatagcacaaatagattgctcaaaattacacaagatgaaaatagcc

SEQ ID NO: 135066 - DNA, 201 bp, Homo sapiens
gggaagtcttttaaagctgctatggacattcagctaaaggacactgagaatgtaactaagaaattcaatgatgtcttcaagttgcctgactataggttttkaataacaatgacctacacttattgagagattaacaatacgccaggtaccttctaacttctaagtatactgttacatttggtcctcacaacaattctatgc

SEQ ID NO: 135067 - DNA, 201 bp, Homo sapiens
tgattccatagtataccacgtttctttcagtattgaaaatcgatgcaattttgaagaagacctttttaaggtgagatgcaggagaatttctctagaaaaawattaattttttctttcttggtttttaatcagaaagataatatatgctgattatacaagtggaaaaatccaatatgattttaagaagttaataacctctca

SEQ ID NO: 135068 - DNA, 201 bp, Homo sapiens
ctttcagtattgaaaatcgatgcaattttgaagaagacctttttaaggtgagatgcaggagaatttctctagaaaaaaattaattttttctttcttggttyttaatcagaaagataatatatgctgattatacaagtggaaaaatccaatatgattttaagaagttaataacctctcacctcctttgccctcctctcctcc

SEQ ID NO: 135069 - DNA, 201 bp, Homo sapiens
gaagacctttttaaggtgagatgcaggagaatttctctagaaaaaaattaattttttctttcttggtttttaatcagaaagataatatatgctgattatasaagtggaaaaatccaatatgattttaagaagttaataacctctcacctcctttgccctcctctcctccattcctaccctttggggtaatcagtgtccttg

SEQ ID NO: 135070 - DNA, 201 bp, Homo sapiens
tggaaaatctaaaacaaatggacaaattcctagacacatataacctactaggattgaaccaggaagaaatctaaaaccctaaccgaccaagagcaagtaaygagatcgaagctataccaaaatctctcagtaaagaaaagctcaggacctgatagcttcactgctgaattctaccaaatattttaaaaagaatatcaatcc

SEQ ID NO: 135071 - DNA, 201 bp, Homo sapiens
aggtgagatgcaggagaatttctctagaaaaaaattaattttttctttcttggtttttaatcagaaagataatatatgctgattatacaagtggaaaaatycaatatgattttaagaagttaataacctctcacctcctttgccctcctctcctccattcctaccctttggggtaatcagtgtccttgcccatattaacac

SEQ ID NO: 135072 - DNA, 201 bp, Homo sapiens
gagatgcaggagaatttctctagaaaaaaattaattttttctttcttggtttttaatcagaaagataatatatgctgattatacaagtggaaaaatccaayatgattttaagaagttaataacctctcacctcctttgccctcctctcctccattcctaccctttggggtaatcagtgtccttgcccatattaacacacaa

SEQ ID NO: 135073 - DNA, 201 bp, Homo sapiens
ctgattatacaagtggaaaaatccaatatgattttaagaagttaataacctctcacctcctttgccctcctctcctccattcctaccctttggggtaatcrgtgtccttgcccatattaacacacaaactgtcatcactttttaatttgcctttgacatatggacattgctttgagtgaatcaatacagcactaacgtttt

SEQ ID NO: 135074 - DNA, 201 bp, Homo sapiens
cttctttgccattacaaacaatgcttcagtaaacatccttgtatacatgtctttacatcctggaaacttttctcaatgcaattggtttccaaaagggatamgtccaagtaagagcttctcttatcctaagtaggcactgccagactaccttcccaaaggattccacagtattatttccattagcaatttgtggaagaattg

SEQ ID NO: 135075 - DNA, 201 bp, Homo sapiens
gtgacacctgagctaatcctaacccaggaaggactctgaggctggctcagtgattggctcttggagtacatgtgaatagataaacttttggaaagaactawcattccagagccagatagtacctagaatagacagcttggtctggctctacatgtctgcctaccctctgctgatgacacttccacttgagagtcctcgcag

SEQ ID NO: 135076 - DNA, 201 bp, Homo sapiens
tctcttatcctaagtaggcactgccagactaccttcccaaaggattccacagtattatttccattagcaatttgtggaagaattgtttcccacattctcaycagcactgaatgttatccttcttctaatttctgccaaactggtgggtgaaaagtggcatcttattgtagatttaatttgcatttccctgactagtgatat

SEQ ID NO: 135077 - DNA, 201 bp, Homo sapiens
agtatcatctgcattcatagaagcataagaacttcatgccttgactcatgtaaatgcaacaggattaaaaagtaaaattgatatccataaaaacagccaaraaatattgtacaacactggacccatgtcaagtcctaaacctgcacactcaggaggtaggagttaatcccagagttctatgtcctaatgcattatggcaaa

SEQ ID NO: 135078 - DNA, 201 bp, Homo sapiens
cactgccagactaccttcccaaaggattccacagtattatttccattagcaatttgtggaagaattgtttcccacattctcaccagcactgaatgttatccttcttctaatttctgccaaactggtgggtgaaaagtggcatcttattgtagatttaatttgcatttccctgactagtgatattcaacatatattttcata

SEQ ID NO: 135079 - DNA, 201 bp, Homo sapiens
actgccagactaccttcccaaaggattccacagtattatttccattagcaatttgtggaagaattgtttcccacattctcaccagcactgaatgttatccttcttctaatttctgccaaactggtgggtgaaaagtggcatcttattgtagatttaatttgcatttccctgactagtgatattcaacatatattttcatat

SEQ ID NO: 135080 - DNA, 201 bp, Homo sapiens
caaagtgcctgaagcagagaaggcaaagagattgaagtcagggacatgactggagggatgtcagggaggtgactggattctaagtcatggagaacttagasggctgttataagacttttatatatctttctctgaatgagattgggagtgacagcaggacttgcacaacgaataacaaaatgtggcttttgttttaaaagg

SEQ ID NO: 135081 - DNA, 201 bp, Homo sapiens
actagtacttttaatttccttcaaaattttttcattgcactgaaatctgtttttgtattgacatcctgactccagacttgcctttccaaatctagataagyatagtgaccattccccataaccaagatccctttctcactgttgcctctctcctgacatacctgctgccgtattccctactcttccccctcctcaagaaaa

SEQ ID NO: 135082 - DNA, 201 bp, Homo sapiens
tgctgaaagccgcagggacctctgcccaggaaagccgggtattgtccaaggttctccccacgtgatagcctgagatatggcctcgtggaatgggaaagacyggaccatcccccagcccgacatacgtgaagagtctgtgcagaagaaggattcatagaggaaggcctcttgcagttgagataagaggaaggcctctgtccc

SEQ ID NO: 135083 - DNA, 201 bp, Homo sapiens
atattttctgtaactttacacttagattatgctttgttatgaatttttacacccttcttctcttaaagatgcagaattgggctttaaaaaaaattattggmtcaaataagcccttccccttccacttgtctctcgggaatgtgagctgatggttcttaagatgttgagttttgtttactattcactgctctttagccagga

SEQ ID NO: 135084 - DNA, 201 bp, Homo sapiens
aagccgggtattgtccaaggttctccccacgtgatagcctgagatatggcctcgtggaatgggaaagactggaccatcccccagcccgacatacgtgaagrgtctgtgcagaagaaggattcatagaggaaggcctcttgcagttgagataagaggaaggcctctgtcccctgcctgcccctgggaactgaatgtctcggt

SEQ ID NO: 135085 - DNA, 201 bp, Homo sapiens
tcctgccacattccccttgctgagatagtgaaaatagtaatcaataaatactgagggaactcagagaccggtgctggttcgggtcctcagtatgctgagcrccggccccccgggcccacttttctttctctgtactttgtctctgtgtcttatttcttttctcagtctcttatcctacctgatgagaaatacccacaggtg

SEQ ID NO: 135086 - DNA, 201 bp, Homo sapiens
gggctggcctccttcataagtatatagccaaaatcaatacaaatggaagcaaagtggttaacaacatgggctttggaatcaaacaaaccaaaattccaccyctggctcctcttctggctatctgggtcaccttaggtaggtcaaattatttgagcctctctgcctcagttgcattatctataaaatggggatagtaatatc

SEQ ID NO: 135087 - DNA, 201 bp, Homo sapiens
aggaaattttaaaaacctttaaatccagtgaaggtgaccattccactggacagaaacataaatgaagaaaactgcagcttcaaagatggactatatgtaasttgcttgaataaacctattggcacaaaatagacattttgaggcaaaccacagatctagaacaagctcatctgtttctgtcactgtctaagatcatgggtg

SEQ ID NO: 135088 - DNA, 201 bp, Homo sapiens
taaattcatagatacaagagttgcttcttacaccttttgctttgcaaacatttatttctcaatttaactcaccaccactgtgatcaccatcacacatcaaygcaacaaaaatcaggtaaataattatcttacttgtttgtatcaatatttcttaaatgtatatacagcttacatttattgcattgttttatattagaagtg

SEQ ID NO: 135089 - DNA, 201 bp, Homo sapiens
aatcaaactaccaaaggtcaaggagaaagaaatgtaaaagcagcaagagaaaagaaataaataacatacaatgaagatccaatacatctgacagcagattytttcagtgaaaacctcgcagacagtggcatgacatatttaaagtactgaaggagaaaaaccttttacagtagaatattatatctggcaaaaatattcttc

SEQ ID NO: 135090 - DNA, 201 bp, Homo sapiens
gtcaaggagaaagaaatgtaaaagcagcaagagaaaagaaataaataacatacaatgaagatccaatacatctgacagcagattctttcagtgaaaacctmgcagacagtggcatgacatatttaaagtactgaaggagaaaaaccttttacagtagaatattatatctggcaaaaatattcttcaaacatgaaggaagaa

SEQ ID NO: 135091 - DNA, 201 bp, Homo sapiens
aaaattgggtgactcccaccctaatacggcacttttccaacaggcttaaaaaacggtgcaccaggagattatatcccgcacgtggctcagagggtcctacrcccatggagactcactgattgctagcacagcagtctgagatcaaactgcaaggcggcagcaaggctgggggaggggcacccaccattgcccaggctcgct

SEQ ID NO: 135092 - DNA, 201 bp, Homo sapiens
cagcagtctgagatcaaactgcaaggcggcagcaaggctgggggaggggcacccaccattgcccaggctcgcttaggtaaacaaagcagctgtgaatctcraactgggtggagcccaccacagctcaaggaggcttgcctgcctctgtaggctccacctctgggggcagggcacagacaaacaaaaagacagcagtaacct

SEQ ID NO: 135093 - DNA, 201 bp, Homo sapiens
gcaccccccagtaggggcagactgacatctcacacggctgggtactcctctgagacaaaacttccagaggaacgatcagacagcagcattcacggttcacraaaatccactgttctgcagccaccgctgctgatacccaggcaaacagggtctggagtggacctctagcaaactccaacagacctgcagctgagggtcctg

SEQ ID NO: 135094 - DNA, 201 bp, Homo sapiens
caattaggattttctactatctgcacatgcttgctgtgtaaggcattgaattttatacttttagttactctactttttgaaccaaaagttgttcacataahcaaagaatttttacatatttataattgtaaatgattaatttgttaaatctatatgaaagtttatagagtttacagtaaactaatcatccttttaaaaaaa

SEQ ID NO: 135095 - DNA, 201 bp, Homo sapiens
aaaccaaaggcaaagaagttaaaaactttgaaaaaaatttagacgaatgtataactagaataaccaatacagagaagtgcttaaaggagctgatggagctraaagccaaggcttgagaactacatgaagaatgcagaagactcaggagctgatgtgatcaactggaagaaagggtatcagtgatggaagatgaaatgaatg

SEQ ID NO: 135096 - DNA, 201 bp, Homo sapiens
agacgaatgtataactagaataaccaatacagagaagtgcttaaaggagctgatggagctaaaagccaaggcttgagaactacatgaagaatgcagaagaytcaggagctgatgtgatcaactggaagaaagggtatcagtgatggaagatgaaatgaatgaaatgaagtgagaagggaagtttagagaaaaaagaataaa

SEQ ID NO: 135097 - DNA, 201 bp, Homo sapiens
tacttttagttactctactttttgaaccaaaagttgttcacataatcaaagaatttttacatatttataattgtaaatgattaatttgttaaatctatatsaaagtttatagagtttacagtaaactaatcatccttttaaaaaaatggtccatttaaactactcaatacgtattttttattccataattgacagcacact

SEQ ID NO: 135098 - DNA, 201 bp, Homo sapiens
agtgggggtcaatattcaacattgttaaagaaaagaattttcaacccagaatttcatatccagccgaactaagcttcataagtgaaggagaaataaaataytttacagacaagcaaatgctgagagattttgttaccaccaggcctgccctaaaaaagcttctgaaggaagcactaaacatggaaagcaacaaccagtacc

SEQ ID NO: 135099 - DNA, 201 bp, Homo sapiens
caccagatgattccatccagatgatggcacaccagacccctcatacattatgattgcttccttaggtctcctgagttcctgtttttctacacatggttacwtttcctccctgctatgtaaactcataattttagctggtcagggagatggatttgacactgaactaccatctcctctcctacagcatctgattcagccttc

SEQ ID NO: 135100 - DNA, 201 bp, Homo sapiens
tggaggaatggaaagaaacagtaaggaagactttgtctttgcatatcagctgagccacaagaggataaggcaccaaacagagttgtgaggcccccgttccrggccactgctcctagacaacatttctagacataggctgggccagaagggaaacctctgcattgaaggaaagaattcattcctcagagcattcaccacctg

SEQ ID NO: 135101 - DNA, 201 bp, Homo sapiens
agaattttcaacccagaatttcatatccagccgaactaagcttcataagtgaaggagaaataaaatactttacagacaagcaaatgctgagagattttgtyaccaccaggcctgccctaaaaaagcttctgaaggaagcactaaacatggaaagcaacaaccagtaccagtcactgcagaatcatacaaaattgtaaagac

SEQ ID NO: 135102 - DNA, 201 bp, Homo sapiens
catacaaaattgtaaagaccattgaggctaggaagaaactgcatcaactaacgagtaaaataaccagctaacatcataatgacagaatcaaattcacacataacaatattaactttaaatgtaaatggactaaatgctccaattaaaagacacagactggcaaattggataaagagtcaagacccatcagtgtgctgtatt

SEQ ID NO: 135103 - DNA, 201 bp, Homo sapiens
acaggagggtagagttgcagtctgaagcacccaaaatggtccactaggatggacaaaggacatacttgaaccaccacttagattcatcttcatctaaaaartaagaaattaagtgtgtgtaatatttaattatttagtacattaattacagtagaatatatagagttgatgctcaatttgttaaaaaatagatatctaaaa

SEQ ID NO: 135104 - DNA, 201 bp, Homo sapiens
ctgccagactaccttcccaaaggattccacagtattatttccattagcaatttgtggaagaattgtttcccacattctcaccagcactgaatgttatccttcttctaatttctgccaaactggtgggtgaaaagtggcatcttattgtagatttaatttgcatttccctgactagtgatattcaacatatattttcatatg

SEQ ID NO: 135105 - DNA, 201 bp, Homo sapiens
actaccttcccaaaggattccacagtattatttccattagcaatttgtggaagaattgtttcccacattctcaccagcactgaatgttatccttcttctamtttctgccaaactggtgggtgaaaagtggcatcttattgtagatttaatttgcatttccctgactagtgatattcaacatatattttcatatgattatca

SEQ ID NO: 135106 - DNA, 201 bp, Homo sapiens
tttttacactgggattttgtgtcattcttaaaattctctatgtgttttggatatgagggatactaacacaaggtgtatgctacaaatttgttgcccaattkagaattattttctattttattgatagattttcacatgaagcaatttttaattttcatgtaatcaaatatattatctttttcactatgattcctgaggctt

SEQ ID NO: 135107 - DNA, 201 bp, Homo sapiens
ttaggaagatttttcctaatccaagatcatacaagttgtttttttcattttgtcttacagtgagtttttacttttgacatttcaaacttcattctatttgsaatatatttttgaatagcatgcattaacattcttttatatttattcaccttatggctggctaattacattagtgctatttattaaataagtcactctgct

SEQ ID NO: 135108 - DNA, 201 bp, Homo sapiens
tactgaatattttattcagaatttttgcatctgtattcataagccaatatggtcagtaactctctttttgttatttctttaccagatttggcattaggatmttttcatcttttaccaaacaatacaattaaaattatgtgtttggttttgtcttatgtagaattgaaatgtaaaataatctaattttggctactttttagt

SEQ ID NO: 135109 - DNA, 201 bp, Homo sapiens
tggcaaaaaaaaaaaaaaaagaatgtgaaaaataagagaatgaccttggaagtcaaaataagagaaaccttcaaggaaagagtgaccaaagcagtcaaagkttgctgagaagctaaaagagatgagtactaaaggcggcagtgcattttgaagttaggagttgattaccgactttgtaagagacatggacaggagaagaaa

SEQ ID NO: 135110 - DNA, 201 bp, Homo sapiens
tttattcagaatttttgcatctgtattcataagccaatatggtcagtaactctctttttgttatttctttaccagatttggcattaggatcttttcatctkttaccaaacaatacaattaaaattatgtgtttggttttgtcttatgtagaattgaaatgtaaaataatctaattttggctactttttagtttgtaatttc

SEQ ID NO: 135111 - DNA, 201 bp, Homo sapiens
caaaagctaatacagatgatgaaagaacacaaagaaaataagatttgcctattcaaaatggtgcctcgggcaggtcctgtatccagaagaggatgttcatycagggtctggggctaaggtcatcttagcacagcccagctgccagcttccctcctctgccgcttccctgaacacaagccagcttcccttatctagcccttc

SEQ ID NO: 135112 - DNA, 201 bp, Homo sapiens
ggtcagtaactctctttttgttatttctttaccagatttggcattaggatcttttcatcttttaccaaacaatacaattaaaattatgtgtttggttttgycttatgtagaattgaaatgtaaaataatctaattttggctactttttagtttgtaatttcaactttccttttagataaagggggtacatgtgcatatttg

SEQ ID NO: 135113 - DNA, 201 bp, Homo sapiens
gtagaattgaaatgtaaaataatctaattttggctactttttagtttgtaatttcaactttccttttagataaagggggtacatgtgcatatttgttacaygcaaatattgcatgatgctgagtcttggagtacggacagatcccatcaccctggtagtgagcatagtacccgataggtagttttctaacccagccccttt

SEQ ID NO: 135114 - DNA, 201 bp, Homo sapiens
acaccttttgctttgcaaacatttatttctcaatttaactcaccaccactgtgatcaccatcacacatcaacgcaacaaaaatcaggtaaataattatctyacttgtttgtatcaatatttcttaaatgtatatacagcttacatttattgcattgttttatattagaagtgcttcagttctttataagtttggtgatgtt

SEQ ID NO: 135115 - DNA, 201 bp, Homo sapiens
gatcacaagtctctttctttaaaacccatgagtccaacaccacataaattgtgcagagtgctaccgaaaattcagttacttcattctattttgtgggcttytggctgtaaaggccatgtcactcttcaaagaggctgatatcctgtagccttgggaaaaggcaatgtctccttaatgtttctattcactaaagtatcttgc

SEQ ID NO: 135116 - DNA, 201 bp, Homo sapiens
cacacatcaacgcaacaaaaatcaggtaaataattatcttacttgtttgtatcaatatttcttaaatgtatatacagcttacatttattgcattgttttayattagaagtgcttcagttctttataagtttggtgatgtttttgtcaccagaaatatgctgtaggaacttaactcttctttatattaattagcttatggta

SEQ ID NO: 135117 - DNA, 201 bp, Homo sapiens
acaatgaagctgcttagcaatcttgggcaagccatctcttaatattaaagcagacaccacagaatagctttcttcacttacaaatgttgattgggcatttrtgatatggcaggaactccttctcacatggagacctgatgttaaaggacacagccatgctcttgaggagcttacaatccaagctggaggcaggggagggta

SEQ ID NO: 135118 - DNA, 201 bp, Homo sapiens
gaagaggtaaaatttcttcctattcccaaaatcactttttagaagtgagtgggtgagggagtatgccaagaaagtgttcagaaaaagaagtaggatgttasgggaaatggttagggtataaatggcttttgatgttaatgggagaaacagtggactagaattagcaaggactggcaagcatgcttaggatcatgtaaagag

SEQ ID NO: 135119 - DNA, 201 bp, Homo sapiens
agtgggtgagggagtatgccaagaaagtgttcagaaaaagaagtaggatgttaggggaaatggttagggtataaatggcttttgatgttaatgggagaaasagtggactagaattagcaaggactggcaagcatgcttaggatcatgtaaagagggacaccatcactggaagtgttactcaacagtatattaagctcagca

SEQ ID NO: 135120 - DNA, 201 bp, Homo sapiens
agggtataaatggcttttgatgttaatgggagaaacagtggactagaattagcaaggactggcaagcatgcttaggatcatgtaaagagggacaccatcaytggaagtgttactcaacagtatattaagctcagcaccctaaaagtagaagcacagaagacaaattaaaacaaaccaagattggctttttcagggctggat

SEQ ID NO: 135121 - DNA, 201 bp, Homo sapiens
gttaatgggagaaacagtggactagaattagcaaggactggcaagcatgcttaggatcatgtaaagagggacaccatcactggaagtgttactcaacagtwtattaagctcagcaccctaaaagtagaagcacagaagacaaattaaaacaaaccaagattggctttttcagggctggataacaaaaaagataagggacaa

SEQ ID NO: 135122 - DNA, 201 bp, Homo sapiens
tgattccatagacagtgattccctacccttaggcagtttataacttcttacaaacctaaatcatctactccagacgacatattaaaaattatcaattaggwttttctactatctgcacatgcttgctgtgtaaggcattgaattttatacttttagttactctactttttgaaccaaaagttgttcacataatcaaagaat

SEQ ID NO: 135123 - DNA, 201 bp, Homo sapiens
cagtattctgctggtgagggcaagagagggcgtgtagatccctgtgtccatggactgactgcaggaggcttccccatctgtccatcttttagcagaagtaktaaaacgatttctaactagatccaaaggattcatttttactttgattgcagtgattgtgggtcccattgcagtcacagctactgctgcagctgctggaat

SEQ ID NO: 135124 - DNA, 201 bp, Homo sapiens
ggtactattaatacactgagggctttggatgagcatctgagactagcaggtttcaggtgagactcagcacatttcagctgaggcagctatgaggcaagatkctttcttcttcagaaaaatggaaggagagtaaagagactttgttttgcaccttaggtgccagcacagccacagcatggtagagcagcaagtgggctcttg

SEQ ID NO: 135125 - DNA, 201 bp, Homo sapiens
tttaaatgtaaatggactaaatgctccaattaaaagacacagactggcaaattggataaagagtcaagacccatcagtgtgctgtattcaggaaacccatmtcacgtgcagagacacacataggctcaaaataaaaggatggaggaaaatctaccaagtaaacggaaaacaaaaaaaggcagggtttgcaatcctagtctc

SEQ ID NO: 135126 - DNA, 201 bp, Homo sapiens
tcccatttaacagttaatagaactgtgcagtagttattatcatacttattttacaaaagaagaaactgaagctcaacttgcttatagttgcagaagtaacrgacttcaaagcaaggatctgaacctaggcagtcagactacagagactggtttttgacccacactattttgctcaaaatatgcaaaatgataatactaaat

SEQ ID NO: 135127 - DNA, 201 bp, Homo sapiens
atgcacccaatgcaggagcacccagattcataaagcaagtcctgagtgacctacaaagagacttagactcccacacaataataatgggagactttaacacyccactgtcaacattagacagatcagtgagacagaaagttaacaacgatacccaggaattgaactcagctctgcaccaagtggacctaatagacatccaga

SEQ ID NO: 135128 - DNA, 201 bp, Homo sapiens
atatagaaaatagccttgaaagggcaaatctaagaattgttggccttaaagagaaggtagggaaagagacaggggtagaaaatttatttaaaggaatagtragagagaacttccccataccagagaatgatgtcagtatctgagtacaggaaagttgtagaacaccaagcagatttaacccaaagagtatctcaaggcatt

SEQ ID NO: 135129 - DNA, 201 bp, Homo sapiens
taatagacatccagagaactctccaccccaaatcaacagactatacatttttttcagcaccacactacacctattccaaaactgaccacatacttggaagyaaagctctcctcagcaaatgtaaaagaacagaaattataacaaactgtctctcagaccacagtgcagtcaaactagaactcaggattaagaaactcattc

SEQ ID NO: 135130 - DNA, 201 bp, Homo sapiens
taaagagaaggtagggaaagagacaggggtagaaaatttatttaaaggaatagtaagagagaacttccccataccagagaatgatgtcagtatctgagtayaggaaagttgtagaacaccaagcagatttaacccaaagagtatctcaaggcatttaaaatcaaactaccaaaggtcaaggagaaagaaatgtaaaagcag

SEQ ID NO: 135131 - DNA, 201 bp, Homo sapiens
gcctggcagagacacaacaaaaaaacagaattttagaccaatatccttgatgaacattgatgcaaaaatcctcaataaaatactggcaaaccaaatccagyagcacatcaaaaagcttatccaccatgatcaagtgggcttcatccctgggatgcaaggctggttcaatataagcaaatcaataaatgtaatccaccatat

SEQ ID NO: 135132 - DNA, 201 bp, Homo sapiens
cagtgtgagcgatgcagaagacaggtgatttctgcatttccatctgaggtacagtgttcatctcactggggagtgccagacagtgggtgcaggacagtggwtgcagcgcaccatgcacgagccgaagcagggcgaggcattgcctcactcaggaagagcaaggggtcagggagttccctttcccagtcaaagaaaggggtg

SEQ ID NO: 135133 - DNA, 201 bp, Homo sapiens
tcaaaaagcttatccaccatgatcaagtgggcttcatccctgggatgcaaggctggttcaatataagcaaatcaataaatgtaatccaccatataaacagaatcaaagacaaaaaccacatgattatctcaacacatgcagaaaaggcctttgacaaaattcaacaaccctgcatgctaaaaactctcgataaattaggtt

SEQ ID NO: 135134 - DNA, 201 bp, Homo sapiens
gtttcatgcacatctggttagtgaactgaagcctcatggacagcccagcttcaggtgggtatagacgctgagcccccacataataataagctgagcctaayaccttcccagggatgttcttttgatctcaaggtttcctgacaatttcagatggaagattaatgcttagtttatttgatccatggtccaatttcttcaaag

SEQ ID NO: 135135 - DNA, 201 bp, Homo sapiens
aattaggcaggagaagggtattcaattaggaaaaaaagaagtcaaattgtccctgtttgcagatgacatgattgtatatctagaaaaccccattgtctcarcccaaaatctccttaagctgataagcaacttctgcaaagtctcaggatacaaaatctatgtacaaaaatcacaagcattcttatacaccaataacagaca

SEQ ID NO: 135136 - DNA, 201 bp, Homo sapiens
agcctcatggacagcccagcttcaggtgggtatagacgctgagcccccacataataataagctgagcctaacaccttcccagggatgttcttttgatctcmaggtttcctgacaatttcagatggaagattaatgcttagtttatttgatccatggtccaatttcttcaaagtgtgatatgctaaataactgtatgaggtc

SEQ ID NO: 135137 - DNA, 201 bp, Homo sapiens
tgaaatttttcttgaaacaaatgataattgaaatacaacatatgaaaacctatgagacacagcaaaagtagtactaagaggaaagtttatagctataagtkcctacatcaagaaagaagaaaaacttcaaataaacaatctaacagtgcatcataaagaattagaaaaggaagaccaaaccaaaccgaaaatttgtagagc

SEQ ID NO: 135138 - DNA, 201 bp, Homo sapiens
taattataattcttaggcctgacgtggtggcttacatctctaatcgcagtactttgagacgctgaggcaggcaaagcaactgaggccaggagttcgacccrgcctggccaacatggtgaaaccccatctctattagaaaaacaaaactcagttgggcatggtggcaagcacctgtcatcccagctgctcaggaggctgagg

SEQ ID NO: 135139 - DNA, 201 bp, Homo sapiens
tgaaataaaaacagggtcctttgaaaaattaaataaaactgacaaactttgagccagactaagaaaaagagagaagatccaaaaaaataaaattagaaataaaaaaggagacattacaactgatactgcagaaattcaaaggatcattagtggctaccatgagcaattatataccaataaagtggattttttttttgagac

SEQ ID NO: 135140 - DNA, 201 bp, Homo sapiens
tgcatttccatctgaggtacagtgttcatctcactggggagtgccagacagtgggtgcaggacagtggatgcagcgcaccatgcacgagccgaagcagggygaggcattgcctcactcaggaagagcaaggggtcagggagttccctttcccagtcaaagaaaggggtgacagatggcacctggaaaattgggtgactccc

SEQ ID NO: 135141 - DNA, 201 bp, Homo sapiens
aatcacttgagcccaggagcagaggttgcagtgagccctgatcgcctcaccactgcattccagcctgagcaacagagtgaaactctgtctaaaagaaaagaaagaaagaaagaaagaaagaaagaaagaaagaaagaaagaaagaaagaaagaaaagaaagagaaaatggcttctttccttaaacctcatgaactaacctc

SEQ ID NO: 135142 - DNA, 201 bp, Homo sapiens
atcacttgagcccaggagcagaggttgcagtgagccctgatcgcctcaccactgcattccagcctgagcaacagagtgaaactctgtctaaaagaaaagaaagaaagaaagaaagaaagaaagaaagaaagaaagaaagaaagaaagaaagaaaagaaagagaaaatggcttctttccttaaacctcatgaactaacctct

SEQ ID NO: 135143 - DNA, 201 bp, Homo sapiens
ggtatcaaaggtgaagcctcagacaaatggctttcctaggctacctttcatcattgttatgcagaaaaggatctccagagaatcaagtgggctggtcttgmggcctctgctatggaaatgacatttgttgtgcctcctttcccctactctttctcacttcctcatcattagtgaagcatggcacaggacaaggtgttgcct

SEQ ID NO: 135144 - DNA, 201 bp, Homo sapiens
aggtgaagactggagagtgagtaagagtgagccatacagtaaaagtggaaaaatccagatgatggaaagggcacgtgccatgcactatcataataactttrtaattgaacacttatattacaatctgaatccctgatctcaaaaaaaaaaaaagaaaaatactcttcatgaaaaaaacgtggcctcatttggctctgctct

SEQ ID NO: 135145 - DNA, 201 bp, Homo sapiens
cacaacttgatatttctggtgatgttggggttatctgcttactgtgtatttgagaacttctgttcacctgcttgtcaaactgaccagcagggggtgctgcrgagggaaacactccatctggagaatgctggcaacttgtctcttaagtctagaggctccttgtccccctcatgatcatcacctatgaggtgcaagcactgc

SEQ ID NO: 135146 - DNA, 201 bp, Homo sapiens
aattatctccctcagcctcctgagtagctgagattacaggtgcccaccaccacgcatggctaatttttttttcgtgtttttttttttttagtagaggcggkgtttcagcatcttggccaggctggtcttgaactcctgacctctcgtgatccatcgtccttggcctccgaatgtgctaggattacaggcatcagctaccac

SEQ ID NO: 135147 - DNA, 201 bp, Homo sapiens
tccttcctttcttaccttgaaggagctcctatttttaaagggaatcactggggacaatccaaaagaaactcttgcaaatcaagctttgccatgccatcacragaagggtaacatgtgtgcccagtggtgaaatttttaaattttggtaatgatctccagggtcacccctatggataacaaaaatattttaaaaacctataa

SEQ ID NO: 135148 - DNA, 201 bp, Homo sapiens
accctgtgcccccaaactcatgtgttatagggccttggtaatccctttctaagcatattccctgacttcttaaattctatttatgagacatatatctaaartaaaactatatttcaggccagatcagcacgcttcttattacaattataaacactgaacttcttagttgctgggaaaatatattgaaaaggcattattatg

SEQ ID NO: 135149 - DNA, 201 bp, Homo sapiens
tagttgaggtttcctaatctgtgaaacagaaaatgaattcaatagaaagatgattgagacaaatttctggaaggtgccaaagcaggatgcctggcattgasggacgcttcacacctgttatctctctccctattctctcttcacccctactcccgcccggcaactccccgctgtcagctccaggaatacttacctgctgag

SEQ ID NO: 135150 - DNA, 201 bp, Homo sapiens
actctacttaaatatagtggggttcccataatccccattttaaaaaacctatccaagttaaagtacagagaatcacaaactggaagaactccttaatttayaaataagaaatggagacccccccaccaagagagaaaggaatttgcccaaggtctccctgaaagagcctaagaaagcgtgaggctctaaggttaaaatcct

SEQ ID NO: 135151 - DNA, 201 bp, Homo sapiens
tagagtttacagtaaactaatcatccttttaaaaaaatggtccatttaaactactcaatacgtattttttattccataattgacagcacactgtggatagytgagagaccacatattttatttctatactgagtattacttaagtaatttcttaagctattaaatattttttaaatagtttataatggggaggagaagcaa

SEQ ID NO: 135152 - DNA, 201 bp, Homo sapiens
tttattataaaatccagccaacaagatgctttgtgccaagggaatgttccttttcagggcaaacactctgtccccagggatgttagacaacttccatagcmccgtataagcattagctagaaatgagtttttcctagtggcccaacagattccctgagcatccctactctttcacggattcccattgcagtgggattgcat

SEQ ID NO: 135153 - DNA, 201 bp, Homo sapiens
acagtaaactaatcatccttttaaaaaaatggtccatttaaactactcaatacgtattttttattccataattgacagcacactgtggatagctgagagamcacatattttatttctatactgagtattacttaagtaatttcttaagctattaaatattttttaaatagtttataatggggaggagaagcaaagcaaatg

SEQ ID NO: 135154 - DNA, 201 bp, Homo sapiens
ttcccattgcagtgggattgcatcaaacctctcagggcaaagctgcaaagggaaaagcaaagctagagctctactctggacctatcgctctagacagttartttctctgtgagggtcagttttatacgtaaggaagaaatggaagattgctccccaaaacggcatcaggttacttatcccaattgtgtggttcagttgcta

SEQ ID NO: 135155 - DNA, 201 bp, Homo sapiens
acagcacctctgtatccacccagggcctgggggatctcactgccctgatgggaaggacacaggcctggccggctttgctgcctgctgattgcagatctccmgggccttgagcaaacataggcagtagccaagaagtgattacagcaggcattgggcaagatgcagtgctctgtgggcctcaggcctgatgtagtgcagtca

SEQ ID NO: 135156 - DNA, 201 bp, Homo sapiens
cacatggacactggaaggggaacatcacactctggggactgttgtggggtggggttggggggagggatagcattaggagatatacttaatgctaaatgacragttaatgggtgcagcacaacagcatggtacatgtatacatatgtaactaacctgcacattgtgcacatgtaccctaaaacttaaagtataataataaaa

SEQ ID NO: 135157 - DNA, 201 bp, Homo sapiens
ctctggggactgttgtggggtggggttggggggagggatagcattaggagatatacttaatgctaaatgacgagttaatgggtgcagcacaacagcatggyacatgtatacatatgtaactaacctgcacattgtgcacatgtaccctaaaacttaaagtataataataaaaaaaagaaaaatacatttcatgagaaaaac

SEQ ID NO: 135158 - DNA, 201 bp, Homo sapiens
cacttgagcccaggagcagaggttgcagtgagccctgatcgcctcaccactgcattccagcctgagcaacagagtgaaactctgtctaaaagaaaagaaagaaagaaagaaagaaagaaagaaagaaagaaagaaagaaagaaagaaagaaaagaaagagaaaatggcttctttccttaaacctcatgaactaacctctgc

SEQ ID NO: 135159 - DNA, 201 bp, Homo sapiens
agggtgcaagtctctgaagctctcactcacccctgtagtctgtgtagaaaatgtacttaatccccctggccccctactgtcattgcctttggtgtgagatrttccctatttcctagtttagtttgagtccctctctcctctgctagccaacacccatccagcaataaggaaccaagcgacagcctcctattcacactccct

SEQ ID NO: 135160 - DNA, 201 bp, Homo sapiens
gttggaagaagattcagggctaagcagttggagagacctagaatcagagatctctcacacagactgaaaaccccaaaactgattagcataacctcagcacmagtaaaaccagaattcattgcttccattcagagatcccatgtttgtgccagaatccaagctgcaatgagtgtttcgggaagtcacttatgactaatactg

SEQ ID NO: 135161 - DNA, 201 bp, Homo sapiens
tttggattatttgttttcttgctattaagtttattattattttaaaaattaaccccttatcagatgtatggtttgcaaatattttcttccattccataggytgcctcttcatcctgttgattgtttctttgctgtataagactgttttagtttgatgtaatcccatttgtctattttgcccttcattatctgtgctttagg

SEQ ID NO: 135162 - DNA, 201 bp, Homo sapiens
aggtctttaaaccatctggggttgagttttgtatgtggtgtgagataaagtctaatttcaattttctgcatgtggatatgcagtttttttcaacagcattyattaaagagactgtctattccccattcacgtgttcttgacaactttgtcaaaatcaatcatcttaaatgcatggatttatttctggacgttctattctgt

SEQ ID NO: 135163 - DNA, 201 bp, Homo sapiens
taaggatcttttgtgataacatatacattttttggtgtgttatatttctttgaagaatgtcattggtatttacataggaattgcattgaatctgtaaatcrcttggggcattgttgtcattttgacagtattaatttttgcaatctataaataataaatagctttctatttatttgtgttttcttcacttttttcatatat

SEQ ID NO: 135164 - DNA, 201 bp, Homo sapiens
cattggtatttacataggaattgcattgaatctgtaaatcacttggggcattgttgtcattttgacagtattaatttttgcaatctataaataataaatasctttctatttatttgtgttttcttcacttttttcatatatgtttcataattttcactatataagtcttttaccacgttatttacatttactcttaagtat

SEQ ID NO: 135165 - DNA, 201 bp, Homo sapiens
gttgatgtggtatttcacatttatagatctgtatgttgaattatctttgcaaccctacgttaaagcccactgtatcatgatgaatgaactttttgacatgytgttgggattagtttgttagtattaatatttattgatgcacctatgttcattagtgctattgcctaatattttcatttgttgaagtgtccctatctttgg

SEQ ID NO: 135166 - DNA, 201 bp, Homo sapiens
atttattgatgcacctatgttcattagtgctattgcctaatattttcatttgttgaagtgtccctatctttggtatcaggattatgcttgccttgtaaaayaactttggaagtattccctcttcttcaattttttggaaggcttttagattggattgacatgagttcttctttaaatatttggtgaaattcagcagtgaag

SEQ ID NO: 135167 - DNA, 201 bp, Homo sapiens
tctaaaaaattttcctgttattaatttctagtttcatgtcattgtgatctggaatgataaatggtatgatttcagtcttcttaaatttattatgacatgcyttgtgtcctaatatttgttctctagcatttcctgtaagacagctctgatggtaataaactcccttaatttttgtttttctggcaaagattttaatctttc

SEQ ID NO: 135168 - DNA, 201 bp, Homo sapiens
gccttgtgtcctaatatttgttctctagcatttcctgtaagacagctctgatggtaataaactcccttaatttttgtttttctggcaaagattttaatctytccattacttgcaaaaaacagattttcccgagaatcgtatttttggttgacactttttttttctatagaacattgaatatatcattccatgctctcagcc

SEQ ID NO: 135169 - DNA, 201 bp, Homo sapiens; identical to SEQ ID NO: 24026

SEQ ID NO: 135170 - DNA, 201 bp, Homo sapiens
agagcaaggggtcagggagttccctttcccagtcaaagaaaggggtgacagatggcacctggaaaattgggtgactcccaccctaatacggcacttttccracaggcttaaaaaacggtgcaccaggagattatatcccgcacgtggctcagagggtcctacacccatggagactcactgattgctagcacagcagtctga

SEQ ID NO: 135171 - DNA, 201 bp, Homo sapiens
tgtctcattcctgattctaatgaaatagctataaacacttacctttaaaattacatttaattctgtctttacaggcttagagcactttcctgttttcccaytttcatagaaattatatttagaatgaacggtaaattttatgttatttcatttttgtctttttatggaaatttatatactcatgtaattttttcctccttt

SEQ ID NO: 135172 - DNA, 201 bp, Homo sapiens
gtattttataaatgtatgcttacaaccacaaaaatgccatgcaatactgttgttctactcacaagatcagtacaggaattataaagcattgattcagggtygacttctgccagcatgtaactgatggtgaatgtgttctcttcattctgcctgagtttcaatgggtgatatcattggtgatacagctggaatctcatattt

SEQ ID NO: 135173 - DNA, 201 bp, Homo sapiens
tcctaatatttgttctctagcatttcctgtaagacagctctgatggtaataaactcccttaatttttgtttttctggcaaagattttaatctttccattayttgcaaaaaacagattttcccgagaatcgtatttttggttgacactttttttttctatagaacattgaatatatcattccatgctctcagcctataagtt

SEQ ID NO: 135174 - DNA, 201 bp, Homo sapiens
gtctctgacagtaaattcaaatgatgtgtctttgagtttattgattctttattctacttgatcaaatctgctttcaaagaagtctatgaaattttcagttsaaccgttgtgtcctttatgtccagaatgtctcttttttaatgatttctttctgtttgttgaactttctattttgttcatgtattatttctctgattcttt

SEQ ID NO: 135175 - DNA, 201 bp, Homo sapiens
tgacagtaaattcaaatgatgtgtctttgagtttattgattctttattctacttgatcaaatctgctttcaaagaagtctatgaaattttcagttcaaccrttgtgtcctttatgtccagaatgtctcttttttaatgatttctttctgtttgttgaactttctattttgttcatgtattatttctctgattctttttagt

SEQ ID NO: 135176 - DNA, 201 bp, Homo sapiens
acagtaaattcaaatgatgtgtctttgagtttattgattctttattctacttgatcaaatctgctttcaaagaagtctatgaaattttcagttcaaccgtygtgtcctttatgtccagaatgtctcttttttaatgatttctttctgtttgttgaactttctattttgttcatgtattatttctctgattctttttagtca

SEQ ID NO: 135177 - DNA, 201 bp, Homo sapiens
tctttttagtcatctatctgtgttctcttgaagctcactgagcattttaaagaccattattttaaattcactgtcagaaagttcataaatctttatttttkggggtcagctattgggtattcttttttttcctctggtggtatcatttttctcttatatttcttgatttttaggctgtgcattggtgtctgcacatttgaa

SEQ ID NO: 135178 - DNA, 201 bp, Homo sapiens
tatttttgggggtcagctattgggtattcttttttttcctctggtggtatcatttttctcttatatttcttgatttttaggctgtgcattggtgtctgcayatttgaaaaacaagaaagttattccagtctttgcatactggctttgtctggaaaaacctttccccagtcatccagcaattcttggtagggtgtctgttgt

SEQ ID NO: 135179 - DNA, 201 bp, Homo sapiens
caaccacaaaaatgccatgcaatactgttgttctactcacaagatcagtacaggaattataaagcattgattcagggttgacttctgccagcatgtaactratggtgaatgtgttctcttcattctgcctgagtttcaatgggtgatatcattggtgatacagctggaatctcatatttgggaccctttttgaaagtgggg

SEQ ID NO: 135180 - DNA, 201 bp, Homo sapiens
tggaagaagattcagggctaagcagttggagagacctagaatcagagatctctcacacagactgaaaaccccaaaactgattagcataacctcagcaccaktaaaaccagaattcattgcttccattcagagatcccatgtttgtgccagaatccaagctgcaatgagtgtttcgggaagtcacttatgactaatactgag

SEQ ID NO: 135181 - DNA, 201 bp, Homo sapiens
ataatgggccaggatactgtagtaaaacatttcaaaaattcttaaatcagtgaaaaattacacatacaacaggaatcccttataattcccaaggacagacmctagttgaaagaactaatagaacactcaaagctcaattggtgaaacaaaaaaaggaaaaagacagtaagagtataacacttggtgaaacaaaaaaaaaga

SEQ ID NO: 135182 - DNA, 201 bp, Homo sapiens
tgaaaaccccaaaactgattagcataacctcagcaccagtaaaaccagaattcattgcttccattcagagatcccatgtttgtgccagaatccaagctgcmatgagtgtttcgggaagtcacttatgactaatactgagtatgatgggactgatatcagagctgagctaggcccagagggcccagaagcagtgacacagaa

SEQ ID NO: 135183 - DNA, 201 bp, Homo sapiens
ctggagtcttgcagagtaaccactctgtcagatagcatgtgtttctgggaggaagtcataggggtctagttccgccttatacccctgcacaccataagcaygggctgagatctagagagagtccagagctggtctgaaaggctgatacaaaggagtctgctctggaactgaggtattctaagaacttggctatctcagcag

SEQ ID NO: 135184 - DNA, 201 bp, Homo sapiens
cactaaaactggctccaaaacagcaataaggctattttgctttcttatcatttatgtgtacactggtttagcactattaatttccttcaaagatttttccktgcactcacaacttggctaactgtttggtgcaaaagatctagttattggactgtctgagattttgacctgccttcctcactatgcttaatcatttttagc

SEQ ID NO: 135185 - DNA, 201 bp, Homo sapiens
tcatccttggtaaaggacccctaggtccctcaaaaagtataaaagaactgaaattcaccagatgattccatccagatgatggcacaccagacccctcatayattatgattgcttccttaggtctcctgagttcctgtttttctacacatggttacatttcctccctgctatgtaaactcataattttagctggtcagggag

SEQ ID NO: 135186 - DNA, 201 bp, Homo sapiens
cctcctcacagtttgggaaatttttaaaggaatttccacttgcaggttgaacaagcccaattgatgaagagagggaagtaccctgactatttcagtacggmcactcttaggagcttgtttgtcattgtgtgtgtatccaggcaagtgagtgtcatttgtgggaaccagacagtgggatctgctcctctccatctgagaaat

SEQ ID NO: 135187 - DNA, 201 bp, Homo sapiens
accctgactatttcagtacggacactcttaggagcttgtttgtcattgtgtgtgtatccaggcaagtgagtgtcatttgtgggaaccagacagtgggatcwgctcctctccatctgagaaattctgaaggaatttttatttcaggtcgattgagcccaaccaatggagagaggaagcaccacaactctttcacattgtaga

SEQ ID NO: 135188 - DNA, 201 bp, Homo sapiens
catgggaaattcgaatttgataaactggtactcttttgtgacactgtttggctccagtatagtttggaatctggagtttgctgttgaatgggaaagtgggmttttgtgctgctgttttaagcagggtcgggccaggttaatatgtgatgatctcatgcggtgccgtttttgaccccagtgttttgggagtatagggagttt

SEQ ID NO: 135189 - DNA, 201 bp, Homo sapiens
aaatctaatagatatctacagaacattttacccaagagcttcagaatacacagttgtatcatcagaacatggatcattctcaatgatagaccatatgttakgtcacagaacaagtcttaagatattcaagaaattgaaataatattgagaatcttctctgatcacaatggaaacatactagaaattaataagggttgggca

SEQ ID NO: 135190 - DNA, 201 bp, Homo sapiens
tactcttttgtgacactgtttggctccagtatagtttggaatctggagtttgctgttgaatgggaaagtgggattttgtgctgctgttttaagcagggtcrggccaggttaatatgtgatgatctcatgcggtgccgtttttgaccccagtgttttgggagtatagggagttttggcctttaaaaatcaaactgccacaga

SEQ ID NO: 135191 - DNA, 201 bp, Homo sapiens
tttgtgacactgtttggctccagtatagtttggaatctggagtttgctgttgaatgggaaagtgggattttgtgctgctgttttaagcagggtcgggccargttaatatgtgatgatctcatgcggtgccgtttttgaccccagtgttttgggagtatagggagttttggcctttaaaaatcaaactgccacagaaactca

SEQ ID NO: 135192 - DNA, 201 bp, Homo sapiens
gggccaggttaatatgtgatgatctcatgcggtgccgtttttgaccccagtgttttgggagtatagggagttttggcctttaaaaatcaaactgccacagwaactcattttatttaaaatttgtttcacagccttccctggattacctatcaaggctaacaaagttcagccatgtggacatgtttgcagacagttgagact

SEQ ID NO: 135193 - DNA, 201 bp, Homo sapiens
ggttaatatgtgatgatctcatgcggtgccgtttttgaccccagtgttttgggagtatagggagttttggcctttaaaaatcaaactgccacagaaactcmttttatttaaaatttgtttcacagccttccctggattacctatcaaggctaacaaagttcagccatgtggacatgtttgcagacagttgagactgtatta

SEQ ID NO: 135194 - DNA, 201 bp, Homo sapiens
gacaatcattacccaaaaacaaaaatcttccagtttttaaaattggctacttggattttacctaaaattaccagacataaacatttacagaatgctctgayggtgtttactgatggttccagccatggaaaagcagcttacatcaggccaaaagaacgagtcattgaaactcaatattactcagctcaaagagcagagttg

SEQ ID NO: 135195 - DNA, 201 bp, Homo sapiens
ctcatgcggtgccgtttttgaccccagtgttttgggagtatagggagttttggcctttaaaaatcaaactgccacagaaactcattttatttaaaatttgkttcacagccttccctggattacctatcaaggctaacaaagttcagccatgtggacatgtttgcagacagttgagactgtattactatctcatggctagag

SEQ ID NO: 135196 - DNA, 201 bp, Homo sapiens
agcattaaaattattgtaagataaaaatagaaatgtcttcagaattgtcagcatacattttttcggggttttatgtttgtctctgctagatattttggggyatcagagtgtggcacagaaagttataaaactataaccagtagtttgagaccagtctgaaaaatgaagacccccccccgccccaccatctctataacataa

SEQ ID NO: 135197 - DNA, 201 bp, Homo sapiens
gttgaagaaaaaattcagtgagcacaagtaaatagaatacatcccttggcccaactccagcttgatttttgctactgtgcattctccaacagccgttatcrttcaaaacgcaggtcttgtggagtggtccttccttcctcacagtacaattaatacttttacattgtactgggatcaaatagctacattaattggtcaggc

SEQ ID NO: 135198 - DNA, 201 bp, Homo sapiens
agacaactaaagaaattggattagttgaagaaaaaattcagtgagcacaagtaaatagaatacatcccttggcccaactccagcttgatttttgctactgygcattctccaacagccgttatcgttcaaaacgcaggtcttgtggagtggtccttccttcctcacagtacaattaatacttttacattgtactgggatcaa

SEQ ID NO: 135199 - DNA, 201 bp, Homo sapiens
cggggttttatgtttgtctctgctagatattttggggcatcagagtgtggcacagaaagttataaaactataaccagtagtttgagaccagtctgaaaaaygaagacccccccccgccccaccatctctataacataaaaataagacaattagccaggcacattgattcatgcctgcagctagtcaggagactgaggtgag

SEQ ID NO: 135200 - DNA, 201 bp, Homo sapiens
tttatgtttgtctctgctagatattttggggcatcagagtgtggcacagaaagttataaaactataaccagtagtttgagaccagtctgaaaaatgaagacccccccccgccccaccatctctataacataaaaataagacaattagccaggcacattgattcatgcctgcagctagtcaggagactgaggtgagaggatg

SEQ ID NO: 135201 - DNA, 201 bp, Homo sapiens
gtgagaccctgtcaaaaaagaaaaagataagaggcagagaatgacaatggggcacaggagcattgcagagaaactaggggaacagttgtaattgttaatasgatggtcagaggaggcctcattgagcaagtggctttaaggtgaagatttaaagagggtaataaggttttctataggtataatgagaaaacagaatgcaag

SEQ ID NO: 135202 - DNA, 201 bp, Homo sapiens
ccacagtctcagtgggagaactcaaaaaacttccctcagaaagcaacagatgatgcagacaaaaaataaagacaatttgccaaaatgccatcacaacttgmtatttctggtgatgttggggttatctgcttactgtgtatttgagaacttctgttcacctgcttgtcaaactgaccagcagggggtgctgcggagggaaac

SEQ ID NO: 135203 - DNA, 201 bp, Homo sapiens
ttcaacaggcagaatgatttatatgtttgtgtcagtcatctttgctccacaagtcctacagaggaaatacaggaaggcagattaatgtcacaaattcaatrgatgtgtgttgcagcaaaactgccttctgcttcagaagaaagcagtatctccagcttccaagctgtactctttacaaacatccttgaaaggataggagca

SEQ ID NO: 135204 - DNA, 201 bp, Homo sapiens
acaaaattgaaaacctaatttaggagtctgcacctgtaacaatatttgaatgctggccagtcccagcagccttacatcaccactcatagactgctgaatgytcaaactgtgtttaaataaggcaaacgcccaggtgacagaaatctcactgtttctgtaactcatttccggttcctggatgtcactttaactttttttccc

SEQ ID NO: 135205 - DNA, 201 bp, Homo sapiens
agtaagcagtaatgtcgcagcagtcataaaattcggctttgggaaattcacagggatttttgtgttctacccatttgtttcatttttcttgtgtacctagrtaggaaaattcattggttaagttaatcaaaagaacctgagagtaaagtcagtattttatgtaaaactggaatccttaatttctgaaaaactgagttcttt

SEQ ID NO: 135206 - DNA, 201 bp, Homo sapiens
gcagtaatgtcgcagcagtcataaaattcggctttgggaaattcacagggatttttgtgttctacccatttgtttcatttttcttgtgtacctagataggraaattcattggttaagttaatcaaaagaacctgagagtaaagtcagtattttatgtaaaactggaatccttaatttctgaaaaactgagttctttctggc

SEQ ID NO: 135207 - DNA, 201 bp, Homo sapiens
cagcagtcataaaattcggctttgggaaattcacagggatttttgtgttctacccatttgtttcatttttcttgtgtacctagataggaaaattcattggytaagttaatcaaaagaacctgagagtaaagtcagtattttatgtaaaactggaatccttaatttctgaaaaactgagttctttctggcttatacattagg

SEQ ID NO: 135208 - DNA, 201 bp, Homo sapiens
ggattagttgaagaaaaaattcagtgagcacaagtaaatagaatacatcccttggcccaactccagcttgatttttgctactgtgcattctccaacagccrttatcgttcaaaacgcaggtcttgtggagtggtccttccttcctcacagtacaattaatacttttacattgtactgggatcaaatagctacattaattgg

SEQ ID NO: 135209 - DNA, 201 bp, Homo sapiens
ctacccatttgtttcatttttcttgtgtacctagataggaaaattcattggttaagttaatcaaaagaacctgagagtaaagtcagtattttatgtaaaamtggaatccttaatttctgaaaaactgagttctttctggcttatacattaggactggaaggcagagaagtcttacacaaatggcaaaatcttactaaagat

SEQ ID NO: 135210 - DNA, 201 bp, Homo sapiens
gtttattatcttgttttgctgtcatgggagttccaggaaaaattaaaacagataatgggccaggatactgtagtaaaacatttcaaaaattcttaaatcaktgaaaaattacacatacaacaggaatcccttataattcccaaggacagacactagttgaaagaactaatagaacactcaaagctcaattggtgaaacaaa

SEQ ID NO: 135211 - DNA, 201 bp, Homo sapiens
cctattccagaagaaagaagactcttcaggcatctgatgaccaaaataaaagaaacattatgatggtggtggtggagtgttctgctacaggcatgtgggargctcacagaactcttaatattcacttttaattcattccaccagagaggaaatgcatgggttttggataggactctgtcatttatccctgtaagaacttga

SEQ ID NO: 135212 - DNA, 201 bp, Homo sapiens
ctgtcatgggagttccaggaaaaattaaaacagataatgggccaggatactgtagtaaaacatttcaaaaattcttaaatcagtgaaaaattacacatacwacaggaatcccttataattcccaaggacagacactagttgaaagaactaatagaacactcaaagctcaattggtgaaacaaaaaaaggaaaaagacagta

SEQ ID NO: 135213 - DNA, 201 bp, Homo sapiens
aggaatcccttataattcccaaggacagacactagttgaaagaactaatagaacactcaaagctcaattggtgaaacaaaaaaaggaaaaagacagtaagrgtataacacttggtgaaacaaaaaaaaagaaaaagacagtaagagtataacactccccagatgcaacttaatctagcactctatactttaatttttttaa

SEQ ID NO: 135214 - DNA, 201 bp, Homo sapiens
tgccccccaaaaattcccaaagaatcaaaagacctaaaagtcttagtttggaaagaatatgtggctgatactgcggtgatattacaaaacaatgaatttgkaactattacagactgggaccctcgaggccaattatattataattgtatgggccagactcactcatgttcacaagccccatccatctggcccattaatctg

SEQ ID NO: 135215 - DNA, 201 bp, Homo sapiens
aagaaaatcaaggcgccatcagaatgaataaggcactaggtttccttgaggcctcctgtcagtggcaccaatggacctgctacccacagaatcttgttccrttgtagacaatgaagctgcttagcaatcttgggcaagccatctcttaatattaaagcagacaccacagaatagctttcttcacttacaaatgttgattgg

SEQ ID NO: 135216 - DNA, 201 bp, Homo sapiens
caaccagcgagaacgggccataatgacgatggcagttttgtcaaaaagaaaagggggatatgtagggaaaagaaagagatatcagactgttactgtatctwtgtagaaaaggaagacataagaaactccattttgacctgtaccgtgaacaattgttttgccttgagatgctgttagtctgtaactttagccccaaccttg

SEQ ID NO: 135217 - DNA, 201 bp, Homo sapiens
gttggtcctggggccttgggcatgcggtcaagagggtgtgcgcggggagaggtggccacaagaggctcccactcttctttccccatgcaggaggggctgtrgcctcctctgtccttctcaaaatgccctgggaagaaagggaccagaagctttaaggcctgcaagggaaggttctgacgactcggcttgttttgaaaactt

SEQ ID NO: 135218 - DNA, 201 bp, Homo sapiens
cttctagctatgttccgtggaacctgcatgagccagaaagaggcaaatttgacttctctgggaacctggacctggagtatgtggtgttgctgcttctgtgmcctggtcaggggcagggcacagaggtggctactggggtggattagcaaccaaagagaaccagggagggacctgggtctggagtcctgttctaggactgtg

SEQ ID NO: 135219 - DNA, 201 bp, Homo sapiens
cttgtggatcacgtcatggagatgagtgggaagggcgaggggtggtgggaatcagagggagacaatgttccctttcccctgtgaagagagtgctcagagayggctatgcgcgttgctcacggaggcctcccagggagttctggtggggctagcctttcccgccacagcttacatattatcagaagggatgagggttgtacc

SEQ ID NO: 135220 - DNA, 201 bp, Homo sapiens
ttaatgcttatcacagttaatcccgtctccagccctgggcagccaccagtcttctttccagttctataaatttaccttttctagacgtttcacataagcgmgctcatgcagtatttagtcttttgcatctggcttctttcacacagcgtggtgtttcttcgaggtccatttatgcatgttgtagcaggactcagtgcttca

SEQ ID NO: 135221 - DNA, 201 bp, Homo sapiens
tctttatccttttgctttttatataccttaacatctgtatttaaaatggatttcttgtagatatcatatatttacatattgctttaaaaaattcaatttgwcagtttttgtattttaagataatgtggctacatcattcacatttaaagtagttattgatatggtttgactgaaatttacctttttgcaaattcttttctt

SEQ ID NO: 135222 - DNA, 201 bp, Homo sapiens
aaccttaacttcgaaccctgggcttaaaatctgtgtgattttttaaaatcagggtttctaagcattttataagcctcagtttcttcactgaagcataaagrtagtaaccttggtctcctgtgatgactgcgaagattgagttactctttgtaaagctcttataccatggatgacatagtaacccccaatatgaaaggaaaa

SEQ ID NO: 135223 - DNA, 201 bp, Homo sapiens
gtcatcatacaattcaacatacagagttccacaaccatcaccagaatccaaaatgttcattgcttttaatgcttatcacagttaatcccgtctccagcccygggcagccaccagtcttctttccagttctataaatttaccttttctagacgtttcacataagcgcgctcatgcagtatttagtcttttgcatctggcttc

SEQ ID NO: 135224 - DNA, 201 bp, Homo sapiens; identical to SEQ ID NO: 24028

SEQ ID NO: 135225 - DNA, 201 bp, Homo sapiens
aaagaaagaaagaaagagagaaaaaaatatatatatataatttaaaaattaacctgacacgactaatcatactgaagtgtaggtagtactaggattgtacmatagtgtcttcttaattccccactctaaagatgtctcttcattattgtttctacttccatggtttctgatgagaagtcagtattaattcttatctttttt

SEQ ID NO: 135226 - DNA, 201 bp, Homo sapiens
attccattttatctgttctgtagacttattacttatgtcagtttaaaaaactgtagctgttgacttagaatttaaaatataggccgggcgcggtggctcaygcctgtaatcccagcactttgggaggccgaggtgggcggatcatttgaggtcaggagtttgagaccagcctgaccaacatggtgacaccccatctctatt

SEQ ID NO: 135227 - DNA, 201 bp, Homo sapiens
gactaatacaattacatcctagtgagattcatcccaggaatgcaagattaggtcattaattttgtagaattctgagctgtcacttattagatattttctcygctctctcaccttctgcaattcaaatcgcacgtacattagaccacttagtgtggtctcacaactcttggatgctgttttctttcccactgtctttttttc

SEQ ID NO: 135228 - DNA, 201 bp, Homo sapiens
ttaaagtggcttctcgctggcctgctggcagcaccttccacctggctcctctctcctctgacgtgaccccatcagtctttcatagtttacttggtttccakccaaatacaatgtcccagactcacctgatacatttccaatcctcagcccagaaacagcgatttctcctaagaaccctgttgcttctgtagaatacaagct

SEQ ID NO: 135229 - DNA, 201 bp, Homo sapiens
tttaaacacagtacaaaatggaagttttgtggctaaagattaagagcaaccacttgtggactatggcggtgtttccaagtcagtgttcccagaaacatttyactggaaggtagtaatgagggtgtactaattatatgtatgatttcaaaaaacttaaggaaaattagatatttaagtgacatgagggttcttaggttatta

SEQ ID NO: 135230 - DNA, 201 bp, Homo sapiens
atactttcttctgatttattttcatatacacgaattctcttttcagctgtatctatggtgatactgtatttgatttaactttgtaaaaatcctcaatgagwgggttcgtccaaataacatagatcatgattgttggaaattgtgagtctttgatcatatctttaaatatgttaaaaaatttttttatttggtttattctct

SEQ ID NO: 135231 - DNA, 201 bp, Homo sapiens
tggtttcattgatttcttaaaaaatacaaatttagaattatagaggttatatttaacttttctgatttatatttttattttttctctgactttggacatcrtagttgataacaacattcacaattttgttattcacttaattctataatatattcataataggtttgaaataacactgataatattactgaaaataagaaa

SEQ ID NO: 135232 - DNA, 201 bp, Homo sapiens
aggcaaacagaatctcagtaggagctgtgggaagccagcacgcctgggcagagggtgaggcgggaaggaggcagaggggaacctgcaaaggaaaagctgayagtcatgcctcttctccttccttagtgccctcagagccagcattcttttgtccaagagggaggaacgcactataaagctggccatttatgctgtaggcag

SEQ ID NO: 135233 - DNA, 201 bp, Homo sapiens
ttgaagggctgaagctgtatgtgtctgtttgcatttctgcaatctagatgggactcagtggcaggagtgagcctcaaaaccagaaagactggtggccgggygcggtggctcacgcctgtaatcccagcactttgggaggccgaggcgggtggatcacgaggtcaggagatggagaccatcttggctaacacggtgaaaccc

SEQ ID NO: 135234 - DNA, 201 bp, Homo sapiens
tgccccaaatagcctcactctttaaccctcctatgcttgtttctcagtaccgccaggcaggccctgtcatcgcggtgcaagtggagaatgagtatggctcrttcaataaggataaaacatacatgccgtatctccacaaggtaagagggccttggtttggccccatgtttacatgcctccttcctcctctgtgcgtttctg

SEQ ID NO: 135235 - DNA, 201 bp, Homo sapiens
tggaatcatgaattgtgagttctgtttttttttttttttttggagacggagtctcactctgttgcccaggctggagtacagttgtgtgacctcggctcacygcaacttccacctcctgggttcaagcaattctcctgcctcagcttcctgaatagctgggattacaggcaccaaccaccatgcctggctaatttttgtatt

SEQ ID NO: 135236 - DNA, 201 bp, Homo sapiens
gtggaggcggccgtttcctttcaaatcccacaagtctgtgagaatggtctgaaagtctcacgcggcacagatctttccaggacccgagtgctccgggaccrggggtgtgaggcagctgggcagatgtgcggcgagccggggcagctctgagcccactcctgcttccctctcccaacccgtctcagaccctgagcccgcccc

SEQ ID NO: 135237 - DNA, 201 bp, Homo sapiens
aagctctttaagacatggctgtaagagccttgacaggccagcccctcagtcagaccaaatagagctgaaggcctttccgaagttgtgaagtgccttggagktggaggcggccgtttcctttcaaatcccacaagtctgtgagaatggtctgaaagtctcacgcggcacagatctttccaggacccgagtgctccgggaccg

SEQ ID NO: 135238 - DNA, 201 bp, Homo sapiens
tgatggccgcagagatcgggctgtgggtgattctgcgtccaggcccctacatctgcagtgagatggacctcgggggcttgcccaggtaagcggggctacartcccagagtcgtggttctagtgaagtatttgctttaaaaaaagtgaatttcaagctagtaacaaggaaagtaacctttattcacggagccgatgggaggt

SEQ ID NO: 135239 - DNA, 201 bp, Homo sapiens
tgagccacctcgcccagccttctttcttcttttgaacccactgggacttaagaaatttttcctttctttcctgtactcacttggaagttatatacatcacrttgtgtattttggctgtttttttcttttttcttaatcttatctatttagtcttttcagataactagcttgtagctttgttagtactctctgtatatttcg

SEQ ID NO: 135240 - DNA, 201 bp, Homo sapiens
tcgcataccttgcactaatttaattattgatacatcattagtattttaaggtccctttacggaattggttgtcattattgttttaattattatgtaaaaawaatttttagagtgcattactggtttacttgggacttttattcttatcctgtttatttcacaaggccgactggaaattcctctgcaatggggtttttagaa

SEQ ID NO: 135241 - DNA, 201 bp, Homo sapiens
cagctcaggccaccgacctggtgtgggagtccccgcgctttgggggtggggccgagccatcccttcgccccaccaggcagctcctccaccctgtgatgcgygtggcccccacccggcctcatcctgggccgtcgtgggaggggctgacgatgtggacctccctagggccttcgtcctgatggccgcagagatcgggctgtg

SEQ ID NO: 135242 - DNA, 201 bp, Homo sapiens
tgaggagtgagttaaaagcaagaaagcaggagatgtgggtgtagatgaccggtagctcttctaggaagtgtggctcttaatgaggagagtgggaagagggkaacattcctgggcctctgcccccatcttgatgcggagggtcctgagtaagtttccatgatcatggaggtcagcttgttgcaaaggaaggtcaaaggcacg

SEQ ID NO: 135243 - DNA, 201 bp, Homo sapiens
ccctcacatgatctcttctctgtgtgtgtctgtgtcctaatctcctcttcttataaggacaccagacatattggattagggcccatcctattgaccacatttttttttttttttttgagacatagtcttgctctgtcgcccaggctagagtgcagtggtgtgaactcggctcactgcaagctccacctcctgggttcacac

SEQ ID NO: 135244 - DNA, 201 bp, Homo sapiens
agcctaaggcaggagggaggtgggaatatggatgggattggcgtggaagcaggtgcatttgtaggtttgagggctcaaatttaagtagccagtgtgagaascagagggaaacctggcagttacgtactgtaacgcactagggaaggcggctcccacagcagccaagtgacccagcagactctaactccagcgctggagcag

SEQ ID NO: 135245 - DNA, 201 bp, Homo sapiens
tttacttaaagtctccattcccaagaatgtatatagctgtgaagcgaggagttactgtaactgattgtggagtggggttggaaaggataagagtttgccaraggcttctgtctcctcttaatttctaacattctctgtgttctcatgttcccctttgcagaggttgaacatgctgtgtctgaattcatcaaatatgagatc

SEQ ID NO: 135246 - DNA, 201 bp, Homo sapiens
ggtggattagcaaccaaagagaaccagggagggacctgggtctggagtcctgttctaggactgtgagaggccctgcacccaggacccagacgctccccaaycgtgacctgtcacccagagggactgggcctgcagcctccgggccccacctctccactgcagcccagaggggcagaagaccctgggagccgcccgactctg

SEQ ID NO: 135247 - DNA, 201 bp, Homo sapiens
ttcccatgtgttgtgggacagacccggtgggaagtaattgaatcataagggccagtctttcccgtgctattctcatgatagtgaataagtctcacgagatmtgatgggtttatcaggggtttccacttttacttctttttcattttctcttgctgctggcatgtgataagtgcctttccccttctgccatgattctgaggc

SEQ ID NO: 135248 - DNA, 201 bp, Homo sapiens
caggcccccgatggggctgtgcagaggctctgaggctgggagcagctcaggccaccgacctggtgtgggagtccccgcgctttgggggtggggccgagccrtcccttcgccccaccaggcagctcctccaccctgtgatgcgtgtggcccccacccggcctcatcctgggccgtcgtgggaggggctgacgatgtggacct

SEQ ID NO: 135249 - DNA, 201 bp, Homo sapiens
tttgctttttattatttttcatatcttggagattctactcaggatcagttttcttctgcttgaagtacatgctttagtgatgtctgtttatggcagactcyctgtttccaggcttcagtctcttcccggctctgaattctaatgtggcagttttctttcagcacacagtctgctgacttcactgctgtgatggggagggct

SEQ ID NO: 135250 - DNA, 201 bp, Homo sapiens
aatctagatgggactcagtggcaggagtgagcctcaaaaccagaaagactggtggccgggcgcggtggctcacgcctgtaatcccagcactttgggaggcygaggcgggtggatcacgaggtcaggagatggagaccatcttggctaacacggtgaaaccccgtctctactaaaaaatagaaaaaattagccgggcgtggt

SEQ ID NO: 135251 - DNA, 201 bp, Homo sapiens
ggagatggagaccatcttggctaacacggtgaaaccccgtctctactaaaaaatagaaaaaattagccgggcgtggtggcgggcgcctgtagtcccagctrctcgggaggctgaggcaggagaatgacgtgaacccggggggcggagcttgcagggagccaagatggcgccaccgcactccagcctgggcgacagagcgag

SEQ ID NO: 135252 - DNA, 201 bp, Homo sapiens
ccaagatggcgccaccgcactccagcctgggcgacagagcgagactccgtctcaaaaaataaataaatacataaataagaaatagacatgcattaaaataatagataggtaggctatataatacacagaaaacatttatacaaaattaatgtccaggctgggagctgtggctcacacctgtaattccagcactttgggagg

SEQ ID NO: 135253 - DNA, 201 bp, Homo sapiens
caagatggcgccaccgcactccagcctgggcgacagagcgagactccgtctcaaaaaataaataaatacataaataagaaatagacatgcattaaaataatagataggtaggctatataatacacagaaaacatttatacaaaattaatgtccaggctgggagctgtggctcacacctgtaattccagcactttgggaggc

SEQ ID NO: 135254 - DNA, 201 bp, Homo sapiens
aagatggcgccaccgcactccagcctgggcgacagagcgagactccgtctcaaaaaataaataaatacataaataagaaatagacatgcattaaaataatagataggtaggctatataatacacagaaaacatttatacaaaattaatgtccaggctgggagctgtggctcacacctgtaattccagcactttgggaggcc

SEQ ID NO: 135255 - DNA, 201 bp, Homo sapiens
taagcgcgctcatgcagtatttagtcttttgcatctggcttctttcacacagcgtggtgtttcttcgaggtccatttatgcatgttgtagcaggactcagygcttcatttccttcaatagctgactggattgtgcttgactgtcacgtacgtaaagtcatagtcaaacccaaaggccgtcctgctttagtgtgttaataca

SEQ ID NO: 135256 - DNA, 201 bp, Homo sapiens
ggaggccaaagtgggaggactgcttgagcccaggagtacaagaccagcctgagcaacatagtgagaccacaactctacaaaaaatacaaaaattcgagagygtggtgagcacctgtagtcccaactactcgggaagctaaggtgggaggatggcttgagcccagttgcagtgacctgagatcgtgcctctgaactccagcc

SEQ ID NO: 135257 - DNA, 201 bp, Homo sapiens
tgtcatcatacaattcaacatacagagttccacaaccatcaccagaatccaaaatgttcattgcttttaatgcttatcacagttaatcccgtctccagccytgggcagccaccagtcttctttccagttctataaatttaccttttctagacgtttcacataagcgcgctcatgcagtatttagtcttttgcatctggctt

SEQ ID NO: 135258 - DNA, 201 bp, Homo sapiens
cgtgcttcaagaccaggcctggtcacagtctcctctgcttaacaccctctcctggttgtcctttgtgcccaggatgacatgcagcccccacgccttggccrgctgggccgctgtgagcctctgcctccgctcccagccccgctacccctcccttgagggccttccttccattccagcacactgcagccccgaaggctagcc

SEQ ID NO: 135259 - DNA, 201 bp, Homo sapiens
tcctaccgcccaaggctctgtgtggacacttaggagatcctagagaattaagtggcaggaagattctggacggactcatcagatggcaatagtgagggacrcgcccgggagtgagcaggggagcggggcgagctgctgccggcggctgccgttctgcctccttagtagtggctcttccaaggaagcctggcacactggaac

SEQ ID NO: 135260 - DNA, 201 bp, Homo sapiens
cactggagctcctctgttctcaggacgcctttccatctcccatagtttttctgtggcaagaaatctgcattggtgctgcgcctggcttgggatcagggccrtctccactaacttgggaaaccacagggagaaccagaagatgggtgttgtgtcaggaaccccgcctagatccggttccattcctgggatcctaccgcccaa

SEQ ID NO: 135261 - DNA, 201 bp, Homo sapiens
cagcacagagtggttccctggtcttcttcctcttctttcagtgacttagatcctcttccagggcatttcctggtaaactcagccctttttttccctggagrctttgatcatggggtgtcagaacccacactcgaccgattttagggtcattccccacaaaagtcaccaggctgagaccgagacagtgctttcccccaattt

SEQ ID NO: 135262 - DNA, 201 bp, Homo sapiens
tagttgaatatttttattttagtctgacacaattaaacttttatttggagctgtcagtcattcatatttcatgtaattcttgttagactgaagttgaaccwgccatctgattatgtgcctgcttttaagtgtttcttttctttttctttacaatcttggcttctttttatggattcgactatttaaaaaaatcaatttctg

SEQ ID NO: 135263 - DNA, 201 bp, Homo sapiens
tggatcagagcctgccgcaccagctgtgcagccttcggcagcaagctcagagactccaggcttttgccccaaatagcctcactctttaaccctcctatgcytgtttctcagtaccgccaggcaggccctgtcatcgcggtgcaagtggagaatgagtatggctcattcaataaggataaaacatacatgccgtatctccac

SEQ ID NO: 135264 - DNA, 201 bp, Homo sapiens
ttgcgtataacttttgactccctcaaaatttagtcactaatagtctactgttgactggaagccttaccaataataaacagtcgattaatgcaggttttgtrtatctattatatactgtattcttacagcaaagtaagcttcagaaaagaaaatgttactaagaaaatcataaggaacagaaaatgtattgacttctcatta

SEQ ID NO: 135265 - DNA, 201 bp, Homo sapiens
ggttcgtccaaataacatagatcatgattgttggaaattgtgagtctttgatcatatctttaaatatgttaaaaaatttttttatttggtttattctcttkagggacacaagttatgtgtaatgcaaacttcttctgtcttactttcacatctcctgcatccatttccttctcattctttctactctctgttcattttaac

SEQ ID NO: 135266 - DNA, 201 bp, Homo sapiens
aaaatcataaggaacagaaaatgtattgacttctcattaagcagaaatggatcatggtaaaggtctttatcctcatcatcttcaggttaaacaggctgagrgggaggaggaagaggtggaggaggaggagttggttttgctgactcaggggtggcagaagaggtggaggaggtggcaggagaggcaggggattgtaactcg

SEQ ID NO: 135267 - DNA, 201 bp, Homo sapiens
ttctagctatgttccgtggaacctgcatgagccagaaagaggcaaatttgacttctctgggaacctggacctggagtatgtggtgttgctgcttctgtgcmctggtcaggggcagggcacagaggtggctactggggtggattagcaaccaaagagaaccagggagggacctgggtctggagtcctgttctaggactgtga

SEQ ID NO: 135268 - DNA, 201 bp, Homo sapiens
agatggcgccaccgcactccagcctgggcgacagagcgagactccgtctcaaaaaataaataaatacataaataagaaatagacatgcattaaaataatagataggtaggctatataatacacagaaaacatttatacaaaattaatgtccaggctgggagctgtggctcacacctgtaattccagcactttgggaggccg

SEQ ID NO: 135269 - DNA, 201 bp, Homo sapiens
atttatacaaaattaatgtccaggctgggagctgtggctcacacctgtaattccagcactttgggaggccgaggtgggtggatcacgaggtcaggagatcragaccatcctggctaacacggtgaaaccccgtctctactaaaaaatagaaaaaatgagccgggcgtggtggcgggcgcctgtagtcccagctactcggga

SEQ ID NO: 135270 - DNA, 201 bp, Homo sapiens
gctactcgggaggctgacgcaggagaatgacgtgaacccgggaggcggagcttgcagggagccaagatggcgccaccgcactccagcctgggcgccagagygagactccgtctcgaaaaaaaacaaaaacccagaaagactgaatatttggatggaagttttaccagaagcacaaatgccgttcacaggcacatgtatgca

SEQ ID NO: 135271 - DNA, 201 bp, Homo sapiens
tgaggtgggtggatcacctgaggtcaggagttcgagaccagcctggccaacgtgtcaaaactctgtctctactacaaatacaaaaattagctgggcgtggyggtgcacacctgtaatcccagctactcaggaggctgaggcaggaaaatcacctgaacctgggagatggaggttgcagtgagccgagattatgccactgga

SEQ ID NO: 135272 - DNA, 201 bp, Homo sapiens
ggtgcacacctgtaatcccagctactcaggaggctgaggcaggaaaatcacctgaacctgggagatggaggttgcagtgagccgagattatgccactggaytccagcctgggtgacagagtgagactcgtcccccccccccaaaaaaaaagaaaagaaaaaaaaagaaaaagaaaaaaaaaccattcaactccactcccag

SEQ ID NO: 135273 - DNA, 201 bp, Homo sapiens
gcaggaaaatcacctgaacctgggagatggaggttgcagtgagccgagattatgccactggactccagcctgggtgacagagtgagactcgtccccccccsccaaaaaaaaagaaaagaaaaaaaaagaaaaagaaaaaaaaaccattcaactccactcccaggcccaggtctgactcgataagcacaggagacgcacagc

SEQ ID NO: 135274 - DNA, 201 bp, Homo sapiens
caggaaaatcacctgaacctgggagatggaggttgcagtgagccgagattatgccactggactccagcctgggtgacagagtgagactcgtcccccccccycaaaaaaaaagaaaagaaaaaaaaagaaaaagaaaaaaaaaccattcaactccactcccaggcccaggtctgactcgataagcacaggagacgcacagcc

SEQ ID NO: 135275 - DNA, 201 bp, Homo sapiens
aggaaaatcacctgaacctgggagatggaggttgcagtgagccgagattatgccactggactccagcctgggtgacagagtgagactcgtccccccccccyaaaaaaaaagaaaagaaaaaaaaagaaaaagaaaaaaaaaccattcaactccactcccaggcccaggtctgactcgataagcacaggagacgcacagcca

SEQ ID NO: 135276 - DNA, 201 bp, Homo sapiens
ggaaaatcacctgaacctgggagatggaggttgcagtgagccgagattatgccactggactccagcctgggtgacagagtgagactcgtcccccccccccaaaaaaaaagaaaagaaaaaaaaagaaaaagaaaaaaaaaccattcaactccactcccaggcccaggtctgactcgataagcacaggagacgcacagccag

SEQ ID NO: 135277 - DNA, 201 bp, Homo sapiens
ctagttttctatttccaattgatttttttggctggttgtattggtcactgaaagagatgtgttaatatttctatcataattgcagatttgcatatttctaycagtagaccttagtattttacctgtcctttagcaagtttatcaaagtttgcttgatgtattttgaggctatgtaaatgtggacttgttttatcttcatgg

SEQ ID NO: 135278 - DNA, 201 bp, Homo sapiens
gctgggcatggtggcacatgcctgtaaccccagctactcagctggctgagacaagagaatcacttgaacctgggaggcagagattacagtgagacaagatsatgccgccacactccagcctgggcaacagagtgacactctgtctcaaaaaacaaaacgaaacaaaaaaacaaaactcgggaattcatatcctattcatgg

SEQ ID NO: 135279 - DNA, 201 bp, Homo sapiens
tgcagtgagccgagattatgccactggactccagcctgggtgacagagtgagactcgtcccccccccccaaaaaaaaagaaaagaaaaaaaaagaaaaagaaaaaaaaaccattcaactccactcccaggcccaggtctgactcgataagcacaggagacgcacagccaggccctggctatctggcctcgtgaccatggtt

SEQ ID NO: 135280 - DNA, 201 bp, Homo sapiens
gggatgtatcataattcatttaacaggtattcagtccaggcttggtgactcatgcctataatcccagcattttgggaggccgaggcaggggggtcacctgrggtcaggagttcgagatcagcctgaccaacatgggaaactccatctctactaaaaatacaaaaaaattagctgggcatggtggcacatgcctgtaacccc

SEQ ID NO: 135281 - DNA, 201 bp, Homo sapiens
gattcatttgttttcaatttttaggtgtgattctttattttttatgtttaattttgtttgtgtttatgtcctatcaatggtcagttttggtaaatgccctrtgtgtttgtaatgaatgtattttgcggtactgggtgcagtattctgtttaagttctatgtcaattttatttattgtgttattctagttttctatttccaa

SEQ ID NO: 135282 - DNA, 201 bp, Homo sapiens
cggtggcggggggcggggtgcagttgtcatccccgattcacagatgagaagctccagacgttggtcctggggccttgggcatgcggtcaagagggtgtgcrcggggagaggtggccacaagaggctcccactcttctttccccatgcaggaggggctgtagcctcctctgtccttctcaaaatgccctgggaagaaaggga

SEQ ID NO: 135283 - DNA, 201 bp, Homo sapiens
gtgagccaccgcgcccggcccctattgaccacattttaatcaaggcgcctacaggctgttctcctctgaggcctctccttatcttgcagatggtcaccttyttaacgtgccctcgcatggtctttctgccgtgaacacgagaccctggtgtgtcaaaatttcctcttcttatgaggaccccggtgacatgggattaagacc

SEQ ID NO: 135284 - DNA, 201 bp, Homo sapiens
tcctgggccgtcgtgggaggggctgacgatgtggacctccctagggccttcgtcctgatggccgcagagatcgggctgtgggtgattctgcgtccaggccsctacatctgcagtgagatggacctcgggggcttgcccaggtaagcggggctacagtcccagagtcgtggttctagtgaagtatttgctttaaaaaaagtg

SEQ ID NO: 135285 - DNA, 201 bp, Homo sapiens
ctgatcttgcatgctgtcttccttttccatgatagtcttaagtatattaatcatagttattttgaattccttgtgagatagttacaacatctgtgtcttayctgtttctgatgattgctttatctcttccaagtgtgttcttttcttgcctttttgtatgtctcataattttttattgaaaactgcgcatcatgcatagga

SEQ ID NO: 135286 - DNA, 201 bp, Homo sapiens
gctctgaagatctctagcagggatgtatctgtcatctacctatccctccatctcagcctgtgaactgcgtgtcatcatgggttaaattaattactaagagrccacggagtccattttatagctcaaatgagcatttttcatttcctgtagtaaacatgacttaagtaaacaaagagtttctctaacaaggatggcttacaa

SEQ ID NO: 135287 - DNA, 201 bp, Homo sapiens
cagtctaatcatgtcagggagccttggcctggctcacttctctgcacagagtgtggttaatttcaacagtgggtgtcctcgcaagtgtcagggatgtggcratggccgtggcagccctttggatgtggcagagtggggtccagacagcatctcgccatcctcactgctgagcatgggttcctcctgcgtgcgtccgggccg

SEQ ID NO: 135288 - DNA, 201 bp, Homo sapiens
agttgaatatttttattttagtctgacacaattaaacttttatttggagctgtcagtcattcatatttcatgtaattcttgttagactgaagttgaacctkccatctgattatgtgcctgcttttaagtgtttcttttctttttctttacaatcttggcttctttttatggattcgactatttaaaaaaatcaatttctgt

SEQ ID NO: 135289 - DNA, 201 bp, Homo sapiens
cttctcaagggtggcccttttccatcaccaaggctgcactcatgcagagaggaagccttcccccccgacctgatcaggctgattaacttcaactcccaggrgagaagactcttgagaacacactttaaccttgggttctcacctggagctccgcatgattttccatttccttaactaatgaatgcatctagcagactcagt

SEQ ID NO: 135290 - DNA, 201 bp, Homo sapiens
gtgtggacacttaggagatcctagagaattaagtggcaggaagattctggacggactcatcagatggcaatagtgagggacgcgcccgggagtgagcaggsgagcggggcgagctgctgccggcggctgccgttctgcctccttagtagtggctcttccaaggaagcctggcacactggaacacgtgctgagcttggggcc

SEQ ID NO: 135291 - DNA, 201 bp, Homo sapiens
cgttcagtacagatgcaattaagaaatatatttttggccaggcgtggtggctcatacctgtaatctgagtgctttgggagtacaaggcgggaggctcactkcaggccaggagtttgagaccaggctgggcaacatagtgagcccccgtttctactaaagaaaaaaaaattagctggacatggtggcgtgtgcctgtagtcc

SEQ ID NO: 135292 - DNA, 201 bp, Homo sapiens
ataaatcccaagaaacccagcatcataggataattggcagcttgaaccacaattggataatagagcaaggaactattaaagatggtcatggttagtgtaayagaggtttaatttccactggtaacttcaacttatttcaaaatagagctatgcatggttttggcttggatttggggcagacctaacaatttggaggaagaa

SEQ ID NO: 135293 - DNA, 201 bp, Homo sapiens
gtagctggaattacaggtatgcgccaccacacctggctaattagagacagggtttcaccatgttggccaagctggtctcaaactcttgacctcaaatgatstgcctgccttgacctcccaaagtgctggcatgagccaccatgcctggcctctcccatgtactttaacttatctctagattacttctaatacccaatacga

SEQ ID NO: 135294 - DNA, 201 bp, Homo sapiens
ctggtctcaaactcttgacctcaaatgatctgcctgccttgacctcccaaagtgctggcatgagccaccatgcctggcctctcccatgtactttaacttayctctagattacttctaatacccaatacgatgtaaatgctacataaatagttgctatatagtactctttaggaaataatgatgagaaaaatgcctgtgcac

SEQ ID NO: 135295 - DNA, 201 bp, Homo sapiens
atctgcctgccttgacctcccaaagtgctggcatgagccaccatgcctggcctctcccatgtactttaacttatctctagattacttctaatacccaataygatgtaaatgctacataaatagttgctatatagtactctttaggaaataatgatgagaaaaatgcctgtgcacgttcagtacagatgcaattaagaaata

SEQ ID NO: 135296 - DNA, 201 bp, Homo sapiens
ctcctgccgtctttaaacacagcagcactggagctcctctgttctcaggacgcctttccatctcccatagtttttctgtggcaagaaatctgcattggtgytgcgcctggcttgggatcagggccgtctccactaacttgggaaaccacagggagaaccagaagatgggtgttgtgtcaggaaccccgcctagatccggtt

SEQ ID NO: 135297 - DNA, 201 bp, Homo sapiens
ccgcccaaggctctgtgtggacacttaggagatcctagagaattaagtggcaggaagattctggacggactcatcagatggcaatagtgagggacgcgccygggagtgagcaggggagcggggcgagctgctgccggcggctgccgttctgcctccttagtagtggctcttccaaggaagcctggcacactggaacacgtg

SEQ ID NO: 135298 - DNA, 201 bp, Homo sapiens
gctgccggcggctgccgttctgcctccttagtagtggctcttccaaggaagcctggcacactggaacacgtgctgagcttggggccaggaagcctgtgtcscgtttccagtctaatcatgtcagggagccttggcctggctcacttctctgcacagagtgtggttaatttcaacagtgggtgtcctcgcaagtgtcaggga

SEQ ID NO: 135299 - DNA, 201 bp, Homo sapiens
actgaaccatgctctgtttagtttccgatttcctcatatagtcggccctcagcatccatggaggattgattccagggcccctgtggacacaaaatcggtcrgtgttcaagttcttgacataaaattgtgtggcacttccatgcaacctatgcacatcctcccatatgctttttttttttttttctgagatagttttactct

SEQ ID NO: 135300 - DNA, 201 bp, Homo sapiens
ttcttcactgttcttttgaattgctgaattacaacggcaatttttctgatagtcaagcagccatgtggtactggtataaactctgcttggctctgagatakgcacacattacatacacacagattgctagactttatttgctagtgttttatttcaaatgtgtttatgattataagcaaaacggatttaaaattttatttt

SEQ ID NO: 135301 - DNA, 201 bp, Homo sapiens
ccctatgggggagggtcccctgggggcccttcttgctaaggtctaaaggtagtacccttactagatttactgtaactccactatcttcacagaaactcctsatttattcttattttgactaactcatagcaaaaatttataaggaagatgtagacatttttgtttttgttctcttttttaatttatacttttaatgagtgt

SEQ ID NO: 135302 - DNA, 201 bp, Homo sapiens
catggcacatgtatacatatgtaactaacctgcacattgtgcacatgtaccctaaaacttaaagtataataataataataataataataataataataataaaaacaaacaaacaaaaaaagaaaataatgtgtagtttacatctatttataaattcccatcaggtcaagctaattgatgatattggccaagtaatcacta

SEQ ID NO: 135303 - DNA, 201 bp, Homo sapiens
gctggctcccgcgctatagctgtggcttctggaggtggacaaggtcagagagtaatttccctccctgtcttttcccaggggacgcgtggctgccctgcatyggttgtgttcagccagcattatttaatcggttgtattcagccagcattatttaatcggttgtattcagccagcattatttaatcggttgtgttcagccag

SEQ ID NO: 135304 - DNA, 201 bp, Homo sapiens
atggcacatgtatacatatgtaactaacctgcacattgtgcacatgtaccctaaaacttaaagtataataataataataataataataataataataataaaaacaaacaaacaaaaaaagaaaataatgtgtagtttacatctatttataaattcccatcaggtcaagctaattgatgatattggccaagtaatcactat

SEQ ID NO: 135305 - DNA, 201 bp, Homo sapiens
tccttcctggtggctcagcccctgctggcccctgacttcccatattcagaaagctgatgagagttcagtctcaactgaaccccaccatgggctgccaagcagagtgcagggctgcagggttggcctgagccgtcctgactccgcccttgcctctgcagcagtgcctgtgcggagacctctggctggaggccggggcgggaa

SEQ ID NO: 135306 - DNA, 201 bp, Homo sapiens
gctatgttccgtggaacctgcatgagccagaaagaggcaaatttgacttctctgggaacctggacctggagtatgtggtgttgctgcttctgtgccctggycaggggcagggcacagaggtggctactggggtggattagcaaccaaagagaaccagggagggacctgggtctggagtcctgttctaggactgtgagaggc

SEQ ID NO: 135307 - DNA, 201 bp, Homo sapiens
tggcacatgtatacatatgtaactaacctgcacattgtgcacatgtaccctaaaacttaaagtataataataataataataataataataataataataaaaacaaacaaacaaaaaaagaaaataatgtgtagtttacatctatttataaattcccatcaggtcaagctaattgatgatattggccaagtaatcactatc

SEQ ID NO: 135308 - DNA, 201 bp, Homo sapiens
aaataactattagaagacagaacatggcattaaagggctattcctttctgcttcctgtctctatgacccacgactctcattaaagctggggctggtgaatmttcctccactgtaaataatgcttcaagaacttagtgatgggactctcagcttgaagctttctggcctgtaagataaacgtcgtctcttctgtccctcttg

SEQ ID NO: 135309 - DNA, 201 bp, Homo sapiens
cacatgtatacatatgtaactaacctgcacattgtgcacatgtaccctaaaacttaaagtataataataataataataataataataataataataaaaacaaacaaacaaaaaaagaaaataatgtgtagtttacatctatttataaattcccatcaggtcaagctaattgatgatattggccaagtaatcactatcctt

SEQ ID NO: 135310 - DNA, 201 bp, Homo sapiens
tgtgaatttacagcagtcaagacaatcactatgtacctaaataactattagaagacagaacatggcattaaagggctattcctttctgcttcctgtctctrtgacccacgactctcattaaagctggggctggtgaatcttcctccactgtaaataatgcttcaagaacttagtgatgggactctcagcttgaagctttct

SEQ ID NO: 135311 - DNA, 201 bp, Homo sapiens
aacccaggaggtggaggtagcagtgagccaaggtcgtgccattgcactccagcctgggtgacagagggagactctgtctcaaaaaaaaaaaaaaaaaaaaraaagaaagaaagagagaaaaaaatatatatatataatttaaaaattaacctgacacgactaatcatactgaagtgtaggtagtactaggattgtacaata

SEQ ID NO: 135312 - DNA, 201 bp, Homo sapiens
tcaaggttcaactgtagatcaagttcattttctctgtgaatttacagcagtcaagacaatcactatgtacctaaataactattagaagacagaacatggcrttaaagggctattcctttctgcttcctgtctctatgacccacgactctcattaaagctggggctggtgaatcttcctccactgtaaataatgcttcaaga

SEQ ID NO: 135313 - DNA, 201 bp, Homo sapiens
gccctcacatgatctcttctctgtgtgtgtctgtgtcctaatctcctcttcttataaggacaccagacatattggattagggcccatcctattgaccacatttttttttttttttttgagacatagtcttgctctgtcgcccaggctagagtgcagtggtgtgaactcggctcactgcaagctccacctcctgggttcaca

SEQ ID NO: 135314 - DNA, 201 bp, Homo sapiens
cttcttataaggacaccagacatattggattagggcccatcctattgaccacatttttttttttttttttgagacatagtcttgctctgtcgcccaggctrgagtgcagtggtgtgaactcggctcactgcaagctccacctcctgggttcacaccattctcctgcctcagcctcccgagtagctgggactacaggcgccc

SEQ ID NO: 135315 - DNA, 201 bp, Homo sapiens
gagtgcagtggtgtgaactcggctcactgcaagctccacctcctgggttcacaccattctcctgcctcagcctcccgagtagctgggactacaggcgccckccaccacgccaggctaattttttttgtatttttagtagagacggggtttcaccgtgttagccaggatggtctctatctcctgacctcatgatccgcccgc

SEQ ID NO: 135316 - DNA, 201 bp, Homo sapiens
cctccaccacgccaggctaattttttttgtatttttagtagagacggggtttcaccgtgttagccaggatggtctctatctcctgacctcatgatccgccygcctcagcctcccaaagtgctgggattacaggcgtgagccaccgcgcccggcccctattgaccacattttaatcaaggcgcctacaggctgttctcctct

SEQ ID NO: 135317 - DNA, 201 bp, Homo sapiens
attcgtttttactctgtcttaacattctcatcagaagcatgttggttcttttcaaagaaccgatttttttttaagttgtctctattgcaaattaatttcartttcactgcttctacccttaggtttatatttcctttatttattttactatttttggtttattttgctgttctaatttcttgaggtgggtaattagccttc

SEQ ID NO: 135318 - DNA, 201 bp, Homo sapiens; identical to SEQ ID NO: 24030

SEQ ID NO: 135319 - DNA, 201 bp, Homo sapiens; identical to SEQ ID NO: 24031

SEQ ID NO: 135320 - DNA, 201 bp, Homo sapiens
taagtaacatcagccatttttagattggttccattctcataccttctcactggcctcaagtgagccaaaaaactcacactgcctgccatctgtcttccccmagttctgcaggtggaggatggtagtctagtctcctgccatcctccacctgcagaattgggggagttttgagatactatttttatttttgtgagactctgt

SEQ ID NO: 135321 - DNA, 201 bp, Homo sapiens
catttaaaaagttagcgtggctaccagccttacaagactcaggggacaggcttgccagggagaacttagctaatccccccatgtcctcagggtgctgggartgttggctttgtttctaattggtttccttttacagagagcctcgctgtcatgtggggctggaagaggttgagaggcactgaaggttccttgccagggaga

SEQ ID NO: 135322 - DNA, 201 bp, Homo sapiens
tagtaattggacatagttgaaggaagaattaataaattggttagggtgtaagaaaattccaataatgcatcacaaagagatacaataataaaaaatagagmagagaggatgaatgactaaaggatgcaatgacatatctaataaagcataacttgagttcttaaagaagaggagaagaatagaacacaagctatatctcag

SEQ ID NO: 135323 - DNA, 201 bp, Homo sapiens
ttaaaagaataaaaattacttgatctctgtaaagcacttaataactggcacatgataatcattcaaaaatagtagtttttgtccacagaagaggaatattstacttttagggattaagtgggcggtactttaaggaggaggtgatatttgaagtaaatttaaagtataaaggggagcttactaggtgaagttggaatgaag

SEQ ID NO: 135324 - DNA, 201 bp, Homo sapiens
agctaaggtcaatgagctccaagcttcagggaaacctcctcaaaatgtagatggaccctagagctttgtcactttcctctgagtcctggaatttaaatgtratggttggagttctagcagtcttctcttatcaggaggcaaagagccataccttagggatgttagagcagtgagctggaagcagcctctgtctttccattc

SEQ ID NO: 135325 - DNA, 201 bp, Homo sapiens
ctggcaaagctacttcctgcagttaatttctctgttcccttcatgttccttttttactactttagctattcatcatactaacttctttctgttataattaktgtggtttctgatttcctgactgatatgagtacttattacaagggccagatactgtattttacatatattgttttacttaatcttcacaaaccctgtgag

SEQ ID NO: 135326 - DNA, 201 bp, Homo sapiens
ctttagaattctcagcattgcatacattatctcatttaatccttagtaagagctttttatgttcagtataattatgccttttttttttttttttttttttwatgagatagagtctcactctgtctcccaggctgaagtgcagtggcgcaatctcggctcactgcaaactctgcctcccgggttcaagcaattcttctgcct

SEQ ID NO: 135327 - DNA, 201 bp, Homo sapiens
ctttgctgcccaggctgagtctcaaattcctggcttcaagtgatactcctgcctcagcctccccgaagtgctggggttacggccgcgagccaccacatgcrgccatgcatatctttaaatgcaaacatgttctacaaatagaaacataaatttacaccggatatcctccatcataaaatttcagtttgtgtattcttaaaa

SEQ ID NO: 135328 - DNA, 201 bp, Homo sapiens
gccataccttagggatgttagagcagtgagctggaagcagcctctgtctttccattctgacaccatggctgccatggacaacctgcttacaatctgtttaygtgagagaagaatccatttccatcttgaatatttattttgggttttgcatcagaggcagccaaatttaatcctaactgatctaaagacaaagagaaagca

SEQ ID NO: 135329 - DNA, 201 bp, Homo sapiens
ttccttcagggtgaattgctatggcgtggtaagtgcccagtgcccctttggtggattcaagatgtctggaaatggaagagaactgtaagattaacgttctmttaagataaatatttatttttatgaaaatgattttcattcccagggaattaactcatagttttcaccttacataaaacctgcctctgttctttcctggag

SEQ ID NO: 135330 - DNA, 201 bp, Homo sapiens
actctggttggtctacttcaaatctacttgggatactttaaaatcagtattcctaaacatccatttgatctggtctctctccctttttatatccagaatasagcctaaacttctttctctggggatcaggatctgccacaaattgactttattttcaatgtcaggccttatctgtgacttatgtccactgcaactccattc

SEQ ID NO: 135331 - DNA, 201 bp, Homo sapiens
tctccaggtcatctggaccaggagctactgtttgctgatctcatcttcagcatcagtttgtcttcgctcatccatgatcccctataacattgggggagcaytttacctacttaaaaaaatccctggagattaaaagtctagaaaatatcttggtttaaattctgactctacccctcctagcagtgtgtctttaaaaagtta

SEQ ID NO: 135332 - DNA, 201 bp, Homo sapiens
tcgtttagaatagattgctatttcctcagctgaaccctagatgatgtaaacattttgcatttaaatgccatggtgtattttttaaattccatatctgtgaytattagcatttcattgagctaatgagatactccagaatgggacttggattgagaccaactgaggagacagcagtttcacatttgccctctcccttcactc

SEQ ID NO: 135333 - DNA, 201 bp, Homo sapiens
cttggattttcctgttcatctcaagacatccaagtaggaaaatcttaggacttaggcagtgtaacatattgaaatctaaaggccctaaaataagcggcaastgaggtaatactttgttttatcttaatcccattatattttgtatttgtctttgagtttaatgagtacttaaaagtagttgccctttttttcatatttggt

SEQ ID NO: 135334 - DNA, 201 bp, Homo sapiens
ggataagtaggtatgttagaatttggagaaacaaaagactaaaaagccctgggctcctttaccattaaatattcatctattgttaggagaaaaaacttacrcaaaggggatactcactcactaagctttagcctattgcctcatccaggggtggttgagtgaactgaggcttttaaatacaatgatggaatcttcctcatt

SEQ ID NO: 135335 - DNA, 201 bp, Homo sapiens
tgtttggggctatgtcgtagatatagtataggcataggaatcctaaggagcaggacatatttcagcctgaatatgacaaaaatcccacttattactctcckgagagcttcaagtgcctatatgacccaaaatacaatggaaagcctattggcgaaagtcatgggttgattgatctaaccctgagataaaatacttattaaa

SEQ ID NO: 135336 - DNA, 201 bp, Homo sapiens
cccaatctttttagtcatctcttcaacaaggggtaaatcagtcagtttctaaaactggtgggaggtctccataaacctgataacaagatcccaaaatccaractgattgactgagttaattcctgatcatttgggttgaacttaagagttatacaagaaaatggtaggggacgaggaggttgtataaaggggaaaaaacaa

SEQ ID NO: 135337 - DNA, 201 bp, Homo sapiens
gtcattatatgaggctagcattatccaaataacaaagccacacaaagacactataagaaaactacagattaatatccctgatgaacattggtgcagaaatyctcaacataatgttagcaaactgaattcaattgtgtaggtaaaggatcgtgcactgcaatgatttggtttgtttgtcccctccaaatctcaggttgaaat

SEQ ID NO: 135338 - DNA, 201 bp, Homo sapiens
tagtgagtagaggccagagatgctgctaaacatcttgcagtgaccaggacagccccatgacaaagaattatctggcccaaaatgccaacaggacaactgcsgagaaatcctgctctggagtctagacattaagcttagaggctctgttctttcacaataaaggttttacactgatgcgtgctgtcaatttgaaaccaaacg

SEQ ID NO: 135339 - DNA, 201 bp, Homo sapiens
ggtgaatcctagttgggaggtctttgggtcatggggctggattcttcatgaatggcttaatgccgtctttgtggtaatgagtgaattcttgctctgctagytcccacaagagctggttgctaagaagagcctgataactctttctcctctctctctctcttgcctcctttctggccatgtgagctctgcacatgctggctt

SEQ ID NO: 135340 - DNA, 201 bp, Homo sapiens
ccgataagaattctctgcattgagtgctctcactgtaagatttgtggacccaacggatcattgtccaactttggctatgatggccagatttgaaaagatayctgggcagatgtcctgctgataacgaagcctagattcctccttagaactgtgttcctttgaatgagtcatgctgcctcactttcaaaaatctgcttaggt

SEQ ID NO: 135341 - DNA, 201 bp, Homo sapiens
tttatgtagtcagttctcctctccacttctctcaaaatgcagtgtcatcagtgtgatgcctaactgcaaaaatatttatctatagatttactgcccacatrtccaacatgtaaaaatcaagaggctatctgaatcttgacttgaaacagattgctgcagggaaagctgaaagctgttcaaccgcaattgcttttaacagtg

SEQ ID NO: 135342 - DNA, 201 bp, Homo sapiens
ttatatcaataagttatttttctattcctgccacctctactcctcccatctccaagctaatgataaatagagaattaaatgtaagaaaagtcttaatgtcrttatgaaacttgggctgctcttctgtaggtgctgaaattcttccttctagaaagtcaggaacatttattcagatgggctacagccattgattggttagtc

SEQ ID NO: 135343 - DNA, 201 bp, Homo sapiens
gaacccgggaggcagaggttgcagtgagccgagacggcagcattgcactccagcctgggggacagagcaagactgtctcaaaaacaaacaaacaaacaaamaaaaatgaaagaaagatcacagtcattatttcataacttaggttattccaagtgcaatgacttcacatcacaatgactccaatatcactacctccatctg

SEQ ID NO: 135344 - DNA, 201 bp, Homo sapiens
ttggatttcattcatttgttatccattcattcatttaacaaacttctttgagaatctgctctgtatctagcactgcacttggagtggaactacagactataacatgttcttactctctatggactgctagtcttacaagagaagcaaagaattgggtaaattctgcacaaaatgctattacagatataagcaaaaagcaga

SEQ ID NO: 135345 - DNA, 201 bp, Homo sapiens
attggatttcattcatttgttatccattcattcatttaacaaacttctttgagaatctgctctgtatctagcactgcacttggagtggaactacagactataacatgttcttactctctatggactgctagtcttacaagagaagcaaagaattgggtaaattctgcacaaaatgctattacagatataagcaaaaagcag

SEQ ID NO: 135346 - DNA, 201 bp, Homo sapiens
tagcctggccaacatggtgaaacccagtctctactaaaactacaaaaaaattagacgggcgtggtggtgggggtttgtaatcccagctattcaggaggctraggcaggagaatcgcttgaaaccgggaggcagaggttgcagtgagccaagatcacgccattgcactccagcctgggctacaagaatgaaactctgtcaaa

SEQ ID NO: 135347 - DNA, 201 bp, Homo sapiens
aaaaaaaaaaaaaaagaaatacttaggacaaaacctaacaacgaggtgaaagacttgacttgtatgccgaaagccacaaaatgttgctgaaaagaagttamagaggacacaaataaatggaaagacagctcatgttcatggattggaatatttgatatttaagatgtcaatactaccaaaagtcatccataggtttagtgt

SEQ ID NO: 135348 - DNA, 201 bp, Homo sapiens
acatgcaaaaattagttgtgtttctatacactaacaaagaacaacctgaaaaggaaattttaaaaattccgtttacaatagcatcaaaaaaaaaaaaaaaagaaatacttaggacaaaacctaacaacgaggtgaaagacttgacttgtatgccgaaagccacaaaatgttgctgaaaagaagttaaagaggacacaaata

SEQ ID NO: 135349 - DNA, 201 bp, Homo sapiens
gctatattgggaaacgtaatattgaaaatcacatgataagttttatcgatgtactcatttgaaatagataattcatgtaaggaaaaaaagtattcttattytacaacacaggaaattctcatttttcttctctttttttttttttgagatggtgtctcgctcttttgcccaggctggactgcagtggcacaacctcagctc

SEQ ID NO: 135350 - DNA, 201 bp, Homo sapiens
atctcaccaaaacatgcttcccaactgactgcccctatatagatataggggcatatatgtacgtatattgttttgaggcagagtcccactctgtggcctargctagaatgtagtggcgcgatctcagctcactgcaacctctgcctcccagattcaagcaattctcctgtctcagcctcccgaatagctgggattacaggg

SEQ ID NO: 135351 - DNA, 201 bp, Homo sapiens
tcagtaggatactaacatgttatgttggaaagaagaaaaaagagattaaattcaattggagcaactagtcaaatcttcatgaggagatgacgcagtaagcyagaatttgaagtaaaaatagaagaaaatagtggaactctagtctaaagaacagtgtgaataaaagcatgctgcaaaaaacagcatggtgtttgaggcagt

SEQ ID NO: 135352 - DNA, 201 bp, Homo sapiens
tgcgtacaaagcccttgaaataatgcctggacatgggaaatgatttaacgttagtgatcctagtcctatttttctgaatcctttccagtttttccagaatwttcccttttacccaacctttcctagacctgtttcctacaagtatgcctcacgtcttctcctagcttttctgtcactcttttttgtacagtcatgtcccat

SEQ ID NO: 135353 - DNA, 201 bp, Homo sapiens
gtatttctgatagctagagtgttgattcactctaagagacattgggcaaatcagcactttcgtctgaatttatttttcctcaagttgatctaagagcctartgttttttcccaaaagataatacaatgaattttatggtcttcatctgtattcagttaatcttgtttctgtaatctgatagggtttcttgatacttcttcc

SEQ ID NO: 135354 - DNA, 201 bp, Homo sapiens
tcattatttatatcatcacaatatctaagaattgcaattgaaccaatataacatgggaacaaaatattttaaatggtatgaaatttacatttccccagtgyatccattgctgagtcagtttcaaaataataaaaactgtatttcttgggcttttaatatctctgatgttggaaagtctctatcacctatcaaaaaatcatc

SEQ ID NO: 135355 - DNA, 201 bp, Homo sapiens
ccactttccatatgttgactacggtaaaataatttttccatgcacatatcaatgacagctcacatatgaagaaacataaaaaacatttctaaggggtcagwcatcagatgacctcaaatggtaattgaattaaggatagttacataatgtcaatttcaattcccctgagaagtctacttgagtcaagtggtaaggaatgaa

SEQ ID NO: 135356 - DNA, 201 bp, Homo sapiens
ttagaaattgtctcataaaattcggcttgttttgaaagatcctaaggtctgacagtaggtccacagttggctggagacagggtggctgatttatttagaaraaacgtgtgtgaatcttccctttttgtttgtctctactactaagttgtgagttccttataatcctcatatcatttttattatgcagaactcaagatatat

SEQ ID NO: 135357 - DNA, 201 bp, Homo sapiens
tcagccctggctgttcattagaatcatctcgggggctttaaaaatgtataaactgatttggggcaggggagggtatacattaacacaaattatatcagtgyatagtttaaatttctcctccaaagcccatgtggcaatttaaatgccattgtaacagcaataggaagtgggcctaatgggagactcttaaataaaattcag

SEQ ID NO: 135358 - DNA, 201 bp, Homo sapiens
aaccctaaagattccaccaaaaagaaactgttagaactaatgaatgaaatcagctcagtggcaggatacaaaatcaacatgcaaaaattagttgtgtttcyatacactaacaaagaacaacctgaaaaggaaattttaaaaattccgtttacaatagcatcaaaaaaaaaaaaaaaagaaatacttaggacaaaacctaac

SEQ ID NO: 135359 - DNA, 201 bp, Homo sapiens
atatgataagaaaggagagaaacgaaatcatataaaagatttaactaaaaccacaaaaggtggaaaaggtgtggaagaccaaaatagaaacagaaaacaasggtaacagaatacagtaaaaaatatagtagatactaattcaactatatcactttaaatgtcaatcatctaaatataccagttaaaaaacagagattgtct

SEQ ID NO: 135360 - DNA, 201 bp, Homo sapiens
caacttactgaattgatattacattttagtttgacaattaatttgactgattttctgatttgtcagttgaaaaatactgtttaagccatattaaaaaaaawatatatatatatatttatgccatttaaaaaatagttgtaagccttgtcaagaattttatgctttagcctacaagtaagagtaaatttttgaagagtttta

SEQ ID NO: 135361 - DNA, 201 bp, Homo sapiens
tttcattacaggtttataagattctaggcatgatttctccacatgcttatctatccaagtctcagatttatacttttagataagccacataaaaacaaatytgaggtgttagtgaatcatactaggtgcattaggaagtacatttacaaacatttacaggtttcagagactatggtttatctttagataacatcgatcatt

SEQ ID NO: 135362 - DNA, 201 bp, Homo sapiens
acaggtgaaagggtacattcttagctaaaatgagtgaaagaagcatgagatcttttagttcttcttagggttcagtccaaggaaatctttgtggtttattkcacgctggtgaatagccaatgtgaagaagtaaaggttgtgtgtgcatctcctcccagatactacaggagtcacattctaagcttggtgtaattaactaac

SEQ ID NO: 135363 - DNA, 201 bp, Homo sapiens
accaggtggggagggtaggatggagtacagggagaagatatgtcagttcacaaaaaacaactgtatttattaaatatgtgtcccagtatgtaagatatttytccatttatgctgttttatacataagtgtgatattacataaaaatacataaatgaatttaaccaaaatactacaaatcagtatatgtaagagtagcagga

SEQ ID NO: 135364 - DNA, 201 bp, Homo sapiens
agtatatgtaagagtagcaggatttcgaaggacttttttcatccttccctataatttggtgtattctttgaagttttacaaagattatgcattgtttatawaatcatacaatcaatggagtgtgggcctccccctatgacttagtacccctgcattttttagctctcagacttgttcgcattgagactccaacaatttgtt

SEQ ID NO: 135365 - DNA, 201 bp, Homo sapiens
tgagaagcaaaatcttaatcaatttaggatagcgtgtaggaaaaaaaatctacgatatcatttaaaatatttcattttaacctattatttttacttatttrtttcttgtggtatagatttttggaccagtgcagcaaatcatgaagtttaaatctttagatgacgtgatcaaaagagcaaacaatactttctatggcttat

SEQ ID NO: 135366 - DNA, 201 bp, Homo sapiens
tatgcatataaatgtatgtgtgtgtgtatatatatgttcttatgtataaatgaaatgaatgacagtaattatacaaggtacaggagtaaggaattaggaayatttcattattataaaatatttgcactacccatgaagcagtacagtgttatttgaaaatagatttagattggttgtaaatgtatagcaaccactaaaaaa

SEQ ID NO: 135367 - DNA, 201 bp, Homo sapiens
aaaaaatggaatactttaaatgtaaacaaaatatgtacaagatctatatgaggaaaactgcacaacacttatgaaagataacaaaaagaattaaacaaatkaagagatatttcacttttatagctagaaagactcaatattatcaagatataaattctcacaaattgatttatagagtgaataaaattacaaacaaaattc

SEQ ID NO: 135368 - DNA, 201 bp, Homo sapiens
gcaggatacaaaatcaacatgcaaaaattagttgtgtttctatacactaacaaagaacaacctgaaaaggaaattttaaaaattccgtttacaatagcatmaaaaaaaaaaaaaaaagaaatacttaggacaaaacctaacaacgaggtgaaagacttgacttgtatgccgaaagccacaaaatgttgctgaaaagaagtt

SEQ ID NO: 135369 - DNA, 201 bp, Homo sapiens
aaaaatggaatactttaaatgtaaacaaaatatgtacaagatctatatgaggaaaactgcacaacacttatgaaagataacaaaaagaattaaacaaatgmagagatatttcacttttatagctagaaagactcaatattatcaagatataaattctcacaaattgatttatagagtgaataaaattacaaacaaaattcc

SEQ ID NO: 135370 - DNA, 201 bp, Homo sapiens
cttttccaggaagcggaatgacgccatagtttcattccccagcaattacccaaacatttaattctcccccatatgatttccatacatctttgtgtttttttctcctgcatgtatttaccacaactaaagggacagtccctcttcactttaaacataaatttttattttagttcacttgattttatccctctaaccacttat

SEQ ID NO: 135371 - DNA, 201 bp, Homo sapiens
ctgcctcccagattcaagcaattctcctgtctcagcctcccgaatagctgggattacaggggccagccaccatgcccggctaattttttttttttttttttgtatttttagtacaaacaacgtttccacatgttggccaggctggttttgaactcctgacctcaaatgatcctcctgccttggcctcccaaattgctagga

SEQ ID NO: 135372 - DNA, 201 bp, Homo sapiens
tctgcctcccagattcaagcaattctcctgtctcagcctcccgaatagctgggattacaggggccagccaccatgcccggctaattttttttttttttttttgtatttttagtacaaacaacgtttccacatgttggccaggctggttttgaactcctgacctcaaatgatcctcctgccttggcctcccaaattgctagg

SEQ ID NO: 135373 - DNA, 201 bp, Homo sapiens
ctctgcctcccagattcaagcaattctcctgtctcagcctcccgaatagctgggattacaggggccagccaccatgcccggctaattttttttttttttttttgtatttttagtacaaacaacgtttccacatgttggccaggctggttttgaactcctgacctcaaatgatcctcctgccttggcctcccaaattgctag

SEQ ID NO: 135374 - DNA, 201 bp, Homo sapiens
gcttcccaactgactgcccctatatagatataggggcatatatgtacgtatattgttttgaggcagagtcccactctgtggcctaggctagaatgtagtgrcgcgatctcagctcactgcaacctctgcctcccagattcaagcaattctcctgtctcagcctcccgaatagctgggattacaggggccagccaccatgcc

SEQ ID NO: 135375 - DNA, 201 bp, Homo sapiens
ataatacagtctgttaacataaaacatgtttccataaacgaaatttgcttatatctgctagaggaatcgtgtttttttgtaaagaagaagtaggttcactraatttgtgatttccactaacatattaatgttttgaagtaagcaggggtaaactttttctcagttaaagagaatcattatcagtacatgaaaatgtaaagg

SEQ ID NO: 135376 - DNA, 201 bp, Homo sapiens
atcgatgtactcatttgaaatagataattcatgtaaggaaaaaaagtattcttattctacaacacaggaaattctcatttttcttctctttttttttttttgagatggtgtctcgctcttttgcccaggctggactgcagtggcacaacctcagctcattgcaacctccacctcctgggctcaagcaattctcctgcttca

SEQ ID NO: 135377 - DNA, 201 bp, Homo sapiens
agtctcctgcccagtcttttccattactttagccccagtaaatgagatcacaaatctcaacgtactgggccatgcagatacttattccaagatagtgacasacctgagggggcccttttagatttaggagaggcccttggttcagatttcagtatgatgaaaacaagtaagaccgaagtctcaagccacaggagtacggag

SEQ ID NO: 135378 - DNA, 201 bp, Homo sapiens
tttacatttgttaaccagcttcaaatcaattcagagaatggtcctggagttttgtgagtaaaccactattttacgtatagtgcttgtattttcctcaaaaygctgccacacagagagcactgtaattttccatgctattgctatgttgatctcagaccttgaaaagtagctttgatccaggactgaaaagaagagaaagtg

SEQ ID NO: 135379 - DNA, 201 bp, Homo sapiens
tcttattcttgtcagagaggagaagtgctttcttctgggttgtctccgtcaattctccttcttaactccataggaattcaaggcttaaagttctttggctyttaaataaacatatgtcttcataggtggggaggaggcccaactagcaattttgaatcatttccttacaattctcagaagttccactttggccagactcat

SEQ ID NO: 135380 - DNA, 201 bp, Homo sapiens
atcatctaaatataccagttaaaaaacagagattgtctgaatgaataaaaaaaaacaagacctaaatatatattatctacaaaaaaaaactactttaaatrtaaagacaaatatagattaaaagtaaagtaaatattaatggagaaaaatatatcatgctaacagtaatcaaaagaaagtgggagtggctacattattttc

SEQ ID NO: 135381 - DNA, 201 bp, Homo sapiens
ttatcagaggtaaagagaggcattatataatggtaaaggaatcaaaactccaagagcacataatgattgttaatgcgtatgtacctaacagccaagtgtcmaaatatatgaggcaaaagctaatacaactttattgagaaatagatgaatcaactaatatgtttggagactttaacacccatctgtcagagctataagtcg

SEQ ID NO: 135382 - DNA, 201 bp, Homo sapiens
atctatatgaggaaaactgcacaacacttatgaaagataacaaaaagaattaaacaaatgaagagatatttcacttttatagctagaaagactcaatattwtcaagatataaattctcacaaattgatttatagagtgaataaaattacaaacaaaattccagcaagttatcttgtggattttgacaaactgtttctaatg

SEQ ID NO: 135383 - DNA, 201 bp, Homo sapiens
  misc_feature (1)...(201): n = A,T,C or G
gttaggaaaaaaataacataaaatgtagaaagaactttctcgcctaccaccagcacccatgggaaagtggaaactcgagagaacaagtttggagtcgcttngttcaaaatggacgtccccgtggggaactctgcttccagtgataaatctttcgcggttctggattttgtttgagagagtcagcatttccttaatccttca

SEQ ID NO: 135384 - DNA, 201 bp, Homo sapiens
catgactttaactatcatccctaccataaggcaaaatctccaactctgccctgtcacccggactctaatcagatatctctaactgtccctcaactcagacwttctgagtcaaaagtttaatctgttatctcaccaaaacatgcttcccaactgactgcccctatatagatataggggcatatatgtacgtatattgttttg

SEQ ID NO: 135385 - DNA, 201 bp, Homo sapiens
gaagcagatgtcttgttatgtttctgtttatgacgtccaccgaatagggtggcattgtaatacttatttcagtaatgtaattcatggcactataaatatgytgaaccgtctggtaattccatgaggagtcagtgaatttcagtgacaaaggagaattctatgcagaaaatgatgtgcaaataagaaaagcatgcagcctca

SEQ ID NO: 135386 - DNA, 201 bp, Homo sapiens
aaattagctgggcatggtggtatatgcttgtaatcctagctacttgggaggctgaggcaggagaatcgcttgaacccagtaggcggagtttgcagtgagaygagatggcaccactgcaatccagcctgggcgtcagagagagactctgtttaaaaaaaaaaaaaaatcccattgcagacaatttttatactagcattttat

SEQ ID NO: 135387 - DNA, 201 bp, Homo sapiens
atctcaatgattggtctctacgggggatattttagttagttattccgctttttgcttcccattgccagtatttagcttaaatttcatgaatgcaggcaaaytttatacatagcgttgtattccttagtaggtacataaaatcaaataaactcttttggaacagttttgaggataattcttaataattgactaacatttcca

SEQ ID NO: 135388 - DNA, 201 bp, Homo sapiens
cggtttagaaacttaaagaacctacttgcacactagccatgtgtactctgttatccaaattactcacatattttagtcactggagtattcattaattcaakatataaaacagttgttgtgtgtcaaaatttgtcctaagtgtcagagatttagagaaataaggctaattcctggccctgaaggagatctacacaactttca

SEQ ID NO: 135389 - DNA, 201 bp, Homo sapiens
attcagtaaccccactcttagttttctataccataaaaataaaagtttcaatgcataaggatatagtgacaaagagatatttgacaattttggaaacaaaktaaaggtctacacaatgaggcataatttaatatactggggtaatttcatacattattacctagtcattaaaaagaatgacccagatctatatatatttcc

SEQ ID NO: 135390 - DNA, 201 bp, Homo sapiens
cacagtgagtcagcattatttgctgataaagataataaactaattttcatatcactgttatataacccacaaaaagaaaatctacacctttatcttttccmatggcatttgcataactttgcacctcattacaacacaaaaggcccttatgtatggtcttttgcaacagggcatactccttgtgtatacacctgaagtctt

SEQ ID NO: 135391 - DNA, 201 bp, Homo sapiens
aaacatacaagaaattaaaatttattcaaacatatatttcatgaacacatactatgccctggcttatctaaaatgtgtgaggcttaaagcaactgttcacrtataagtagttagaaatgcagagtactggttgggagccaggggattcaagtcccagaaggaaatacttttaatatactgcattattcaggcctttaatct

SEQ ID NO: 135392 - DNA, 201 bp, Homo sapiens
ccagctactcgggaggctgaagcaggagaatggtgtgaacccgggaggcggagcttgcagtgagccaagatggcaccactgcactccagcctgggcgacaraaccagactctgtctcaaaaaaaaaaaaaaagaaagaaacaatgaacaagcttcaaaaacagatagataatgtaagcagaaagatgcaaattctaagaaa

SEQ ID NO: 135393 - DNA, 201 bp, Homo sapiens
gtttaaaatgttctcactaatatcaaaagcaaaagtcaggaaaaacggaagcagagagctgtactgaggaattaaaataatccagatgagtgataacaatataactaaagaaaagcggatatatccaaaatgtgtgaatcctgaatgagcaagactcactagctgtgtgagggtggggagagggagaatgaggggctatga

SEQ ID NO: 135394 - DNA, 201 bp, Homo sapiens
aagtaatatatgtattaaaaattaatttatgacagaatgaaagagggacagaagaggaaccatttaataaattgtgttaggacaacataaagacaaaatckattccgggcaaataaaaaactcatagggaaaagaagaaactgataaatatttatttatttatttaattatattttaagttctgggatacatgtgcagaac

SEQ ID NO: 135395 - DNA, 201 bp, Homo sapiens
aaaggaatacaggaatatcatatcatttctataatttgacataataactagcaataacaggttaacaatattgccctatcatatataagcaatgtacacasaaatttataataactagtccaagtaacataacttagccttatggaaaataactatatatgtctgaatgggagaagaataataaaaagtaaagggtcctac

SEQ ID NO: 135396 - DNA, 201 bp, Homo sapiens
cctgctttctccctttttccttccttggctgttggagtggatactgtggtgtcttgccgagatcttctcttcagggtcaacatatatatccaggcagctgwtgggaatttctgctgctgatggttcttaactgcatctcaggaaattttgctcttggttttagaacactccctccctcaagatgttccttctttccgggtg

SEQ ID NO: 135397 - DNA, 201 bp, Homo sapiens
attttaaattgagctcaatatctaaaatggcgccagtactttttgggaaatatttattgttggaggcaatcattgaagaagatatcagaacaagtaatttmccaatgaatatctgacatgcacaacagataacatatatttttgttactcagcttgcccatagtgttgagtgaaggtaggtatttaacacttgccaaatag

SEQ ID NO: 135398 - DNA, 201 bp, Homo sapiens
aaggaaggaataaaggaaagaaggaagggagggaggagaaagacaagaaggaagggagggaaacagacaggaagggagagagaaagaggaagtttgcatcyaaacttttattcaagaaattgatttttttaatgtggccaatacttctcttaaaataatttatatagagagtaaatatgtctaagattcaaacacaatata

SEQ ID NO: 135399 - DNA, 201 bp, Homo sapiens
aattaaatgagctaataggtataaagtcatcagaacattacttgaaacagggcaagcactcagatgatagcaactattaaaatcataaaacacttatattytaggaaatccagcatgtgctaggtacgtggagctcatcatgtaaagattattcagcaggagtaattccaacatacagtagttgaatgtgcgcaatgtgtt

SEQ ID NO: 135400 - DNA, 201 bp, Homo sapiens
aatattagatctcaaagagcttaaggtcctgcttaagaagagaagccaaaggggagataggtcatcttataatggttagggcacatgactagaaaatgttkaactttacctgaccattaaaacggcaattatgacaataatggcaacactggtagtttcctaattaaaattctgctgaaggaaattcatggatgaaaaatc

SEQ ID NO: 135401 - DNA, 201 bp, Homo sapiens
ttaatctaaaacttatggaattttagatttggtgtttgacatgtttttcagacaatggagtcaatgaatggtggaaaactctattccaatgcatatctgartgatttagcaggctgcatcaaaacattgcgctactgtgcaggttgggctgacaagatccagggccgtacaataccaattggtaagtatctttgagaaacc

SEQ ID NO: 135402 - DNA, 201 bp, Homo sapiens
ggccagactcattaaagagaatgacaaatttctatctttaacaaatttcattttaggacagttcttttggggcggggaaaacaagataaaagaaaaaatawcaacaagtggaactgatatttggacaagaaaggaaagaaatattggaatttaaatggaacatttccaggaacaagagcacaagcatactttctcatcctc

SEQ ID NO: 135403 - DNA, 201 bp, Homo sapiens
ttgttggataatctgcatgagaattataaaaaaaaaaaaaagaaaaaattgtggaaatctcaaagtagtctacattttgattgactcattgatgtctttcrtgtctttctttctacacattaaggaagcaaactggaaactagacaaaacactatgagtactatttatgcaagattatttcaaattccaagcagcaaatcc

SEQ ID NO: 135404 - DNA, 201 bp, Homo sapiens
tatcttgttcctattgtaacgtttgctagagctacaatacaataaagtattgtacttaaaatgggagtaacactgtttaaaaaattgtccttcagctaaayattaatttaagaacttgaattgtttggaagccctgcttaaatttagtctttgtacactgcctatgttgataaatacagacaacttccaaaaccaggatta

SEQ ID NO: 135405 - DNA, 201 bp, Homo sapiens
aagcactgatttttaactatgaaccaggctacctagagaaagcttacaatctttatttacccttatagctaggtatggacatgagactaagctaaggtcartgagctccaagcttcagggaaacctcctcaaaatgtagatggaccctagagctttgtcactttcctctgagtcctggaatttaaatgtaatggttggagt

SEQ ID NO: 135406 - DNA, 201 bp, Homo sapiens
gaaatggcaagttgttttgattttagggatcactatatgctctctacaaacaaaatgaaaacattttttgtcccaatgaataggccccttaacattgaackattctcaaatagtaatctgcatttcaattctggatgatgttaatttctgctcccataatagattctacggtctaaactttagcaaacccaagttaaacca

SEQ ID NO: 135407 - DNA, 201 bp, Homo sapiens
ttctctttccctgacacaattgaaaaggctgatggggttttgcaaacaacaagaaaaaagagtatatactcacgttactaaagtcagactatcatttaaarcaaatgaaaggaaaattttatttctcctattttttgttttcgtcattctgtcattttgttttcattcatttgatgacagttaaaaattttctttcccttt

SEQ ID NO: 135408 - DNA, 201 bp, Homo sapiens
tttcttaaaatgtggcatatctaaaatctgaagtgtaaaaatccatttctaagttgcctcaacatttctattgattgcttccccatatagaaagtacttgragtccaagagtatgcataggcatttataatttccaatcaatatttcaaacagaaggttgatgtctactttacatatatattattcaaaagtcacctaagt

SEQ ID NO: 135409 - DNA, 201 bp, Homo sapiens
ctggtcccatttccactgactatttccactgctctatcgatacttttttagatgtcaaaggaatacaaataactactgaattatgctttatatttggcatycttttagaaggaagagggcttacatgcgagcaattctattactaggtcttgatactgctaaaaatgggcagaactttctatcgcttctacatcttaactc

SEQ ID NO: 135410 - DNA, 201 bp, Homo sapiens
caatttcaggctagtactacaattcctttgaatgcttctaactatacaggataattttcttgtatggaaataatgctgttttcttgtatggaaaattataytggcatgaatgggcaaacaagacggcttatcctcttccccattttgtaggaaatcacaagtgtcatagagtattcatttgcagaacgttatagatcttat

SEQ ID NO: 135411 - DNA, 201 bp, Homo sapiens
ttagtggggtatgcacataatggagtagaaatactaaagatatttcatgtgaaacatgaaaacacacacatttaggaaacagtatgggtggaatttaattyaggcaaacctatgaactttaggaatacaataccctccaggactggccctgatgtgcacttccaatccaattggagcatgcaggaggtcagaagtgatagc

SEQ ID NO: 135412 - DNA, 201 bp, Homo sapiens
attcaacacctgtaaaaattatattatagaataacttaaattgactaacaaattacaagcgttgttattttccagctaataatagaaacaacaaaaaccartttttatttagtgaaaattgttctcaagttctaaatgctatcttcatttaaaacttaaagcaaccctatagggcaggtactattttgagtcatttttaca

SEQ ID NO: 135413 - DNA, 201 bp, Homo sapiens
agtggggggaatacatttagcatgacggctggctgcaatttctggcagtcaccccaaattcatctctgcccaaatgcagacaggaagccaaacacaaaggyttggtgtcaaacagtcaacttgggatcacatttttgcttctttgtccaactctcatgaacataaattcatgttgaaattaatgtagcattctttcaaatg

SEQ ID NO: 135414 - DNA, 201 bp, Homo sapiens
agctaagatatgagctggacccctaagaaaaatagaacttgaaggcagtccaggttggggtggacaaataatgagaagaaggatgagattcaagaggtagygaatatgtcagtttgactggatagagttatctggatgccagaagagggataaaaaatgaaatagctaagttgcgactgggtcatgataagtctgatcaat

SEQ ID NO: 135415 - DNA, 201 bp, Homo sapiens
acaatgtgatcacagaataaattaacctcaaactaagagggaaaaaaaaacaactagtgatacaaaattgtcacaaattaagaacactggcaaggtgatakagtcatggtctctttatctcacaaggcaaataaatataaagttttgtggaaatagccttgtatattaaccaaaaaaaaaaaaagcccctcaccaggtctc

SEQ ID NO: 135416 - DNA, 201 bp, Homo sapiens
ccgtctcaaaaaataaaaaataaaaaattagatagcataatattaaataaactttttattctcctcctgggtgaggagagtaaaaaacttcagaatatttwtctgaacacgtaagtgtttctaagtctaatttgaaatgatttttctgctctttagttgcccaggggttgccaagttttaaatttctgtaaagaagtaatg

SEQ ID NO: 135417 - DNA, 201 bp, Homo sapiens
tcacaaggcaaataaatataaagttttgtggaaatagccttgtatattaaccaaaaaaaaaaaaagcccctcaccaggtctcttgttttgttaagcagctmatgcatagttttgtaaatgaaaatttgatattaatgactttctaaatgactttttctaatgactttcatgctttggaccaagtatgctggttgggagtct

SEQ ID NO: 135418 - DNA, 201 bp, Homo sapiens
cttgtatattaaccaaaaaaaaaaaaagcccctcaccaggtctcttgttttgttaagcagctcatgcatagttttgtaaatgaaaatttgatattaatgaytttctaaatgactttttctaatgactttcatgctttggaccaagtatgctggttgggagtcttgcttctaaactataatatgagtattctatctctgcca

SEQ ID NO: 135419 - DNA, 201 bp, Homo sapiens
aaagctgatactagagccaagggtacaatctcactcttggtggttactaagctgcaatatccccctgcagcctggctgctatcaaatctccctggttaccstatctcctgggaatttttgctgccatgagcaatatacaggagtcttcaaaaatgccagtgataatgtattttctggatccattaatgcccctaagccact

SEQ ID NO: 135420 - DNA, 201 bp, Homo sapiens
gtgttttgcctaagtaatactatttaaattggtaaattactttgagatatttatggtaagtccagaagaagaactttagaatttcttctttcatttatgcwtaaagacataatccatcttataattctgttgaattatttagttaaacaatgatttgaggctattttttaatcaaagtcaacacaagacaataccaaaaag

SEQ ID NO: 135421 - DNA, 201 bp, Homo sapiens
aaataaaatgaatcactaaagggcatttttcaggtggagataaaattattctaggtatgagtctggagatgcagaaataaagaacaatagaaaggaaaaayatgtcaatatatctaaacaaacgtatctcaataaatgtataaaacaatataaatataatgtctggttgtatttaaaatacctgattaagatctacttgaa

SEQ ID NO: 135422 - DNA, 201 bp, Homo sapiens
ccacaaaaagaagagtaaaaataatatataattccaacctaatacaacaaggaattctaatcataactatgagagatgattgatatggtagtttgcactaktaatcattttacaatgtatacatatatcaaattataaagctgtatacctttaatatataaaatttttatttgtcaagtatacctcagtaagtctggaaaa

SEQ ID NO: 135423 - DNA, 201 bp, Homo sapiens
ataacaataactgcaaacaattttcaacaaaagtatttagcacagtattatttattaatgcaagttattgaaaacatttaaaacatttcaaatgtgtcagygtatgtataacaagggcagtagaagcaaaatttataaatactgtgatcatgaataattttattttattcttttttataaattttccacaataaatacaca

SEQ ID NO: 135424 - DNA, 201 bp, Homo sapiens
tccaccaagccataagtttagcaagcaattaatcatcaagtggacatgcttttaagagatgtacatgagaaggtggttcaatgcctcaatttgtccttcaygtcctttgagacctactccatcttcattgtcttctctcactcaatccaagggaattccttataactgagaaagaaaaccttgaacttagtttacagatgg

SEQ ID NO: 135425 - DNA, 201 bp, Homo sapiens
ccattctgacaccatggctgccatggacaacctgcttacaatctgtttatgtgagagaagaatccatttccatcttgaatatttattttgggttttgcatsagaggcagccaaatttaatcctaactgatctaaagacaaagagaaagcacaagtacatcagtaattacaatagatataaataaaggagtaaatatatata

SEQ ID NO: 135426 - DNA, 201 bp, Homo sapiens
tcttcagcatttagaaaattaaaatgcaaagaaaattttattcttgtttagagtctactaaggaagcaacctatttcttccttttaatgcacattttatcrcctaaaataaataagagtttataggcacatatgaaataatacggtatactttagatagattttgaaaatgtctttgatggaataaaatcataaggtgagt

SEQ ID NO: 135427 - DNA, 201 bp, Homo sapiens
cttgtttagagtctactaaggaagcaacctatttcttccttttaatgcacattttatcgcctaaaataaataagagtttataggcacatatgaaataatayggtatactttagatagattttgaaaatgtctttgatggaataaaatcataaggtgagtgagtgattctgagtattagtgttttttgttactttttagttg

SEQ ID NO: 135428 - DNA, 201 bp, Homo sapiens
atccttcatctccacagccatcccacagttataaccagcactcccctaaatcctctgcaagtcatcggttactctgaccccctaatcgtagcatggggtcmtaaaatgtcctgagtttcctttgcggcaaacttcgtatttcagttgttaaagcccaattattcccctaggcactcagttttctttgtagactttattatc

SEQ ID NO: 135429 - DNA, 201 bp, Homo sapiens
ggctctgttctttcacaataaaggttttacactgatgcgtgctgtcaatttgaaaccaaacgctattcttgactcattcactaagccaaaagtaaattcarttaactaaaagttagtgaacgttgctatcagctaaaacttgagatgggtacctggcaatgccaaaaagaacaaagaggacttgatcccggacctcatgga

SEQ ID NO: 135430 - DNA, 201 bp, Homo sapiens
gagagtaaaaaacttcagaatatttatctgaacacgtaagtgtttctaagtctaatttgaaatgatttttctgctctttagttgcccaggggttgccaagytttaaatttctgtaaagaagtaatgttttattttattttattattattattattgctgcaggaaaagactactgggaaattaaagtcagcaacacccaag

SEQ ID NO: 135431 - DNA, 201 bp, Homo sapiens
tctcaacgtactgggccatgcagatacttattccaagatagtgacagacctgagggggcccttttagatttaggagaggcccttggttcagatttcagtaygatgaaaacaagtaagaccgaagtctcaagccacaggagtacggagttcaaccataggggttaacaatttgagaagtagaaacaaaataaaatgatgaca

SEQ ID NO: 135432 - DNA, 201 bp, Homo sapiens
tgactattggctatggcagacattctcaaaatttagcctgtctcagaatgtccaggaaggcttgttaaaacacagatagctgagccccaccttcccctagrtttcactgcaataatcttagaatgggacctgaaaattttcattttttatcaattctttggtaatgctgatgttgttggttgggaaggaggtgagggaatg

SEQ ID NO: 135433 - DNA, 201 bp, Homo sapiens
agtaatttctgagcacgtggtactatgctgtatacagggaggtaaaagagtaagaacaatatttacttggtacccttgtgtatgcaaatattcttatatcrgccttcttactctaggattattagagataattgaagttatttttgaaagattgaattttgaagataccctccctctcccatttttgacctagtttatatc

SEQ ID NO: 135434 - DNA, 201 bp, Homo sapiens
gcaaagattctacaatcagatgggctccctttaaaactcagttcagccacttttagttattaaccttgagcaaagctcccgtctctctttgctttagtttyttcatctgtaaaacagggaacatatttgtgccataaaattaatgagaattaaatgagctaataggtataaagtcatcagaacattacttgaaacagggca

SEQ ID NO: 135435 - DNA, 201 bp, Homo sapiens
aaggggaaaaaacaacaactgcaaaaagcccaagagcctgaatttagaccaatctatcatcttcctcctcttaaaaagaaaacaatttaaaagttttaaakaaaaaataaaggtcatgtttttgttttgccaagaatcaaaagattttgctgaaactactgctgcaaaatattttgtttcaagccatcttagggcacctca

SEQ ID NO: 135436 - DNA, 201 bp, Homo sapiens
gacaataatggcaacactggtagtttcctaattaaaattctgctgaaggaaattcatggatgaaaaatccaggcattacttaagtttgtgtgagtagactrtgtatatccagatggaatgtaaaaattaaaaatgattactgagccatcattaatagtcactgacactaagttgtcacccacagttgattacaaaataaga

SEQ ID NO: 135437 - DNA, 201 bp, Homo sapiens
agcccttgagagctacatactttctctctccattcaagaggaaggccagatctgtttgcagtttgcaactaacaaacagaaaaatattattgatgttttarttctggagccttgaacatcgacctttgccactgggattaattttattaggaaaacaaatctctatgcccaaagttccagttgaaaccttgtcaggcagtc

SEQ ID NO: 135438 - DNA, 201 bp, Homo sapiens
agcaaacagttcttctgtgcctacttaattagtgccagtcttaatcctgggtacagagaggaaatcagatgtaatgtggtactagtgccttttttttttttacagtgtggaccctggacaagaagcataggttgatatcacttgcaagtttattaccaatgccaactcaggcttcactcgagacctgctaattcagaatca

SEQ ID NO: 135439 - DNA, 201 bp, Homo sapiens
agtagactgtgtatatccagatggaatgtaaaaattaaaaatgattactgagccatcattaatagtcactgacactaagttgtcacccacagttgattacwaaataagagaaaccttgttggaattctgataggacttagaagactaggtttcattctcagatgttatgtgtatatcaaattgtgaccgattcctagaaag

SEQ ID NO: 135440 - DNA, 201 bp, Homo sapiens
gggtttcaccatgttggccggactggtctcgaactcctgacctcaagtgatccatccgccttggcctcccaaggtgctgggattacaggcctgagccaccrtgctggcctggacctatacaatattctaaggctgtggttctcagccctggctgttcattagaatcatctcgggggctttaaaaatgtataaactgatttg

SEQ ID NO: 135441 - DNA, 201 bp, Homo sapiens
tcttctttcttttctttctttctttctttctttctttctttctttctttcgtctctctctctctctttctctttctctcttttcttttctttcttcttttyttttttttttttttttttttggagctggagtctcactctgtcacccaggctggagtgcaatggtgcgatcttggatcactgcaacctctgcctcctgggt

SEQ ID NO: 135442 - DNA, 201 bp, Homo sapiens
agagatagaaaaaccagaaacaactatagtaaataatcttgatgggaagtgatccacaaaggaaaaaataattgaaaacaaagtcttcctctgaaaagggmaaactagcattaaagaagaaaccagaactgtaggattccagctaactgaagtagctgcacagatcccatttctttcatccagttccactgttcaaaggtg

SEQ ID NO: 135443 - DNA, 201 bp, Homo sapiens
ccccaaacagagtcctcaccagggcattgcctagtggagctgtaggaatggggccactgccctctaggcccagaatgggagcgccgccagcagcctgtackctgagcctggaaatgctgcaggcattcactccagcccttgcaaacagccatgtgggttgtgcccagcaaagccatggggacagggctaccagaggcctca

SEQ ID NO: 135444 - DNA, 201 bp, Homo sapiens
ctttctttctttctttctttctttctttctttctttctttctttctttctttcttctttcttttctttctttctttctttctttctttctttctttctttcgtctctctctctctctttctctttctctcttttcttttctttcttctttttttttttttttttttttttttggagctggagtctcactctgtcacccagg

SEQ ID NO: 135445 - DNA, 201 bp, Homo sapiens
gtgaatcaaaattagccagacaaaactgaccagtctctaagtagagcctaattttttgtttgtagtcccaagctccaccacagtgttcctcaatctttccygtgcccggggattcagtagatctgaggtggggtcaaagaagcacatttggctaccaagtgatgccacaactgctggttgtaggaccacattgtcggtagc

SEQ ID NO: 135446 - DNA, 201 bp, Homo sapiens
gctttaaaacaatggaaaagaatcctgtcatttgcagcaacaacctggaaaatttatgctccatgaaatatgacaggcataaaaagacaaataccgcaggrtctcacttttatgtgggatctcaaagagtagaactcatagaagcagagattggaatggtggttaccaggggcttgggggagtggaggatgagggttggga

SEQ ID NO: 135447 - DNA, 201 bp, Homo sapiens
tcctggaaggtgtgtggaatagtgtggggcagaaaataagagaatgctttaatcagaaattaggataaatgtttaaagcaaaataactgaaagctgagagratatgagtagaagagcttttgatgaggatttttgggaaggtgctttaaaggtaagcctgagggatgtagagaataaggtggccaagagtagggaagaaca

SEQ ID NO: 135448 - DNA, 201 bp, Homo sapiens
gcaatgaagtataatatgccagatgatttcacaaaactacgcaattattacataacatctacagggggtgtataatatggaagttggattagcaaatatgycttttgcaatacaaagaatctattgttacatattgctttctagtggaatttcccgttggttatgctcatttggaagatagggcctgcactgagctgtgga

SEQ ID NO: 135449 - DNA, 201 bp, Homo sapiens
ggctcaaaacaaatgctgtggcatcttttctctttccctgacacaattgaaaaggctgatggggttttgcaaacaacaagaaaaaagagtatatactcacrttactaaagtcagactatcatttaaagcaaatgaaaggaaaattttatttctcctattttttgttttcgtcattctgtcattttgttttcattcatttga

SEQ ID NO: 135450 - DNA, 201 bp, Homo sapiens
  misc_feature (1)...(201): n = A,T,C or G
cccaagaatattttacttttatagtatcatctcttttcctctaagctggctaaaggcaaaaaacaaatggaaaataatattgtcaccattatagaacattnaacaagcctaatgtaaattttataattattataacaaacattcattagcctagacttctccatataaccattaatataactataggaacagtgattatac

SEQ ID NO: 135451 - DNA, 201 bp, Homo sapiens
ggtagaagaaggagataaggtgagtttctgaacactagtttcattttatgccaggtttcttggttttttgccattctgagctcctgaaccccattgcaagytccaaaagacatgccatgaaaatatggtttctggggcagcttaggaaaattgtctaagttgtccttgttaccaaaaaaaaaaaaaaatgctctgtagtta

SEQ ID NO: 135452 - DNA, 201 bp, Homo sapiens
aacactagtttcattttatgccaggtttcttggttttttgccattctgagctcctgaaccccattgcaagttccaaaagacatgccatgaaaatatggttkctggggcagcttaggaaaattgtctaagttgtccttgttaccaaaaaaaaaaaaaaatgctctgtagttatgtaataatgataaacctgtgcttctgggt

SEQ ID NO: 135453 - DNA, 201 bp, Homo sapiens
ctcactgtctgtgggaaaaagtgcacaaacaaaggtcctttataatattactcaacctttgtttatggcctctttcccaggccaccgcattaacttaagastttcaacttcgtcatgcccagtgtccatccccaacaattgcttgctagtcactgcctctgtacatgtccacagtgtagtcctcaggacctagttcaagtc

SEQ ID NO: 135454 - DNA, 201 bp, Homo sapiens
aaagccatttggtgtttctcccaaatgaaattttactgtggcacaaacatcacataaatttagaatgctaaagcaacctgtgttcatgagagcagggtaascctcctcctttgtaatgctccctttcaggttggcaagttgatcaaagaagctgccgggaaaagcaatctgaagagggtgaccctggagcttggaggaaag

SEQ ID NO: 135455 - DNA, 201 bp, Homo sapiens
ccaggctctggaagccacatttttgtccacttattaaaatagcatgaagggagagaaaagtataaacataaatctcctttaaaaagtgtttttctcttgcrtataatgagaatcaggtaaataattagattttgctaacttttggccaccagcaaatttaaagctaaacaaattgtttatggtctgcaaaactgcattcta

SEQ ID NO: 135456 - DNA, 201 bp, Homo sapiens
ctttatgtggtatttagaacatatatttagaatacataaagcagtaagaagaacgtttatttttccttttgaaacacacaatttgctagatcctttagacytttaacaaaagtgatttaatttgacttgcaataagtttcagaatgcaatttatatacattattttgcttataacagaatatctaaaattgggtaatttat

SEQ ID NO: 135457 - DNA, 201 bp, Homo sapiens
ttatcttgtggattttgacaaactgtttctaatgtttacatggaggggcagaagacccagaagagccaattttatgttgaagaagagaaacaaaatgggarggcctgcactactagacttcaagactacagtaaagcttcagtaatcaagacagtatggcactggcaaaacgatagataaatacattaatggaacacaata

SEQ ID NO: 135458 - DNA, 201 bp, Homo sapiens
tctttctttctttctttctttctttctttctttctttctttctttctttctttcttctttcttttctttctttctttctttctttctttctttctttctttcgtctctctctctctctttctctttctctcttttcttttctttcttctttttttttttttttttttttttttggagctggagtctcactctgtcacccag

SEQ ID NO: 135459 - DNA, 201 bp, Homo sapiens
tgaggggctagtgaattttgttgattggtgtggatttatggggatgaaaaatatgatttcagagtaacatatgatacagattaagaagtcctgcatttaasaaatttgacttagattttattagtggagtagtgaaaagccatggatatatttaggatgttgctgaagtagaacaaaaagttagcccatcaaaaatgcatg

SEQ ID NO: 135460 - DNA, 201 bp, Homo sapiens
ttctttctttctttctttctttctttctttctttctttctttctttctttctttcttctttcttttctttctttctttctttctttctttctttctttctttcgtctctctctctctctttctctttctctcttttcttttctttcttctttttttttttttttttttttttttggagctggagtctcactctgtcaccca

SEQ ID NO: 135461 - DNA, 201 bp, Homo sapiens; identical to SEQ ID NO: 24036

SEQ ID NO: 135462 - DNA, 201 bp, Homo sapiens
tttctttctttctttctttctttctttctttctttctttctttctttctttctttcttctttcttttctttctttctttctttctttctttctttctttctttcgtctctctctctctctttctctttctctcttttcttttctttcttctttttttttttttttttttttttttggagctggagtctcactctgtcaccc

SEQ ID NO: 135463 - DNA, 201 bp, Homo sapiens
agctgtcattcttgcatatcttgattaataccagataagacgtggaaaaaaatcttcaattaaggaaacatttattgtgttcctataatatattaatatayagtagaacagctagcttgctacttcaaagtaggagcctggagctatgtgctgtgttcaattaaaattatgtaaaatatgaacacatttattagagtagct

SEQ ID NO: 135464 - DNA, 201 bp, Homo sapiens
cgcagaatgcagaacaccaagagcgaaccctagtgtgaactacggacttggggtgataatgatgtgtcagtgcaggttcatcaattgtaaccaatgcaccyttctggtgtgggaagtcaaatagctggcagttgtgcctctgtggagaaagagggtgtatgggagttctctacactttccactcaattttgctatgatgtt

SEQ ID NO: 135465 - DNA, 201 bp, Homo sapiens
  misc_feature (1)...(201): n = A,T,C or G
ttcttccaaaggaaatttaacacctgaccattatctgttttcacctaccatttttgcagttacctatttggattctcacacataggtttgagatgagaagnaaaatcttaatcaatttaggatagcgtgtaggaaaaaaaatctacgatatcatttaaaatatttcattttaacctattatttttacttatttatttcttg

SEQ ID NO: 135466 - DNA, 201 bp, Homo sapiens
cttggattcatttggaacaatattcacgtaaacaaagaactgtaaaaaaagtgatgaaattgccacaatgcaggtatataaaaatgttcacctcgtttatrcattctcatttttcaattatacttaatataaaaaatatttaaatgttttcatgcatttgtatgccttcagtcatcaagtaaaatgtattttaatgttact

SEQ ID NO: 135467 - DNA, 201 bp, Homo sapiens
acctatgcaatattctctttctttctttctttctttctttctttctttctttctttctttctttctttctttctttctttctttctttcttctttcttttctttctttctttctttctttctttctttctttctttcgtctctctctctctctttctctttctctcttttcttttctttcttctttttttttttttttttt

SEQ ID NO: 135468 - DNA, 201 bp, Homo sapiens
tataagaattgccaagtaatttctgagcacgtggtactatgctgtatacagggaggtaaaagagtaagaacaatatttacttggtacccttgtgtatgcaratattcttatatcggccttcttactctaggattattagagataattgaagttatttttgaaagattgaattttgaagataccctccctctcccatttttg

SEQ ID NO: 135469 - DNA, 201 bp, Homo sapiens
agtaaaatgtattttaatgttactactgatattttttctaagaaaggtagcttataaaaatgacaagttaaatgaatttttagttcacttctaaatattaktattttaaaatgaagaataacttgtagaattatatgtatatgttatatttaataatataaagaatcatctatatattatatttaataatatgcttaataa

SEQ ID NO: 135470 - DNA, 201 bp, Homo sapiens
cggaatctacttgtaattaactgtctccttgtggctatttcatattttatctttccagctgagtgacacacttttgaaaaatgactgtttgatattacctygtactattctcagtactgactcttctcaaacttacaaaattgttgacattaacttaacacatatttgttaagtaggtgttgactaaccaattacatgtgt

SEQ ID NO: 135471 - DNA, 201 bp, Homo sapiens
agacctatgcaatattctctttctttctttctttctttctttctttctttctttctttctttctttctttctttctttctttctttctttcttctttcttttctttctttctttctttctttctttctttctttctttcgtctctctctctctctttctctttctctcttttcttttctttcttctttttttttttttttt

SEQ ID NO: 135472 - DNA, 201 bp, Homo sapiens
tatagttgcactattctatttgtttctaggtagtgtgtatccatatatgtctgcattctaatttatagtgctacttttttttatcaagatgagtatgttayaatgaaattaatggagtttgtaaggagctttccaaatttctaaaactgccaaaaaggatttttttttcacaccttaagtattgtctataatgcacttttc

SEQ ID NO: 135473 - DNA, 201 bp, Homo sapiens
agtcacacctagatcagacctatgcaatattctctttctttctttctttctttctttctttctttctttctttctttctttctttctttctttctttctttctttcttctttcttttctttctttctttctttctttctttctttctttctttcgtctctctctctctctttctctttctctcttttcttttctttcttct

SEQ ID NO: 135474 - DNA, 201 bp, Homo sapiens
acataaatttttattttagttcacttgattttatccctctaaccacttatacttgaatttctactccggttcttaatttctttattttaaattgagctcartatctaaaatggcgccagtactttttgggaaatatttattgttggaggcaatcattgaagaagatatcagaacaagtaatttcccaatgaatatctgaca

SEQ ID NO: 135475 - DNA, 201 bp, Homo sapiens
tccttgtgggctttctccgggcgctctggtttcttctcacgtctcaaatctgtgcatgttaggttaggtgaacaggcatgcctacgtggtcccagcctgcrtgagtataggtgtgcttgtgtgagtttgccctgcaatgggatggcatcctggtcaagactagttacctcctggtgccctgagctgcttgataggcttggc

SEQ ID NO: 135476 - DNA, 201 bp, Homo sapiens
ccttatagtatcaaacacagatcgtaaacttgctcattttgtaattaggaagtgaaaatgtgcctttctcaatctctaaatgtattaaatggttgagtacygtactctaacaaatcagcaaaattacaaggaaacaaatatctctgaagagtcagtgaaatgggagaattataaaatgaccagtctactttctcaatatgc

SEQ ID NO: 135477 - DNA, 201 bp, Homo sapiens
tctttagatgacgtgatcaaaagagcaaacaatactttctatggcttatcagcaggagtgtttaccaaagacattgataaagccataacaatctcctctgmtctgcaggcaggaacagtgtggtaagtccaacctaaggaatgtagccttttcagtaataaccacattaacagattactaccttgaactttttcagacttg

SEQ ID NO: 135478 - DNA, 201 bp, Homo sapiens
cgatacctgtttccctttctttgtttttcataattgtgtcttacacttaaagcaaatttcaatccaaaggctaaattttcatcagatgtattttatctgtrtttacattttataaaatttatgattgagaaacttattccaggtatatttaacttttttcttttcttgggaaaggatctcactctgtcacccaggctggag

SEQ ID NO: 135479 - DNA, 201 bp, Homo sapiens
tttattgttggaggcaatcattgaagaagatatcagaacaagtaatttcccaatgaatatctgacatgcacaacagataacatatatttttgttactcagyttgcccatagtgttgagtgaaggtaggtatttaacacttgccaaataggaaatgttcttaatgaaaactaggaattccaatactgtatatatatatacca

SEQ ID NO: 135480 - DNA, 201 bp, Homo sapiens
attaaaatgcaaagaaaattttattcttgtttagagtctactaaggaagcaacctatttcttccttttaatgcacattttatcgcctaaaataaataagagtttataggcacatatgaaataatacggtatactttagatagattttgaaaatgtctttgatggaataaaatcataaggtgagtgagtgattctgagtatt

SEQ ID NO: 135481 - DNA, 201 bp, Homo sapiens
gaagcttttaaaaggtattttcaaaagcttaattgcccaagaaaataatcagtgtaagagtattaggttacccagcagaaaatgatgtcttctacataccygtctacatcacaagaagggaggggtaaaaaaggatcaagatcttattcttctgtaagcctacatgtgcatgagtgttatgattttgagactactcttata

SEQ ID NO: 135482 - DNA, 201 bp, Homo sapiens
taaattttcatcagatgtattttatctgtatttacattttataaaatttatgattgagaaacttattccaggtatatttaacttttttcttttcttgggamaggatctcactctgtcacccaggctggagtgcagtggcgcgatcacggctcaccgcagccttgctctcccaggtcaagtgattctcccatctcagcctcc

SEQ ID NO: 135483 - DNA, 201 bp, Homo sapiens
taaccaagcagttctgtatgtgccaatttggaggcttaggtggggtgaaaaaaaacaagttaaataaaaatagtagcaagagaaatattgaaaatattagkaccacatagtatgattttccttatgttaaaaaagctatataaatgtgtaaatgcatgaataaagttctgtaaagctatacggtgggaactgtgaattatg

SEQ ID NO: 135484 - DNA, 201 bp, Homo sapiens
tctttgagattctgttctttttcatgtaaaatgaggagatagaaaatgcttgaggagttaaatatatagagctcttcaacggtgccaggcatatcctaaascttcagtcatgcccgggttttatacttatttaaagccttctctaaccttctcaagcagacttactctcttctgtgtggttataggacattgtatttgcct

SEQ ID NO: 135485 - DNA, 201 bp, Homo sapiens
aattaaaatgcaaagaaaattttattcttgtttagagtctactaaggaagcaacctatttcttccttttaatgcacattttatcgcctaaaataaataagagtttataggcacatatgaaataatacggtatactttagatagattttgaaaatgtctttgatggaataaaatcataaggtgagtgagtgattctgagtat

SEQ ID NO: 135486 - DNA, 201 bp, Homo sapiens
attatgaacacaatttagaatattcattcttcaccactcactctgctagcccctgacacaatagaggaattgcaaaagtataccaaactttttaaaaaaatatcaatgtttattacaaattatattatacaatttttctacttttatattccttctatatgttctgaagactgttcaccttgtagagacaagatgtattat

SEQ ID NO: 135487 - DNA, 201 bp, Homo sapiens
tgacaatctcagatttttgtggtttgctttttctttttttcaaacagtgctctgtaaatttaggaaaaagttagaacgtgtggcatgaaacaatgtctaartataagcaatcaatgtgattaactgaatgccgcaaatatgcactgtatatgtatttctcaggaaaggcaggcaataaatacatatattttgtatatatca

SEQ ID NO: 135488 - DNA, 201 bp, Homo sapiens
agtagaaaccactttgttaacttttcgtccttcatcgtttttggtgtctgataatgccaaaagtgaacttgaactttacaaaaaaaaaaaaaaaaaaaaaagcatttgcttctaacatcaaagtgtaaagagtccaaaattactcttgaaaatctcttaaatcatcctaaagttataacacatagataatagacacaattt

SEQ ID NO: 135489 - DNA, 201 bp, Homo sapiens
atgttaatttgaggtccatttgaggggaagatatctccttagatgggatttagcttaattgtgtacaattttttaaaaaaatctagggtcattactttttstctcccccaattcttaaagggaattgtgtctcctgcaaaatattgcaacctactggcctgtgatatagccactatttgtggagctatacaattccatgta

SEQ ID NO: 135490 - DNA, 201 bp, Homo sapiens
tgcctaatatgtttagcttactgaattgaattcctgttgacttacaggaggatgttgacaaggcagtgaaggccgcaagacaggcttttcagattggatcyccgtggcgtactatggatgcttccgagagggggcgactattatacaagttggctgatttaatcgaaagagatcgtctgctgctggcggtgagtattatcc

SEQ ID NO: 135491 - DNA, 201 bp, Homo sapiens
gcaaacccaagttaaaccaaattttagaaatttctttaccttaaaacttctcagaggtttcaataagatcacatgaagtttgagtctcctagaatgatatrttaggtttattcaagcatttgaccactgagctcttttgatggaaaaactcaagtttgttaagggtgcccaaaatatttctctaaaataaatcttatttct

SEQ ID NO: 135492 - DNA, 201 bp, Homo sapiens
aaaataaaaaaaatccaattattaatgtggtttatcaaaatcatgtttttatgaatactatttttgtttgtttatgttttagcagttagatgagtcagagmataatatagttgggggagggtatttccttgtttctgttgtctcaattgggcattatgatgaagccaatttaacataaacaaataccaagatcaggtttca

SEQ ID NO: 135493 - DNA, 201 bp, Homo sapiens
aaaaagttatcagaggtaaagagaggcattatataatggtaaaggaatcaaaactccaagagcacataatgattgttaatgcgtatgtacctaacagccawgtgtcaaaatatatgaggcaaaagctaatacaactttattgagaaatagatgaatcaactaatatgtttggagactttaacacccatctgtcagagctat

SEQ ID NO: 135494 - DNA, 201 bp, Homo sapiens
tttatgttttagcagttagatgagtcagagcataatatagttgggggagggtatttccttgtttctgttgtctcaattgggcattatgatgaagccaattwaacataaacaaataccaagatcaggtttcaagcaaatttcatctttagaatctgaaagtggcagtaacaaagaagtctacatttttaaaaaatcaacatt

SEQ ID NO: 135495 - DNA, 201 bp, Homo sapiens
agcagttagatgagtcagagcataatatagttgggggagggtatttccttgtttctgttgtctcaattgggcattatgatgaagccaatttaacataaacmaataccaagatcaggtttcaagcaaatttcatctttagaatctgaaagtggcagtaacaaagaagtctacatttttaaaaaatcaacattagcatgtatg

SEQ ID NO: 135496 - DNA, 201 bp, Homo sapiens
ggctgaggtgggtggatcagctgactgaggtcaggagtttgagaccagcctggccaacatggtgaaacgccatgtctactaaaaatacaaaaattagatgrgtgtgatgcctgtaatcccagctacatggaggatgaggcaggagaattgcttgagcctgggaggcggaggttgcagtgagccgagatcatgccattgcac

SEQ ID NO: 135497 - DNA, 201 bp, Homo sapiens
taaaaatggtgaatggaaaaactgcctaaatgcactttaccaaaattatctttttagtattattgggaatatcaatccaaatttttcttacaaatgtgccraacatctactatgaactgcaggtgttgaagaaatgattagtgtcctacatatgagttcctatttgaaagacttcaaatatttcttgaaagcattgaggaa

SEQ ID NO: 135498 - DNA, 201 bp, Homo sapiens
ggaactgaggaacagagcggctatgtaacttactaaagttacacagcaagtaagtgacaaagctacactgccaatgctggcagtttgagctaacacactarcaagagacttgtctaaggtcaattccactactctgggacactgacttgccagaatcctcttgtatccttcttcatcctgactttcatttgcccattgctg

SEQ ID NO: 135499 - DNA, 201 bp, Homo sapiens
aaaatggtgaatggaaaaactgcctaaatgcactttaccaaaattatctttttagtattattgggaatatcaatccaaatttttcttacaaatgtgccgarcatctactatgaactgcaggtgttgaagaaatgattagtgtcctacatatgagttcctatttgaaagacttcaaatatttcttgaaagcattgaggaatt

SEQ ID NO: 135500 - DNA, 201 bp, Homo sapiens
tctgagacaatatgcttcttgcagagatcaacactgcatctctcatttatatccttggtttctggatatagtatatcctataagtatgctatactatattygatagatatactatactatagatatagtatattctataaatctatgaagtagtcttctttttcatcaagtgttgaatttccatacattccacattcctca

SEQ ID NO: 135501 - DNA, 201 bp, Homo sapiens
gagtagaaaccactttgttaacttttcgtccttcatcgtttttggtgtctgataatgccaaaagtgaacttgaactttacaaaaaaaaaaaaaaaaaaaaaagcatttgcttctaacatcaaagtgtaaagagtccaaaattactcttgaaaatctcttaaatcatcctaaagttataacacatagataatagacacaatt

SEQ ID NO: 135502 - DNA, 201 bp, Homo sapiens
ctcaacttactgaattgatattacattttagtttgacaattaatttgactgattttctgatttgtcagttgaaaaatactgtttaagccatattaaaaaawatatatatatatatatttatgccatttaaaaaatagttgtaagccttgtcaagaattttatgctttagcctacaagtaagagtaaatttttgaagagttt

SEQ ID NO: 135503 - DNA, 201 bp, Homo sapiens
gagaagagggtattatccccctttcccaattagctctaacaactgttttcacacctattactgcatttttatcattcattccttactgtggttgaaagaayagatctaggctgaagtctgagattctgtgttcttaacagtctttcagcttttgctgatgctaccaaaatgtctgttgaccagcagcaagggtctaaaagt

SEQ ID NO: 135504 - DNA, 201 bp, Homo sapiens
atgctcaagaactcaagaatcctaaattacaataggaagacctcatttgttgctactataaagtacattatttacagatggctcctgtccagtggggggaatacatttagcatgacggctggctgcaatttctggcagtcaccccaaattcatctctgcccaaatgcagacaggaagccaaacacaaaggtttggtgtcaa

SEQ ID NO: 135505 - DNA, 201 bp, Homo sapiens
gagccaggggattcaagtcccagaaggaaatacttttaatatactgcattattcaggcctttaatctcttggattgttatataatgtttcactccactatytggaaatgcttccaaaccgcagaatgtcttcagcattgcaaataaattactgtgccaacatgtttctgccaccctgttgagccacattattagatgaggt

SEQ ID NO: 135506 - DNA, 201 bp, Homo sapiens
gaggctgaggtaggagaatcacttgaacccgggaggcagagcttgcagtgagccgagatcgcgtcattgcagtccagctgggtgacaagagcgaaactccrtctcaaaaaataaaaaataaaaaattagatagcataatattaaataaactttttattctcctcctgggtgaggagagtaaaaaacttcagaatatttatc

SEQ ID NO: 135507 - DNA, 201 bp, Homo sapiens
ttaaaatgtgtaacaaagaaagcagaggacagaacaagacaaaagccagaagcaagtttaaatattagaaaattttcattgtataaataagacattacagrattaaacagaaaatatctgttttatattggctcgttctgagtctctagacattatttgtattatatttcattatttatattaaagccatacaggtagtaa

SEQ ID NO: 135508 - DNA, 201 bp, Homo sapiens
gggcatggtggcgcatgcctgtaatttcagctactcgggaggctgaggtaggagaatcacttgaacccgggaggcagagcttgcagtgagccgagatcgcrtcattgcagtccagctgggtgacaagagcgaaactccgtctcaaaaaataaaaaataaaaaattagatagcataatattaaataaactttttattctcct

SEQ ID NO: 135509 - DNA, 201 bp, Homo sapiens
gtaagatagggttggccgggcgcagtggctctcacctgtaatcccagcactttgggaggccgaggcgggcagatgatctgaggtcaggagtttgagaccarcctgaccaacatggtgaaaccccacctctactaaaaatacaaaaattagctgggcatggtggtgggttcctgtaatcccagctactggggaggctgacgc

SEQ ID NO: 135510 - DNA, 201 bp, Homo sapiens
accccattgcaagttccaaaagacatgccatgaaaatatggtttctggggcagcttaggaaaattgtctaagttgtccttgttaccaaaaaaaaaaaaaaatgctctgtagttatgtaataatgataaacctgtgcttctgggtgtcatggtgattttttttcacatcattttcctttattttcaattgaaatagtatata

SEQ ID NO: 135511 - DNA, 201 bp, Homo sapiens
caagccagaaatattttgagaaaattatgcttatttatttagaactgtagatttatacacaatacattaagacataataacttttactctggaaaggcaayttttttcacaattatgactaattcttggacaccagttgaatccaggaaatggctacttgtttatcaaaggtaaaatgatgcatttcttaaaatgtggcat

SEQ ID NO: 135512 - DNA, 201 bp, Homo sapiens
agtaagcttcacttattaaaccatggtttgttcatgctacaaaagaccttcatcagctaatgacattttactcatacatacacacacacacacacacacacgcacacacacacacaataaataattataggtaaaatttattgtgcttactctgccatgactgtttaagttcttgacaatgattttatttactcctcataa

SEQ ID NO: 135513 - DNA, 201 bp, Homo sapiens
ttcatctttagaatctgaaagtggcagtaacaaagaagtctacatttttaaaaaatcaacattagcatgtatggttaatagcaagtatggttaatcaaagraccatttattactcaaatattcaacataatttgaaatacacaaaaattcagaacgagcagctatgtgcaataaaactatagtaataaaaatgacctgtag

SEQ ID NO: 135514 - DNA, 201 bp, Homo sapiens
tagtaagcttcacttattaaaccatggtttgttcatgctacaaaagaccttcatcagctaatgacattttactcatacatacacacacacacacacacacacgcacacacacacacaataaataattataggtaaaatttattgtgcttactctgccatgactgtttaagttcttgacaatgattttatttactcctcata

SEQ ID NO: 135515 - DNA, 201 bp, Homo sapiens
tctcactaccctttgtgcccagatcttgctatttgacctaaaggaagtcattttaactcttaaaaagtggaggttagacaagatgacaagatttcttctawttcaaaaattccctagcacatgattgctgaaaatatttactacatatttttaatctaaaacttatggaattttagatttggtgtttgacatgtttttcag

SEQ ID NO: 135516 - DNA, 201 bp, Homo sapiens
actaatcaaacaagccagttcacacggactcgtttcaaatatcttcaaagcaagatgggactgtgtttgcagcctaagttaagggtttgtgtgtgtgaatytgtacgtatgtgttattttagtggggtatgcacataatggagtagaaatactaaagatatttcatgtgaaacatgaaaacacacacatttaggaaacagt

SEQ ID NO: 135517 - DNA, 201 bp, Homo sapiens
acattaatcataagagccctaaagagagacctgtgtattttcaaattctatgtgccttgggctactttttctaatgtcaccattaccatgcaaattgaaayttaaagcaataatcacttaatactgtaaattatttttgatgttttggtcatgagtatccttttcctttttttcttttttctttttttttctttacttgag

SEQ ID NO: 135518 - DNA, 201 bp, Homo sapiens
tggtactaagaaatgtggctactttagaactgtcctactttactccgggacaaaatgggagaagtcacttaaaacacaaatagatcttgatgaagagagtycttgctgaaaccaggaagcttctgtgggaactagaacagaattgaatgtaaagcataatgtatctctctggatgaccacattaaacttcggggcacataa

SEQ ID NO: 135519 - DNA, 201 bp, Homo sapiens
tcgatgtactcatttgaaatagataattcatgtaaggaaaaaaagtattcttattctacaacacaggaaattctcatttttcttctctttttttttttttsagatggtgtctcgctcttttgcccaggctggactgcagtggcacaacctcagctcattgcaacctccacctcctgggctcaagcaattctcctgcttcag

SEQ ID NO: 135520 - DNA, 201 bp, Homo sapiens
  misc_feature (1)...(201): n = A,T,C or G
aaatcattcctgtaagcttttctcctatataattctcaattttaaaaagaagagttcttattctatctaatgatgaagctttctctaaaacagatggatgnttatgtatttgttaaatgtggagtaaatgtaagatttgttgaacttggtctccctgtgactaaacttcttgcatatgaattaggtagtccgaaaacctat

SEQ ID NO: 135521 - DNA, 201 bp, Homo sapiens
tatcaaaatggcaatcataaaagccacaactctacagacacaaatgtctgtatctgaatgtatcaaatttctgtatacagaagacttgcattacttattarcattgcccctccatcctgatcacatgcacatatgtccaagtccactcctctatcacaacacacataaatacctcccacatatacacacagcagtgttctt

SEQ ID NO: 135522 - DNA, 201 bp, Homo sapiens
tgtggaggaggcccgtgggggaataaaggctactttgtccagcccacagtgttctctaatgttacagatgagatgcgcattgccaaagaggaggtaaatgkcttcattctgttctgttctttttgttgccatgttttgtctgtttgtgtgtatacaaagtgtcactttaaaattcccagctctttggaacatctttccctc

SEQ ID NO: 135523 - DNA, 201 bp, Homo sapiens
gatagcgtgtaggaaaaaaaatctacgatatcatttaaaatatttcattttaacctattatttttacttatttatttcttgtggtatagatttttggaccrgtgcagcaaatcatgaagtttaaatctttagatgacgtgatcaaaagagcaaacaatactttctatggcttatcagcaggagtgtttaccaaagacattg

SEQ ID NO: 135524 - DNA, 201 bp, Homo sapiens
aagaaatggtcaagacttatctttggctccaatgagattgaaatatattcatatcaatattttagtgaaattgcttattaattcaaaagtcccaataaatygataaaaactatataattatgaacactgataatagctgatatgtactacttgtctatgctagaccagtcattgtgttgagcccctggccctctttcttgg

SEQ ID NO: 135525 - DNA, 201 bp, Homo sapiens
acacccatctgtcagagctataagtcggatagatttagcaggcagaaaatcagtgaggatataattgaattcaacagcaccgtcaatcaactgaataaaaytgacatctaaagactacatctaacaatagcagaatacatattattctcaagctaacatggaacattcaccatgataggccacatttttgaccataaaaca

SEQ ID NO: 135526 - DNA, 201 bp, Homo sapiens
ttgtatattacattcagcagccagtaagaacaaatggcttaaatgaatagaatttatctttcttacatgacaaaatgcctacatgtgggtgactgcttccwttggttcagtaccttcatgacacttggggtgatatctctgccactctttaggcctttccctttggctgccatatggctgctgcagttctagccatcatta

SEQ ID NO: 135527 - DNA, 201 bp, Homo sapiens
tagagaagaaaacttctcctaacagaagagatgaaacttcctctagggcagaaagcaagtgtaggatatcagttagtagagaagagggctttcttgcatgraacattacatgtggtatgttgaggggctagtgaattttgttgattggtgtggatttatggggatgaaaaatatgatttcagagtaacatatgatacagat

SEQ ID NO: 135528 - DNA, 201 bp, Homo sapiens
cagttgggtgaattatttttttctagagcatctcataaggttggcattaagagacaatctcaatcccctactctcctcctttttgaattaaattcttataytgtaacttttaaactttttatcttttaggcagggtttcctcctggagtagtgaatattgttcctggttatgggcctacagcaggggcagccatttcttct

SEQ ID NO: 135529 - DNA, 201 bp, Homo sapiens
gtaagaccagaaatcttatgattggctagctactatataaaatgctctgtacacaagaaatattttctattgtccctagccagtaaaacaagaacaaactygtaccaaacatgaactacagtatatttatactgctgtgctaaatggtgtttgtgggtatgtttttcttctctctaggggagagtacggtttccatgaata

SEQ ID NO: 135530 - DNA, 201 bp, Homo sapiens
ttaaaaatggtgacaccacaggttgaaatcataccagaggaataaaggtgaaaattcctcagcctagaattctagaccctccccaatagggaatccatgtrcctgttgaggtctgtccaacccatggccagggatggctttgaatgtagcccgacacatttttttttcattctcatcagctatctttactgttagtgtatt

SEQ ID NO: 135531 - DNA, 201 bp, Homo sapiens
aattaaccgcacattggattaatgtataaacattaggtagctctatcaaattatttatgcaagtacccatattatagacattgagaatagctgactaatartgtgttatttaaaagggttcataggagagggtaatgaaaattgccttgcattcccattggttaagaggaaaatccataccacgataataatcgttacagc

SEQ ID NO: 135532 - DNA, 201 bp, Homo sapiens
agatggatgcttatgtatttgttaaatgtggagtaaatgtaagatttgttgaacttggtctccctgtgactaaacttcttgcatatgaattaggtagtccraaaacctatctatattctggcatatctcttgagaatgttttaatactacatcatccataaatgttaaccctttactctatgggttgttttattaaaagtt

SEQ ID NO: 135533 - DNA, 201 bp, Homo sapiens
tcaggttcaaaaaaatatcatgggtttctaaatagctagacttcaaaagtcacacaaccaaaaaaatctgacaagagccgacaaaccacaggaattttctkacccactggcagacgttatgctaattgacatttaatcatgtcatacttagctactgctaaaaaaaaaaaagttttactcctaatgttttttcatgaagtc

SEQ ID NO: 135534 - DNA, 201 bp, Homo sapiens
acctattggtgtatgtggccaaatcattcctgtaagcttttctcctatataattctcaattttaaaaagaagagttcttattctatctaatgatgaagctktctctaaaacagatggatgcttatgtatttgttaaatgtggagtaaatgtaagatttgttgaacttggtctccctgtgactaaacttcttgcatatgaat

SEQ ID NO: 135535 - DNA, 201 bp, Homo sapiens
cagaggtaatattatttactcagggcaaaagttaagaatgtctgcattgccagctatgaagtatgttttatgtaactatttttgagccaacaattttaaarcaaaaactctttttaatgatttgttacttattttagccttcaaacatatggatagaatataagcagatgtagtttgaatgacatgatgcacctattttaa

SEQ ID NO: 135536 - DNA, 201 bp, Homo sapiens
acaggatcaacagaggtaatattatttactcagggcaaaagttaagaatgtctgcattgccagctatgaagtatgttttatgtaactatttttgagccaayaattttaaaacaaaaactctttttaatgatttgttacttattttagccttcaaacatatggatagaatataagcagatgtagtttgaatgacatgatgca

SEQ ID NO: 135537 - DNA, 201 bp, Homo sapiens
caaagaagctgccgggaaaagcaatctgaagagggtgaccctggagcttggaggaaagagcccttgcattgtgttagctgatgccgactgtgagtagaaaycactttgttaacttttcgtccttcatcgtttttggtgtctgataatgccaaaagtgaacttgaactttacaaaaaaaaaaaaaaaaaaaaaagcatttgc

SEQ ID NO: 135538 - DNA, 201 bp, Homo sapiens
gggatcaaaaattttctcctacaggattcggtaactttgtttgccattctctcttcacaatactgttgttttaccttttcttttttcttttttttttttttataaaagggaaataggaaattcaagaagacaagcattctcagacagaattcaaacgccaaaatgtttaacttaattagtaagcttcacttattaaaccat

SEQ ID NO: 135539 - DNA, 201 bp, Homo sapiens
tgtttatatgaaaattaaactgaatatattacaaacaatatcatcaaatttctaaacacattgttggataatctgcatgagaattataaaaaaaaaaaaaagaaaaaattgtggaaatctcaaagtagtctacattttgattgactcattgatgtctttcgtgtctttctttctacacattaaggaagcaaactggaaact

SEQ ID NO: 135540 - DNA, 201 bp, Homo sapiens
ttgtttatatgaaaattaaactgaatatattacaaacaatatcatcaaatttctaaacacattgttggataatctgcatgagaattataaaaaaaaaaaaaagaaaaaattgtggaaatctcaaagtagtctacattttgattgactcattgatgtctttcgtgtctttctttctacacattaaggaagcaaactggaaac

SEQ ID NO: 135541 - DNA, 201 bp, Homo sapiens
caatggttgaactaatttacgctcccaccaacagtgtaaaagcattcctgtttctccacatcctctccagcatctgttgtttcctgactttttaatgatcygcattctaattggcatgagatgatatctgattgtggttttgatttgcatttctctaatgaccagtgatgatgagctttctttcatatgtttcttggccac

SEQ ID NO: 135542 - DNA, 201 bp, Homo sapiens
ggtgtatacatgccacgttttctttatccagtctatcactgattggcatttggattggttctaagtctttgctattgtgaatagtgctgcaataaacataygtgtgaatgtgtctttatagcagcatgatttataatcctttgggtatatacccagcaatgggatggctgggccaaatggtatttctagttctagatcctc

SEQ ID NO: 135543 - DNA, 201 bp, Homo sapiens
ctatacagaaacttatggatgctgctaaagacatgcttagggggaaatttagggctttaaatgaaaaaaaaagaaaagctggaaaattaaatatctaagtwtcaagaagttagagaaggaacatcaaaacaacctaaagaaaatagaatgaaggaaacaataagaacagaaattaataaaaacaaacaaacatagagagga

SEQ ID NO: 135544 - DNA, 201 bp, Homo sapiens
acagaactagaaaaaagtattttaaaatttacatgaaaccaaaaaagagctcatatacccaaagtgatcctaagcaaaaagaacaaaactggaagcatcayactacccaacttcaaactatactgtaaggctgcagtaatcaaaacagcatggtactggtacaaaaacagacacatagaccagtggaacagaatagagaac

SEQ ID NO: 135545 - DNA, 201 bp, Homo sapiens
acactggcaaggtgatatagtcatggtctctttatctcacaaggcaaataaatataaagttttgtggaaatagccttgtatattaaccaaaaaaaaaaaaagcccctcaccaggtctcttgttttgttaagcagctcatgcatagttttgtaaatgaaaatttgatattaatgactttctaaatgactttttctaatgact

SEQ ID NO: 135546 - DNA, 201 bp, Homo sapiens
caaaataccacaaactgggtaatttatgaacaatagaattatttctcacagttctggaagctaggaagtctaagatcaaagtgccagcagcttctgtgtcwccatggtgagagcccttccttatagacagagccatcttgctgcatcctcacgtggtagaagggagaacctatgtcctcacgtggcagaagggccaagggc

SEQ ID NO: 135547 - DNA, 201 bp, Homo sapiens
ataaagcccggctccgggttctcctgtttacagccctccggtggtttctccttgcagttaaaataaagcccaaattcttttatctgccttgcagagctagrtaacacggtcggtctgttctcaagccttctctcttatcattcttcttgctgcacttggggcagccgcactgtcctttttagcccttaaacatgtcaagcg

SEQ ID NO: 135548 - DNA, 201 bp, Homo sapiens
gctgctataacaaaataccacaaactgggtaatttatgaacaatagaattatttctcacagttctggaagctaggaagtctaagatcaaagtgccagcagyttctgtgtcaccatggtgagagcccttccttatagacagagccatcttgctgcatcctcacgtggtagaagggagaacctatgtcctcacgtggcagaag

SEQ ID NO: 135549 - DNA, 201 bp, Homo sapiens
ttctctcttatcattcttcttgctgcacttggggcagccgcactgtcctttttagcccttaaacatgtcaagcgttttgcttatcctggggcctttgcccrcattcatccctcagtctagattcttctctgatatttgcacaactgactccttcctgtcattttaagctctgatattacctggtctggaaggccttctcag

SEQ ID NO: 135550 - DNA, 201 bp, Homo sapiens
attctaaggtccattcataaatattctaaagccattgacccatttggtcattcaatgaccaaatactcagtcattgaatactaaccaaatgagtattcaayggttaggaaggtctggggaaaggttttcaaaggataattaagaacagaaaggatattgaatgtttaacactcctcagtgattgcttctcaatcgcaaatg

SEQ ID NO: 135551 - DNA, 201 bp, Homo sapiens
ttagtattaacttccaagtatgaatctgggggagcaccaacatttagaccatagcacactctatcactagaaatcgttaaactttatagttttattgactrtaatgcatgcttaactatccgcttataacaatcttcaatgaaattgtttcttctcttccatgtgtattgtagctgacatattgagcagaggaccaaaatc

SEQ ID NO: 135552 - DNA, 201 bp, Homo sapiens
tgcaccaatcccattcaggagggtggatccctcctgacctaatcacctctagagaccccacctgttaaaactatcacattagtattaacttccaagtatgwatctgggggagcaccaacatttagaccatagcacactctatcactagaaatcgttaaactttatagttttattgactataatgcatgcttaactatccgc

SEQ ID NO: 135553 - DNA, 201 bp, Homo sapiens
agaagggccaagggcattccctcagccctcttttataagtgcaccaatcccattcaggagggtggatccctcctgacctaatcacctctagagaccccacytgttaaaactatcacattagtattaacttccaagtatgaatctgggggagcaccaacatttagaccatagcacactctatcactagaaatcgttaaactt

SEQ ID NO: 135554 - DNA, 201 bp, Homo sapiens
acttctgtgtcttggtggtggccgattagaatgatgtatgagaaggattaggaagccgtgctcaagctgaaggagaaagaggctgtgctctgttagcagcrtccccgatggacacaagaggaggcatcacaggcagcgcatcccacatttgccaccctgtcatttatgtcctggatcttactgcagagtaatgggcattta

SEQ ID NO: 135555 - DNA, 201 bp, Homo sapiens
atgttgactaatttctcatcttcattctcatcatttttctttctgtcggtcctaaggatcagcgttctctctctgaacacccttcagtgctgctggccatyctcattatggtcttgttcaaactagtgtttcttgagtccctcctgtaagtctgttaatcctggatttcaacctctggggcaaagagggcctgtttgaagt

SEQ ID NO: 135556 - DNA, 201 bp, Homo sapiens
ctggtccaaaacccttaatagagagagttattttacacatacaagtttcaacattgcaccccagcacttttaaccaggtaaggacaatttaggaaatcgatttttttttttgtaatcagattagaattttaaaaaaataatagatggtagagcacaggaactccaaacctgtttagtgactcatagtttgccttctttgca

SEQ ID NO: 135557 - DNA, 201 bp, Homo sapiens
tttgagattttaaagaagtaattaagtgcaaaatggtatataatgtgtactttttctacttttaggaaaatttaatgagagcttattgcaaaaattgttataatttggtcattataagtgacttttagtaaaagtaccataaaccttatgttatgccacagaaattcctttaaaataaaattcttaaactaaacataccta

SEQ ID NO: 135558 - DNA, 201 bp, Homo sapiens
attataattatgaagataattcatgggtactcatcagggacataaagatgtcaacaaaagatactgaggctgactgctggggggagtcaggaagggggcargggcttgaaaaactacctattgggtactatgctcagtacctgggtgacaggagcaattgtaccccaaacctcagcatcatgcagtatacccatgtaacaa

SEQ ID NO: 135559 - DNA, 201 bp, Homo sapiens
ttatggtcttgttcaaactagtgtttcttgagtccctcctgtaagtctgttaatcctggatttcaacctctggggcaaagagggcctgtttgaagtttccytaagttcataataatggcatctggagcaaataataagcccttgtgtgtgtttttggcagaaaagccatgaagacaagcagatgctaataaaagaatctgc

SEQ ID NO: 135560 - DNA, 201 bp, Homo sapiens
caggagaatcacttgaaccagggaggttgcagtgagccaagatcacgccattgcactccagcctgggtgacagagcgagactccatctcaaaaaaaaaaawaaataaatgtgtaacctcaaccctcaggagctcagagctggttgcgggtttatatatttttaagggtatgaatgagcaagttcttagttagaaagaaaaa

SEQ ID NO: 135561 - DNA, 201 bp, Homo sapiens
gtttcgtagctgtctattccattacgtacacgatgaccggcacattgcctggcccctacctcttccctgaggcctatgcttctgtatccacctttctgctsatacctccacagagatgtctaaaaatcatttcacacttaacatgcccaaaatagaactcctggttttccacagccccaccccaaacctctgatctacagc

SEQ ID NO: 135562 - DNA, 201 bp, Homo sapiens
gctcatgatccacaggcttatgtatattctgtctttccccctggaatctaacttctgtgagaataagagcctttaatgccttgttcctctttttatcctcrttgtctaagacaatagacacacagtagttccttgaatgagtacaaagaattataattccaaatgaatttaattttagataacttttaagaaataaataga

SEQ ID NO: 135563 - DNA, 201 bp, Homo sapiens
accctcaggagctcagagctggttgcgggtttatatatttttaagggtatgaatgagcaagttcttagttagaaagaaaaaaaaaaaccaatagcacttayatttgtaatcatgactgactcaggctttcttttgtgctcaacagctgcacccactgggctgcaacattattaatgttgccagtgatgaaagtgggattgt

SEQ ID NO: 135564 - DNA, 201 bp, Homo sapiens
aaataccacaaactgggtaatttatgaacaatagaattatttctcacagttctggaagctaggaagtctaagatcaaagtgccagcagcttctgtgtcacsatggtgagagcccttccttatagacagagccatcttgctgcatcctcacgtggtagaagggagaacctatgtcctcacgtggcagaagggccaagggcat

SEQ ID NO: 135565 - DNA, 201 bp, Homo sapiens
gggccacaggtggagctgcctgccagtcccgggctgtgagcccgcactcctcagcccttgggcggtaaatgggaccgggtgctgtggagcagggggcggcrctcgtcagggaggctcgggcagcgcaggagcccacgggtgggtggtggggaggctcaggcatggctggctgcgggtccgagtcccaccccgctgggaggc

SEQ ID NO: 135566 - DNA, 201 bp, Homo sapiens
aaaataccacaaactgggtaatttatgaacaatagaattatttctcacagttctggaagctaggaagtctaagatcaaagtgccagcagcttctgtgtcascatggtgagagcccttccttatagacagagccatcttgctgcatcctcacgtggtagaagggagaacctatgtcctcacgtggcagaagggccaagggca

SEQ ID NO: 135567 - DNA, 201 bp, Homo sapiens
cccagctggcttcccccagtggagccggcactggggccacaggtggagctgcctgccagtcccgggctgtgagcccgcactcctcagcccttgggcggtaratgggaccgggtgctgtggagcagggggcggcactcgtcagggaggctcgggcagcgcaggagcccacgggtgggtggtggggaggctcaggcatggctg

SEQ ID NO: 135568 - DNA, 201 bp, Homo sapiens
tggttaagtgattttctctggtagtattttataatttgttgctctttatttttagtgaatcaataataagtttttgtactgtggttaccatgaggcttacaaaaaaaaaatcttataacaagttattttaaagaggtaacaacttatcttggatcaacttatcttggagaagcaaacaaatgcaaaaaacataaaaaaatc

SEQ ID NO: 135569 - DNA, 201 bp, Homo sapiens
atctatttatatgtctgtatttctgacttcttatatggattggttctctctccctctccccctggcattagttattccatcttcttcccttctgggttccrggaactccacagatgtaaacaccactggttagttgccacaataaagagaccacatctgtggtcctcagtttgatctgttattttcttttctttctttttt

SEQ ID NO: 135570 - DNA, 201 bp, Homo sapiens
tgtggttctcctccagcccactttccctcccttccttgcagtgtcctcctctacccagccattatttattggagttccctgtagctcagtccttaaacatstctccttagtctatgtacttttcctgggtatcttcatttacattcacatgatcaaccatatgccagtaacttccaggctccttccaaatccatttgtcca

SEQ ID NO: 135571 - DNA, 201 bp, Homo sapiens
cacatattttatattttatatgtattgtacactatatttttacaataaagtaaactagagaaaataaaatggtattagaaagtcatgagcaagagaaaatrtatttaccattaagtggaagtggatcatcatataggtcttcatcctcatcttcatgttgcttaggctgaggagaaggaggaagaggaggggttggtcttg

SEQ ID NO: 135572 - DNA, 201 bp, Homo sapiens
tgaggtttttctgattgcattggtaatattgaacttttttaatgccttttggccgtttttatgtcttcttttagaaatgtctgttaagatcttttgcccawtttttaatgggattatttgggggttttgctattgacttgttaatcccttgtcagatgggtagttcgcaaatattttctcctctcctgtaggttgttctag

SEQ ID NO: 135573 - DNA, 201 bp, Homo sapiens
ctgcagtgtggtgctgctgaacagtcactctgttttggcatgcctttcgctgagttacagtgcagagtttccagggcttgggatggtagtcctgcctcccsattttgtctctgcctgtcctcagggatgtttttccctccaggcagtcatgatgcttccaaagggttaaaggcaaggacaggtctccagccagggaaccaa

SEQ ID NO: 135574 - DNA, 201 bp, Homo sapiens
acaggcctttttttccctttattcacctgcaatagtcaaagattcttggctgtttatctaaagttgtagtcggaccagtcaggtttttgatatcaggtatraaagggcacatttcgaaatacgtagtcgatcttgttttaaatgtacacttaaatttgtttttgaaataagaagtagttagttttattagaatgttttaat

SEQ ID NO: 135575 - DNA, 201 bp, Homo sapiens
aatctttctaaagaaatgggttggaatgcattttaattaaaataaagtaaacttaatttaagagaatgtgtaaatttccttacaaactttgagaaattatyggatccgtctgtaacacaacctctcaggttgcaagaatatgaatagaatagaaaagtttgtgtagaataggacacttgtttgatattgtatgttccataa

SEQ ID NO: 135576 - DNA, 201 bp, Homo sapiens
gcctacaggtccccattccaggctgcgctgtatctgatatacccatgctataccacttgttaaatatttttaatatcacctctgcttgtgactgttttatrtatgaacacaacagtaaatgaaacatatgatttactctatcaaaaaacattcatttgtaaaacgcctacttcataaaccagtaataattataattatgaa

SEQ ID NO: 135577 - DNA, 201 bp, Homo sapiens
ttcatgggtactcatcagggacataaagatgtcaacaaaagatactgaggctgactgctggggggagtcaggaagggggcaagggcttgaaaaactacctrttgggtactatgctcagtacctgggtgacaggagcaattgtaccccaaacctcagcatcatgcagtatacccatgtaacaaacctgcacacgtacccctt

SEQ ID NO: 135578 - DNA, 201 bp, Homo sapiens
acaaaagatactgaggctgactgctggggggagtcaggaagggggcaagggcttgaaaaactacctattgggtactatgctcagtacctgggtgacaggarcaattgtaccccaaacctcagcatcatgcagtatacccatgtaacaaacctgcacacgtaccccttgaatctaaaatgaaagttgaaaaagtaataataa

SEQ ID NO: 135579 - DNA, 201 bp, Homo sapiens
tagtctgaagaacatgtgcagaaggccaataagcacataaaagatgctcaacatcattagtagagaaatgcaaagcaacataaatcaacgtatgaaagcckcaagttccatgatcgtgtagtggttagtactctacaatgtgtgactgctgtacctgcagtctgattatttggcaagactcaggcttggggaaaaaatttt

SEQ ID NO: 135580 - DNA, 201 bp, Homo sapiens
caaaaaggaaatctatgaggtattgtagaagaatgggttaaagtagttgtgttcctgtttctctgtgactttttagaagagcactatgcaagctccctttsttcttagccttttgctttcaaggaatataatttttaataaaaggaaatcatatatgctcagggtcctaataaatttagacacaataaatttctgcatctt

SEQ ID NO: 135581 - DNA, 201 bp, Homo sapiens
ttttaatcaagatagaaaacaaattcttatagcctggactctggagactgttttgcttctgcaatcaatgtactgagcacatccatttcattgttttcttyttctagggttattgatttctatagtaaccagaaggatgcaatactggcagctgcagacaagtggttaactggtgagtggaacgtatattcgtcctcatga

SEQ ID NO: 135582 - DNA, 201 bp, Homo sapiens
gtgggattgttccagattccctaagagacatactttccagatggaaaccagaagatgcaaagaatccccagaaaaacacccccaaatttctttatactgtyccaaatggcaacaaccctactggaaactcattaaccagtgaacgcaaaaaggaaatctatgaggtattgtagaagaatgggttaaagtagttgtgttcct

SEQ ID NO: 135583 - DNA, 201 bp, Homo sapiens
gagataccgatgatgcctagcttttcactataaacatttttttaagtatcaaacatatattaagctccccagaaatctttgaaaaataagagaaatgtgcyttttggaaagtctctttttatgtacctgactgtgtccccaacctttcactacaaatagctttttaaaataaataccaaacccatgttaaactctatagaa

SEQ ID NO: 135584 - DNA, 201 bp, Homo sapiens
aaacatggtcaatcttagagcagagggaaaagagacatagacaaccacaagctggattttaaagcttcttactggaaggaacatgcatcacttctgccccraatttgttgcccactgcaagacacatggccatacctgacgtaaacggggcaagaaagaattatataattctctgggaagggacaggaggtatttttgaac

SEQ ID NO: 135585 - DNA, 201 bp, Homo sapiens
cgcctgtaatcccagcactttggaaggctgaggtgggaggatgcttgagcccaggagttcaagaccagcctgtgcaacatagcaagaccccaactctaaawatatatatatatatacacacacacatatatatacacacacacacatatatatacatgtatctatataaacacacgtatacacacacacacatacacacac

SEQ ID NO: 135586 - DNA, 201 bp, Homo sapiens
tctctcatagggttgctctgatgattaagtgagttaatatatgtaaagcccttagactagtatgtggcacatactcagtgctcagtaagtattagccactrgtatttaaaatgaagggtttgttttctgatgatggagataaagtatactcgtggtaggatatttggaaaatgtataaaagcataatgaaaattttttaaa

SEQ ID NO: 135587 - DNA, 201 bp, Homo sapiens
tttaatttccttctgaatttttcattgacccattcaggagcacgttgtttaattttcgtgtgtttgcatattttataaagttcctcttgttattgatttcyagttttattattgtggtcaggaaagatatttgataagatttgggtttttttatttgttcagacttgttttatagcctaaggtatggtctgttctgcagac

SEQ ID NO: 135588 - DNA, 201 bp, Homo sapiens
ggcttattcaaacattccatgatacaaacaacttattgagtctgaacttctaggtagccatagaactcttcctagagagaacaaagaatcgattatgcaaygcatgcgctaaagacttcaggtttggaataagaaagatgtagattcaaatctcagctcatttattacgtaattgactttctgagaatttctggctgaatg

SEQ ID NO: 135589 - DNA, 201 bp, Homo sapiens
acaccagctgcatttcgccctgccctctaaccagtcacactcttcacacagcagccagccacatctgtccctgcagaaatgtcagtataaagcccggctcygggttctcctgtttacagccctccggtggtttctccttgcagttaaaataaagcccaaattcttttatctgccttgcagagctaggtaacacggtcggtc

SEQ ID NO: 135590 - DNA, 201 bp, Homo sapiens
atatattgtctatggctactttttcactatagaggcagagtagttgcagggtagttgcaacagagatactatgacccgcaaagtgtttactgtttggcccyttataaacaatttgctaattcttactctagaaccatgtgagctcaaactaaaaaatgggcttctgagcatggaaacagtactaacctatgctgactaaca

SEQ ID NO: 135591 - DNA, 201 bp, Homo sapiens
taatttgaagtctttctactttcttgaaacaggcgtttattgctataaactttcctcttagtactgtttttgctgtcttccacaaattttagtatattgcrtttccattttcatttatctcagtaaaacttttaatttccttctgaatttttcattgacccattcaggagcacgttgtttaattttcgtgtgtttgcatat

SEQ ID NO: 135592 - DNA, 201 bp, Homo sapiens
agccacatctgtccctgcagaaatgtcagtataaagcccggctccgggttctcctgtttacagccctccggtggtttctccttgcagttaaaataaagccmaaattcttttatctgccttgcagagctaggtaacacggtcggtctgttctcaagccttctctcttatcattcttcttgctgcacttggggcagccgcact

SEQ ID NO: 135593 - DNA, 201 bp, Homo sapiens
cagtagttccttgaatgagtacaaagaattataattccaaatgaatttaattttagataacttttaagaaataaatagattaagaaataaacaattacttcaaccttttttagcttgcaagaaaatatgatttcctcataatagaagatgatccttactattttctccagtttaacaaggtaagtgattatgtgaacttac

SEQ ID NO: 135594 - DNA, 201 bp, Homo sapiens
tgactgctaaaagagtgtttgcttttcatttgcaatttttttagaacctcattcaattattatttcttaagttcctttttttttctttttaatgctcaacmatgaatgagattccacaaatttgtataaagctaagtctataagcaatgccagtacaagccagttcagccttagcaattggtaaaatatggaaattctact

SEQ ID NO: 135595 - DNA, 201 bp, Homo sapiens
agtagttccttgaatgagtacaaagaattataattccaaatgaatttaattttagataacttttaagaaataaatagattaagaaataaacaattacttcaaccttttttagcttgcaagaaaatatgatttcctcataatagaagatgatccttactattttctccagtttaacaaggtaagtgattatgtgaacttact

SEQ ID NO: 135596 - DNA, 201 bp, Homo sapiens
gtagttccttgaatgagtacaaagaattataattccaaatgaatttaattttagataacttttaagaaataaatagattaagaaataaacaattacttcaaccttttttagcttgcaagaaaatatgatttcctcataatagaagatgatccttactattttctccagtttaacaaggtaagtgattatgtgaacttactt

SEQ ID NO: 135597 - DNA, 201 bp, Homo sapiens
tagttccttgaatgagtacaaagaattataattccaaatgaatttaattttagataacttttaagaaataaatagattaagaaataaacaattacttcaaccttttttagcttgcaagaaaatatgatttcctcataatagaagatgatccttactattttctccagtttaacaaggtaagtgattatgtgaacttacttc

SEQ ID NO: 135598 - DNA, 201 bp, Homo sapiens
gcgcagccagaaacccttctcccatccggaccatgagtgagaaacggggtgaccatctctcctttggggtggggcattcctcgcacagcctctaaggaggrttccctagcaagccaccgcttggttgcatccatgcgtacccctgtgcacgctcgcggtgagccaggctctgcgtgcagaaatgaaatagacacagccttt

SEQ ID NO: 135599 - DNA, 201 bp, Homo sapiens
atgaacaaaacaggagcccagtgaacatagtacagatcacctacagtattgatttattcttccttcctaagtatcctcggaaaggagagacaataggaacrgtctattataagtcaaaagtctattcattttgttagttcttcacctagcaagtcttctcagcatccaaggtgtggtttgaaagcagtgtccacccactcc

SEQ ID NO: 135600 - DNA, 201 bp, Homo sapiens
aaatttcagatttctttggcttttctgattcatttactgacgaaagagactttttctaggtttcaagaattatgaagagtctgagattctaccctacttgsaggttaacgtattagcctgccatactttcttatgttgctggacaactcatggcacagcaggcagtatgagcttgaagtttgcattgactcccctgcccct

SEQ ID NO: 135601 - DNA, 201 bp, Homo sapiens
agagatattttattatccaagaatatgctatcaatatcctggagcccacctatctagtttccagtgtgtcaactagcaccagcttagctaaccagacttamagtgagtttgtaattacatgattaggtatggcatacccagttactccttcttttctctgcctaccccaagccccattagctctgttttatgacagaaatt

SEQ ID NO: 135602 - DNA, 201 bp, Homo sapiens
gacattgagacacacaaaaaaacatgcaggctggttgcagtgtctcctgcctgtaatctcagcactttgggaggccaaggtgggtggatcgcctgagatcrggagttcaaaactaggctggccaaaagtggtgaaaccctgtttctactaaaaatacaaaaattagctgggtgtggtggtgtgtgcctataatctcagcta

SEQ ID NO: 135603 - DNA, 201 bp, Homo sapiens
tttcaaccacaacaatattgcaacagaatgaatgcagagcggatttgagaatgcagctgtcttcacttaacccagacattaaagagacttgcaaaaatgtaaaaaaaaaaaaaaaaaaaagttctttaggaaattacagctatttttcataaaatatatttttatttaatacagtatattaaatgaataaatatatttttt

SEQ ID NO: 135604 - DNA, 201 bp, Homo sapiens
actgtaattgcctttgggctaatgaatgatttttcatttcaaatagtccatacaataaagttacaccatgttcaaaataaaaatatttttaaaagcttctrtgtggagtgccaaggaatagagtaagaatcttctgcattatttaaatcatattttacttaagagttaagaatacccacttgatctgttagtctctggatt

SEQ ID NO: 135605 - DNA, 201 bp, Homo sapiens
ctgaactcatttaacaagaaaaatcagtgaagtccatgttttcatcattctaatttttatctgataaataactacatttagcgtagttaaatttattttcaaaacctgctttgttgattatacaactcctggctttgtgggaatgggacggggatggacgtaactagagaggaaaactagacttaggaacaaagggtgaga

SEQ ID NO: 135606 - DNA, 201 bp, Homo sapiens
ttttattaatttttttttttttaagttgaggtattgctttgttgcccagtctgttcttgaacttctggccttaagccatcctcccacctcagtctcccaaratgctgggactacaagtgacagttgcttttagagtgggtgctctgagatatttgaaggtccttgagaatagttgtatctctttagtagctctaaaacctt

SEQ ID NO: 135607 - DNA, 201 bp, Homo sapiens
gtgaaggtttttatgtctttttatagcctagcaagaaatagatcttcttaaaattctatttaattttcataagatgtttgaatgtatgagtgtttaagtgttttttttttttgttttttttgattgattcatgtttatcctgtgggccatctttaaacgtggtttataataaaaatgcactcaaattaaatgtgcttcttt

SEQ ID NO: 135608 - DNA, 201 bp, Homo sapiens
gaaggtcaagtttgagaaaaacttgacattttgtccataagtaggatgatatttatcaaaaatgagtatgttgcctctgtccccttgggaacaaaagttayaatctattctctttcttccttttcactgtcagctttagatctacagacgtgttatgcctgatagttcagagaaagatgtttttgaatgactaaacaaccc

SEQ ID NO: 135609 - DNA, 201 bp, Homo sapiens
ctggaacagttcccattttgctaaactcaaggatgaacatcttaacactcctagcaactttttttttttttggaattgccctcttcccttagcttttggcrtgccatactattcctggatttgttccagctttcactggttgttctttcttggttgtctttgctggttcctcctccttttcccatctttaaatgatggggg

SEQ ID NO: 135610 - DNA, 201 bp, Homo sapiens
ttttttttttttttttttttttgtgactgagtgtctgtgactctgtcgcccagagtggagtgcagtggcgcgatcttggctcactgcaacctctgcctccygggttcaagtgattctcttgtctcagcctcctgagtagttggaactacagggtgcgccaccatacctggctaatttttgtacttttagcagagacggggt

SEQ ID NO: 135611 - DNA, 201 bp, Homo sapiens
agccaccgcacccggccgaacagatctatttcttataactaatgcttcagaacaattttacttccaaggtgtaaataaaatccccaggaagaggaattgatttttttttaaaaaaagtatatattgggtgctgtatttattcaaagattaactttattatgatcctctagtggcttgagtgagaaattgtctccttgttat

SEQ ID NO: 135612 - DNA, 201 bp, Homo sapiens
tgatattatgatttgtggcctttttttctttttttttaaattatcaatactagggaaagctgtcaagtgagtaaatacagtcatcccttggcatatgcagrgggttggttccaaatctgtgcacactcaagttctgcagtccagtcagtgctgagaaactgatgtaagtgaaaggttgaccttctgtatacacaggtttta

SEQ ID NO: 135613 - DNA, 201 bp, Homo sapiens
aattgttacagatgtgactgagtcttccattttgatgcagattattctgcatttttattgataagctttcattaacattttattttgggggaatttcttayccttctaaaattcattaaatgcataagtcttgctgtaaatttcagtctgagcagactgtggattattcatgtttacaagtaaacttcaaaatcttttttt

SEQ ID NO: 135614 - DNA, 201 bp, Homo sapiens
acctaaatgtttcatttttgggagtgctaataatgtaaatggtattgtttttagtttcaaattccatttatttattgctggtaaattggtgttcatagtattttttttttttttgagacagagtcttgctctgtcgttcaggctagagtgcagtcttgcaatcttggctcactggaacctctacctcctgggttcaggcaa

SEQ ID NO: 135615 - DNA, 201 bp, Homo sapiens
caaaaaggttgggcattgttggtaaggtaccagtagtttaacccacgattgcttttgtatcataactgaaaatgtcagtatggtaaaatttcggtattatwgtgaacatagttttgaccatgcagacttctggaaagggtatttgaagaacctgaatagaaagtgaagaactttcttctttgagactctggagtacaggat

SEQ ID NO: 135616 - DNA, 201 bp, Homo sapiens
tttaaatttttttttccaatctgttcagctttttacttattgttatgatggagtgatgacttacaagctccatccatagggaactggatatcagaagtctgactctttttttttttttttaaagtcttaaacggccttttctgaagactattagtggagaacatgagatggagaacttgttaacttcaggaagcactgatg

SEQ ID NO: 135617 - DNA, 201 bp, Homo sapiens
ttaaatttttttttccaatctgttcagctttttacttattgttatgatggagtgatgacttacaagctccatccatagggaactggatatcagaagtctgactctttttttttttttttaaagtcttaaacggccttttctgaagactattagtggagaacatgagatggagaacttgttaacttcaggaagcactgatga

SEQ ID NO: 135618 - DNA, 201 bp, Homo sapiens
atttttttttccaatctgttcagctttttacttattgttatgatggagtgatgacttacaagctccatccatagggaactggatatcagaagtctgactctttttttttttttttaaagtcttaaacggccttttctgaagactattagtggagaacatgagatggagaacttgttaacttcaggaagcactgatgattga

SEQ ID NO: 135619 - DNA, 201 bp, Homo sapiens
agtgcaatggcgtgatcttggctcatcgcaacctccgcctcccgggttcaggtgattctcctgcttcagcctcccgagtagctgggattacaggcatgcgccaccacacccggccaattttttgtatttttagtagagatagggtttcaccatgttggccaggctggtctcaaaactcctggcctcaagtgatccgcttgc

SEQ ID NO: 135620 - DNA, 201 bp, Homo sapiens
ctgaggcatgagaattccttgaaccctggaagcagaggttatagtgagccaagattgtgccattgcactgcagctggcctacagagcgaggctctgtctcaaaaaaaaaaaaaaattgtctagagtaacatagttattaagtggaagacctgagactgaactccaggtctagctttcttgagatctactgtgttatatcag

SEQ ID NO: 135621 - DNA, 201 bp, Homo sapiens
attactctgagaagaggcctgtagacattatcagactgccgaagggggcctatgacaagaggaagaggctgagagtgaaagagagtgagttaggggaaacrtgtgtacaaaagggaagttgatttacagcataattgtgtgagtagttcgataacctaataactagttagtagaaaacttaagattcacatctcccattat

SEQ ID NO: 135622 - DNA, 201 bp, Homo sapiens
cttttgaaggataagggaggtttagatagttagaaaacagaaaagggaattccagatggagataaaagaaactgagaagctagggcatattcagggaataraaaggagcctcaaagagcaaggggtatattaaggggggctaatgcagaacaggttacagaggcaggcttataccagatcatgagactctttaaagattat

SEQ ID NO: 135623 - DNA, 201 bp, Homo sapiens
agcagccccttgtccttgcttttgtgaaatttctgaataggctgtacagtgatgtcaatcccctattttgtaatttaacacatacaaacttgcacaccccwaattgtacatgaagaaatgcagctgccacagaagttatgagctctgaaatgaggcatatgccactttctggccgcacagtctcttgttcagagtcaggct

SEQ ID NO: 135624 - DNA, 201 bp, Homo sapiens
ctaccttcgaccctctaaaattatcagaattgttatctccagcactgagatttcaaaagggttctgatgtggattcaacccagtttagttagcatgactaraagagaacttgcttataatatggtttcagggacaaagaaaattatgtgactttgggtttcttttaatgagctttaagaatacccccatgaatagtttatt

SEQ ID NO: 135625 - DNA, 201 bp, Homo sapiens
gctaccatggctggctagtttttttgtaatttttgtagagatagggtttcgccatgttgcccaggctggtttcaaactcctgggctcaagtgatccccccrcctcagccttccaaagtgctggcattacaggtgtgagccactgtgcctggccgggttttttttttttttttaaaccttttgacctataaagaaggaatgt

SEQ ID NO: 135626 - DNA, 201 bp, Homo sapiens
ttgcccaggctggtttcaaactcctgggctcaagtgatccccccacctcagccttccaaagtgctggcattacaggtgtgagccactgtgcctggccgggttttttttttttttttaaaccttttgacctataaagaaggaatgtttattcttcagtgggctcttactgtgggagtggtaaaaacattggcacaatcttat

SEQ ID NO: 135627 - DNA, 201 bp, Homo sapiens
gtagtatctaattatagtgttgtaaaattcggtttactaagactacatttgcattatactataagaagttctatctttaaagtacacacgtacctgcatgtttttttttttttactgtaataaatttaaagtattatgtcatgtctgttgaatatgaggaacattttggggcagttgataggatttttgatgctaaacaag

SEQ ID NO: 135628 - DNA, 201 bp, Homo sapiens
ggaacatatgttaagggtatatttaactttgagaaactccccagttgttttccaaatcagctcttccaatttgtgttcttgccagcagtgtatagagttcragttgcatcccatcgtgtcagcacatggtattgtcagtcttttaattttagccattctagtaggcatgtagtgataccctactgcagttttaatttgcat

SEQ ID NO: 135629 - DNA, 201 bp, Homo sapiens
agaagttagatgaagaattaaaggaaaacccaaataatggcttgatgaatttacttgtatattaaaagccatgcacacaattctaaactctggttctttcrtttttaaacccgttgtttttttttttgtttgtttgtttgttttagttatcttgtaaaattccagcccatttacctggcaaggccagggcataagattgcc

SEQ ID NO: 135630 - DNA, 201 bp, Homo sapiens
tacttattttcactcgtgttaatatcttttgattcttctccatgtttttaagcaattggttttgaatgtgaccctgcaaccgtgatctcaattgggtttcttttttttttttttgagacagagtctctctctgtcacccagattggagtgcaatggtgtcatcatggctcgctgcagcctcgaccttatgggctgaagtga

SEQ ID NO: 135631 - DNA, 201 bp, Homo sapiens
gtttccattttttggtgattatgacaaaagtcattataaacatatacatttttatgtagataattttctcatttcttggggaaacgagtggggttattttytaggaatagggttactgggaacatatgttaagggtatatttaactttgagaaactccccagttgttttccaaatcagctcttccaatttgtgttcttgcc

SEQ ID NO: 135632 - DNA, 201 bp, Homo sapiens
cgacacaaagcaatctgtctcttccgtgtcagatacgaagtaatcttcatattcaaacagtcattaattttagttcattttgtcaagagaaatgtttactrtctcttggttcatgcaattaattttatttttaatagagttcatagatgatatccatcagtttgatgtgatgaaaagtcctggcaagcaatattttaagat

SEQ ID NO: 135633 - DNA, 201 bp, Homo sapiens
actcaaacattcctcaagacactgaggactgcctgcagtgacaggttcaggctgactgacagagcccaaggaatgagctcaaaccaaccttttgcacccarcttcctttcaaatgaaagtgacaggggttgaaggctctcatggcttttgaggtaccttttggaagcagacccagaagagattatttggaaacacttggta

SEQ ID NO: 135634 - DNA, 201 bp, Homo sapiens
aaaggtgaggcgtctaatgtctttgacaaaatttatggttgcaatagagcagcctattattttccctcagatacgtgccatttctctcttctggttctatyatgtttacaataagttgctgttcttttgtaattttctgaaacttttttctctgagactgtgttatctaaaacaaaccctaccaaaacaaaaaagtttccc

SEQ ID NO: 135635 - DNA, 201 bp, Homo sapiens
cttttattacgtaatagatgctaattgatgtcttttaagtggttgttggggcaagggactcttccacttttggggtaccagctgtttcagctcttatattkgagagtcaaaagaaaaagcagtagtaggcactaagtgatgtggacctcatcatacatatcgccaattgtctttagcatcttcatatgatttcagctgcca

SEQ ID NO: 135636 - DNA, 201 bp, Homo sapiens
agattgctttgatctctaggaccagttttctttgtatggtcctctcatattatcttaaattttagattttagggttttgttgttgttgttgtttgttttcrtgagaagttttggctacccaccttttttttttttttttgaaaaaatttgggtttagtggtatatgtgcagatttgttatataggtaaattgcatgtcatg

SEQ ID NO: 135637 - DNA, 201 bp, Homo sapiens
aagcatagtacctgataggtagttttttgaccctcactcaccttcctgtctctaccctcaagtaggcccctgtgtctcttgttgccttcagatccatatgwactcaatgtttaacttgcacttataagtgagaacatgtggtatttggttttctgttcctttgttagtttgcttaggataatggcctttagctccatccat

SEQ ID NO: 135638 - DNA, 201 bp, Homo sapiens
tgcatatttgtatatatattactaaatatggtttattttttatacttattgatggtgtatgctcgatttttttttttcataatggtttaagctgtaagaarttgctatcacccttgagctatcctcctggaaacctcttcttttattcccccataaattggtgtgtatatttggttttaatactgtgtctgctggggaaat

SEQ ID NO: 135639 - DNA, 201 bp, Homo sapiens
caactgctgataatgtgagttctccggagtctttttcaaatacagaagtctttttaattcaaaggaaccatcttccagccactgacaattaggatttccartggtgtattattctagtatcaactcaatccaataagcctcttcatggaaagcccatgaagtaattttctaggtttcgaataaaattttaccgtataagca

SEQ ID NO: 135640 - DNA, 201 bp, Homo sapiens
tcctttgttagtttgcttaggataatggcctttagctccatccatgttgctacaaaggacatgatttcactattattttttatggctgcatagtattccgwtgtgtgtacataccacattttctttatccagtctgccattgatgagcatttaggttgattccatgtctttgctattgtgaatagtgccacagtgaacata

SEQ ID NO: 135641 - DNA, 201 bp, Homo sapiens
ttgcattcttgatttgatcctcagcttggatattgctggtgtataggaatgctgctagtttttatagattgatttttgtatcctgaaactttgttgaagtwtatcagatcaaggagcttttggacagagactatgggatttcctaggtgtagaatcatgtcatctgcaaacagggatagtttgacttcctgtcttcctatt

SEQ ID NO: 135642 - DNA, 201 bp, Homo sapiens
taccaaaagctggttgagacacaacaaaaagaaaacttcaggtcaatatccttgatgaacatagatgcaaaaatcctcaacaatatactagcaaactgaayccagtggcacatccaaaagcagatctgccacaatcaagtaggctttatccctgggatacaaggttggttcaacatatgcaaatcaataaatgttatccat

SEQ ID NO: 135643 - DNA, 201 bp, Homo sapiens
cttctccttccactcactcccctttcttcccttcctccctcccctcccctccccttccttccctttcgtttccttccttcctttcctttccttccctttcyctttcccttccttctttaccttcctttccttcctttccttccgtcttactctgtcacccaggctggagtgcagtggcgagatcatggctcactgcagcct

SEQ ID NO: 135644 - DNA, 201 bp, Homo sapiens
agatatgacagttttggccaaagattgaaaatgtagccatgtgccagagagatatatgagcctactaactccatggctattttatgaattattgaaatgtwactcttacccttaaaaaatgttgcatttgtgcttttattctgtttttctgcttctgagcagcctaagacttgcatatgtcaccaggcagctgaaacctaa

SEQ ID NO: 135645 - DNA, 201 bp, Homo sapiens
ataagtgatgttttggtgggcagctttgttgaagactgggttttctttcctttgaagtcatttgaaggactaatgaagagtgagactaaactgtaaaactycattttgtcagatagctggaacattagggacatgcttgggtaggtggtgatcttagatattgaaaactaatcagggaaagtagattgagagagaagtgga

SEQ ID NO: 135646 - DNA, 201 bp, Homo sapiens
ttttctgacaggtgttgagtgtattttgccttactttttggatcaactaacctgttagtattgagttgtatctcacaggaacattttctttaaaaaagctytaggaatctctgctcttgagaaactcttctatgacacctataaacatatcatcagtgttgagatgactgttttcacgtttttccatatttaaggtctctt

SEQ ID NO: 135647 - DNA, 201 bp, Homo sapiens
caagtgtgctgcttaatgcttctaatcccccctccccccaactcaatttctttccagaccttttattttttaccaaggactctcaccaggaaaataataarggacttttgcagtggtgactaattcttatgtttagaggttatcaaagaatgttagagtactttaatagtgaatagcataatagtgctagcacagtcatta

SEQ ID NO: 135648 - DNA, 201 bp, Homo sapiens
tcttaagctttaaattggcattggttgtttccattttttggtgattatgacaaaagtcattataaacatatacatttttatgtagataattttctcatttyttggggaaacgagtggggttattttctaggaatagggttactgggaacatatgttaagggtatatttaactttgagaaactccccagttgttttccaaat

SEQ ID NO: 135649 - DNA, 201 bp, Homo sapiens
acaaaaactgactgaaaatatgtcaggtggttggaatttttctttgaagcaatcatttatgtttttattagtcttttgtttatgcataagaaaggtgaggygtctaatgtctttgacaaaatttatggttgcaatagagcagcctattattttccctcagatacgtgccatttctctcttctggttctatcatgtttacaa

SEQ ID NO: 135650 - DNA, 201 bp, Homo sapiens
tgatttctctggcctaatccccattgttttatgcctcctattacttcctagtctatcctttggattgttaaattagtgccctatctgatcttctttctcamatccatcctccaacatagttactggaatagtcttatttaaataaacatttaaccactactattaatgaccttcctcttgctggaaacattatgaccctaa

SEQ ID NO: 135651 - DNA, 201 bp, Homo sapiens
cagtagaatacagagtgggttggatatgaattactgacaaccataaatatctagacaaccatgtctctctctctctctctctttctctctctctctctctmtatatatattatatatagtttcttgatgatctcaatctcctgacctcctgatctgcccgcctcggcctcccaagctgctgggattacaggcgtgaatcat

SEQ ID NO: 135652 - DNA, 201 bp, Homo sapiens
gtctagatttttgaaggcatctctatttttgaaggctagagtggtgatagaaataaaaattcatcattacgctccatgtgtgaaacagggatttggttcarggtactataattctcccaaatagatgtttatactgttattgatggaaatgtttttcaaggagtagggtagtactaacatttatttcactattcaaggtta

SEQ ID NO: 135653 - DNA, 201 bp, Homo sapiens
gggtatttcactgtttgtccgacacaaagcaatctgtctcttccgtgtcagatacgaagtaatcttcatattcaaacagtcattaattttagttcattttktcaagagaaatgtttactatctcttggttcatgcaattaattttatttttaatagagttcatagatgatatccatcagtttgatgtgatgaaaagtcctg

SEQ ID NO: 135654 - DNA, 201 bp, Homo sapiens
tttattttatttttttaaaagcttgcttgcatgtaatcgttaaaacatttcataaaaggaatgtaacatcttccagtgaattttgggtttagccacatacmgcacatgatgaagagtgaaagaaatggtgacaggtggtgttagttaattttgatgttggggggaatagcatcttgaggttattttttataaaattctctc

SEQ ID NO: 135655 - DNA, 201 bp, Homo sapiens
ctgttattgatggaaatgtttttcaaggagtagggtagtactaacatttatttcactattcaaggttattagcttactgacaagatggtatgttttatcargtctaaatttaaagttcttttgatacttaaaggtcaaggagctgatcgttttttgttacacttaaagaaatcatataactttcctattaaacacttccct

SEQ ID NO: 135656 - DNA, 201 bp, Homo sapiens
agtgtttgggtttctgttcccgttggtttgctgagaatgatggtttccagctttgtccatgtccccattagaagtggtgctttcgggttattaaatattasggtatttcactgtttgtccgacacaaagcaatctgtctcttccgtgtcagatacgaagtaatcttcatattcaaacagtcattaattttagttcattttg

SEQ ID NO: 135657 - DNA, 201 bp, Homo sapiens
aattgcttgtgattaaataagagtttctttactttttttacttggttggaattgggtatcacattgctctgctgttgagactctgtgggatacgttgatargagaaaagctttattgctgccatctgccataagcaaacttattcttctgttgatgccccaggtccagtatctgtaccgagtgttttgccggctacgtcct

SEQ ID NO: 135658 - DNA, 201 bp, Homo sapiens
gaagttacccagtctgaactattcctttatagcatcacaaacggactaagacatatgatttcatatcctttgccattaatatttttaacctcatttgttgrtgtttttcttcatttgcattatcctgtagtaatgcccgtgcaatcagcgtttttaaagacatacctgaaataattatcctacatatatattattaatttg

SEQ ID NO: 135659 - DNA, 201 bp, Homo sapiens
cgagtgaattctgagttcttgctctattagttgtcaagagagctggtgaaaagagctggcacctccctccctctttctctggcctcctctcttaccatgtratctctgcacaagcttgatccccttcccctctggaggcggtctgaggctctcaccagatgcccagtcttccagccaacagaattgtgaaccaaataaacc

SEQ ID NO: 135660 - DNA, 201 bp, Homo sapiens
ctccagcctggacgagagcgaaactccatctcaaggaaaaacaaaacaaaaatgaacagaatagctaccctgatactgtgaatataagcaatcactataatttgagatggaatgaggtttagcatggaatgtatttctcagcattactttctttgatttttgtctcttaaaaacctgtaaagatttgagaactgatcataa

SEQ ID NO: 135661 - DNA, 201 bp, Homo sapiens
ctgcattgcaaaatacatggctaaccatggtgtttgacacttgctcatgcactttttatcacaggagcatcacaaaatgattttttatctgcattgaaataaatgagattttctgttaaaccagtgcagcaattcaacaatcatttagttcctcactgtgtgttttgcacattacttggtgaagtgagaaggtattaaatg

SEQ ID NO: 135662 - DNA, 201 bp, Homo sapiens
ttcccctgagatatgacagttttggccaaagattgaaaatgtagccatgtgccagagagatatatgagcctactaactccatggctattttatgaattatkgaaatgttactcttacccttaaaaaatgttgcatttgtgcttttattctgtttttctgcttctgagcagcctaagacttgcatatgtcaccaggcagctg

SEQ ID NO: 135663 - DNA, 201 bp, Homo sapiens
atgtaaaaagcctcctataccccctggaaatctgagttcttctaaaaggccttttgaattttgccgttgaaaatccatcctcatttgaatgctgcctgtawcattgctttacttatcagtcaaattcaggatataagataccagaaacaaagtagcttttatttatttggaatgaaacaaatcaaaaccactagacaggag

SEQ ID NO: 135664 - DNA, 201 bp, Homo sapiens
ctggataagttttgtgtttttagtagagaaggggtttcaccatgttggccaggctggtctcgaactcctgacttcaggtgatccacccacttcagcctccygaagtgctgggattacaggtgtgagccaccatgtctggccaagggttcctttttcactttaaaattatttacaccactcctattcaacatagtgttggaa

SEQ ID NO: 135665 - DNA, 201 bp, Homo sapiens
atactacaaggctacagtaaccaaaacagcatggtactggtaccaaaacagagatatagaccaatggaacagaacagagcccttggaaataataccacacrtctacaaccatctgatctttgacaaacctgacaaaaacaagcaatggggaaaggattctctatttaataaatggtgctgggaaaactggctagccatatg

SEQ ID NO: 135666 - DNA, 201 bp, Homo sapiens
cccaagtcaagtcataccaataattttctcccattaatcaaaattttggagaaaaaaaaaaaaaaaacaagcgagatttctaccatccactcaaccagatyccatatacagagactgggagcctgactggtaagaaatacttacactcttgctagcttgtcaggctctaggttcacttgaatgtggcgtccagaagagcag

SEQ ID NO: 135667 - DNA, 201 bp, Homo sapiens
gtattatcgatagcttcttaatgtctccaaccagaaaactgagagacctggaaagcctgcacatggatctgggaatatgctgcattgtcttatgctttatktagtagtcagaacaggtgttgctgtagttcggatatttgacccttcaatcctcatgttgaaatttgatcgcccccgagtgttggaagtgaggcctagtgg

SEQ ID NO: 135668 - DNA, 201 bp, Homo sapiens
taaaagaaaaatttcacaaaatgataacttaccttattatttgccacatgctcagaattttccatttcattctattttctttttataaaatgatggtcacmatccactgatggcttcatgatacactgagttgatactctaatgagtttgatggcactggtctaatgttagttgaaagtggattattttatggagaggcaa

SEQ ID NO: 135669 - DNA, 201 bp, Homo sapiens
tctcattctttgtatccttgttatagttgttacagatttatacatagaagtccactttttaatgtcgttcaagcaaaactctgtaaaataggtaacagatyggagaaccttgttgtgttaagttcctgggaaggatttaggtttactggaattttgttcttggagggcaggggatatctttgggacttaaccattctcatg

SEQ ID NO: 135670 - DNA, 201 bp, Homo sapiens
tctgatttgcctttccctgatgatcaataagggccttattctcatgttgtttgtgggttgttgggtatagaaagcatcagccttaaagataacaatacctsttagcttggtttgctatagaaatgttttgggggaaggtaacgcaaggggctatgaggataagacttgaatcttgaagaaaagaacttagccaagaattgt

SEQ ID NO: 135671 - DNA, 201 bp, Homo sapiens
atatactcgtgtgcacaccaggtcggcttcttcaacacatggatgaaacagtatcttttcatgctaccgacctccaaatgttaggtgagtcaaatcaattkctaatttaaaaaaaaaaaaagctcagacttaggagagagcccttatacatttttatgatagaaattttatgttagataaatgttatgattcaaaacaaac

SEQ ID NO: 135672 - DNA, 201 bp, Homo sapiens
tggctacctaccaattacctgctaattaatatttttccagccttgatgtaggtctctgtcttcattcatctctgctctttctgcccttctgtaactcagargtcacagcactggatcgtatctcagcttttatcctactctacattctcctcttttatgaaactcttcttccttggtttctctaactctctatccccaccc

SEQ ID NO: 135673 - DNA, 201 bp, Homo sapiens
aacacacatatgtatttgtgtgtattagagaaaactttgcagtcgtgagtactgtagcattagcatgtttactacaatagcatacataaggcacaaatatrggcactcaaatcatttatgcaccaagctgtcatagagtggatttctacccaggaaataaggaatgttttcttaagtggcacatcttcacatgtgggaaag

SEQ ID NO: 135674 - DNA, 201 bp, Homo sapiens
aagggctttttagcaaggggatagtgtaaacaaagaaaggcttgcagatagaaatgtgtatgtcacattgtaagaagtgactgggtagaattgaacatgtrtgtaaaggggtctgaacatatatatataagagaatagctgaatttgaatgtgcattgtgctagattaagaggcccagtatatgaatttgagcttgacagt

SEQ ID NO: 135675 - DNA, 201 bp, Homo sapiens
attaggagatatacctaatgtaaatgcagcacaccaacgtggcacatgtatacatatgtaacaaacctgcacgttgtgcacatgtaccctagaacttaaartaaaataaaaaaataaaaaataataaaaataaataaaattatttacatgggcttcatgttagttgcataacatttcattgttttggagtaccattttcct

SEQ ID NO: 135676 - DNA, 201 bp, Homo sapiens
tgtcctgatttcattgttcatataatgaacaatggttcattcagaagcaggttgtttaatttctatgtttttgtgttatttttgagaaatcttctttatcratttctgtttttattgcaccgtggtctgagagtgtgtttggaattatttcaattttttttttgaatttactgaaacttgctttaagactcagcatgtggt

SEQ ID NO: 135677 - DNA, 201 bp, Homo sapiens
ttctttttttggtgtatgtgtgtaggaaatttgcttgagagatgtgccactattaaaacttgtttccttttttggtctggatttcagttacttacatgacrtattctaatgtttttcttttccgtaattccacaagcacccctgccactttggaacagaactacatagtctgtgagctgcagcaaaaaataagtgtgctgt

SEQ ID NO: 135678 - DNA, 201 bp, Homo sapiens
ggaggggcaaggttgagatgcaggtcaaaaagctgacttctgatgacttactgaacatgaatttgctgtctttttgaggtgctggaagccttatatcgtckgcaatggacttcaacagatgggctgggggttctcataatatcacctacgagagaactggcctatcagacctttgaggttctccgaaaagtaggaaagaat

SEQ ID NO: 135679 - DNA, 201 bp, Homo sapiens
ttcagcctgtttgtgtcattacatgtgagatccatctattgaaggcaccagacagttgggtcttgcctttttatccatcttgccattctatgccttttaartggggagatttagaacatttacattcaggattagtacgatatatgagattttgatcctgtctttatgttgttggctgtttgctttgtagagttggttgtg

SEQ ID NO: 135680 - DNA, 201 bp, Homo sapiens
cctttcactgatagccagtttcctgatggcatggctctggcagcagctgaactaccgtggggtttcttttccctttcctctgagttgggggtggatggttstgatggaagataaacaaaatcatttactttggactggataaaacttgagtggtatgccttctgcttggaagatccctttgatttggaggggcaaggttga

SEQ ID NO: 135681 - DNA, 201 bp, Homo sapiens
gtgtctttatagtagcatgatttataatcctttgggtatatacccagtaatgggatggctgggtcaaatggtaattctagttctagatccttgaggaatckccacactgtcttccacaatggtcgaactagtttacacttgtgggagggtttttaaataacaaattgatttttttttctaataagtatagaagtgttcagt

SEQ ID NO: 135682 - DNA, 201 bp, Homo sapiens
tgatgatccctattctagaaagcttgttctcccccagtctacatatggaccatccgcactctgcctgcttccctcctccctccttcgtttctcaccttctrcctcttcccctcctcccgtaactattgatggctacctaccaattacctgctaattaatatttttccagccttgatgtaggtctctgtcttcattcatctc

SEQ ID NO: 135683 - DNA, 201 bp, Homo sapiens
tcatcagatgttggcaccttgatcttgtacttcccagtctctggaagtgtgaggaaataaacttctgttgttgttgttgttcttattcttctccctcttcyaattttttttttttttagacaagatcttgctctgtcgccaggctggagtgcagtggcacgatcttggctcactgcagcctctgcctcctgggttgaagca

SEQ ID NO: 135684 - DNA, 201 bp, Homo sapiens
ttacatatcttcatcctgatttctgctaaatcagtacctctccaagtcttctccatcatggtatatgccatcattactcaccaggttgattaggcacaaamcttcctttaacataccaggcacatggctacctctgggccttcacacttgatgatccctattctagaaagcttgttctcccccagtctacatatggaccat

SEQ ID NO: 135685 - DNA, 201 bp, Homo sapiens
attcaaatgacagtctcattttagctgggtattgaaaaaaattgtaggagttgatgtgtacaaggaaaacgtaggcacttcggcaaaaggaagtaacatcrtataccctagggttgctctgtagctaacagggaacctcaaggagcatttaaacaggaaagtaacataatccgggtcatttggcccagacttgagacagat

SEQ ID NO: 135686 - DNA, 201 bp, Homo sapiens
atccatttttccatagctatggccatttaagagtctaaagtaagagccagagactggtctggctcacatggtccttaatgaaattttactaagatcagaartgtcatcttgaggacaagggactcagtatctggtgcctaattctgaaatggatgttgtgaatgaagcttatttatatgagaggataaaagatccttttca

SEQ ID NO: 135687 - DNA, 201 bp, Homo sapiens
agaaagaattaaaggaagactttagaaaatctatcttgttttattgttgttgacacataattaagttggcatggaatccagatgacttaaccataaatttktgtgatagttaagaaagagggaaactgtaatcaggcatctgaggaatagtagccacaagaatattaacaagtaacacttgcttaactggaccctgcagta

SEQ ID NO: 135688 - DNA, 201 bp, Homo sapiens
gcacacttccctttgataaactaattgctttttctttggatgaatacctactagtgggattgctggatcatatggcagttctatttttagttttttttttkgagagatctccatactagttttagtagcttttttgtaggtttttaaagaattttcacattgacagttatgtaatctttgaataaggatacttttttgtca

SEQ ID NO: 135689 - DNA, 201 bp, Homo sapiens
tccagcctgggtgacagagcgagactctgtctcaaacaaaacaaacaaacaaaaaaaaccaccaaaaaaaacaaaaaacaaaaaacaaaacaaaaaaaaamccttaaaaaactaatggacttgagagatgccctggactgactttttaatctactggtcttcaatgactttttctctgactcaacagtagtttcataaagc

SEQ ID NO: 135690 - DNA, 201 bp, Homo sapiens
ttctaacttttgaattatgataaatctacttccagttctttcgcttctgtcttgatgtttactcttggctcttttcagagtactaataaagctttttcagataagaaagaaacgttttctaatgattcacttcaaattattttcttttagtttcactcagtattaaaagtttgtcattagtgcatttgtttcatgtcttgg

SEQ ID NO: 135691 - DNA, 201 bp, Homo sapiens
agttttggatgttattttgggatgtataaatcagacgaaaagtcacaaaatcgtgtgccattcaaaggtggtggaagttgaagaggaagcgtatctaaatracagataatgagtctttatgaagttacgaaaaagaggtcagcacctgagaaacagactaaactagaatagtcatatgacatctgatgttcactgtaaaat

SEQ ID NO: 135692 - DNA, 201 bp, Homo sapiens
tttccttacttatttttacatttatgttcttccttaaaatgaacatcttgaccgagcgcggtggctcactcttgtaatcccagcactttgggaggccgagrcaggcggatcacgaggtcaggagattgagaccatggtgaaaccctgtctttactaaaaatacaaaaaaaaaaaaaaaaaaaattagccaggcatggtggc

SEQ ID NO: 135693 - DNA, 201 bp, Homo sapiens
tccttaaaatgaacatcttgaccgagcgcggtggctcactcttgtaatcccagcactttgggaggccgagacaggcggatcacgaggtcaggagattgagmccatggtgaaaccctgtctttactaaaaatacaaaaaaaaaaaaaaaaaaaattagccaggcatggtggcgggtgcctgtagtcccagctacttgggagg

SEQ ID NO: 135694 - DNA, 201 bp, Homo sapiens
tggctcactcttgtaatcccagcactttgggaggccgagacaggcggatcacgaggtcaggagattgagaccatggtgaaaccctgtctttactaaaaatmcaaaaaaaaaaaaaaaaaaaattagccaggcatggtggcgggtgcctgtagtcccagctacttgggaggctgagtcaggagaatggcatcaacccgggag

SEQ ID NO: 135695 - DNA, 201 bp, Homo sapiens
atcaacccgggaggcagagcttgcagtgagccgagatcgcgccactgctctccagcctgggcgacagagcgagactctttcaaaaaaaaaaaaaaaaaaaaaaagaacatcttaacatatactgccttgttctccatttggctatgaatctatcacactccagcacttgtttcttgttacctgtgtgggtgctttacctgc

SEQ ID NO: 135696 - DNA, 201 bp, Homo sapiens
tcaacccgggaggcagagcttgcagtgagccgagatcgcgccactgctctccagcctgggcgacagagcgagactctttcaaaaaaaaaaaaaaaaaaaaaaagaacatcttaacatatactgccttgttctccatttggctatgaatctatcacactccagcacttgtttcttgttacctgtgtgggtgctttacctgcc

SEQ ID NO: 135697 - DNA, 201 bp, Homo sapiens
caacccgggaggcagagcttgcagtgagccgagatcgcgccactgctctccagcctgggcgacagagcgagactctttcaaaaaaaaaaaaaaaaaaaaaaagaacatcttaacatatactgccttgttctccatttggctatgaatctatcacactccagcacttgtttcttgttacctgtgtgggtgctttacctgcct

SEQ ID NO: 135698 - DNA, 201 bp, Homo sapiens
aacccgggaggcagagcttgcagtgagccgagatcgcgccactgctctccagcctgggcgacagagcgagactctttcaaaaaaaaaaaaaaaaaaaaaaagaacatcttaacatatactgccttgttctccatttggctatgaatctatcacactccagcacttgtttcttgttacctgtgtgggtgctttacctgccta

SEQ ID NO: 135699 - DNA, 201 bp, Homo sapiens
gactagattaaacagtatgttgcagcatgactgctatttcgactggactgtgtacatgccaagaatgaggtctatctcatgagactaagcagtttcggtgccctgccactctgtgaggcagaaccacatatgtttgagcctccacactggaagccagaactttcttcaccactattcattaagattttcataaaattattc

SEQ ID NO: 135700 - DNA, 201 bp, Homo sapiens
gactgtctgttatacaattttataacattctgtgcccagatgcagattatataaagagatgttttcatgttagatttcatgatagattggctagaatgcgmgcttcatcaaacaggagccacatgtgtgtcttgttctcaccattttccccaggttctagcacagtgccttgcatgtggcaggcactcaataacttactga

SEQ ID NO: 135701 - DNA, 201 bp, Homo sapiens
aatcgacaagcttcatccaaagtataaatgtttatgtttcaacggaacctgtggtttgcttcggattagtcccccaagtcagtgataagtgcatgtgtgcrcacacaaacacacacacaactagaaatcctgggaattttaactatctttttctccaaaaaaacccagaaaactcgttgaacataatgttataaccttaga

SEQ ID NO: 135702 - DNA, 201 bp, Homo sapiens
ttgtcattgggtcagactgtctgttatacaattttataacattctgtgcccagatgcagattatataaagagatgttttcatgttagatttcatgatagaytggctagaatgcgagcttcatcaaacaggagccacatgtgtgtcttgttctcaccattttccccaggttctagcacagtgccttgcatgtggcaggcact

SEQ ID NO: 135703 - DNA, 201 bp, Homo sapiens
agtcttgtgtacttcaaaatatatccagactctaccacattgttcacttactgccctaattcaaaccctctatcttgtgtgtagaccaataaaaatagcctttttttttttttttgagagggagtctctctctggcgcccaggctggagtacagtggcacgatctcggctcactgcaacgtctgcctcccaggttcaagtg

SEQ ID NO: 135704 - DNA, 201 bp, Homo sapiens
gttcatgcagtatatatgtataattatgatactactactgccccattaagaaccagtggtctatatccatatatagaataaactttatatatatagaatakatagaataaactttatatgtatagaatatgtagaataaacttctatacttttttggtgacagggtcttactctgttgcccaggctggagtacagtggcgt

SEQ ID NO: 135705 - DNA, 201 bp, Homo sapiens
ataggacaactgaattgctctatttttaatttctctttaaaggtgttaaaaatgcttcttctgtaatattatcagtaaggactttgtttcctttggccatkgggagttaagagcacagccgtcagaagagattcttctgggatactcccctctgacctccacagaagtaaattttctccttgaggaggctacttgcaaatt

SEQ ID NO: 135706 - DNA, 201 bp, Homo sapiens
ttcttagagaattaatgtttggtgttagagtcagaatactgtttcttttattaaacttgcaaaatgtactaaccagataaaacttgaggaaaacagattcmtaataaatttgagtaaggtgtaaaaaaaaagggctgtgtgtgtacatatccctttgtttatgttgtagaaaatagttgtattattaagtggtctgatagt

SEQ ID NO: 135707 - DNA, 201 bp, Homo sapiens
tcaaattgtgaaggacacaacaactaaagaaaaattagatctttctgaagttgtaagtcagagcatacttagaaaaagtatactagtgttttcattatgtkgttatatatagacaactggtatttctaatgattttatttttgagagaatatgcctttgggccatagcaatttgctgtttttcagtgacaagttgaattct

SEQ ID NO: 135708 - DNA, 201 bp, Homo sapiens
ttgttttcactgaaaagacctttgtgagtgacttcttaggatgtttctttttgtcatttcacattgcattcacatagaatgcactcatgcctaatgactgyaaactttctatcacttggttacaccataagttccttgtctacctcccttttaaaatttttagattgtacccatgcttaggtttttggttcttgtttgatt

SEQ ID NO: 135709 - DNA, 201 bp, Homo sapiens
aaaaatcagccaggagtggtggtgtgcgcctgtagtctcagctccttgggaggctgaggcaggagaatcacgtgaacccgggaggcggaggttgcagtgasccgagatcgcaccactgcattccagcctgggcgacagagtgatgctctgtctcaaaaacaacaaaacaaaacaaataaaaaaaaaccatagtaaagtcag

SEQ ID NO: 135710 - DNA, 201 bp, Homo sapiens
tgttgctatagaacatttgcctatcatttggagatgtctgcctggggaggtgtctgttcttactctcatgagcttataacatctagtgacatttagctcartatcttggtgtttgggctctctttatatccagcatcgaaaatgagacaagtattcagaattacataaatctgatctattttcatgcttccttttggggat

SEQ ID NO: 135711 - DNA, 201 bp, Homo sapiens
gaatgccacttaaatctgtctttggtctgaggtgatctaaataatattagtggatttgttgttattattacagtttttattttgagataattgtggtttcrcttgtagttgatagagatatcccaagctctccatttcaataattttgtcattactggaatgttttatataaaactatgcagtatgtagctttttggaatt

SEQ ID NO: 135712 - DNA, 201 bp, Homo sapiens
ccatccaggttgctgtgaatgccattatttcattcctttttacggctgaatagtattccatttctttatccacattttctttttttttgtttgttttttgwtttttgagaccgaaaaaaatatttttcatttttcagatctgaaactctatacctgttaggtgggtcttaattttaagactacagtttaattttaagacta

SEQ ID NO: 135713 - DNA, 201 bp, Homo sapiens
cgctggggagggggctcgggccggccagcagcggggcagcgtctcactgcggcgaggagttgcagagtggaggcggcggatctgtcaccgggacccggccrggaatgagaggtcacgccgggtgccacagctcaaacctctgcaccgttctggccactcttctgcttgccacactgttcctaaaaaaataatagaaatgcg

SEQ ID NO: 135714 - DNA, 201 bp, Homo sapiens
gtataatgttagttgtgggtttgttgtagatggcttttattacatagattggctatgtcccttctttgctaactgtgcttaggattttcatcataaagggrtgatggattttgtcaaatgctttttctgcatctattgagataatcatgtgatttttgtttttgattctatttatagtttattacaaaaagattttgtaga

SEQ ID NO: 135715 - DNA, 201 bp, Homo sapiens
aggaggctgaggcaggagagtctcttgaacccagtaggtggaggttgcagtgagcagagatggtgccactgcactccagcctggatgacagagtgactccwtcttaaaaaaaaaaaaaagaacaaacatttacttttatgaacagatttgtaccaagttgttcctaaattggtacagaattcatgatgcatgtttttgaaa

SEQ ID NO: 135716 - DNA, 201 bp, Homo sapiens
ctggcaactaattattagataaaacaagagttattgttgtctgaattgtctatagagttttgtggtgttagacttagaaattactgagtcaaataaacctmtgtttttctggaagggacacagatatccagagattaatttatttcgcattacatagtaatgaaaaagccaggacatttagacaggtcccctcattagcag

SEQ ID NO: 135717 - DNA, 201 bp, Homo sapiens
gctgtagtggttttaggttgtgagctaggtcctaatcagtacttcctgttaagtgttttctgcatctcacctttggatacagctttttttttttttttttkttttttttttttaggcaaagccttgctctgtcctcaggctgaggtggaatggtgtgatcttcactcactgcagcctccacctcctgggttcaagcaattc

SEQ ID NO: 135718 - DNA, 201 bp, Homo sapiens
cgttgcaataaacatgagagtgcagacatctatttgacatacgaatttcaattcccttatatataagagatctaaaggttctaactggtttagagtacaaaccagaccagaccagaccagaccagaccagaccatatagtttaatggcatcactgggagtagaactcaagctgcctgcttgccaaaattcatagctgctac

SEQ ID NO: 135719 - DNA, 201 bp, Homo sapiens
catgcagtgtttgggtttctgttcccgttggtttgctgagaatgatggtttccagctttgtccatgtccccattagaagtggtgctttcgggttattaaayattagggtatttcactgtttgtccgacacaaagcaatctgtctcttccgtgtcagatacgaagtaatcttcatattcaaacagtcattaattttagttca

SEQ ID NO: 135720 - DNA, 201 bp, Homo sapiens
gttgcaataaacatgagagtgcagacatctatttgacatacgaatttcaattcccttatatataagagatctaaaggttctaactggtttagagtacaaaccagaccagaccagaccagaccagaccagaccatatagtttaatggcatcactgggagtagaactcaagctgcctgcttgccaaaattcatagctgctact

SEQ ID NO: 135721 - DNA, 201 bp, Homo sapiens
ttgcaataaacatgagagtgcagacatctatttgacatacgaatttcaattcccttatatataagagatctaaaggttctaactggtttagagtacaaaccagaccagaccagaccagaccagaccagaccatatagtttaatggcatcactgggagtagaactcaagctgcctgcttgccaaaattcatagctgctactc

SEQ ID NO: 135722 - DNA, 201 bp, Homo sapiens
tgcaataaacatgagagtgcagacatctatttgacatacgaatttcaattcccttatatataagagatctaaaggttctaactggtttagagtacaaaccagaccagaccagaccagaccagaccagaccatatagtttaatggcatcactgggagtagaactcaagctgcctgcttgccaaaattcatagctgctactct

SEQ ID NO: 135723 - DNA, 201 bp, Homo sapiens
gcaataaacatgagagtgcagacatctatttgacatacgaatttcaattcccttatatataagagatctaaaggttctaactggtttagagtacaaaccagaccagaccagaccagaccagaccagaccatatagtttaatggcatcactgggagtagaactcaagctgcctgcttgccaaaattcatagctgctactctg

SEQ ID NO: 135724 - DNA, 201 bp, Homo sapiens
tctctgaattctttagctctacttcttatttttatagcagtagtagggcgtacctactctgtatgcttctgagccttgtggaattaaaaagagtaattgaygtatacctagctacccagaacttcaaatttaatttttttctttattgcaaagagtaatacaggctcattacagaaaaatgagaagacatatataacagca

SEQ ID NO: 135725 - DNA, 201 bp, Homo sapiens
caataaacatgagagtgcagacatctatttgacatacgaatttcaattcccttatatataagagatctaaaggttctaactggtttagagtacaaaccagvccagaccagaccagaccagaccagaccatatagtttaatggcatcactgggagtagaactcaagctgcctgcttgccaaaattcatagctgctactctgg

SEQ ID NO: 135726 - DNA, 201 bp, Homo sapiens
tctcaccttttcccatacatctgtagacacagggaccctaagttggagatcaggttatcacaggaacagagattatgtagcatacctactctgtcatcatstgttcagattacatattacatgctgattttttctctgttgtatgatacgtcctttcagtggcacaccagacattactaataaagtctttattatttggat

SEQ ID NO: 135727 - DNA, 201 bp, Homo sapiens
tgtagcatggcagaactaaagataacattttgccttctttttttgtagcataaaatagtttttggtaccagtatgtcctcaaaaataaaataggaaaaataaagcatttaaggcatttgagccacacctaattaaaaggggaggaggacttcaattactgaatctaataagattcacttatacttttctcctgaagtaatt

SEQ ID NO: 135728 - DNA, 201 bp, Homo sapiens
gagactacttctctaagcatgcttacaatgggctcaaaagagaaatgttatacatgaaggttttataaatgatatttcaacaagaacttttatttaagatkactggttcttaatttttttttatttgaggggaggtgggcatggaaaccattattgaatggcttcctaagaaggctgatatataagactgaaaagtaaaat

SEQ ID NO: 135729 - DNA, 201 bp, Homo sapiens
gatgcaggtagaaacatccaggagctggttgaatatgctgatctggtggtctggaaaaaaccctaggctaaaatgcatatttttaagtcattagcattgtrgaagattgtggaaacactgaactgcatgagaatacccagaatgaatatgtaagatgaggatagttgaggcccaaggatggaacctggggaaatgaacatt

SEQ ID NO: 135730 - DNA, 201 bp, Homo sapiens
atttatataatattttctacactaatataaatatgaaaaatcaaagtttgagttactgccctcattaaaaatgagtacagttgacatttattgtttagacyttgatcaaattgctatttaagcttctaaacttttaatttctattgtgatctaatagctgacaggaggaggttgaactagatctcttaactcccttccttg

SEQ ID NO: 135731 - DNA, 201 bp, Homo sapiens
tgacatgccgagttttgatctttttataatcttaaaagtattgtctcatttctcagagcctgaagttattgggtacttcttttttacaatataatttcccktccgccattagtgttttaattttcactgtggctttgatctcttcaatttctttggaattaatgatacagtgtttagagaaaaaatacaatgcagatttaa

SEQ ID NO: 135732 - DNA, 201 bp, Homo sapiens
tagaaattgaacagttcttttttaaaggctacttatgaatgtttatgaaaagttttcctgtaaatcctttgtttctccgtagccatcttctaggaggaacmaaagaaataatccatttagataaagcacttgttttctaggatgcttttgtaggtgcacagtaaatgtgtttccccttctcccttattccccttcctactt

SEQ ID NO: 135733 - DNA, 201 bp, Homo sapiens
tagttccccctcagggagggctgacagggttttaaagagtttttacttctgccttctttctcagttcagtgcatagctgcaatagaatttaaactaccttygaccctctaaaattatcagaattgttatctccagcactgagatttcaaaagggttctgatgtggattcaacccagtttagttagcatgactaaaagagaa

SEQ ID NO: 135734 - DNA, 201 bp, Homo sapiens
tgtatgtttaccataacaggtaatatgtcagttattacatttttgaaccttttaaattgctttatagcagtgtagggctgctgactttccatttaagtgayagatggaaagccacatgccatggataacatgttgttgtttgctcatatgtttaaataccagttcctagttttattatttctgaatatgatccatggctta

SEQ ID NO: 135735 - DNA, 201 bp, Homo sapiens
ctttgaatgtgagcctctttgctgattcttcttatgttaggttgttttcttcaattgcttactgcctgaatattcctcctgtcttggtgtttcttacaggkactcatagttactatggcaagatgctcctttttagtaactgaggttactattgtatgaaacagaatggctggttttgttttggcttagtatttgagggat

SEQ ID NO: 135736 - DNA, 201 bp, Homo sapiens
agactgtctgttatacaattttataacattctgtgcccagatgcagattatataaagagatgttttcatgttagatttcatgatagattggctagaatgcragcttcatcaaacaggagccacatgtgtgtcttgttctcaccattttccccaggttctagcacagtgccttgcatgtggcaggcactcaataacttactg

SEQ ID NO: 135737 - DNA, 201 bp, Homo sapiens
ccttgaaccctggaagcagaggttatagtgagccaagattgtgccattgcactgcagctggcctacagagcgaggctctgtctcaaaaaaaaaaaaaaatkgtctagagtaacatagttattaagtggaagacctgagactgaactccaggtctagctttcttgagatctactgtgttatatcaggagaaattaattccaa

SEQ ID NO: 135738 - DNA, 201 bp, Homo sapiens
atgacaaaaaaattagctgggtgtggtggtgcatgcctgtaatgccagctacttgggtggctgaggcatgagaattccttgaaccctggaagcagaggttrtagtgagccaagattgtgccattgcactgcagctggcctacagagcgaggctctgtctcaaaaaaaaaaaaaaattgtctagagtaacatagttattaag

SEQ ID NO: 135739 - DNA, 201 bp, Homo sapiens
tggcctccaaaagttctgggattacaggcgtgagccactacgcctggccagtctagcttattctttaaaattttgaaaaatattttttatatatatggatkgggaaaaatcatcgtaagttttttcaaagacatatggaaaatcctctcaaatgtgattttttggatgcacagtggcctgatttctaatacttgataacat

SEQ ID NO: 135740 - DNA, 201 bp, Homo sapiens
cacaaatgggtcttgaattttgtcaaatgccttttttacattattaagacaatcctttatttttggtggggagtttgttaacgtggttaatggtgtttatkggtttttgaatgttaaaccaacttttctttcctggcatgtacccctcttgaccatgagtctttttatatgtagcttggttcactttgcagatattttaag

SEQ ID NO: 135741 - DNA, 201 bp, Homo sapiens
atcattgtgttgtcctcagtgattattgattagaactcctttgttagctgggcagctcagaaaaacatgtggggatcactgtattacagagacaaggattrtagaaaaagggtcaattataaatttgaatttgttttccttgtaagacatttagtatccctaatgatggtgtttctactccaacttacatatcttttggcc

SEQ ID NO: 135742 - DNA, 201 bp, Homo sapiens
aaaagtcaaaaacctcccctataaaggagattcttggtttgatagtggttagtccagctgacctcccaaacctttactacttcttgggttctttgaagaartggctagaaacacagagaacaaaaggccaaagcttggcatgttgtcttcataaacaatcaaaaatattctggaaaattcaaaactctgaatatatagccc

SEQ ID NO: 135743 - DNA, 201 bp, Homo sapiens
tcttgaagtaaatttttcccttccagaagctcagtttggttcttaaaatggctattttgtctttcaagcttctggattgttttactgtattccttggattrggtttcaactttctcctgcatcttgatgcgcttccttgccatccagattctgaattctttgtctgtcatttcatacatctaaatctggttaagaaccatt

SEQ ID NO: 135744 - DNA, 201 bp, Homo sapiens
ttgtttatttttttgtagagatgaggtcttcctgtgttgcccaggctggtctcgaactcctggactcacgtgatcctctcacctcagccttccaaagtacygggattacaggtgtgagccaccgtgcctggcaacttttatacttcttacaaccctgaggtgctaggccttttccacttttggtttggctacacccccatg

SEQ ID NO: 135745 - DNA, 201 bp, Homo sapiens
acatgtccacaggaaaacttgaccctgcagacccttttgaagaaacagaattctgtggcttttaatattcataatgttgtgcaaccaccagcaccactatytaatttcagaacattttgacacccccaaaaggaacctagtaccctttagctccatttaattccctttccccctcatccttggcaactactaatctacctt

SEQ ID NO: 135746 - DNA, 201 bp, Homo sapiens
tggaggtatgccatacttcaattaaagctcaggagtttgagaccagcctgggcaacatggttaaaccctgtctctactaaaaaatacaaaagaaattagcygggcattgcggtgcatgcctgtagtcccagctacttgggaaggctgaggcaggagaattgcttgaactcgggaggcggaggttgcagtgagcaaagattg

SEQ ID NO: 135747 - DNA, 201 bp, Homo sapiens
ggcttctgagttcgcgcatgcgcctctgtgcgtttgtcccatgctggttccgtgagtctggccttaggtgtctcgtgtctggggttgatccgagctgtcgycgccgccgccgcaatgggcaaaacggccaactctccgggttcgggagcccgacccgacccggtgcggagcttcaatcgctggaagaaaaaacacagccat

SEQ ID NO: 135748 - DNA, 201 bp, Homo sapiens
gtttttgtggttggtactttgaggagaacagaaagtgagagaagaaaaaaaatattgtcctctctaagcaaaagagaaaaatgagagtggatgggtctgtaagtccatattgtgagttcatcagtaatgctagatcagattttgggcttcagttcattcagcctttatcatttactgccaggttgttagagctctcctaaa

SEQ ID NO: 135749 - DNA, 201 bp, Homo sapiens
gaggctgaggcaggagaatcgcttgaaccgtggaggtggaggttgtggtgagccaagttcatgccattgcactccagcctgggccacaagagcgaaattcygcctcaaaaaaaaaaaattaagctttgatagggtgaatgcctccaccttgtttatgtataaaggagtttcagtgagttacaaagaaatttaagttaacaa

SEQ ID NO: 135750 - DNA, 201 bp, Homo sapiens
tttgaatttgtgaaaatatttgataatatttctctatagcagtgttttttggtgcagatacaaatatgttttcttaaaaatatggatgctaatttccgttcccccccccctcccatttccctttctctcacggtcattctctttcccttccattctttcactttcccactcctcccacctcttctgctctcatcttataaa

SEQ ID NO: 135751 - DNA, 201 bp, Homo sapiens
ggtgaagcggcataatgtgtttggattggaccttaaagacgagaaaacattacaggtaagtttactcccagtggagggtcttctattacattgtcttactrtgtgcttattgttgccttttggggactgagagaaagtgaaaactaagaaacttagactgggtttctttgcaatgaactcttcctcctttcccccatactt

SEQ ID NO: 135752 - DNA, 201 bp, Homo sapiens
agctgaaacctaaaacatgttcaaggctttcagggatgaatgaccttaaagctcaggatagtctaatttgagacctatgttcttattatcagttcagcccygagcagtagtaactgggagttgcgggctgcccgtggactctttgaaagttatggctctgctctccccacaaaatgtgttatgtatatttactttatattt

SEQ ID NO: 135753 - DNA, 201 bp, Homo sapiens
ttataatagattccatacaaagatcttttagagttttaaaaaaatttcatctctttaatttcaaagatattatttattataaggtactattagattgtttaaggggggggggggttgaaatcctgtgatccagtcccaccacctgaagtttcctctatatatgttttttatagtacgttctttatattctactaactcact

SEQ ID NO: 135754 - DNA, 201 bp, Homo sapiens
cccttgtaatacaaaagctgccatagaaatacttaaatgaatgggtgttgtttttcagtaaaactttaattagtgaaacaggtggctgatgggctttgtcmcctaggccttaaaccttttaatttgtcctctgtacttctgctagaatgattctttccaagatgaagatctaatcattttactgccgattagaacccttcc

SEQ ID NO: 135755 - DNA, 201 bp, Homo sapiens
tataatagattccatacaaagatcttttagagttttaaaaaaatttcatctctttaatttcaaagatattatttattataaggtactattagattgtttaaggggggggggggttgaaatcctgtgatccagtcccaccacctgaagtttcctctatatatgttttttatagtacgttctttatattctactaactcactg

SEQ ID NO: 135756 - DNA, 201 bp, Homo sapiens
actcccagagagagagagccgagcacagtggctcacgcctgtaatcccagcactttgggaggccgaggtgggcggatcacaaggtcaagagattgagaccrtactggccaagctggtgaaaccctgtctctattaaaaatacaaaaattagccgggcgtggtggcgggcgcctgtagtcccagctacttgggaggctgagg

SEQ ID NO: 135757 - DNA, 201 bp, Homo sapiens
ggtgttcagaaagttgacctccagggagacagtgttagataagagcatgaacatacaattaaaatgattaaattaaaatttatttttggaacacttatttycttaaatgtgagaatgaaatctctaagcatatgctttcttttctttttcagtttaaacctttttagaaatgagactgggtagattccattttagctcaac

SEQ ID NO: 135758 - DNA, 201 bp, Homo sapiens
tcaagtaagataatctatgttaaagcactttgtacgtttgttgtaggagaatgccacatcttatttgtgtttcttgccattatcaaaaccaaaacaaaaayaaccagtcaggtaacatttctgttttgggatattttcacctgacctacttgtaaatgagttttccaactaactgttttaagaaaagtcattcctgtttta

SEQ ID NO: 135759 - DNA, 201 bp, Homo sapiens
atttggaagattgtatatactagaattttgacagtggtaattgctgttgctgctagcatttgcatagtagcgccagtaaagtttttctgtattcttccagkttggctacacactggaagcatacagcttccatctgcttatgcttctcataagctgtatgattacgtgctaagatcttatgatgtcagctttagtgagtcc

SEQ ID NO: 135760 - DNA, 201 bp, Homo sapiens
tgtttttcttaagatatttaattaaggtgacaggtacgcatgctcgggaagttaaaaagcaatttctggaaagtgttccaagttaaacctgaaggaggcaycagaaatcctgaaggaggaatgtagcaatcaaaaacattgtgtagaatgttcgtattggcagtatcaatagaggttttgccttatggtcctccttaacca

SEQ ID NO: 135761 - DNA, 201 bp, Homo sapiens
catgtgggtaaaatactccccctttctgcccagggctttaagagaggagcgtgcatgcgtgtgtgtgtgtgtgtgtgtgtgtgtgtgtgtgtgtgtgtgtstgtgtgtctgtgtgtgtctgtgtgtgtctgtgtctgtgtgtgtctgtatgaggatgatagggggttcttgttttgagcaggctggaagggtggagaaaga

SEQ ID NO: 135762 - DNA, 201 bp, Homo sapiens
aaaactggaaatcctagagctgaaaagtacagttactgaaatttaaaaaattgccaggtgagctcaaaagcagtttggcattgtcagaagaaaggaacagyaaacctgaacacccagtagaaattgtcctgtatgaggaatagaaaaaaaaaatgaagaaaaaggaacagaacctatgagacctgtgaagtagtccagtat

SEQ ID NO: 135763 - DNA, 201 bp, Homo sapiens
tattcaccaatatttctcaatatttgactttggaaaatttgtaaccaccaacagcttcccaatactaaaaaggcttgtttttttttttttggttttttttktttgtttgtttgttttaaagacatcgatggtggataacaaatgtgactttaaaaaaattatataatgcaatgtgtcaacatttagagatctgcataatct

SEQ ID NO: 135764 - DNA, 201 bp, Homo sapiens
gtgggggacacaaacattcagaccgtagcatgtttttgtaaggcatcctctcagtgttaattaaactgctgtcttcttggtttctatatttaagagaggtytgatgtgtacgactaagcttctgtgtatattctcttaaatatattatgtacctgtctcagtcactttgggctgcggtaacaaaattccatagactagtaa

SEQ ID NO: 135765 - DNA, 201 bp, Homo sapiens
aaaagctttgcctcttaatactatcactttgggggttaggtttcaacacatgaattttgtgggggacacaaacattcagaccgtagcatgtttttgtaagrcatcctctcagtgttaattaaactgctgtcttcttggtttctatatttaagagaggtctgatgtgtacgactaagcttctgtgtatattctcttaaatat

SEQ ID NO: 135766 - DNA, 201 bp, Homo sapiens
actaccacacctggctaatttttttgtattgtagtagagacagggttttctccatgttgcccagagtggtcttgaactcctgagctcaggtgaactgcctkggcctccaaaagttctgggattacaggcgtgagccactacgcctggccagtctagcttattctttaaaattttgaaaaatattttttatatatatggatt

SEQ ID NO: 135767 - DNA, 201 bp, Homo sapiens
acttgtattggcgctgttgaaacaccctggcttgatttgcctaaaaataatttggagagtggttagatttggggaggagagttgaggatgtagaagagacmaaactggctgtgacttggtaattgttgaggctgagtgaaagtctctaacttttcttttgtatattttgaaattttttataataaaaataagtaaaaacaa

SEQ ID NO: 135768 - DNA, 201 bp, Homo sapiens
gcttttgttgcattccacaaagtttgctaagttattttcatttttatttaattcaagagaaattttaaagtattttgattttgttttgacttgtgttattyagaggtgtgtttaatctccatgtattttagaattttccagttacctttctgctatttctatgttatgttatgacagagttttgatctgtcgcccaggctg

SEQ ID NO: 135769 - DNA, 201 bp, Homo sapiens
tcttaaacggccttttctgaagactattagtggagaacatgagatggagaacttgttaacttcaggaagcactgatgattgaaagaatgaaatctcttggwtggaattacttttggggttgtctatccatttcagagagttgtgatctcctgtcactaaggatgtgtacattcagcatcagtgggatccatcagaatctta

SEQ ID NO: 135770 - DNA, 201 bp, Homo sapiens
tttctatgttatgttatgacagagttttgatctgtcgcccaggctggagtgcagtggcacgatctcggctcactacaacctccacctcctgggttcaagcrattctcctgcctcagcctcctgagtagctgggattacagacacgtgccgccatgcctggctaatttttgtatttttagtagacgtggggtttcgccatgt

SEQ ID NO: 135771 - DNA, 201 bp, Homo sapiens
ggggtttcgccatgttggccaggctggttttgaactcccgaccccaggtgatctgccctcctcggcctcccaaagtactgagattacaggtgtgagccatygtgcctggcctctgttatttctagtttaattccattgtggtctgaaagcagatattgtatgatttatattattttaattttgttaagatgtgttttatgg

SEQ ID NO: 135772 - DNA, 201 bp, Homo sapiens
aaatgcattttcaatttgtgataggtttatcaggatgcaacccctttgtaagtcaaggagtatctgtatacagtagtccttttgtgataataagggacatrttttagataaatagtctatatagagttcctaaatgtaatttaattaaaaaaattttttttgccaccactctatatggtgctgaccaatgttgctttatct

SEQ ID NO: 135773 - DNA, 201 bp, Homo sapiens
ccagttgattgatggtattgttgagttcaactatgttcttactgactttctgcctgctggatttgtctattcctgatagtagggtgttgaagtctctaatkataacagtggattcatctttctggttgcaattctatcagtatttgcctcacatagtttgatgctgtattgttaggagcctatacgttaaggattgttgcc

SEQ ID NO: 135774 - DNA, 201 bp, Homo sapiens
atgggtcctcctggagtttttatttctcagacttgtccacattgaggctccagcaggttttatcaattacagttgagggtctctcacccaggcactgcctyccccagttgtttctgctcatgactcagctcaagtaagctgtgatccctgtactcacctctctctttcctgtgttgggactgtggtttgtcctgtgtcgtc

SEQ ID NO: 135775 - DNA, 201 bp, Homo sapiens
cctcccccagttgtttctgctcatgactcagctcaagtaagctgtgatccctgtactcacctctctctttcctgtgttgggactgtggtttgtcctgtgtygtccatctttatcatggataaaagaagagttttaaatttttttttccaatctgttcagctttttacttattgttatgatggagtgatgacttacaagctc

SEQ ID NO: 135776 - DNA, 201 bp, Homo sapiens
cactgggtaccatggaagcccaaaggaggtacagcctgtgtcctactcagcccgactcctactgtgtgcagataattttgagctgagttgtgtggagaatrggatactaagaatgctgtttggaaagatgctggagcatctctattttgtgactgccttctcttccaaattatttggtgaaattttcttttaatcctgttc

SEQ ID NO: 135777 - DNA, 201 bp, Homo sapiens
taaaagatgtgaaattatttttcattatgctttccaatctttctaatctttgaattaacagatatttgagttcttatcattttcacctgtcctttattgcmatttattgcatttacaagatctttgcatctcccatagcatatcagcaatgagccagagagtagggattcagaggttggattctatttcagcagatagatg

SEQ ID NO: 135778 - DNA, 201 bp, Homo sapiens
acgaatttaagaaattgagctttgggctgggcgcgttggctcacgcctcaatcccagcactttggcaggccgaggtgggtgtatcacctgaggtagggggktctgagaccagcctgaccaacatggagaaaccccatctctactaaaaatacaaaactagccgggagtggtgtcacatgcctgtaatgccagatactcggg

SEQ ID NO: 135779 - DNA, 201 bp, Homo sapiens
agcaaacatccttcaaacttgcagttgaaacctaggagctttggaagtagtacacacatttaaaaatattagattaattttggtatgtcatgacttactgmatgcctaagaggtcattcagttatctatcagaaaatatgaaacattggaaagatgttttttcactggtttgtgcatacaacggatgagccttccagaaca

SEQ ID NO: 135780 - DNA, 201 bp, Homo sapiens
ctctcttaactttagactgtctaattactcctcaaatgcactaagcagattctggccttcgctcttggtatcaccacatagctatgtgatttgtttccttmctgtctccagatttctgctaaaacataactttactagagaagcattcactgatttcctgatgcaaaatagcaacctcctcttatcctgtattctcttacc

SEQ ID NO: 135781 - DNA, 201 bp, Homo sapiens
cacacatttaaaaatattagattaattttggtatgtcatgacttactgcatgcctaagaggtcattcagttatctatcagaaaatatgaaacattggaaaratgttttttcactggtttgtgcatacaacggatgagccttccagaacactgattatagaaaagtgtgttgaaataaatgatgtgatttattggttgtcac

SEQ ID NO: 135782 - DNA, 201 bp, Homo sapiens
aagagatagttcccatgatcctccaaaaagttcactccccgaaataggctaagaaagaaaaaaactcttgttgccacagaagtcaaggataacatttgtayatacagtgcctccagtatcccacaaatttgtgagggggctgcccatcacagacccattaatccatgacactgggtaggcccacctaggattggactttcc

SEQ ID NO: 135783 - DNA, 201 bp, Homo sapiens
ccttggtttttatagtgttttcaatcagaggaaatgggtattacttgtctgagatagtgttcttaatgcttatgagccgtattttttaggttagatgattsatggattttaatagcctgccagtcacttcatagacaagtcttcttaggagaggaataatgactataatgaaaataaagatatcaaaccatttatattatt

SEQ ID NO: 135784 - DNA, 201 bp, Homo sapiens
cagtaaatatttgttgaaaaatgaatgtcatatattagttagctttaggaaataaaactgtaatgaatgtgtagtctgttttatacctaattatatgctgstaatttttctcctcttccttgtctccaggagaaaagactgaaagaaagggaagccagaagagaagccaacaagagacaagcaaaggtaagggtttatata

SEQ ID NO: 135785 - DNA, 201 bp, Homo sapiens; identical to SEQ ID NO: 24057

SEQ ID NO: 135786 - DNA, 201 bp, Homo sapiens; identical to SEQ ID NO: 24058

SEQ ID NO: 135787 - DNA, 201 bp, Homo sapiens
aatacaagaatggtctaatacacctggctaaaataatggcttcctactacagatattttgactactgagaaatccaaagatatatcagctcagaattccasgtccagtccacctttctaaaatacttaaagtcctctgctttccttctgctaacacaaacaatggctactgctgtcactgactgagtgcctgcattagcca

SEQ ID NO: 135788 - DNA, 201 bp, Homo sapiens
gtacttgaactgttatcttgtttctggtccagtgctctttatcttattccatgttaccctcttaaagaaaaaatagtgtctaaaatgttttctgacaggtrttgagtgtattttgccttactttttggatcaactaacctgttagtattgagttgtatctcacaggaacattttctttaaaaaagctctaggaatctctgc

SEQ ID NO: 135789 - DNA, 201 bp, Homo sapiens
aaacctcttttcttataaattacctggtctcaggtatttctttatagcaatacaagaatggtctaatacacctggctaaaataatggcttcctactacagrtattttgactactgagaaatccaaagatatatcagctcagaattccaggtccagtccacctttctaaaatacttaaagtcctctgctttccttctgctaa

SEQ ID NO: 135790 - DNA, 201 bp, Homo sapiens
atctgatgaaggataaagaagtatttgatgtgagcaagttacctatacctgaatatgccctgtaagtattcataatatagttgtaatagtgaatcctcaargttagagggaattaattaattaatttagagatggggtcttgctatgttgcccaggctgtctcaaacccctgtgctccagcagtccacccacctcaacttc

SEQ ID NO: 135791 - DNA, 201 bp, Homo sapiens
gactggtaagaaatacttacactcttgctagcttgtcaggctctaggttcacttgaatgtggcgtccagaagagcagaggggctttggtatcctgctcacrgtgtcaaaagagtaggggcaaatagagaacttcccctttgccttctgaaggtttgttgaaagtcagctgacaaaaggtagattaatagaagaaatggcat

SEQ ID NO: 135792 - DNA, 201 bp, Homo sapiens
gtccttcacatattttttttttttcttcctgccaatgcgtgttttaactgtactctctaggcttattgtggaaggaattggtttaggcacattttctgtgrtgtgttattgtgagtgataataaatgcatatactggtatctgtttagttgccagtctcctttagctcaggatgctaacccatacatgttttagatttgga

SEQ ID NO: 135793 - DNA, 201 bp, Homo sapiens
taaattgttttcttcctttgtggtgatagtttgtgatttgaaataaaccatttatgccaaaaagaaagttatatcaacttcctctttgtggcaattcactmtttaccaagcaggactggaatgtttgtatacatcgtgccacccaaatgtaatcgttcagaggaagtgactcagaactttaagatgcaaattaattgaaag

SEQ ID NO: 135794 - DNA, 201 bp, Homo sapiens
attaaatgttcccctatcgaagtccacttgtaaatgactgcagcaaactgtaaagggatggaatagagaatttcagcacttgaaggttttcactgcacaartgaattttatgaaaatctaatgatcagatgttaattatgaactagttaattggttttcttgattaaaaaagaaaggtgagagcatgagaataatacactt

SEQ ID NO: 135795 - DNA, 201 bp, Homo sapiens
aaatattttctttgattttgtcatgctgaatggaaaactgattatattaaatgttcccctatcgaagtccacttgtaaatgactgcagcaaactgtaaagrgatggaatagagaatttcagcacttgaaggttttcactgcacaaatgaattttatgaaaatctaatgatcagatgttaattatgaactagttaattggtt

SEQ ID NO: 135796 - DNA, 201 bp, Homo sapiens
gaaagtaatagaaaatagaaatttcatgcaaatgtatgcagtggatagttagttatgattcccaagtattcatctacccaaagtaaatgtctcctgtgcaracaaaatattttctttgattttgtcatgctgaatggaaaactgattatattaaatgttcccctatcgaagtccacttgtaaatgactgcagcaaactgta

SEQ ID NO: 135797 - DNA, 201 bp, Homo sapiens
acgaaataaactgtctttcaaatatgtcatcgccagagattgtagtctcaaatatttatctttaaataattacatatggataggtgatttaatcttagtcyagcagctcaatgatgtatggaaattctttttgtcagtcccaccgggggagcattgattgctaaacagaatattggggactgatatgcaagattaggtatt

SEQ ID NO: 135798 - DNA, 201 bp, Homo sapiens
aagatctgagtttctcacttacgtttttttttttctctctaaagaacttttaaacatattttgcaaggcaattctactggcaataagttttgtcaattttkgtttgtctgaaaaagtgtttctctttcacttttgaaggataattttgtgggatacagagttccaggctggtggtttttctctctccacactttaaatatt

SEQ ID NO: 135799 - DNA, 201 bp, Homo sapiens
cacccattgttgtcataatttacactcaggattgtgctagttgaatttgtgagcagcaggcatggagccagaattctccagaacactttgtggggagggcrccgggaagagtgaagagctaacagggtagtataaaaatccccctaaaattagcaaagatgagtttctcagacctaacagcagtatcctcaatttgttagt

SEQ ID NO: 135800 - DNA, 201 bp, Homo sapiens
ctttgttatgaagatctgagtttctcacttacgtttttttttttctctctaaagaacttttaaacatattttgcaaggcaattctactggcaataagtttkgtcaatttttgtttgtctgaaaaagtgtttctctttcacttttgaaggataattttgtgggatacagagttccaggctggtggtttttctctctccacac

SEQ ID NO: 135801 - DNA, 201 bp, Homo sapiens
tgaagcggcataatgtgtttggattggaccttaaagacgagaaaacattacaggtaagtttactcccagtggagggtcttctattacattgtcttactatrtgcttattgttgccttttggggactgagagaaagtgaaaactaagaaacttagactgggtttctttgcaatgaactcttcctcctttcccccatacttaa

SEQ ID NO: 135802 - DNA, 201 bp, Homo sapiens
tggcatgaggatccttcgttaaaattcttaagatactgctttctgattgattaaattataaggaacagttgtaattatttaaatataagttttactcttartgcgacatttgtttatgggaaccaagccagtgtcttaaatagaaattgaacagttcttttttaaaggctacttatgaatgtttatgaaaagttttcctgt

SEQ ID NO: 135803 - DNA, 201 bp, Homo sapiens
cctcccagactgaagtgattcttgtgccttaccctcccaagtagctgggactacaggcacacgccaccttgcccagctaatttttctatttttagtagagrcagagttttgcaatgttggccagggtggtcttaaactcctgacctcaagtgatctgcccaccttggcctatcaaagtactgggattgcaggcatcagcca

SEQ ID NO: 135804 - DNA, 201 bp, Homo sapiens
tttgaatctccgtttaaagagttctactaattggcaggtttcttctctccttcactttcactactctcaccagcataacatggaactgattctacagttcraaaatgcaagataggaatcttctccttatctcatgtaaacacttactttatagtaattgtttcaaaaattttacccccaaatgattaccgagcttacaca

SEQ ID NO: 135805 - DNA, 201 bp, Homo sapiens
tgatagaatttaatgatttctaccctttctctgtgaaccccataaatccttgttcttagtcagtgctagaagctttccatgcaatacgtattagccagctkggtttctctctaattacttacagtgaacttcatttgtcactgttgggcctgacatggtatacctgtttgttatttgagatcttaaggtgcagatgacttt

SEQ ID NO: 135806 - DNA, 201 bp, Homo sapiens
gagcttacacatattagggcataagatgacctaggtctctttgggttatcgacagggttctaagagggccccagtgacactacgtaatacctccttatgcygctcttattgaaggagggtcacaaattcctccagaccatattcagatctgctcatctccatccagagaggttttagcacatcacagcttgctcctggcct

SEQ ID NO: 135807 - DNA, 201 bp, Homo sapiens
ggatagtaagtggtagtatctaattatagtgttgtaaaattcggtttactaagactacatttgcattatactataagaagttctatctttaaagtacacaygtacctgcatgtttttttttttttactgtaataaatttaaagtattatgtcatgtctgttgaatatgaggaacattttggggcagttgataggatttttg

SEQ ID NO: 135808 - DNA, 201 bp, Homo sapiens
atattgattttgcctttcttccttctttttatctaacttcgagctcctcaagttgcatatggaaaacttgagtgtatggtactgtatgggtggtaaaaggsatactctagggtaatttgatatgttgattttcaccttgcctgtcagctttggaactgaatgcccatggaagttgtgacttcattctgtgatgcagttcct

SEQ ID NO: 135809 - DNA, 201 bp, Homo sapiens
atgttgtcagtggaatagtattaagaggttggggccttaagaggtgattaggtcatgagggcaccttcctccttaatgggatcaagacccttataaaaagscttcttgtagtgttcttccagcttgctcttctgccatgtgaggacacagtttttccttcttgccctctgccttctgccatgtgaggatgcagcaagaagg

SEQ ID NO: 135810 - DNA, 201 bp, Homo sapiens
tccagggatgttcttcttgggagtctccaaatagtgcatcagtgtatcctttccccaggtgatgcctttgttcttattggtgtctgtgtaagagtatccarcggcctcacctgtctcctgcctggagagactatggagattaggcccagtcttgtgctggcctcccttttgcattgtgtggcactgggcacacttctgaac

SEQ ID NO: 135811 - DNA, 201 bp, Homo sapiens
ggtcttgatatactgttgggcagagaatctgctggtttttatttggcataacaaatgattgaaaacagtgatgttttgttacagttctaataaggccgacrtggtagtgattcttagggtgcataaattctaggctctagaaaaaagtgccttagtaaactgggcactgtaaatgtccctggactatataagaagaaattt

SEQ ID NO: 135812 - DNA, 201 bp, Homo sapiens
tgttgatgttattcaccaaggtccatagtttacactagggttcattcttggtggtgtccattctgtgtgcttgcacaaatgtgtaatgatgcatacctacyattttaatatcatatggcagttttcactgctctaaaaatcctgtgctctgcctatttattcccctcccctccccctgaacctctgacaactactgatctt

SEQ ID NO: 135813 - DNA, 201 bp, Homo sapiens
accttaaggtacctcccacccacacacactttcagtctcttttttagtttatccccaacagtgcttctggagttatccaaaaatatagatgagatcctgtkgtcttcacattgccctaatggttcccatttatctacagaataaaaatccaatgtggttggttgtctttactaagatagcgagaaaaatatttcccatctc

SEQ ID NO: 135814 - DNA, 201 bp, Homo sapiens
ttttgtgtggaatgtgttttcttacctacttcattgtgttgaatttgtgaaagaaacggttttgatatgtcttcagaaattgcctgcattgatccatgttwaaaaaaaaaaaagaatctcacactataagagttagacataaattgtgtttgttagtgaagggtactcctatcaattcctttgtttctcattttctttgaa

SEQ ID NO: 135815 - DNA, 201 bp, Homo sapiens
actgaatgcttggtacacatataatccttacatgatagtgacattgtctggccttgactagaagactaagaaactaagtgtttcagttgactggggggaaraaaaatccctgtagagaaataggatccaaaagagaaaaagtagaaagacttttttttttttaagaaaaaaatgataatccaaatatcagcttttaattaa

SEQ ID NO: 135816 - DNA, 201 bp, Homo sapiens
tccaagttgcttacactctctccttctctctcaagaatgccaatgagctgtaaacatggtctcttcacataatcccatattactcagtggtgttttttttwatttttaattcttttttatttttgtctgggttgatttgagaaattggtcctcaagctctgagattctttcctcagcatgctctattctgctgttaatact

SEQ ID NO: 135817 - DNA, 201 bp, Homo sapiens
agaagtccctggctgacagccagcaagaaaatggggacttcagtcctacaaccggaaaggaagtaaattttgccaacaacctgaatgagcttggaagtcargttttctccagagcttccaggtggggacttggcccagctgacattttgatttcagacttgtgataaccctgagcacagaacttggccatgctgtgccagc

SEQ ID NO: 135818 - DNA, 201 bp, Homo sapiens
cagctcattttgttatcagggcagggacatgattttgttcactgcagcatgtccagaacctaaaagtgtgtctgctatacataataggtgctaaataaagmtttgttgaatgaagacatctttgtcttaatccatttgtgctgttataacaaaataccttagattgggggtaatttataaacaacagaagttaactgcttg

SEQ ID NO: 135819 - DNA, 201 bp, Homo sapiens
cttcagattactttttattaaggaaacaaaatattactgaaaaaaacttttgccaaagtacggatgaccataataaatgtcaaattctgtagctcacattrtaagttgaattacagcaatatatggagaaactttaaaaggttatttaatcatagaatagccatttacctgtgtgcttttatggttgctatgagacaagta

SEQ ID NO: 135820 - DNA, 201 bp, Homo sapiens
tcctaattggatgagattggcttaaactaaagcattttactaaggatgctgcatggatgtgctgctgcactggtaatagactagacgtgggatatacataytgatgtgtctgacaagatttatcaaattctatcgtttaaaaaaaaaaaaccactttttttgaaagctaaccaatagaccctggtgttcatctccatggtt

SEQ ID NO: 135821 - DNA, 201 bp, Homo sapiens
tttcttcaagacaaacaagcatttttcagttatttaaccaccaagttaagtttgaatctgtgttcttgtgtcgttgttttccagcaaacattattccatgwgtcatataaaactaatctcattcatgactgatctcacccattgctaatctcattcaaaactggtttcatcaggcgaaaattcatgtgctattctggacat

SEQ ID NO: 135822 - DNA, 201 bp, Homo sapiens
ttgaatttatcccattggctaattttcttatattttggtctaaactcatttttaatttctattatattgtacttttcaacctcttaatttacagtgtttcrtctcctatgtacgatctgtatatctgatgaaggataaagaagtatttgatgtgagcaagttacctatacctgaatatgccctgtaagtattcataatata

SEQ ID NO: 135823 - DNA, 201 bp, Homo sapiens
gcctcctgggttcaagcaattctcctgcctcagactctcgagtagctgggattacaggtgcccgccagcacgcctggttaatttttgtatttttagtaggsacagggtttcgggtttcacagggtttcaccacgttggccaggctggtctagaattcctgaccttgggtgatccaccctcctctgcctcccaaagtgctgg

SEQ ID NO: 135824 - DNA, 201 bp, Homo sapiens
caaaaatgctcttggaagaaaggacattaaactatacacgatactatgctttttgcttttgctgggccaatgatatgaccttgagcaaatcatttaaaatytctgggtcttcaacatttcctcatttattcttaaaatgttgcgtccatatccaaagttctgttattcaataatgtctttgtccattcgttcctctttttt

SEQ ID NO: 135825 - DNA, 201 bp, Homo sapiens
taaagaagactcgtgtttaattccaccttgtgaagaaacatgttttaaaaccccataacaacttcatggtgacatctataatgtaagcagttaatcctctrttgtgtagataataaggtaatttgaaacatgctcttaagttgttatatgtaaatagagagtcaaatttatttattttcattgatggatgggaagtgagac

SEQ ID NO: 135826 - DNA, 201 bp, Homo sapiens
aaaagattgagcacctagtcaatgaatgttgggctgaaatgagctcagcaatctgtttgactaaagaagactcgtgtttaattccaccttgtgaagaaacrtgttttaaaaccccataacaacttcatggtgacatctataatgtaagcagttaatcctctattgtgtagataataaggtaatttgaaacatgctcttaag

SEQ ID NO: 135827 - DNA, 201 bp, Homo sapiens
agataatcactccaagtaacttaagagttctctgaagtcattttcttgctttcctataccataaaacctacatgaaatggtgtttgttcaaaatatgcccycacacctttacatctgggaacaggcagaagcattcacattttctgtgctcatttgaaaagataactctcgacgccagggcattccattcatgttataatc

SEQ ID NO: 135828 - DNA, 201 bp, Homo sapiens
tagagttcctaaatgtaatttaattaaaaaaattttttttgccaccactctatatggtgctgaccaatgttgctttatcttatggtagaatatccttcaaragcaaaccagtaggagatccctaacaaatagttgaattgtcaggtctaaatacttttgtatttttaaactctgtttacttcctattggagaagtgaatag

SEQ ID NO: 135829 - DNA, 201 bp, Homo sapiens
tcaaggagtatctgtatacagtagtccttttgtgataataagggacatattttagataaatagtctatatagagttcctaaatgtaatttaattaaaaaawttttttttgccaccactctatatggtgctgaccaatgttgctttatcttatggtagaatatccttcaagagcaaaccagtaggagatccctaacaaatag

SEQ ID NO: 135830 - DNA, 201 bp, Homo sapiens
atttctggccagcaaatgccttaaggtcaggttgtcttgatctggtctagcctggcaattagactctggggttatcctatttctggtttgtcctgagactkggggtataatcttcacagatggggcatagcctttctcagggtctcaaccaaaagactgaggtatctaccagggcccctctgtcttggcaagttgtgaacc

SEQ ID NO: 135831 - DNA, 201 bp, Homo sapiens
aattttttctttatttctggccagcaaatgccttaaggtcaggttgtcttgatctggtctagcctggcaattagactctggggttatcctatttctggttkgtcctgagacttggggtataatcttcacagatggggcatagcctttctcagggtctcaaccaaaagactgaggtatctaccagggcccctctgtcttggc

SEQ ID NO: 135832 - DNA, 201 bp, Homo sapiens
aaagtcatctgacagttctcttgttcctttgaaggtaattttttctttatttctggccagcaaatgccttaaggtcaggttgtcttgatctggtctagcckggcaattagactctggggttatcctatttctggtttgtcctgagacttggggtataatcttcacagatggggcatagcctttctcagggtctcaaccaaa

SEQ ID NO: 135833 - DNA, 201 bp, Homo sapiens
tgcgtgcattttcatatgcactgatttttgtcatgggaagaaacaaagcagaggaatgttttcttccttgctgtgatacctaattttggaaggtacactawtttcaaaatgtttgatatgggaaatggttgcatattccaaaaacacttagcacgaccttgctaaataatgctctctcctgtggtttggatcagcattgtt

SEQ ID NO: 135834 - DNA, 201 bp, Homo sapiens
tagctaaccagacttacagtgagtttgtaattacatgattaggtatggcatacccagttactccttcttttctctgcctaccccaagccccattagctctsttttatgacagaaatttcagatttctttggcttttctgattcatttactgacgaaagagactttttctaggtttcaagaattatgaagagtctgagattc

SEQ ID NO: 135835 - DNA, 201 bp, Homo sapiens
tgtaatgagtgaataaatcattagaagcttttccattcaaatctggttgttcttttatctttgcttattcagattctttaccccaatttgagagtgtaccrtctggtagaaaaagtatcaggaatataaaggattagtaaatattagttttctgaatgggttgatcttagatagaatcctgtgttagttttgaaaagctgg

SEQ ID NO: 135836 - DNA, 201 bp, Homo sapiens
tggttgttcttttatctttgcttattcagattctttaccccaatttgagagtgtaccgtctggtagaaaaagtatcaggaatataaaggattagtaaataktagttttctgaatgggttgatcttagatagaatcctgtgttagttttgaaaagctgggtcagatgccgagtgagtatcttgtgtgaaatcattcctaaac

SEQ ID NO: 135837 - DNA, 201 bp, Homo sapiens
ttaagatcacttaaaaatgaatcatggttatttcatagtaaatagttgtcattgttgctcaatatatcattgtattcattgaccattttcatcacattatrgattaggattacaatttataaactacaaggaaaatagtagtgcatggccttattaatcatacagaaaaaagattaacatttactggtagtttgtgtctta

SEQ ID NO: 135838 - DNA, 201 bp, Homo sapiens
gtaccagctgtttcagctcttatattggagagtcaaaagaaaaagcagtagtaggcactaagtgatgtggacctcatcatacatatcgccaattgtctttrgcatcttcatatgatttcagctgccagtaaacaattcatctctggacttatcttactgattattggaagtcagcattgggattacttgttttatactgag

SEQ ID NO: 135839 - DNA, 201 bp, Homo sapiens
tgtttgtttcctttcttggatgaacaatttgcagtcttggttttgttttttttttctggtagaaataaaattagcgagataatgaataggacaactgaatkgctctatttttaatttctctttaaaggtgttaaaaatgcttcttctgtaatattatcagtaaggactttgtttcctttggccattgggagttaagagcac

SEQ ID NO: 135840 - DNA, 201 bp, Homo sapiens
taagttccattatttctgtcaaagtcatctgacagttctcttgttcctttgaaggtaattttttctttatttctggccagcaaatgccttaaggtcaggtkgtcttgatctggtctagcctggcaattagactctggggttatcctatttctggtttgtcctgagacttggggtataatcttcacagatggggcatagcct

SEQ ID NO: 135841 - DNA, 201 bp, Homo sapiens
gagttcctgcattatccttcagctggtttcccctaatttttttttttttttttttttttttttatacagagtttcgctctgttgctaggctggagtacggkggcatgatctcggctcatgggttcaagtgattctcctgcctcagcctcccgatagctgggactacaggtgtgcaccaccacgcccagctaatttttgtat

SEQ ID NO: 135842 - DNA, 201 bp, Homo sapiens
aggtggaggttgcagtgagcagagatggcgccactgtaccccagcctgggcaacaaagtgagactctgtctcaaaaacaaaacaaaacaaaaaaaaaaccstgggcatggtggctcatgcctgtaatcccagcactttgggaggccaaggcaggcagatcatgaggtgaggagttcgagaccagcctgaccaacatggtga

SEQ ID NO: 135843 - DNA, 201 bp, Homo sapiens
ccgtcagggttttttttttttcccctgagatatgacagttttggccaaagattgaaaatgtagccatgtgccagagagatatatgagcctactaactccakggctattttatgaattattgaaatgttactcttacccttaaaaaatgttgcatttgtgcttttattctgtttttctgcttctgagcagcctaagacttgc

SEQ ID NO: 135844 - DNA, 201 bp, Homo sapiens
ctcaattttaaatgctgtacttgcatatatcttgctggactggctatgggagggaattctctgctttataaagtagtctcagacacagaggtgccttgttwaaattcacctttcccttagccgtattgtaaatacatacccatagtatagggaagggattaccactcacaggttactcatgaaagttcatgctattatgta

SEQ ID NO: 135845 - DNA, 201 bp, Homo sapiens
ttctttatcttgcttctgtttgtaccttagtgatttctttttccctccctccttccttttctttcagacgaaggaagacatttaaaggaaaggtttttttmcatctacttatttgaaaataattttcatgacaaaataccaaatttgactgtcattgaatgttatacaaagataggcatattggatttatatacaggacaa

SEQ ID NO: 135846 - DNA, 201 bp, Homo sapiens
gaaggactgactgagtgaatgagtaactgagtaccattacacatcgttggtagagtaattaactggctagactggtgtgcagccatcaggactttaggtgscttgttggttaaaagctttcaggttggctttaaaagtatggaaaacttaattattttgagaacccttttattacgtaatagatgctaattgatgtctttt

SEQ ID NO: 135847 - DNA, 201 bp, Homo sapiens
ccaataacagagcgatgtcggttatgcatgatggatttggaggatgcggggtgccttttgaagataatttacactgtctacatttgatatgtaaaagatcwatatttcctaatctaaacttgtggatctgagtagatacagacttcactatgggaatcctgtggaaggcacttaaatagctccctggcttggagaattttg

SEQ ID NO: 135848 - DNA, 201 bp, Homo sapiens
gatctgaggtatggatattaataatcctatttaacagatgagataattgaggttctaagaggaatgaaacttgtccgaatctttcacgcttagtaggtggygtggaattggaagctagatccatgtctttctaatcccaaagcctttgcttttaaccatgaagccagactgcatccctcaacatcatctatgctccttcct

SEQ ID NO: 135849 - DNA, 201 bp, Homo sapiens
tcacatactgtagtagttttagaagattacttacagctctttcagaaacattacttaagactagatgacaagagactattagttttaaggtaaattaggtkctctgtctttaagtttggcccagaaaaatatttgtagccctagtttcacttcagctgccaaaatgcaataaaatatttcgactgcagtttgagaaatttg

SEQ ID NO: 135850 - DNA, 201 bp, Homo sapiens
aaccttttttccctctatgccacatcagcagacaaaatggcgaggggcctttggagccatgaggtatgaggaacagttacagaggaactatggatatttarttaatttggctcagaaaatacttaggaagggaaacattgacttttgagacacatagacctggattaaaacccagtgtattgactagttctgtgatcttga

SEQ ID NO: 135851 - DNA, 201 bp, Homo sapiens
aattgcaggtacttctaatcccatttttagaactccctgtagcctttttttctgtcattatagaagaacagtttcaggggttgtaaacttagaagggtctstcagcaagagatttgttgttgaatctttaagctctcatcagaatgccttttgtggctgctgatgtgttaagtgcaaagatgaagagtagtgcctgtaatg

SEQ ID NO: 135852 - DNA, 201 bp, Homo sapiens
aacggggtttgaattagtgaaatgctgcattacttcagctgagttcctttattggtgaaaaagaggctctggaatcagaatgtctgggtttgaattcttgkgccagttatttaaacccttagagcaatttccccatttatataatgaaggtaaaaatagtacctatttcatagcactgtttgggggattaaatgaagtaac

SEQ ID NO: 135853 - DNA, 201 bp, Homo sapiens
ccattataggattgttttcccctcctaatctgtggttatctttgtcttgtaacattgttctgcctgtcccaagcaagaaaccttttatccttccgagaacrccttcttttggacaaattcttttgtggtttgcatcttctcttttttccttataaagaatctcaaatttctttcataaaacctcttcccagagaggttaaa

SEQ ID NO: 135854 - DNA, 201 bp, Homo sapiens
ggggtctgagaccagcctgaccaacatggagaaaccccatctctactaaaaatacaaaactagccgggagtggtgtcacatgcctgtaatgccagatactygggaggctgaggcaggagaatcgcttgaaccgtggaggtggaggttgtggtgagccaagttcatgccattgcactccagcctgggccacaagagcgaaat

SEQ ID NO: 135855 - DNA, 201 bp, Homo sapiens
aattgagctttgggctgggcgcgttggctcacgcctcaatcccagcactttggcaggccgaggtgggtgtatcacctgaggtaggggggtctgagaccagyctgaccaacatggagaaaccccatctctactaaaaatacaaaactagccgggagtggtgtcacatgcctgtaatgccagatactcgggaggctgaggcag

SEQ ID NO: 135856 - DNA, 201 bp, Homo sapiens
cttttaggggaagaatttcaagcatattgataggtcttaaattttctagtctctctgggatagtaggaaggagaatgatttttaaaaagttgattatgtarcatggagtttggggactagtaaaaattttattgaaattatttgggaattgttttacagttgtttttagtggaggttgtatttctgaaaatattgcatttt

SEQ ID NO: 135857 - DNA, 201 bp, Homo sapiens
tgtaaatctacagttatttaaaaataaaaactttattaaaaatagatccagagtttaaccactttttaacactcctgctatccctatcatccaagtcaccrtaatctgtaacatgaattactaattgtaacagtcttctaactagtctgctagtcttctttctcttatcctcccactcttctatccccagtttattctgaa

SEQ ID NO: 135858 - DNA, 201 bp, Homo sapiens
ccctctgaccctaatttcttaaccttctgacccttataatctgtttttctcccagtacttgttttctggcttttccctgacctttggttcattttcttacygtctgtcaatctcagctagttactgcttgctgtttttactatcgactctgtgatcgatctcttaaccttttccttttttgttttggttttatcagtacct

SEQ ID NO: 135859 - DNA, 201 bp, Homo sapiens
agtgttccaattctgcactttcttgcctcaaagtataattgtaaatcagtccccaccataatgccgttactcttgacattatattacatattgtggttcargaatgaatctcaagtcagcacgaacccggtcctctaaagtatgctacacgtataaaattggctgtctgatcacccattgttgtcataatttacactcagg

SEQ ID NO: 135860 - DNA, 201 bp, Homo sapiens
tcatggttctgcaggctatacaggaagcatagtggcatctgcttctggggaggcctcaagaagcttccagtcatggcagaaggcatggagcagaagtaagrgaagtggggtgaagtgacacatacttctaaaccaccagatatcgcaaagacagtaccaaggggatggtactaaaccattcatgagaaatctaccctgtga

SEQ ID NO: 135861 - DNA, 201 bp, Homo sapiens
atctgccaccaccaccaccttgtcccagtaccagatctagccttctgttggcctagcctccctagcattgtaattatgtcatttcccctgtagaacatatrtcactgcctccttcgttttagaataatacatgcccctgtgttattgactgtttttgtctggaagcacttttagagcatggaacatatttggtttttcttt

SEQ ID NO: 135862 - DNA, 201 bp, Homo sapiens
tctctgctcgaaagaagggtgacttggtacctttactagttatgtttccagtatctaccttgtatgtgcctacacagttcatgtcttgtgtcttcgtttaygctgtaccatcacctaattgccctcctcatcacctctacatgttccattcctcatttaccctgagcgtaagtgaaatggcatctccttcatgaagtcttt

SEQ ID NO: 135863 - DNA, 201 bp, Homo sapiens
gcacgttagtattagaccatgccaaggtttttaacacctgcttctaataacttgaaaggtcaaattggcatttttttaaatgaactttttcttttttgctkgggaatactacctgatgtgtatttttaaatcaactttatctttgaacatttttgatttgtaggaaagttgcagtggagagttcctgcattatccttcagc

SEQ ID NO: 135864 - DNA, 201 bp, Homo sapiens
agtaccaccaatagtaatactagctgtaatttgaggaggataatccaaatcctcagacctgggttatgtcttgtcactttctcatcaaagcaggttatgctatgacctcttccaaccccctatctcagggggtctgctcaccattcacttagcataagtaagcagtggctttgaatttttagtatcttgctgtagtggttt

SEQ ID NO: 135865 - DNA, 201 bp, Homo sapiens
acagagttaaaaatcaatcaactagggagactgcagtcgggtattttgcaaagtaagcctttatgcagttggcttgatctctctatgtagcacaaaatcartgtataaaagtggtatttgagatttattgaatactttttcatatgttttacatttactttttaatcctcccaataactgtatgaggtagataccattggt

SEQ ID NO: 135866 - DNA, 201 bp, Homo sapiens
tcaggtttaagcgattgtcatgcctcagcctcctgagtagctgggattacaggggtgcgccactatgcccagctaatttttttatatttttagtagattcrgggttttgctgtgttggctgggctggtctcgaactcctgacctcaagtgatccatctgcctctgcctgccaaagtgctgggattataggtgtgattcacc

SEQ ID NO: 135867 - DNA, 201 bp, Homo sapiens
ggcaatattctctagggtctcagcttcccagctgactctccacacaaaggcctgacaactgtgtgccccatggatggatgattaaaggagacagtgagatrggaaatcaaaagctgtccatggaagggaaaaagatcaataacaaatgggtacccaaaaagttgagtcacacaaatatcaaacccattttaaaaataaatg

SEQ ID NO: 135868 - DNA, 201 bp, Homo sapiens
gtaactagatactatagctttcatgttgaatcggaaatacaaagtcagtgttttagtaatacccacatagtacaaccatcattgtcaaaacaactttcttktagttaaatcataatattattgcagatgcactagctattttcataaccgtgaccattatctaaaaatataatacattgataacttggcacaagtctttat

SEQ ID NO: 135869 - DNA, 201 bp, Homo sapiens
ggattgtagggagagtagcctttgatcgtttgttactccatgttgggagatgggggttttcctttggtttagctttaggaagtttcagaaagtttgtgttrattggccttacggtccccgcccccagacccaggtgttttccttttgatccaggtttaggaagtagcagaattggtctcaggttccctgcctccagacctt

SEQ ID NO: 135870 - DNA, 201 bp, Homo sapiens
ggggtaattaaggttgctaatcagctgaccttaaagtagggcgattatcctggattaggtgggcccaatgtaatcacaggtgtccttagatgtggaagagrgaggcggaagagtcagtgtcagaatgacgtgatgtgagaaagacttggagtctgttgctgactttaaagacagaagagggtcaccacctaggaatgtggg

SEQ ID NO: 135871 - DNA, 201 bp, Homo sapiens
ccaagctagattgcagtggagtgatcacagctcactgtagtcttgacctcctgggctgaagtgatcctcccacctcagcctcttgagtagctaagactacwggcctgtgccaccaagcctggctaatttttttttttttttttttaatttttagtagagactgagtgtcaccaagttgcccaggctggtcgtgaactcctg

SEQ ID NO: 135872 - DNA, 201 bp, Homo sapiens
ggattgaagagtgtgttggcagcctgcctccttctgtaggcattccattccctttgaaaacagctttttagctgataataccacgagtgctagagtgagcyacacctaattttaatgccttgtttggaagattatcttctaattgaggttccttgctgggacagtatgttatttgaataaaccgttcttctaatgctggta

SEQ ID NO: 135873 - DNA, 201 bp, Homo sapiens
tcacaacttgataaattaaatgccaggaattcattagaaatactggcagataatacaaatggtgcatagaaaaataatgcctttgaaaagatgttctgtcrtacgtaaaataatacaactgcaacttaaaacttccccgaggtactctgtttcacctagttgattggcaacataaagcctaataatatacttagctgcaga

SEQ ID NO: 135874 - DNA, 201 bp, Homo sapiens
tctccaactaatttcactcttttttccaaattgtgtgtatagaactattttcattgtgatctgtggtttgtggtaattttgtccttgtttcttaaattgakatcccttgaaggatgataggaagtaaattttcttcctaaaattgatgtggttggtgatgctttactgtgttcaacattttggaggtcagatagtagtatg

SEQ ID NO: 135875 - DNA, 201 bp, Homo sapiens
ttatattttttgttaatgaattgaagtataaaaagtaataacactctatttcttgtccaagagtcatttttttaaaaattctaaaaaagtaaaatctgcaytttaagaagttaaatttagtttttaaaaatcttctagttggaaaactaaagtttggtacacacccagaaaacatttactaaaattgattacataaattaa

SEQ ID NO: 135876 - DNA, 201 bp, Homo sapiens
ttgtctctcttcacatggttttccctctgtgcatgtggacccttggtgtctctttgttcaagtttcttctcataaagacaccgtttgtgttggatcagagyccacccctatggggctctaacttaatcaacctctttaaaggccctgtctccaagtatagttatgttctgaggtacgaggcattagggcttcaacatagga

SEQ ID NO: 135877 - DNA, 201 bp, Homo sapiens
aaaagcaaaaaccacatgattatcccaatatattcagaaaaggctttcagtaaaatttaacatctcttcatgttaaaaaccctctaactaggcattgaagkaataaacgtcaaaataataagagcaagctatgaaaaacccactactgacatcatactgaatggacaaaagctggacacattccccttaaactggaataag

SEQ ID NO: 135878 - DNA, 201 bp, Homo sapiens
agaccattggattggctttgcaaggtaaagatgtacttggagcggccaaaactggatctggcaagactctggcttttcttgttccagtaagtacattgtcrttgggtcagactgtctgttatacaattttataacattctgtgcccagatgcagattatataaagagatgttttcatgttagatttcatgatagattggct

SEQ ID NO: 135879 - DNA, 201 bp, Homo sapiens
gttctagcacagtgccttgcatgtggcaggcactcaataacttactgaatgaatgaactattgtgccttgacaagtcattacattcttgatggaagtggastgctccagtatggcaggttaaagtggttctgtgctgcagtaggactggtgggagacagtttctgctctcacccttgtgagcctgccagtggcatttatac

SEQ ID NO: 135880 - DNA, 201 bp, Homo sapiens
taagaaaggaaggtagactctttagaggaatgtttatagtaggtcaagataagacctgctgctcacttttgttctatcttatagcacatctagaatgcctstatctgctagaatctccactagactgtgaggataaatacttcaatttttatgcaaacatgcacaaaagaagaaagaatagcatcacaaacccttacgtac

SEQ ID NO: 135881 - DNA, 201 bp, Homo sapiens
acaattaagaattaagctttttttttttttttttcctgactgcttgacagtgagtaggagaaaaagctaaggtaaactctcctttttgaaagtctgggcargaaataatgataaggatggacatggaagcgggagaagttagatgaagaattaaaggaaaacccaaataatggcttgatgaatttacttgtatattaaaag

SEQ ID NO: 135882 - DNA, 201 bp, Homo sapiens
taacaccttaggagataaaggaatataaagtgatttgattttatattcctcggagattaaattcctaggagatttgatgctagatttcgagccactgctakacagtgaatgtcatttgagcttcatttttctcctttggagcctgacatgtaatatgtgctaaataaatatttgctgaattgaattctgctagccaagcta

SEQ ID NO: 135883 - DNA, 201 bp, Homo sapiens
caagaacttgggaatggaatagtaagatatgtgaggtatagtttttttcccttggcttactttcgagtggacattgatctcttaaagagttgagatagctrtgaaaatttttgtgacaattaacaattaacttgaaaatgtaaagactgcttgtctaggatttttcacttttctcttttttctgtttgcctccagcctatt

SEQ ID NO: 135884 - DNA, 201 bp, Homo sapiens
cctacactttagagtaagaaatacattttccatcccttcccgctaacatgtacatacaacattaaaagaaaaatttcacaaaatgataacttaccttattwtttgccacatgctcagaattttccatttcattctattttctttttataaaatgatggtcacaatccactgatggcttcatgatacactgagttgatactc

SEQ ID NO: 135885 - DNA, 201 bp, Homo sapiens
aatgttattcccatttaacagaagaagaaattttagtatagaaggttgcatacctgcttgtgtgtagtggattcagaattccattttggtagttggactckggagagtgaatgagagaaagagccaggtcacaaatcctggggaacagcaacagttaaggaacaggcagatgaaaagcagctaggaaaactggtatatttt

SEQ ID NO: 135886 - DNA, 201 bp, Homo sapiens
gtaaatcctgttgtgtgttcagctcagtgttggaggaaggagagagtgcttcgagtgatcacactgggagagagtggccctggtgtgttaggtggaaccaktgctgacttagagggtccgacagcctgggaccctgatttctcatcctggtgatagcagtagatcactgtgtggccttgagcaaatatcttaactatgctg

SEQ ID NO: 135887 - DNA, 201 bp, Homo sapiens
ttatatgtatagaatatgtagaataaacttctatacttttttggtgacagggtcttactctgttgcccaggctggagtacagtggcgtgatcttggctcaytgcagccttgacttcccagtcctcaagcgattctcctgcctcagcctcctgagtagctggaaccacacctggataattttgtttatttttttgtagagat

SEQ ID NO: 135888 - DNA, 201 bp, Homo sapiens
actactactgccccattaagaaccagtggtctatatccatatatagaataaactttatatatatagaatatatagaataaactttatatgtatagaatatrtagaataaacttctatacttttttggtgacagggtcttactctgttgcccaggctggagtacagtggcgtgatcttggctcactgcagccttgacttccc

SEQ ID NO: 135889 - DNA, 201 bp, Homo sapiens
aggcagaaaaatgtgtaaaggagagactggcctagcctcccaggctacatctctctcccttgctggatgcttcctgcccagataaattacctgttgtgacygccctggacgtgcctgcctaccagacacctgatcttgcaagaccattattaaagtctcacatttgctgttctttgcacctctaagtccattcttggcgtt

SEQ ID NO: 135890 - DNA, 201 bp, Homo sapiens
aacagaaccataggcggatacagaatattgtgcatctcctattagttactataaaatctcactggaatcccagcagcttaattttttcttacaaatgaaawattaggaaacatttaccattatttccagcccaggaagacctgttaaacataccatattctcatatcttcttgatttttaaattttatacatgttttccct

SEQ ID NO: 135891 - DNA, 201 bp, Homo sapiens
tcttattttgtagacaaggaaattgaagcttaggaagttgaagtaactttcccaataacatacagctaggaaatggcagagccaggatgcaaatctgcttyatatgacgctgaagcgttgactcttaagcattaggccataggtcatttccgaggtagtcaagaatattcaatttgagagtcttaaaaactgaagcagaag

SEQ ID NO: 135892 - DNA, 201 bp, Homo sapiens
gtagagattgcggtgagccgcgatcacaccactctccagcctgggtgacagagcaagactctctgaaaaaaagaaaaaaaaagaaaaaagaaaagaaatasagcttttttcccccccactttctagttactaaattgcccttggtttttatagtgttttcaatcagaggaaatgggtattacttgtctgagatagtgttct

SEQ ID NO: 135893 - DNA, 201 bp, Homo sapiens
attaataatagaatagagataattaattgatatttagaaataagtacctatttccaaaacagaaaagtaagcattctttttttaaaaaaccttagaaatayttttttcttttatatttgtctgtatgtagaaaattagttgcttgggaaagagttgtttttatttttgctttgttctagttctgtcatttttttttcttaa

SEQ ID NO: 135894 - DNA, 201 bp, Homo sapiens
ttttggaaggtagacatgtattgacataatttacaaaacctcaggttatatgataatggctgcagtattctaatattccaaatttataggaaacataaaaragcagatgctcttaggaatttcatctaatgtcaatgttagcttttccactttagtagcttatcaatgtggttcatacaccaggagagataataatcaaga

SEQ ID NO: 135895 - DNA, 201 bp, Homo sapiens
ccctccctccctttttatgtccaaattccatttacagacattctaatctccactgctttagtttaatactctttgtcacattgtttgtttttgttgttgtwggtttcatttgtttgttaatgtgactaatgacagtaagcttccaaatggccttcagtgtatcttaatgcccccatgtcactaccagttttttctcaaact

SEQ ID NO: 135896 - DNA, 201 bp, Homo sapiens
gctgagtcagagcattggacacttctgggaggaaaatggaggaattatttccagttttgcatcaagctggtcataaatggatatgctgatgaggcacattmactttgatatccaggctgtcttcttaaagagtaatccaggccgttggaagttgagcagtttgttctctttcagaacacatcatgtgcttggggtataatg

SEQ ID NO: 135897 - DNA, 201 bp, Homo sapiens
cacctaggattggactttcccaggactaaccagacaaaaagaatcgagcctttttgtctggactaaccagacaaaaagaatgacaaaagcccgctatggaygggacttaagacaaactctcctgaggtcttggcatattcagaacaaagagtaggctgcttaatatgttacatgtctcggagttcccagtcttttcaggct

SEQ ID NO: 135898 - DNA, 201 bp, Homo sapiens
ttcatatgtaaactggagcattttttttttctccatagaaaagatgttctatactgtggttgatttccattatcacttaggctgcccatgtaccatacaarcatgacacttaggtgagtgaaaggggttgcagtgactaattgtaccaaaacaactgtcctgggcaaacccaggtatgatcactttaattataactcaaag

SEQ ID NO: 135899 - DNA, 201 bp, Homo sapiens
cagaagaatgtatgtacgcttatatgtgaaattaggcacgttagtattagaccatgccaaggtttttaacacctgcttctaataacttgaaaggtcaaatkggcatttttttaaatgaactttttcttttttgcttgggaatactacctgatgtgtatttttaaatcaactttatctttgaacatttttgatttgtaggaa

SEQ ID NO: 135900 - DNA, 201 bp, Homo sapiens
atgagaggtcacgccgggtgccacagctcaaacctctgcaccgttctggccactcttctgcttgccacactgttcctaaaaaaataatagaaatgcggccktacctaagggtagggagactaatgctgtaatagctacagtcatattcatattaataatactgatgacaatagtggtaataatgacacctacatttttaag

SEQ ID NO: 135901 - DNA, 201 bp, Homo sapiens
tgaatttgtagattgcttttgacagtatggtcatttaaaaatattgattctacccatttatgggcatgggatatgtttccatttgtgtcatctgtgatttmtttcagcagcagtgttttgtagttttccttgtggtttttcacatccttgtttaggtatatttctaagtattttacgtttttttgcagctattctgaaaga

SEQ ID NO: 135902 - DNA, 201 bp, Homo sapiens
gtaatttcctttagaagcctttgatacctaaagcagtgctgtgtatgtaagatatattaaaggttttaaaattttactaaagaaacatgttttgaataccyaatatgtgcaggtcattgtactagatgttaaattgtagatgtataagatgtactgctgccttcaataaactcagttttggtagctgagagagacataaaa

SEQ ID NO: 135903 - DNA, 201 bp, Homo sapiens
gaccgaaaaaaatatttttcatttttcagatctgaaactctatacctgttaggtgggtcttaattttaagactacagtttaattttaagactatagctccrtcgcccaggctggagtgcagtggcacaatcctggctcactgcaacctctgcctctgggctcaagcaattctcttgtctcagcctcctgagtagctgggac

SEQ ID NO: 135904 - DNA, 201 bp, Homo sapiens
aatttattcagcaaatatttgaacacctgctgtgtgctaggcattgagagctgttagcaaaaccaacagtattccctgtgcattaatgggtgggatggacmaaaaatgaatatgtgtgctatggtaggggcaagatgaagcagtgtaagggggatatagaattcagggaaggtgggtggcatgctgcaatttcagatagaa

SEQ ID NO: 135905 - DNA, 201 bp, Homo sapiens
cattgtagaatatgaacagggtcaaatactttgaagttatgtaactttgaacaaactgctaaattaatctaagctttagttttctaattaaaaatttgtargaacaagatttgactcacaattgttctgaacattaaatgaggtagtccatatgtagtttattcactaattcttctttcaatcattattgaatatttccta

SEQ ID NO: 135906 - DNA, 201 bp, Homo sapiens
aacagaacagtaaatggcctgaacaatttaaacaaaccaaggaaaatgtcctaaggtagtaaatagggaattatgggattttcccttaactattgtaacastataaatgttcaaagaggtagaaggaaccatttaagacaataaataaatgaacatgatcataaaacttagttgggaatgaggcttaagtaaggaaaatgg

SEQ ID NO: 135907 - DNA, 201 bp, Homo sapiens
ctcccgggttcaggtgattctcctgcttcagcctcccgagtagctgggattacaggcatgcgccaccacacccggccaattttttgtatttttagtagagwtagggtttcaccatgttggccaggctggtctcaaaactcctggcctcaagtgatccgcttgccttggcctcccaaagtgctggtattacaagcgtgaacc

SEQ ID NO: 135908 - DNA, 201 bp, Homo sapiens
taagccgcactaaccaggctgtcaagtaatttgcttttcttataggtattggagccaactgtggaattctcagtcaaatgtacaatgaaacatcttgaatrttattttgatgctctcccattttgttcaaacaaattctgattaaatctagctactggcacattcttgctgagtctctggtatcacttggaaggaaggtag

SEQ ID NO: 135909 - DNA, 201 bp, Homo sapiens
atgtgaggctcattccaaagcaggttgaaaattaactgtatagtgtgcttttgtcaaatgaggcttcctggagtttctcaaatagctgaccatagtaactmttgtgatcaggctattctttggtagtttgtggtctttttataggaagttttgacatttagcatcttagatttggaattagccaaattatgggtgagtttc

SEQ ID NO: 135910 - DNA, 201 bp, Homo sapiens
atttgcctctgaagtcttgactgtgaaaacaaaaagaacaccttgtctataaggagacaacatgctgctactttggagaagcacagcttttcttatttcawcaactgtcctgtgaaacgcaaaatagtgaattttatacagcagtgttttaatacctgtctttaaagtaaactgaagaaacaacgccacgatatagctcaa

SEQ ID NO: 135911 - DNA, 201 bp, Homo sapiens
cactccctagtgagatgaacccggtacctcagatggaaatgcagaaatcacccgtcttctgcgttgctcacgctgggagctgtagaccggagctgttcctrttcggccatcttggctcctcccaaggttatctccagttcttataaaatccttctagcaggatctggtatataaagaccatagtctaagtgctaacaggca

SEQ ID NO: 135912 - DNA, 201 bp, Homo sapiens
acaagattatgtcatgtatcttggtcaaaacttgcacagtaaagtcctcacttaacatcataaatggattactggaaactttgactttaagaaaaatggcrttctttatgccttaggaactgaactcttgtttgtatcaattagcctatggcaaaattggttttgttatatagtagttgtttcacttaaatttgcagtttc

SEQ ID NO: 135913 - DNA, 201 bp, Homo sapiens
attttggggcagttgataggatttttgatgctaaacaaggaatgttttgctgtttcttcctgtacattccctagtactgtgcacaaacagtagagttgaawttcgtggttctccagttgaaatagaaaggctaattgccgtttcttttttttttttttgagacggagtctcgctgtgtcacccaggctggagtgcagtggc

SEQ ID NO: 135914 - DNA, 201 bp, Homo sapiens
tggactcatctggatgatccaggacagtctccttactttaaagttagctgattaactgccttaattcgtttttgccatgtaactatattcacaggatgccrggattagcatgtggacattttttggggtcgtttttctggctaccacagtaactgatgataaagctccattcagttgctctagttaagtcataattgtgcc

SEQ ID NO: 135915 - DNA, 201 bp, Homo sapiens
agttctatctttaaagtacacacgtacctgcatgtttttttttttttactgtaataaatttaaagtattatgtcatgtctgttgaatatgaggaacatttkggggcagttgataggatttttgatgctaaacaaggaatgttttgctgtttcttcctgtacattccctagtactgtgcacaaacagtagagttgaatttcg

SEQ ID NO: 135916 - DNA, 201 bp, Homo sapiens
gtgcagtgtagcatgatcatggctcactgcagcctcgaactccctagcctgaattgatgctcctgcttcagcctcccaggtagctgggactataggcacaygccaccatgcccagctaacttttgtatttttttgtagagatggggtttcaccatgttgcccaggctggtgtagcatcttttcatatggttatttttttta

SEQ ID NO: 135917 - DNA, 201 bp, Homo sapiens
gatgctcctgcttcagcctcccaggtagctgggactataggcacatgccaccatgcccagctaacttttgtatttttttgtagagatggggtttcaccatrttgcccaggctggtgtagcatcttttcatatggttattttttttatctacatatcctctttggagaggtgtctgttaagatttttggcctccttccccct

SEQ ID NO: 135918 - DNA, 201 bp, Homo sapiens
tgatttacaagggattttgaatgtgttttaaagtaatgtgttgaatttgtttcctaagggacaatagagaaaaattctttttttggtgtatgtgtgtaggraatttgcttgagagatgtgccactattaaaacttgtttccttttttggtctggatttcagttacttacatgacatattctaatgtttttcttttccgtaa

SEQ ID NO: 135919 - DNA, 201 bp, Homo sapiens
ccagcgcaagtgctcctaaacacacacatgctgcttgaaccctttgtccccataattgagaatcttggagaagcaatataaaaactgccaggtaatacttrtgttccttttgagacatttaaataaatttagtaatcaaaattatatagttatttttaaccagaaatgaaagtaggctttttggcaggcctatgtgttcac

SEQ ID NO: 135920 - DNA, 201 bp, Homo sapiens
accatgtaaagaatgacttcagccttggtgcggtggctcacgcctgtaatcccagcactttaagaggctgaggtaggaggattgcttgagtctagaagttyaagaccagcttgggcaagatggcgacaccctgtctttaaaaaaaaaaaaaagacttcagtttttcaaggaccgattttagattttcaaagcttccagtct

SEQ ID NO: 135921 - DNA, 201 bp, Homo sapiens
gactacacgcatgtgccaccacgcccagctaattttttgtatttttagtagagacagagtttcactgcattagccaggatggtcttgatctcctgaccccrtgatccaccctcctcggcctcccaaagtgctgggattatggatgtgagccactgcaactggccaaaagtatgatttattaaacaaaagtctgaggctgat

SEQ ID NO: 135922 - DNA, 201 bp, Homo sapiens
aaaaaggaggaagatttttcttgtcaagggaaggtctcatttctatgtaaccactaagcatcggactaagaacagaaagaagagctgacatggctttgcarctcagccaggagctttaaatagacagaggctgtgttttattattgctctgaatagtttagctacctccatttcacagcccttttctgagtgctcagagat

SEQ ID NO: 135923 - DNA, 201 bp, Homo sapiens
attttggcaagaacaatgcttataatgttaaaatggaatttaaatcctcttcttttcaacatggattttatatattatttgtatatcatgatattccaatyggattcaagcccatgtggccttctattcactttcttgtattcctctggtgcaggacgaaaaatccctaagataatttgttactgggcttggccccattta

SEQ ID NO: 135924 - DNA, 201 bp, Homo sapiens
gacaatggagagcttggccaggataatggctcctcaaatggcagtggctacctccttggagcacctgatacccgtatcagtgtggccattgtagtccccartggcaacatgccttgaatccagtgcgttggccagtgtgggccacttttgcgccatgtaatctttgaaacctcattcttgagagatgcccccaggaaaatg

SEQ ID NO: 135925 - DNA, 201 bp, Homo sapiens
tatagtaaaatgccacagaattctgtatgctgttattaccacttcctcatctctcatctcttcaggctacttactcagcatgttatacctccacttgaccraaacctgtcttttcacaatcagcagcaacttctgtcttatcaaatacagtggtcaattctgtctttattttactggacctctcagcctttgacacagttg

SEQ ID NO: 135926 - DNA, 201 bp, Homo sapiens; identical to SEQ ID NO: 24061

SEQ ID NO: 135927 - DNA, 201 bp, Homo sapiens
aagtccaagttcaaggtgctgtcaagattggtttctgaggaggactctgtttcaccctcttactgtgttctgacatggcctttcctttgtgcttgtgcagyggggggtgtagaatgatactgatctggtgtgtcttcctcttcttctaagtgtactaaacctattggattagggtcctacccttataaccttattatctgt

SEQ ID NO: 135928 - DNA, 201 bp, Homo sapiens
gatttaacagatggaacattcttgtaactaaggttgccattgtaacaaattaccacaaacttggcggcttaaaacaacagagatcttgaggtcaggagttygagaccagcctgaccaacatggtgaaaccccgcctctactaaaaatacaaaaaaattagctgggcctagtggtgggtgcctgtaatcccagctactcggg

SEQ ID NO: 135929 - DNA, 201 bp, Homo sapiens
tcactgcatatctatgtagtattggtctggggtggggaagaaacaagcaagacataatcatccattctcattcatgttcacctattaagatcacttaaaartgaatcatggttatttcatagtaaatagttgtcattgttgctcaatatatcattgtattcattgaccattttcatcacattatagattaggattacaatt

SEQ ID NO: 135930 - DNA, 201 bp, Homo sapiens
gatctcgaaattgtctcttgactttgggagtgagtaggtgatgtttctctaggtgatcctggagggtccttttacccttccaagttctgtaataattccaktgtttttttaaaatcaccactatatggctttgcacaccacagttttacaaatggtatgtataagaatatccaattttgaataatattggacatcatcctg

SEQ ID NO: 135931 - DNA, 201 bp, Homo sapiens
ttccacttttggtttggctacacccccatggcagaatgtatactagaagatatgagggtaaatgtaagcccagtctcttaaattagttacaaactcagcawgcccaaactctagttgtctttcagtgtgcctgattgcagtcagtctgtcacctgttgttcttagcctgaccccttttcaacaccatctaaaaccaatgct

SEQ ID NO: 135932 - DNA, 201 bp, Homo sapiens
aggccgtatgtaagggctggagacacagacgtgatgaagtctgccttcatggaactcacattctaatgcatgtatcctccacagtattatgagccactggrtagcagttcttatgtagcagtgtctggtatggtgcttggcatacatagtagtcatccaaaaaatgaattaacaaatctcttttgcatctgtgtgttctac

SEQ ID NO: 135933 - DNA, 201 bp, Homo sapiens
cttctaaagtttgtttttttcccttgtcaatcacagttttgtctgatcgtggattctggatccattagttctaatggatcaattcaagtgggcatgaagtyccactttggcaattcagagtaaaagcttaccttccatggctgatgctcttctgcctccattataattttaccaggaaaacaatagtccctctccactctt

SEQ ID NO: 135934 - DNA, 201 bp, Homo sapiens
cagcttagtaggaaacccagctctctgtttcagtgggctttgtgacattcattgaatttattggtctgctgggaactgcacagagtcctgtgttcttatckcaagtaagttttgaaagagttttgtaccttttgaggaaccaagacctcagatactgtaattgcctttgggctaatgaatgatttttcatttcaaatagtc

SEQ ID NO: 135935 - DNA, 201 bp, Homo sapiens
accaagtattcttttactcacttattatggatatattactgtcccaaatatgaaaaagttagacttgtcagccttcaataaacttacatagtgacacaggmcatttatgtggaaatgttaagtgaaatgatacaagatagcagtgtaagaaagacaatgtaaactatttacctgcagtaataaaatatttttaatttggcc

SEQ ID NO: 135936 - DNA, 201 bp, Homo sapiens
gctttcccatctaggagcttgactggagcagaatccactttcaagctcattcatattattggcagaatgcatttcttttgacagctgtatgaccgaagccwtcactttttgctggctgttggctggaggccacctcctatggactaaatggcccctgcaccaattcttatgttgaagccctaatcttcaatatgatggaat

SEQ ID NO: 135937 - DNA, 201 bp, Homo sapiens
cagaagtagttggggccagatgtccaaactccatttaaggatctaggctttcatgtgctatttttgatgacaggtgtagaagggagagcttgatgttctcwggcttttttactcttctttatccatcttatatattggtataggctgtgttttactctggctttcacctctcattcttcctttgaatatgtggaataggta

SEQ ID NO: 135938 - DNA, 201 bp, Homo sapiens
gaagacgaggatagtgcatcttgtcctcatagaagaggccctgtagttagaatgtgtgctttggagtgttagaatgggtattctgaatgcaagaatatgaytgtttcagttttgtcaagaaaatgcttaactggactgtgtattctaacaatattagaatataacaaaaaaatctatcattatatgtccttacctgcctaa

SEQ ID NO: 135939 - DNA, 201 bp, Homo sapiens
tcagatacaattgcctcattctcagactcgggaagacgaggatagtgcatcttgtcctcatagaagaggccctgtagttagaatgtgtgctttggagtgtkagaatgggtattctgaatgcaagaatatgattgtttcagttttgtcaagaaaatgcttaactggactgtgtattctaacaatattagaatataacaaaaa

SEQ ID NO: 135940 - DNA, 201 bp, Homo sapiens
taatttagtcatcagaatcacagttttgtaatttcaaaaatgggaacaataaatctttttgacctacttcataggctttgaagatcaagtaagataatctwtgttaaagcactttgtacgtttgttgtaggagaatgccacatcttatttgtgtttcttgccattatcaaaaccaaaacaaaaataaccagtcaggtaaca

SEQ ID NO: 135941 - DNA, 201 bp, Homo sapiens
gaatagtatgttgttgcctttatagatatccatttccactttcttagttgatgatttttcactctacattatgattttcacttatcctttgagtgtttgakctacaaatgattgcttgcccaggtgatgaagaattttcttgtattcctatctttccagtatgtagagatggaaatgcatattggttgttgtttattatct

SEQ ID NO: 135942 - DNA, 201 bp, Homo sapiens
actcatttaacaagaaaaatcagtgaagtccatgttttcatcattctaatttttatctgataaataactacatttagcgtagttaaatttattttcaaaasctgctttgttgattatacaactcctggctttgtgggaatgggacggggatggacgtaactagagaggaaaactagacttaggaacaaagggtgagaataa

SEQ ID NO: 135943 - DNA, 201 bp, Homo sapiens
aaattctttaatgatatctcttgtgaccattagaataccttcccaactactagtaagctgatgaatcattttgaacatctggaaacattcttctaaagttkgtttttttcccttgtcaatcacagttttgtctgatcgtggattctggatccattagttctaatggatcaattcaagtgggcatgaagttccactttggca

SEQ ID NO: 135944 - DNA, 201 bp, Homo sapiens
catgcctgaaacagagttgatgttcagtaaatcttagtggaatagattatgttgacttcctaaaactagttcagcatgacatagttctagttgttcatttscctttttttgttgttgttaagagatggagtctgtctctctctgttacccaggctgaagcgcagtggcaccatcatagctcactgcagcctccaaagctca

SEQ ID NO: 135945 - DNA, 201 bp, Homo sapiens
tctaatttttatctgataaataactacatttagcgtagttaaatttattttcaaaacctgctttgttgattatacaactcctggctttgtgggaatgggayggggatggacgtaactagagaggaaaactagacttaggaacaaagggtgagaataaataggtgataatttgaatccttcagtcacttaattttattgtat

SEQ ID NO: 135946 - DNA, 201 bp, Homo sapiens
caccatgcccagctaatttttgcatttttagtagagacagggtttcaccacgttggccacactgatctcaaactcctgacctcgggttattcacccgcctyggcctcccaaagtgctggaattacatgcatgagccaccgcacccggccgaacagatctatttcttataactaatgcttcagaacaattttacttccaagg

SEQ ID NO: 135947 - DNA, 201 bp, Homo sapiens
tcatatgcctttattcttgatcatctttttaaaagggaattgaataaaaaatgaagcttgattcttactctttatacaatgttgaataaaatttcaagatkcacagtaggaaatacataatagattttgactgtgaaacttagaagagtgtttctttaagtaactaaaaattaaaaaaaaaacctagaaaatgtgcttatt

SEQ ID NO: 135948 - DNA, 201 bp, Homo sapiens
ggttcactcgtcactcactttcacccctccctgcatccccatcaaatgactgagaattttccagatgtggcatttatattttggccttgtcctaacataayaaacaatctctcttcctgtgataccatattcttgtttctttgtatcgagtggaatttcactagttgattgcagcctttgtctgccagggttcttcatctg

SEQ ID NO: 135949 - DNA, 201 bp, Homo sapiens
taatcctccccctgtccctcttggagtactctaaagcatatctcagatgccatatttattagtataggctggagtacagtagcatgatcatagctcactayagcctcgatctaccaggctcaagtgatactcccacctcagcttccccagcagctgggactacaggcatgcgccatgcctgactagtttttattttactta

SEQ ID NO: 135950 - DNA, 201 bp, Homo sapiens
tctcccttattccccttcctacttcatatgcctttattcttgatcatctttttaaaagggaattgaataaaaaatgaagcttgattcttactctttatacmatgttgaataaaatttcaagattcacagtaggaaatacataatagattttgactgtgaaacttagaagagtgtttctttaagtaactaaaaattaaaaaa

SEQ ID NO: 135951 - DNA, 201 bp, Homo sapiens
gttcccctatagttttttctctctctctctcttttttttttttgagacaggagctcactctgttgcccaggctggagtgcagtggcaccatttcggctcactgtaacctccgcctcccgggttcaagtgattctcctgccttagcctccccaatagctgggattacaggcatgtgccactgtgcctggctaatttttgtat

SEQ ID NO: 135952 - DNA, 201 bp, Homo sapiens
aggcacctgccaccatgcccagctaatttttgcatttttagtagagacagggtttcaccacgttggccacactgatctcaaactcctgacctcgggttatycacccgcctcggcctcccaaagtgctggaattacatgcatgagccaccgcacccggccgaacagatctatttcttataactaatgcttcagaacaatttt

SEQ ID NO: 135953 - DNA, 201 bp, Homo sapiens
ttgccctattgcactaaaacctctaatacaatgttgactagaaatagcaacagcctttttttctcatcttagagataaagtattgagtatctcagtgttasataggatgttacctctagagttttggaggtgtcctttatcaagttgaataagttccatttccttctgttcagttttttttttaatcacaaatgggtcttg

SEQ ID NO: 135954 - DNA, 201 bp, Homo sapiens
gtgtaccttagatataagataggagcaatctttgttagtgaaaatgatttctttaattcctttagcttacatttgtgaaggtctgcagtctgctcctcgtrgatagtggctgatgcttctttacgtgacctgcttttgttggtatctatgatttaaaggttgcataaaaggtcacagcaaatttattttgcatcttgaagc

SEQ ID NO: 135955 - DNA, 201 bp, Homo sapiens
gcatgctcatttcggggccacagctaccatgctgtgggaaaaagcccaccaataccttagcctgtagcctttgctaagcttctagctgacagccagcatcmgtgtacctgccaaatgggtgatctgagaagtggatccttcagtttccctgccctcgcagctgatgctgtgtggattatggagatgagccatccctgtcaa

SEQ ID NO: 135956 - DNA, 201 bp, Homo sapiens
ttaggagtctatttcccaggtacccttgggagtatttcttaggagtctgtttcccaggcaccccttaggaataggggtgcccccactttattctcctgtcyagtcaatacagcaggcacagtgttccttctaaaacataagtcggattatatcactcctctgatggcataccatttcactcagagtgaaagccaatgaccc

SEQ ID NO: 135957 - DNA, 201 bp, Homo sapiens
aactagtatatgcattttctttctttggactaggagagatagacatcctgtagttgttccatcactgcttttagaaagtcaggaatcttaggtttgaattkgactttgtcactaatgaccgtgtacccttggacaagtctttaacttctctaagcctcagtttcttctctggtaaaatggggttaattgtatctaactctt

SEQ ID NO: 135958 - DNA, 201 bp, Homo sapiens
tgatggcataccatttcactcagagtgaaagccaatgaccccctgggcctaaactattcatccgtttccccccagtttgctagtattctccccttgttctstatgctccgtactggtcttgctgtttcttttatgtgccaggcgtgcttttgcccgtagggcctttatactggtgctgtctcttttctgctggaatgcatt

SEQ ID NO: 135959 - DNA, 201 bp, Homo sapiens
ccagaccttgcccttttaccaacagcatggccaaggtatttaatatctgagccctagtttccttttttataaaatagaaataaaggcccatcaaataggtktgtttgagaattaagggtcagtttagtgaaagtgctttgtaaactgtattgattatacagatgtcagaattcttatttcaggatcttacagtgtttccag

SEQ ID NO: 135960 - DNA, 201 bp, Homo sapiens
tgattcagactcatgaatcagatcttacctaatatgttaattatttattgttgtataacaaattgacccatggcttggtggtttaaagcaataaccatttrttatcgcagcaaccatttatcttgtagcttctgtgggtcaggtacccagtgtggttcatctgggtcctctggctctcagtctatcacaaggctgtaatga

SEQ ID NO: 135961 - DNA, 201 bp, Homo sapiens
atgtcagttctgttccttgtagggggactacacaagggtgtcaataccaggaggtgcagattattgggagttgttttataagctgcctaccacacccaacrtcaaattttacctctgatttcaaggataaaaacaatcctgaggtagaagtgaaacaagaagaggtgtgggatctccactatagctccctggttattttct

SEQ ID NO: 135962 - DNA, 201 bp, Homo sapiens
actcaaatcttctgagactgaactttttttttttttaaaggaatctatgaaaatctggctttcagcgagtcttattttctttttactgtttcctcttaagrgttttttaagttggctgaatttactctacttactcatatgtgttttagtagctattgagccattttatttaatagcttgaataaactattggttattgaa

SEQ ID NO: 135963 - DNA, 201 bp, Homo sapiens
cacaggtgtttagcacatcactgatgtgctggtgatgccacagtgtgttagcgtttgccactcaattcaaacatctctccctcaaaaggaagttccttgayatgctcttctcacccctgactacctaggacagtcatattcatttattctgtgtattttttctaagattatatatataattaatgttttgttctagttgtt

SEQ ID NO: 135964 - DNA, 201 bp, Homo sapiens
ttgctgaagaggacatgaaaaacaaccttttaacttaagtacaatttacagaatacatgtgcatgtattacctgctaaagttaatattaaaaagaatgacstggaactaagactctcttgtcagccatgtgtaaaatacaccatcagtggacagcacaggtgtttagcacatcactgatgtgctggtgatgccacagtgtg

SEQ ID NO: 135965 - DNA, 201 bp, Homo sapiens
gtatttgtaatgcagtggaacttgcaaattgtgttagcctgaactctgggccccaggggaggggcgggtaaagatgattagtttttacagtattcctttcraacctattgggttttttttaattaggtgttatttgatcttattatgtttcatgagagcagtgatgacaatctgtgtggagaagaataggagatgctgcac

SEQ ID NO: 135966 - DNA, 201 bp, Homo sapiens
atcctgtggggcctcttttagctctacaattctgatttctgtttttcaggagccgatgaactattatctgtcatttttatatgctttctaaccttcccatrtaatatttttgaggtgtgtcacttattctgtatagtatgtttgccagtggttgaaatacagcaggagactaaccatttcggtagaaaggatttgactggc

SEQ ID NO: 135967 - DNA, 201 bp, Homo sapiens
gaattcaaatccaggtttgttttttttttaaacaccgaaatctatgctcttaaccaatgtatatactatcagctactaactgtctttcaccacaattaatrgtagaatgattatcttgagtatcttctttagggataactattaattcaaaggaagctcctttttaaaatacaacattggaaaaagaaaaatatagaaatt

SEQ ID NO: 135968 - DNA, 201 bp, Homo sapiens
agagccagttactgggagaagaaaggtagatgtcttcaaatttgttgacatttgtggtcatgaagacgaactagtatatgcattttctttctttggactakgagagatagacatcctgtagttgttccatcactgcttttagaaagtcaggaatcttaggtttgaattggactttgtcactaatgaccgtgtacccttgga

SEQ ID NO: 135969 - DNA, 201 bp, Homo sapiens
tctttatcaaaattgattcccttcttcacaaattgtatcaaatatgctctctgttgtggctttctcctctcgttttctgttttcaaatgcattctcccttmactaacatgtgccaaaaagaatataatgtccctcttgaactttgtctcatttaatggcatcaccttgttccagaggatgtaggtgtactcagatgcatgc

SEQ ID NO: 135970 - DNA, 201 bp, Homo sapiens
gagacacaccccactcccctgctggtctgtgagcccaggcatcagaggttagattttgatgtgacaagctgtcctcattcctttgagaccaaaggaagttytaaataattgacttagaattgaatctgggtgcagaatcccttaaatcaggtacttcctgttcttgtcacaccttcaatcagagccagagatgaatagttt

SEQ ID NO: 135971 - DNA, 201 bp, Homo sapiens
gaatttttatttctgtcctgatttcattgttcatataatgaacaatggttcattcagaagcaggttgtttaatttctatgtttttgtgttatttttgagaratcttctttatcgatttctgtttttattgcaccgtggtctgagagtgtgtttggaattatttcaattttttttttgaatttactgaaacttgctttaaga

SEQ ID NO: 135972 - DNA, 201 bp, Homo sapiens
atagatggactatttgtatactcggttacaaagcccaccagagaaacatactttcaaatccataaattgtgaacaaccatggtgcatcctattaaaagccyctcataggtgaggactctcacctagcaaataccatgtttgtttccctggagatctgtcattaatatgttttctaggagatttgaccatatcacttttatt

SEQ ID NO: 135973 - DNA, 201 bp, Homo sapiens
ctgatttctacccctgtagtgttgcatttttcagaatgatatataaataggataatacagtatttagtcttttgtgtctagcttctttcatttagcttaaygttattgcatgcatcagtagtttgttccttttaattgctgagtaagtatttcattggatggatgtaggttttcttaagctttaaattggcattggttgtt

SEQ ID NO: 135974 - DNA, 201 bp, Homo sapiens
acatgtgagtgcatgtgtctttttggtataatgatctattttcctctgggtatgaacccagtaatgggattgctgggttgaatggtagctcttatacagtwgtttcataacataattgtttgtggtatatgccaaatagtattcataatactgaactatatggagggattatctccattcctatcaaccccttcctttctc

SEQ ID NO: 135975 - DNA, 201 bp, Homo sapiens
atgaaaaaactttatgcagtagtttttctttttttaatttcagcttttattttagatacaggggatacatgtatatgattgctacatggatgtattggacyttgtagtgagcatagtacccaagaggtggtttttcaatccacacccttttcactccttcccctttctagtagtctgcagtgtctcttattcccatttatg

SEQ ID NO: 135976 - DNA, 201 bp, Homo sapiens
gcaagaaatagatcttcttaaaattctatttaattttcataagatgtttgaatgtatgagtgtttaagtgttttttttttttgttttttttgattgattcrtgtttatcctgtgggccatctttaaacgtggtttataataaaaatgcactcaaattaaatgtgcttcttttgaccagcatgaaagaagggagagaacagt

SEQ ID NO: 135977 - DNA, 201 bp, Homo sapiens
gcatacaacggatgagccttccagaacactgattatagaaaagtgtgttgaaataaatgatgtgatttattggttgtcacgcatggtttagcagaatggcyaactgtgttgccagcagcagcaagctatctagtttcatagaagtgattttctaggttttgattataatctggatagaacaaaagtgataagcaactgagg

SEQ ID NO: 135978 - DNA, 201 bp, Homo sapiens
gtagatgaggagatgaagataaggaccatagctatcgatgtgttttgccaccttgctttccaaaaataaaatgccaatttatggttgggttgctttctttraatagatcttctgaataactaatgaaacagagatgagtatgaatagagcacaggacagggtggctgaagttaaagaggaaggaacagagtttaatattta

SEQ ID NO: 135979 - DNA, 201 bp, Homo sapiens
ctactgatctttttactgtctctatagttttatttccagaatgtcatatattatagttggaattatacggtacctagccttttcatattggcttctttcasttagtagtatgcatttaagtttcctccatgtcttttcatggcttcatagtacatttccttttagtactgaataacatttcattgtctggacgcaacagtt

SEQ ID NO: 135980 - DNA, 201 bp, Homo sapiens
ttggcttctttcacttagtagtatgcatttaagtttcctccatgtcttttcatggcttcatagtacatttccttttagtactgaataacatttcattgtckggacgcaacagtttttattcacctactgaaggagatttttttgttagttttgttttgaccttgtttatataaccagctatagcctggttataaaaaggac

SEQ ID NO: 135981 - DNA, 201 bp, Homo sapiens
gctccttggagttttgccacttgcacgtgcatttcagctgtcagccaagaatttgtggaggattatacagatatctgaggtaccctttctgtggctcactytgttttgggattcttaatttctagattttctgggcctgtggtgcatgttctgactccttagactaatagatagtggctttctgtttcagtgctagcagtc

SEQ ID NO: 135982 - DNA, 201 bp, Homo sapiens
tagtggatgttggattaacgttcagctttcaaaggtctgaaggacatcttaattgcttccaagctttggcagttattagtaaacctgctataaacatccaygtgaaggtttttgtgtagacctaagttttcaactcctttggataaatattaccaaggagcttgattgctgggtcagaaggtaagaatatgtttcattttg

SEQ ID NO: 135983 - DNA, 201 bp, Homo sapiens
gtctgtgcacttgttgaaaggaaacactaccaactaggtctatgagtgacagagaccacggtgaaacgttttcaaaacctattcagaattatacatttgcytatttaaatggttggtattgccaaatgcatcctattctgaaagaagtgaaataaatgtgaaagctgtctttagctcattagtgaaatgaaggaaacattg

SEQ ID NO: 135984 - DNA, 201 bp, Homo sapiens
gatttcctatatagatgatcatggatctgtgaacaaagccagttttatttctttcccaatcggtatgccttttatttccttttcttgtcttattgcattarttaggacttctagaatgatgttggacagcagtggtgagaggggacatcattgcttttttcctgatcttagcgggagagcttccagtttctcaccatgaag

SEQ ID NO: 135985 - DNA, 201 bp, Homo sapiens
tatttccttttcttgtcttattgcattaattaggacttctagaatgatgttggacagcagtggtgagaggggacatcattgcttttttcctgatcttagcrggagagcttccagtttctcaccatgaagtatgatattagcagtaggttttttgtatttgttgaggacttgcatctatcattatgagtgatattggtctgt

SEQ ID NO: 135986 - DNA, 201 bp, Homo sapiens
tctctacatgtgcttatttgccattcatatatcttctttggtgaaatgtcttcaagtcttttgtctctcttttgaaattgtgttgccttagtaagttctamgagttctttgtatattctgaatacatatccttaatcagatatattttgctaatactttctcccaatctatggcttgtttttattttgagtgtctggcaaa

SEQ ID NO: 135987 - DNA, 201 bp, Homo sapiens
tgatgttggacagcagtggtgagaggggacatcattgcttttttcctgatcttagcgggagagcttccagtttctcaccatgaagtatgatattagcagtmggttttttgtatttgttgaggacttgcatctatcattatgagtgatattggtctgtagttttttctcccctgtagtggcctcatagaatgagttaggaag

SEQ ID NO: 135988 - DNA, 201 bp, Homo sapiens
ctatgttcttactgactttctgcctgctggatttgtctattcctgatagtagggtgttgaagtctctaattataacagtggattcatctttctggttgcarttctatcagtatttgcctcacatagtttgatgctgtattgttaggagcctatacgttaaggattgttgcctttttggagaattgacttctttatcattat

SEQ ID NO: 135989 - DNA, 201 bp, Homo sapiens
ctctggacttcaggtatccttctgtaactgctttggatcatttagcagctttagttgctcttcatgagttgtcgttgtagcctttaagcaccgctttcttrtgagaccaccccagccttcagctttgtctggcacttataggtagctgtgcttaaataggtctgttatttttattttctctttagaacctctggaatcaat

SEQ ID NO: 135990 - DNA, 201 bp, Homo sapiens
acatttatttaatccattgtttgttgatgggcacttcagtttttccacatcttgactattgtgaataacgttgcaataaacatgagagtgcagacatctayttgacatacgaatttcaattcccttatatataagagatctaaaggttctaactggtttagagtacaaaccagaccagaccagaccagaccagaccagacc

SEQ ID NO: 135991 - DNA, 201 bp, Homo sapiens
ttcttgttgcaaatgatggaattctgtattttccttaaggctgaatagtattccattgtacatatatatgctacatttatttaatccattgtttgttgatkggcacttcagtttttccacatcttgactattgtgaataacgttgcaataaacatgagagtgcagacatctatttgacatacgaatttcaattcccttata

SEQ ID NO: 135992 - DNA, 201 bp, Homo sapiens
atttcttccctttttaaggttgaatatcaaatcttgtacgagcggttttgtttgtttttattttttgtttttaagggaagagggttgaggatgttagtgtrtttggtgtctgagaaggattactacaggttgcagggtggggtaggggagaaaagattttggggcttcttaagttttaactttgcatagtgattcagtaac

SEQ ID NO: 135993 - DNA, 201 bp, Homo sapiens
tatgtgtcttgtacagagtttgttaaatttatgtggtagccagtaggattcaattattaaagaaaactcaaaagatccaaaatgacaatgtctagaaatcsatgacctgatgtaggaaaaggatgcaatacagcaacaggattagagcattaaagatatgcgtcgtaggcaaaggcttcctaatagcaaggggtctagagg

SEQ ID NO: 135994 - DNA, 201 bp, Homo sapiens
gtatgctttgaggatggatttgggcacacatgcagcctctctcctctccagtgaaaatcacatactgctcattgttaagagattcctgtctctgcccttaytgagcttctaacttgctggaacaagaagacatatcaatttatatgactgggtggccggcagcatattgacctttggtaatttgtaacaacttttcttacc

SEQ ID NO: 135995 - DNA, 201 bp, Homo sapiens
tgtattctgtgttttctccagccaagaagacttttcagctgtattttttatagtttgtatgatggagaaatataggctgttaaatatgctgtttcataccrttctccggtatgctttgaggatggatttgggcacacatgcagcctctctcctctccagtgaaaatcacatactgctcattgttaagagattcctgtctct

SEQ ID NO: 135996 - DNA, 201 bp, Homo sapiens
ttctcactgccaactcagatataaaatgtagcagagttccttttattaatacatatgatatttgttgaattagagcttgttacttattgttatgaacttaygatactggcataagtgaggagtaagaatggtttctctcatcatttgagtgaaatctacatgtaagagtaaatcttttaagtgacagaaagcaaactcaac

SEQ ID NO: 135997 - DNA, 201 bp, Homo sapiens
tgaagaacctgaatagaaagtgaagaactttcttctttgagactctggagtacaggatatagtaactactttctcactgccaactcagatataaaatgtarcagagttccttttattaatacatatgatatttgttgaattagagcttgttacttattgttatgaacttacgatactggcataagtgaggagtaagaatgg

SEQ ID NO: 135998 - DNA, 201 bp, Homo sapiens
ttggaaatataaactcttgtgttttgtgtgtgttgattttcacaatgataggttgtttccatttttttgtataattttgtattatgaactcatccttaggytgcttcccaccgtgggaattttgtgtggtctagtttgaaaacatgtccctccaggtcctattttatatttgcttactctttttagtctcaataaccctgt

SEQ ID NO: 135999 - DNA, 201 bp, Homo sapiens
gatgtcttttaagtggttgttggggcaagggactcttccacttttggggtaccagctgtttcagctcttatattggagagtcaaaagaaaaagcagtagtrggcactaagtgatgtggacctcatcatacatatcgccaattgtctttagcatcttcatatgatttcagctgccagtaaacaattcatctctggacttatc

SEQ ID NO: 136000 - DNA, 201 bp, Homo sapiens
tgtatcgtatccgctgttacgtattcccagttcttcctttgtaatgtcttacctgtaactttgtttctgtcttaattgtcatcatgagaataaggtagcgyaggatttttaaaattctttacttcactcaagtacatacctatgtatttaaactctttgccctggtgtctttggagactcttgcttgaaaaccattgtaaa

SEQ ID NO: 136001 - DNA, 201 bp, Homo sapiens
aatttttttgtttgcttttatatccctcacagaatccagcagttttccttaggaagaagtaaattaacatgtggttatacaattcattttgtatcgtatcygctgttacgtattcccagttcttcctttgtaatgtcttacctgtaactttgtttctgtcttaattgtcatcatgagaataaggtagcgcaggatttttaa

SEQ ID NO: 136002 - DNA, 201 bp, Homo sapiens
agctgccaaaatgcaataaaatatttcgactgcagtttgagaaatttgacaacctcatattaaattcaagagttagcctgtatttaatatgtgtcagtttrcttctgcattgcaaaatacatggctaaccatggtgtttgacacttgctcatgcactttttatcacaggagcatcacaaaatgattttttatctgcattga

SEQ ID NO: 136003 - DNA, 201 bp, Homo sapiens
gttgggattacaggcgtgagccaccatgctcggcctggacacagtttaattgtcattggatattttactgtgttcctatggtaaattactataattggaaraggaatgttgcaacgttgcaaacaatgtatggcaatcattttgctttccaagtatacattttcctactctaaaaacttaagtttgcaactgcacatttta

SEQ ID NO: 136004 - DNA, 201 bp, Homo sapiens
ggccaatccagggtacttttcctttccatttgaggcgtggtggggggtggggggattgtagggagagtagcctttgatcgtttgttactccatgttgggaratgggggttttcctttggtttagctttaggaagtttcagaaagtttgtgttaattggccttacggtccccgcccccagacccaggtgttttccttttgat

SEQ ID NO: 136005 - DNA, 201 bp, Homo sapiens
ttggttgtctttactaagatagcgagaaaaatatttcccatctcacacattctactttataatgtggttttgatattcttcccacaacgaggtggagtctrtgtccctctactagaatatggacaggcttgtgataatggtggaagagatactagtgtgacttcctagactgagtcataaaaagtgtcttggcttctgcct

SEQ ID NO: 136006 - DNA, 201 bp, Homo sapiens
tttttcacttcagtgcacagaatttgtgccacttcatggtctctctttttgtttttttttttgactcttaaaatttaccttaaggtacctcccacccacamacactttcagtctcttttttagtttatccccaacagtgcttctggagttatccaaaaatatagatgagatcctgttgtcttcacattgccctaatggttc

SEQ ID NO: 136007 - DNA, 201 bp, Homo sapiens
taagccaggtagtctgataccagtgcaccaaaccagtaggctttactgcattgcatttatttaaatcccatttgtttcattgttgaaggagcagctttttcccccgctaagcattgttctgttttacttctttaattttagaaatattttcttaagatttggttgagaaataaatgcagtgtgaaatcagttgtcaaggtt

SEQ ID NO: 136008 - DNA, 201 bp, Homo sapiens
catgctcaaagactttatctggaagccatgggaagtatgtggcgggactctgtatagagagaatatatctgagctgtaaaggttggagggtaagagatcargtaggagactggagactattggtagagtctaggtcttgggtcctttgagaggcagatgacaaaatgggattgggtgaactggagctttaggggttacagg

SEQ ID NO: 136009 - DNA, 201 bp, Homo sapiens
gtgcatgtggacccttggtgtctctttgttcaagtttcttctcataaagacaccgtttgtgttggatcagagtccacccctatggggctctaacttaatcaacctctttaaaggccctgtctccaagtatagttatgttctgaggtacgaggcattagggcttcaacataggaattttgggggacacaactcacttagcct

SEQ ID NO: 136010 - DNA, 201 bp, Homo sapiens
ggataattttgtgggatacagagttccaggctggtggtttttctctctccacactttaaatatttcatttcactctctccttgcttgcatggtgtctgagraatcaggtgtaattcctgtctttgttcctctatagatgaggtgccccccgtccacttctttcaggattaaaaaaatatttaattttctgtagtttgacag

SEQ ID NO: 136011 - DNA, 201 bp, Homo sapiens
agtggacattgatctcttaaagagttgagatagctatgaaaatttttgtgacaattaacaattaacttgaaaatgtaaagactgcttgtctaggatttttyacttttctcttttttctgtttgcctccagcctatttttaatattcatcagacagatttttttaatcattagatgtctctaagacctttcataatttatgc

SEQ ID NO: 136012 - DNA, 201 bp, Homo sapiens
tggactccttgctttctggtgttctaagtttatcttatctatttccagttctttttttttttttttttttaaggttatagattttcttttttttttttttwaatttttttttttattatactcttaagttttagggtacatgtgcacattgtgcaggttagttacatatgtatacatgtgccatgctggtgcgctgcaccc

SEQ ID NO: 136013 - DNA, 201 bp, Homo sapiens
catcttggctcctcccaaggttatctccagttcttataaaatccttctagcaggatctggtatataaagaccatagtctaagtgctaacaggcatggtcattgtgttaagctttacagtggacaggcctttttaaaagagttcatgctgataattacaaatggtatttagaattacaaggtttttattaagcctcatttaa

SEQ ID NO: 136014 - DNA, 201 bp, Homo sapiens
ctgttatctttttgtccttggaggcttatgcttaaattatttcttgcatgttttaaaatttatcgcttgctggaggaagcagagttgggtatactcaatayattatttttagctggaaatatctgccttgatttagcccttggttttgaaacatacctgaggtattgtttttttttccttgcaattcctggaatctgtact

SEQ ID NO: 136015 - DNA, 201 bp, Homo sapiens
ttaatacatatgatatttgttgaattagagcttgttacttattgttatgaacttacgatactggcataagtgaggagtaagaatggtttctctcatcattygagtgaaatctacatgtaagagtaaatcttttaagtgacagaaagcaaactcaaccctaactttgttttctgcttacttagacaattggctattgatttt

SEQ ID NO: 136016 - DNA, 201 bp, Homo sapiens
gatcataaaataactaattgaataaaacgacttgaattgtcatctgtagtgattctagtgtaaattatggcataaaattaaaacttcggaatgaaaaaacytgttcttcaaaagtatgttgtcttatttaatgacaacatgcaaatgaaaacaaatttacatttattgcaatttaaaatttatttctttgttttaactaag

SEQ ID NO: 136017 - DNA, 201 bp, Homo sapiens
gaacatatagatcctcttctcttgtaacttgttgctactccctgttctcattgatccttgagcaggcttcactacagtgcatacctccccacagaggggargctgggtgtccttggcagaacaggtgctcacttaatagaggcagagaagggtctggtgcattttcttcctctggttgcaattccttggtggccagatcac

SEQ ID NO: 136018 - DNA, 201 bp, Homo sapiens
ggaagagtgaataagtatagtaattcagtcactaagcacgcctattggaattctaacagtgtaacaaaatttaatctaatatataatactttaaccatagyctgcattttaaaaataatacaaatataaggtataaaatgaaaataattttcgagttctcatcacttctgcttttattatggagtgtgttataatctccaa

SEQ ID NO: 136019 - DNA, 201 bp, Homo sapiens
cccagttagatgattttcagatgattacatggagaagcttacttttatgagacaatatagtgaaatggttcacaacgttggctctggagtaaaacttagasttcaaaccttgcctcagccatttgtaaactgtgtaacttgggaaatattacttcttactttagttttcctcttctggaaaataagactaataatagtact

SEQ ID NO: 136020 - DNA, 201 bp, Homo sapiens
ctctcttatatttcctgccttcactatttgaggaaatctgattttgttggctgaatgtcatgacccctgaccctgacacaacagatgctgtcgatggggartaaatgtgggacaggaatgattgtaggctgtgtagtaattatggtacaaactgctgtggttttgtaagacctgttcttggcaggagatgttgctttcctt

SEQ ID NO: 136021 - DNA, 201 bp, Homo sapiens
ggacagaaaaccaaacaccacatgttctcactcataggtgggaattgaacaatgagaacacatggacacagggtggggaacatcacacactggggcctgcygggggtggtgggagggggaaggatagcattaggagatatacctaatgtaaatgcagcacaccaacgtggcacatgtatacatatgtaacaaacctgcacg

SEQ ID NO: 136022 - DNA, 201 bp, Homo sapiens
taaataaagtatacattgggtgcatatttaaaatgttcctatgaaaagatgtaagtgattaaaagcacttggaaatgaaatagatgagtaagggtcaaaaytagagtatagccttaggtatatgagaggaagaatggtaattcaagacacactgtacatctagaatctatgggtgatagaaggaacaaaaaagattctgtt

SEQ ID NO: 136023 - DNA, 201 bp, Homo sapiens
gtttagctgaatgattcatttaacagaatcatttactgtttctagtatacagtatagattccaaaggcctagcctttaatatgagcttcgcttgccctccrtctgagttgtctaagtagcatgaattatttccccatcagtgtcctcatagtatttattcattaatatgtttgagggcagtgcttaatttttaaggtttat

SEQ ID NO: 136024 - DNA, 201 bp, Homo sapiens
gttaggggaaacgtgtgtacaaaagggaagttgatttacagcataattgtgtgagtagttcgataacctaataactagttagtagaaaacttaagattcayatctcccattatctttctgttattacatttggcaagtcaatcttcagtttaagtcgactgtataactgtctttcagtctaaatcacacctgcttatttag

SEQ ID NO: 136025 - DNA, 201 bp, Homo sapiens
atagagggttaaagatagatcaagaagagaaaagatcttttcattcccttaataaaaatatgttaaaccacatcagtaatattaaaaccaaaaagctacarttagattcttctcagcagttcccttaatcctacttaagtcttataactagtggatgttggattaacgttcagctttcaaaggtctgaaggacatcttaat

SEQ ID NO: 136026 - DNA, 201 bp, Homo sapiens
atcagactgccgaagggggcctatgacaagaggaagaggctgagagtgaaagagagtgagttaggggaaacgtgtgtacaaaagggaagttgatttacagyataattgtgtgagtagttcgataacctaataactagttagtagaaaacttaagattcacatctcccattatctttctgttattacatttggcaagtcaat

SEQ ID NO: 136027 - DNA, 201 bp, Homo sapiens
catagtgtacagaccccaaagtctactgatgaaataattaaaaatactattgagcctttatgcagagtgggttagcctgagtatttgggagtgttagttgmccttaaataccctctgccatgtcccctcttaaccctcaatagttaaccaagtattcttttactcacttattatggatatattactgtcccaaatatgaaa

SEQ ID NO: 136028 - DNA, 201 bp, Homo sapiens; identical to SEQ ID NO: 24065

SEQ ID NO: 136029 - DNA, 201 bp, Homo sapiens
gtccaaacacctggaatccacagaagggaatgtctggattatataaggacttgtggctgcagatagaattaatagaaggcggtttagcacggtggctcacscctgtaatcccagcactttgggaggccaaggcgggtggatcacctgaggtcaggagttcgagaccagcctggctaacaggtgaaaagccacctctactaa

SEQ ID NO: 136030 - DNA, 201 bp, Homo sapiens
caacccaaccacccagcccctagcctggtcaggagcaggaggttccccgcgtgccaccaggaagctcgggccggccaagagcgtagactcttgagaggagygagacaggtgcgcgccagccggccttcggggctttatgggaactgggccgtgcggcggtcccgccctcgtgcgcaggcgcagaaccgttgtgaccagagc

SEQ ID NO: 136031 - DNA, 201 bp, Homo sapiens
acaggtgcgcgccagccggccttcggggctttatgggaactgggccgtgcggcggtcccgccctcgtgcgcaggcgcagaaccgttgtgaccagagcggtkgcgggctgagcggtttcgagccggcgtcggggagcggcggtaccgggcggctgcggggctggctcgacccagcttgaggtctcggcgtccgcgtcctgcg

SEQ ID NO: 136032 - DNA, 201 bp, Homo sapiens
ggtgatcagcctgcctcggcctcccaaagtgctggaattacaggtgtgagccacagcgcctggccaagaatgattatttttaagattgaactcaggttgtrtcacttcctaactcaaactgcccagcgtcctcccatttaactcagaataaaagcctttgcaatggcctaaaggtaggatgattatattctttagtgttta

SEQ ID NO: 136033 - DNA, 201 bp, Homo sapiens
agagtttcaccatgttgaccaggctagtctcaaactgctgacctcaggtgatcagcctgcctcggcctcccaaagtgctggaattacaggtgtgagccacmgcgcctggccaagaatgattatttttaagattgaactcaggttgtgtcacttcctaactcaaactgcccagcgtcctcccatttaactcagaataaaagc

SEQ ID NO: 136034 - DNA, 201 bp, Homo sapiens
gctaacaggtgaaaagccacctctactaaaaatacaaaagaaaaaaaaaaaaagccaggcgtggtgctaggagcctgtaaccccagctactcgggaggccraggcaggagaatagcttgaacctgagaggcagaggttgcagtgagccgagatcactccagcctgggcgacagagcgagactatctcaaaaaaaaaaaaaa

SEQ ID NO: 136035 - DNA, 201 bp, Homo sapiens
atcacttaaactcagttgagttaaatgagttaggtataagttaggcataattattatcctcatttctcagatcagactaaggcataaacagattaacttgstggaagacattcatctctttgttttaaaatggcaaacctaagatctaggctagagattgaaatacttcctggaattataccacccatctgtcagggaaaa

SEQ ID NO: 136036 - DNA, 201 bp, Homo sapiens
gccagaatttaccagataggcactgactttgccagcagagggagcagccagctctttctgtgggtgacttgttaaaccttacgcttcttagcactcagcaycccctgggctgtcaaaccctcacttatttacacaggaccttcatttgaaatgggtcattctggtttccgaccatctcttattctaacaatttgtcatctg

SEQ ID NO: 136037 - DNA, 201 bp, Homo sapiens
aggatgtcgtatgtttgaaatgtttgttttttggtgctgtaaagaaatagtattcgaacattaatttattttatttagtaaggccgtttttattttttgtwgaaagggtacacttgtcagcagttttgtcccaagagtatactgaacaaaggagacagggttatttataacctgacgcatttaccctactgctgtgtccgg

SEQ ID NO: 136038 - DNA, 201 bp, Homo sapiens
gctaatttcttcatgccaacatcatttcatgaagcccctgattctgtgacgatgtgcagatgtgccgctttctggaagaatgatttgaagacaaaattggwtagagcacacagcccccatgtctcttgcccgagtcactgtatgtcttaaacgataaatgatcctagtcttgccttttcctacacttaagataacatctgg

SEQ ID NO: 136039 - DNA, 201 bp, Homo sapiens
tgttttttgcttttcttttttttttttttggttttgtttgtttttgagacagagtcacactgtgttgcccaggctggagtgcagtggcacgatctcggctyactgcaacctctgcctcccaggttctagcagttctcctcagcctcctgagtagctggtattacaggtgtgcgccaccacgcctgggtaatttttgtattt

SEQ ID NO: 136040 - DNA, 201 bp, Homo sapiens
catcttgggtttggtggggtttggctggcttctttactgtaacctgttttatcagcaaggtctttacgacctgtatcttgtgctgaccttgtgtctcatcytgtgacttagaatgccttaaccatctgggaatgcctgccgcccagcaggtttcagccttattttactcagctcctattcaagatgcagttgctctggttc

SEQ ID NO: 136041 - DNA, 201 bp, Homo sapiens
cttcaaagagcaaatcatggactttaacaaaaagtgaaattaattttgaacttgtattatttagtataaatctgatttctattaataaatttaacaaaacygtaaccaaaaatatatatatattatataaaatatatataatatatattatataaaatatatataatatatattatataaaatatataacatatattattt

SEQ ID NO: 136042 - DNA, 201 bp, Homo sapiens
tcctattcaagatgcagttgctctggttcaaacgtctctgacggaatcatacagtatgtgaccttctggaaatggcttttctcattcagcatttttgcccytgagatccatctaagttgttgcccatatcatttatttctttattgctgagtagtattctctagtatagttgtaccacagtttatttaaacattcacccgg

SEQ ID NO: 136043 - DNA, 201 bp, Homo sapiens
ccctgagatccatctaagttgttgcccatatcatttatttctttattgctgagtagtattctctagtatagttgtaccacagtttatttaaacattcaccygggaaaggatattttggttgtttctagtttgggactattacaaataaagctgctatgaacattcatgaacacgtttttatatgaacataaatgtccatac

SEQ ID NO: 136044 - DNA, 201 bp, Homo sapiens
gtataaatctgatttctattaataaatttaacaaaactgtaaccaaaaatatatatatattatataaaatatatataatatatattatataaaatatatawaatatatattatataaaatatataacatatattatttatataatatatattatataaaatatatataatatatattatataaaatatataacatatatta

SEQ ID NO: 136045 - DNA, 201 bp, Homo sapiens
gatttctattaataaatttaacaaaactgtaaccaaaaatatatatatattatataaaatatatataatatatattatataaaatatatataatatatattatataaaatatataacatatattatttatataatatatattatataaaatatatataatatatattatataaaatatataacatatattatataaaatat

SEQ ID NO: 136046 - DNA, 201 bp, Homo sapiens
actaaagcagccttttcctaatgaattgttattgttatactgcagtgataagggctccaactgtgcagaaatacttgagatcactgttctcctaaaaatayatacaaaacagatgcaatgtatttgagtttctcaaatcagccatgatttttgactaggaatcacttgaccagtgaatgattactttatcttcctgtattt

SEQ ID NO: 136047 - DNA, 201 bp, Homo sapiens
ctggtgtgttttacacttacagtacatctcactgaggacagccacatttagctagcagccactcagtagccacatggagctgcagcttctgtaagtgcacrgcacaggtctagacagaacctgtgtgagaaaaactgataacagagaaaaacaaaaagctcctgtagttgctaactctccgtgttagcaactacatggatg

SEQ ID NO: 136048 - DNA, 201 bp, Homo sapiens
atttctattaataaatttaacaaaactgtaaccaaaaatatatatatattatataaaatatatataatatatattatataaaatatatataatatatattatataaaatatataacatatattatttatataatatatattatataaaatatatataatatatattatataaaatatataacatatattatataaaatata

SEQ ID NO: 136049 - DNA, 201 bp, Homo sapiens
tagaatgttggaattaaatgggtgccccatcaacatataacatgaaactttaagtggttttaaggtacattgttggttatggtgttcattctcattttcarcctgtcactttttttctgtttatttttggcagaaacttgggaaccgtgggtgctgttgccttggactgcaaagggaatgtagcctacgcaacctccacag

SEQ ID NO: 136050 - DNA, 201 bp, Homo sapiens
ataaaatatatataatatatattatataaaatatataacatatattatataaaatatataatatatattatataatatatattatatattatataaaatatatataatatataatatatattatataaaatatataatatatattatataaaatatatattatatattatataaaatatattatatgttatatataaaata

SEQ ID NO: 136051 - DNA, 201 bp, Homo sapiens
gatcatggctactaacctgacctttgtctgtacttgagcacccttcgcgatttaactttcatgtagcgtccgacttctaatatggatttgaatttcttgaytgttactgctcagaacaatcaccctttttgagcaggagctggaggttatgccgacaatgacatcggagccgtctcaaccacagggcatggggaaagcatc

SEQ ID NO: 136052 - DNA, 201 bp, Homo sapiens
atatatataatatatattatataaaatatataacatatattatataaaatatataatatatattatataatatatattatatattatataaaatatatataatatataatatatattatataaaatatataatatatattatataaaatatatattatatattatataaaatatattatatgttatatataaaatataata

SEQ ID NO: 136053 - DNA, 201 bp, Homo sapiens
aatatatattatataaaatatataacatatattatataaaatatataatatatattatataatatatattatatattatataaaatatatataatatatawtatatattatataaaatatataatatatattatataaaatatatattatatattatataaaatatattatatgttatatataaaatataatatatattat

SEQ ID NO: 136054 - DNA, 201 bp, Homo sapiens
agtactccctggaatgaagccaagaaaaaatatttttatggaataaatacataatttattaaatgtgtctgtgtgtgtgcgcgtgcatgtgtgcgtgtatrtgtgtgtgtttgccattcatctgccatcaccagccgattaacaaatgaccctggtatacacaataataactaagttaagtcgtcactggtagtttgtcaa

SEQ ID NO: 136055 - DNA, 201 bp, Homo sapiens
attttctgatgaacaattgatttaaagttttgtccaaacacctggaatccacagaagggaatgtctggattatataaggacttgtggctgcagatagaatyaatagaaggcggtttagcacggtggctcacgcctgtaatcccagcactttgggaggccaaggcgggtggatcacctgaggtcaggagttcgagaccagcc

SEQ ID NO: 136056 - DNA, 201 bp, Homo sapiens
gcagaaccgttgtgaccagagcggtggcgggctgagcggtttcgagccggcgtcggggagcggcggtaccgggcggctgcggggctggctcgacccagctkgaggtctcggcgtccgcgtcctgcggtgccctgggtaagtcggcggccctcccggagcagccgcccgagacgcgggagggcgaatgaaataaacgaaaat

SEQ ID NO: 136057 - DNA, 201 bp, Homo sapiens
gactcaagaaagattgtcttttttgccattttgtcaatagaagtcacgttaagtataagaacatcatcaggccgggcttagtggttcacgcctgtaatccyagcactttgggaggccgaggtgggtggattgcctgagctcaggagttcacaaccagcctgggcaacatggtgaaaccacgtctctactaaaaaatacaaa

SEQ ID NO: 136058 - DNA, 201 bp, Homo sapiens
ttgacaaaactgccatcatcatcatggctcgttcttgacggtcgctgtctcttcggagctgctgggtacacctgcagactagcaacagacagaacaggcaygcaaggattaatatgaaatttacaataatagtacttccgatggtcttaacccaagtgacagggttaagatttgtgagaccatcaggaactgctgattgcc

SEQ ID NO: 136059 - DNA, 201 bp, Homo sapiens
attaattttactctgacacccagactggagtgcagtggcacaatcagagctttgcagccttgacttcctaggctcaagtgatcctcccacctcagcctccygagtaaagctggaactgcaggtgagcaccaccacacccagctaattttttattgttttgtagagacagggtctccctgtgttgcccatggtcgtctcaaa

SEQ ID NO: 136060 - DNA, 201 bp, Homo sapiens
aataaaattttaaaaaatcccaaatctgctgtttttattttgcttttgctatggtatttttgccacataaaagattttagggccaggcgtggtgcctcackcctgtaatcccagcagcttgggtggctgaggcgggtggatcacttgagcccaggagtttgagaccagcctgaccaacatggtgaaaccccgtctctacta

SEQ ID NO: 136061 - DNA, 201 bp, Homo sapiens
tggtagatttatgctttttgccaaatacaaggaattttcaggcattatttttttgaatacttctcattcccacccattttctcctcccatctaggagtctratgacttgaatgttagctcttttgttatggtcccactggttggctgggctctgttcattttggttttttccaggccctgttctgttgttcagactgagtg

SEQ ID NO: 136062 - DNA, 201 bp, Homo sapiens
tttcaggcattatttttttgaatacttctcattcccacccattttctcctcccatctaggagtctgatgacttgaatgttagctcttttgttatggtcccrctggttggctgggctctgttcattttggttttttccaggccctgttctgttgttcagactgagtgatttcttagtccagtaattcttctgtcttgtctgt

SEQ ID NO: 136063 - DNA, 201 bp, Homo sapiens
cctcaaacccctggctcaagtgatcctcttgcctcagcctcccaagtagctaggcctttgggtgtgtgctactatgcccagctaatttttttttaagagakggggtcttgctgtgttgtccaggttggtcttgaactaggcctcaagagatcctcttgcctcagcctcccaaagtgctgggattacaaagcacaggtatga

SEQ ID NO: 136064 - DNA, 201 bp, Homo sapiens
ttttaaatttgaatgctaggaatattctttaaaaacttacttagattggcaaccaaatgaccatttgctttcactggagctcagcgatatttacacagcayttgagatattctctctacaattcaatttacaagctattagagaatctttgagataacaggattttttttttttttttttttgagactgagtctcgctctg

SEQ ID NO: 136065 - DNA, 201 bp, Homo sapiens
ctccttcaaattccatgcacatggcaggcatgtttgtgcatcaggaacgctcctccccagcagctgggatggcatgattgcccctctgtcctgcagagacwctctgtgtaaaacagcacctccccaccatcactcttccctggtgcttctttgtttttttgtttgggttttttgtttttttgttttgtttttgtcacctga

SEQ ID NO: 136066 - DNA, 201 bp, Homo sapiens
atattattgccctgttactaccaccctctaccccaaatgcaggctccatgggagaaaggactttgtttagctttaccactgtgtcccagcacttaaaacartgcctcaaatataattcattatagaaccttgctggtgggtatgctggggtgttcgtgtacaatttgttcaactgtgttacagtcacgcgtctcatgacag

SEQ ID NO: 136067 - DNA, 201 bp, Homo sapiens
aaaagagtagagctgaaaagagggaaagcaaagattatggggggaaaggtgggacttttaacagcgtactgtggaccttggcttttcccagccaaggtcastaccggcaagcaatattcccagcatcctctgctataatcctctagaataaataactgtttgggaacttcatacaaaaagctgactcccagtaggtattga

SEQ ID NO: 136068 - DNA, 201 bp, Homo sapiens
aaatgttaggggaaaattaacggatttgatctttacgacaaccccatgcacagggtccataggcaggcagcatcagcgacacccgggaggttgtcagaaaygcaggatcagccaggcacagtggctcacgcctgtaaccccagcactttgggagtccaaggcaggcgtatcacctgagctcagaggtttgagaccagcctg

SEQ ID NO: 136069 - DNA, 201 bp, Homo sapiens
tttgccagcagagggagcagccagctctttctgtgggtgacttgttaaaccttacgcttcttagcactcagcaccccctgggctgtcaaaccctcacttayttacacaggaccttcatttgaaatgggtcattctggtttccgaccatctcttattctaacaatttgtcatctgcatgcattgggaagcacagattaggga

SEQ ID NO: 136070 - DNA, 201 bp, Homo sapiens
aaatcaccccaaaaccaccatctctgactcaagcttccatgcgacagcctgatccatttccctggacaggtctctcctggaacgcagcccaggcacctgtrctcctggaacccttgaggtctctcctttgagtcgtggtcaccgagagggttgaggacgcagcacctgaggtcccagcctttgcaggagccgccctgggca

SEQ ID NO: 136071 - DNA, 201 bp, Homo sapiens; identical to SEQ ID NO: 24064

SEQ ID NO: 136072 - DNA, 201 bp, Homo sapiens
acatgacgctttctagtccacctttgcctccgcagatcatggctactaacctgacctttgtctgtacttgagcacccttcgcgatttaactttcatgtagygtccgacttctaatatggatttgaatttcttgactgttactgctcagaacaatcaccctttttgagcaggagctggaggttatgccgacaatgacatcgg

SEQ ID NO: 136073 - DNA, 201 bp, Homo sapiens
ctgaggctccctttatcctcctaaattctggggcatctacatgacgctttctagtccacctttgcctccgcagatcatggctactaacctgacctttgtckgtacttgagcacccttcgcgatttaactttcatgtagcgtccgacttctaatatggatttgaatttcttgactgttactgctcagaacaatcaccctttt

SEQ ID NO: 136074 - DNA, 201 bp, Homo sapiens
tgggttgaattacggcatttacggctcttaagtcagttaacttatgccatctgccggattttttttgaattacaaacacaggagaattccaaggcgagaaygaaggctcaatatgtcccttttctaattgttcctttgctaataaatgtaaagcctccagtttttgttttggtagcggccactgatttacccataccggtt

SEQ ID NO: 136075 - DNA, 201 bp, Homo sapiens
tagattcttgcatcacaaagtattatttccctgtagtgctaggtatccattttcttgcctctctgcatgttggaatatttagttctgaagattgttacagrgagggttctgtggtgtaatggttagcactctggactctgaagattttcatgagttagtgtagtgtctgtagaagttgcacatggggactgttactcttca

SEQ ID NO: 136076 - DNA, 201 bp, Homo sapiens
cagcatcagcgacacccgggaggttgtcagaaacgcaggatcagccaggcacagtggctcacgcctgtaaccccagcactttgggagtccaaggcaggcgkatcacctgagctcagaggtttgagaccagcctggccaagatgatgatgaaaccctgtctctactaaaaatataaaaattacccaggtgtggtggtgcatg

SEQ ID NO: 136077 - DNA, 201 bp, Homo sapiens
aagcttggctaagaatccagaagcatactatgtgacatatacagcccatcatttgaaatttgtttctaggatgcatgacctccactgtgccactaatggtrgtgctttggaacaatagagggaataaatgcagtgtcttctagatatgcccaaagatggaatatcttgactaaacttatatttcaccctataacaagtctc

SEQ ID NO: 136078 - DNA, 201 bp, Homo sapiens; identical to SEQ ID NO: 24066

SEQ ID NO: 136079 - DNA, 201 bp, Homo sapiens
caggtgactgaagttttgagaagcagctaaattgttccatctgccctaaagagcagcttattcttttagaggaaaactagccctaccttccctttttaatrtgttgctctagtctttagtaataatctacactctcgacaattcttgataccctttttctgtcatgaactcagagacactggaagcttccttaaaaagagt

SEQ ID NO: 136080 - DNA, 201 bp, Homo sapiens
agcttattcttttagaggaaaactagccctaccttccctttttaatgtgttgctctagtctttagtaataatctacactctcgacaattcttgataccctytttctgtcatgaactcagagacactggaagcttccttaaaaagagtagaggcttggtaactcctcttctccttggtatatcacccaagagatgtgaagta

SEQ ID NO: 136081 - DNA, 201 bp, Homo sapiens
cccttggagacacctggccttctgtggtcctagagtaactgaaaagtaagcaaagacttggctgcttccaaatattagggcactttgacaccatggaaccyggtcagttaattccccagcagaagcttataagaaaaagtaaaggcgcctcctcccactgcagcagttcattggctgtccagtgtcagctccctccagaac

SEQ ID NO: 136082 - DNA, 201 bp, Homo sapiens
ttagcacggtggctcacgcctgtaatcccagcactttgggaggccaaggcgggtggatcacctgaggtcaggagttcgagaccagcctggctaacaggtgraaagccacctctactaaaaatacaaaagaaaaaaaaaaaaagccaggcgtggtgctaggagcctgtaaccccagctactcgggaggccgaggcaggagaa

SEQ ID NO: 136083 - DNA, 201 bp, Homo sapiens
ggatgttaggttgtgggtatcattttccccaaatcactggaacatgatggccttgctagagatccatataatgcagtcatgctgtttcttcctccatagtrtgtggggcatgaggaggagacagggagagggtggcttcattgagcaaaaaggaatggctgtgctttggggccaaggagatgctgtcctgctgtagctgct

SEQ ID NO: 136084 - DNA, 201 bp, Homo sapiens
ttactgtttgcctacacatgctagacattattctaagtgtttaatatgcaatacctacctcattgatggttgtaaggattaaatgggttgatgttcttacycattttacacatgaagaaacaagcacaaagagattgagaagcatagctagatttgtaggcattatctgggcagagaaatatagagaaagggtgctagtgg

SEQ ID NO: 136085 - DNA, 201 bp, Homo sapiens
caaacacctggaatccacagaagggaatgtctggattatataaggacttgtggctgcagatagaattaatagaaggcggtttagcacggtggctcacgccygtaatcccagcactttgggaggccaaggcgggtggatcacctgaggtcaggagttcgagaccagcctggctaacaggtgaaaagccacctctactaaaaa

SEQ ID NO: 136086 - DNA, 201 bp, Homo sapiens; identical to SEQ ID NO: 24069

SEQ ID NO: 136087 - DNA, 201 bp, Homo sapiens
ccagcttctcaggaggctgaggcaggagaactgctagaacccagttgcagtgagccgaaatcacaccactgcactccagcctgggcgacagggcaagagtyggtctcaaaaaaaaaaaaaaaaaatcagtactccctggaatgaagccaagaaaaaatattttaatggaataaatacataacttattaaatgcatctgtgt

SEQ ID NO: 136088 - DNA, 201 bp, Homo sapiens
cattttgcattattgcttgttgattagtagtgctccaattttgaccttttcctaatagttgatctgcatctatgttaactggaggattggcagccctattwcttcagacctgttcttgtgccccatcaatccaccaactcttaaattgtaaaaattgagacagtgagagtgatgatttggccaaaatctcccaatcataag

SEQ ID NO: 136089 - DNA, 201 bp, Homo sapiens
ccatctctactaaaaaatacaaaaaattagccaggcgtggcagtgtgcacctgtagtcccagcttctcaggaggctgaggcaggagaactgctagaacccrgttgcagtgagccgaaatcacaccactgcactccagcctgggcgacagggcaagagtcggtctcaaaaaaaaaaaaaaaaaatcagtactccctggaatg

SEQ ID NO: 136090 - DNA, 201 bp, Homo sapiens
tttttcctttttacaaatttgcctagttttgtcctacactcattttttcctttgaattattttttccctttcttatcagtctcattgttttttcttttacwtttttaacattctttatagatagatgggatttctctatgttgctcaggctggccttgagctcctgggctcaagtgatcctcctacctcttcctcttgagt

SEQ ID NO: 136091 - DNA, 201 bp, Homo sapiens
tttacaaatttgcctagttttgtcctacactcattttttcctttgaattattttttccctttcttatcagtctcattgttttttcttttacatttttaacrttctttatagatagatgggatttctctatgttgctcaggctggccttgagctcctgggctcaagtgatcctcctacctcttcctcttgagtagcaggaac

SEQ ID NO: 136092 - DNA, 201 bp, Homo sapiens
gcctgtaatcccagcagcttgggtggctgaggcgggtggatcacttgagcccaggagtttgagaccagcctgaccaacatggtgaaaccccgtctctactaaaaatacaaaattagtcgggcatggtggtgcatgcctgtaatcccagctacttgggagtctgaggcaggagaatcacttgtacccagtaggtggagattg

SEQ ID NO: 136093 - DNA, 201 bp, Homo sapiens
cctgtaatcccagcagcttgggtggctgaggcgggtggatcacttgagcccaggagtttgagaccagcctgaccaacatggtgaaaccccgtctctactaaaaatacaaaattagtcgggcatggtggtgcatgcctgtaatcccagctacttgggagtctgaggcaggagaatcacttgtacccagtaggtggagattgc

SEQ ID NO: 136094 - DNA, 201 bp, Homo sapiens
ttatcctttgtgttataaacaattatattcttttagttattttaagatgtatagctaaattatcgactatagtcactgttgtgctatcaaatactaactcwtattcattctattttttgtacccattacttatccccacttctgccccacccccactatctcccagcctctgctaaccatctttttactctctatcttcat

SEQ ID NO: 136095 - DNA, 201 bp, Homo sapiens
tggagaagtgtaggaaaccctttcctgttggctacagatgttgctttcaggccgttaacaccttgttttgactctccgccttcccttaggtctggaatggkagagcattgagtactgttatcttccacatctcaggagaagggggcagtagagagacattgagcctggatgtgggagggaagacccctctgctcaggctga

SEQ ID NO: 136096 - DNA, 201 bp, Homo sapiens
gacattttgcatattatgttttaagactttggatattatttatataaatcttttatcaggtcttctctaacctgcgctgatcagtgtaaagggatgccttrttattgccagatggaaaagatgtgagcttctttggcagaagaaagtagatgtctaagccacacacctggatttgattccttgctctttacccagaagaca

SEQ ID NO: 136097 - DNA, 201 bp, Homo sapiens
cttggcctccaaagtgctgagattacaggcatgagccacctcacccagccaagaacttcttttagccattcttttaggttaggcctgctggcaacaaattstttccatttgcccttatctgtgttatggactgaatgtttatgtccccctcaaaatttaagtgttgaagccctaatctggctgtgtttggagatggggcct

SEQ ID NO: 136098 - DNA, 201 bp, Homo sapiens
tggctgtccagtgtcagctccctccagaaccagagccagggattatctgcctttgagaacctctggggccttgtgacaatccaatgcagcatctcaactcstgagtccttgccccatgtccagcatcaataagtaaggcaaatgtcaatcttctgtgcttctgtatcaactgtgggagggtaaaggcgaatccttccaagg

SEQ ID NO: 136099 - DNA, 201 bp, Homo sapiens
gggcactttgacaccatggaacctggtcagttaattccccagcagaagcttataagaaaaagtaaaggcgcctcctcccactgcagcagttcattggctgyccagtgtcagctccctccagaaccagagccagggattatctgcctttgagaacctctggggccttgtgacaatccaatgcagcatctcaactcctgagtc

SEQ ID NO: 136100 - DNA, 201 bp, Homo sapiens
tgcctgtgccaggaccacccttggagacacctggccttctgtggtcctagagtaactgaaaagtaagcaaagacttggctgcttccaaatattagggcacwttgacaccatggaacctggtcagttaattccccagcagaagcttataagaaaaagtaaaggcgcctcctcccactgcagcagttcattggctgtccagtg

SEQ ID NO: 136101 - DNA, 201 bp, Homo sapiens
acgtgctaaaataaccctcttccaagaggtgagtgtgggagacagaataacggccctcaaaggtgtcacatccgaatctccacctgtgaacactcctcacrtggcaaaagggactttgcagatgagaatagaaattgtaagaaagggagattatcctgggttatctgggtgggcccaatgtcatcccaagggacttccttt

SEQ ID NO: 136102 - DNA, 201 bp, Homo sapiens
cgggccgggggcggagaggaacgcgggagggcgccgggcccctgggcttttcgtaccaagctcgaccgagccgcccctacccacccccagctgcgaacccrgccgttcagaacagagactgggcattgtccccacagggtctcccgaggaccttgtacccgcgcggtttccttgggctggctttggacgacgctttcgcct

SEQ ID NO: 136103 - DNA, 201 bp, Homo sapiens; identical to SEQ ID NO: 24088

SEQ ID NO: 136104 - DNA, 201 bp, Homo sapiens; identical to SEQ ID NO: 24089

SEQ ID NO: 136105 - DNA, 201 bp, Homo sapiens
gatttatactgaggcaaatatgagtgaccaatggcctctgatacagctcttgggaaatcctgagaatgtgtgcttctggagagacataagatgtcaatcartacatacaagacatacattggttccatctggagaggtgagactactgggggagggggagtggtttccaggtcatagttaagattcaaagattttctgatg

SEQ ID NO: 136106 - DNA, 201 bp, Homo sapiens
gtgtccgcagtccagtgtatagcaaatcccattaaacttgctcggcttgtcatggaaaaggtatatgtgactaaagcagccttttcctaatgaattgttaytgttatactgcagtgataagggctccaactgtgcagaaatacttgagatcactgttctcctaaaaatatatacaaaacagatgcaatgtatttgagtttc

SEQ ID NO: 136107 - DNA, 201 bp, Homo sapiens
actttaggagctgtgtgtcaggaaacaggaagaccaaactttgtgtccaggccttctacatctgtgaatttacccaatcttcggttgaaaatatttggggaaaaaaaaaaccgtgtaagactgcctttgcaagccaggtgtgttggctcatgcccgtaatctcagcactttgggaggctaaggtgggtgggtcacatgagg

SEQ ID NO: 136108 - DNA, 201 bp, Homo sapiens
gtccagtgtatagcaaatcccattaaacttgctcggcttgtcatggaaaaggtatatgtgactaaagcagccttttcctaatgaattgttattgttatacwgcagtgataagggctccaactgtgcagaaatacttgagatcactgttctcctaaaaatatatacaaaacagatgcaatgtatttgagtttctcaaatcag

SEQ ID NO: 136109 - DNA, 201 bp, Homo sapiens
gaggcaggagaatcacttgaacctgggaggcggaggttgcagtgagtagagatcgtgtcactgcactccagcctaggcgacaagggtgaaactcatctccaaaaaaaaaaaaaatcgttttttttggtgggggtggggacaaggtattaattttactctgacacccagactggagtgcagtggcacaatcagagctttgca

SEQ ID NO: 136110 - DNA, 201 bp, Homo sapiens
ggcctgctggcaacaaattctttccatttgcccttatctgtgttatggactgaatgtttatgtccccctcaaaatttaagtgttgaagccctaatctggctgtgtttggagatggggcctccaaggaagtaattaaaattaagtgaggtcataaggatggagtcctgaaccaataggattagtgtccttataggagacacc

SEQ ID NO: 136111 - DNA, 201 bp, Homo sapiens
gcctgctggcaacaaattctttccatttgcccttatctgtgttatggactgaatgtttatgtccccctcaaaatttaagtgttgaagccctaatctggctgtgtttggagatggggcctccaaggaagtaattaaaattaagtgaggtcataaggatggagtcctgaaccaataggattagtgtccttataggagacacca

SEQ ID NO: 136112 - DNA, 201 bp, Homo sapiens
tctaacttccatttggtttttctttacatcttatatttctttgctgaaactttataatttttttagttatttcaagttcattgaagcatttttatgatgcttttttttttttttttaaagggacagggtcttagtctgtcacccaggctggagtacggtggtgtgatcacagcttactgcaacctcaaacccctggctcaa

SEQ ID NO: 136113 - DNA, 201 bp, Homo sapiens
tggaggcgggcggcggtgggcgcgggttaacgtccccggggaaactgagaccccagcaggtccgggccgggggcggagaggaacgcgggagggcgccgggyccctgggcttttcgtaccaagctcgaccgagccgcccctacccacccccagctgcgaacccagccgttcagaacagagactgggcattgtccccacaggg

SEQ ID NO: 136114 - DNA, 201 bp, Homo sapiens
ccagcagcatatttgtctcaggagctgccaagttcttcttaaagtaaactggggaggaaaagcagttatgatgttgcaacctctggaagcagtggtctcarcttctggtctcctgctcagcttggcttaggacttgctgtgggatcgaagggcaagtcccttaaacttccttggacagcaggggttggaattagattccct

SEQ ID NO: 136115 - DNA, 201 bp, Homo sapiens
agcgggggctggaaccagatctcccccacgtggactcgcggacagggcggggatcaggacgggggcggggccaggggaggggcggggctcggggagtgaggcaagactggagggcctgggactctcgggtacccgggccaggggaggggcggggctcagggagggagggagagactggatgacctggggcttgcaaggcgg

SEQ ID NO: 136116 - DNA, 201 bp, Homo sapiens
gtagctgggattacaggcatgcgccaccatgcctggctaattttgtatttttagtagagatggggtttcttcatgttggtcaggatggtcttgaactcctraccttaggtggtctacccacctaggccttccaaagtgctgggattacaggcgtgagccaccatgcccggccagctccatttctttcttctgtctgctctg

SEQ ID NO: 136117 - DNA, 201 bp, Homo sapiens
gggtgttcttctgaagctcagggagcagctcttggggagaaagtgtttccaggaagcggacaagagttctgttgagctgaagagcagggcagcagccgggrcgagcgaggctggagtcatgcagggcagagccttaaatgctaagctggggtttgctctcggtaggaccagctagctgccccgagcgggggctggaaccag

SEQ ID NO: 136118 - DNA, 201 bp, Homo sapiens
gcaagcaggattctgttaccggaagctgcagcacacaggcatgctgcctactccgaggtggttgcggtgtgtttctctcgcccaagaggccaggtcagggytggtggttcatctcgctggatagcccctaaccctagaacccgggaaatgataacccggtatgcgtagcaggtcagaggggcacgcgcgtttcttggctta

SEQ ID NO: 136119 - DNA, 201 bp, Homo sapiens
cgaggctggagtcatgcagggcagagccttaaatgctaagctggggtttgctctcggtaggaccagctagctgccccgagcgggggctggaaccagatctyccccacgtggactcgcggacagggcggggatcaggacgggggcggggccaggggaggggcggggctcggggagtgaggcaagactggagggcctgggact

SEQ ID NO: 136120 - DNA, 201 bp, Homo sapiens
tgatcagactgctttttagaattgagggaaagagagacttttcttcctggcaggaacaggaggagagcattccttttgggatatgatgatgggtcagcctrtgggcctggagcttccatggcctgtctcttttaggagtggccatggggtcacagagttctctcgagatagaggctgcataaatgtggccagtgattttct

SEQ ID NO: 136121 - DNA, 201 bp, Homo sapiens
gcctcctggctgcccagggccctctgggaagctgtgctgggcccgctctttcaggttccaggtcaggaagctgaggctcagagaggaaaaggattcacccygagccacctacctggctaatggcagggctgggactcaatccaagtgtgtcacaagttctaggttggcctcctgccacccacaatgcgtgcttggagtata

SEQ ID NO: 136122 - DNA, 201 bp, Homo sapiens
accagatctcccccacgtggactcgcggacagggcggggatcaggacgggggcggggccaggggaggggcggggctcggggagtgaggcaagactggaggrcctgggactctcgggtacccgggccaggggaggggcggggctcagggagggagggagagactggatgacctggggcttgcaaggcggggcgaggggaggg

SEQ ID NO: 136123 - DNA, 201 bp, Homo sapiens
aaaaggattcaccccgagccacctacctggctaatggcagggctgggactcaatccaagtgtgtcacaagttctaggttggcctcctgccacccacaatgygtgcttggagtatactttctatctggttttgtcctcagtattcctggctgcctagaggtgaacctgcccgcccgggggaggccactggtagaaaagggac

SEQ ID NO: 136124 - DNA, 201 bp, Homo sapiens
catgtcagcagtcagcctttcctaatttgagtggaataacaatgaatcctgccatcactttattcatttttttttattcagcgaatgcttatgaaccccarctctggtccagattttgcctgggctccgagttggcatcaaagacacaggagacgccttccttccatttctggttgatggactagtaaggtgtacaggggt

SEQ ID NO: 136125 - DNA, 201 bp, Homo sapiens
caccccgagccacctacctggctaatggcagggctgggactcaatccaagtgtgtcacaagttctaggttggcctcctgccacccacaatgcgtgcttggwgtatactttctatctggttttgtcctcagtattcctggctgcctagaggtgaacctgcccgcccgggggaggccactggtagaaaagggacaagattatc

SEQ ID NO: 136126 - DNA, 201 bp, Homo sapiens
aaaaataaaaattaaaaaaagtgcatattatacatgtacagcttgaagaattttcctaaaatgaacatccctgtgcaaccagcacccagatcagaaatggraaatttccagcacctcagcagccccgtggggccctccaggtcacttcatcactccctccagcaaaggtcactcctctcctgacctctgctaccatgtatt

SEQ ID NO: 136127 - DNA, 201 bp, Homo sapiens
accatgtattattttttttctgtttttcagttttatagaaatggcatcataaagtagcatgtattcttttgtagctggcatctttgttttagtgttagatytgtgagattcaaccctgttgctctttgcagtgacagctcatttttctcattgccttatagtgttgcactgtataaatattccacaactgacttaattttt

SEQ ID NO: 136128 - DNA, 201 bp, Homo sapiens
aattcaaaatgaggtttggcgggggacagagccaaaccatattagccacaggaaagctgttgagccttgcagtgcctctgaggatccctggctgtggggtrggcccgggttctagtccaagggctcctgcgtgcaactctgcccagcttccgtggagggttattcttgtgtttaagatatgtgtgtgtgattctgatggca

SEQ ID NO: 136129 - DNA, 201 bp, Homo sapiens
aaatgaggtttggcgggggacagagccaaaccatattagccacaggaaagctgttgagccttgcagtgcctctgaggatccctggctgtggggtgggcccrggttctagtccaagggctcctgcgtgcaactctgcccagcttccgtggagggttattcttgtgtttaagatatgtgtgtgtgattctgatggcaccttcc

SEQ ID NO: 136130 - DNA, 201 bp, Homo sapiens
gctgggtcatagagtacacatagactcagcctaggggtacttccaaacagttttttgaagtggttataccagtatatactcccactagcagcatgtaagcrttttgcctgctccacatcctcgtcagctctggtggtgtttgccttttcgttcaaaccgtgcctgggattgtgacttcagtttgcatttccctaatgacta

SEQ ID NO: 136131 - DNA, 201 bp, Homo sapiens
acacatagactcagcctaggggtacttccaaacagttttttgaagtggttataccagtatatactcccactagcagcatgtaagcattttgcctgctccayatcctcgtcagctctggtggtgtttgccttttcgttcaaaccgtgcctgggattgtgacttcagtttgcatttccctaatgactaatgcagctgggcatg

SEQ ID NO: 136132 - DNA, 201 bp, Homo sapiens
tagtccaagggctcctgcgtgcaactctgcccagcttccgtggagggttattcttgtgtttaagatatgtgtgtgtgattctgatggcaccttcctgcctygggccagctgtgtgctgacgggcactgccgctgcctaggtgttggttccggtgagcccagcaactttgtgactgatccttgtcctcctctgttccagggt

SEQ ID NO: 136133 - DNA, 201 bp, Homo sapiens
tgcagtacatgtactggacgatgctgcagcagctcactcaccactctgtcaacggctgcaacctgcggccgggggacctcctggcttctgggaccatcagygggccggtgagtatctggctgcactgagggctgcccacgcagagcatccctgctccccacacagccccaagggccctcagctcagcctcgagaagagatt

SEQ ID NO: 136134 - DNA, 201 bp, Homo sapiens
tcttccctttcctgtgatgaaggagccagaaaacttcggctccatgttggaactgtcgtggaagggaacgaagcccatagacctggggaatggtcagaccrggaagtttctgctggacggggatgaagtcatcataacaggtgagggctgccaaacccagcagctcgtcttcctccttgcccgccatgcactgttctagct

SEQ ID NO: 136135 - DNA, 201 bp, Homo sapiens
ctcctctgttccagggtactgccagggggatggttaccgcatcggctttggccagtgtgctggaaaagtgctgcctgctctcctgccatcatgagattttytctgctcttctggaaacaaagggctcaagcacccctttcaaccctgtgactggggtcctccctcgggctgtaggcctggtccgccattcagtgacaaata

SEQ ID NO: 136136 - DNA, 201 bp, Homo sapiens
gttccagggtactgccagggggatggttaccgcatcggctttggccagtgtgctggaaaagtgctgcctgctctcctgccatcatgagattttctctgctyttctggaaacaaagggctcaagcacccctttcaaccctgtgactggggtcctccctcgggctgtaggcctggtccgccattcagtgacaaataaagccat

SEQ ID NO: 136137 - DNA, 201 bp, Homo sapiens
ccatgcctggctaattttgtatttttagtagagatggggtttcttcatgttggtcaggatggtcttgaactcctaaccttaggtggtctacccacctaggycttccaaagtgctgggattacaggcgtgagccaccatgcccggccagctccatttctttcttctgtctgctctgtctgtacactccaggctttgccatgt

SEQ ID NO: 136138 - DNA, 201 bp, Homo sapiens
aaagggagactcccttttgcggtctgctaagtaacgggtgccttcccaggcactggcgttaccgcttgaccaaggagcgctcaagcggcccttatgcgggygtgacagggctcacctcttgccttctaggtcacttctcagaatgtcccttcagtacctgaccctatacccaccggttattcctaggttatattgtactac

SEQ ID NO: 136139 - DNA, 201 bp, Homo sapiens
ggtctgctaagtaacgggtgccttcccaggcactggcgttaccgcttgaccaaggagcgctcaagcggcccttatgcgggtgtgacagggctcacctcttsccttctaggtcacttctcagaatgtcccttcagtacctgaccctatacccaccggttattcctaggttatattgtactacaataaagagtaatattaaaa

SEQ ID NO: 136140 - DNA, 201 bp, Homo sapiens
gcggcccttatgcgggtgtgacagggctcacctcttgccttctaggtcacttctcagaatgtcccttcagtacctgaccctatacccaccggttattcctrggttatattgtactacaataaagagtaatattaaaaactaatgattaataatgtttatactaataatcgataattgtccatgatcatctgtatatctaat

SEQ ID NO: 136141 - DNA, 201 bp, Homo sapiens
agagaggatatgcttttctccaggttgatgaataaatgacaaaactaagagcagaggtcctgagagtttgagttagcgggagagaagtggcaagggctggyaggctggctggccttccattggaaggagggatactccctgggttttcctgtacgtgatcttttttctccctgttttggtcttagcctacactcaacagct

SEQ ID NO: 136142 - DNA, 201 bp, Homo sapiens
agagtttgagttagcgggagagaagtggcaagggctggcaggctggctggccttccattggaaggagggatactccctgggttttcctgtacgtgatcttytttctccctgttttggtcttagcctacactcaacagcttcatgggcctgggtcaggctgcctggaaggaggcgagagtgttcttgcagaacttgctgtct

SEQ ID NO: 136143 - DNA, 201 bp, Homo sapiens
cttttttctccctgttttggtcttagcctacactcaacagcttcatgggcctgggtcaggctgcctggaaggaggcgagagtgttcttgcagaacttgctstctgtgagccaagccaggctcagagatgacaccgaacttcggaagtggtgagaagcacgtggtcataggggggatgaggggatgcagcaggggaggtgaa

SEQ ID NO: 136144 - DNA, 201 bp, Homo sapiens
gcaggctgagggactgagcagtaaggtcagcccttaggggatgctgcttggagaaggtggtcagtgtgggcttgaggtagcagaggagctgaggttggagyttgtgaaggagatggaagagcttgggggaggtctctgggcagctccccaggaggacaatgtgtccttactataagggactggagagagctggctggggga

SEQ ID NO: 136145 - DNA, 201 bp, Homo sapiens
tgctgtctgtgagccaagccaggctcagagatgacaccgaacttcggaagtggtgagaagcacgtggtcataggggggatgaggggatgcagcaggggagrtgaaggctgtgtggttatcagtgccattctgagtcacggcttggcagccttagtgtggccaagtcagacctgccctcatccagcccctgcctgagctgcc

SEQ ID NO: 136146 - DNA, 201 bp, Homo sapiens
gctggctgggggagctggggaccggggaaaggccagggaaggcggtcgtgagcagggcaggctgtgcccagctgcctccgggatgctaggctaagcctgcmgctgctcattccacctcgcgtccattgcctgcagtacatgtactggacgatgctgcagcagctcactcaccactctgtcaacggctgcaacctgcggccg

SEQ ID NO: 136147 - DNA, 201 bp, Homo sapiens
tgcggggcgctcctacctggccatgaagccatctgttctcacgcatcctgactctgcctcccagagtctctgcctgcttgttctgtccttccccacagctrtggctacccgggacttcaagtgtgagtctccctaggccagaaagactgtagacattctgcttggtctcccttctccctgagcatagttataaaatactgg

SEQ ID NO: 136148 - DNA, 201 bp, Homo sapiens
ctggagtgcagtggcacaatctcagctcactgcaacctccatctcccaggttcaagcgattctcctgtgccttagcctcccgagtagctgggattacaggygcgctaattgtgtatgtgtcagtttccgtgcttaactaaaagcttgtgttagtttcctgtggctgcagtaacatagtaccgcaaactttgtggcttaaaa

SEQ ID NO: 136149 - DNA, 201 bp, Homo sapiens
atcatgagattttctctgctcttctggaaacaaagggctcaagcacccctttcaaccctgtgactggggtcctccctcgggctgtaggcctggtccgccaytcagtgacaaataaagccattgtgctctgaggcctgcactgccgcagatgcagctgtgtccacttatgatcgtgatttgatccagtgggtcaaggtgtgt

SEQ ID NO: 136150 - DNA, 201 bp, Homo sapiens
catggtccatgccagagccaaggcataaattcatgttattctttcttccctttcctgtgatgaaggagccagaaaacttcggctccatgttggaactgtcrtggaagggaacgaagcccatagacctggggaatggtcagaccaggaagtttctgctggacggggatgaagtcatcataacaggtgagggctgccaaaccc

SEQ ID NO: 136151 - DNA, 201 bp, Homo sapiens
agaccgaggataggtgtggccattggcgaccagatcctggacctcagcatcatcaagcacctctttactggtcctgtcctctccaaacaccaggatgtctkcaatcaggtaggacattgtgaaacgacttgtccctgacctcagtggcacttactgtggatgccaacaagagaatgctccttgcgttccatttccgataga

SEQ ID NO: 136152 - DNA, 201 bp, Homo sapiens
cgtgggccaagagggctggccaggtgctttggttctgcatctgtgtggagggtccctgctggtggggggagatggaggaggggctctggggctgttaccckctcctcatcactgacctttcccagcatccaggcccggcattcactcaggctattatcttgcctcaggtagtgagttgcagactgctcaagttcatgacta

SEQ ID NO: 136153 - DNA, 201 bp, Homo sapiens
aaatgcaaaatgaaatgaatcgtgtcactctcccagacaagcagagcaagcaggattctgttaccggaagctgcagcacacaggcatgctgcctactccgwggtggttgcggtgtgtttctctcgcccaagaggccaggtcagggctggtggttcatctcgctggatagcccctaaccctagaacccgggaaatgataacc

SEQ ID NO: 136154 - DNA, 201 bp, Homo sapiens
ggataggtgtggccattggcgaccagatcctggacctcagcatcatcaagcacctctttactggtcctgtcctctccaaacaccaggatgtcttcaatcakgtaggacattgtgaaacgacttgtccctgacctcagtggcacttactgtggatgccaacaagagaatgctccttgcgttccatttccgatagaggtaatg

SEQ ID NO: 136155 - DNA, 201 bp, Homo sapiens
cttccagccaccataggtgagtgcagtctcttcaccaagataagaacggagcagcttcgtgggccaagagggctggccaggtgctttggttctgcatctgkgtggagggtccctgctggtggggggagatggaggaggggctctggggctgttacccgctcctcatcactgacctttcccagcatccaggcccggcattca

SEQ ID NO: 136156 - DNA, 201 bp, Homo sapiens
ggaaatacctgacctttgctctctaggtgacaagtgacctgggcggcagatcagctccagattctaatgaactctcccccatgtaaggctttttttgtagrccctggaaacagattgggagagccgatccccatttccaaggcccatgagcacatttttggaatggtccttatgaacgactggagtggtaattactggagc

SEQ ID NO: 136157 - DNA, 201 bp, Homo sapiens
agggccacctaaagggggacctgtggactcttcaatagataggctttctgagtaaatgagccaagcccagccaggggctttttctggtgctgacggtgtcrtcttcctcctagccaagaccgaggataggtgtggccattggcgaccagatcctggacctcagcatcatcaagcacctctttactggtcctgtcctctcca

SEQ ID NO: 136158 - DNA, 201 bp, Homo sapiens
ctcttgcccctttgtcctggggcagcctgactggggctgatctttgtggagatggcagtgctaggtgtctctgctccttggtcaagggcaggagggggtcrttgggagatgccctgatcagcctttgtaagtcctggctgtgcccttcttctgcagcacgagacattcagaagtgggagtatgtccctctcgggccattcc

SEQ ID NO: 136159 - DNA, 201 bp, Homo sapiens
catcaaatcttgttctgtgcaaatggcgccacctggaccccaactcatagaatgcagcttggagcccagcaacagggagtccctgcagcctctggttcccrgcaccgcttggtctaccactgggtctaggccttgacccctggttccagtcctcccttctcagcctgttgcaatctgccccactccatcactggcaacacc

SEQ ID NO: 136160 - DNA, 201 bp, Homo sapiens
tcctggctgtgcccttcttctgcagcacgagacattcagaagtgggagtatgtccctctcgggccattccttgggaagagttttgggaccactgtctctcygtgggtggtgcccatggatgctctcatgccctttgctgtgcccaacccgaagcaggtaagcacattctctgcaggaagctcccaaacccagccctgctgc

SEQ ID NO: 136161 - DNA, 201 bp, Homo sapiens
ccatgtaaggctttttttgtaggccctggaaacagattgggagagccgatccccatttccaaggcccatgagcacatttttggaatggtccttatgaacgwctggagtggtaattactggagctctgctcctgtagagatgacggggaggaggctggggacttggggcaatttcatagaagctgaagatctggtgcaggtc

SEQ ID NO: 136162 - DNA, 201 bp, Homo sapiens
atggcacaagggagctggggcaggatgctgagaacatggttcttcagtccgctctgcatacagggccacctaaagggggacctgtggactcttcaatagayaggctttctgagtaaatgagccaagcccagccaggggctttttctggtgctgacggtgtcgtcttcctcctagccaagaccgaggataggtgtggccatt

SEQ ID NO: 136163 - DNA, 201 bp, Homo sapiens
atgtaaggctttttttgtaggccctggaaacagattgggagagccgatccccatttccaaggcccatgagcacatttttggaatggtccttatgaacgackggagtggtaattactggagctctgctcctgtagagatgacggggaggaggctggggacttggggcaatttcatagaagctgaagatctggtgcaggtcaa

SEQ ID NO: 136164 - DNA, 201 bp, Homo sapiens
ggctgtgcccttcttctgcagcacgagacattcagaagtgggagtatgtccctctcgggccattccttgggaagagttttgggaccactgtctctccgtgrgtggtgcccatggatgctctcatgccctttgctgtgcccaacccgaagcaggtaagcacattctctgcaggaagctcccaaacccagccctgctgcctct

SEQ ID NO: 136165 - DNA, 201 bp, Homo sapiens
gttaattgacaacatataacagctctgatgccctgcattctcttgccttcctttctcaggctgcacttaccagtgggctaccatggccgtgcctcctctgkcgtggtgtctggcaccccaatccgaaggcccatgggacagatgaaacctgatgactgtgagtgaccgcagcgtccaggccttgctggtacccagctctct

SEQ ID NO: 136166 - DNA, 201 bp, Homo sapiens
tgctaggtgtctctgctccttggtcaagggcaggagggggtcgttgggagatgccctgatcagcctttgtaagtcctggctgtgcccttcttctgcagcaygagacattcagaagtgggagtatgtccctctcgggccattccttgggaagagttttgggaccactgtctctccgtgggtggtgcccatggatgctctcat

SEQ ID NO: 136167 - DNA, 201 bp, Homo sapiens
ccaggggctttttctggtgctgacggtgtcgtcttcctcctagccaagaccgaggataggtgtggccattggcgaccagatcctggacctcagcatcatcragcacctctttactggtcctgtcctctccaaacaccaggatgtcttcaatcaggtaggacattgtgaaacgacttgtccctgacctcagtggcacttact

SEQ ID NO: 136168 - DNA, 201 bp, Homo sapiens
acttctcgggactcccaggtcttgctgagcatggtccatgccagagccaaggcataaattcatgttattctttcttccctttcctgtgatgaaggagccakaaaacttcggctccatgttggaactgtcgtggaagggaacgaagcccatagacctggggaatggtcagaccaggaagtttctgctggacggggatgaagt

SEQ ID NO: 136169 - DNA, 201 bp, Homo sapiens
tgtcgtcttcctcctagccaagaccgaggataggtgtggccattggcgaccagatcctggacctcagcatcatcaagcacctctttactggtcctgtcctytccaaacaccaggatgtcttcaatcaggtaggacattgtgaaacgacttgtccctgacctcagtggcacttactgtggatgccaacaagagaatgctcct

SEQ ID NO: 136170 - DNA, 201 bp, Homo sapiens
tccttgtcctcctctgttccagggtactgccagggggatggttaccgcatcggctttggccagtgtgctggaaaagtgctgcctgctctcctgccatcatragattttctctgctcttctggaaacaaagggctcaagcacccctttcaaccctgtgactggggtcctccctcgggctgtaggcctggtccgccattcagt

SEQ ID NO: 136171 - DNA, 201 bp, Homo sapiens
tccctgggttttcctgtacgtgatcttttttctccctgttttggtcttagcctacactcaacagcttcatgggcctgggtcaggctgcctggaaggaggcragagtgttcttgcagaacttgctgtctgtgagccaagccaggctcagagatgacaccgaacttcggaagtggtgagaagcacgtggtcataggggggatg

SEQ ID NO: 136172 - DNA, 201 bp, Homo sapiens
aaacccagcagctcgtcttcctccttgcccgccatgcactgttctagctgcggggcgctcctacctggccatgaagccatctgttctcacgcatcctgacyctgcctcccagagtctctgcctgcttgttctgtccttccccacagctatggctacccgggacttcaagtgtgagtctccctaggccagaaagactgtaga

SEQ ID NO: 136173 - DNA, 201 bp, Homo sapiens
ggccatgattgtaagccccattttacagacaggaaaatgggctcagagaaggatcaacttgcctgagcacaacagggccacagcctgtctcccagcccccrgatcaggccattgaccaagctgaggatgcagagctgggatccttgccctttgttctgtgttgtcccctggatgtgatggttccttggaactgaagagggc

SEQ ID NO: 136174 - DNA, 201 bp, Homo sapiens
ctcgagtgagtgtctccagtaggctatgccatgaggggagggtctgttagaaccaagatgaggaagaaagaaagggagagagagcagttccaagccagagwtgttgaacaacaaggccaaggttgcagaatgaggcaggggtgaatctgagaccagaacccaggctccaggttccaggcttccacgtgagatgcgcaaata

SEQ ID NO: 136175 - DNA, 201 bp, Homo sapiens
ggtctacccacctaggccttccaaagtgctgggattacaggcgtgagccaccatgcccggccagctccatttctttcttctgtctgctctgtctgtacackccaggctttgccatgtctgtctcactgtcagttccagggtctcggcccttcatgaggtggttcctgtcaggaggcgcagtacactgcaggagctgtcgcc

SEQ ID NO: 136176 - DNA, 201 bp, Homo sapiens
agaaatagtacagagatcccaatacccttcacacagtctcccccagtggcaacatccttcgtaaccatggtgctctatcacaacctggatgttgatgttgrtacagtcggtcccaccacctgaggatccctcatgctgcccatttttcagaggggacactgaaatctgggcagcccccaaggtgaggggaccagggaagtg

SEQ ID NO: 136177 - DNA, 201 bp, Homo sapiens
cggtgtcatacatatattttctttttcttttttttttgagactgggtcttacttggtcacccaggctggagtgcagtggcatgaccttggctcactgcagmcttgacctcccaggtgaagccatcctcctgcctcagccccctaagtagctgggattaaaggtgcacaccaccatgcctggctaatttttgtattttttgt

SEQ ID NO: 136178 - DNA, 201 bp, Homo sapiens
ctgtaacctggcacagtgccctcaaaggacctctgtccttggcattgaatgctcttgcccctttgtcctggggcagcctgactggggctgatctttgtggagatggcagtgctaggtgtctctgctccttggtcaagggcaggagggggtcgttgggagatgccctgatcagcctttgtaagtcctggctgtgcccttctt

SEQ ID NO: 136179 - DNA, 201 bp, Homo sapiens
tttagtagagacagggtttcacctgttagccaggatggtctcgatctcctgaccttgtgatccacccgcctcggcctcccaaagtgctgggattacaggcstgagccaccgtgcccggcctagagttttgcattttcataaagtcaggcatgccaatcattttccttatggcatttacttttgtgtaatgtttagaaaggc

SEQ ID NO: 136180 - DNA, 201 bp, Homo sapiens
tcagggacaaggagaatgcgttgatgccaaattggtatgaactgggccaaatgtctgcataagttcaaagtctttcttttcatttccagcagcatatttgyctcaggagctgccaagttcttcttaaagtaaactggggaggaaaagcagttatgatgttgcaacctctggaagcagtggtctcagcttctggtctcctgc

SEQ ID NO: 136181 - DNA, 201 bp, Homo sapiens
tgcctcctctgtcgtggtgtctggcaccccaatccgaaggcccatgggacagatgaaacctgatgactgtgagtgaccgcagcgtccaggccttgctggtrcccagctctctgttcccacacagagagttctgtggcctcactcacagcaccgttttttttttttttctggtgttattccagctaagcctcccgtatatgg

SEQ ID NO: 136182 - DNA, 201 bp, Homo sapiens
gttgcctcaggaagctctgagtgcctcatcactgatggtgtagaagaagctgtcatggggccaccgagtcaggctgagacagtgggaagccctggttggtrgaggcaggctgaaaggcccgtctgcttttctggagctccctgtctctcctgggcttccctgtgatttctctggattcagtccagaggagggaaatgagtg

SEQ ID NO: 136183 - DNA, 201 bp, Homo sapiens
taaagtttggttttaaaaatttataaagtaggtatgtagttgatgaatttatgtctttaattctcatccaaatattgccatcccatcaactctcttcaagkgcaatgataattaagttcagttgcctattttaccaattttcaatcatataaaagccaaaaaagaaaaaaaaaaagcaagaaagtggatatttgatataaa

SEQ ID NO: 136184 - DNA, 201 bp, Homo sapiens
tgctaggctaagcctgccgctgctcattccacctcgcgtccattgcctgcagtacatgtactggacgatgctgcagcagctcactcaccactctgtcaacrgctgcaacctgcggccgggggacctcctggcttctgggaccatcagcgggccggtgagtatctggctgcactgagggctgcccacgcagagcatccctgc

SEQ ID NO: 136185 - DNA, 201 bp, Homo sapiens
cctgccgctgctcattccacctcgcgtccattgcctgcagtacatgtactggacgatgctgcagcagctcactcaccactctgtcaacggctgcaacctgyggccgggggacctcctggcttctgggaccatcagcgggccggtgagtatctggctgcactgagggctgcccacgcagagcatccctgctccccacacagc

SEQ ID NO: 136186 - DNA, 201 bp, Homo sapiens
ccagggtactgccagggggatggttaccgcatcggctttggccagtgtgctggaaaagtgctgcctgctctcctgccatcatgagattttctctgctcttytggaaacaaagggctcaagcacccctttcaaccctgtgactggggtcctccctcgggctgtaggcctggtccgccattcagtgacaaataaagccattgt

SEQ ID NO: 136187 - DNA, 201 bp, Homo sapiens
ttgtgaaacgacttgtccctgacctcagtggcacttactgtggatgccaacaagagaatgctccttgcgttccatttccgatagaggtaatgccatcgaargtctcagaggttatacttggataaggctggggttgttttgagacagacaaactggtaggaggtggccttgggacaattcagggtggcttctcacctcagg

SEQ ID NO: 136188 - DNA, 201 bp, Homo sapiens
ctcatccagcccctgcctgagctgcctattgatgggagggctttgggaggactgggattgccttggcgcctggaatggagctgcccaagctaggccaggcsaggcccattggccctctctcttactcaggctgtcctcattagcatcatctgtgacctcatctggtttctagagtaggaaagagtttccacttgtctagtc

SEQ ID NO: 136189 - DNA, 201 bp, Homo sapiens
ggctgtcctcattagcatcatctgtgacctcatctggtttctagagtaggaaagagtttccacttgtctagtcccatttcctagggtagaatatagaaacrgcttcagtgggtggatgtcctctcagctgtgaaaggttcagcatagctctggccccaggccagccagaaggtgcccactggagattgtggataatcttgg

SEQ ID NO: 136190 - DNA, 201 bp, Homo sapiens
gtgacccctctgccttccaggggccctgcaatgcgctttcaggcccagcctttcctcacaggccaggctttgttctccatctcggcctgtctgctgcccaycttccctttctctcccctcctgtggctttcaggaacatctctggtttggctcctgtgacctttgacctgctgatgccccttccttggctgcatttcctag

SEQ ID NO: 136191 - DNA, 201 bp, Homo sapiens
gtccttatgaacgactggagtggtaattactggagctctgctcctgtagagatgacggggaggaggctggggacttggggcaatttcatagaagctgaagrtctggtgcaggtcaaaagtggcaggtgatgcagtgactgagagtgggggtctgggtatcaaacagactttcagctctaagaactcgggccactcacttaa

SEQ ID NO: 136192 - DNA, 201 bp, Homo sapiens
gtggcctgggatgcactgaagggaggggaggctgctttggagctcaggggagtggaaggaaggccgatggcgggggcagggcacaccactgcactctgctytcctgaggcgtccatctgacctctgacttagaaacacagtggattcatgccaggcccctgtggcagtcctggtccatggctggagtttggaaatacctga

SEQ ID NO: 136193 - DNA, 201 bp, Homo sapiens
tcccagccatttgcacatcctcgcttgagcatctcaccacgcatttgctgggggcctctaccaacacccggtgctggtcctgcacccacactgctctcccrtgctcctctgcctctggggtcatctcatgtttgctgtgctacaaacaaccctgaggtctttccttgcaagccagttctagtgaagtcctgtggggctttc

SEQ ID NO: 136194 - DNA, 201 bp, Homo sapiens
accttccctttctctcccctcctgtggctttcaggaacatctctggtttggctcctgtgacctttgacctgctgatgccccttccttggctgcatttcctrgagacccacagtatgatcccccctactgctatccagggacacagtgctgggtccctggagagggaatgctcctgctgtctcagaccctctgcctagggga

SEQ ID NO: 136195 - DNA, 201 bp, Homo sapiens
ggccacagcctctctttgcttgtcctccagtcatctgccttcttccgggtcggtcatcacagggttttgcctgccttcctctgtgccagcccttccccaayaccatttaggtacaacactactattccccctctgaactattatttacttaatgttttccttcagagtggctcccagtttaaacttaatatattaagaagg

SEQ ID NO: 136196 - DNA, 201 bp, Homo sapiens
gagggcacgtgctacagccctggagatgtgtgtggctcgtctaaaggaaagaggaggggaggggaggggacaccctggtgctcactgggaacctaactggkcccatagggcattaaccctgtcactgagctctcagtggtagggctgaaaggatggagtccgggacttccatcttctgcttgaatcccctccccagcctct

SEQ ID NO: 136197 - DNA, 201 bp, Homo sapiens
gagccagcgcatcaagaccccagattcccaccatgggccagccctgagtgtcttgcagacagacccgagatccccaccctgggccagccctgacatagacrgggcccacatctccctgtggctgctcagcccgcctccgcgaacaggcccaatggggcgttggtaataaagagactggctctgcaggccatgactctgctg

SEQ ID NO: 136198 - DNA, 201 bp, Homo sapiens
actccaggctttgccatgtctgtctcactgtcagttccagggtctcggcccttcatgaggtggttcctgtcaggaggcgcagtacactgcaggagctgtcrccatgggagcaggatgctccatggagaaagagctgtcacagagagcctcctggctgcccagggccctctgggaagctgtgctgggcccgctctttcaggt

SEQ ID NO: 136199 - DNA, 201 bp, Homo sapiens; identical to SEQ ID NO: 24094

SEQ ID NO: 136200 - DNA, 201 bp, Homo sapiens; identical to SEQ ID NO: 24096

SEQ ID NO: 136201 - DNA, 201 bp, Homo sapiens
aagtggcaggtgatgcagtgactgagagtgggggtctgggtatcaaacagactttcagctctaagaactcgggccactcacttaactcctctgagctccarttttctcgagtggctagggacacggctgacatcataactaatatttactgagcacttatgtgtcaggccctgtgcttaacacccttcgtatattctcccg

SEQ ID NO: 136202 - DNA, 201 bp, Homo sapiens
atgacccagtggactgcccagccccagaagagctggctgtcacctgtgtgccaggatcccagtggccaaagggcaggggcaccaggaagtgagaggagagycgggacctgggaaatgagtgttgactgtgtctgaaaccgagtgtgggggccgcagccatccttgccccatgtccttctgcagaataagagtaaacaggcc

SEQ ID NO: 136203 - DNA, 201 bp, Homo sapiens
gcctggataatatccagcctcctacaggaagctggtggagcagagtgttccctgactcctccaaggaaagggagactcccttttgcggtctgctaagtaaygggtgccttcccaggcactggcgttaccgcttgaccaaggagcgctcaagcggcccttatgcgggtgtgacagggctcacctcttgccttctaggtcact

SEQ ID NO: 136204 - DNA, 201 bp, Homo sapiens
atgttggaactgtcgtggaagggaacgaagcccatagacctggggaatggtcagaccaggaagtttctgctggacggggatgaagtcatcataacaggtgrgggctgccaaacccagcagctcgtcttcctccttgcccgccatgcactgttctagctgcggggcgctcctacctggccatgaagccatctgttctcacgc

SEQ ID NO: 136205 - DNA, 201 bp, Homo sapiens
gagcacatttttggaatggtccttatgaacgactggagtggtaattactggagctctgctcctgtagagatgacggggaggaggctggggacttggggcartttcatagaagctgaagatctggtgcaggtcaaaagtggcaggtgatgcagtgactgagagtgggggtctgggtatcaaacagactttcagctctaagaa

SEQ ID NO: 136206 - DNA, 201 bp, Homo sapiens
ttcctctcggcagcatgctaccaacgtcggaatcatgttcagggacaaggagaatgcgttgatgccaaattggtatgaactgggccaaatgtctgcataarttcaaagtctttcttttcatttccagcagcatatttgtctcaggagctgccaagttcttcttaaagtaaactggggaggaaaagcagttatgatgttgca

SEQ ID NO: 136207 - DNA, 201 bp, Homo sapiens
tcttttcttttcttctttttttttcccccgagatggagtttcactcttcttgcccaggctggagtgcaatggtgcgatcttggctcaccacaacctctgcycctgggttcaagcgagtcttctgcctcagcctcctgtgtagctgggattacaggcatgcgccaccatgcctggctaattttgtatttttagtagagatgg

SEQ ID NO: 136208 - DNA, 201 bp, Homo sapiens
gtggctttcaggaacatctctggtttggctcctgtgacctttgacctgctgatgccccttccttggctgcatttcctagagacccacagtatgatcccccctactgctatccagggacacagtgctgggtccctggagagggaatgctcctgctgtctcagaccctctgcctaggggagcaggtgctgctgggggcctggc

SEQ ID NO: 136209 - DNA, 201 bp, Homo sapiens
gataattcaggatgatcgtgtctcaaaattcttaacttgattacatgtataaagactctgggagttaggacatggctgtatctttttttttttttttttttgagatggagtcttgctctgttgcctaggctggagtgcagtggtgcgatctcagttcactgcaacctccacctctcaggttcaagcgattcttctgcctca

SEQ ID NO: 136210 - DNA, 201 bp, Homo sapiens
aaccctttgttgcaatgcattgcaaatattttctcccagtatgttatcttttttctttgtttgccagtctttctagatacagagttttgcattttcttttyttttttttttttttgagacagagtcttgctctgtcgccatggctagagtgcagtggcaccatctcggctcactgcaagcttcgcctcccaggttcacgcc

SEQ ID NO: 136211 - DNA, 201 bp, Homo sapiens
atgccagagccaaggcataaattcatgttattctttcttccctttcctgtgatgaaggagccagaaaacttcggctccatgttggaactgtcgtggaaggkaacgaagcccatagacctggggaatggtcagaccaggaagtttctgctggacggggatgaagtcatcataacaggtgagggctgccaaacccagcagctc

SEQ ID NO: 136212 - DNA, 201 bp, Homo sapiens
caggagtttgagaccagcctggccaatatggtgaaaccctgtctctactaaaaatacaaaaattagcagccaggcgtggtggctcacgcctgtaatcccasaactttgggaggccgagacgggcggatcacctgaggtcaggagtttgagaccagcctggccaacatggtgaaaccctatctctacaaaagtacaaaaatt

SEQ ID NO: 136213 - DNA, 201 bp, Homo sapiens
tgccttgtcctgaaggctcctgagctttggcaagggtgagggcacgtgctacagccctggagatgtgtgtggctcgtctaaaggaaagaggaggggagggsaggggacaccctggtgctcactgggaacctaactgggcccatagggcattaaccctgtcactgagctctcagtggtagggctgaaaggatggagtccggg

SEQ ID NO: 136214 - DNA, 201 bp, Homo sapiens
gggaggctgaggtgggtggatcacaaggtcaggagtttgagaccagcctggccaatatggtgaaaccctgtctctactaaaaatacaaaaattagcagccrggcgtggtggctcacgcctgtaatcccacaactttgggaggccgagacgggcggatcacctgaggtcaggagtttgagaccagcctggccaacatggtga

SEQ ID NO: 136215 - DNA, 201 bp, Homo sapiens
tcccagctctgatgtcctaggagctaattgtttcacagactctaagtgaaatcatgttggacaatgggaagcttcagccacagaacaattctttttttatyttcctccctgatgcatggaattaagttttcatcaatattgcttttctttccaacaggagaaggaatgagccaggcggctaccatatgcaagtccaatttt

SEQ ID NO: 136216 - DNA, 201 bp, Homo sapiens
tggagagtgcttaggccacgtcaaaagcaagacctgtaaaaggtggggtatggtggtgcagatcactgaggaagcagtgagcttttatcataccactacasagtcctggctgcttgggaggctaaggtgggaggattgcttgagactaggagtttgaagctatagtaggctgtggtcatactgtgaatagccactgcattc

SEQ ID NO: 136217 - DNA, 201 bp, Homo sapiens
atgtccctgaagtccggccgggcaaagcgatcggaacccgggaagaaatcgtcccaggcgcggagtggggcgatattaacgtccatgttctcagctttgcsttcttcgcctccagaatctggcggcggcggcggcggcaaccgatcagctgagctgagttggagagttgacagcggctccgtctcggtcggctttgcggtt

SEQ ID NO: 136218 - DNA, 201 bp, Homo sapiens
attataaatgtacaagtttcctaaagcttattaaattttgaagccattatttgcaaatgtgacatttactaattttaagtgtaaaataattgaagattagmtctgaagattagtcaccaagcaactttaaggagtgacctcttctttattgcattatagtaatcttttacacaaaagaagaaaactaagggttttcaattt

SEQ ID NO: 136219 - DNA, 201 bp, Homo sapiens
agaaaaatctaacttcatgacctcatgtaaaaatttaaaatgctttctgaaacatactccccttttgtagtgctactgtgagaaattaattttgataggartataggtgtgcttacttaaattttgaaatttagttggaatgaacatcttagctttgagtataattaattgcatgttaagaattatgtaagtactaaataa

SEQ ID NO: 136220 - DNA, 201 bp, Homo sapiens
tcgaaaaagaaccagttattagactttgcatattttttgtcttacattatgtcttaagttacctgcagtaaagagatgttttagttccatatgaagcaggycatttattaatctgataaacaagaaaaacatgtagtgttactctattacatgaatcacacaaaacaatgtaaaatttgttactgtctcagtttttaaaaa

SEQ ID NO: 136221 - DNA, 201 bp, Homo sapiens
atatatatgtaaaatagtttcaatccgtagaaattttgagttgttctcttttggttatagattatttgaaactgagtgattgtacacttttgacctgttcragaactctgaattttatataccttgcaagagtctttcagccattgaatacaaattacacagaatttattactgagaatttgtagacttaagactacattg

SEQ ID NO: 136222 - DNA, 201 bp, Homo sapiens
cattggtattcaatagcacaaccgactcataggattacttgaaagcatacttcttcttttgaattcttatccccttctcctttaaagcccttcaaattgtyttcctagatatctcttctaaattatgaagatggtgtcttagatccaagctccattgtccctttgatagatggggggacagaaggttttaaaggaaatgcc

SEQ ID NO: 136223 - DNA, 201 bp, Homo sapiens
gaggaagaaaaggccatcacttagtttattttgctttctttagtttttgacgttgctgcagcttttttgtgttgtaggaatttgatatcttcttggatggrttgtgtaactaagctgtcgaaaaagaaccagttattagactttgcatattttttgtcttacattatgtcttaagttacctgcagtaaagagatgttttag

SEQ ID NO: 136224 - DNA, 201 bp, Homo sapiens
tgaggaagaaaaggccatcacttagtttattttgctttctttagtttttgacgttgctgcagcttttttgtgttgtaggaatttgatatcttcttggatgsgttgtgtaactaagctgtcgaaaaagaaccagttattagactttgcatattttttgtcttacattatgtcttaagttacctgcagtaaagagatgtttta

SEQ ID NO: 136225 - DNA, 201 bp, Homo sapiens
atttttcttctcatagtctaacaaagcttaaattttataccttgtaaatgtagggcaaacctgtctttacaggcagtgcagcctaagtgaagtgactcagwtaatctgtattatagtttgagaggcatttttaatggtatacaatattttgagttgaaacaaattgtatgaaattgttaagaactagatcataactggaag

SEQ ID NO: 136226 - DNA, 201 bp, Homo sapiens
aactttatccaccacaggtaatcaaaaaagcacctgcatttcttttatagtatcttggcatggaattagggattaattattaagtctagttaatatttagrattgttaattagaagtggccgtattttaaaaattacactaagaagaaagataaaatatgaaattctgctctatttgaggaaagatatgaaccgagtacat

SEQ ID NO: 136227 - DNA, 201 bp, Homo sapiens
cactttgggaggccgaggtggacggattacttgagctcaggagtttcagaccagcctgtgcaacatggcgaaacccgtctctactaaaaatacaaaaattrgctgggtatggtggcatgtacctgtaggcacagctacttgggaggctgaggcaggagaatcacttgagcccaggagggcaaggctgcagtgagctgcagt

SEQ ID NO: 136228 - DNA, 201 bp, Homo sapiens
gccagcttcctcaaaatattcagttttctccatcagctaaactacaggaggttttggattatctaaccaatagtgcttctctgtaagtattgtagattttygttatgttgtaaaaatcatttttgtgatttttgaaaccttaaaaaaattatcttttgataaaaattatgtttgatacttctctctcatcataatctttag

SEQ ID NO: 136229 - DNA, 201 bp, Homo sapiens
agctaaactacaggaggttttggattatctaaccaatagtgcttctctgtaagtattgtagatttttgttatgttgtaaaaatcatttttgtgatttttgwaaccttaaaaaaattatcttttgataaaaattatgtttgatacttctctctcatcataatctttaggcaaatgaaatctccagccatcacagccacccta

SEQ ID NO: 136230 - DNA, 201 bp, Homo sapiens
attgctcttttagtagaatattttaaaatctctaagaaatcaaatattactttgattaaagaggattggattttgatgtttttctagaccgtaatactctrtagtttgtttacatgtgtattatcctttctgttgagttttttttgcttgtattaattatattttttctgttttagaattggggcttgttgatggacaaga

SEQ ID NO: 136231 - DNA, 201 bp, Homo sapiens
caaatgaaatctccagccatcacagccaccctagagggaaaaaatagaacactttacttacaggttatcaatgtgtattttaaatttttttcagaaaattrtatcaagttttattttactttaatgtgtcttacattaaagtaattttgttttctagtcggtaacctctattgaagaacgaacaaggccaaatctctccaa

SEQ ID NO: 136232 - DNA, 201 bp, Homo sapiens
aatccagattagatttcttagtctggctcttggttccctgattgccattcctccactgtttgctttgtttcttttttgacctctttctagctgtagcttcrttctcctgcttgcctagcattcaaagggaatagaggtctgaatgactgagggctagaattgaaattattgttcatagctttatttgtaggcaagaattaa

SEQ ID NO: 136233 - DNA, 201 bp, Homo sapiens
tgcaggggccctccggggtgcttgacgtaaaggtcttgaggaaggacccttgtgcactcctcttcctccatcccaaattgtcagagcagtgaccctgtgamaaggcaatctaccttaaacacacaggaaaaggacacaagaccgttttgtggccttttgcaaacactgagacagtagtactaattgcaaacttttaatgat

SEQ ID NO: 136234 - DNA, 201 bp, Homo sapiens
cttgaccctaggaggctgaggttgcagtgagctgaaattgcgctactgcaccccagcctgggcgacagagcaaggctccatctcaaaaaaacaaaaaaaaacacaaaaaaccataaaacgatagaactttagggtttggtggagagtgcttaggccacgtcaaaagcaagacctgtaaaaggtggggtatggtggtgcaga

SEQ ID NO: 136235 - DNA, 201 bp, Homo sapiens
ggcaggcggatcacaaggtcaggagatcgagactatcctgactaacacagtgaaaccccgtctctactaaaaaatacagaaaacaaaaaattagccgggcrtggtggcaggtgcctgtagtcccagctactcgggaggctgaggcgagagagtggcgtgaacccgggaggcagagcttgcagtgagccgagatcacaccac

SEQ ID NO: 136236 - DNA, 201 bp, Homo sapiens
aagttatcacctctccaaggaggccttccctgaccattctctctaatggactgcatccatcattctcagtctaacacatacctcattttcttcatagaacwcttcaatatctgaggtgttccaagtatttacttttgtgttatctcccctatcaaaatgaaatcactatacgagcagatactttttttcattgttactatg

SEQ ID NO: 136237 - DNA, 201 bp, Homo sapiens
tgaatctgggaggcggaggttgcagtgagccgagatcccatcagtcactccagcctgtgtgacaagagcgagactccgtctcaaaaaaaagaaaaaaaaaagaaaaattaacattgaaacttcctgaaatcattagagttttagaattcctggttcaatagaattcacaaatttcaaataattgagcaaatacaaagtctc

SEQ ID NO: 136238 - DNA, 201 bp, Homo sapiens
caagattcaagattttaacgacactttctatcgacgtaagttttttacttgaaattaatgctcactagattcttagaattttttagttggtagctattcaratattgctagctatttcaaggctatttcttcacttgctttcctctctcactgttggcttttcagtaatgttgctgatagactgaaaagagaatgctagtt

SEQ ID NO: 136239 - DNA, 201 bp, Homo sapiens
tcaaggcgggaggatcacttgagcccaagagttccagaccaccctgggcaacatagagagaacccatctctaaaaaaaaaaagaaagaaaaaaagaaaagraaaaaaaattagctgtgcatgatgatacatgtctttggtttcagctactcaggaggttgaggtgggaggattgcttgactgcacctggaggtggaggctg

SEQ ID NO: 136240 - DNA, 201 bp, Homo sapiens
tttcgtctctacaaaaaaattaaaaaattagccgggtgtgcacctgtggtccctgctgcatgggaagctgaggtaggaggatcgtttgagctcaggatctsgaggctgcagtgaactgtgttcatgccactgtactccagcctgggcaacagagcgagaccctgtctcaaaaacaaaaacaaaacaacccaaaaaacaaaa

SEQ ID NO: 136241 - DNA, 201 bp, Homo sapiens
atggttaccttaggcatatatggaatatagagaacatcaaggagtgatttgttaaagatgagtttaagaagagaagtagaggccaggcatggtggcttacrcctgtaatcccaacactgggaggctgaggtgagaagattgcttgagcccaggagatccagaccagcctgggcaacaaagggagatttcgtctctacaaaa

SEQ ID NO: 136242 - DNA, 201 bp, Homo sapiens
ataattggctcttaaaagatctggaaagaggttgttgacttcaaacagcctatttatcccttttactacacaccctatttcttatcagatgcttaattctrtgctggtgagacagatttaatcgaagtgttttctaacctggccagcgccacataatttactcccctccctgcctgggcagggaaaaaatactcttgcatt

SEQ ID NO: 136243 - DNA, 201 bp, Homo sapiens
acttttaatgataactctacatgtcaggtattgtactaagcactccagtcattttggcagaataattggctcttaaaagatctggaaagaggttgttgacytcaaacagcctatttatcccttttactacacaccctatttcttatcagatgcttaattctatgctggtgagacagatttaatcgaagtgttttctaacct

SEQ ID NO: 136244 - DNA, 201 bp, Homo sapiens
tggatgggttgtgtaactaagctgtcgaaaaagaaccagttattagactttgcatattttttgtcttacattatgtcttaagttacctgcagtaaagagaygttttagttccatatgaagcaggccatttattaatctgataaacaagaaaaacatgtagtgttactctattacatgaatcacacaaaacaatgtaaaatt

SEQ ID NO: 136245 - DNA, 201 bp, Homo sapiens
ggaagcatgtattgtcccttttttctatgtattgtcccttttttctctgtattgcttttaaaaaatttatagtggactatttatcttaactttagagaagytgcataatttataaattattaaacaattgctccattcattagaaaaattaaaacaagtttttgcacacatgtgctattaaaacattaagtgctatattga

SEQ ID NO: 136246 - DNA, 201 bp, Homo sapiens
taagttcctttacttgtattcagacatttcaacaagattcaagattttaacgacactttctatcgacgtaagttttttacttgaaattaatgctcactagwttcttagaattttttagttggtagctattcaaatattgctagctatttcaaggctatttcttcacttgctttcctctctcactgttggcttttcagtaat

SEQ ID NO: 136247 - DNA, 201 bp, Homo sapiens
gcaagaaaaaatttcaaagcataaacataatcacattgaatattttcctttttatttgagcaggtctggtgtggttaccttttcatttggggataccatartagttgtaggtgtggtttttttcatactgatctttgcagctgaatttactgtgttctgtgcagaatggctgttgatggtgggtgtggggacactggagac

SEQ ID NO: 136248 - DNA, 201 bp, Homo sapiens
aatctatattatttcaaaataaagagcttaaaaatgcaaatacaggcccctgtagggaaaaaggaagagttggtgggggtgggttggttagtggggggcaytcagtttgtctatccccattatgtgggtctgggaaactttgggtattttctagaaatccagattagatttcttagtctggctcttggttccctgattgcc

SEQ ID NO: 136249 - DNA, 201 bp, Homo sapiens
aacaagattcaagattttaacgacactttctatcgacgtaagttttttacttgaaattaatgctcactagattcttagaattttttagttggtagctattyaaatattgctagctatttcaaggctatttcttcacttgctttcctctctcactgttggcttttcagtaatgttgctgatagactgaaaagagaatgctag

SEQ ID NO: 136250 - DNA, 201 bp, Homo sapiens
aattaagtatatttacttcattgtttattgccagtcattggttttcaggtgaagacacaaattgttattataatcccttgatttgatacattggtattcartagcacaaccgactcataggattacttgaaagcatacttcttcttttgaattcttatccccttctcctttaaagcccttcaaattgttttcctagatatc

SEQ ID NO: 136251 - DNA, 201 bp, Homo sapiens
tcacctgaggtcaggagttcgagaccagcctgaccaacatggcaaaactaaaaatacaaaaactagctggttgtggtggcaggcacctgtaatctcacctmcctagagactgaggcatgagaattgcttgaacctgggaggcggaggttgcagtgagccgagatcgcaccactgcactccagcctgggtgacagagtgagt

SEQ ID NO: 136252 - DNA, 201 bp, Homo sapiens
gttgggggagcatttttggagaccatatcagacagataatgggagatggaggggcttggagtggatatcacaaaagactttggaggttactgtaagtgctstcgcttttactctgagtcatgaagtcattggagagatttatgcaatgagagacttgattggcttttcacctaggttactgaggctgatgcattgagaata

SEQ ID NO: 136253 - DNA, 201 bp, Homo sapiens
ttggttagaaatttgaacaaagtcacccatacattttctaacttccagaactctacttattatatatcttttgctttatagcctgaaataactctatagcraagtaatttacaagaaatggtctattatgaaaagcaggctttaaagcataaaaatttttttataggaaatatgcatgattataaaacaacctgattttta

SEQ ID NO: 136254 - DNA, 201 bp, Homo sapiens
acttgagcccaagagttccagaccaccctgggcaacatagagagaacccatctctaaaaaaaaaaagaaagaaaaaaagaaaagaaaaaaaaattagctgkgcatgatgatacatgtctttggtttcagctactcaggaggttgaggtgggaggattgcttgactgcacctggaggtggaggctgcagggagctctgatca

SEQ ID NO: 136255 - DNA, 201 bp, Homo sapiens
gttggaatgaacatcttagctttgagtataattaattgcatgttaagaattatgtaagtactaaataatagaggcgtagaattttggactgatagtgtctrtcttaaggcaagtgttcacttatatgtcacttttttttattacagggtagggaaaagtatagcacatctttatgtgcttttgtatttataaaaagatagt

SEQ ID NO: 136256 - DNA, 201 bp, Homo sapiens
ttaaattctcatgagtgtggtgaccaactgaagaacatgttttagggtggaggaagtgacccacccagcctaatacctcagaaaggtaaggtcagatagaytgagaattggtcattggagttagcaacacggaggttattggtgaacttgacaagtacagtttctgtggagtttgagaacagtcaggactttgaaagcaca

SEQ ID NO: 136257 - DNA, 201 bp, Homo sapiens
aaagaggattggattttgatgtttttctagaccgtaatactctatagtttgtttacatgtgtattatcctttctgttgagttttttttgcttgtattaatwatattttttctgttttagaattggggcttgttgatggacaagaactggcggttgctgatgtcaccaccccacagactgtactattcaaacttcattttac

SEQ ID NO: 136258 - DNA, 201 bp, Homo sapiens
tgtgctgtgagagaaaggaatcgaggatgatacaacaaggtttttgctctaggggcgggcacctggaaagatggagttactgcaatgaggaagttactgcratgaggaagatctggaaaagaacagatttggttgttgtgagcaagggtgatcaagtttggttttggaaactgttaagtctgagatgtctgctagatggtc

SEQ ID NO: 136259 - DNA, 201 bp, Homo sapiens
actagattcttagaattttttagttggtagctattcaaatattgctagctatttcaaggctatttcttcacttgctttcctctctcactgttggcttttcrgtaatgttgctgatagactgaaaagagaatgctagttttagctgacatgaccagctacaagtttctatgcttacctgaatgagagttcactcaaggaatt

SEQ ID NO: 136260 - DNA, 201 bp, Homo sapiens
agtggggccccacactgttggtgagatttatgagtattagaagctgtaactaagaactttatcttccaactgctcagaactgcatgaccaaaagctgtcaagagtgtattagtaacaatatgattactccttgatcacaggcaattgatacccaagaaagaattaaacctctttagaggtttaaacataaataaataaatt

SEQ ID NO: 136261 - DNA, 201 bp, Homo sapiens
tatggcattgtcaaattcattttagaaattaaaacttagctgcttaagttcctttacttgtattcagacatttcaacaagattcaagattttaacgacacyttctatcgacgtaagttttttacttgaaattaatgctcactagattcttagaattttttagttggtagctattcaaatattgctagctatttcaaggcta

SEQ ID NO: 136262 - DNA, 201 bp, Homo sapiens
cagtggggccccacactgttggtgagatttatgagtattagaagctgtaactaagaactttatcttccaactgctcagaactgcatgaccaaaagctgtcaagagtgtattagtaacaatatgattactccttgatcacaggcaattgatacccaagaaagaattaaacctctttagaggtttaaacataaataaataaat

SEQ ID NO: 136263 - DNA, 201 bp, Homo sapiens
ggaaaagaacagatttggttgttgtgagcaagggtgatcaagtttggttttggaaactgttaagtctgagatgtctgctagatggtctatatcttacaagrtggtctgagatcaccagaacaaagcacaaggctactccgaattctggccagtaaagtaggaagaaaactgaatgaactggaaaccaatttttaaaaagtg

SEQ ID NO: 136264 - DNA, 201 bp, Homo sapiens
gggcaatgtagtgagacatcatctctaaaaaattaaaataattttttgtaaaagcatgagccataaaaggaaaaaattgatacactgaacttcatcaaaaktaaaaacttgctgtgtgaaagaccctcttaaacggatgaagaaaagccacagactggagaaaatacttgtaaagcatctgatggaggactcatatctaga

SEQ ID NO: 136265 - DNA, 201 bp, Homo sapiens
ggctcccagctactcaggaggctgaggtgggagaatcgcttgaccctaggaggctgaggttgcagtgagctgaaattgcgctactgcaccccagcctgggygacagagcaaggctccatctcaaaaaaacaaaaaaaaacacaaaaaaccataaaacgatagaactttagggtttggtggagagtgcttaggccacgtcaa

SEQ ID NO: 136266 - DNA, 201 bp, Homo sapiens
actgtacaaatacatggaaattaaacaacactctcctgaaagactgttgggtcaatgaagaaattaaggcagaaataaaaaaaattattgaaacaaaaacrgcaacataacatactagaacctgtgagatacagcaatagcattgctaagagagctatttatagcaataaatgcttacatcagaaaagtagaaagagctca

SEQ ID NO: 136267 - DNA, 201 bp, Homo sapiens
gttctagaaatggaacgtcaaagcctggatgaccacacatctgtttacagcatagcttactgaatattttaagtccattgttaagtcctactgcttagaaraagattcctttctgaatattactgcccattgacaatgaatgcaccttgccacccatgagctctgttagagatggcaaggaagttgatgcttgctgtcaca

SEQ ID NO: 136268 - DNA, 201 bp, Homo sapiens
ttctagaaaattctatctgtagggacaaaaagttggtcagtggttacgtaggcgggatgggttgctgtgttggagttctagaggaggatcactgtgtggcrgaaggaatcttttggaagtgatagatatgttcactatcttgactgtgatgatggtttgataagtacacatgtatgtcacacttaccaaagtatatacttt

SEQ ID NO: 136269 - DNA, 201 bp, Homo sapiens
tgacttgacttttactttggtgcagctgattaacgttagcctgtatgatgaacaaggaagggctgggaggaccagcctattttagttactgtgactgcgtragaaattaccctaaaacttagtggcataaaataaccatgtattgtcctcagggattccgtgagtcagagattcacacacacacacaaaaggcttaatttt

SEQ ID NO: 136270 - DNA, 201 bp, Homo sapiens
acagatctgtaagctgctactatgagcaagcatcatacaagggtctggaattccatgggggaatgtttggaaaggctcatgtgttattttatttattattwtttttttttgagacagactctgtctttgttgcccaggctggagtgcagtggcgcgatctcagcttactgcaaagctccgcctcctgggttcacaccattc

SEQ ID NO: 136271 - DNA, 201 bp, Homo sapiens
aagtctgtgtaatctccctgtgcctcagtttttcatctttagagtcttaatagtaactatctcatagggttgttttcatgattaaatgagtcagtccatakacactgaacaacagtgtctggcaatagtaagcagtgaataagtttagctattactattgttgttattaacttcattagatataactcttacttagagctc

SEQ ID NO: 136272 - DNA, 201 bp, Homo sapiens
ctaagtagacactccttcatgaatggggttgatgatgtagtaccgtctcttgttagctatcagtgttaactagatagttatagtttctaataaaatattakgacatttaaaattcatatatattgtattgcagacagttcagcttttctcagatgtagcacagtaatccagctagtacagcagttcttggcaaagaaaatg

SEQ ID NO: 136273 - DNA, 201 bp, Homo sapiens
agtagggtacatagacttcgattctggctgcatgcagtaatatggtctcatttatagatatcgtagacatagcagtgagtaaagtagataaaactgaaccytcccaaagcttgcattctgtggggcaagaaacaaaactataaatgaacaattatgggtatatcagagtatgtactatttgattccattgaagttcagtaa

SEQ ID NO: 136274 - DNA, 201 bp, Homo sapiens
tacagataaaataagaaattgttaataaagatttgttttactgacggcagtttattgaggttagttgtattcactataacagttagtggatgattttcctrttcctgattactgtaaaaagtaatgcaaaacattttattttcatgcccttttctttttagatggaaattccttcttccagcattataaatcagtacattg

SEQ ID NO: 136275 - DNA, 201 bp, Homo sapiens
tgaggcaggagaatcacttgaacccaggaggcagaggttgcagtgagccgagatcgcaccactgcactccagcctgggtgacagagcaagactctgtctcaaaaaaaaaaaaaaaactaaaaaggaaaaattagatgtcatgaatacataaaatatatatagatactagtctactttatcatttactaccataaaatatac

SEQ ID NO: 136276 - DNA, 201 bp, Homo sapiens
tgccttttaaagttcttttgatgttggacaatgccgctggccacccggaaccctgtgagtttaaccttatgttgaagtggtctgcgcgctcttccaaacacaacatttctaattcagactccagattgattagtcctaaggacctttagggctcattacacatgatactctatggaaaggattgtcagcattatggaagag

SEQ ID NO: 136277 - DNA, 201 bp, Homo sapiens
cagccatactcattcgtttacatattgtttatggctgctttcatgctacataggtagaattaagtagttataccagagatcttaatggcctgtaaagcctraaatattttctgcctggctccttactgaaaatgtttgtcaattttaatactattatatttaacaattactggaatgctttttttcctgcgtgattgtgtt

SEQ ID NO: 136278 - DNA, 201 bp, Homo sapiens
atctccctatgttccccaggctggtcttcaactcctgggctcaagggatcctcctgccttggtattacaggtgtgagccaccacgcctggctgaaatccctttttttttttttactaaattccagatgagtgcatcatagtaacatcgaaatatttgtattttgagagcttaatgattggttgaaatgggtgccctgtttt

SEQ ID NO: 136279 - DNA, 201 bp, Homo sapiens
actccctttttttttttttttttttgagacagaatctcctgggctcaatcagtcttcctgccttaacctaccaccaagtagctggggctacaggtgcacamcaccatgcccacctaatttttttttttttttttttttgagacagagtcttgctctgtcgcccaggctggagtgaagtggcgcaatcttggctcactgcaa

SEQ ID NO: 136280 - DNA, 201 bp, Homo sapiens
cggatcaccagaggtcaggagttcaagaccagcctggccaacatggtgaaaccccgtctctaccaaaaacaaaaaacaaaaaattagctggctgtggtggygggcgcttgtaatcccagctacttgggaggctgaggcacgagaattgcttgaacccaggaggcaggggtttcatgagccgacatctcgccattgcactcc

SEQ ID NO: 136281 - DNA, 201 bp, Homo sapiens
ttactgtagccttgtagtatagtttgaagtcagatagtgtgatgcctccagctttgttctttttgcttaggattgtcttggcaacgtgggctcttttttgrttctatatgaacttcaaagtagttttttccagttctgcaaagaaaatcattgttagcttgatggggatggcattgaatctataaattaccttgggcagta

SEQ ID NO: 136282 - DNA, 201 bp, Homo sapiens
gtttactttataaagataaaggattaatatagtctgattaattagaactacttttattaattctaggaggatctccttacagtttgaactttagagtcaarttttttgtaagtgaccccaacaagttacaagaagaatatacaaggtgggtttatggatatatttttcttgaaaatattgtcaaaactctaatatgaaatt

SEQ ID NO: 136283 - DNA, 201 bp, Homo sapiens
aaatggtcttaaaattgcttgcttaactatggaaactggcatttggctgtttttatatgcattagatagctatatttgtatatggttacatttgatatacygcaaatttatgttaattcacagttaagtaatgagaatgtctcaaataaatgctctgagaacttttattaacaaacttcatctgaacacattggtgtactt

SEQ ID NO: 136284 - DNA, 201 bp, Homo sapiens
tcaaaagagacaaagacggccattacataatggtaaagggatcaattcaacaagaagagctaactatcctaaatatatatgcacccaatacaggagcaccsagattcataaaacaagtccttagagacctgcaaagagacttagactcccacacaataataatggaagactttaacaccctactgtcaacattagacagat

SEQ ID NO: 136285 - DNA, 201 bp, Homo sapiens
gccaatttgctttttaacaagtgaaatgacatgataagatctatgttttagaaaatagtattatgagcaatgatagagaatggattagcgaggaaagcctyggtacccagaaactataaggtaattgcagtaatccaagtgaaaataataaaggcctgaacaaaaacattggtaatggaatggaaaatagggaacaaattt

SEQ ID NO: 136286 - DNA, 201 bp, Homo sapiens
aaataactgcctgaagcagaagaaagtaaaatcaagtttgatggtagtcaaggaattaatttgctctcagacccttttataatggaatgttatggaatctyataactggtattgtttggtaaaatggggtaaatgtctagttttttgtaaattttactaccatagtgtatatcagtgatttttctactctgattagaaatt

SEQ ID NO: 136287 - DNA, 201 bp, Homo sapiens
atacttaacgtgttaaagttactcctagaaaaaaatggacttagtaatttctgtcttgccaatttcaggttgcttttatcattttttcttataaatgattrcatatattcaaagcctcattagcttgtctgaagaaaattcagaccttgtttttctcttcccttttgcacaaacagccatttctccatttgtaccagcaac

SEQ ID NO: 136288 - DNA, 201 bp, Homo sapiens
tcattttctctcctgccgccctgtgaagaggtgccttccaccatgattgtaaatttcctgaggcctccccagccatgtgtaactgtgagtcaattaaacckcttttgtttataaactacccagtctcaggtatttcttcatagcagcatgagaatggactaatacatttgccatctcaaaacacctttattctactttcct

SEQ ID NO: 136289 - DNA, 201 bp, Homo sapiens
taaaaacaatgaatggtccaaatgtatgttggccaaaattggcccataatccatgaatttataactgctcttttaggacaataatgtctaatcataattgygcaataaaaaccacctctggaggtgtttcttgtaaccccagaagtagagattcaacagttttagcaaaatgtaccatagaatcagtgctgtccctctcat

SEQ ID NO: 136290 - DNA, 201 bp, Homo sapiens
ggcagccatgcaaattaatatacactgttgcatttgaccatttatgtattaccttacctaacagattaataagattttatttcattagaagttattgataytataaagtatttgttctaggaagacaatgataaaatctagtttatattttattaataagttctatcttctgattaaatgaatggtaggtggtaaaagcgt

SEQ ID NO: 136291 - DNA, 201 bp, Homo sapiens
ttccaatgtaaatttaaatgtaaaacaatagtatagttgggtaagagttggaaacatttttaataatatttgttatgatcatcctaggcaacaatagttcmtgcatttgtaaaggaaatgttgatagatttcactgcataacatacagagtatacactgaggacaaaataccaactggagggaaatacttgcaacatatgt

SEQ ID NO: 136292 - DNA, 201 bp, Homo sapiens
agcctaccgaccaaaaaaagtccaggaccagacggattcatagccgaattctacaagagttacaaagcggagctcgtaccattccttctgaaactattccratcaatagaaaaagagagaatcctccctaactcattttatgaggccagcatcatcctgataccaaagcctggcagagacacaacaaaaaaagagaatttt

SEQ ID NO: 136293 - DNA, 201 bp, Homo sapiens
ctgttgatatctttctctgcaggtatttggtgtttagctctgctgtctcttccacatgctttctatcttccaaagtgtattagtatcccctcccccccccttttttttttttgagatggattctcattctgttgcccaggctggagtgcagtggcgtgatctcagctcactgcaacctccaccttgcgggttcaagtgatt

SEQ ID NO: 136294 - DNA, 201 bp, Homo sapiens
gatattcgatacaagattttaattatgcaacttttcaaaatgtgtatgtttgcaattatgctcatttgttcctgagagttcttgttgcctctccctccccsacccagtcactatgttgttattttgttgacttagacagttcttcagtttttagtatataaactcaaatatttctgcagatgatgtagcactctggtcaag

SEQ ID NO: 136295 - DNA, 201 bp, Homo sapiens
taccataaatattaataaaagcaagttcaaggacaatctgatttaaaaaaaaaaaaaaaaaaaaaagatcggccgggaagggagcaacacctgccattcaraaggctgttactgcccttggggaagattggcctagtattgacaaattttacatgtttttcgacaaaactgggattaaggactattaaatgggatatgtac

SEQ ID NO: 136296 - DNA, 201 bp, Homo sapiens
gaaatttcttttgtactttggcagtttttagttgtaagttgtattacagtaccttctctttttcatcatattctttggtcctgaattgtgccatgatgtawctcaatataagttctataattagaagtgatcatggagtacatagagtatataattaaataagctgtggggttaagggaagattcctataagagatcatct

SEQ ID NO: 136297 - DNA, 201 bp, Homo sapiens
taactgcaagttattagtcaaagaatttactcttctgaactaaaatttttattagaattatgattttttacaaactatgcataatataagcatacaaaaartatgcttcctatatatctgaagaatagattttaagtgaagaaaattacaagttatttaattttgtctttttaagcctaatggtggtattccacatgataa

SEQ ID NO: 136298 - DNA, 201 bp, Homo sapiens
gctgtacaattatttggcattaaatttcttggatttttacttattcttcagtaattgcaattgtggttcttttaattagatagatcacatcatagaaataraagatagcatgtgatgaataatagaaatgtttactttgacaattaagtgttataaaatgcactaaaggatataccttactctgaaccgagataaagggta

SEQ ID NO: 136299 - DNA, 201 bp, Homo sapiens
tttagagatcaccacaaccttctaattggaaaccacagtttaggcaatcgggggaaaaggaaaaggtttctgtttttgtatgaatacataatagttgtacrtgtttatgggattcaaatattttattgtcattttttatattggacatcttctgaaatggataaaacaactcccaattaaagttatgattctctttctgtt

SEQ ID NO: 136300 - DNA, 201 bp, Homo sapiens
aggtagggttccaacttaactcttttgcatgtggttacccacttgtcccagcaccatttgttaaaatgactgttctttcccattgaattgtctcagggctsttgtcaaaaatcagttgagcacaaatataagagtttatttctagacttccaattctattccattgatttgtatctctgttcctatgctagtactacactg

SEQ ID NO: 136301 - DNA, 201 bp, Homo sapiens
tgccaccatgcctagctaatttttttgtatttttagtagagacagggtttcaccatgttagccaggataggatggtctcaatctcctgacctcgtgatcckcccaccccggcctcccaaagtgctgggattacaggcatgagccactgtgcccagcccataaactgtttcttaaagcttcctttcaaaagttacacattcc

SEQ ID NO: 136302 - DNA, 201 bp, Homo sapiens
tattactgttcattactgagcacagcagccagatttctgacataaaacataagtcacctaagtttcctgctcaaagcacagtggctttcattgacacgtggagcagaattcaagttctttgcccccccaccccttgctcccactcagccttgcttactttcctctattctacactagctttcttgcagttactcagatctt

SEQ ID NO: 136303 - DNA, 201 bp, Homo sapiens
ttcagtctattctttctgttcttgagactggatattctcagttaacttgttttcaagttgactgattcttctgtctgttcgaatctgctgttgcgctcttytattaacagtggtagaaagttcgatttatgattatggaaattgagatgtcatttttaaactgtccttttatttcaaaaggatttttaaattgaaaacatt

SEQ ID NO: 136304 - DNA, 201 bp, Homo sapiens
ggaaaaggaaaaggtttctgtttttgtatgaatacataatagttgtacatgtttatgggattcaaatattttattgtcattttttatattggacatcttctgaaatggataaaacaactcccaattaaagttatgattctctttctgtttgataatcttagccaaaagccgttgctgcaacaaaactcattttaacgtagt

SEQ ID NO: 136305 - DNA, 201 bp, Homo sapiens
gggaaaaggaaaaggtttctgtttttgtatgaatacataatagttgtacatgtttatgggattcaaatattttattgtcattttttatattggacatcttctgaaatggataaaacaactcccaattaaagttatgattctctttctgtttgataatcttagccaaaagccgttgctgcaacaaaactcattttaacgtag

SEQ ID NO: 136306 - DNA, 201 bp, Homo sapiens
acataccattctggaatttaaattgtgataatgttgctgggaagcatgagaagtgctggtggtctgcctctcctatatcccttgactaggatctggggaaraagggatttgcatcttcctggccatattttcccagagtggaacattggccagggcagaagaaggagggagtgggttgtggctcaagtgccacagggtctt

SEQ ID NO: 136307 - DNA, 201 bp, Homo sapiens
ggggaaaaggaaaaggtttctgtttttgtatgaatacataatagttgtacatgtttatgggattcaaatattttattgtcattttttatattggacatcttctgaaatggataaaacaactcccaattaaagttatgattctctttctgtttgataatcttagccaaaagccgttgctgcaacaaaactcattttaacgta

SEQ ID NO: 136308 - DNA, 201 bp, Homo sapiens
cctttcattacctctttaagcatggtctcctttagttctgtggatatatttataatgactgctttgaagtattgttcagtctgacatgtaggccctctcaygagcagttcctgttacctgctatttttcttctgtttctcttatatgtttctgtttcttctcctgtgttatgttttcgtttaaacttgacgttttacttta

SEQ ID NO: 136309 - DNA, 201 bp, Homo sapiens
gggtcccagactggtagcattccctgtttgggacatggctagtctcatgggcaagggaaaaaagaagcataatgaaatcataagctgtttcatttttttcytttttttttttttttttttttttgagatggagtcttgctctgtcgcccaagttggagtgcagtggcgcgatcttggctcactgcaagctccgcctcccag

SEQ ID NO: 136310 - DNA, 201 bp, Homo sapiens
tttatttattttttttgagacagagtctcactctgtcacccaggctggattgcagtgatgcaatctcggctcactgccacctctgcctcctgggttcaagygattctcctgtctcagcctcctgagtagctgggattgcaggcacatgccaccacgcctagctagtttttgtatttttagtagagacggggtttcacaatg

SEQ ID NO: 136311 - DNA, 201 bp, Homo sapiens
aagggtcactctggcagtaaatctctgtatcagttatcttgttatgcttgatcacaaatgagcctaacttaaagagacataacaaaagttctttctttcttacattgtatgtacattatgtgtcatctgtggctgtgctctaccttatcttcattctgggtcccagactggtagcattccctgtttgggacatggctagtc

SEQ ID NO: 136312 - DNA, 201 bp, Homo sapiens
tatgatacggggtgcatgttacatgcatagaatgtgtaatgattaagtcaatgtttagagtatccatcaccttgagtatttatcatttctatgtgctgggracatttcaaattctcttttctaggtattttgaaatatataatacttgtttttaactatagtcaccctactctactgaggaacattagtatttcttccatc

SEQ ID NO: 136313 - DNA, 201 bp, Homo sapiens
ccgaattgctcggttatttttcccctctcttttttccagtgcccacctgttttctgattgatatataatacttgtacatatttatgggtacatatgatacrgggtgcatgttacatgcatagaatgtgtaatgattaagtcaatgtttagagtatccatcaccttgagtatttatcatttctatgtgctgggaacatttca

SEQ ID NO: 136314 - DNA, 201 bp, Homo sapiens
ttcttcatataaagccaatgtacattcttaggaagttatttggtaaatagcctctaaatgcattaattttttacaagtaaactctttatgttgctcatctrgaacataatctctgaaaacaaattgtaggatttgattcatggtttggggtataaaaataaaacttttaacatattatttaatttatttctgcagatcccc

SEQ ID NO: 136315 - DNA, 201 bp, Homo sapiens
aaaaacttcttcccattctgaatgaatgtgaactagtattttattgaggattttggcagtgcaagtgggccagaaataactttttattacaagtatagcayatatacaataaagaacaaatcttaaatgtaagacaagaatttataaggtgaaatctcctgtgaaactatcactggatcgagataatagaatattaccagt

SEQ ID NO: 136316 - DNA, 201 bp, Homo sapiens
agactaacaacagtggatggtggtttgccatgacatttgaagtcacattcttgtattttaattaaaatcaagtttttatttttgaagtttgcctctccccmcatttctattttacatgtgttttggggactataacaagagtcaccttaaccagtttgtaatcaagcacctaaatattgcaatcttatctcaacctttatt

SEQ ID NO: 136317 - DNA, 201 bp, Homo sapiens
ggaagacctggaaggtctggctctttgcccagatgctggtgttggtgttgatgttgatggatgtgctctgctgatcataatactctagagaagaaattgcrtcttatctttgaacccaccattcataatgtttattcctaactcaaattggatagttcagtatctgtatatcaggaatttggtttcatattaaaggtaata

SEQ ID NO: 136318 - DNA, 201 bp, Homo sapiens
ttgtggcggttgtgaatgggagttcattcctgatttggctcttggcttgactcttgttggtgtataggaatgcttgtgatttttgcacgttgattttgttycctgagactttgctgaagttgtttatcagcttaagaagcttgagggctgagactatggggttttctagatataggatcatgtcaactgcaaacagggtta

SEQ ID NO: 136319 - DNA, 201 bp, Homo sapiens
tgttctgttccattggtttatatgtctgtttttgtactagtaccgtactgtttttggttactgtagccctgtagtatagtttgaagtcaggtagtgtgatscctccagatttgttctttttgcttaggattgccttggctatttgggctcttcttcggcttcatatgaattttaaaatagttttctctagttctttgaaga

SEQ ID NO: 136320 - DNA, 201 bp, Homo sapiens
aaatggtactgagaaaactgggtatctattgcagaagaatggaaccagacccttatctcagtatataaaaaatcagctccaaatggattagagagttacaygtaagacctgaaactataaaactgctaaatgaacatagaggaaatgcttcagaatactgatctaggcaaagattttatgggtaggtctttaaaagtacag

SEQ ID NO: 136321 - DNA, 201 bp, Homo sapiens
agtattcagaaattttgctcctatatagcacatcctcctttccccttcctttgtattactgtcacacaaattgcatctttatacattgtaagcccatcaaygttgtattgctttacgcagttatattttaaatcagataggaggaaaaaagagttacaaacacaaaatgtatttctaccgttgtttacatttagctatcta

SEQ ID NO: 136322 - DNA, 201 bp, Homo sapiens
ttctcctgcctcagcctcctgagtagctgggattacaggtgcataccaccatgctcagctaattttttttttgtatttttagtagagactcggtttcattrtgttggccaggctagtcttgaactcctgacctcaagtgatcctcctgcctcggcctttcaaagtgctgggattacaggtgtgagccactgcacctggcca

SEQ ID NO: 136323 - DNA, 201 bp, Homo sapiens
ttacccttcaattgtgagaaccaaaaaatgtctgcatacattgccaagtgttccgtggaggacaaacttgcccctgtttgagaaccactgctctacattcrtgtttctcaaagatattgatatggaccagccacattgatatcacttgcgggacttactgaagtgttattttttcagaatctggaattgggtcccaaaaat

SEQ ID NO: 136324 - DNA, 201 bp, Homo sapiens
tggctgggggttggaacacttggaggtgggggatccacttcgcagattgcttattcatatgtctaatgactgaaggatgggctcagctgggactgttgagcagagcacttatgtatggtttctctatatggcttgggcttcttaacagcatgttagaagctgggttctgaagggaagcatcctgagagtgagtgttccaag

SEQ ID NO: 136325 - DNA, 201 bp, Homo sapiens
taagtatattcagtgttattggagtattttgacttctaggttctagtggataattttttaaaaatgagattaaccaatgcctctaattctcatccagtacwgcaaccatctctgatgccatatctgacctcttgtgtcctgtagccagactcctggttctcaacaatattaatatttattcatttgttcaatcctataata

SEQ ID NO: 136326 - DNA, 201 bp, Homo sapiens
caagggtcactctggcagtaaatctctgtatcagttatcttgttatgcttgatcacaaatgagcctaacttaaagagacataacaaaagttctttctttcttacattgtatgtacattatgtgtcatctgtggctgtgctctaccttatcttcattctgggtcccagactggtagcattccctgtttgggacatggctagt

SEQ ID NO: 136327 - DNA, 201 bp, Homo sapiens
cagtacaagacatttagcctcaccttgtattttccttgccccagctctgaaatcagccttttttctccagagtcctaatttcttttagtgaggaatagtayatagtaggttaagtatattcagtgttattggagtattttgacttctaggttctagtggataattttttaaaaatgagattaaccaatgcctctaattctc

SEQ ID NO: 136328 - DNA, 201 bp, Homo sapiens
ccaagggtcactctggcagtaaatctctgtatcagttatcttgttatgcttgatcacaaatgagcctaacttaaagagacataacaaaagttctttctttcttacattgtatgtacattatgtgtcatctgtggctgtgctctaccttatcttcattctgggtcccagactggtagcattccctgtttgggacatggctag

SEQ ID NO: 136329 - DNA, 201 bp, Homo sapiens
tccaagggtcactctggcagtaaatctctgtatcagttatcttgttatgcttgatcacaaatgagcctaacttaaagagacataacaaaagttctttctttcttacattgtatgtacattatgtgtcatctgtggctgtgctctaccttatcttcattctgggtcccagactggtagcattccctgtttgggacatggcta

SEQ ID NO: 136330 - DNA, 201 bp, Homo sapiens
tccttctatatttatcattagatattatttttaaaaagttattcctctccctcacttaaaaacattagcatcactctggacttatggatttttattcagartattataatctattatttattttggaacttaagttgtttcatatttcctgataggagtttctttaaactgcctctctttttctttgactagtcctcagtt

SEQ ID NO: 136331 - DNA, 201 bp, Homo sapiens
ataacctttgcccaatatttgaatttcaggagtctgtgttgacatccttgattacttttatagacttcagagtgtgtgtgtgtgtgtgtgtgtgtgtgtgkatagagtttggttgtgtatgtatacagtttggttattgaaattagaagtatagaaaagggaaacagttacagggattactgtgagagtacataattaaat

SEQ ID NO: 136332 - DNA, 201 bp, Homo sapiens
caatgagcatatattgctcttataattagaaaagataatacacatttctttatttacatgacagttgtaatagtcaatgactcacacgcataaaaaaagtrttcatttttctgagcaatgaatatggatagttttcaattaagtcaaggattcagagaatattctatagatatattcatttccaaacagaattctaagact

SEQ ID NO: 136333 - DNA, 201 bp, Homo sapiens
atatgtgtatctctagcatctagcactgtgtctagcaactaggagctattcacatacttacgtgaataaacaggtatattgaaggcataggtttagagaaytctgtagggccttagtgggtcgggagtgtgtttctttcttgcacgcacagtactttaaatgctgaaatgtataaataggatatagtgagttgtaaaagat

SEQ ID NO: 136334 - DNA, 201 bp, Homo sapiens
cttgtcagtaacatctgagaaaacatttggtagcaaacccttccctttttacctttgtccttccttttcttgtttcttctgtttttctcatccttcttattgtctatcttactcttcctagcctgtcttacctttattcttcatataaagccaatgtacattcttaggaagttatttggtaaatagcctctaaatgcatta

SEQ ID NO: 136335 - DNA, 201 bp, Homo sapiens
aaatctttctaatttatcttactgtttccagcctagcacaaattgcagtcagttatagtggcttactacaagaagctgctagggaaaatggaatgtcttcwttgggaagggatcgtgatttgaaaaagttctcttaggtgattctgatactgtgactcattttgtatctggctatttttatggcttttgatctgtgttatc

SEQ ID NO: 136336 - DNA, 201 bp, Homo sapiens
gaagaatatacaaggtgggtttatggatatatttttcttgaaaatattgtcaaaactctaatatgaaattttgaaattaattaggcaaaaagaaattactrtggtgtaattctgagctttccagtcagtacacagaataagttatggctattccaagataacgttttcctccttttttggatggctgggagagtgtaaggg

SEQ ID NO: 136337 - DNA, 201 bp, Homo sapiens
gaacccaggaggcagagcttgcagtgagccgagatggagccactgcactccagcctgggcgacagagtgagactccgtctcaaaaaaaaaaaaaaaaaaaagcaagggactagtgggaggaagtatttgaatccttaaagtttgaaacaattttagacattaacacagcagttcttaaggttttcttcatcttttttcctt

SEQ ID NO: 136338 - DNA, 201 bp, Homo sapiens
tgggattgcaggcgcccgccaccaggcctggctcattttgtttttagtagagatggggtttctccatgttggtcaggctgatcttgaacttctgacctcargtgatccacccgcctcgacctcccaaagtgctgggattacaggagtgatccaccgtgcctagcctgtagttatttttcttagtgatatccagattgtcct

SEQ ID NO: 136339 - DNA, 201 bp, Homo sapiens
gggaggaaatcatcactgaaacagaaggaaatttgtaccataaatattaataaaagcaagttcaaggacaatctgatttaaaaaaaaaaaaaaaaaaaaaagatcggccgggaagggagcaacacctgccattcagaaggctgttactgcccttggggaagattggcctagtattgacaaattttacatgtttttcgacaa

SEQ ID NO: 136340 - DNA, 201 bp, Homo sapiens
tgggaggaaatcatcactgaaacagaaggaaatttgtaccataaatattaataaaagcaagttcaaggacaatctgatttaaaaaaaaaaaaaaaaaaaaaagatcggccgggaagggagcaacacctgccattcagaaggctgttactgcccttggggaagattggcctagtattgacaaattttacatgtttttcgaca

SEQ ID NO: 136341 - DNA, 201 bp, Homo sapiens
ttcttgttttattatttcaccttgctgtggtttcatcaggcatatagttcttgggtctcatattatatttgccatgcataagtctgttactgaaaatgacytttacttctattgaaagattcttgggcagttattcaatgatgattttatacatctttattttgaaggcttactctgtgactatacacaagttgttcttgt

SEQ ID NO: 136342 - DNA, 201 bp, Homo sapiens
gtaataactctcacacagtgaggcaatcagtagtcaatttggcagcatttatcaaagttaaacatggccatacacttcaacccagcaattgcatttccacraatttgtcttaaagaaatgcttcattatgtgtacaaagctttatgatgaaaatgttctttagagcattatttgtaacagcaaagtactagaaacagcctg

SEQ ID NO: 136343 - DNA, 201 bp, Homo sapiens
ttgggaggaaatcatcactgaaacagaaggaaatttgtaccataaatattaataaaagcaagttcaaggacaatctgatttaaaaaaaaaaaaaaaaaaaaaagatcggccgggaagggagcaacacctgccattcagaaggctgttactgcccttggggaagattggcctagtattgacaaattttacatgtttttcgac

SEQ ID NO: 136344 - DNA, 201 bp, Homo sapiens
ttatgatggaacaaagtttgaatctttaaaggccatattttaacatgccaccttcccgtttaaaaatatataggagttccccggtgcttatcaaattaatyccaaatttacctgcttgaccttgaagactttctaccaacttcatctcattaaccttgtttctcattcgtgcttaaaaagaaaatagtcttgttttttcct

SEQ ID NO: 136345 - DNA, 201 bp, Homo sapiens
ttttaagttcttttaaaaaataaaaaatatttcatgacccatgaaaattacatgaaattcagacttcaatatctgaatttagaatacagccatactcattygtttacatattgtttatggctgctttcatgctacataggtagaattaagtagttataccagagatcttaatggcctgtaaagcctgaaatattttctgcc

SEQ ID NO: 136346 - DNA, 201 bp, Homo sapiens
gatgtaacttcactagatcttgctttttctctgctgtggacataggaatgataagcctgttatcactgggtttgtgttggcttgtgttgtttcaatgtcargtcctattttcactgtggctttggtataaccatttatttactgtggccaacctatggagtgtattgtccctctcatgccgtgaattcattgtcactaaat

SEQ ID NO: 136347 - DNA, 201 bp, Homo sapiens
gtagtaacaattaaacagaattagaatatttttaaccaaacaaaaggcacagtaatttcctaagcagtttgctgtcacgtttaactcctttttttttttttgccttcctaaaagcaattttgagtaaagtaagatgacagtacttgcaaatttaaaagcaaatagatggaaggagagagtatcagatctataatgaaagtc

SEQ ID NO: 136348 - DNA, 201 bp, Homo sapiens
tgttgggattacaggcatgagccaccatgcgcggccaactgcaacacctttcaaatggaaaagtaaagatgtgatagataattttatttgatcttctttcsccttttaaaacatgaagatttagcatattttttcccaaagagagaattttcaagtagtgaattctccagaaattaagaattactgtattgtgaaatgaaa

SEQ ID NO: 136349 - DNA, 201 bp, Homo sapiens
gatggggttttgccatattgtccaggctggtcttgaactcctgggctcaagctatctgcccacctcagcctcccaaagtgctggtattataggtttgagtygctgcacctggccagatttttttttaacagctttgttgaggtaaagtagcatataataagtgacatatgtttagagtatagtacttgatgtttttgttat

SEQ ID NO: 136350 - DNA, 201 bp, Homo sapiens
ctgttttttatattttatttttcagagtcaatacagatttgtatgtgaagctattttgaaagtttatgaagaaggctttgttaaacccttaacaacatcawcaaataaataagaaagcaaaaagatctgggatatgtgttggaaaactgctttcccttatgttcactgtgccataatgctgctcgcaggaaatggcatttt

SEQ ID NO: 136351 - DNA, 201 bp, Homo sapiens
gttgtatagatggtagctgaagcaatgggtgggactgtcactgcttatgaagtatatataaagttaggaagaggcacactgacagagctcctaactaccaycactgaaagattaagggctctccgaaatcaagaagccagtgaagaagactgaaagaaaggttgtgagagaggagtgtggttgtgtgttagatgatggtga

SEQ ID NO: 136352 - DNA, 201 bp, Homo sapiens
gaggagtgtctggcattaaaagcagcataagtcaaagtttctagttttatcagtctgggttcctcatcctttccatttttcttctattcattttatgataytgaggaaaagaaacacctctaaacttcctcttatactgtttgttaacagtagattagagtttctcaactttagcactattgacattttggaccagatcat

SEQ ID NO: 136353 - DNA, 201 bp, Homo sapiens
ggggctacccatcagaagtctcctctccactgagggctggacacttgtcgggtcgacctgcctgtggaaaggagccacccaccataggtctcctctccacygagagctggacacttgtctggacgacctgcctgtggaaaggagccatccactgtgggtctcctgagagctatgctgtcgctccgtgaactcctctctgcc

SEQ ID NO: 136354 - DNA, 201 bp, Homo sapiens
gttcctattatctcctcagtgtatttacttatttgctcaatccccttgtatgtgccagtcttccgaccccgcattagttgtctcctttctccttgcttgcygcctctgaggcctgtggcatggggtcctcagagcttgctgtcaggtccatgtaggaaagagaacttctcatttaatctttttcccctcatttaatcagga

SEQ ID NO: 136355 - DNA, 201 bp, Homo sapiens
accgtgtgtatacacagctcaagatgagcctggaacacctcgtgcttggctcagtaaggccttttccagatgccccaagtggtcaccttggaattgtgttyagccctttccctttttctactgtatctaattggatcctcaaatttcagtgaaacaacctcatcatctctcatttctggtcctacattttaatccttattt

SEQ ID NO: 136356 - DNA, 201 bp, Homo sapiens
ctgtctgataggagaaagaaagtaaagatggtatacaggccaggtgcggtggctcacgcctgtaatcccagcactgtgggaggctgaggtgggtggattgytttaggcctggagttcaagaccagcctggcccacatggcaaaaccccatctctactaaaatacaaaaaaatggttgtggtggcacacacctgtatttccc

SEQ ID NO: 136357 - DNA, 201 bp, Homo sapiens
cagtgtgtcttcataagattttttgaattgaggcacctggcttttttccataaatacagtcaatagttactcaattttttttttttttttttttttttttktgcttctggaaataatgccctctctctatgacagaatatttttcccatgtcgagtgaaagctcagtatccaaaagtaaaatacaaagttttcaaatcaga

SEQ ID NO: 136358 - DNA, 201 bp, Homo sapiens
cacacaaaagtataaaattccctgacagagcagataagatatatctagagtagatgagaaaaagaaaggagtcaaaggttattactacaaaaaaaaaaaaaacaaataatcaagggaaacaataagaggatgaaaggaataaaggatgtacaaaacaatcagaaaacaattagcaaaataacaagaatagatctttactta

SEQ ID NO: 136359 - DNA, 201 bp, Homo sapiens
acaagaacagacggaaatgtaagcacagagatggaaaccttatgagaaagaattaaacaggagtgctagaaataaaatgcattgcaacagaaatgaagaaygcctttggtcttatcggtagattatacacaagaaaaaaatgagtgagcttgaagatatgtcaatagaaacttcaaaaaccgaaaagtgatgggaaaaagg

SEQ ID NO: 136360 - DNA, 201 bp, Homo sapiens
catccacatttctttaaataatttcttccgtttccttctctcctctccttctggtactgtcattatacatacattggtgggctcttaatggtgcttgcatwtctctgaggctcttaatttatcttctttttatttattttttttgagacagagtctcactctgtcacccaggctggattgcagtgatgcaatctcggctca

SEQ ID NO: 136361 - DNA, 201 bp, Homo sapiens
taagaattcttaagtcaccttcctctttctctctctttttccctccctttacccgctgcctcccccatttcactggtgtatgcgcatgtgcgcgcgcgcgygtgtgtgtgtgtgtgtgtgtgtgtgtgtctgtgtgtgtgtgtgtgtgtgtgtgtgaaatatctctttggtgcccttgcgttactggtgccctaaacatgc

SEQ ID NO: 136362 - DNA, 201 bp, Homo sapiens
tttttcttttgaagtaattgtaggttcacaggatgttacaaatatagtacagagaggtctcatttactgtttactcagcttctcccagcggcccaatggtracatcttctctaactgtggtacaatattaaagtcccattagttgacattggtaccatctacagatcttttatagctatcaccagtttttacatgctgtca

SEQ ID NO: 136363 - DNA, 201 bp, Homo sapiens
atactctcatgatgtttctaatgtattatattagttataggacgtctcattatgttgtaaatattgctttattgggttccttttcaccaaactctgaattmctccatgttttattcatgtttgtgatgttagcatcacagttacttagtaaatggattgtaatacttttaggaatggtaaaatgaatactaaggaaaaggt

SEQ ID NO: 136364 - DNA, 201 bp, Homo sapiens
tacccttgtttaatgggacctgggcatatcagatccccctccccaccctgccccaggatggtttcttttggctttgaatagcatttgtggcttatcccaaygtgctaagaaattattattttctttgttgccaagttgggaaaaggattgggaaaaccactgttttagagactgtaagtattagaaagtttatggttccta

SEQ ID NO: 136365 - DNA, 201 bp, Homo sapiens
acatataaaaaaatatatagagtatatatatacacacatatggttttatactatttatactataataaatcagttaagaaaaaaaggagatactctatatmcacacacacacacacacacacacacacacacacacacacatatatatatatatattttttttttttttttgagacagagttttgctcttgttgcccaggc

SEQ ID NO: 136366 - DNA, 201 bp, Homo sapiens
tggtctcttgggtccaagtgatcctcccacctcagccttccatgtagctgggaccacaggcatgtgtcaccatgctggttgaattttttttttttttttttaagtggagatggagtcttgctatgttgctcaggctgatctcaaacttctcagctcaagcaatcctacctgcctcggcctcccaaagtgctgggactgcag

SEQ ID NO: 136367 - DNA, 201 bp, Homo sapiens
catataaaaaaatatatagagtatatatatacacacatatggttttatactatttatactataataaatcagttaagaaaaaaaggagatactctatatayacacacacacacacacacacacacacacacacacacacatatatatatatatattttttttttttttttgagacagagttttgctcttgttgcccaggct

SEQ ID NO: 136368 - DNA, 201 bp, Homo sapiens
aaaccaagtgagaaaaattagattgaaattctagagatttcttttcagtcagtgtgttttggggtgggtgcgcaggtgttcctttttttttttttttttttaacaaatgggagaactcagtaatgtagtctctggattatgtaatcctaatgcttgcaactattagtagaatccaagctaattcctcttgaaaaactaagt

SEQ ID NO: 136369 - DNA, 201 bp, Homo sapiens
acatatggttttatactatttatactataataaatcagttaagaaaaaaaggagatactctatatacacacacacacacacacacacacacacacacacayacacatatatatatatatattttttttttttttttgagacagagttttgctcttgttgcccaggctggagtgcaatggcgtgatctcagctcactgcaac

SEQ ID NO: 136370 - DNA, 201 bp, Homo sapiens
tgaacactgcttaagtgtggctataattaattgaggtcatcaaatgtgctgaaattgtatccaaaggatgctgtgtggtgagaaatttgggttttttttttcccatgtgaaagcatattctagtatctttttttattggggagaacatagaatttataaaatatataaccattatttgcgggtcagtaggtaccttttgtc

SEQ ID NO: 136371 - DNA, 201 bp, Homo sapiens
ttaatgtcaccaacatacatgagcagggttattctctcatttgtgagcccttactgtaacaaaggtctcagtatatgtgattgtgacttcttttccccttrattttctggggcaagtgttgaggtggagattgcggaaataatatattgagtgcagtgaatcagattgaagattagcaaaccttacaaatagtaatgtgtc

SEQ ID NO: 136372 - DNA, 201 bp, Homo sapiens
atatggttttatactatttatactataataaatcagttaagaaaaaaaggagatactctatatacacacacacacacacacacacacacacacacacacayacatatatatatatatattttttttttttttttgagacagagttttgctcttgttgcccaggctggagtgcaatggcgtgatctcagctcactgcaacct

SEQ ID NO: 136373 - DNA, 201 bp, Homo sapiens
ttgaggatagggaccatgttttgaacttatatcaccccagtacctgacacagtgccttatagaaaataggcttcaaataatgaatgagttaagggaaaaaagtatacatctaaaacttgatactgtggaaaagaatataagctagaatttaatctccaaagtgatactgaaacagatgaagaaataaatatatggctgtaa

SEQ ID NO: 136374 - DNA, 201 bp, Homo sapiens
cttactgtaacaaaggtctcagtatatgtgattgtgacttcttttccccttaattttctggggcaagtgttgaggtggagattgcggaaataatatattgrgtgcagtgaatcagattgaagattagcaaaccttacaaatagtaatgtgtctttttcagtgataccttcaattagtttaggtgcttctgtggttgacttt

SEQ ID NO: 136375 - DNA, 201 bp, Homo sapiens
tctaataaggagtttgcaacctagatccctttcatgcacagttcacaatagggttcatgttcctatgagaatctaatgctatcactgatttgaggaggtgsagcttagacagtaatgcttgctagctcaatactctcccgcccatcgctcacctcctgctttgtggcctggttcctagcaggccatggactgatactggtt

SEQ ID NO: 136376 - DNA, 201 bp, Homo sapiens
atggttttatactatttatactataataaatcagttaagaaaaaaaggagatactctatatacacacacacacacacacacacacacacacacacacacayatatatatatatatattttttttttttttttgagacagagttttgctcttgttgcccaggctggagtgcaatggcgtgatctcagctcactgcaacctcc

SEQ ID NO: 136377 - DNA, 201 bp, Homo sapiens
tatactataataaatcagttaagaaaaaaaggagatactctatatacacacacacacacacacacacacacacacacacacacacatatatatatatatattttttttttttttttgagacagagttttgctcttgttgcccaggctggagtgcaatggcgtgatctcagctcactgcaacctccgcctcccaggttcaag

SEQ ID NO: 136378 - DNA, 201 bp, Homo sapiens
cctgaaactataaaactgctaaatgaacatagaggaaatgcttcagaatactgatctaggcaaagattttatgggtaggtctttaaaagtacaggcaacaraaagaaaaatagtcaaatgggactatcaaactaaaacgcttttacatagcaaaggaaacaatcgacagagtatagagacaacctatagaactggagaaaa

SEQ ID NO: 136379 - DNA, 201 bp, Homo sapiens
atactataataaatcagttaagaaaaaaaggagatactctatatacacacacacacacacacacacacacacacacacacacacatatatatatatatatwttttttttttttttgagacagagttttgctcttgttgcccaggctggagtgcaatggcgtgatctcagctcactgcaacctccgcctcccaggttcaagt

SEQ ID NO: 136380 - DNA, 201 bp, Homo sapiens
tacttctaagctatgtcagcttgacacatctgtgtatgtaaatgtgtttgtatttcttttaccagaatattttgaaggagaactgaatgaggaagacaagstttcaatagattaattgatctgaaattttgattgtagacagtcattaaagtggatataatttatgacttttcctagaagatatgaagaacaaaaatcact

SEQ ID NO: 136381 - DNA, 201 bp, Homo sapiens
tacctgtatgttttcttctacttgactagaggtgttaatccagaaacagcgtgtttcatttaaaagtgcacaggtacctcctacttcagctatgaggacayctaaggcctgtctattttgtgctactactgaggtttttagtctgtagattgctgttgtgcctctatgacacttagagttgctttccatccttgttgtatc

SEQ ID NO: 136382 - DNA, 201 bp, Homo sapiens
atcaacttttaccagcctgagggtgtgaaatttatctttggggagaatgttgtttggcactgggggaagagtgttctcctgagaggagttagttacccagktaaaagtgcccccatactatgtcccatttatgcctcataaatctttaagggttaaaggtaaagctaacaaagggaatcctacgatgatgagttgtgggtc

SEQ ID NO: 136383 - DNA, 201 bp, Homo sapiens
taacattttacttattctctttttaagggaggatatgatcagaagatgcctgtgattgtgtctcgagtagcaccaggaacacctgtgagttatctaaatgkttcaaataaatcctgttttcaagaatatgtacttattttataattcttactagtttaaataaaacaaggaatttcatcatttcttttatttatcaagtgt

SEQ ID NO: 136384 - DNA, 201 bp, Homo sapiens
ttttcttaagtttttatgttacctactctgtttccttaattttcttaggttaaaaaaattaaaataggaatagcgtcttttgtattgtcttatgaatttarttcatttttcaacaatgctacttttaaaagttgctaatttttaaaaaggataaatactgtaacaacgtttacccttgatcaccaccataatagctatttt

SEQ ID NO: 136385 - DNA, 201 bp, Homo sapiens
ctgttctaggataacttgttatgcatctgcaatatgccagctgcttttcgaataagaggtttcagtaatactaagtttctgtgtccagatcttgggcccarttgaaacagtacagctgattggtcacatttaaaacatatttatggagaaagataaaaggccaatgtgtccgacttgcaaaagacaattagagtagaaaga

SEQ ID NO: 136386 - DNA, 201 bp, Homo sapiens
acttaataattatgcttccaaatgtttaaaataaagctggacttgcacatatatatatgtatactttacatatatatatacacagctttacatacacacakgtgtgtgtatgtaaagctggacttgcatgtgtatatgtatacacgtatacatgtatgcacacatagcaagatttacttttgaaaatatttatcctgaaac

SEQ ID NO: 136387 - DNA, 201 bp, Homo sapiens; identical to SEQ ID NO: 24176

SEQ ID NO: 136388 - DNA, 201 bp, Homo sapiens
ctcttggtaattcagtatagtagctcttcctcttaaatattattcctagtgacattttatgactctgtttttccatttaccttttgaattctatccataattttttttttttttttttttgagacaaagtatcactctgtcaccaggctggagcagtggcgtgatctcggttcactgcaacctccgcctcccaggttcaag

SEQ ID NO: 136389 - DNA, 201 bp, Homo sapiens
ggatgtatgacatagctctgttttcttcctagtacttgcataaagaaactttcagtattcattggaatggagttggtgagcatagaaagagttatagttaycacataaggaagctacatgactcactctctgctgcctcactgcttcccctgggtaattgtctgtcctgattcccatgtggattcaagaatcccccaagga

SEQ ID NO: 136390 - DNA, 201 bp, Homo sapiens
actataataaatcagttaagaaaaaaaggagatactctatatacacacacacacacacacacacacacacacacacacacacatatatatatatatatttwttttttttttttgagacagagttttgctcttgttgcccaggctggagtgcaatggcgtgatctcagctcactgcaacctccgcctcccaggttcaagtga

SEQ ID NO: 136391 - DNA, 201 bp, Homo sapiens
tcttgcagttgtaacaggtgcaggcaacacccttccaccaaagtaaaagtgccttgctgagaaattttctgtttaggtgcgggtttcttttggctacgccragcacttgtttctgacagcttcaattctgtaaaggttgatttgtgtctttttttcccctttttattttagtcttgtttgaggtttgttaatttcattgat

SEQ ID NO: 136392 - DNA, 201 bp, Homo sapiens
tccaggcaaccctcagctccagcagcctgggcaccgtggacgaaatgattgatggcggcaggaagctgacaggcttctgggcgtaaaggggaaggttcccrgtgaagccccaccttcaagccagggatgaccagaagcatgggggctgggctgtcagttccaagttgagtccacagcctggagggggataacttaaagtgc

SEQ ID NO: 136393 - DNA, 201 bp, Homo sapiens
aagacagatgaagaaaaatacatactgtatgcttccatttatataaattctagaaaattctatctgtagggacaaaaagttggtcagtggttacgtaggcrggatgggttgctgtgttggagttctagaggaggatcactgtgtggcggaaggaatcttttggaagtgatagatatgttcactatcttgactgtgatgatg

SEQ ID NO: 136394 - DNA, 201 bp, Homo sapiens
ttttttttgagacagaatctcctgggctcaatcagtcttcctgccttaacctaccaccaagtagctggggctacaggtgcacaccaccatgcccacctaatttttttttttttttttttttgagacagagtcttgctctgtcgcccaggctggagtgaagtggcgcaatcttggctcactgcaagctccgcctcccgggtt

SEQ ID NO: 136395 - DNA, 201 bp, Homo sapiens
ttcaccttagtagcttttaaaaaagattaatgcttgctctcttccccagacaaatataatcagaatgagagacaggtcagggaggtagactgtatcagtatataaaacatttgcaggcgatttaaatgggggccaacattgagaagctctgtttgaagcacatacttcccatcattgatgagttttttcagatagccattt

SEQ ID NO: 136396 - DNA, 201 bp, Homo sapiens
ttttcttgtcccacaggttgctgacagtctggttgttgtcatctttttattttttcagtctgttttttctgttgttcttttttttttgagatggagtctckctctgttgcccaggctggagtgcagtggtgccatctctgcctcccaggttcaagcggttctcctgcctcagcctcccgggtagctgggactacaggcacg

SEQ ID NO: 136397 - DNA, 201 bp, Homo sapiens
catgaaactaggcttcttatttgatttccgtggacactagtagagaagggctcagtttttttcccattgagtttggcattgtcaggtttctgtcctaccaygtacccttatctggtccttttcctagagaaagcaggcttttcttgggctctttcatcagcacctattagcatttctgggtaacagaattctacagtaccc

SEQ ID NO: 136398 - DNA, 201 bp, Homo sapiens
tttttcccattgagtttggcattgtcaggtttctgtcctaccacgtacccttatctggtccttttcctagagaaagcaggcttttcttgggctctttcatmagcacctattagcatttctgggtaacagaattctacagtacccagtctgtgatatataggaagtgaaaagaaaatgcaaggtctagagtccagaaataaa

SEQ ID NO: 136399 - DNA, 201 bp, Homo sapiens
tagaattcaccaggctggaatttcctaatcctagcaagcctggggacgctgcaggagaccagggcgtgtttcatccttacctacaactgcataaggcagaygctcccagagcggccattttagaggcctccccctgggaatgcattctttccccagggctgtcaattattaatattccttactggggaaagaattcagcga

SEQ ID NO: 136400 - DNA, 201 bp, Homo sapiens
ttcagatagccatttgacccaattctggccaataagagtctttgtaaggtaacttttacaaggaagcttgttcttttaaacattgtcacatggatatgaabcttggaattgctgtgagcatcttgctaaaggctcacgaatatagccaacacttggaatgcagatgagaaagatggaaagaaacctagtcttaatgtccct

SEQ ID NO: 136401 - DNA, 201 bp, Homo sapiens
atgcactaaataaactttttttcccttcataataagcagtggtggagaatactggaactgttgtcatacttaaaatgttgaaatactcttttgactgacasatggtactgggactatcagatctattactttctccaccagtctcttcatgtacatatccttatctctgttccaaagtatccagaggattaacatcattat

SEQ ID NO: 136402 - DNA, 201 bp, Homo sapiens
gtttcatccttacctacaactgcataaggcagacgctcccagagcggccattttagaggcctccccctgggaatgcattctttccccagggctgtcaattrttaatattccttactggggaaagaattcagcgatgtttctcttacccgttttcagcaataagagaaatatgactctgtcctgcccggctcccaggcagtt

SEQ ID NO: 136403 - DNA, 201 bp, Homo sapiens
gtagatgaaccaagaaaaccttgtctgtgaaagcagacaaacacaaaaggcaacctgttgtatgattccattcttacgaaatgttcaaaacaggtaaattygtagagacagaatgtaggttagtgattgttaggggcaacagggaagggtacattgagactgactgcgaataggtacaagattacctttgagggtgatgga

SEQ ID NO: 136404 - DNA, 201 bp, Homo sapiens
ggaggctgaggcaggcagatcacctgaggtcaggagttcgagactagcctgaccaatatgatgaaactctggctctactaaaaatacaaaaattagctggkcgtggtggcatgcacctataatgctggctactcaggaggctgagacaggagaatcgcttgaacgtgggaggcggaggttgcagtgagccaagatcagatt

SEQ ID NO: 136405 - DNA, 201 bp, Homo sapiens
agtaaaaaagacaagcagaacaacattatatatatagtatactaccatttttaagcaacagttttacagaaaagtgggaagttgcatatatgtttatatgytgtatatagaatatccctgagaaggctatatgacaaacagaaaaagattaccttcctggctgcaaactagaagctgaaatgggagaagagactttcttta

SEQ ID NO: 136406 - DNA, 201 bp, Homo sapiens
caaattccttgggaaacataaaaaaattgctgacaccctatgcctacagattcatggttagttggtctattcacctaaatatctgaagaaagtccctttgygagtctgatactcattgactcattcatagtcacccatttggttaaatcacctgattttataataaaatgatgaaagacttgagaggtgaaaggggagctg

SEQ ID NO: 136407 - DNA, 201 bp, Homo sapiens
accttgtctgtgaaagcagacaaacacaaaaggcaacctgttgtatgattccattcttacgaaatgttcaaaacaggtaaattcgtagagacagaatgtargttagtgattgttaggggcaacagggaagggtacattgagactgactgcgaataggtacaagattacctttgagggtgatggaaatattctggaattaga

SEQ ID NO: 136408 - DNA, 201 bp, Homo sapiens
actgaagaaatgttagctgttgttattattaagaaaacttactttcttttactaataactcatgtatctaaaacaggataacaaaccatggccattgaaayggagtctcgctctgttgcccaggctggagtgcagtggcgcgatctcagctcactgcaagctccgcctcccgggttcatgccattctcctgcctcagcctc

SEQ ID NO: 136409 - DNA, 201 bp, Homo sapiens
cagtcgtggtaggttatatgtttccaggaattcatttcctctaggtttcccagtttgtcagcttgtagttgttcgtaatagtctctgatgggctgggcacrgtggctcatgcctgtaatcccagcactttgggaggccaagacgggcggatcacgaggtcaggagattgagaccatcctggctaacgcggtgaaaccccgt

SEQ ID NO: 136410 - DNA, 201 bp, Homo sapiens
ttgtttttgagacggagtcttgctctgttgcccaggttggagtgcagtcgtgtgatctcaggtcactgcaacctctgcctcccagattcaagtgattctcrtgcctcagcctccccagtagctgggattactggcgcacgccaccatgcctggctaatttttttttatttttagtagagatggggtttcaccacgttggac

SEQ ID NO: 136411 - DNA, 201 bp, Homo sapiens
aaaggaataaaggatgtacaaaacaatcagaaaacaattagcaaaataacaagaatagatctttacttaacaacattgaatgtatatggtttaagttcccrttaaaacttagacactggctgaatggatgtaaaaaaagaagaccgaattctatgctacctacaagaaactcaacttcacctgtaaaaagcacaatagact

SEQ ID NO: 136412 - DNA, 201 bp, Homo sapiens
aatgggattatttgatttttttttttttttactgttgagttctgagagtttattacatattctgagtactagtctattgtcagataaatgttttgcaggctttttttttttacagtctgtaagttttaaattttgatgatatagctaatttgtcttttttgttgttgtttttatgaatcatgcttttgatgtcacatctaa

SEQ ID NO: 136413 - DNA, 201 bp, Homo sapiens
cagtgccacatcagcagccatgtggcttgacacagtagctgtcatctctcttatacctgtccttaggcaataagacagtaattcttttatcagataataaygccaatagtggtcagtgttcttatcaagaacaattttccgcttacctatttaatcttttacttctcccaaatccacgacttctgtggatgcatacttctt

SEQ ID NO: 136414 - DNA, 201 bp, Homo sapiens
tttaattaaatcatggtaactgaagtttgtatgtatctagacagtgtaaagctaaagctacttgtgtgtatgtacttggaaatcatcagtcttatttgtakgtctaggcacataataggtcatcaggaaagaaattgttgcatgaagaaggaacaaaaatactctctctggcaaagctagatttctacattttttaaatag

SEQ ID NO: 136415 - DNA, 201 bp, Homo sapiens
caccttctttggggtgcctgcgggcccctgagatgcagtggggagcatgattgccgaggcttcgggcctggaaatgggtcctacccggccatgcgagggcrggggtggcccagaggctgcctcagggatgcaggacacaagggacccactgctgccactgctgctcccacagctgctcctgctgccactgctctggcctcc

SEQ ID NO: 136416 - DNA, 201 bp, Homo sapiens
tagttgtagtactagtactcaataaatactagttgaatgaatgagtaaatttgaactctgttccacttttagaaaatgccataacaagctatagttaaagkgtttttaaaatactgcctttgttttcagtatatgatgtctacttgcctaatcatgtcatctcccaatctggacagctgacttgttaattcatagtcatag

SEQ ID NO: 136417 - DNA, 201 bp, Homo sapiens
catctgttaatatatagttggaatataggttgccaaacagagataacataaagtgaagagaattctacttcgtacaaatttctatttaatagaaactctcrtgtattagacagttgatgtaagaaaataagccttttttcctattattcacgtgttagaattcttttttggaaaaggcataaatttaataacttttgtctt

SEQ ID NO: 136418 - DNA, 201 bp, Homo sapiens
ggagaaatgtaagttgtcttgttggatatgtctgtctctgtctgggtgggtgtggttgtctgttcctgtgtgtgaatctgtgtgtgtgtgtgtgtgtgtgygcgcgcgcgcatgtgcgttgattgcagtgggaaatgaagtcttgtgagggtccttgtgtttgggcaatgagtgggatcattttaagacctttaaaataga

SEQ ID NO: 136419 - DNA, 201 bp, Homo sapiens
gattttgaatatattttgaatatggaagtgacagcttttactcatgtgtactggctatgggtgtgagagaaaaaggatttggtaattattccaaagctttyggcctgaacttttactaagttgggaaagacctgggagaagtagatttagtagaagcataagtcaagaatttatcttgggacatgttaaatttgaagagac

SEQ ID NO: 136420 - DNA, 201 bp, Homo sapiens
ctctctctttttccctccctttacccgctgcctcccccatttcactggtgtatgcgcatgtgcgcgcgcgcgtgtgtgtgtgtgtgtgtgtgtgtgtgtgtctgtgtgtgtgtgtgtgtgtgtgtgtgaaatatctctttggtgcccttgcgttactggtgccctaaacatgcatttagtctgcctcttgggaaatcagca

SEQ ID NO: 136421 - DNA, 201 bp, Homo sapiens
catccttgtaactaccacctagttcaagtggtagaatgttgccagttactccagaaaccttttcccaataacagctccttcctacatagtatttttttttwaataatttttattacccaaatgtgccttggtagaaactgtagcttggtcttgctgttgtttagttattttatttgactcacagtaactgagatctctctt

SEQ ID NO: 136422 - DNA, 201 bp, Homo sapiens
gttttgttacagtcacccatataaatagtgaggagctttaaaaacttggtgtattcttgtatttctagaaaataagacagtattctggaaaataataattwgggttactgaaaatgtgccctccagataagttagaggagtagtcctgcatggtgtttcatagatttaattagactgctcagttttttcagataaatagcc

SEQ ID NO: 136423 - DNA, 201 bp, Homo sapiens
tctctctttttccctccctttacccgctgcctcccccatttcactggtgtatgcgcatgtgcgcgcgcgcgtgtgtgtgtgtgtgtgtgtgtgtgtgtgtctgtgtgtgtgtgtgtgtgtgtgtgtgaaatatctctttggtgcccttgcgttactggtgccctaaacatgcatttagtctgcctcttgggaaatcagcat

SEQ ID NO: 136424 - DNA, 201 bp, Homo sapiens
tatatgccctgtccaccgtcaccagtgataacatcaagggcctgaacagaggaccatcccagctgctggcacctgtatatgttattcatgaacctagagaytgacccacttagaactgtgagggccctcacgtgacatccaagggcctgacgatagatgtgcctcgccctcagctaccacctccagacactgttggagtct

SEQ ID NO: 136425 - DNA, 201 bp, Homo sapiens
ttgtcccccacatgcatagctcaggaccccaagggatagcccactgatactgctgacaccatgcataccacctggagacccaaggactggcatgcccagcytgccatcaccacagctggtgcccatgaaccagcctacctggcatttccatccccaatacagcttcaccacaacctctacaccctaagccactgaggaact

SEQ ID NO: 136426 - DNA, 201 bp, Homo sapiens
acactcaggttccatactgtgaatcaacctctgtctgtgcaccacactctgagaagcactgccctggaggttggcttagaatctgcaagtttcagagataycctgtgtgatttaaatgcagatatggtatatgaaccaaattttgagaaatactgcttttaagttatatctaaaagtgaggggttttgttacagtcaccca

SEQ ID NO: 136427 - DNA, 201 bp, Homo sapiens
tccagccaacactataggtacatcacaagaaaaagtttgttcctatgacagccaattcataaaattggaagaagcacctgttacaccagatgtgcagataycaacgtataaggacagaagaaataaatgcctgaaaaataaaataatgatattaaagaaatgcaatgatatatgacagcttgacaatacagagatatcaag

SEQ ID NO: 136428 - DNA, 201 bp, Homo sapiens
aatggtttggtgcccagggacatgggtgggacagaactctcaaagcaaggggtgatgtgtcaggcagagggcatggccaggtggggagctgcatgggatgrtgctgggaggatgacaggtgggagtcagaagcccttttctccaggctttaagatcaatgacaggagggaggaggtgccaccatgtcctctctctccagga

SEQ ID NO: 136429 - DNA, 201 bp, Homo sapiens
acaaggaggtggcctccaccctgtggccacgaggcctgggccagctgaccacggtgagaagcgggtaggcggtgagggcaagggtgggaggggtggggagkggtaggctgaggctgttctgtccccaggagggggtccgccagcagctggagctgggccgcttcctgaggagccgctacgaggccttcctgagtccggagt

SEQ ID NO: 136430 - DNA, 201 bp, Homo sapiens
cgagaggcaagggttgcagacagccaagattgcgctactgcactccagcctaggtgatggagcaaggctccgtttcaaaacaaaaaacaacaacaaaaaawcactgttatccacatcatgatttcccagccagatccagatccggcccatggggggactcagaagagcagggggcagcacaggcctgcggggccagaggca

SEQ ID NO: 136431 - DNA, 201 bp, Homo sapiens
gggactcatggtcagtgtccactcacaaggcctgcttccctcatgacatctggccagtgacacccacaggggaggttgggggcagacacccttctcttccrgtacccttgaacatggtgtcagggtgtggctagctcgacggacaccgaacagctccacagggagggtagtgcccaaggctttttgcctcccctaccatgt

SEQ ID NO: 136432 - DNA, 201 bp, Homo sapiens
gatggagcaaggctccgtttcaaaacaaaaaacaacaacaaaaaaacactgttatccacatcatgatttcccagccagatccagatccggcccatgggggractcagaagagcagggggcagcacaggcctgcggggccagaggcaaactcgagggctcaggatggtccatctgtcctgtctccccacagcaagcccacgg

SEQ ID NO: 136433 - DNA, 201 bp, Homo sapiens
ctgaacccgagaggcaagggttgcagacagccaagattgcgctactgcactccagcctaggtgatggagcaaggctccgtttcaaaacaaaaaacaacaamaaaaaaacactgttatccacatcatgatttcccagccagatccagatccggcccatggggggactcagaagagcagggggcagcacaggcctgcggggcc

SEQ ID NO: 136434 - DNA, 201 bp, Homo sapiens
tccgccatggcgaccgggccccgctggcctcctaccccatggacccacacaaggaggtggcctccaccctgtggccacgaggcctgggccagctgaccacrgtgagaagcgggtaggcggtgagggcaagggtgggaggggtggggagtggtaggctgaggctgttctgtccccaggagggggtccgccagcagctggagc

SEQ ID NO: 136435 - DNA, 201 bp, Homo sapiens
agcgggtggagagagaggcagctctgggtctggccgcctgagctggctccgagaagcaagactgtcctcgagctggtctgtccagaccagggtgagccccrgcccacgctgctctcctggatctgggagaaactgcgacaaagacgcaggggccgagagcccgggttcccccgacccgctgtgagacccaaggcaaggcac

SEQ ID NO: 136436 - DNA, 201 bp, Homo sapiens
ctctactaaaaataaaaaaaaaaaattagccaggaatggtggcacacacttgtaatcacagctacttgggaggctgaggcaggagaatcacctgaacccgrgaggcaagggttgcagacagccaagattgcgctactgcactccagcctaggtgatggagcaaggctccgtttcaaaacaaaaaacaacaacaaaaaaaca

SEQ ID NO: 136437 - DNA, 201 bp, Homo sapiens
tggaggcaggagggcacaggggaggggagaaggtcagtggggtgcagggcagccaagatacccaccagccctccccagagccagggcccctcagacccccrggtgtcaaaggtcccggggggcaccgtgtcctcagtggcagtcggagcccagtgctggacatcatggaggccccggtgccctcaccccctcctgatgtgg

SEQ ID NO: 136438 - DNA, 201 bp, Homo sapiens
gcagggcagccaagatacccaccagccctccccagagccagggcccctcagacccccgggtgtcaaaggtcccggggggcaccgtgtcctcagtggcagtyggagcccagtgctggacatcatggaggccccggtgccctcaccccctcctgatgtgggtcccaggaccacctactgtcctaagggggacatcacagaaga

SEQ ID NO: 136439 - DNA, 201 bp, Homo sapiens
tgagctgtgaaatacctctggccccaggggtttcagataaagccttctgggctgtgtaatgacgatgtctattattaactaataatcgctgttggctgggygtggtggctcacacctgtaatcccaccactttgagaggctgaggtgggcagatcacctgaggtcaggagtttcagaccagtctgaccaacacggtaaaac

SEQ ID NO: 136440 - DNA, 201 bp, Homo sapiens
ctttggaaggcaaatggctagccagcatttttagctctggaaatgaagttacctcccgctcctggattttggtaaaaatcgtgtctgttgattccctctasccggaggcagtttgggcccaaaaccaaggaagaggtgaagatcattgagcaccaaacacagaccctgcggctgatgccccacctggccacagccttggcc

SEQ ID NO: 136441 - DNA, 201 bp, Homo sapiens
atgccttttcaggcacgttgtatgtgcttggaggaggtggggtcacattgctcatcctgttctgctcagactgacgttatcctttttgttttttttgcatacacacacacacacacacacacacacacacacacacacacacacacacacacacacacacgcggggaggagagaagcaggacctacttggttgctggggaa

SEQ ID NO: 136442 - DNA, 201 bp, Homo sapiens
tgccttttcaggcacgttgtatgtgcttggaggaggtggggtcacattgctcatcctgttctgctcagactgacgttatcctttttgttttttttgcatacacacacacacacacacacacacacacacacacacacacacacacacacacacacacacgcggggaggagagaagcaggacctacttggttgctggggaag

SEQ ID NO: 136443 - DNA, 201 bp, Homo sapiens
ccttttcaggcacgttgtatgtgcttggaggaggtggggtcacattgctcatcctgttctgctcagactgacgttatcctttttgttttttttgcatacacacacacacacacacacacacacacacacacacacacacacacacacacacacacacgcggggaggagagaagcaggacctacttggttgctggggaagtc

SEQ ID NO: 136444 - DNA, 201 bp, Homo sapiens
tgaagttttgcttatctggatttccttattgctgaggaatcagctatctaatagtaatttttcatggcaatctgttttttctttctgtttctttttaagtattttatttgttgtcatgacctatggtttcactataatatgtataaatataaatttggttgtatttttcctatttggattcatttgaggttagtaagtacg

SEQ ID NO: 136445 - DNA, 201 bp, Homo sapiens
cttttcaggcacgttgtatgtgcttggaggaggtggggtcacattgctcatcctgttctgctcagactgacgttatcctttttgttttttttgcatacacmcacacacacacacacacacacacacacacacacacacacacacacacacacacacgcggggaggagagaagcaggacctacttggttgctggggaagtcc

SEQ ID NO: 136446 - DNA, 201 bp, Homo sapiens
gaagttttgcttatctggatttccttattgctgaggaatcagctatctaatagtaatttttcatggcaatctgttttttctttctgtttctttttaagtattttatttgttgtcatgacctatggtttcactataatatgtataaatataaatttggttgtatttttcctatttggattcatttgaggttagtaagtacgt

SEQ ID NO: 136447 - DNA, 201 bp, Homo sapiens
aagttttgcttatctggatttccttattgctgaggaatcagctatctaatagtaatttttcatggcaatctgttttttctttctgtttctttttaagtattttatttgttgtcatgacctatggtttcactataatatgtataaatataaatttggttgtatttttcctatttggattcatttgaggttagtaagtacgtg

SEQ ID NO: 136448 - DNA, 201 bp, Homo sapiens
cccatcaaatttcagtggctttatttaattgcctgtttccaaattaattttctatcagcaaataataaaaggccactttggataaaaatatagcacattaraggaaagcttcatctttttgctgccctctcctataattcctcttttgcaaataacttttcagaatcatcactgagcgccccttgttcacacaccttcggc

SEQ ID NO: 136449 - DNA, 201 bp, Homo sapiens
gttttgttcttgttgcccaggctagagtgcaatggcgcaatcttggctcaccacaacctctgctttccaggttcaagtgattctcctgcctcagcctcccragtagctgggattacaggcatgcaccaccacgtccagctaattttgtatttttagtagagatagggtttctccatgttggtcagtctggtcttgaatttc

SEQ ID NO: 136450 - DNA, 201 bp, Homo sapiens
gtaggtggatggtgcagtgctgactgcctctttcattctcagccctcagcaagcccttcactgtctgcctccatcccccacccccagctagtccacctccctctctctctctctctctctctctctgtctctcgccacctatggtctgtgttccactaagcagctggagtcatcttttaaaatcacaaatcatctgactcc

SEQ ID NO: 136451 - DNA, 201 bp, Homo sapiens
actggtctcctgccttactgatagccgtggggcatgctgatcttcccttagctgtgtctcttgactgggttactcctcgggaagttggttctttctcttcygaggaagagagagctccttgtagaattgtcctagaaatattcagaaagctcaggatgtactatcaccaatgtagtgccaggtagcaccaggtcagagcag

SEQ ID NO: 136452 - DNA, 201 bp, Homo sapiens
taggtggatggtgcagtgctgactgcctctttcattctcagccctcagcaagcccttcactgtctgcctccatcccccacccccagctagtccacctccctctctctctctctctctctctctctgtctctcgccacctatggtctgtgttccactaagcagctggagtcatcttttaaaatcacaaatcatctgactcca

SEQ ID NO: 136453 - DNA, 201 bp, Homo sapiens
tgaaaattatatgatgatgaaagaaaccaaagaagattcaaagaaatggagacacgtaccatgtttatacattggaagactccacatgataaagttgtcarttctcctcagatttaatgcaattcctatcaaaatctcagcaaggttttatgtaaatatatccagggttattctaaaatttatatgggagggcaaaagaat

SEQ ID NO: 136454 - DNA, 201 bp, Homo sapiens
aggtggatggtgcagtgctgactgcctctttcattctcagccctcagcaagcccttcactgtctgcctccatcccccacccccagctagtccacctccctctctctctctctctctctctctctgtctctcgccacctatggtctgtgttccactaagcagctggagtcatcttttaaaatcacaaatcatctgactccaa

SEQ ID NO: 136455 - DNA, 201 bp, Homo sapiens
ggtggatggtgcagtgctgactgcctctttcattctcagccctcagcaagcccttcactgtctgcctccatcccccacccccagctagtccacctccctctctctctctctctctctctctctgtctctcgccacctatggtctgtgttccactaagcagctggagtcatcttttaaaatcacaaatcatctgactccaaa

SEQ ID NO: 136456 - DNA, 201 bp, Homo sapiens
ctcatgtacttgggtggaggattttttttacttgttttgtgaatttttggagggtaagaatttgatcgaggaaaaggtagctgaaagctaaggagaaaaartgttttcctgtctttctttgaatacctttaaactctctgtggtcttacattgaaaagcgatgtcttgggttttgactcttgactgtgacagggcctgggg

SEQ ID NO: 136457 - DNA, 201 bp, Homo sapiens
accttctctggcatccgggttggaggaggtctctcttgctatttattttctcacagaacctccctgcccccatcttttcctttctggaacttgccacagatttttttttttttttttttttttgagatggagtctcgctctgttgcccaggctagagtgcagtggtgcaatctcagctcactgctatctctgcctcccagg

SEQ ID NO: 136458 - DNA, 201 bp, Homo sapiens
ccttctctggcatccgggttggaggaggtctctcttgctatttattttctcacagaacctccctgcccccatcttttcctttctggaacttgccacagatttttttttttttttttttttttgagatggagtctcgctctgttgcccaggctagagtgcagtggtgcaatctcagctcactgctatctctgcctcccaggt

SEQ ID NO: 136459 - DNA, 201 bp, Homo sapiens
ttgctatttattttctcacagaacctccctgcccccatcttttcctttctggaacttgccacagatttttttttttttttttttttttgagatggagtctygctctgttgcccaggctagagtgcagtggtgcaatctcagctcactgctatctctgcctcccaggttcaagcaattctgcgtcagcctcctgagtagctg

SEQ ID NO: 136460 - DNA, 201 bp, Homo sapiens
tttattacagcaaaatcatatgtaaaaaatacatatatacacacacatgcatctctgtctctctcacacgcacatgcacacacacacacgtgcacacacayacacacacacacacacaaaattcaaggtcagcaaaggaaaaagacacatgggctgaagtccagaggaaaccagaagcaagtttccaagagtcctctctca

SEQ ID NO: 136461 - DNA, 201 bp, Homo sapiens
tttggaaggcaaatggctagccagcatttttagctctggaaatgaagttacctcccgctcctggattttggtaaaaatcgtgtctgttgattccctctagscggaggcagtttgggcccaaaaccaaggaagaggtgaagatcattgagcaccaaacacagaccctgcggctgatgccccacctggccacagccttggccc

SEQ ID NO: 136462 - DNA, 201 bp, Homo sapiens
cccaatacaccaaacagtatgaagaaaaaccactctttggcctgctccaaaactgggctgaatctgtgggggacaagctgagaaccaggtacgtattactyaggccatcatcatctgccttcagtgggttatcatgaagcctgagttcatacagccttggcataactcactcttgcttgaaatttttagtgtttgctgtat

SEQ ID NO: 136463 - DNA, 201 bp, Homo sapiens
ttatggaggtttgatgtacagagtatttcctcaccccagtagtgggcactgaactcacgataggtagttttttgaccctcacccttctcccaccctcctcyctcaagtaggccgccgcgcctattgatttcttctttgtgtctgcgtgtactcagtgtttagctctcacttataagtaagaacgtgcggtatttggttttc

SEQ ID NO: 136464 - DNA, 201 bp, Homo sapiens
gtatgtgtgtgtgcctgcatgtgtgcacacgtgtgaatgtgcatatgtgcactagtgtgcatatgtgtgtgtgcagtgtacatgtgctgtgtgtgtgtgcrtgtgtgtgcgcacacacaggcagtggtgagacttgcttaaagcgtttctgagttgctgatgcatcagagcagggcgaggggctttggaaaggcctgacta

SEQ ID NO: 136465 - DNA, 201 bp, Homo sapiens
agagtaaagaggaaatcacagcttcacctcaacctccacttgttgctgtgcccagcaattgcatgcaccatatcttgatgtcacacatgaatttcaggctyaatttatttgctgacctcagagctcagagctgaggcttgcccgccttgagcttatgggatcagtgtgaaggctgtgatgatccgcatagggagactctgg

SEQ ID NO: 136466 - DNA, 201 bp, Homo sapiens
gagtaaagaggaaatcacagcttcacctcaacctccacttgttgctgtgcccagcaattgcatgcaccatatcttgatgtcacacatgaatttcaggctcratttatttgctgacctcagagctcagagctgaggcttgcccgccttgagcttatgggatcagtgtgaaggctgtgatgatccgcatagggagactctggc

SEQ ID NO: 136467 - DNA, 201 bp, Homo sapiens
gctagagtgcagtggtgcaatctcagctcactgctatctctgcctcccaggttcaagcaattctgcgtcagcctcctgagtagctgggattacaggcaagygctactacgtccggctaattttgtatttttagtagagacgggtttgttggtcaggctggtcttgaactcctgacctcgtgaaccacccacctcggcatct

SEQ ID NO: 136468 - DNA, 201 bp, Homo sapiens
tgcgtcagcctcctgagtagctgggattacaggcaagtgctactacgtccggctaattttgtatttttagtagagacgggtttgttggtcaggctggtctygaactcctgacctcgtgaaccacccacctcggcatctcaaagtgctgggattacaggagtgccacagatttttaattacctattttatttgtccacctgg

SEQ ID NO: 136469 - DNA, 201 bp, Homo sapiens
ttgctgtgcccagcaattgcatgcaccatatcttgatgtcacacatgaatttcaggctcaatttatttgctgacctcagagctcagagctgaggcttgccygccttgagcttatgggatcagtgtgaaggctgtgatgatccgcatagggagactctggcccaggtggcctgggctccacttggtgctcctagggtaggag

SEQ ID NO: 136470 - DNA, 201 bp, Homo sapiens
cccaccccaaccacttccactgctgaccccagacacctctaactcttgctagaccagttattccagatctgtctgtggtatagaggggtgtgtgtgtgttggggggggtgtatgtgtttgtgtgtgtcttcatatgagcatgtgggtagggagctgaggggtcaggaagcagagaaagaatcatcatatttcgatggtgta

SEQ ID NO: 136471 - DNA, 201 bp, Homo sapiens
atacaaaaaaaaaggcgggcatggtggcgggcgactgtaatcccagcttactctggaggctgaggcaggagaacctgggaggcggagattgcagtgaggcragatcacgctgctgcactccagcctgggtgacagagtgagactccgtctcaaaaaaaaaaaaaaaaaaaggaattttgagaggacacaatgatgtagccc

SEQ ID NO: 136472 - DNA, 201 bp, Homo sapiens
gaggctgaggcaggagaattgcttgaacccgggaggtggaggttgcagtgagccgcgattgcactactgcactccagactgggtgacagagtgagaaaaamaaacaaacaaacaaacaaacaaacaaaaaacagaactagaccagccaagcaattttgaaaaagaacagagttggaagacttccagtacctcattttcaga

SEQ ID NO: 136473 - DNA, 201 bp, Homo sapiens
gtgatccttagtccaactctgagcctctttcttggggtctttctcaggcacccatttaccttccaccttgggagtttgtgaatgacttttttcttttgggttttttttttttaatgtataaattttctgggtttttttttttaacattgcttgtgtattacttttagtaattaattaaaaaacccaaaaagttcattttta

SEQ ID NO: 136474 - DNA, 201 bp, Homo sapiens
aatgtcgctgagtgcagggcagagagcaggacggagagagaatgagcttggaggaagcccccagcatatttcctggattactgagaggagctgcccttctkccagggccaggggaggccagctctgtcagtgggagacccctatggacgactgtccaggctggtgtttgtgacaggtctgctgggtgtggggaggcacagg

SEQ ID NO: 136475 - DNA, 201 bp, Homo sapiens
ttcttggggtctttctcaggcacccatttaccttccaccttgggagtttgtgaatgacttttttcttttgggttttttttttttaatgtataaattttctgggtttttttttttaacattgcttgtgtattacttttagtaattaattaaaaaacccaaaaagttcatttttagttaaaaaatgatgcagacacagatgca

SEQ ID NO: 136476 - DNA, 201 bp, Homo sapiens
aattttctgtatattttttaattttaaagaaaatgtgagtcctatgtagtgatgggatcgcaaatttgaaatgtgtgtgtgtgtgtgtgtgtgtgtgtgtktttttctctttctgcaacagggttacatgatggaaaatcgaatctcaggcttaaagtgtgacacagatgtgtttgccacttttgaaggtgacgatgttgt

SEQ ID NO: 136477 - DNA, 201 bp, Homo sapiens
gttcattccccctacccgcccccacacctttcccagcctctggtatctatcattctacgctttactgctatgagatcaacttttttagctcccatatatgrgtaagaacatgccatatttgtgtttctgtgcctgacttatttcacttaacataatgacctccagttccattcatgtagctgcaaatgaaatgatttcatt

SEQ ID NO: 136478 - DNA, 201 bp, Homo sapiens
ctaaaaatacaaaaattagccgggtgtgatggtgcacatctgtaatcccagcttctcgggaagctgaggcaggagaatcacttgagcttggggtgcagagrctgcagtgagccaagattgtgccactgcattccagcctgggcgacagagtgagactttgtctcaaaaaaaaagaaaaaaaaaagaatgctagaaaatagc

SEQ ID NO: 136479 - DNA, 201 bp, Homo sapiens
gagaggtgattaggtcacgatcacgctgccctcatgggtggggttagtgccttatcaaagagtgcttccttgcctcttacaccatatgcagactcagcaaraaagtgccatctgtgaacaaggaagtgagccctcagcagacactgaatctaccactactttgatcttggacttcccagactccagaactgtgagaaatca

SEQ ID NO: 136480 - DNA, 201 bp, Homo sapiens
ccctcaaaccaaaagtattgaactagtttctaaggaaactattcattagaaaatagaatctcacaatcctgattaaacacatggaaaacacagtaaatgayggcctgggattctttatagccattgggatgacgtgaaattgagaaatctgttatctgtcttttttttttcctttttttattgctgctcaggaccctgttt

SEQ ID NO: 136481 - DNA, 201 bp, Homo sapiens
accaagtgaaatttagaagacgacaagagggtaaaactggttactatgctcggaaatacttggagatacaggataaaaataaatacaacacacccaaatayaggatagtagttcatctaaccaacagagatatcattagtcagattgcttatgcccgtatagagggggatatgatagtctgcgcagcatacgcacacgaac

SEQ ID NO: 136482 - DNA, 201 bp, Homo sapiens
gcgtataagctttcttgtatgttatatcttacctcttatattcttgcatggcgatagcctttccaaggagaccaaatgctccctcattttagccatgacgrtctctcccaagaagagagagcattgctaacatatgcctccaagattcagccttgcctgtgtttttggggctctgtcgaattaaccaggctttcactaact

SEQ ID NO: 136483 - DNA, 201 bp, Homo sapiens
caggctgttgtctccctggagcgtcctggccagccagcctcactgtgatcaggcacctgttggcccaggttttctagcaagtgggttgatgtgcaggtggrgacccgggacagttggggcatgggaagtgacaggaaggccgttgccttccaactctgctgagtttcttatgtatttctgtgtggtggatgatttccgttt

SEQ ID NO: 136484 - DNA, 201 bp, Homo sapiens
tattgacactatttttctacagaaaaaaatagttttaaaaaacaaacctactctatttctttcaaatgaaattcttggtgaggccaaaataataatgatgstcaccgtgattttctttcagtttcctggcatttaacatggacacagttgatgatctcgcctttctgttgaaagcagtgaaatttcgtgaaagggttcttc

SEQ ID NO: 136485 - DNA, 201 bp, Homo sapiens
cttgccatttaccaggcactgtcctaagatttcatgtgtagtaactcatttaatgtctcaagacaaatcaacgggacagagatttttctctttgttttttkattgatgttacaacagcacctgaaatgatgccttgcacaaagttagactttatgaatatttgttgaataaatgaatgagtgtaataaccctccacagttt

SEQ ID NO: 136486 - DNA, 201 bp, Homo sapiens
ttataaagaaatctaactcaaaatgaattacttaaatataaaatgtaaaattataaagcttttagaaaaaagttaggagaaaatccttgagacctagggayagggaagaagttcttagggttgacatcaaaagcacatttcataaaaggaaaaattggtaagctgcatttcatgaaaaataaaattttttattctatgaaa

SEQ ID NO: 136487 - DNA, 201 bp, Homo sapiens
ccaaagtgctgggattgcaggcatgagccaccgtgcctggtgaatccactttcttttctgctcccacctggtgcatccatctctactctcaccacccatcygtgggtggggcttccttcatgtggtcattgcctgaccaggctccccgtgctgtgctggttgctggggtggttgcagtcctgccccagtcagagcagcgct

SEQ ID NO: 136488 - DNA, 201 bp, Homo sapiens
ataaatgtctgggcacaccgtccacctagtttcattatatgttaacactttgccatattaaaatttctcttttttaccgtctatgcatatgtttgtgtgaktgtgtgtgtgtgtgtgtgtgcatgaaatcatttgagagtaagttgcagacgtcaaaacacttcacccctaagagcttcaatgttcattttctaaaaataa

SEQ ID NO: 136489 - DNA, 201 bp, Homo sapiens
gtgtgtttggggtgagagctttagccagtgtggaaactgaaagtcattcaaggaaggttagttatcatcctgctgctggtggagcagtgtagaaacacagmcacacacacacacttgcacacacacgtgtgcatacagatgcacacgcacatatagacacacacatgcatacatggacacatgtgcacacaggcacatgca

SEQ ID NO: 136490 - DNA, 201 bp, Homo sapiens
tgtgtttggggtgagagctttagccagtgtggaaactgaaagtcattcaaggaaggttagttatcatcctgctgctggtggagcagtgtagaaacacagacacacacacacacttgcacacacacgtgtgcatacagatgcacacgcacatatagacacacacatgcatacatggacacatgtgcacacaggcacatgcac

SEQ ID NO: 136491 - DNA, 201 bp, Homo sapiens
ggagcagtgtagaaacacagacacacacacacacttgcacacacacgtgtgcatacagatgcacacgcacatatagacacacacatgcatacatggacacatgtgcacacaggcacatgcacacacatgtacatacacatacacatgggtaacaagcaccagtttttttgggtggatctcagaagagactggcaaacaagg

SEQ ID NO: 136492 - DNA, 201 bp, Homo sapiens
gagcagtgtagaaacacagacacacacacacacttgcacacacacgtgtgcatacagatgcacacgcacatatagacacacacatgcatacatggacacatgtgcacacaggcacatgcacacacatgtacatacacatacacatgggtaacaagcaccagtttttttgggtggatctcagaagagactggcaaacaagga

SEQ ID NO: 136493 - DNA, 201 bp, Homo sapiens
atcccagcactttgggaggctgaggtgggcagatcacttgaggtcagcagttcaagaccagcctggccaatatggtgaaaccctgtctctactaaaaatamaaaaattagccaggcacagtggcatgtgcctgtaatccccactactcaggaagctgaggcatgagaatcacttgaacccaggaggtggaggttgcagtga

SEQ ID NO: 136494 - DNA, 201 bp, Homo sapiens
tttggcttgtgctgaaaggtacagagacaatacaaaatgaatagagccactaagcttctgcaatcagggaacaagtggagaaaaacaaaacaaaacaaaamaaaaaaaccctagctataaacaagtgctcctttcattaaaaagtcaggatgcctcagagggaagaagcaagaacccagagggtggagccaagggtcacag

SEQ ID NO: 136495 - DNA, 201 bp, Homo sapiens
gagccgcccaggcgtggagggtgcaacgctttggggatgcctacccatgcgagtctagcacagggcttgcgggtggggtgttccttcttgaatgatctgtwctccatttcctctgtgcacagctctgggggcagatttcatttcagactgctttagaagacaggacagcaggagaggaaatcactagagacaaaagaaaat

SEQ ID NO: 136496 - DNA, 201 bp, Homo sapiens
tagcagtaatgcaatgtaaaatcaggaaatcaatattagtacagcactgttaggacatagaccctattcagatttcacgagtttttacatgcactcagttktgtgtgtgtgtgtgtgtgtgtgtgtgtggttttatgcagtttgaccctatatgtagattcatgtaaccaccaccacaatcaagatatagaactgttccat

SEQ ID NO: 136497 - DNA, 201 bp, Homo sapiens
acccatgcgagtctagcacagggcttgcgggtggggtgttccttcttgaatgatctgttctccatttcctctgtgcacagctctgggggcagatttcattkcagactgctttagaagacaggacagcaggagaggaaatcactagagacaaaagaaaattagaaggatttggtagaagtcatatataggaaactgagagca

SEQ ID NO: 136498 - DNA, 201 bp, Homo sapiens
actaaaacacataaagaaaaatattgataaaataatcagagccctcatgacctgtggggtagtaacacacactctaacatatatgtaattggagtctaagaaggagatgagagagagaatagcatagaaaaaggattagccaaatattttttaaatttttatcaataatgacagcacataaattcaagattctagcaggag

SEQ ID NO: 136499 - DNA, 201 bp, Homo sapiens
gagaacagggcctggccaagacttatcatttcaccatttaaatagagatcaagatgctaaagttcccaggagacatctcttttgtgacttgccaagagcayggagaaattccatcagggagcttctgagatatggatccagactagcagacattaacagaattaccaggtgtctagggggatcccagacttttcagcacac

SEQ ID NO: 136500 - DNA, 201 bp, Homo sapiens
tagaactgaaaaatataacaactgaaataagaatctcagtagatgggctcaacagcagaatggagagaacagaggaaagaataagtgaactggaagatacratagaaatgactgactctgtacaacagaaagaagatggaatgaaaaacaaagagagcagagcctcagggacctgtgggactataacaaaaactaaattta

SEQ ID NO: 136501 - DNA, 201 bp, Homo sapiens
tagatcaaggatgagcagcatcgcaggtaattttagagactccagagttaatggtaatgactctaatgatgaagccttctatgccttgaacacctgctacrtgtcaggcatcacttagtcctcatgctcattatcagccccagttaatggttgaggaacctgaggctcagagggtttctgttacttgcccaagataacaca

SEQ ID NO: 136502 - DNA, 201 bp, Homo sapiens
acaatccactaaagctgggctctcaaagcccctggttccatggtcgtgtggcaggggaggccctgcccttcctcagtttgatgtcattctttcctggatgstgaaggggtataagcaaaagatttacaaggataagctctcttttgaggagccattcaaaatactttctctctctctctctttttttttaacatatttctg

SEQ ID NO: 136503 - DNA, 201 bp, Homo sapiens
tctagaggaaatttccaccaagtacagtgccagtggggttagtttgagggatcactgtccaccctagcaatatctgtttcatcttctgatccggcacagawtagccaatggaaccccaggagaaggctttactgctcctattctatgtccaggccaggggctcagggctaccataacaagagtccaggttgcttctctcct

SEQ ID NO: 136504 - DNA, 201 bp, Homo sapiens
gggaagaggggctaggcctggtgtggtgaggaggaatgcaggccataggcatagggctccagcagggccaggctcagagtggtggcagcagtgggcatggwggctgggaaagagcgagaagttctccagaaatcaaagtggcagcactactgtgggaaagtggtgcatccaagggacatcatcgtacaagagtcagcaggc

SEQ ID NO: 136505 - DNA, 201 bp, Homo sapiens
ccaaatattttttaaatttttatcaataatgacagcacataaattcaagattctagcaggagaggatgaaaaacaaacaaatataaaaataagagcccatyatagtataattgctgaaaactaaaaataaagaataaatcttaaaagttagaagagaacaaagaacattagatgcaagaaataatggtagaatgatggttc

SEQ ID NO: 136506 - DNA, 201 bp, Homo sapiens
ttttcattagaaattgcatagccaaaggacaatagaaagatatctttaccatgctgctgaaagcaaaaaagaatctaccttgagctctgaatccagtcgtrtgtgcatatgtgtatgtattaaaatgaaataaaggcattttcagtaatagaatttgtcaccaacagacctatactacaagaaatgctaaggaaggtactt

SEQ ID NO: 136507 - DNA, 201 bp, Homo sapiens
ttcaacctctacttcctgggctcaggcaatcctcctgcgtcagcctcctgagtagctaggactatgggcatgtcccaccacgcctggctaatttttttaatttttttttttttgagttagggtctcactgtattgcccaggctggtctcaaactcctgacctcgagtaatcctccctccttggcctcccaaagtgctggga

SEQ ID NO: 136508 - DNA, 201 bp, Homo sapiens
gctagcttttgtatatggtatgaagtaaaggataaggttcatttatttctttgttttttcatgtggatgttcaattgttttagtgccatttgttgaaaaaytgttttcccctcattcaattaccttggtacctttgtagaaaatcagtagaccatatacatatgtggctctgtttctgaactctctactgtgttctattca

SEQ ID NO: 136509 - DNA, 201 bp, Homo sapiens
gagaggtcttgcctccagggtctttcccaggcaggtgtattctgaatgagtgacagcaaaagcattcgtgtaaacttaacacagcttgggcccttatctcwatgtacaagtttctgctgagccacttttataggcaaagttaatttttaaaaaagattaaattgatgattctatgtaattaacactggtttctgccaattg

SEQ ID NO: 136510 - DNA, 201 bp, Homo sapiens
gaagatggaatgaaaaacaaagagagcagagcctcagggacctgtgggactataacaaaaactaaatttatatcatttggggttccaggaaaagataaaamaagaagatggagctaaaaaagtactcaaagaaataataattgaaaaatcccccaatttgacaaaacccataaacctacggattcaagaagtgaatgacca

SEQ ID NO: 136511 - DNA, 201 bp, Homo sapiens
agagatggggtttcaccatattggtcaggctggtcttgaactcctgacctcaggtgatccacccgcctcggcctcccaaagtgctgggattacagacatamgccactgcgcccagctgatattttttaaaattatattttgcatgcattcctgcattgtcaaacattccaatgttgcattctacattgtcaagggtaattg

SEQ ID NO: 136512 - DNA, 201 bp, Homo sapiens
ccacgtcctacatgtcactctgtggatgcatttctagcctaactccttctcatctttggaatagggtaatcacaaaacttatcatccaaacatggattttktgtgtgtgtgtgagtgaaaggggcaccattaaaaatagaacttggatggcaggcatagtccatgactgtcccaggcaaaccagggcattgggtcagccta

SEQ ID NO: 136513 - DNA, 201 bp, Homo sapiens
ggaagagagaaaggaagaagaggagaagaagaggaggtaaatgaggaggaggataaggaggagaggaggagaaaaaaatgaggagaagaaagagtaggagraagagaagaaggaggaggaagaggggaaggggtaggggaaacagaagactcctcctgccaggcagcacagaaaaatatgtggtcccaccttcacccatgc

SEQ ID NO: 136514 - DNA, 201 bp, Homo sapiens
ctggaaaaggttttaaagcagttattataaaaatgcttcaatgagtaatagtgaacatacttgaaacaagtgaaacaataaaaaatcaccaataaaatcayctcagcaaagaaacagtaaatataaacaaccaaatggaaatgttagaactgaaaaatataacaactgaaataagaatctcagtagatgggctcaacagca

SEQ ID NO: 136515 - DNA, 201 bp, Homo sapiens
ctgtggcattctcccaccacattggtggtgtcccccacttcagggtgtataagactcacctgggaaagactaattttcaaaatctgatacaggttgccctycatcacactgccaggctgagtcccaagcgaaaggcaagtcatttgcaaatgaacatcattaatgatcctcaaaatccaggggcagtaaattctttggaaa

SEQ ID NO: 136516 - DNA, 201 bp, Homo sapiens
gacttgggcctccttgcaccctccatggtctctggcccacctcattgtccccattatagctctgcagcttctttcctttcctcctgcttctttcattcccrgtctccctacatcacagtagggggttgacccatggaaaatctggtcataggaatctccaggaaggcagtgtcccaattaggggaaagagactgccttcac

SEQ ID NO: 136517 - DNA, 201 bp, Homo sapiens
atgacataattgtttatgtagaaaattccaaggaatctacaagaatgaagcaaggaaagaaggaaggagaaagaaatgaacgaaagagagagagaaaggamggaaggaaagcaggcagacaaggaaaggaattcctagaactaaaaagtgactcagcaaggttgcagatacaaggtcaacgttcattcattgtatttctat

SEQ ID NO: 136518 - DNA, 201 bp, Homo sapiens
cacactgccaggctgagtcccaagcgaaaggcaagtcatttgcaaatgaacatcattaatgatcctcaaaatccaggggcagtaaattctttggaaacaaytgctctgagttatttttccttattcagatttagaggtttggatggagaattggtggaggctggaaataagattattagaaacataactttctagagcttc

SEQ ID NO: 136519 - DNA, 201 bp, Homo sapiens
atgatgcaatagagagctctctggttttctttttgtcttatttttcctagacaaggtactggtgaagctgaccacccagaatcaccagtaggaacagaccaaaaaaaaaaaaaagcccaaatgagcctgctttctctagccagaggaccagaaatgggacacccaccaagacagaaaacttttagccaaatgttctacttc

SEQ ID NO: 136520 - DNA, 201 bp, Homo sapiens
gtaatagttagagcaaccaggaaaaaaacctatacaaagagatatactcacaaacactataggtgcatcaaaatggaattttagaaaatattcaagtaacytaaagaaaggcaagaaaaataaaacagaaatgaaaaacagagaaaacattttaaaaagtcggacttaagccctaacatatcaataattacattaaatgta

SEQ ID NO: 136521 - DNA, 201 bp, Homo sapiens
ggctcatgcctgtaatttcagcactttgggaggctgaggtgggcagatcgcttgagcccaggagtttgagaccagcctgaccaatctggcaaaaccctgtytctactaaaaatacaaaaattagctgggtgtggtggtaacacagctgttatcccagctatttgggaggctgaggcatgagaatcacttgagtccagtagg

SEQ ID NO: 136522 - DNA, 201 bp, Homo sapiens
tgtttttaacctggacatctgattttaaaggatgccaaggtccaaatcttgattgtctctatattcagatgaatggaagccacagagactttgagaaggcwggagccaatgtttctccagagttttcaaaagtagcagacttgaacagttaaaagttctttatttctgataaaggttctaatttacagtaaagttttcaaa

SEQ ID NO: 136523 - DNA, 201 bp, Homo sapiens
gaatggcgtgaacttgggaggcggagcttgcagtgagccgagattgcgccactgcagcccggcctgggcgaaagagcgacactccatctcaaaaaaaaaamaaaaaaaaaacaacaactatatagtatttgcatataacttatgcacaaagatacctactttgtcatccctaaattacttactatatgtaatacaatgtaa

SEQ ID NO: 136524 - DNA, 201 bp, Homo sapiens
tataacaaaatatggcagatggccgtcttctcgctatgtcctggccttttctctgtgcatgcacgtccttgatgtgtctccctcttctttttctttttttytttttttttttaatttgagacagagtctctctctgttgcccaggctggattgcagtggcgggatcttgactcactgcaaactccgcctcccatgttcaag

SEQ ID NO: 136525 - DNA, 201 bp, Homo sapiens
caatcccacaggtccctggggctctctttttctttgccagtctattttctctctgttgttcagataggataatttctattattctatcttctagtttactcagtctttcctctgtctccatagttctgctttggagctcatctttcttttaatcaggttacttttcagttctaaaatgtctacttgattctcttttatgtt

SEQ ID NO: 136526 - DNA, 201 bp, Homo sapiens
aatcccacaggtccctggggctctctttttctttgccagtctattttctctctgttgttcagataggataatttctattattctatcttctagtttactcagtctttcctctgtctccatagttctgctttggagctcatctttcttttaatcaggttacttttcagttctaaaatgtctacttgattctcttttatgttt

SEQ ID NO: 136527 - DNA, 201 bp, Homo sapiens
aagtagctgggattgcaggcacccaccaccatgcccagctaatttttgtattctaagtagaggtcgggtttcaccatgttggccaggctggtcttgaactsctgacctcaagtgatctgcccacctcagccccccaaaatgctgggattacaggtgtgagccaccacacctagcctgtattttctatttctttactgaaat

SEQ ID NO: 136528 - DNA, 201 bp, Homo sapiens
tatttctttactgaaatttactattctaccatttgtttcaagacggtttgtgattgttcattagataatttttagaatggctactttaaagcttttgccakataattctaacatctgtgtcattttgctgttggcatccgttgattgacctttttcatgcaagctacatttctcttctccttcatatgctgaaaaatattg

SEQ ID NO: 136529 - DNA, 201 bp, Homo sapiens
tatgttacccagaaccagagcccatagcctatacctttagtaagagtcaccttttttttttttaattctgaaaagtggaggtactacagtgtgaaaggccaaaaaaaaaaaaaaatctttgatttctgaaagaattaattccattcagggattcaacttcttcctggtttagtcttgggagggtgtatgtgtcccagaatt

SEQ ID NO: 136530 - DNA, 201 bp, Homo sapiens
tgggttgatgggttcagcaaaccaccatggcacgtgtatagctatgtaacaaacctgcacattctgcgcatgtatcccagaacttaaattataataattamaaaaaagaattgattccaacccttactctatcatttaactttctttgagcctctgtttcttcatgtgtaaaaagggggctgtgtcaggggtccccaagac

SEQ ID NO: 136531 - DNA, 201 bp, Homo sapiens
agaaacctcatacattgctggtggtaatgtaaaatggtatagtcgctttggaaaacagcttggcagttctccaaaatattaaacatgaaattgccatatayctcagcgcttctactcctaggtatataccccacagaaatgaaaacatatatgcacacaaaaatgtgcacatgagtgttcttagtgacattttttgtaata

SEQ ID NO: 136532 - DNA, 201 bp, Homo sapiens
gtgtgtggccttctttctgggctctctattctgttccattggtctatatgtctgtttttgtaccagtaccatgctgctttggttactgtagccttgtagtrtcatttgaagttaaataatgtgatgccttcagctttgttcattttgcttaggattgccttagctattcaggctctctttggttccgtatgaattttaaac

SEQ ID NO: 136533 - DNA, 201 bp, Homo sapiens
ctggcccatgaaggcacacaataaatatcatgaaacttcgtggggcaaaggtagtagtggacagtatgggaaagggccactgaaggttcagatgatcaaasctctgctccaatgttttaatcccttgggagaacacaggaaatgaccccaagggtttccctcacccctggtgaggacacaggaggcagagcattcagagac

SEQ ID NO: 136534 - DNA, 201 bp, Homo sapiens
cacactttgttgttggtggccattgattcatagcaatgcaatggccatattgatgttaaaaacatgtcatgttaaagttagaagacatccagacatccttytgagatttggagatgttgttttgctattttctctctttgctttttttttttttttccttttttttttgttttaaggagcaattaggatttttggtgcaca

SEQ ID NO: 136535 - DNA, 201 bp, Homo sapiens
ttcataaagcaggttcttaagagacctatgaagagacttacattcccacacaataatagcaggaaacttcagcacctcaatgacagtattagacagatcaytgaggcagaaaaaacaaaagtattcaggagctgaactcaacactggatcaaatggacctgatagacatctacacaactccccacccaaatacaacagaag

SEQ ID NO: 136536 - DNA, 201 bp, Homo sapiens
tgatatcaacattttcccctttgcatgtgtcaaaatgcgttgagatgttaaagtaagatccagctccagtggaggggtaataagcagtcctgtccttacaraaactgtgctcacagcctcccaaagtgccaccctgtggtcataggcttcgggcttggggatgtctgctcagctgcccacagacaacctaaagtcacctga

SEQ ID NO: 136537 - DNA, 201 bp, Homo sapiens
ccaataatagaagagcttagattgctttaactaatcatgagctcccaccctctaaactattgttgtccactgctccagtactgtgttttctgatcccacarattagccatcatgtttattattctatggaatcattttttctttagagttaccaccttttaccaatttctttgctcacaattccttcttgcatctctgtag

SEQ ID NO: 136538 - DNA, 201 bp, Homo sapiens
gatctattttgtatattttttcaaataataagtttttggctttgttgatcctctccactatatctgatttttctatttcattgatttttatctttattacytcttttcttctgagacaaggtttcactgtgtcacccaggctagagtgcagtagcgtgatcgtggcccttgggctcaagagatcctccctcagcctcccaa

SEQ ID NO: 136539 - DNA, 201 bp, Homo sapiens
cataacaggcacctgtattttatccttggctttaaaagaaatgtgtttactatttcaccattaaggatattattcggtgtgggacttgtgcagatattctytattatgttaaggaaaagcctgttttactcttcctttataaacagttttgtgcatgtgtgcatttattgagtggttttaaaattaaatatattcatttta

SEQ ID NO: 136540 - DNA, 201 bp, Homo sapiens
caatgccatggttaattaaaggaagtggttcataacaggcacctgtattttatccttggctttaaaagaaatgtgtttactatttcaccattaaggatatkattcggtgtgggacttgtgcagatattctctattatgttaaggaaaagcctgttttactcttcctttataaacagttttgtgcatgtgtgcatttattga

SEQ ID NO: 136541 - DNA, 201 bp, Homo sapiens
ccttggcttttaaacaatcctctgtcttttttttatttttatttttattttatgttattttattattattatactttaagttttagggtacatgtgcacartgtgcaggttagttacatatgtacacatgtgccatgctgggatagcattaggagatatacctaatgctaaatgacgagttaatgggtgcagcacaccagc

SEQ ID NO: 136542 - DNA, 201 bp, Homo sapiens
ttgaattcctgtaaatatcaacaatgactaagagacagagtgtgagcgttgtactatccttgtgctgagcactttgcgtacgtcatctcatcagccttctyaacaagcctgtgagtaaggagccgttgtaatccccaagttagacctgggaaactgaagcacagagaaattgagtcatttgctcaagatcacatggttatt

SEQ ID NO: 136543 - DNA, 201 bp, Homo sapiens
gccacctttaatcctccaatagtcctgtgagtaggagttattatccttatagttttcccatggaaggacgaacaaggccagaagtgagatgttatttctcyaaatctactgaaagacagaggcaaaggttctacaggccttccaaactaaggctattatccctaattcaggaccttgtccccttttttggcaggtgataac

SEQ ID NO: 136544 - DNA, 201 bp, Homo sapiens
ccaggcaaagtgggcaccaggcaagcagcagactggtgcgagcagagacagtcattcgggggtctcccctccaacctggatgctgcagagttactattcaytggaataacatagatggtgtttgtttaaatacctcacagcaacccccgagacacgtacatttcactacagaccagtaggtcagcttgacttagatctgat

SEQ ID NO: 136545 - DNA, 201 bp, Homo sapiens
ccttagaaacatgacagttgagccttgggctgcacagcctgcttgctgagagcacagtggagcttagtgaggactgaggatgggggctctggagtcaggtyaccaggttcagatcccggctttacctctaccagctgtgtgactgtgagtgagttacaaaccctctctgagcttcagtttcttcctcatttataaaatgta

SEQ ID NO: 136546 - DNA, 201 bp, Homo sapiens
gtctggtctggtcagggagaaagatgcacaaagatgaggtgcagaaagtgctgccccagaggctggccagggtgcaaggggccacagggcttcccccttgygctgcctgacgcatcagggtaggaacgccctgcagaccttggtctggccttgaaggatagaccgtgctttgctgaatggaggagggaagggacagcattc

SEQ ID NO: 136547 - DNA, 201 bp, Homo sapiens
acttctaatatctaagtagtttcaaaatatggttacattagtaccaaaattgatgggcaaaagtaacaccaaaagtaaaaaaagaaattatttgcaccaastatactgtatttgtgagttttccactgggaacaggatggagaataagaccttccaaacggtgaataaaaataaaagtataggaactcttgatttatcata

SEQ ID NO: 136548 - DNA, 201 bp, Homo sapiens
cttactccactcctgaaggagcctgtggcctctgttcctgcttgttccatgtggcttctggtttctgtgggctgtagaggaagggcagagggattgtgaakgtagacagctaagaccactcaggagccagggaccaaggaagatccagaagaactaaaaaaaaaaaaaaaaaaaaaaaatagactgaaaaatccaaaagca

SEQ ID NO: 136549 - DNA, 201 bp, Homo sapiens
tgggaccagaacacaccacagggtctccactgcccctccacttgggagagctggaactcaagcccagctgctggccttggccctgcacaaccacattcttyacaaggacctcctgcagtgtctcctggcccttgtgttacctgagcccggatgcccatggccagggccggtgccctccatcttggctcctttgaaaccaac

SEQ ID NO: 136550 - DNA, 201 bp, Homo sapiens
gctacctttggaggcttcagagaataatccattccttgcttctttcaggctctggttgcttctggcattccttgactgtggccaactcgttccagtctctstctccgtggtcacattgcctcctcctcttctgtctgtgaaatctctctcttataaagatgcatgtgattgcatttaggacctacctgaataatccagaat

SEQ ID NO: 136551 - DNA, 201 bp, Homo sapiens
tttctcagccctgctagaaaccaaaatctggcttctgttgagaccaaaatatgatcatttagttttcactggaatgttattaatttggcccttgagacttmagatttgtatttgaaagtgggaaagagataaaggccttcaaatgtctcctgagcattgacacagaaagtgatcagttttttctaactgcttggtttatct

SEQ ID NO: 136552 - DNA, 201 bp, Homo sapiens
ttaactcagtctctagctcctctgcccttcctggaggatggcaggggtttcagggagggcgataaaagctgtgagcttctaaccatggcttggcatttctsatgaccagcccccatccagaagctgaccaggagcccactaggagttgcctcattagaacaaaagatgctccagcacccaggaaataccaagaggtttagg

SEQ ID NO: 136553 - DNA, 201 bp, Homo sapiens
cctgaagtggcccctcaggcagggacagcccacacagtggggtgttggggcactgctgggggccctgagctcagacactgtggccttgacaggtgactcakcctgagggcttgcgcagaacctcttgcaggctcctggtcctctgggctcccgtgactcattccctttctcgcagttcacaggtgggcaggcccaggggtc

SEQ ID NO: 136554 - DNA, 201 bp, Homo sapiens
aacccacactgggggagcactgtggggcgggcagataacatgcttcagagtctaatagaaatcccaactgcccatgactctgggttccttccttaccagcytcatagtcttgtgtgtctccatcatatgatgctgccaggactgatagaatacatgtttgtaaaatgcctggcccatgaaggcacacaataaatatcatga

SEQ ID NO: 136555 - DNA, 201 bp, Homo sapiens
gaaaataagataattctcgtagatttttataactatgggtgaaaattcttctgtgtccaggagtgcagcaacaaaggactttgcagtagagctggcttctraccagttctttctgtgagctagaagattaaagtgcacgaatcatgcaagtaggttagtctggaaaacataacacagcagaaaaaaatggctttcaaaaat

SEQ ID NO: 136556 - DNA, 201 bp, Homo sapiens
acgaatcatgcaagtaggttagtctggaaaacataacacagcagaaaaaaatggctttcaaaaatgttcagaacagctgtttctcagtatgtaaaccagcytcttggtgcagtggatatcagagttccttgccttgtgcatattttatcattcttcgatcctgagcagtttaagacaaaataaattttatgcaaacccatt

SEQ ID NO: 136557 - DNA, 201 bp, Homo sapiens
aacacagcagaaaaaaatggctttcaaaaatgttcagaacagctgtttctcagtatgtaaaccagcctcttggtgcagtggatatcagagttccttgcctygtgcatattttatcattcttcgatcctgagcagtttaagacaaaataaattttatgcaaacccattccaggccatgggcatgcagttgagtttttctagc

SEQ ID NO: 136558 - DNA, 201 bp, Homo sapiens
cctaacaccagaggtgcctaaggtcgcagctgctcaggacctgtggcagctgtgagcagctgagctcagtttgctctgttctttcttcttgcaagaatcayacagaccatgttggtcctatggaatagaatcacaatattgcctcagaccataggaccaatacagcagaaggtcctgagaagctgcggcttgctccatctc

SEQ ID NO: 136559 - DNA, 201 bp, Homo sapiens
cagcttggacgtgtggcgcatgcatgacctggggccacacatgcagatgccgagacaggcgcgtggcagagaggactgcagggcctcgtaacatccaggtsctgagcctgagcactatattaaatgggagggcgaatcgctgcaaggtggaaaacaggatcaatgccacgcatgaggcaattgcagctgtcctatccatta

SEQ ID NO: 136560 - DNA, 201 bp, Homo sapiens
tctcgtaaatcttcttgggtttctcttccctattctccttgagaaggttggttggagaaagacgactttatatatttgggggagtttgtggggtttgagtsaacacttggggccatacaccaagagaagagttaaagccatggaaatcatgatggaagattgagattttttaaattagcactgtcaaatttacaaaggcag

SEQ ID NO: 136561 - DNA, 201 bp, Homo sapiens
cttcagtgaaaacatttacaattataacttaaacaggtcctcacagcagtcagacagattgtttgcattacaggtactgtcttttcatgtgaaaatggaartttagaaatctagaacaggcttcagctgctgaatcttgatacacctactgggggaagaagcaatggctaatgacaacagctcacactcatcacgtgtcca

SEQ ID NO: 136562 - DNA, 201 bp, Homo sapiens
gcctcccaaagtgctgggattacagacataagccactgcgcccagctgatattttttaaaattatattttgcatgcattcctgcattgtcaaacattccartgttgcattctacattgtcaagggtaattgagatctgagcacaaatatttaaaggggtaccattaaaaatgcagcttgtatggcaggcatggtccatgat

SEQ ID NO: 136563 - DNA, 201 bp, Homo sapiens
atgaggggtactgtggtggcaggcttctggagtcactctcaaggcttgttaatcacatccttgttgctgggggtcctgtaagacaggagaaagccagcttstctgtgactcagtttcccatctaccaagcagaggtggaagctgttactggcttaagtaacagaccctgcagacccgagaagggggctagggaaacggtac

SEQ ID NO: 136564 - DNA, 201 bp, Homo sapiens
gcttctctgtgactcagtttcccatctaccaagcagaggtggaagctgttactggcttaagtaacagaccctgcagacccgagaagggggctagggaaacrgtacccaagggtaagatagctgttatcaggagttgcctctcagatttcactacaatttgaaccatagaacaatatttagattccataaattactcatttg

SEQ ID NO: 136565 - DNA, 201 bp, Homo sapiens
ttctcatttcagtgtgtcttaaaaacaagaattaaatgtgtaaatcatggaaactattgagtttttggaggggagatctttaagatacatgctttttagawaccaaaagtgtcaaaatgaagcattaagatgatgtattatttcttcaatgcatctgtttatcttttgtgaaatctcaagtttgataaatcaccagagata

SEQ ID NO: 136566 - DNA, 201 bp, Homo sapiens
cttctctgtgactcagtttcccatctaccaagcagaggtggaagctgttactggcttaagtaacagaccctgcagacccgagaagggggctagggaaacgrtacccaagggtaagatagctgttatcaggagttgcctctcagatttcactacaatttgaaccatagaacaatatttagattccataaattactcatttga

SEQ ID NO: 136567 - DNA, 201 bp, Homo sapiens
agatctcctggtgacagtctgcactcgcaccatcatttactgaatgtaaatgatcacacctcctcattttgttcttgcacacctgggagtttcttacatayctggcagcagctgcctccaatttgggtgggagatagccccagccaggggcctccatgggactaaaacttcctgaagccatcgcctgcagagcctccctgc

SEQ ID NO: 136568 - DNA, 201 bp, Homo sapiens
tagaacaagggttggctcagagcaagccttccctgctctagtgatgttgagtgagtgcctggaacattccccatgctacagtcccagctatggcctggctyggtcaccttgccaaaggtacctggctagaagcaccatgggaggctcaaggcaggcctgtctataggtggatctgatatctaccacatttatggcagcaca

SEQ ID NO: 136569 - DNA, 201 bp, Homo sapiens
aagcagttgtggaaaattaaactatgtaaggaagctaaagaagatgagaactatcttaacaaggtgtgtttgtccagaattctctgagttcgtactcctcrttaaagaatgtttcctttttcctggtacagggagggtatctttcaaatgagagtttaatctcctgttttcagaaagaaaagggggagactaggattccct

SEQ ID NO: 136570 - DNA, 201 bp, Homo sapiens
aaggcaggagcattgtttgagctcaggagttcgaggtggcagtgagctatgtttatgccactgccctccagcctgtgtgacacagcaagaccccaactttaaaaaaaaaaaaaagttgggagaagaactactggtgacatagaaatcaggtttcagacctacacttctagcaacaaatggttttctctcattcctatgcca

SEQ ID NO: 136571 - DNA, 201 bp, Homo sapiens
gaggcaggagaatcgctttaacccaggaggcggaggttgcagtgagccgagatcgcaccactgcacttcagcctgggtgacagagcaagactctgtctccaaaaaaaaaaaaaaaaaaaaatttcatggtagtatgccaggctccatagtaagtcagcaaaagggtcattttggtggctttctggacgcagctggcatggt

SEQ ID NO: 136572 - DNA, 201 bp, Homo sapiens
atgggcagggccctctaaagcttagccgcaggggcagggcccctattatcgagggccctggcgcaaagattgcgagagaagctgaaagaacattctgagaygggatttctgagcactgaagccccaggtgcaggttataggtcagggtcaactgtacctgctaacttagtgacaggtgcccaatctgaccagcaatatttc

SEQ ID NO: 136573 - DNA, 201 bp, Homo sapiens
ccagtgttcggagcagaaaacatgttgagacttagttgtagaccaagagcttgtctgccagagaagagatgcatgctggctcctgtgggctttcagttgtrgggccagagaaaaggagggccacatgtgtcatgctctgccgctctctggaacagaggtgctttctgacagggcaggctgggggacagtgagcagggccct

SEQ ID NO: 136574 - DNA, 201 bp, Homo sapiens
tcagcactcactgtgtaccgggcacttctctaagcattggtgatcagcagttactaggggctctgtcttcatggagtctgcactccgagagcagtaggatrgtaggcatagtgacagccctgagaaaggtactcttgagcaggtggggacctgaggaaagatgggctgagaacttcctggtacccttaaatccctccagtg

SEQ ID NO: 136575 - DNA, 201 bp, Homo sapiens
acacatctaggttttactgattcagtccctgtgtttatctacttaaatcccgaaactttacttactctgactttatatgaaggaaagcctttgtcatcaamgtgttttcagcactcactgtgtaccgggcacttctctaagcattggtgatcagcagttactaggggctctgtcttcatggagtctgcactccgagagcag

SEQ ID NO: 136576 - DNA, 201 bp, Homo sapiens
aggcagctcttcagacagcagccaaggccctggtgtctagccctgcccctgccccttcctgccgtacaccctggccgcccaggcttctccatgctgctgcrtctctaaagccgctctgcccgcggccctgaaagcctttgttgctgctaccgttccttctcagattgagaatttatgtcaagtgtgagtgcgcagcccctc

SEQ ID NO: 136577 - DNA, 201 bp, Homo sapiens
aagcaagccctctgaaaaccttctctggcatccgggttggaggaggtctctcttgctatttattttctcacagaacctccctgcccccatcttttcctttytggaacttgccacagatttttttttttttttttttttttgagatggagtctcgctctgttgcccaggctagagtgcagtggtgcaatctcagctcactgc

SEQ ID NO: 136578 - DNA, 201 bp, Homo sapiens
aaatcttcttaagaatattcagtaattcagacattacattaattcacattctccatctcagcttgtgatccaagtgaggttttttgacaactttctctctsggagtatattttaaacataagcatgtgattcaacagcacttgaccctgaagttgtgatttagtgctttaattggaagctctagcttgtaagcattatgga

SEQ ID NO: 136579 - DNA, 201 bp, Homo sapiens
ttttcccttttccatttttcccttttatgttttcactctacttatgcttattttgtggccaccctagcaattttaacatgcacatttaacttacgaagtcygaagtgaattattagcattcttttctcccaataatagaagagcttagattgctttaactaatcatgagctcccaccctctaaactattgttgtccactgc

SEQ ID NO: 136580 - DNA, 201 bp, Homo sapiens
aacccaagttgggtgtctgagggcaggacacgcagcatgaggctgtggacctgtgacatggtggcacggcaggactgcaggatcagctgtgcacttcattygaatgcaagccagatgtggcagctactggaactccagaccacacccccagaggagaatggaaggagggagcccctgttggtctttggtctgaatttaatg

SEQ ID NO: 136581 - DNA, 201 bp, Homo sapiens
tctggctctctgcacagattaattcacctacaaaatgaaattgccttgtgtaactacatcacacctggctgtgggattgcttggagctttgcctttaaatyatgtgatcatctttgaaacgtacatttctgaagggtccatgaggtagctggccaaggaagttgggagctgatatctccctttggaatcatctagtgggat

SEQ ID NO: 136582 - DNA, 201 bp, Homo sapiens
gtcttgtgtgtctccatcatatgatgctgccaggactgatagaatacatgtttgtaaaatgcctggcccatgaaggcacacaataaatatcatgaaacttmgtggggcaaaggtagtagtggacagtatgggaaagggccactgaaggttcagatgatcaaagctctgctccaatgttttaatcccttgggagaacacagg

SEQ ID NO: 136583 - DNA, 201 bp, Homo sapiens
tgggtgggagaagcttcagtagccctcagtgtcattcctccttggagaagccagagagcacatctgatgggtggtgagaagtgagagtaaactccctgctsagtgcttggggattgtcagggtcttgggccagagggagggaaagaaagagttgggtggtgcctactcttctgcccacccacttgtttccctctggcccct

SEQ ID NO: 136584 - DNA, 201 bp, Homo sapiens
gggccagagggagggaaagaaagagttgggtggtgcctactcttctgcccacccacttgtttccctctggcccctggcaggaaagcctgtggtggaatggkctattgggcataggggaggctccttcctttcatttcatcttctatccctgtcctaactgccctggctcccagccagcacaccagtgtctgagaattgaat

SEQ ID NO: 136585 - DNA, 201 bp, Homo sapiens
gtggtttccacaggaagagatgggcagggttggtaagcaggtttaagactggctagtatggataacttcagaaggctctgaggcataggatctgtctgtcytgagttgtctggtacctggccctggggagactaggttaggccctgagtggaagagacagataaaggaagcagcgggaatggggtcctgaactgattcatt

SEQ ID NO: 136586 - DNA, 201 bp, Homo sapiens
tgttctgccttcttttggttaaagcaagcctgaggcccgtcaggattcaagaggaggggacatagagggcatctctagatggctggagtgccagaaatttrtggctcccttgaattcaccaccttcagtttgtagcgggtgcaatacctgggcctgactgaggctagtgcgtatatatagggtggtgcccaaccaggagag

SEQ ID NO: 136587 - DNA, 201 bp, Homo sapiens
ggtctaattgaccagagaatgtcaggggtgaaaaagagaacggaccagccttctggtccacggaaggcaagcaggttttactaaagtgtcagctaaaacarttggtcccaggaccagtgttagagactgctacaggcaagaagggagagcaagcaataagtagttaatgaagttggccacaggggaggatgggggatggtg

SEQ ID NO: 136588 - DNA, 201 bp, Homo sapiens
aatcgcttgaacccgggaggcggaggttgcagtgagccgagattgcactgctgcacgccagcctaggcaacagagtgagacaccatctcaaataataatawtaataagaagaataagatggtcttgtcaggaaatccttccatctctccctccctgtgtctggctgtattgaacacccagtctgtgtgacacacacagtgt

SEQ ID NO: 136589 - DNA, 201 bp, Homo sapiens
aagcatggaaacagggcttctctacatgtatgatatttattcatctaacaagcagtttttgcaggtcacagaggccagcctacagaaggttctgcactgtrtccatgcttaatgtagtactgaaaatttggatgtttgccgtctgtcttgctattaagttagactctctcacaatatcctcaatggtgatttttcttctgt

SEQ ID NO: 136590 - DNA, 201 bp, Homo sapiens
ctaacaagcagtttttgcaggtcacagaggccagcctacagaaggttctgcactgtgtccatgcttaatgtagtactgaaaatttggatgtttgccgtctrtcttgctattaagttagactctctcacaatatcctcaatggtgatttttcttctgtcgattggacaggtaaagaccaagaaggaggattttttccatgcc

SEQ ID NO: 136591 - DNA, 201 bp, Homo sapiens
gggtctagagggaggggctgcttgttagcaaacccctaagcctcctgaagggcttgttcctggcttgactccagtgaaatgtctccaaggagagaagagaktgacacctcacggggctgcgggagcagcactaggttgtcagttatgctcaaaatatattttgtagtaaaaacttgtgtagcatttctattttgttttttc

SEQ ID NO: 136592 - DNA, 201 bp, Homo sapiens
tgcctcctgccatgggagagggtaaaagggcccccgttgggaggggccaggaggggcccgggcctcccagagtgtatctgttcaattgcgttttctacgtytgtccagtagggcaggtttatatacagggagacaggctctccaagaaaacaatggggccaccccaggttttgagatgttcttgaggaaggtcatgcagcc

SEQ ID NO: 136593 - DNA, 201 bp, Homo sapiens
cattcgctgtcatcagactgcatttttataattttctccaacccacctgtccctctctcaccaccattcttaatggtccgaggggtctgcatttggagcarctgcctgaccagctaattcccttctaacatctggtaaactccaggagcagaaatacactgggatgtttgcaatgaccgagaggggccatgggagcaacgc

SEQ ID NO: 136594 - DNA, 201 bp, Homo sapiens
ctcatctcagaagccaccagtgagccgctggctactgggcccagcccccttattctctgggagactctccttgaggacctgccacacctgcccttcagtayagaaagagggcatctcagagctcaggaagagaggctgcgggtggagaggggaggaccctcttcccaaagccaagcagaggaaaccaagtttaatagagaa

SEQ ID NO: 136595 - DNA, 201 bp, Homo sapiens
acactgggatgtttgcaatgaccgagaggggccatgggagcaacgcgagagggatccagaccgaagccacctttgacctctctgcccaggtgaggaatccrtccttctcctgccgtgcaggggagctggaaacctggacagaaacagatctccttctttctgtgtccagcttcacaccctctgtgtgtgctctctggccca

SEQ ID NO: 136596 - DNA, 201 bp, Homo sapiens
ctgaccccttcgagattagctgtggctttccaagctatgggtgccatgaaggtaattgactctgattttaacttaattatctactgtgaattctctcacgwctcagggatgagtaacaattccaggagctgagcttctggagccacagttggtataatatggccagggttcccggttagatgctggggagtgccaggtggc

SEQ ID NO: 136597 - DNA, 201 bp, Homo sapiens
tgccagagttgagggaaggggtcctctttgtgtgggtagggatacctttggcatcaagatttgagactttagattctaaatctaagaccagatttggaatytggaagcagatcagatctgcttccaaaattctaacatgggcgtcaggaccaagagagatggtggggaaagccccagcagactcctttagtagacagaaga

SEQ ID NO: 136598 - DNA, 201 bp, Homo sapiens
gatgtaggtttctggttgagttccctctttaaaaatcctatttgcttgtttggattggctgaaacttctatcctttagtcgattacttttttcctgtgtgktgaaatatgcctaacataaaatcagccatttgttttagtctgtttgtgctgctataacaaaataccatagactgggtactttataaagaacagaaattta

SEQ ID NO: 136599 - DNA, 201 bp, Homo sapiens
aggatctgtctgtcctgagttgtctggtacctggccctggggagactaggttaggccctgagtggaagagacagataaaggaagcagcgggaatggggtcytgaactgattcatttgcatatgaaaaatgcactcaaagggagtcgtttgctgtcttcagcaattagctggccctgggagcccctgtccctccagggtcag

SEQ ID NO: 136600 - DNA, 201 bp, Homo sapiens
gtcaccctttgactcttctttttttttcttttcttttctttttttttttttttgagacagagtcttgctctgtcatccaggctggaatgcagtggcatgakcttggctcactgtaacctctgccacctaggttcaagcaattctcatacctcagcctcccgaatagctgggattacaggcacctgccatcacgcccagcta

SEQ ID NO: 136601 - DNA, 201 bp, Homo sapiens
tcagccttgaccccaaacttagaacctactcctcaaacaagccctgcagagagttggacaaaatgcaaggaggaagttagcagctgtctgttgtacatgarcttgcctctttaggctccagcccccacgttctgtgctctgctctccccaggagacatcctagcacatgtggtttccccctgctgtgtttccagagatgtt

SEQ ID NO: 136602 - DNA, 201 bp, Homo sapiens
gccaatgtaggcttctaagaggaaggaaatcttaaaccatcctcattcctccaaactgtgaaagtggcagggaagcccagctgactcaggcagatgccccwggtaggctgataacatgggtctctcagaacaaatagtctttaaattgctgtctggcattgctgtggaggagaggcagagtttggggagagtgtggaggtg

SEQ ID NO: 136603 - DNA, 201 bp, Homo sapiens
tgggaagaaaggttctcatgtgggacatttctggagacctatgaaagaaactgctccagagaggctcaagatcatggaggggaaagaaatacattttcctrgcccattgctaggtgcatggctgagtctccatacaaaagacagattaactagagaaagcatgcacatttatttaatataagttttatataacatgggagc

SEQ ID NO: 136604 - DNA, 201 bp, Homo sapiens
tgtgctcacagcctcccaaagtgccaccctgtggtcataggcttcgggcttggggatgtctgctcagctgcccacagacaacctaaagtcacctgatttcraaagaagtttgcctcctaaaaatgctcataacaagtgtatacatggtttcaatatacacgtgaattgggcaatcataggcaatacctgagagctagaaag

SEQ ID NO: 136605 - DNA, 201 bp, Homo sapiens
gtggtagatagcacatttatttcaaaacaaacaaaaaaagggatattctagggcatgacacagaagcactatctgggtaatgttctcactcttaaagagtscctgaaaacggggatgccctgcatgagaggtgagtcccagcagagagaaacccagcaagggcttgtctgtgaagcccttgccaccttccatgccaggcct

SEQ ID NO: 136606 - DNA, 201 bp, Homo sapiens
acaaatatttattgagcctctgttatatgccagggccttgggaagtccaggggagggggaaatggccctgctttcagggagctctctgtgaattgggagtkcggggaagataagccctcagtgtcataagaggtcagtggccaggggccagatggaggtgggagagggagaatcctgtgtgccatgatgctgccccgtgcc

SEQ ID NO: 136607 - DNA, 201 bp, Homo sapiens
attactctggtgttagatagatgtgctgctttaaaaatgttccacgctgggaaggttaacttctagaagagctgaaaagcttcctgttgggctttcctcaraaacttaggctgtcttgccctaaccacattttaggaaattcagatttctgcattctggagtctttggaaggcaaatggctagccagcatttttagctctg

SEQ ID NO: 136608 - DNA, 201 bp, Homo sapiens
cgtaattggccgtatcaagttaattttcttgtgtgaattctgcatactcttgatattacttaatttgtttttctctctttttaattacagcttgggttgaygatagccattcgctatagccacaggtaaatgtttacatttttgtttcttttaagaattatccttaccagtttatagctcttggtttgcttatgtctcaga

SEQ ID NO: 136609 - DNA, 201 bp, Homo sapiens
caaggacatggaatcaaccaacgtagatgcccatcaatggtagactggataaagaaaatgtggtccatatacaccatggtatactgtacagccacaaaaargaatgagctcgtgtcttttacgggaacatggatggagctggagaccattatccttaacaaactaatgcaaataccagaacagaaaaccaagtaccacatg

SEQ ID NO: 136610 - DNA, 201 bp, Homo sapiens
agccgaagccttgtcataggagaagtcctctccatggcggacatggccacaggagtgaaggtgagaggcgccgggcacctgcccttcatgaatgcatgctygctttgcatgccaaggaatgaaaactataaccccgtgagctctctcagtctatgtagtggcacaggtgttggtaaaattgcatacctcaaaacctgtgcc

SEQ ID NO: 136611 - DNA, 201 bp, Homo sapiens
tgatgtattatttcttcaatgcatctgtttatcttttgtgaaatctcaagtttgataaatcaccagagataaaaacatcatttttaacctatcagagatcrcaagtgccaggaggaaaaatagtgctttgtctcctctttatgaatttacctctctctttgcttatgacttatgagattttatttgcagagaaaacataat

SEQ ID NO: 136612 - DNA, 201 bp, Homo sapiens
cctagaagtagtggactgggagtggagctccaaactctgggccctattctgtgttctttcctccctccataagcaattttgcttctcagtgttaactccartcattcatttctgaataatttagaattggcttatgtttgaaatttaacatgctgatggggaagctagtgccagggtttataaaaggatggtaatcagaga

SEQ ID NO: 136613 - DNA, 201 bp, Homo sapiens
cccaggacctcctggcagtttagggaggagctttgctgatgggaatggccttgtactctactgtaatgactctgtctgatggggtggagaagtcactgtaygggggcccctgacccatgcaggggacagttggggagctctgccatgtcaccaaggaaggacggacagcatgctgtttacgtctgttataaccacagtgtc

SEQ ID NO: 136614 - DNA, 201 bp, Homo sapiens
atatcaggagaaaatgaggagtgattgctaataggtataggctttctcttttgggtgatgaaaatattctaaaattagatggcaatggttgcacaactccytaaatatactagaaatcactgaattgtacacttgaaaaatatgaatgctgtggtatgagaaatatgtctaataaagctgttgagaaagagagaggaggaa

SEQ ID NO: 136615 - DNA, 201 bp, Homo sapiens
gtacagagtatttcctcaccccagtagtgggcactgaactcacgataggtagttttttgaccctcacccttctcccaccctcctctctcaagtaggccgcygcgcctattgatttcttctttgtgtctgcgtgtactcagtgtttagctctcacttataagtaagaacgtgcggtatttggttttctgttcctatgttaat

SEQ ID NO: 136616 - DNA, 201 bp, Homo sapiens
gagagtcaggagccatcagggtggtttgcacggggaagaggggctaggcctggtgtggtgaggaggaatgcaggccataggcatagggctccagcagggcmaggctcagagtggtggcagcagtgggcatggaggctgggaaagagcgagaagttctccagaaatcaaagtggcagcactactgtgggaaagtggtgcatc

SEQ ID NO: 136617 - DNA, 201 bp, Homo sapiens
ttagatttatttgtgattgcattgaatctataaagcaatttgggcagtattgcatctttcagattaatgaagatgatgtatctctttgtttatacaggtgytcaatttatctaagtaatgttttataatttacagtgtagaaatcttgcacatttttcactaaatgtagtcaaaaggcattgatttttaatttaattccca

SEQ ID NO: 136618 - DNA, 201 bp, Homo sapiens
tgaggtcaaatcattggaatcagactgtccctcagccttgaggctgagtttagctctgcccacctttgtgggatctgcgggagttgggatgggaccagagrgcaatcaatgtctttattggctggatgggtgggcttgggatgttcagttggaggactgagttttgctctactcaaagacaagaggcagaactcttcccag

SEQ ID NO: 136619 - DNA, 201 bp, Homo sapiens
ggacaggaaaacaagtgactagccaccattgcatagctagtcagccggcaatagaactaggaccagaaagctgggcttcttcctgcggggcccactcagaygagcaaattcatagaaaattccaccactccaccccttcagcaccatgagagcacacacgggaggtgtgactgcagtggaaccatgaggggtactgtggtg

SEQ ID NO: 136620 - DNA, 201 bp, Homo sapiens
tctgtcacccaggctggagtgcggtggcgcaatctcagctcactgcaagctccacctccccaggttcaatcgattctcctgcctcagcctcctgagtagcygggattacaggtgcccgccaccgcacctggctaattttttgtattttagtagaaatggggtttcaccatcttggccaggctggtcttgatctcctgacct

SEQ ID NO: 136621 - DNA, 201 bp, Homo sapiens
agatgatgcttaggtttgttgttgttgttgtttgttgttgttgttgtttttgacggagtctcactctgtcacccaggctggagtgcggtggcgcaatctcrgctcactgcaagctccacctccccaggttcaatcgattctcctgcctcagcctcctgagtagccgggattacaggtgcccgccaccgcacctggctaatt

SEQ ID NO: 136622 - DNA, 201 bp, Homo sapiens
acctcattgtccccattatagctctgcagcttctttcctttcctcctgcttctttcattcccggtctccctacatcacagtagggggttgacccatggaawatctggtcataggaatctccaggaaggcagtgtcccaattaggggaaagagactgccttcactttaacacaagcccaggaaaaagttggcacattctgcg

SEQ ID NO: 136623 - DNA, 201 bp, Homo sapiens
taaggtgcaacttagactttggctacagaaatgatattcagatgatgcttaggtttgttgttgttgttgtttgttgttgttgttgtttttgacggagtctyactctgtcacccaggctggagtgcggtggcgcaatctcagctcactgcaagctccacctccccaggttcaatcgattctcctgcctcagcctcctgagta

SEQ ID NO: 136624 - DNA, 201 bp, Homo sapiens
cttaagcttaaggtgcaacttagactttggctacagaaatgatattcagatgatgcttaggtttgttgttgttgttgtttgttgttgttgttgtttttgayggagtctcactctgtcacccaggctggagtgcggtggcgcaatctcagctcactgcaagctccacctccccaggttcaatcgattctcctgcctcagcct

SEQ ID NO: 136625 - DNA, 201 bp, Homo sapiens
cttgcaccacctgggacagcaccatgaatgttacttccccaccccatcctatttggaccaacatcaagggaaccataagtgatgtttggggatcttaagcytaaggtgcaacttagactttggctacagaaatgatattcagatgatgcttaggtttgttgttgttgttgtttgttgttgttgttgtttttgacggagtct

SEQ ID NO: 136626 - DNA, 201 bp, Homo sapiens
gccctcgttggtcctgtactttggatgcctgcagtggtatgcatggctgaattattctggaaccaagctattcaaacagtatctgggggattctgcaggaygtcgagctgggcagtggcgttggactttttaatttcaaccatttctcttctcatagctctccctcccctttcaccctcccacagcctggggatcctccta

SEQ ID NO: 136627 - DNA, 201 bp, Homo sapiens
gccaaagtgtatccatgcatgtggatgagtgtgtgtatgcacctatatatgagtgtgcatgtgtgcacatgcggtggtacacgtgtgtgcatgtatgtgtrcttgcatatgcatgcatgtatgcacatgtgaataaacacatgcacacaagcactaaaagactgcatgtgtgcgtgtgcatgtctgaatgtggacgagtgt

SEQ ID NO: 136628 - DNA, 201 bp, Homo sapiens
ggagtttgtttagtgtgttctggcaatacttacagtatgtcctcagtagggggtgttccccagggagggcagcacaaaatccctctgacctccgtgtcccrggacctcagcctggctgggccagggtcaggggccaacccacgggcctccctcccctctctcttctggatccctgctgagaccagcaacaaaggggtcaat

SEQ ID NO: 136629 - DNA, 201 bp, Homo sapiens
tcaaaaaaatatatttcaacacacatttactgcctttgaagccagtaatcctgggcatgattttgggccagttattcccaccctatgcctcagtttttccwtacataatatggagataacaaaccttcccttgtagaggttgtgggagttaaattctatgcgacaaagagcatcaaatgctcaacacatagactcaggaag

SEQ ID NO: 136630 - DNA, 201 bp, Homo sapiens
tccaaagcttttgtttgttctggctgcatctgacatcctttcgatgttagagaacaggtgtcctgggaagtccgggtggggaacaggggatccttcctacyccccgagacagacgtggagctgagtggaagttccgcatctcgtttgtcatttcccttctcacgctgatgaggccaatgctttctaagagtgggttttggt

SEQ ID NO: 136631 - DNA, 201 bp, Homo sapiens
tctgcatgttaatagatttctggggtaagataaagctcggtgatgtcacctgcaggtgtgtgagcctgtggtagcagtctgctgcctgacatttgcttcayaaggcgttgctagccacatctgtcctcagctgtgagagtgtctgtatgcaccagcaggctgaacagagagatgtttgtaaccagaacagagagtcagatg

SEQ ID NO: 136632 - DNA, 201 bp, Homo sapiens
catgcttcgtgcgaggcggtacctttgtatataacacaataaaattcgccactcatctacatgcgtttctccatttctatatgacaattaaaggtcaaatygcaaagttgaatcagttatagctctgcgtttaggatacgttcaacctgagctgattttatctgcctgggcttcgtaaaatgttagtatttgcatagtgag

SEQ ID NO: 136633 - DNA, 201 bp, Homo sapiens
ggtcctccatctccctctgtcccagcaaagagtacctggacctgaccccttaaggacaagtttctatccccactctgccagcaactggagtgtaaccttgrgcaggtcacttttatctcttttagcctaacgtcctcttccagtaaaagaggaggtaaattagaccaccccaaagacccttccagcatcacactctgcaaa

SEQ ID NO: 136634 - DNA, 201 bp, Homo sapiens
taacattttaggccactcattttgaatattgttttccatgttctttgcattatctccttctaggcgtattaggctgatatcaatatctgctgcctctgcarttttgattctgttgattttttaatcttctgcttgtcttttatttgcccttgtgttttgtgagcagcctgtgaataagtaggtggatggtgcagtgctgac

SEQ ID NO: 136635 - DNA, 201 bp, Homo sapiens
aaaattatcgacaaggctgcaattctaaatatgcttgagaatgaaccaacctggccttctaccactcgtctctctcctccaggcgctgccaagtgaacttkcttggagccccacgtcctacatgtcactctgtggatgcatttctagcctaactccttctcatctttggaatagggtaatcacaaaacttatcatccaaac

SEQ ID NO: 136636 - DNA, 201 bp, Homo sapiens
ggcatagtccatgactgtcccaggcaaaccagggcattgggtcagcctagatttgaatcaaggccaaagcctctccctcaatcacatggtttgactttgcstagcaggcctctttctcagtgcttggtccagaccctccctgtccccactcccactaggattgtcccctcttaaaaatcagagcctctgtttagggtggaa

SEQ ID NO: 136637 - DNA, 201 bp, Homo sapiens
gatacacatcccctgtatctctaataggcacacacaaaatatgctccaggagacacctaatcccctagccaagggaccaggaagatggtggcctgatgacmgaaaatctttttggtgatacccatgctacaccagccagacacaacaaaaaaacataaccattctcccgaccgccgttgacaatttctgcctcgctgggag

SEQ ID NO: 136638 - DNA, 201 bp, Homo sapiens
tgctctgctgtctgtgcatttacacttcgcctagctcctccacaaagttctgctataaggagaaatgggccaatgtctttccaatccaaatgccatcagargcaagctctacatgtgcccgactgcctaagaggagcatatgagcgcacagatggcagcagtatatgaggacattacacctgctctgctccttgatacttc

SEQ ID NO: 136639 - DNA, 201 bp, Homo sapiens
aggctggatctggcaaacctcccaagaaggatctgtctggggtccaagtgtcagtaaggccccctagtagaagggccttctcagtggttactgtgacaactttatcagccagactctttgctcaagagtctcatttttcccgggcatcaactggtttctgaccaactccctttctattttattggtcagagatctctttct

SEQ ID NO: 136640 - DNA, 201 bp, Homo sapiens
gtgaaggttggcctgacaaattatgctgcagagtattgtactggcctgctgctggcccgcaggcttctcaataggtttggcacagacaacatctatgaagrccaagtgtaggtgactggcaatgaatacaatgtggaaaacattgatggtcagccaagtgcctttacctgctatttggatgcaggccttgccagaactacc

SEQ ID NO: 136641 - DNA, 201 bp, Homo sapiens
aaaaattaggctagctgctgtcattcactagctccaaatggagtaataagtactcctctaaagaggaaacttcatgatctaagcataatattccaagccaratttaatccctgagtacagccaatggaaagatatttttagatatctaagaatcagaagcaatttcactaatatagccttccttaaaaagttatcttaaaa

SEQ ID NO: 136642 - DNA, 201 bp, Homo sapiens
ctacatacctatcagaatagctcagatttataaagtgatagcgccaaatgctggtgaggatgtagaaaaacagcatcactggtacatttctggtgagatcrtcaagactttggaaaacaggttagcagtttcttataaaactaaatatgcaactgccatataactgagcaattgtactcctggggattttcccagagaaat

SEQ ID NO: 136643 - DNA, 201 bp, Homo sapiens
actgaagcttcctgcccacaaccacatgagtaaccttggaagtgtaccctgcagctccagtcacagcttcagagactgcaagcatgggacagtcaacactygctgcaacctcatgagagtccctgagccagaaccacaccatcaagcagcttctggattcccaggcttcagaaactgtgtgcataatgaacacttggtgta

SEQ ID NO: 136644 - DNA, 201 bp, Homo sapiens
aagatgtttaacatcactagctattagggaaatgtaaattaaacctacagtgagatatcactacatacctatcagaatagctcagatttataaagtgatarcgccaaatgctggtgaggatgtagaaaaacagcatcactggtacatttctggtgagatcatcaagactttggaaaacaggttagcagtttcttataaaac

SEQ ID NO: 136645 - DNA, 201 bp, Homo sapiens
ttttgggccagttattcccaccctatgcctcagtttttccatacataatatggagataacaaaccttcccttgtagaggttgtgggagttaaattctatgmgacaaagagcatcaaatgctcaacacatagactcaggaagtaggagttgatgtttcctcgatgtgcccaggctggggatttggagaaaagagataccaca

SEQ ID NO: 136646 - DNA, 201 bp, Homo sapiens
tcctgcccacaaccacatgagtaaccttggaagtgtaccctgcagctccagtcacagcttcagagactgcaagcatgggacagtcaacactcgctgcaacytcatgagagtccctgagccagaaccacaccatcaagcagcttctggattcccaggcttcagaaactgtgtgcataatgaacacttggtgtaatccactag

SEQ ID NO: 136647 - DNA, 201 bp, Homo sapiens
ttgttacttttggagggagaaagaacactgtattgcctacagactactcataatgagagcaatgatgacattcattagctttaaaacctgcacaacccatmttgacagctcatttgttggggacagatttttatgttagtgtgtctagtttaggagatggggacttgagaagaggggagcatgagaaattattgtaaaatt

SEQ ID NO: 136648 - DNA, 201 bp, Homo sapiens
agtaaggagccgttgtaatccccaagttagacctgggaaactgaagcacagagaaattgagtcatttgctcaagatcacatggttattcagtggtgggctkgggggtggaattaaggatgcttctttggggagctctgaggaatcacccacttgtactatcttgctattttttttttttgagatggagttttgttcttgtt

SEQ ID NO: 136649 - DNA, 201 bp, Homo sapiens
ggttgcagctcctcaaacaggccaccctggtcacctctggactcagcacagattggcctctctgcccgtgactgtccctgtcttcctctcttgctcacccrttgcctgggcatggatgtggcttccctgggaaagcttcctgcctttggggctgttcttagtgcctggcttattccagccccaggtgttaacagtctgcct

SEQ ID NO: 136650 - DNA, 201 bp, Homo sapiens
acagagatgacctggaacaggcgtgtgccctctggggactcatggtgcatccgggtagctgaaacacttggtgctgtgtggagcctctgtggttacactgkcaggagggacatgtggcagcgggtactgagagtaacatgccatacagagacagttgtggggtttttatggtcagagtccagtacatgtcctttatagaag

SEQ ID NO: 136651 - DNA, 201 bp, Homo sapiens
aaaataaggggctttgtattttagtggcgacaggcctgggaagtagcagggaaaatacttctgatgctgcatccatttcccctttctattcttgccaggtmtgcatggtgtggacaatgggatattaatatttgacaaggttcggatacccagggagaacctgctggataagtgagtagtttctccttaactcaggtcaat

SEQ ID NO: 136652 - DNA, 201 bp, Homo sapiens
tatgcatgaagaaatttatcattacattttgacattatatgctctcatgcttggtgcacagttgtagaactgaatgagtttgaggatcacagaaatgttayactattccaggacatgagtaaagctataggaaggagagcttaataatgatctcgatgccttccttagggccccactgtttcatcgttcctgtccgggatg

SEQ ID NO: 136653 - DNA, 201 bp, Homo sapiens
gaacactatgaaagggagacttattggggcaagctctggcaagagcacacctggaggaaggagaaggaggaaaaccaactgggtgcctagggagaagggcrgaggaaatgcagctgctgttgacggcagccggctgcatggagaggggctttgccagtggtgaaacccgattccatttccaacttgtggaatcgtatttta

SEQ ID NO: 136654 - DNA, 201 bp, Homo sapiens
aaatcactttaatctcagccattttcaaagctgaggtggaggtgaaataaatgaattgaggtgatagcacagccatgttggtttcaagacgtggagccagrtgaccttcccattgtcttctcttctgctgtgaaatcccctggaaacggaaccctgcactgtgtggttctgtttttcacagtattcattgctttttttttt

SEQ ID NO: 136655 - DNA, 201 bp, Homo sapiens
tgagaccaaaatatgatcatttagttttcactggaatgttattaatttggcccttgagacttaagatttgtatttgaaagtgggaaagagataaaggcctycaaatgtctcctgagcattgacacagaaagtgatcagttttttctaactgcttggtttatcttggatctgggcggaatgagtgcacacagcagcccctca

SEQ ID NO: 136656 - DNA, 201 bp, Homo sapiens
tttttaataacatggagagatgctcatgatataatgttgagttaattttaaaaagctccacatcaggttgcgtgtgcaatatgctctgttttccaaaatawgaaggcaatatgcatagaataagactggaacgaaatttgccaaaatattagcagtgattgttttttgatgatgaaaatatctatgattattttctttatt

SEQ ID NO: 136657 - DNA, 201 bp, Homo sapiens
gtcagggagaaagatgcacaaagatgaggtgcagaaagtgctgccccagaggctggccagggtgcaaggggccacagggcttcccccttgggctgcctgaygcatcagggtaggaacgccctgcagaccttggtctggccttgaaggatagaccgtgctttgctgaatggaggagggaagggacagcattcctataagagg

SEQ ID NO: 136658 - DNA, 201 bp, Homo sapiens
ttacattttgaaagtacacaaaacataacattcaatatcaggattaagatttattacataagtgagacaaaccttctattaaaagtggaaggctctcagaytggatgaaaaataacacccaaccatacaatatatatttcaaaaatgcacatttttcccaggaagatgctggagacatactcatccctattccttctgcta

SEQ ID NO: 136659 - DNA, 201 bp, Homo sapiens
aacagaagactcctcctgccaggcagcacagaaaaatatgtggtcccaccttcacccatgccaggaaaggcccagtggggagtgcagactccacactcacragactacaatgaggcaatgcaacctcaccactatggttgtcagaggaggcctagtagggagctggggttttcatctccacttggcagtaatgaggcctcc

SEQ ID NO: 136660 - DNA, 201 bp, Homo sapiens
acttctctccttttgatataaaatgtcagggagggaagaaaaggaatgaagagtgacaaagaaaggaagggcttttcaagagaacaaaccaactcatgatrcacacaaactcaccccatcctccaacataacaaccctctttactcccacgaatgaacagacaagttctgtttttctctttccaaatccattgacccatac

SEQ ID NO: 136661 - DNA, 201 bp, Homo sapiens
aggaatgaagagtgacaaagaaaggaagggcttttcaagagaacaaaccaactcatgatacacacaaactcaccccatcctccaacataacaaccctcttkactcccacgaatgaacagacaagttctgtttttctctttccaaatccattgacccatacgcaaagctggcactaattttttcgaaaccagatgttgcagc

SEQ ID NO: 136662 - DNA, 201 bp, Homo sapiens
tgctgtaaaatttacaaatattcagcaaagttgaaataattttacaggaagcatttatgtacaaaccatggagattctattaacctattactgtacctgcyatatcactatcatatctatggatctgtgtatggaactcacccatccattcaccttctctttttgatccatttcaaaataaactgtagacatcagcacatt

SEQ ID NO: 136663 - DNA, 201 bp, Homo sapiens
agaaatgaacgaaagagagagagaaaggacggaaggaaagcaggcagacaaggaaaggaattcctagaactaaaaagtgactcagcaaggttgcagatacraggtcaacgttcattcattgtatttctatatatagttgtcccaaggtatctgtgggggattgatttcaggatcaacactcagataccaaaatctagggag

SEQ ID NO: 136664 - DNA, 201 bp, Homo sapiens
atcttaagtgtacattcactgagttttgacacatgcataaacctatgtaaccaaactcatattaagatacagatcatcactccagaaagttctttcatgcsccttcttggtcaatctcactacgcagatacagccactcttctgatattttcccaccacagattagtttttctatactagaacttcacataaacagaacca

SEQ ID NO: 136665 - DNA, 201 bp, Homo sapiens
cacctgtagtcccggctactcgggaggctgaggcaggagaatggcgtgaacttgggaggcggagcttgcagtgagccgagattgcgccactgcagcccggmctgggcgaaagagcgacactccatctcaaaaaaaaaacaaaaaaaaaacaacaactatatagtatttgcatataacttatgcacaaagatacctactttg

SEQ ID NO: 136666 - DNA, 201 bp, Homo sapiens
tacattcactgagttttgacacatgcataaacctatgtaaccaaactcatattaagatacagatcatcactccagaaagttctttcatgccccttcttggwcaatctcactacgcagatacagccactcttctgatattttcccaccacagattagtttttctatactagaacttcacataaacagaaccaggcagtatgt

SEQ ID NO: 136667 - DNA, 201 bp, Homo sapiens
actcgggaggctgaggcaggagaatggcgtgaacttgggaggcggagcttgcagtgagccgagattgcgccactgcagcccggcctgggcgaaagagcgasactccatctcaaaaaaaaaacaaaaaaaaaacaacaactatatagtatttgcatataacttatgcacaaagatacctactttgtcatccctaaattactt

SEQ ID NO: 136668 - DNA, 201 bp, Homo sapiens
tgaggcaggagaatggcgtgaacttgggaggcggagcttgcagtgagccgagattgcgccactgcagcccggcctgggcgaaagagcgacactccatctcaaaaaaaaaacaaaaaaaaaacaacaactatatagtatttgcatataacttatgcacaaagatacctactttgtcatccctaaattacttactatatgtaa

SEQ ID NO: 136669 - DNA, 201 bp, Homo sapiens
gaagagtttgtatagaattgaattatctgttccttgactatttggtacaaatataatgataaggctaaacagaccttgtggtttctttctaagaacatataaaatgattggttttgtttctttccttgatataagctattcaggttttctgttcttgagtctgttttgctaatttttattttcctagtaatttgttcattt

SEQ ID NO: 136670 - DNA, 201 bp, Homo sapiens
ttgaaaaattaaattttggaatgtactaacatttcaataaatggagtattgcctgtatatagtgctattagtggtagttattatttatagaatttttcctrtcacacaataggcacacgcatacacacacagagataagaacacacaaatacataaaaattgcttcatccttacattaattctgtgagaaagtaataaatt

SEQ ID NO: 136671 - DNA, 201 bp, Homo sapiens
tataaaaataaaaattgggctgctactctaagcagtggtgggaataggtcatggctgtctatcagtcttgctttatccaagcgtacggttttggccttcarttccctggctttcatttaaaccaagatccatgtcatggaggcaggaaggttcagggcctgggaaacagcgaggaaccaagtgatttgcccagaaggagtg

SEQ ID NO: 136672 - DNA, 201 bp, Homo sapiens
tatgtttttagaggaatgtgaatcattaaggatgattaggatgggctatgatggccaagctccaagacagtcttcaacgatccctgcctcctgtagtcacrccctcatggagtgcccacattatatcgttgaaattgtcttagtctctgtctctctgtctctgtctttctctctctctctctctggaagccatgtcatgag

SEQ ID NO: 136673 - DNA, 201 bp, Homo sapiens
tatatcgttgaaattgtcttagtctctgtctctctgtctctgtctttctctctctctctctctggaagccatgtcatgagcagcccatgttgcaaataackgaaacttatgaatgcacttggaagtgtttcctgtagccctaaccaaagcttcagagactgcaagcctgggacagacagccagcaactggactgtcatctc

SEQ ID NO: 136674 - DNA, 201 bp, Homo sapiens
ttcagcctcccaaagtgctgggagccaccgtgccaggcctcatgctttttttttttaaacttttattctaggttcagggttacatttgcaggtttgtcatrtaggttatttgtgtgttatgggggtttggtttacagctaatttcatcacccagctaatagcatagtcctcaataggtagtttttttatcctcacctcctc

SEQ ID NO: 136675 - DNA, 201 bp, Homo sapiens
gcccgagcgtggctgcgggtgctgcctggccgtgtggctgctctgcttcgtctattctttatttttgcagtttgtccttgagcaggtggatttttgttagyggggtttcctgacccagggttgctggttggaggtggccaatgtctggaatgacagatgcaggggcggggtgtattggaggatgccctgcttttccttctg

SEQ ID NO: 136676 - DNA, 201 bp, Homo sapiens
gaattacaatatttttcaaccaatatttccatttaataatataatgtggttatctttctatgtcaataaaaacatgattgcatgaggttctgatgcttctrtgtttttagttatatggacaatgtcataatgaatatccttaacagtatggctttcagactttacatgctacaaaattgttctttataaatgttgaactaa

SEQ ID NO: 136677 - DNA, 201 bp, Homo sapiens
gtgttccactaagcagctggagtcatcttttaaaatcacaaatcatctgactccaaagcttagaatttatttttaactttacattgcacctaaactaacataaaataaatccccaagatggctgctgaggcccctgtgacttgacccctgtctgcccccaaaggcttctcttcaggcccctccccctcactcatcacctcc

SEQ ID NO: 136678 - DNA, 201 bp, Homo sapiens
ctgtgttggttcgcttaggataatggcctccagctccatccttgttgctgcaaaggacacaatctcattcctttttatggcagtgtagaattccatggtgyatatgtaccacattttctttatccagtctattattgatgggcatttaggttgattttatgtctttgctattgtaaatagtgctgccatgaacatacgcgt

SEQ ID NO: 136679 - DNA, 201 bp, Homo sapiens
aagcccttcactgtctgcctccatcccccacccccagctagtccacctccctctctctctctctctctctctctctgtctctcgccacctatggtctgtgytccactaagcagctggagtcatcttttaaaatcacaaatcatctgactccaaagcttagaatttatttttaactttacattgcacctaaactaacataaa

SEQ ID NO: 136680 - DNA, 201 bp, Homo sapiens
ctatttgtgctctcactctcaaccctggggcccaccggcattgtgaatactcagcatttcaagtctcatccctggggaaggctgtgtgtattgtaaatccygtatcaatgcagtcgttgttggcattgtttaggcatgtatcagagccacacacacttccagactgtgtgtcaaaaggtcccagaaaactgcatttctgtg

SEQ ID NO: 136681 - DNA, 201 bp, Homo sapiens
cagccctcagcaagcccttcactgtctgcctccatcccccacccccagctagtccacctccctctctctctctctctctctctctctgtctctcgccacckatggtctgtgttccactaagcagctggagtcatcttttaaaatcacaaatcatctgactccaaagcttagaatttatttttaactttacattgcacctaa

SEQ ID NO: 136682 - DNA, 201 bp, Homo sapiens
ctgtttggaggctcactggccacaatggcaaatgtgtggtgggtgagcttcctggcggggatgtattctctcctgctcccaggggcacatgccagcactcwccagcgctggggctcgcatctcttccagcaaggccaggccaggctctgagtgcatctgtgtcatgctggagtccctgcaagccctgtgcttgcccaggtg

SEQ ID NO: 136683 - DNA, 201 bp, Homo sapiens
tattttatttgttgtcatgacctatggtttcactataatatgtataaatataaatttggttgtatttttcctatttggattcatttgaggttagtaagtaygtggatttgtgtcactaacaattctgtaacattttaggccactcattttgaatattgttttccatgttctttgcattatctccttctaggcgtattaggc

SEQ ID NO: 136684 - DNA, 201 bp, Homo sapiens
gcaagccctgtgcttgcccaggtgaccctccccttattcattggccacaagaggcaaagtagccagtgagtcattcgagcccatagcatctgtctccagarcccacaccctgagccactgtgctctcttggccctcagccaccttggagagctgccactgccccttgccgtcctcctggccacagaagactcctcctccag

SEQ ID NO: 136685 - DNA, 201 bp, Homo sapiens
agtgatgttgagcattttttcatatgcttgctagctgcatgtatgtcttctttgaaaagtgtctgttcatgtcctttgcccactttttaacagaattgttyggtttttacttgttaattgtttaagttccttctggatgttagacctttgttgaatgcatagttggcaaatattttctcccattctgtaggttgtctgttt

SEQ ID NO: 136686 - DNA, 201 bp, Homo sapiens
tcttagaagacgaaacacatgcttaccatacagcccagaaattacactcttgggtatttatccccccaaaaatgaaaacttgtgttcacacaaaaacttgyatattaatgtacgtagctgctttgttcagaataacaaaaaatctggaaacaaacccaattttcctttaatgggtaaatgattaaggaaactgtggtatgt

SEQ ID NO: 136687 - DNA, 201 bp, Homo sapiens
aacacatgcttaccatacagcccagaaattacactcttgggtatttatccccccaaaaatgaaaacttgtgttcacacaaaaacttgtatattaatgtacrtagctgctttgttcagaataacaaaaaatctggaaacaaacccaattttcctttaatgggtaaatgattaaggaaactgtggtatgtgcataccatgaaa

SEQ ID NO: 136688 - DNA, 201 bp, Homo sapiens
tggtagctgctagatctagaggaactcagaagtgccattgatgatggacccagacagagaaaatccagtgctggtcggtttgtactgctctgagacattgwgggtagggacagggaacagagagtgatagcagccattctgtgtttgttacgtttttaaaaaccaatacagcggtctgaatggcagatgttttacaacaat

SEQ ID NO: 136689 - DNA, 201 bp, Homo sapiens
tgtacgtagctgctttgttcagaataacaaaaaatctggaaacaaacccaattttcctttaatgggtaaatgattaaggaaactgtggtatgtgcataccrtgaaatatatattcttttgcaatgagaaagaatgcactattgatacattcacatggggaatcaccaaaaaattttgctgagtggaagaaaaaaataccaa

SEQ ID NO: 136690 - DNA, 201 bp, Homo sapiens
agaaatcccagaaactgcatagttctatgagaattttaactcatctcttaccaagccatgaaaaaactttgaatgataaaaataaagttgagtaacggacrtatattgaatttggttcctgacaacagatactgcatcttctttacagagtctcataaaacttacaaaaatggatcatatattaatctataatgaaaacct

SEQ ID NO: 136691 - DNA, 201 bp, Homo sapiens
ctgtagatacagctgaaaacagaacttaaccctttgaacgtagccactgggttgatgcagctcacaaacccacaggatttccttttcctacagagactccrctctacttgggtcaccacggagagtccatgtcaccatgttatctcaaagttacaaaggtcagaccctctactgacattgagcctgtgcattaccggaaac

SEQ ID NO: 136692 - DNA, 201 bp, Homo sapiens
ccatttgtcttgacagtagtgctagaggttggtggcatggatttcaatctgtgtgagtcttaaatccttctactttcccattacttgggctggtgattatmtaaagtcatggctacgcctggaggacagggaggaaaagcaaagatctcatttgaacttaaggtacttttgtggtttgcttaggaggaggaaattgcagat

SEQ ID NO: 136693 - DNA, 201 bp, Homo sapiens
cgtgcttgtaatcccagctactcaagaggctgaggcaggagaattgcttgaacccgggaggtggaggttgcagtgagccgcgattgcactactgcactccagactgggtgacagagtgagaaaaacaaacaaacaaacaaacaaacaaacaaaaaacagaactagaccagccaagcaattttgaaaaagaacagagttgga

SEQ ID NO: 136694 - DNA, 201 bp, Homo sapiens
caaggaggaagttagcagctgtctgttgtacatgagcttgcctctttaggctccagcccccacgttctgtgctctgctctccccaggagacatcctagcacatgtggtttccccctgctgtgtttccagagatgtttgtctccaggctgtccttataacctttaaggtgttaagtgcagagcaattaacaaatatcatgga

SEQ ID NO: 136695 - DNA, 201 bp, Homo sapiens
cctgcaggtctctgttgagccacggatgtgggtctctgttttgcaggatggggtttgttaaagttgttaagaataaggcctactttaagagataccaagtraaatttagaagacgacaagagggtaaaactggttactatgctcggaaatacttggagatacaggataaaaataaatacaacacacccaaatataggatag

SEQ ID NO: 136696 - DNA, 201 bp, Homo sapiens
atagagatctacctcattcatttttttacagccacagaataatctatgttatggatatactgtagcttactccacccctctcttgtgtatttaatccttcytcccaacatttggtcattacaaacaacgttacagtgaataaccttattatataaattttagtgttgtttgaattatatcttcagggtaggtttctagaaa

SEQ ID NO: 136697 - DNA, 201 bp, Homo sapiens
ctacctcattcatttttttacagccacagaataatctatgttatggatatactgtagcttactccacccctctcttgtgtatttaatccttcttcccaacmtttggtcattacaaacaacgttacagtgaataaccttattatataaattttagtgttgtttgaattatatcttcagggtaggtttctagaaatgttgttg

SEQ ID NO: 136698 - DNA, 201 bp, Homo sapiens
ctgctgcagacacagagggggcaggattgcctcagagccggaggggctcttgtgtggcaacagaggacttgaggcccaaaggaggcctgattttgtttgcrtgcatatgcagtggtgcttcagctgttagctctcctttattcaaatgaacagcgttcagggtgagaccatcctcccgcatgtgagcatgcaagtatgcat

SEQ ID NO: 136699 - DNA, 201 bp, Homo sapiens
gagagaatagcatagaaaaaggattagccaaatattttttaaatttttatcaataatgacagcacataaattcaagattctagcaggagaggatgaaaaayaaacaaatataaaaataagagcccattatagtataattgctgaaaactaaaaataaagaataaatcttaaaagttagaagagaacaaagaacattagatg

SEQ ID NO: 136700 - DNA, 201 bp, Homo sapiens
catttgtgatatttcaggataattatatctatttttaaattttgtttttaattttacaagtgatagatggagcacattcttattataaacctcagagcccmccttgtcccctccactctgccccttgcagaggccagcactgccatggatttaatgtgtgtgtttccagacgatttacatgcatttatgtgtgtgtttgca

SEQ ID NO: 136701 - DNA, 201 bp, Homo sapiens
cagtccactttttggccctgtgccttgtgaataatccagctcaccccattggatctctgaggtatatgggctgctggtttcatcctgagcagcctcgtatycaggctgtcaggctgttgtctccctggagcgtcctggccagccagcctcactgtgatcaggcacctgttggcccaggttttctagcaagtgggttgatgt

SEQ ID NO: 136702 - DNA, 201 bp, Homo sapiens
ggcattactgctagtttcacaactcatgtgacttgtgggtgtgtttccctgggggtgcacctaggctagagcttctccaatttctgtttttcctccctctyctgcttcttcttcactagtgaggacaagctaaagccactcagatcccttcactcaggcacagaagtgacactatgcttagaagagcccctgagtatatat

SEQ ID NO: 136703 - DNA, 201 bp, Homo sapiens
aaaaaaaaaaaaaaaaaaatagactgaaaaatccaaaagcacagtgggctcctgctcagccctaggcgggactcgaagctcgtctggaacagtcctccagscaaagtgggcaccaggcaagcagcagactggtgcgagcagagacagtcattcgggggtctcccctccaacctggatgctgcagagttactattcattgga

SEQ ID NO: 136704 - DNA, 201 bp, Homo sapiens
agccctgaaggttatgtgatttccctgagcaccccccccaactggttggtaacagggcaggactaaaacccaagttccctgattctgagatgggtgggacrcattccattccttagggccagactgccctaaggagcacctggggtttatggcctccagagttctcattcacagcccatgtactttatgtgagtgtggttt

SEQ ID NO: 136705 - DNA, 201 bp, Homo sapiens
ccatttgtttatcttggcactcttgaggaaaaatcaatggaaataaatataaggatatatttctagactctcaattctattccattgatctatatgtctaycctatgccagtatcaccttttctcaattactgtagctgtgtatcaagttttccaattgagaagtgtgagtctttcaacattattcttttttttcaagatt

SEQ ID NO: 136706 - DNA, 201 bp, Homo sapiens
ttgatgatgaaaatatctatgattattttctttattttactccagggttttctcctcttctacaatgaatgtgcatagcttccatattcaggaaaaaaaawtaaaaataaggaagaaacagaagccctgaaggttatgtgatttccctgagcaccccccccaactggttggtaacagggcaggactaaaacccaagttccc

SEQ ID NO: 136707 - DNA, 201 bp, Homo sapiens
tctagctgagacgcagaggttggtagaaggtcatttgcatgtgttgggcggaagcccagagggatacaaaaagaaggaaaaacggagttttaaatttggcrcaaatggctaaattctgtgtgtgccccggcgaatcaccccctggacactcatagccccctcagcaccccagtgaggaccctcctcctggccgagtgaaac

SEQ ID NO: 136708 - DNA, 201 bp, Homo sapiens
accaaaacaacaaaatcttgacaaataccacttgacaagactgacttacagacaaccagtactaaaaacccaaaccactggaaatgcatatggcttttccyggtgggacagaaaattcaggtgcccatttagttaactgagctctgggaaggcctgaatgaacactgctccctggctgctttcagggctttatttgtccta

SEQ ID NO: 136709 - DNA, 201 bp, Homo sapiens
ttcccttcctgcttcctatctgtgactttgcagcactggtttcacattttgtgcttttatccagtataagatttccatttgtgtgtgctgtggggttgtcrcctaaatagcctttttgtttttgttttgaggtggagtcttgctctgttgcccaggctggagtgcaatggtgccatctcagctcactgcaacctctacctc

SEQ ID NO: 136710 - DNA, 201 bp, Homo sapiens
aactgtgcctgcggccccaggtgatgttgctaaattatacatgggtagaggctttcagcagcgctgtttttccaccggagcacaaagcactgtgttacagsagggattttacatgtggatctccaggccccgcagaaaccgcagagctgcagggaagcaagtaactatttaactgagagggcacgtcagggtgtgagttaa

SEQ ID NO: 136711 - DNA, 201 bp, Homo sapiens
aaggttgatgacataaaacaacaaaaaattattctttcatagttttagaggtcagaagtctgaaatcggtatcactgatccaaaatcaaggtgttggcagsattgcgctacctttggaggcttcagagaataatccattccttgcttctttcaggctctggttgcttctggcattccttgactgtggccaactcgttccag

SEQ ID NO: 136712 - DNA, 201 bp, Homo sapiens
attctgttttctcattggtaattttttaaatctcatcctaatttctgaacgatcatttacacgatatataattctggattgacagttgttactttcagtamttgaaaaatctttctggtctctacagtttctgatgagaaattcaatcattcagattgtttttctcctagaggtaatgcgtcagtttttcttcagctgctt

SEQ ID NO: 136713 - DNA, 201 bp, Homo sapiens
agtttttcttcagctgctttcaagaatttttctttgtttttagattccagatgtttgattatgatgtgtctaggcataaatttctttgtgtttatcctgtytggggttcactaaacttctgaaacctgcacatttgtggggttttgccagatttagggagtcttttgacattatatcttcaagtactgccttctttctcct

SEQ ID NO: 136714 - DNA, 201 bp, Homo sapiens
aagtggaggcttcagctcttaagctgctcgggcaatttccattgccaagagcagtctaaggtcaacttggagcattaagaaatggatgcacactctgaagygcatttgattacctattgactcatgatgttcaacctcagtgacgggaacctggagaatgttggggttctgcatttatctccttgctcacacatggtggtc

SEQ ID NO: 136715 - DNA, 201 bp, Homo sapiens
gcaggctatgtacctggttatgtttgggctgcaaatttcaatgcaccttctgttgattgtgattccaatgtcggtttggccctcaaaccttttgcagcacyatttagctatgttccgtgtatgcaccactaacaggccagtctggcatctgaattctcatctgtttactagttcagttatcaaggcctttttttaaaagct

SEQ ID NO: 136716 - DNA, 201 bp, Homo sapiens
cactaacaggccagtctggcatctgaattctcatctgtttactagttcagttatcaaggcctttttttaaaagctgtacatgtatttgtttacttattttwaaagtttttataaatttatggagtacagtgcaattttgttaatacatgcatatattgcatagtggtaaattcatggatattagggttattccttgggtat

SEQ ID NO: 136717 - DNA, 201 bp, Homo sapiens
ggcacatgggcgtttcttgtttgccacgcttaattctctgtttcctgctttaagttctattctgcaaggacctttccttccaggtgcaggctggctttccrtgaccttgaagcagctcttgggccctggatgctcacctcttttctctgctcaccggcctttggtctttcttccctctatcctgtgttttctcctaccatt

SEQ ID NO: 136718 - DNA, 201 bp, Homo sapiens
atttagttcccacttataagtgagaacatgtaatatttgtctttctgtgtctgttcaaagtcttttgtatgctaattagcatgaaatccatgcatgaaggyctcaggctgcattcaacatttcgtaaacaactttctggggctgctttcccaagtcctgcctctccatgaccatcctgatactttctggttccctcgggct

SEQ ID NO: 136719 - DNA, 201 bp, Homo sapiens
atttcgtaaacaactttctggggctgctttcccaagtcctgcctctccatgaccatcctgatactttctggttccctcgggcttcctctcctcatcctccrgccagaaagctgaggtttagttatcctactctgctgcacatgcttccagggacatgagcagcatgaggaaaaagagttaaactcactgccagttttggag

SEQ ID NO: 136720 - DNA, 201 bp, Homo sapiens
tgctgcaatcccatcctttcacaactgtgtcttggagctaaaagacccctattttggaagccattcctattgagagacacctcctgtctaatccacaactraatattttacgcctctgtaagactctttcaaaatacaaattatctgtaagagctaagttgaaactaaatatctgtcattaaaatgtgttatttttgaagc

SEQ ID NO: 136721 - DNA, 201 bp, Homo sapiens
ttggaaggcaaatggctagccagcatttttagctctggaaatgaagttacctcccgctcctggattttggtaaaaatcgtgtctgttgattccctctagcyggaggcagtttgggcccaaaaccaaggaagaggtgaagatcattgagcaccaaacacagaccctgcggctgatgccccacctggccacagccttggccct

SEQ ID NO: 136722 - DNA, 201 bp, Homo sapiens
gcttgaacccgggaggcggaggttgcagtgagccgagattgcactgctgcacgccagcctaggcaacagagtgagacaccatctcaaataataatattaakaagaagaataagatggtcttgtcaggaaatccttccatctctccctccctgtgtctggctgtattgaacacccagtctgtgtgacacacacagtgtgcac

SEQ ID NO: 136723 - DNA, 201 bp, Homo sapiens
caaaggagagagcatatgattatattatggggaaaatatatttgatgaaatccaacatgagctgatgatgaaaagtctcagcagagcagaaatagaaaggratttcctcaatttttggagagtatatctacaaaagaacctacagctaacctcatacctaatagtgaaatattacacacttttctcctaaagacggaacaa

SEQ ID NO: 136724 - DNA, 201 bp, Homo sapiens
ttatttaacattgtattggagggcctagccagtgcaacgagacaggaaaaaagaaatagaagaatttaccaaactaatagctcaaaacagggctacaggayacaaactcaatatctaaaacgaattttgttttatatgttatcaaacaattggaaaataaaatttaatttacaatatcatctaaaaacatgagtttcttag

SEQ ID NO: 136725 - DNA, 201 bp, Homo sapiens
cttccctgcttgccagcaccttgggcagttaggtagtgtggttctggtttggttagtggtattgtagttgttactgttgtttaatccctgatattgtttcsctccttactggcaggtatctgaaacctctctccctgccgcttgcaaagacattcataagttttcttgaagttctgaaaagtgagtgggttttagtattct

SEQ ID NO: 136726 - DNA, 201 bp, Homo sapiens
ggactcgaagctcgtctggaacagtcctccaggcaaagtgggcaccaggcaagcagcagactggtgcgagcagagacagtcattcgggggtctcccctccmacctggatgctgcagagttactattcattggaataacatagatggtgtttgtttaaatacctcacagcaacccccgagacacgtacatttcactacagac

SEQ ID NO: 136727 - DNA, 201 bp, Homo sapiens
accggacgctgtgtagtctgggtggcttttgtggcagttgtgctgcttctgagcgtagctttctagagtgtgcgagtggtggctagatgtgctttgtttcrtgtgctgtgcatttcagtgctatgtgaggatccatctgaccccaatacattttatttgacatgcacagctgggttgctggaggatagttcaggccattaa

SEQ ID NO: 136728 - DNA, 201 bp, Homo sapiens
tgcctgtcagtaatgactcctttccctgccacaatacagtcagaccagatgcttaaataagatctagagtctcacaatataacatgaaaatatacagtttyaaatgaaaatcactcactatatcaagaatcaggtatatctcaaactgaatgagtaaagaaaatcaataggtgctaacaccaaaataacagagatgttaga

SEQ ID NO: 136729 - DNA, 201 bp, Homo sapiens
gactcgaagctcgtctggaacagtcctccaggcaaagtgggcaccaggcaagcagcagactggtgcgagcagagacagtcattcgggggtctcccctccamcctggatgctgcagagttactattcattggaataacatagatggtgtttgtttaaatacctcacagcaacccccgagacacgtacatttcactacagacc

SEQ ID NO: 136730 - DNA, 201 bp, Homo sapiens
tttctatatgacaattaaaggtcaaattgcaaagttgaatcagttatagctctgcgtttaggatacgttcaacctgagctgattttatctgcctgggcttygtaaaatgttagtatttgcatagtgagtttaaaaacagaaaccttttgcataaccatatttgaaaaatccaaaacaaagagaaagagaatggactgatga

SEQ ID NO: 136731 - DNA, 201 bp, Homo sapiens
aacagtgaaataattagctcaccccaggcagcctcagctataatttatggctccatgtctcccattttaactttgttttgcattcattagtatacaatttwaaaaaaaatctcaaggaatcacagttctgacgactaacattaaccactctgtcactcacagatattgctaaggctatcattctgaaaagtaaattaattt

SEQ ID NO: 136732 - DNA, 201 bp, Homo sapiens
acagagagatgtttgtaaccagaacagagagtcagatgtaacaagctgactctgggctgcgttgcaaacacatgtactttccctatggcgttagctgattygatttagttatggaacaaaatacaaatgttatttctttaaaatatcacggtgccaggcagagtatatttccttacacctttttctgagtttcttaagccc

SEQ ID NO: 136733 - DNA, 201 bp, Homo sapiens
ggtgtgtgagcctgtggtagcagtctgctgcctgacatttgcttcataaggcgttgctagccacatctgtcctcagctgtgagagtgtctgtatgcaccarcaggctgaacagagagatgtttgtaaccagaacagagagtcagatgtaacaagctgactctgggctgcgttgcaaacacatgtactttccctatggcgtt

SEQ ID NO: 136734 - DNA, 201 bp, Homo sapiens
attggggtgactgtgattgggttagttagtggctccgtagagaagagtaggttacatgagcagacttaggactttattaccaaggatgggaggaagagggkttgggccaacaactggaaatcttgctacacgtttaaaaaatatttttattatggaaaattttaaacacgagggagagtagcatagtggattccctattat

SEQ ID NO: 136735 - DNA, 201 bp, Homo sapiens
cttcatctctcattggccagataaacccatccgtccattcctaaggccatcaaaggcaagaagcattggggtgactgtgattgggttagttagtggctccrtagagaagagtaggttacatgagcagacttaggactttattaccaaggatgggaggaagaggggttgggccaacaactggaaatcttgctacacgtttaa

SEQ ID NO: 136736 - DNA, 201 bp, Homo sapiens
tttcagggtggttatttcaggggctccgtgacacctcaaggaccagagtggctttgatctttcttctctgcaactcaacatgtcagttttgtctttgaccractcactcatggtcacaatatggctgctgaggttcttgctctcacatatagatgtagaagattgagaaaagggggacccgtgttttcccatatgtcattt

SEQ ID NO: 136737 - DNA, 201 bp, Homo sapiens
tttagataggaagtggattgttttctctcttaatgattcctgaagtggggcagtttcagggtggttatttcaggggctccgtgacacctcaaggaccagastggctttgatctttcttctctgcaactcaacatgtcagttttgtctttgaccgactcactcatggtcacaatatggctgctgaggttcttgctctcacat

SEQ ID NO: 136738 - DNA, 201 bp, Homo sapiens
accacatctccatgaaggaggcaggatgtggaggttccacaccaggtggacttggggattcaaactcaggcctctgactcccagcagaagacttttccccraagtgtgtcaccaacaccacccagggtgctgggatggttccctagggctcagagccttgattcagccccagcccccaaggagggtgtttgtttgctctcc

SEQ ID NO: 136739 - DNA, 201 bp, Homo sapiens
ctggttgcagggatacctgcaaacaagtttgcaccctaagaagtctcagagtccagggtgaggcttagccccaaagctcctctcctttgaagttgactggwtgcaatggtactgcagagcaggaaacatgggaagtaattatctttttagtaggtcactggcctcctttgggagaagagaccagagggagaggggagaagg

SEQ ID NO: 136740 - DNA, 201 bp, Homo sapiens
ctcctcctatacctgtggttctaaactatggtgattttgcctccagagacattcagtgacatttttggttgtccaaacttggggaggttactactgactgkcagctacggtggagaggccagggatgctgttaaccatcccaaaatgcttggttcggctgctcacaacaaagaattatctggcccaaaatgggaaaagtgc

SEQ ID NO: 136741 - DNA, 201 bp, Homo sapiens
atggattgacgaaggcagcaaagcctagcagtcacactgaagcagctccctgccgtcaaccaaccacatttgcaccctgattaaaaactggaaacgttaaragacttgaagatttctgctctctgcacctgcttaactcttcctcttgcccttactaaattttagctgctttctttttggctaatttcacaatgttcaaaa

SEQ ID NO: 136742 - DNA, 201 bp, Homo sapiens
agagacttcaaaggggcacatggacttgtcaggaataaaaacagaaatgtcattctgacaatacttccagaaaaaaaaatgtgatttggggccaggagtgrtggctcatacctgcaatcctagcactttgggaggccaagggggaaggatcgcttgagcccaggagttcaagaccagcctgggcaagatggcaagacccca

SEQ ID NO: 136743 - DNA, 201 bp, Homo sapiens
tctgtaaacttttgatatggacttcattcactccgcatgatgtctttgagattcagccaagtggttgcattcatcaacagtgaatcattttcattgctgartactggtccgttgtgtggattagcagagtttgtttttccattcaccctttgaaggacatttgggttatgtccagtttttgacaattgtgagtagagctgc

SEQ ID NO: 136744 - DNA, 201 bp, Homo sapiens
atagtatgctgtcttcaagaaacccatctcacatgcaatgacacccataggctcaaaatgaagggatggtgaaaaatctaccaagcaaatggaaaacaggaaaaaaaaaaaaaaaagcagaggtggcaatcctaatttcagacaaaacatactttaaaccaacaaaaattttaaagacaaagaaggacattacacaatgat

SEQ ID NO: 136745 - DNA, 201 bp, Homo sapiens
tacattcatctcatggctacatggcacatactctaaaattgaccacacagtcaggcataaaacaacactcagccaattcaaaaacactgaaatcataccarccatgctcttggaccacagagcaataaaagtagaaatcaagactaagaaaattcctcaaaaccatataattacatggaaattaaacaacctgctctgaat

SEQ ID NO: 136746 - DNA, 201 bp, Homo sapiens
aatgaaattaaggcagatttcaagaagttctttgaaactaatgagaacagagatacaatacagcagaatctctgggacacaggtaaggtagtgttaagagygaaatttatatcactaaatgcccacatcacaaagttggaaagatctgaaaataattacccaacattacaactagaggaactaaagaagcaagagcaaacc

SEQ ID NO: 136747 - DNA, 201 bp, Homo sapiens
ttcttatacttcctttcttaatcagattactagaagagaaaatttggacccaggcacggtggctcacgcctgtaatcccagcactttgggaggccgaggcrggtggatcacaaggtcaagagatcgagaccatcctggccaacatggtgaaaccccgtctctactaaaaatacaaaaacttagctgggcatggtggcgtga

SEQ ID NO: 136748 - DNA, 201 bp, Homo sapiens
atattccattaaataagtttccagagagcttgaatcaagtctcagctaacttgaattcagctgatgtagacctatcagctgacaagactttacaaacttgwaaatgacaaaacatgtcaggtgacttaaccaagagtcataaagaactccttggggagttcaaggtaggccatataaacaagatgactttaaaataaattt

SEQ ID NO: 136749 - DNA, 201 bp, Homo sapiens
tgtctgctttgtcctgcaggtatgctggggccctcctggatgaggatgtcttccagggaaaggagctggtcaacagtcgctcgctgcaggctctggtggcrgggctgaaggcctacagcacctgggagaacatccgctgcctgcaggactgccgcgagtgcactggaggcatggtgagccccaaggcctgcagcccccgtg

SEQ ID NO: 136750 - DNA, 201 bp, Homo sapiens
cgtgggctagaggagaaccaggtaggttacatatgaaataaggttggttgtgagttaaaatttcttgagttttggggaaggatatatgggagttcgttatrctatttgttctacttttgtatatgctttaaatttttcatagaattcttttaaaaaataaaacctatactgcacatccaaaacatggccattttacattag

SEQ ID NO: 136751 - DNA, 201 bp, Homo sapiens
ctttgaattttatctttttggtttaagaaaaccacttatacatagtgagtcagattcttctactaggaagggtattttgaaagagtatgtaaggccccagragatgaacaagcaaaaggcatgaaaacccagtttacaaaagaacggcaatggatcagcctcctaatgatcaaggaaatgcatattagactattcggcaat

SEQ ID NO: 136752 - DNA, 201 bp, Homo sapiens
gaaaaagagaacggaccagccttctggtccacggaaggcaagcaggttttactaaagtgtcagctaaaacagttggtcccaggaccagtgttagagactgmtacaggcaagaagggagagcaagcaataagtagttaatgaagttggccacaggggaggatgggggatggtgtgataaatgccccacatttgccttgggga

SEQ ID NO: 136753 - DNA, 201 bp, Homo sapiens
ggactacaggcacctgccaccacacctggttaacttttgtatttttagtagagacgaggtttcaccatgttggccaggctggtcttgaactcccgacctcmagtgatccattcgccttggcctcccaaagtgctgggattacaggattacaggcatgagccaccgcgcccagccttgaatagccattttctaatcctgtgt

SEQ ID NO: 136754 - DNA, 201 bp, Homo sapiens
ggaaagcaccttgtacttcaactctgacctgggctcagcatttcactgggtctcagagaccagacaagaatcctgcagctggcccccgaatccgggatacrgtcctgtctgggcacttctctttctccgtaggaaacaagctgggaactgtggacatcagggtgctctctgtatcctttctcccatattccctttttctca

SEQ ID NO: 136755 - DNA, 201 bp, Homo sapiens
gggctcagcatttcactgggtctcagagaccagacaagaatcctgcagctggcccccgaatccgggatacagtcctgtctgggcacttctctttctccgtrggaaacaagctgggaactgtggacatcagggtgctctctgtatcctttctcccatattccctttttctcatatgtagcaggatgttgagggagatttgtt

SEQ ID NO: 136756 - DNA, 201 bp, Homo sapiens
gacaaatgcatatgtcatataaccaccactagcatctggatataggacatttctgtcacccacaaagttcctttgtgcaactttgcagtcaatcccttccycatccccaactcctggaaactacttatctttctttcattgtaaatttgccttttctataatttaatagaaatggaacagcttaggtttgttcctctttat

SEQ ID NO: 136757 - DNA, 201 bp, Homo sapiens
tgtcacttccagcaaggccatgccaggctttgagtgcatctgagctgtgtgtcactggccacctgcacccagctccaggaggctgcagggcgtggccggcygccctctgcattaaggtctagttggaggcccaggtttcagttcttaagagtgatgcttgactgtaatgtttctgttaacctggattttggaatcctttgg

SEQ ID NO: 136758 - DNA, 201 bp, Homo sapiens
ccgctattggttcaggggccctcatgctgcaatcagcaccaccatagctgggaaggacagggatgaggttttagggaactgatcccccaggcttccattcrgttggcagctccaaatggacacagaagcttgtgaatcatgtgtgatgtggcagccttcctgctcagcagacatctgtggtaccctggttaaagccaagac

SEQ ID NO: 136759 - DNA, 201 bp, Homo sapiens
tttatcttttgggattatggcccaaacccatatatatacatgcacgtgcttgtggatatgtgcgtgtgcacacgaaggcacatgtgctacctggtaggatrtataatatagggagttagcaggggtggagaagtagggtgtctcttcttttcatgtcaatttttaaaccatacacatatattattttaatgttaaaaacta

SEQ ID NO: 136760 - DNA, 201 bp, Homo sapiens
atacgaaagttgaccctcagtagtggcctccatgactgtcccttctctgggcacacgccgtggtgctggtctgtaaagacgtgtgaaggtctcctctaacygtaccttccatgtgcagtcgtggccctcctcctctcacaacattccatggctcctttttacccagatcagctccgttgttggcttccgagtctttcattt

SEQ ID NO: 136761 - DNA, 201 bp, Homo sapiens
tgcataggcaattagagggttataatggttgccagcaatactctcgaagttaatgctgtctctgcacttggaggccgagccagaatttgaccttctgatgygttcattttgaccacttgacagcagaatggtgtgtagagcctatactgctcctaggtcagcccatctgggcgtgaggatcactgtgaagcccgcagttgg

SEQ ID NO: 136762 - DNA, 201 bp, Homo sapiens
atgtaataaatgggcaaaaaatactcgaactgattattcaccaaacaagatgcatagatggcaaataagaccatgaagggatgctcaccctcattagtcawtaaggaaatgcaaattaaggtagaatgagataccattacatatatgttaggatggcttaaaacttcaataccatcaaattgaccctcatcaaaacttccc

SEQ ID NO: 136763 - DNA, 201 bp, Homo sapiens
ctcacacgcacatgcacacacacacacgtgcacacacacacacacacacacacacaaaattcaaggtcagcaaaggaaaaagacacatgggctgaagtccrgaggaaaccagaagcaagtttccaagagtcctctctcaatggagtcatgcaggacatgcttaattcctccaacaacaaattgtgagaatacctgtgaaat

SEQ ID NO: 136764 - DNA, 201 bp, Homo sapiens
tcactcctcacgctgctgtctcctcacgctgagcttcctgccacatccaccccttgcttttgctatttcccatggaggattaacttcccttgtctctcgcygaccagtgaactcaccctccaacagcccccctttatcgtctccttttcagatctatcaaggaaccatgctccatgctcttttctgttgttgggtctcagg

SEQ ID NO: 136765 - DNA, 201 bp, Homo sapiens
gatctgaccacgcccctcccactaagaaggccccttgggcttccccgtgtagacagcagaatcctgacctttagcacgggattcagacctcactcctcacrctgctgtctcctcacgctgagcttcctgccacatccaccccttgcttttgctatttcccatggaggattaacttcccttgtctctcgccgaccagtgaac

SEQ ID NO: 136766 - DNA, 201 bp, Homo sapiens
ccacaactgacttctttctattggcttctcacctaagaaaggctaaatctggcatcctgttcaggcctgtgcccaaacctaatatgggagttatagtcacyggccccgtaagaggccctggcacccctcgagggctggacggggaaagagagagttggggaacctgcgtgtgatcgaactgctcacagtgtgaccgtcctg

SEQ ID NO: 136767 - DNA, 201 bp, Homo sapiens
ggtccacagagttgtgactcttaagcaaagtctaaatgcagttctttcccacaactgacttctttctattggcttctcacctaagaaaggctaaatctggyatcctgttcaggcctgtgcccaaacctaatatgggagttatagtcaccggccccgtaagaggccctggcacccctcgagggctggacggggaaagagaga

SEQ ID NO: 136768 - DNA, 201 bp, Homo sapiens
agaaggcaagagaggacgagattagcatttctgcacatgactctggatggcctccttcagcacaggggaggggagtggttgctaaaatagtaataatggtrctaccacatgacagtgcccacctcctctgggtgttgcgagggtttaacaagttagagcagagcagagctcacggtggaggccgtgagggctgtgctgctt

SEQ ID NO: 136769 - DNA, 201 bp, Homo sapiens
ccggatctcgtgaaccagcatccctcggggtgggaggcaggaatctgccttttatgaaacacgtgcttcaggccccagagccctgaactgggaggtcgccraggtctctctctcctgtgttatctgggagcgggattctcactgaccttgttcccttgtcctgccaccggcaggattttaagctgtgatcaggtgcagctc

SEQ ID NO: 136770 - DNA, 201 bp, Homo sapiens
tcaggccccagagccctgaactgggaggtcgccgaggtctctctctcctgtgttatctgggagcgggattctcactgaccttgttcccttgtcctgccacyggcaggattttaagctgtgatcaggtgcagctctaaacccaagcactgacactagcttgccacgtggctccgctccgtaacctgaaggcagcctctgagc

SEQ ID NO: 136771 - DNA, 201 bp, Homo sapiens
gtaatgctccatcttggaatctagacccaggcaactccagcgtggcaggttttttcttgaggaggggcaccacaggatacccacacccagagagaggcagrcagagaaatgaggtgggccagccacggtgccagggagggttctgggctgtgcaggtagagggagctcccccgaggtgcctgtggtgtgccatgcccaggg

SEQ ID NO: 136772 - DNA, 201 bp, Homo sapiens
gggctgtgcaggtagagggagctcccccgaggtgcctgtggtgtgccatgcccaggggccgggtcagcagactgggtcagagaggctggggtgcttccagyccaggctgaggcccgtccctctgggagggagggagcaggctgggcagacgggccaggcctgttccaggagcccgtctggggtagattgcatcacactgtg

SEQ ID NO: 136773 - DNA, 201 bp, Homo sapiens
gaggtgagaggattactcgagcctgggaggccaagattggagtgagctgtgatggcaccattgcactccaacctaggcaacagagtgagaccctgtctcartgataacaacaacaacaagactccatcaatgaaactcctgagattgaggaggctcctttctcccaccttcactgacattgggtatggcaaatctggttta

SEQ ID NO: 136774 - DNA, 201 bp, Homo sapiens
tcttttaatcagtgtaattattttgagatccattcatgtatcagtagttaattccttttcattgtagattcatattcagttgcatggatgtatcacagttwgtttacccctttacctgagggacattgggttttttttttattggggagctgtttccaataatgctgctatgaacatttgcatataagtcttttttaggga

SEQ ID NO: 136775 - DNA, 201 bp, Homo sapiens
ggtatgtcctggcctggggctgcagggtctttttgcattttatttgttttttttaatagtcaaaagcacatcctgtatgtgtagatacctttattagtgcttacgtggagtaacttagctaattctcaaattgagtgaatactattattagtcttactttacacaagaaggaaactgaggccagaaagattaaataatttg

SEQ ID NO: 136776 - DNA, 201 bp, Homo sapiens
atggaatagaatcacaatattgcctcagaccataggaccaatacagcagaaggtcctgagaagctgcggcttgctccatctctcagcctcctactgctgcrtgaaaaataaaccttgtaactatggagctgcccctcctgaatctgacatctactcagttatccttcggaaacaatcctgatgtggagcacccttcctcat

SEQ ID NO: 136777 - DNA, 201 bp, Homo sapiens
caaatattttctcccattctgtaggttgtctgtttactctgttgatagtttcttttgctgtgcaaatgctctttcatgtaattaggtctcatttgtcaacttttttttttttttttttacaattgctttggcatctttgtcatgaaatctgtgccaaggcctatgtccagaatggcatttcctaggttatcttccagggtt

SEQ ID NO: 136778 - DNA, 201 bp, Homo sapiens
tatccctcctaatgagcttcagttttggaaagggatctttgaggcatagggctaactttttaactcaaaaaaatatatatatatttaggccaggcacggtrgctcacgcctgtaatcccagcactttgggaggctgaggtgggtggatcatgaggtcaggagatagagaccatcctggctaacacggtgaaaccccatctc

SEQ ID NO: 136779 - DNA, 201 bp, Homo sapiens
agctgctatgtcaggtccagtccatgacaggggtggtacaaggaccttggcctcctgactcttggcaggttctctgtggtccagcttccacttgcctcccsaagcctttttgaaatgcattcactcaggctgtcatcttgtgttgcattctttgacattccatgatttggataatttctagtatccaaagatcttacacaa

SEQ ID NO: 136780 - DNA, 201 bp, Homo sapiens
ttgaactcttcaccaccattgagaatcatgtattctattctggggtggttggattgatagactgttgagggttgggaggaaaagaggtgatgagaaggtgsaaaagttatttgttgagttttctcaaggatctgaagggcactttgagaactctttcctggggccattttgtgtatttaatcacagtcaagtctactatca

SEQ ID NO: 136781 - DNA, 201 bp, Homo sapiens
ctgagccaccaaaaatgagtccaattagacactggcagttaggggtggggtcagctgcaggcagagagccctgcttggacagaggtccaggatgggaagcrtctgaaggggcttagtgggagaaaaggctggaacactcaagtcaagctatagcggactcttgaatgccaagctgaggcgtttttggattttattccctac

SEQ ID NO: 136782 - DNA, 201 bp, Homo sapiens
gctcagcagagactccgtgtccatggtttttattgggggctggtcatgtagacaccctctgcctagcacatatcaatgcagactttcagaagaaagcacaygttcagcataaaccacattatgtgctcaattggtttaggcacagtgagccacccttatcagtcaaggaatggtgggaatcttcccaaacccaagttccca

SEQ ID NO: 136783 - DNA, 201 bp, Homo sapiens
cacttgggagctggctggtaggccttcaaggggcctttcctcttcacttgaacttgttgtggttttttttcctttttcctcatactctgaggggtgcagtygtagccagctttgcacagggctttctgcaaagtttcccacctgaagtcccttcttcaggcaggggtctgcattgcacagccagttagttttctgtccctg

SEQ ID NO: 136784 - DNA, 201 bp, Homo sapiens
aatgccatgtacgggaattatgcagctgtctttgcccagctcatcatagatggaagatctcaaggtttgttaccaatacagacaactagaataattctctycattagtactatttaccagtgaaaaaccatttcacagagctgcttttatcttgtaaataattcagtactaactttatctcctaatatgcatgaagaaatt

SEQ ID NO: 136785 - DNA, 201 bp, Homo sapiens
aaatattaacaaattgaatctggtaatgcacaaaatgaattacacatggcaacctagtggaatttatctctgatatgcaagtatgcttcaacattcaaaartcaatcaaatgcaatccaccacatcaacagactaaaggcgaaaaagtcacatgatcatgtcagtttacacagaaaaagcatttgacaaagtccaacaacc

SEQ ID NO: 136786 - DNA, 201 bp, Homo sapiens
caagcccaggaaaaagttggcacattctgcgacaacgttctggttttctagtttgctcctagtttactgtccctgctacctcttctccaacttgtaaggaratagcttcataaaattggttggagcatgacaaaattttatgctgactacttccccccaacacacatcttttctttttctttttttttctctactaagggt

SEQ ID NO: 136787 - DNA, 201 bp, Homo sapiens
gctattttaagcaggtataaacaggagcctgttcaccttcatagatctttcttggatcagcctagtggcacttgctgcagttaactatgttggtagatttwttcccatatcccactggggtagacctacatctctcacctctgctcatctttaaaagttaaaacaaaccacagagtaacataggcaaagtacaataagtga

SEQ ID NO: 136788 - DNA, 201 bp, Homo sapiens
tgtttctcctcagtgcgttccagaatttcacaaagaagaacagaaacagccaaagcagggtgaaaaaaatatctacaaaattggagcgcagtgaagtctcraaaaagctctgcaacctagcacaatgataaggttatcagcaaacatgcactgatccctcctttcacgttagacgcagagctgctctttgctgcttggaga

SEQ ID NO: 136789 - DNA, 201 bp, Homo sapiens
tcttaaacccagagactatgtccaaactcatgctccaaaccattttgccatatgaaaattgagttgtgttggcttctgccctctctgcttcagaaaatagyagagtcctccttaatgggatgagcacagtttggctctaacttgtaattttccaactatctgaatttgggtaagtcctcacttcccaagcctcagtttcca

SEQ ID NO: 136790 - DNA, 201 bp, Homo sapiens
agcctgaatgtttatgtctttccatgattaatgtgtcaaaacctaccaagatgatggtataggaggtggggcctttgagaggtgattaggtcacgatcackctgccctcatgggtggggttagtgccttatcaaagagtgcttccttgcctcttacaccatatgcagactcagcaagaaagtgccatctgtgaacaaggaa

SEQ ID NO: 136791 - DNA, 201 bp, Homo sapiens
gcagggcctcgtaacatccaggtcctgagcctgagcactatattaaatgggagggcgaatcgctgcaaggtggaaaacaggatcaatgccacgcatgaggyaattgcagctgtcctatccattatcttcccaatttaagtgtgacactggagtccacagtgtttgtttcccaaaattggctgactcttgttccgctgatgg

SEQ ID NO: 136792 - DNA, 201 bp, Homo sapiens
ttaagttaatggctgatttttttccttaatttttgcatatagtgtaaggtatgggtcaaaattcactttgttgcatgtgggtatccaactgttccaggtcsctttattgaaaagaccatcattcctccatggaatggcctatgctcctttttgatgaccttttcaggccttttattgatcattgatctaatcagttttctc

SEQ ID NO: 136793 - DNA, 201 bp, Homo sapiens
tgtttctcatattaaggttcatttaccagtttctggctcagctttttctgggtagacccccactgatgtaatagtgccttttccacaacaactttgtgccrgtttccagtgtcccatccctccattcactctgtgtgagtctctgcagaaggcattccatgccctttttgtcactggttttttttttttttttttttttga

SEQ ID NO: 136794 - DNA, 201 bp, Homo sapiens
agcatacgcacacgaactgccaaaatatggtgtgaaggttggcctgacaaattatgctgcagagtattgtactggcctgctgctggcccgcaggcttctcrataggtttggcacagacaacatctatgaaggccaagtgtaggtgactggcaatgaatacaatgtggaaaacattgatggtcagccaagtgcctttacctg

SEQ ID NO: 136795 - DNA, 201 bp, Homo sapiens
gcctctgcctgcctctccagcatcatcttgggttactttcctaagcagtccattccagccataccagccttcttaacacacacaactctaagtgctatttyatgtttaggaatgagtaatacttcctatctgatttaaatgtattttattattacttcaataaccttgattttcaatatttatgaaaattgttcatacatg

SEQ ID NO: 136796 - DNA, 201 bp, Homo sapiens
ctaagcagtccattccagccataccagccttcttaacacacacaactctaagtgctattttatgtttaggaatgagtaatacttcctatctgatttaaatrtattttattattacttcaataaccttgattttcaatatttatgaaaattgttcatacatgctgcctttgaactagaaatttcttttctagaaatgtactt

SEQ ID NO: 136797 - DNA, 201 bp, Homo sapiens
ataatcaacaacctagttaaagtgccatattaattctaacgatctgtttgtagttcttttgggtttcctatgaagatagtcctatcacctgagaaaaatgwtagctttgtttcttcctttccaatcatttacatttgtttctttgcctatattatacaagtggcaagagtttccaatgccatggttaattaaaggaagtgg

SEQ ID NO: 136798 - DNA, 201 bp, Homo sapiens
agtatgtatattaaagaattgcattatttatcatagacacatatagtacacacttaaatattaggggaggttggttaaagaaaaagtagttaattcatgtsatggagtacaacgtggtgttacaaaaagtgaaaggatgggtaataggcactgtagaggaggcaaaattttacctctaccatcttaaggtttttcagctgg

SEQ ID NO: 136799 - DNA, 201 bp, Homo sapiens
catattaattctaacgatctgtttgtagttcttttgggtttcctatgaagatagtcctatcacctgagaaaaatgatagctttgtttcttcctttccaatmatttacatttgtttctttgcctatattatacaagtggcaagagtttccaatgccatggttaattaaaggaagtggttcataacaggcacctgtattttat

SEQ ID NO: 136800 - DNA, 201 bp, Homo sapiens
cttaaatattaggggaggttggttaaagaaaaagtagttaattcatgtgatggagtacaacgtggtgttacaaaaagtgaaaggatgggtaataggcactktagaggaggcaaaattttacctctaccatcttaaggtttttcagctgggcctgagaattatattgacataagacagattaacaggagcaaagcatgcaca

SEQ ID NO: 136801 - DNA, 201 bp, Homo sapiens
cactgtagaggaggcaaaattttacctctaccatcttaaggtttttcagctgggcctgagaattatattgacataagacagattaacaggagcaaagcatrcacatttatgtaagttttaagtaatatgggaactcttataaggagaagaagacccaaaaaagtggcaaaacccaaatgtttttatactaggtcgaacaaa

SEQ ID NO: 136802 - DNA, 201 bp, Homo sapiens
tccagaatcatctcccagaactgctgttcagctccagctggtctttattgagcccctcttgtggaccaggctaatttcctgaaaactggtttttgctaacrtttcttacgcttgctcgtgaaatcagccacttaactgttctgggttttcccgtggcagatccctataggcttctcactgcactatcccaaactttttatc

SEQ ID NO: 136803 - DNA, 201 bp, Homo sapiens
tatgtttaacattttgaggaactaccaaatattttttcagtgtagctgcaccattatatattctcaccaagcagtatgtatttcaatttctccacatactmgccatacttgctattatctgccttttataaccattctaatggatgtgcagtagtatctgattaggattttgatttacatttgcctaatgactaattatat

SEQ ID NO: 136804 - DNA, 201 bp, Homo sapiens
ttttgaggaactaccaaatattttttcagtgtagctgcaccattatatattctcaccaagcagtatgtatttcaatttctccacatactagccatacttgytattatctgccttttataaccattctaatggatgtgcagtagtatctgattaggattttgatttacatttgcctaatgactaattatattgaacatcttt

SEQ ID NO: 136805 - DNA, 201 bp, Homo sapiens
aactcacttcaaatgtaacaatataggcaggttaaatgtcaaagaatgaaaaaagacatatcgtgcaaagatttgccaaaaaaagaaggagtggctacttwaatttcatataaagtagactttggggaaaagtaaattttcagagataataaaaggactttcagtaatgattaaaagggtcaatccatcaagaagatacag

SEQ ID NO: 136806 - DNA, 201 bp, Homo sapiens
gagtttacaagtatgtctttcagactctctcaattatacaataaagctcctaggaagcttgagggcatcctctgtcagccttctcaacacccccaagggcytatgtcaaagagatttgtgggtgtggcttttgtctaatggaataaacctccccaaagattcacaggaaatgcacaaagtttctaagagaattatatcagg

SEQ ID NO: 136807 - DNA, 201 bp, Homo sapiens
ccagactcactgatcaaacagaaagggtcttgctatatatagttgagagctgcaggtcatcagagtgtgtctgtggtgatcaaaagaagctggagtttccrgggaatagatttctcagccctgctagaaaccaaaatctggcttctgttgagaccaaaatatgatcatttagttttcactggaatgttattaatttggccc

SEQ ID NO: 136808 - DNA, 201 bp, Homo sapiens
tgtatcattctaattttaatcctagttagagtgagttagttctacccaattttagttgcttaaatggaaaaagtggaaatagcggcagaagttaaaggagwttatcaaggaattggacgtattggatgagatagggagaacaggaagggaatgtacttattcatttactcaagggtgagtcctcgcctctgggctctgggc

SEQ ID NO: 136809 - DNA, 201 bp, Homo sapiens
agcctcagtaagggaggtcgctgcctctagagaaggctgcctggttcccagcaatgctcagccatcaaactcctccagaggagctgtccatggaggggtakgtgtcagcccccatatttctgccacaactaagaggaagctggcttcctcatcttcactgtaggtatctgagatgagagccacatttccctaccagactga

SEQ ID NO: 136810 - DNA, 201 bp, Homo sapiens
gtattagtttgtttcttttcattattgtagtattttactttatggatatagtagaatcattctcttatggatgaatagacacctgggatgtttgctgtttytcacttctgtgagtagaaccgctatgagcattcttgtataaccttttttgtgagcatatgtttttatttctcttaggcaattagtaggagtgaaactgct

SEQ ID NO: 136811 - DNA, 201 bp, Homo sapiens
ctagagaaggctgcctggttcccagcaatgctcagccatcaaactcctccagaggagctgtccatggaggggtaggtgtcagcccccatatttctgccacractaagaggaagctggcttcctcatcttcactgtaggtatctgagatgagagccacatttccctaccagactgaagctcagctggtgcaatctcctcttt

SEQ ID NO: 136812 - DNA, 201 bp, Homo sapiens
atggataacaaatattcctggaagtgctgggacaaaaggagcagaaataataatcacagacatagtagaaaaagaatttccttcatttccattatgctaayggaaaaaaaagacttatacttagacatagatgaaaaatctagaataaagagaacagaatgtgagcaacaagacagaaaataatagcttactcaaaaacag

SEQ ID NO: 136813 - DNA, 201 bp, Homo sapiens
cacatttccctaccagactgaagctcagctggtgcaatctcctctttccagggacctggtattttagtgccaggtcttccttccctaccaggaaggagcckgcccctcctatgtggggcccagggcagaattacaaagcaagcttacaacatgttgaagaaaatctactctgccctcctgccctgacaaatgtagctttgt

SEQ ID NO: 136814 - DNA, 201 bp, Homo sapiens
gaagtccagcttatctttgcttttggtatcatacctaaggaaccattgcctaatccaaggtcatgaggatttgctgctatgctatcttctaagagtgttayagttttaactcctgcattaggtctgtgatccattttgagttaattttgtgtatggtgtgaggaagggctcaaacttctttctttttcatgtgaatatcca

SEQ ID NO: 136815 - DNA, 201 bp, Homo sapiens
cattgaaaagactattctttcaccatttgtttatcttggcactcttgaggaaaaatcaatggaaataaatataaggatatatttctagactctcaattctwttccattgatctatatgtctatcctatgccagtatcaccttttctcaattactgtagctgtgtatcaagttttccaattgagaagtgtgagtctttcaac

SEQ ID NO: 136816 - DNA, 201 bp, Homo sapiens
cctcatctcttatggttgctatttatagatctttttttccatcattttactttcaacttatttgtatctttgaatctaaaatatgtcttttatctagagarttaggtgaaacttgtttttaaaatctagtatgacaatacctgcctttctatttgatgcttaattcacctacccagagaagaccttttgtcacactgagct

SEQ ID NO: 136817 - DNA, 201 bp, Homo sapiens
tgtaattgtgcacacatttaccatgtaatattttcttattcctcatagattattattaaattagtagtacatctttgagagatattttttaaagggagaaratatgacatatgtgttacgtattaacatctgtgcatggcctctctttctctctctttgtctctgttgtttatcgctctttatatggaagctaaataaatt

SEQ ID NO: 136818 - DNA, 201 bp, Homo sapiens
taaaggactgaattatttccctttaaaatcaggagtaaggcaacgatgtctgctcttgctactgctattcagtgtagtgctggaagttgtagccagtgcartaggcaagaaaaggaaatgaaaagcatatagattggaaaaggagtaataaaactgtttctatattcagatgacatgcttatttatgtagaaaaccccaag

SEQ ID NO: 136819 - DNA, 201 bp, Homo sapiens
aagagactttaaccctgaagctctttttacaacagttttagtgatgcagagtaagttagtgctttgtttgggaaaaagaaacaaaaagagtgctttttggkgaaaatttaaaatggctttcctagatcaaggatgagcagcatcgcaggtaattttagagactccagagttaatggtaatgactctaatgatgaagccttc

SEQ ID NO: 136820 - DNA, 201 bp, Homo sapiens
aagaatctgaaattggccaatatcagatccagggtgaccctactggtccttgtcagtcagggttataacactggctagaaatgacccactcaatggaaatrcagagccagggctgcaggtttatcctgggtggtgttgtctcctatctgaggggcttctgtggtctccacgggggtcatccctcagcttgtgggaggaggc

SEQ ID NO: 136821 - DNA, 201 bp, Homo sapiens
catggaatttgtaaaatgattatgttaatcagcctgggctgctgtaacaaaatgccatagactgggcggcttaagtaatagaaatttatttctcacagttytggagactgcaagtcaaaagtcaaggcactgacaggtctggtgagggcgcttttcctggccggcagatggctgacagccgccaccttgctgtgtcctcac

SEQ ID NO: 136822 - DNA, 201 bp, Homo sapiens
aaattcagatttctgcattctggagtctttggaaggcaaatggctagccagcatttttagctctggaaatgaagttacctcccgctcctggattttggtaraaatcgtgtctgttgattccctctagccggaggcagtttgggcccaaaaccaaggaagaggtgaagatcattgagcaccaaacacagaccctgcggctga

SEQ ID NO: 136823 - DNA, 201 bp, Homo sapiens
tttttagtggagtgagttttgacgcacatatactcttctcgtgtaataaacactaaagccaaatacaaaacatttccatcatccccaaaagttccctctgrcccctttgcagttgaccctcacctctccaccacagcagagccagttttctgatttctattcccaatagcttagttttgcctgttcttgaacttgatgtaa

SEQ ID NO: 136824 - DNA, 201 bp, Homo sapiens
tgaggcaggagaatcacttgagcttggggtgcagaggctgcagtgagccaagattgtgccactgcattccagcctgggcgacagagtgagactttgtctcaaaaaaaaagaaaaaaaaaagaatgctagaaaatagctttacattgataaatttgacaacttagaggaaatggaccagttcctcaaaaactggaaattatc

SEQ ID NO: 136825 - DNA, 201 bp, Homo sapiens
cacacacatactttcccaccactaagactcatgctttcacacagaaaccttgcagactgaccttgaggtacaaatatttccatgatgtcacttcagtgctrtaccaccaggaaaccgcgtgcaccaggaattgcatttctttatctaaaaaccagcttctttaccaggtgtcctctgactttagaaatgggtggaaaaaaa

SEQ ID NO: 136826 - DNA, 201 bp, Homo sapiens
caccaaacctagcagccaataattaactacacacaccttccatcatgcacagtgcaaaccatgatgtccttccttctgcaggtggctcttgccatgcccamggacctcatcttggccccatgccattgagagagtcctaagctccgaccagcaagggcttccctctgcctctcaagtggaggcactcaggggctgcccgtt

SEQ ID NO: 136827 - DNA, 201 bp, Homo sapiens
agagggaccatcactgagacctttggggccgagcaggtgccctgtccatctcttcacctgtcccaggtcaagtaattgctgacttaaagtgtccaaagtcraacttgtcaagtttctgtactctaaagttactctttttcccccttttcatacgatcagcccacactgaagatgtgaggagttatgttccacctcctcaag

SEQ ID NO: 136828 - DNA, 201 bp, Homo sapiens
tttattcatgggagggttggtctgcagggggctcacactgccacaccagaagtggacgtcctccggcttttttcactgaacactgtttcttggagattttkttccaaattagcatgtagacaacatccttaattttttcccatgaatcaaacaggggatttcaatatccttaatctttttaatagtacatagtagtccact

SEQ ID NO: 136829 - DNA, 201 bp, Homo sapiens
actggcctgctgctggcccgcaggcttctcaataggtttggcacagacaacatctatgaaggccaagtgtaggtgactggcaatgaatacaatgtggaaarcattgatggtcagccaagtgcctttacctgctatttggatgcaggccttgccagaactaccactggcaataaattttttggctccctgaagggagctgtg

SEQ ID NO: 136830 - DNA, 201 bp, Homo sapiens
tgttgctagtatttagaaatataatcaatgttttaatgtattgaccttgtatcctgtaacctgctaagctcgttattagttctagaggatttagggcatgycgggggacatttactgtgtgttgtttttttttttttctatgtaagcaagcatgttgtctgtgaatagcaacagttttattgtttcctttccaatttccat

SEQ ID NO: 136831 - DNA, 201 bp, Homo sapiens
acagatgatagtcacttaatagaaatgacaaaggtgacagccaatgttcctaaagcccataaccattgccaggttcttgctcgagagcttcctgcctgctstctcctggtttgagttccctctctggagaggaggttgagagcagaggtggttctctgaccaccaaagtccccagcttatgggactccatccctgaaaaac

SEQ ID NO: 136832 - DNA, 201 bp, Homo sapiens
ttgtgattgttcattagataatttttagaatggctactttaaagcttttgccagataattctaacatctgtgtcattttgctgttggcatccgttgattgmcctttttcatgcaagctacatttctcttctccttcatatgctgaaaaatattggattatttcctagaccttttgaatattatgttatgagattctggatg

SEQ ID NO: 136833 - DNA, 201 bp, Homo sapiens
aatttacacttttaccaacagtgtaaaagtgttcctcgttctccgcaacctcgccggcatctgttgttttttcactttttaataatcaacattctgactgrtgtgagctggtatctcatggttttgacgtgcatttctctaatgatcagtgatgttgagccttttttcatatgtttgttagccacatgtatgtcttctttt

SEQ ID NO: 136834 - DNA, 201 bp, Homo sapiens
tgctgtttaaatttacacttatctggtggctgtcgacattgagtactttttcatgtgcacattggccattgtatatcttctctgtgaaagatctatttaartctcttgcatatttttctaaattgacttgtttatcttattgttattgacttataagagtttatttataacaaaaacaagcacttacttattttaaatatt

SEQ ID NO: 136835 - DNA, 201 bp, Homo sapiens
gaaataaaaaggaatataagagaatactatgaacaatagtatgcaacaaaatatacaaaacctatatgaaatggatgaagtcctagaaggaaacaaactaycaaaatataataaagaatacatagaaaattctaataaaccaatcacaggatattaggtaaataattttaaaacttcccacaatgaaaatcccaggcctaa

SEQ ID NO: 136836 - DNA, 201 bp, Homo sapiens
gcctgctctgtggtctagaggctggtcagtttccatgtatgcctcagaggagtgcgtcttctgcaattggatgcagggtttcaaaggagaccaatagatcragcttcttagtggcattattcaaatatgccctattcttactgaggttttggcctgtctgatctatcaattattgagagatgtgtgctgaaatctcccact

SEQ ID NO: 136837 - DNA, 201 bp, Homo sapiens
acagccagcaactggactgtcatctcatgagagaatctgagccaaccatgcaaccaagatatgcccaggttcctaactctcatagactgtgagatgataatttttttattttaagatgctaaattttgggataatttgttatatagcaataggtaactaatataacatccaaaaacaaacaaacaaaaaactgttcaaaag

SEQ ID NO: 136838 - DNA, 201 bp, Homo sapiens
acactcttttagttattttaaaatgtacaattaagttattactgactatagtcaccctgttttgctattaaatagtaggtcttattcattctttttaactrtttttgttgttgttgttgatgccctttattagactgaggaaattcccttcaattcctagttggctgagtgtttttttcatgtatgttcaattttgacaca

SEQ ID NO: 136839 - DNA, 201 bp, Homo sapiens
ggacaggaactgaggagcaacagcagcaggcctgcgtggaggggtgggttctggaggtgcgagggcaaaggggcctggagggcctccaggtggagggtgarctatgaggaaaagccaagggcttcttctgggcaccaaggtggagaggagagaactgggtccaactcagcttggacgtgtggcgcatgcatgacctggggc

SEQ ID NO: 136840 - DNA, 201 bp, Homo sapiens
gggcgtggtggtgggggcctgtaatcccagctactcgggaggctgaggcaggagaattgcttgaactcaggagtcagaggttgcagtgagctgagaacacrccattgtcatctagcctgggtgataagagcgagactccatctcaaaaaaaaaaaaagagaaacagagcatgaatgtcagtacagatatacctcagagaca

SEQ ID NO: 136841 - DNA, 201 bp, Homo sapiens
actttatgctaaaaaaagactaatgagcatctaagccttcagtgagttactctttttgctagtggagggtcttgacttgatgttgatggctgctgactgakcaggttggtaattgctgaaggttagggtggctgtggcaatgtcttaagataacaacgaagtttgccgcaacaattgactcttcctttcatgaaacatttt

SEQ ID NO: 136842 - DNA, 201 bp, Homo sapiens
ttgcttttctcattctcgaagcttgtgagtacttctcattatgcagcaggaagtcctctttctggttcttaataaagtgactaataatttagaatgttcayattaagagcaggttgtaattataattagaatatataataatgtggatttctgcctattggggattaatttcagactcctctcaaggatgtatttgttttg

SEQ ID NO: 136843 - DNA, 201 bp, Homo sapiens
tgttgttgagtgtagccactgtaatcactgattttagctagatcttctggataacttgctgcttaagctgtagcttctacatcagcacttgctgcatcacyttgcatttctatgctatagagatggtgtctttctttaaaaatcaagaaccaatttagcctcaaacttttcttttgtagcttcctcacttctctcagcctt

SEQ ID NO: 136844 - DNA, 201 bp, Homo sapiens
acaggagtgccacagatttttaattacctattttatttgtccacctggccaatgtctgtctctctcatgaggacagggccatggctgtagttcactatggrtagcgtagtgcctaagatggagggagccttggtatgcatttggtgacaggatccatgaaggaactcttttctgcccactctgtccagcgaataagtcctg

SEQ ID NO: 136845 - DNA, 201 bp, Homo sapiens
acacatgaaatgggcttgagacagggcccggcatatcatacatgctccagtgtggcagcaaggagcaggccctctgtgaccctactttgagggtcctaatyctgatcttgccacttgctaattgtataacatcgagaaggctgctgacatgctgtgcgtcagtttccccatctataacataggaataataatatctgacct

SEQ ID NO: 136846 - DNA, 201 bp, Homo sapiens
gctgcctccctcctggggccttccagcatcttctgtactgggttatattagtttgttctttcactgccacaaagaactacctgagattgggtaatttatgragaaaagaggtttaattgactcatagttccacaagcctaacaggaagcatgactaggaggcatcaggaaacttacaatcatggtggaaggcaaaggggaa

SEQ ID NO: 136847 - DNA, 201 bp, Homo sapiens
tgtccctgctgctatctttcaactggattcacttgttctcttgggcaatctccatttacccaatacctgtaagggtaaaattaagaaaatagctaacacayattcaagttcttgccatttaccaggcactgtcctaagatttcatgtgtagtaactcatttaatgtctcaagacaaatcaacgggacagagatttttctct

SEQ ID NO: 136848 - DNA, 201 bp, Homo sapiens
cattacttacttttatcgtcacaattctgggagtaggtactgtttgccctctttgtagctgaagtgtctgaagcacagagagggtaggccacatggccgaygtcacacagctaggagatggtaagcttctcccctatttgtgctctcactctcaaccctggggcccaccggcattgtgaatactcagcatttcaagtctca

SEQ ID NO: 136849 - DNA, 201 bp, Homo sapiens
gccatttgtgcactagatttttaaaaatatgattctaatagcttattgccaaaaagtcttgtttggtctttttatacaaaataaacttttataaatagaawcttgccatctcattgactttatggttttagatatattgtggtatttctcatgaatcttaccatgatggtgggttcctgatattgtttggctgtgtcccca

SEQ ID NO: 136850 - DNA, 201 bp, Homo sapiens
ttttgaggccttcccagccacacggaattgtgagtccattaaacctgtttttctttataaattacctagccttgggtatgtctttatcagcggcatgaaayggactaatagagtaaattggtcccagtagggtgttgtgctgttgtaaacatatccagtgactttgaaactgggtaataggtagaggttggaacagtttgg

SEQ ID NO: 136851 - DNA, 201 bp, Homo sapiens
ttttcttttctatcacaccaaggcttggggctttcctgaactctcaatagtaatagcatcctaaaattgtttgagtgcatacaaagataactcaaaatggrttaaagacttaacttaagacctgaaactgtagatctactagaagaaaacacaggaaaaaagcttcttgacattggtttgggtaaagattttttggatatg

SEQ ID NO: 136852 - DNA, 201 bp, Homo sapiens
aggctgaggtggactcagatggagatgaagaatttgttgggaactggagtgaaggtgactctttctatgttttagcaaagagacaggtggcattttgcccyggccctagagatgtgtggaactttgaacttgagggagatgatttagggtatctggcacaagcaatttctaagcagcaaggcattcaagagatgacttggg

SEQ ID NO: 136853 - DNA, 201 bp, Homo sapiens
attttccagtaatgaggtagttttgcccacaatcctgttttgtcttctctcatctgagacttgggggctctcagggggcaggctgtagctctcttctttgyacccctggccacctgtctgctctctgtgctcttgaggcccttaatgagtcctgaggactgactcagtgccctagtttgctagggctgccataccgctaac

SEQ ID NO: 136854 - DNA, 201 bp, Homo sapiens
tcatgatggcaaagatatcgctaggtgatgggaaatttttcgctgggcacttgactgtataaagaatgtgatcatgatttggagttctcaaaaaaggacartagggactcctggcctgctaagatagaatagccccattccttacagattttcctcttcacagttaaactccctggacaaaatacaacagacaagcatggg

SEQ ID NO: 136855 - DNA, 201 bp, Homo sapiens
taaaggaaatacttcagacaattaaaaagtgaggagggcaaagagacctaaatggaggtaaggtttccacacttcactcaaagtggtaaaacattaatatmactagactgtgatgagatatattacaaatttttacatgtaaataataagactatataatgtgatactgtgaggttctgggggaaaacctgaaagaaatga

SEQ ID NO: 136856 - DNA, 201 bp, Homo sapiens
tttacaaagacagacgataaaaatcaccttgtgattataaatgattcaactttgaaagaaccttgctccaagattagaggaatcagctcttattttttttwaaaaaaatcatttttgactccctgacattctcttgagtccctgctatgaagaagcactagggacatgtatagatgctgccacctttaatcctccaatagt

SEQ ID NO: 136857 - DNA, 201 bp, Homo sapiens
ggtccagcagggagctgagtctctactcccacctgatgtcgattagactaaccaggaggtgtgagcagggactagtcactactctgtgttctccccacccytggtgtctgtgggcccagtgaggagctgaagctctatacccacaagatgacaagaaactggatcaagtagcgtgcagcagagccagtggacactttgacc

SEQ ID NO: 136858 - DNA, 201 bp, Homo sapiens
tagtggggctgagcagggagctcatctttcattcctctcctggtggaaacaggtggtgctcagattccccaccagagtagtgtcagcaaggcccggtggcraatccacccccactcagcagcaacaagaaccaatgaagtggcttaaggtggagcccatcaccagtgtgcttctgctacccaccctggggccagcaggggt

SEQ ID NO: 136859 - DNA, 201 bp, Homo sapiens
ccaagggaccaggaagatggtggcctgatgaccgaaaatctttttggtgatacccatgctacaccagccagacacaacaaaaaaacataaccattctcccsaccgccgttgacaatttctgcctcgctgggagctgatcttccactggatccttgacctaaggaagcaggcaaaagcaggggtagtactcccatcccccac

SEQ ID NO: 136860 - DNA, 201 bp, Homo sapiens
actcacaatagttgctaagaggctcgatgtaacccagaaggcagagagcggaggagctgtctaccgagtgagctcttgcttcccagagcccaggttctggygcttccctctctgaggattctgctggtgtttggaacatgggtttagagttccctctgtctatcccatgtttctttctctcctgcttaggaataaagtaag

SEQ ID NO: 136861 - DNA, 201 bp, Homo sapiens
acaggctaattttcagaagggttgctgggggtgggggaggcatcatttgcctacatatggtgaggtataatcactagtaccttggcatttattagaatttkgaagaacgaggtaaaaaaaaaatcagtccactttattgaaatcttttgcagaaatatgacacaaccattttcaaatagtttttactaccaccaaaataat

SEQ ID NO: 136862 - DNA, 201 bp, Homo sapiens
tgttgaaaacccttcacctgcccttgtgggaacactgcctgagagccgaactctgctggctctgattagtcatgtgacgcaggcctggcagtttcgcttcrtttcccactttcttgctttaaggattgggtggggtcaaccaagttcttcagactgttgatatttagttctgctttcacattgcctcttttctccatattc

SEQ ID NO: 136863 - DNA, 201 bp, Homo sapiens
acaagttttcaggcatctgagggcagcaggcacctggaaatccagacttctaagacccctgtggccattttcagaaatgaagcaggtcccccaggcatgamaggtacctggagattcaagagtatgactgcccctgggcctctgtggcttgaaaatattatcagagcaaaacttgtcattccttattcagagctaaagtgc

SEQ ID NO: 136864 - DNA, 201 bp, Homo sapiens
tctctttcaacatttccctgttgtgttatgaaaaagaggtgggtgggggacttcagaagctgtctggagtggcagacagctctgcaggatgagctgagagygccgcagtcacacacaggtgggaggagagggctgagggacagtgggcgcagtgtcccacctcgtggtgcggtcagtggagaaggagtcatcgataagggg

SEQ ID NO: 136865 - DNA, 201 bp, Homo sapiens
tagcatagagggcactgtagaatgagaagggtggaaatgagtccactgtagccttatgcggaaatcactctgcggcaggaccgcactttatcggaacctgmtttcatgtggtttgcccacaggcagttttaatcctgtgattattatggggtggggggaagtgaacttctggttggaaatgttactgatttacttactcat

SEQ ID NO: 136866 - DNA, 201 bp, Homo sapiens
gggacacagagccaaaccatatcaggtggtatatttagtgttactcttcttccacatcagaacttgacagatgattcaagaacattccaacacaatcctgrgcctcacttgcttcatctgtaaaatagggataatgccttcttcacagggctgttgtgaggattaaaggattctgtgaggtaaaggaagtctgtgtgaagt

SEQ ID NO: 136867 - DNA, 201 bp, Homo sapiens
tattacaattcaagatgagatttgggtggggacacagagccaaaccatatcaggtggtatatttagtgttactcttcttccacatcagaacttgacagatrattcaagaacattccaacacaatcctgagcctcacttgcttcatctgtaaaatagggataatgccttcttcacagggctgttgtgaggattaaaggattc

SEQ ID NO: 136868 - DNA, 201 bp, Homo sapiens
ttctcaagggccaggtagagtccagaatcaacatccagtttcacttgactttcaaactagaagaggagctcacagctgagtttcaccatgtaggagagaarggaattatattgcatgtgaagagctgatacaaaacatttttgtgctcccagaactccattgcctgttcttttagagactactggtgtctgtttgctggtt

SEQ ID NO: 136869 - DNA, 201 bp, Homo sapiens
tccgtgaccttgaagcagctcttgggccctggatgctcacctcttttctctgctcaccggcctttggtctttcttccctctatcctgtgttttctcctacsatttgcttcttgcttctctcttgttcttctcctactgtccatctctccccatttgcaggaggtgaagctcctgggctcccctggaggttacatgggcatc

SEQ ID NO: 136870 - DNA, 201 bp, Homo sapiens
ttttctcctttgtggacagtcagttgttccggcaccgtttactgaattggacattcttttctagtaacctgcaaggtctctttggcatttattaaatctcygtctatttgagagtttgtcttggggctattttgttcctagtctctttgtgtatttttgatccaacaatacactgttataattactctggctttataataa

SEQ ID NO: 136871 - DNA, 201 bp, Homo sapiens
gtgggagtgggaatcagagaaagcaatttgttcatacttggagtgacattgcttctgcagcaagagtgagatagagttacagccatcataaattttatagrttagcaaaaacaaagttaaatcttaatcctggtattgcgttagtgaaatggaactggattgctatatcattttaattttaattctagttaaagtcatttt

SEQ ID NO: 136872 - DNA, 201 bp, Homo sapiens
ccatgggtgacccctgaaatgcccttcaggaacctaggcttgccagatgtaggaaaaagaaatataggatgcccagctacatttgtatttcaggtaaacawgaatattattttagtataagtatgacccatgcaatattttggtgtccaaatacaaattgggtgtcctctcttttatctggcagtcctgttggaaccccta

SEQ ID NO: 136873 - DNA, 201 bp, Homo sapiens
gaccgcattggccttcctgattctgactgagttccactttctgcttcctgggacatggaggaggagcgaggagagggaccaggagcatcagggactatggstcatgaaggcacaggattgggtcccgtcatttgcagactcaacatttttaatgtattgcccacccacagtgtatcaggctcagagaaactgacttatctt

SEQ ID NO: 136874 - DNA, 201 bp, Homo sapiens
cgtggactctgggttgaaatcccagccccaccgcttcctggctatgtgaccctggcaactggctgaacctctctaggccttggttgtattattggaccatrgggtgagcgattccatgaactacccaaagttgtcatgaagattaaattaggtattccatctaaagagtttggaacagagcttaagtttggaacagagctt

SEQ ID NO: 136875 - DNA, 201 bp, Homo sapiens
ttgttcactgagttggtagctttatgggatttttcatcacactgggtcactgctggccctgggagggctgggtttggtcataccacagcttgcatctgggkcactatctcatgggatggagatgggctcctcggtgggatcagggcaggtattatggccaggaacctaggagtgtgcctgcgtccaacacaacctcccagc

SEQ ID NO: 136876 - DNA, 201 bp, Homo sapiens
gagtgaaactccatctgaaagcgtggactctgggttgaaatcccagccccaccgcttcctggctatgtgaccctggcaactggctgaacctctctaggccytggttgtattattggaccatggggtgagcgattccatgaactacccaaagttgtcatgaagattaaattaggtattccatctaaagagtttggaacagag

SEQ ID NO: 136877 - DNA, 201 bp, Homo sapiens
tgggcatccaggggtgatgcctccacagtgatgggaggttgtgctggctgcctgtactggtccactcagccttccacttgtgtgttggaatctccccattytggggaggccacccttctgtgggctggatcctgctttgattctccttattgaagtagagatggaaatttcaggagacacaggggagaaactggccagtga

SEQ ID NO: 136878 - DNA, 201 bp, Homo sapiens
taggtgtggaattattgaaagcatggactctgggctgggtgtagtggctcatgcccataatcccagcactttgggaggctgaggcgggtggatcacttgasgtcaggagttcgagaccagcctggccaacatggtgaagccccatctctactaaaatacaaaaattaggtgtggtagcaggcgcctgtaatcccagctact

SEQ ID NO: 136879 - DNA, 201 bp, Homo sapiens
tcttttctcccaataatagaagagcttagattgctttaactaatcatgagctcccaccctctaaactattgttgtccactgctccagtactgtgttttctratcccacaaattagccatcatgtttattattctatggaatcattttttctttagagttaccaccttttaccaatttctttgctcacaattccttcttgca

SEQ ID NO: 136880 - DNA, 201 bp, Homo sapiens
gcacacaataggctgcaaaggagggagctctggaggaagaatacacgcttaggccagggcggcctcatggccagatagcccaggctctgtttcacccacaytgaggaactgtgaaatcctgggcttagcccctctgagagttacagccctcacctgcaaaactgggaccatcacctgtaccttggaggactcttacagtta

SEQ ID NO: 136881 - DNA, 201 bp, Homo sapiens
acatggcagaaggcagaaggggagaaaggggtgaactcactccatcaagcccttttctaaaggcacctaatcgcatccacaagggaggagccctcatggcmtaatcacccctgaacgtctccaccttttaatactattacgttggcaacacctaaattttggaggagacacattcaaaccgtagcagagagttttacagac

SEQ ID NO: 136882 - DNA, 201 bp, Homo sapiens
tgatgtgaggcagagccctctgcttattcagtagactttgtcccaggactaactcctcagggacattcaacaccacctcatttatctggcatcagccaacscttggaacagagccaaggcctgaaataaacaaaacagatctctgggaatcacaaagagatgttgcaaagcccacgtactggagctcaagcccttactcca

SEQ ID NO: 136883 - DNA, 201 bp, Homo sapiens
tatcttagtccatgtcttcttctgtaacagaataccactaagtaattgataaagaacagacatttatttcttacagttctggaggctggggagtccaagaycaagatgctggcctctggtgagagctactctctgcttccaatatggcaccttgaatattgtatcctcacatggcagaaggcagaaggggagaaaggggtg

SEQ ID NO: 136884 - DNA, 201 bp, Homo sapiens
agttttgcttatctggatttccttattgctgaggaatcagctatctaatagtaatttttcatggcaatctgttttttctttctgtttctttttaagtattttatttgttgtcatgacctatggtttcactataatatgtataaatataaatttggttgtatttttcctatttggattcatttgaggttagtaagtacgtgg

SEQ ID NO: 136885 - DNA, 201 bp, Homo sapiens
tgggaccatggaagaaagccatcttctcggccactgctgacaccaaagcatgggggtctacaggtctgggaccagaacacaccacagggtctccactgccyctccacttgggagagctggaactcaagcccagctgctggccttggccctgcacaaccacattctttacaaggacctcctgcagtgtctcctggcccttgt

SEQ ID NO: 136886 - DNA, 201 bp, Homo sapiens
ggttgagagcagaggtggttctctgaccaccaaagtccccagcttatgggactccatccctgaaaaacacccagcagaagggacccaaggtgatgttgctkcagagatggcaactcaggactcacaacttttcaagtctgggtaaatgagagacaaagcaagtccttgtgaagtgatctccatgcttttcaagcagggttg

SEQ ID NO: 136887 - DNA, 201 bp, Homo sapiens
actatatttttaattaagacaaaggattccatacgttcccagtctgctgcttcctacttttggcaccttaaggaatgctacacaaattagactgttcataytcaccaccagaatgagcatcttatgtcatagattccttgcccttgagtggaagacaagcttcttccccccaaccccccgccccaaggaacagttgtttta

SEQ ID NO: 136888 - DNA, 201 bp, Homo sapiens
agttcatttttagttaaaaaatgatgcagacacagatgcataaactgtttataatcatttgtctccaaagaattcaaggcctcaagtgtagaatttaagtyactcaagaagatggctgcaagccccattcagtgactgctctatgccatgggtctttctgtaagccgcatagacgtttacccaggacatggatgctgggac

SEQ ID NO: 136889 - DNA, 201 bp, Homo sapiens
tgggcacacgccgtggtgctggtctgtaaagacgtgtgaaggtctcctctaactgtaccttccatgtgcagtcgtggccctcctcctctcacaacattccwtggctcctttttacccagatcagctccgttgttggcttccgagtctttcatttcctccccgacctatcccgccaactcctccctccatccttgtgatcct

SEQ ID NO: 136890 - DNA, 201 bp, Homo sapiens
cttaaataaaggacaaggggctagaaagcaaaggtggtgggtgaggcagctgttttaaacagagaggtagggacacctttcttgcagtggaacttcttcaracctgagatggaaatgaaatgagggagcccccatggaggtctgaggggagtgttccaggcagtgggaacaggattgcaaaaccccacggaagtgggcaag

SEQ ID NO: 136891 - DNA, 201 bp, Homo sapiens
aaagtccctttaagtgcgaagtctttattcctggtttcctccttctccacttcctccccctgaaaacagctgatggcccgttgtcactagagcccaggagrggctccttccttccctcccacctgggctatttttctgtgccacacctgtcctggtctttgtgaggcatggccatctccatgctgggctgattagaagttc

SEQ ID NO: 136892 - DNA, 201 bp, Homo sapiens
aaagaagttctctaaacagaagggacatgatgaaagaaggaatcaagaatcatcaggaaagaagaaagaattcggtaaacaaagatggtaaattcaattakctctccttctccttttgaattttctcaattatgtttgataattgaagtgaaaattataacactgatgtgattctaaatagatgtagagaaaacattttag

SEQ ID NO: 136893 - DNA, 201 bp, Homo sapiens
gcggagattgcagtgaggcgagatcacgctgctgcactccagcctgggtgacagagtgagactccgtctcaaaaaaaaaaaaaaaaaaaggaattttgagrggacacaatgatgtagcccatagtacctgcatatgcacgcgcatgcatacacacgcacacacacatgcacacacacactctcatgcatactctctctact

SEQ ID NO: 136894 - DNA, 201 bp, Homo sapiens
actggcctcctctaacacataagataagattgatttaatctgttttgtctttttcaaattaacagaatttctaatttgttctgatacctttattaaatgtratcatatagtgaaaaattcagtgatgttaaaaacagcaggaaaatattaaacttgccatatacaaagtttggatcataaaatatgtttcatggggctgtc

SEQ ID NO: 136895 - DNA, 201 bp, Homo sapiens
tggaacttgccacagatttttttttttttttttttttttgagatggagtctcgctctgttgcccaggctagagtgcagtggtgcaatctcagctcactgcwatctctgcctcccaggttcaagcaattctgcgtcagcctcctgagtagctgggattacaggcaagtgctactacgtccggctaattttgtatttttagta

SEQ ID NO: 136896 - DNA, 201 bp, Homo sapiens
tccctgcccccatcttttcctttctggaacttgccacagatttttttttttttttttttttttgagatggagtctcgctctgttgcccaggctagagtgcrgtggtgcaatctcagctcactgctatctctgcctcccaggttcaagcaattctgcgtcagcctcctgagtagctgggattacaggcaagtgctactacgt

SEQ ID NO: 136897 - DNA, 201 bp, Homo sapiens
ggtagattttttcccatatcccactggggtagacctacatctctcacctctgctcatctttaaaagttaaaacaaaccacagagtaacataggcaaagtamaataagtgacccaacatttcatacagttaaaaaatgcttctaataggaaaaaatcccaaagcaaaagtattaggttaaattgtttatataaaaattaaaa

SEQ ID NO: 136898 - DNA, 201 bp, Homo sapiens
tacacatggcaacctagtggaatttatctctgatatgcaagtatgcttcaacattcaaaagtcaatcaaatgcaatccaccacatcaacagactaaaggcraaaaagtcacatgatcatgtcagtttacacagaaaaagcatttgacaaagtccaacaaccattcatgataaaaactcagcaaactaggaaagaagggaat

SEQ ID NO: 136899 - DNA, 201 bp, Homo sapiens
ctaattttttcgaaaccagatgttgcagcatctaaatatttacattgttcctcatcaggactccacgtgtgagattctggagaaagggagccttctggatygggggcctttgcttgtcttttcttctctgctccccagaatttgattttaatgtagtttttcaaattggggactatgagttcttgacaaaatgtattaatt

SEQ ID NO: 136900 - DNA, 201 bp, Homo sapiens
ggccctctgcctgaccatgatctcgttcctaaacgggagggtgtgcacacagataaagtgagagtgttttaacaggggtcctgcctgaggaattttaagtrccagaattacttagacctcatcatcaaattagcaagaaactgggtcaaccttctaaagcagtggttctcaaccaggggcaattttgcaacgtttggatgt

SEQ ID NO: 136901 - DNA, 201 bp, Homo sapiens
aaagaattcaaggcctcaagtgtagaatttaagttactcaagaagatggctgcaagccccattcagtgactgctctatgccatgggtctttctgtaagccscatagacgtttacccaggacatggatgctgggactttctaagcctgactagtttctaagtgggtcacctcagggtcccaaggattgagactcctgtgagg

SEQ ID NO: 136902 - DNA, 201 bp, Homo sapiens
gaggaagcttttcaagttattactggatgggctatgctcaacaggtttttccagttctgcctctagggagtcttgcccaacaattaatccagatggtcacygacgggtttctttcacctataaatccttgaagcctctttttgaccccaacaccactaatgcaggcttcctctgttttcccataggatttagaggattctt

SEQ ID NO: 136903 - DNA, 201 bp, Homo sapiens
tcagcttcagaagtcctgctcttctcccagccctgtggatcccactcagcatcaggtggttactgcaggaagccgtctgcctttgtttttcttgggcaccrgctcaaagtccctttaagtgcgaagtctttattcctggtttcctccttctccacttcctccccctgaaaacagctgatggcccgttgtcactagagccca

SEQ ID NO: 136904 - DNA, 201 bp, Homo sapiens
tatttgactcagaataagagggttttgtttttgcttggtttggttttgaggctatcttacttctaatgtgtcattatcttttagagatacacagtgagatrtttgtgggtgaaatgatatgactgaggtctgctttgcagtgatacagagaaggggaataggtgggagcagagtaaaaacaggattcgcgatgagtggata

SEQ ID NO: 136905 - DNA, 201 bp, Homo sapiens
ctggagtgctgtggtgtgatctcagctcactgcaacctccacctcctgggttcaagcgattctcctgtctcagcctccggagtagctgagattacaggcayccaccaccacgcctggctaattttttgtatttttagtagagatggggtttcaccgtgttggccaggctggtcttgaacttctgacctcaagcgatccgcc

SEQ ID NO: 136906 - DNA, 201 bp, Homo sapiens
aagaaatgagacatgcttccttttctgcttctccatggctgttctattttgccttatttgaaccatcctattatctgtcttagcctgcttggactgctatracaaaataccatgggctggatgagttaaacagcagaaatttatttttccacctttctggaggctgtaaagtctaagatcatggtgccagcatggtcaggt

SEQ ID NO: 136907 - DNA, 201 bp, Homo sapiens
tgaatgaatgcttaactttaaagagtagtgttaatctattctccaaagttagtgcatcaattcacattcccaccaacagcatgtaatcggatcctgtggayccatatcctcttccatacttggaattcttagacttctccatttttttgcaaatggttataaaatggcatcttattgtcttgagggaagacaattatcttg

SEQ ID NO: 136908 - DNA, 201 bp, Homo sapiens
gccttttcaggcacgttgtatgtgcttggaggaggtggggtcacattgctcatcctgttctgctcagactgacgttatcctttttgttttttttgcatacacacacacacacacacacacacacacacacacacacacacacacacacacacacacacgcggggaggagagaagcaggacctacttggttgctggggaagt

SEQ ID NO: 136909 - DNA, 201 bp, Homo sapiens
gatcccaaaagcataggcgataaaaactaaaatagataaatgagattgcatcaaactagaagaggggagattcacataacatacaactaaccattttaaastgtacaattcagtggcatttagtgtgttctcaatgttttggaaacattgtttctatctcattttcatcaccccagaaaaacacactgtacctattaaaga

SEQ ID NO: 136910 - DNA, 201 bp, Homo sapiens
gagtatgaagctagccctggtgcagccattttgtcattttgagggagaccacctctaggatgaagtggcccatggaggcagagtagacagacactaagttytaggacacacttgagcctcagaatcaaacctgctctgaagcctgccccaagtttgccttgccagttccctgaggtagcaactgccctttaccgttcaggt

SEQ ID NO: 136911 - DNA, 201 bp, Homo sapiens
actgtgatgagatatattacaaatttttacatgtaaataataagactatataatgtgatactgtgaggttctgggggaaaacctgaaagaaatgaaaggasaaatagacaaatcaacaattatagttggatatttcaacacatttatttcaatggttaacacaactactagacagcaaatcagaaaggatatgaaagaact

SEQ ID NO: 136912 - DNA, 201 bp, Homo sapiens
aggagaattgcttgaacccgggaggcagaggttgcagtgagccaagattgtgccattgtgccactgcactccagcctggatgacagagtacgattctgtcaaaaaaaaaaagaaaaatggaaaaagaaaaaattgcccatgggaatgacaggtaaaacacagaggatgttatatgttaagctgatgtttcagtgtaggatt

SEQ ID NO: 136913 - DNA, 201 bp, Homo sapiens
atttgtttaatctccacaacaaccttgcaaagcccactgaggaaactgaggctcagaggggtgaacaactgcttggggtcacacgctaataagctgtggcrttatgactttgccccggggccagttaaccctacagctttccccagacagacagtggagctcctcaaccccatccaccgcactctttaagaggtttctttc

SEQ ID NO: 136914 - DNA, 201 bp, Homo sapiens
attctgaggtggttttttatcaccagtgacctgaagactctgttgccctggggagagggggaagaaaggcaaaagcaaagtctgacacccgaatgatgtgygttttatggaggactctcaagaacagaagttagtggctgtacttgacctagatgctaatgaaatgccaccctttgagcccagtctaatggccaacacaca

SEQ ID NO: 136915 - DNA, 201 bp, Homo sapiens
aggaagaatgcataggaaggaagagaaggatcagtctgttaaagcacagtctttttttttttttttgacggagtctcgctctgtcgcccaggctggagtgyagtggcatgatctctgctcactactctggggactacaggtgcccgccaccacacccagctaattttttgtattttagtagagacggggtttcactgtgtt

SEQ ID NO: 136916 - DNA, 201 bp, Homo sapiens
aggtttatgttaattcctcacatatatcaaacatggcagctagtcagtgccaattcttgagacataacatgtttgagaaacactttggaaacaaatggaarctcctgactgcaagggaaggaaggagggaacgtgggctggttatgttgaggattagattcaagtagtttgttctggtattttgaattcttcaggcagtaa

SEQ ID NO: 136917 - DNA, 201 bp, Homo sapiens
tccccccacttcccctcacataggttctgcttcttgacctggaacggagaaactcaaaatctaaccccggctatgttgttaaatggtgaacctttaaattcacacagggtagttgatgggaatttcaaaacacggggttaaattctgctcctacaaagatggaacaaaagctctctgtcttttggaggtcgctaatccggt

SEQ ID NO: 136918 - DNA, 201 bp, Homo sapiens
aactgggatttcctggtgttgtcctttacagtggaatgggtagagcttcagcatctccttccagaacttccagaagtgtctggccagctcttgtcctcccmctgccaagatgttctgctgcaggctgttccctgagagttgcatgcatctgccacaccctttcagttgtaattgtgacaccagtgcagagagatatcaatt

SEQ ID NO: 136919 - DNA, 201 bp, Homo sapiens
ccccccacttcccctcacataggttctgcttcttgacctggaacggagaaactcaaaatctaaccccggctatgttgttaaatggtgaacctttaaattcacacagggtagttgatgggaatttcaaaacacggggttaaattctgctcctacaaagatggaacaaaagctctctgtcttttggaggtcgctaatccggtg

SEQ ID NO: 136920 - DNA, 201 bp, Homo sapiens
ccttttcttgccttattgccctggctagaatctccattttggtgttgaaaggaagtgctgataacagaatcctcatcttctacttgaacttaaggggaaarcactcagcctttacctttaagtatgatgttagctgacattttttgtagatcctctgcaggaaagtatttttttaattggctgtatggctgcccaaatcta

SEQ ID NO: 136921 - DNA, 201 bp, Homo sapiens
atataggggtcaccaagcctgctgactgtgacaggtggagttttggtttgaatgaggtcaaagtagtgggcagaatcaagggagaggtcaggcctgctcargagggacccctgactcatggcttaaatcgtcccagtgttggaaaatctgttatttactgcgtgggacccatttcctagagacagactaataatgacctta

SEQ ID NO: 136922 - DNA, 201 bp, Homo sapiens
ggctagagtgcaatggcatgatcttggctcagtatacccaggctcaagcaatcctcccacctcagccctctgagctcctcggcctcccaaagtgctgggtktgcaggtttaagccactgtgcctggcctacttattcctttttaatctcctttaatttccttttcttgccttattgccctggctagaatctccattttggt

SEQ ID NO: 136923 - DNA, 201 bp, Homo sapiens
tccactaaataaatggtgggatattctatgttcatggagaggaaacttaatgttgttaagattaaacgtcatctcaatcaaaatcttggcaagttatttcrtggatatcaacaaactgattttaaagcctataaggagagacaaaagactcacaatagccaatacaaaattgaaggagaagaacaaagttggaggacagcc

SEQ ID NO: 136924 - DNA, 201 bp, Homo sapiens
tatttggaaataggaccatgatactccacagaccttgctgatactccacttccaggacagaagtaggaaataatatggaagcattagccactggtcccagsccagtggagaaacaaataccctgaagcttgtacaatgaagcacttaaaactgagagaggtattaatgccattcgtctcgggggactgcagatttcattca

SEQ ID NO: 136925 - DNA, 201 bp, Homo sapiens
ataggtttaacttaatcagaaattgcccagctgtttctaaagtggctgtaacattttacactcccatcagcaatgattttagttgctccacatcctcaccratactcggttttgcaagtcttactcattttagccattttagtgggtgcgtagtaccttctcattgtggtcttaatctgcgtttctcagatcttcttcatg

SEQ ID NO: 136926 - DNA, 201 bp, Homo sapiens
accacatgacagtgcccacctcctctgggtgttgcgagggtttaacaagttagagcagagcagagctcacggtggaggccgtgagggctgtgctgcttgtrttttagaatgattgggtttattattcgcatcattttctgaatttcaggaggattcttgggctccatcccggatctcgtgaaccagcatccctcggggtgg

SEQ ID NO: 136927 - DNA, 201 bp, Homo sapiens
ctttttccttgttaataccgagtaggggtgaagtctcagcttcccattgggtcctgctgatggggtgttggtgtgaagcagggtgtgactagatttacctygcatcttcttgctaggccttgttgttgctgggtatagatggccactactggactccactaatgctaccctggcaccacctgcttttgctgggcaggagat

SEQ ID NO: 136928 - DNA, 201 bp, Homo sapiens
agaaaaatgctaataccacagtatataaaagggcaagctatggacgatttgaagaagacatatacatagctaataattaatatgcatataagatagaaaaattattaataatcaaaaaaaggcaaattaaaatgagataatattttactttgttgaattagcaaagtcatttgaaaggaaaaatactcagctttggtagga

SEQ ID NO: 136929 - DNA, 201 bp, Homo sapiens
caggtaatctcgaaggcaaccctgagtggcaatccttatggccaccacagtccacctcttgcaacacgcatgtcactcccttgcccctatctcccaaatgytgcttttaagtcatctcagacaattttcaaaggactgcagagcaggaggtgttgcagtcttgttttaagatggtcttggccgggcgcggtggctcacgcc

SEQ ID NO: 136930 - DNA, 201 bp, Homo sapiens
gtgtgtctccatcatatgatgctgccaggactgatagaatacatgtttgtaaaatgcctggcccatgaaggcacacaataaatatcatgaaacttcgtggrgcaaaggtagtagtggacagtatgggaaagggccactgaaggttcagatgatcaaagctctgctccaatgttttaatcccttgggagaacacaggaaatg

SEQ ID NO: 136931 - DNA, 201 bp, Homo sapiens
gaaaaatgctaataccacagtatataaaagggcaagctatggacgatttgaagaagacatatacatagctaataattaatatgcatataagatagaaaaattattaataatcaaaaaaaggcaaattaaaatgagataatattttactttgttgaattagcaaagtcatttgaaaggaaaaatactcagctttggtaggaa

SEQ ID NO: 136932 - DNA, 201 bp, Homo sapiens
aaaaatgctaataccacagtatataaaagggcaagctatggacgatttgaagaagacatatacatagctaataattaatatgcatataagatagaaaaattattaataatcaaaaaaaggcaaattaaaatgagataatattttactttgttgaattagcaaagtcatttgaaaggaaaaatactcagctttggtaggaat

SEQ ID NO: 136933 - DNA, 201 bp, Homo sapiens
caagtggatgtgaccagcaagccagaggacaaagatctgcaaagaggtcgtggcagtgggggtcgaaaggagggttggcattggaggagcagtggcccatygccatcctggaggaagctgtcccttgggaagtgctgagatcccagtgttcggagcagaaaacatgttgagacttagttgtagaccaagagcttgtctgcc

SEQ ID NO: 136934 - DNA, 201 bp, Homo sapiens
atgggtggtgagaagtgagagtaaactccctgctcagtgcttggggattgtcagggtcttgggccagagggagggaaagaaagagttgggtggtgcctactcttctgcccacccacttgtttccctctggcccctggcaggaaagcctgtggtggaatgggctattgggcataggggaggctccttcctttcatttcatct

SEQ ID NO: 136935 - DNA, 201 bp, Homo sapiens
cattcttcgatcctgagcagtttaagacaaaataaattttatgcaaacccattccaggccatgggcatgcagttgagtttttctagcaattgtgctatttkaaggagacacccaggttctgccctaacaccagaggtgcctaaggtcgcagctgctcaggacctgtggcagctgtgagcagctgagctcagtttgctctgt

SEQ ID NO: 136936 - DNA, 201 bp, Homo sapiens
aagcaggtttaagactggctagtatggataacttcagaaggctctgaggcataggatctgtctgtcctgagttgtctggtacctggccctggggagactasgttaggccctgagtggaagagacagataaaggaagcagcgggaatggggtcctgaactgattcatttgcatatgaaaaatgcactcaaagggagtcgttt

SEQ ID NO: 136937 - DNA, 201 bp, Homo sapiens
caacgtgtttttctacattatgctgtaaaatttacaaatattcagcaaagttgaaataattttacaggaagcatttatgtacaaaccatggagattctatyaacctattactgtacctgccatatcactatcatatctatggatctgtgtatggaactcacccatccattcaccttctctttttgatccatttcaaaataa

SEQ ID NO: 136938 - DNA, 201 bp, Homo sapiens
taagcagtggagccttcacctcatccagcatcaatgaggcacaatgaggtggtgggaaaagggggtagttggccctgtgcttccccactcccttccctgaygtcagcagggcctagagggaacagaacttgcccccaacctgtctccaacaaggcaatgtgcatcagcactccttttcctccagcatggtgtcgatgggac

SEQ ID NO: 136939 - DNA, 201 bp, Homo sapiens
gggagctgagcctcttgcctcacctgacatcaacagaatgaaataggatgaagtgggggagttaatatccttcttcctcctcccctatttttagcaggagycagtaagcagtggagccttcacctcatccagcatcaatgaggcacaatgaggtggtgggaaaagggggtagttggccctgtgcttccccactcccttccc

SEQ ID NO: 136940 - DNA, 201 bp, Homo sapiens
agccgaactctgctggctctgattagtcatgtgacgcaggcctggcagtttcgcttcgtttcccactttcttgctttaaggattgggtggggtcaaccaarttcttcagactgttgatatttagttctgctttcacattgcctcttttctccatattcaagcaaacctagattgaatttctaaaatcctgagagaataata

SEQ ID NO: 136941 - DNA, 201 bp, Homo sapiens
atttgcaaatttgtgacacagaagttattagactacataagaaagagctgctatatattctacatttataaatatatatctgtttgtcatatatctatgayaaaagtgttatatgtatcaacatgtttcctttttcttcagctctttttatattttggcttgatttaagcttgattttataagtgctgtgttacactgtca

SEQ ID NO: 136942 - DNA, 201 bp, Homo sapiens
ttaggtttgttcctctttattgtgaagtggtattcgtttgtgtaggtgtatacaatttgtttacccattaagcaggtggtagatgtacgcactgcttcccrtgttggctattatgaataaagcttctgtgaacaattttatatgtgactttatgtggacatatgtttttgtttatcttgtgtaaataccgaggggtggaat

SEQ ID NO: 136943 - DNA, 201 bp, Homo sapiens
gtcacatggtggctgagttccaagcaggtaggtgcagaaaggacaaagagaaaaaggcggtatcttgttatcaggaaaacagtagcttttacagaggagcytcccggtagacaactgcctgttctcattggcaagggaggttacatgtctaaccctagcggctagggagtatggggaggtgagatttaaaaaaaaagaaat

SEQ ID NO: 136944 - DNA, 201 bp, Homo sapiens
ctttttctttttttttgaaacggagtctcccgctatcacccaggctggagtgcagtggcacaatcttggctcactccaaccactacctctccggttcaagygattctcctgcctcagcctcccgagtaaatgggattacaggcacatgccaccacacccagctaattttatatttttagtagagatggggtttcaccctgt

SEQ ID NO: 136945 - DNA, 201 bp, Homo sapiens
ataaaagtgttatatgtatcaacatgtttcctttttcttcagctctttttatattttggcttgatttaagcttgattttataagtgctgtgttacactgtyaatgaaaattaaagtttctcttgatcttagttagacactctccaggtacctgtatcagagacgtagacaaatgtcacagtctagctcaaggaaagaaaca

SEQ ID NO: 136946 - DNA, 201 bp, Homo sapiens
ctgttgatttcatgttctgacagtttcagttaagcctcaacagggaaaagtttcagaaacaggtcagatcaaacacgtaccgtttcccactcctggaactygtgtgtgtgacaaaaatggtcaagtcttcaccaggcatagactttgtctttggggtctgtttatattgccggactccagaccagagcttggaagacagcg

SEQ ID NO: 136947 - DNA, 201 bp, Homo sapiens
ctaatttctttcccatattaaatgtacatttttctgccttatgtcagctttaagcagtcactaagggcagtcaggttccataacatagtcttcagctgaaygtgaagatcatattattgaaacaagatctttctagctgaccgtactccaaatgcatgctttggtgcctgtaaaatctatttaaggcctcctgattttccc

SEQ ID NO: 136948 - DNA, 201 bp, Homo sapiens
catttagaaccaagcatgcaggtgacatgcatgattaggacacagcagagaaagaagtgcagagaagggagagaggggagtcagattcatccccgtcaacrccttcaccttctctgggggcagtgctaactccagcctgcctgcttgccagcttcgtggcttagcggtggagaaccatggccacttactgacctagaattc

SEQ ID NO: 136949 - DNA, 201 bp, Homo sapiens
gaaataaaacttcctcctctctgaggcaatgccagatctcctgtggcttgtccccaccttaccccaaacaggtctttgcagttaaagtaggtgtaggggaragggttgtggcagcgtagtggtgagtgctgtgtgtacatagtgagaagtttgtacagggccaggcaatcccagggcataagagctcaggaaacagttttc

SEQ ID NO: 136950 - DNA, 201 bp, Homo sapiens
caatggttgcacaactccttaaatatactagaaatcactgaattgtacacttgaaaaatatgaatgctgtggtatgagaaatatgtctaataaagctgttgagaaagagagaggaggaaaaaaaagaaatcaggttatgtgagtcttctaagtattttttttcccctcgaaattgtcttgctattctagagtctttgcaag

SEQ ID NO: 136951 - DNA, 201 bp, Homo sapiens
accccaaaccagttgatggtgatctggtgatcacagtctgaggggagagggtggtactgcctggtgggggagttcagagagagggtataggaaatgttctrtatcttgatctgggtgattccatgggcatatgtgcatgtaaggaatcctagagctttaaacttaagacttacgtgtgctacacatctgactgtatgtgtt

SEQ ID NO: 136952 - DNA, 201 bp, Homo sapiens
aatggttgcacaactccttaaatatactagaaatcactgaattgtacacttgaaaaatatgaatgctgtggtatgagaaatatgtctaataaagctgttgagaaagagagaggaggaaaaaaaagaaatcaggttatgtgagtcttctaagtattttttttcccctcgaaattgtcttgctattctagagtctttgcaagt

SEQ ID NO: 136953 - DNA, 201 bp, Homo sapiens
tggttgcacaactccttaaatatactagaaatcactgaattgtacacttgaaaaatatgaatgctgtggtatgagaaatatgtctaataaagctgttgagaaagagagaggaggaaaaaaaagaaatcaggttatgtgagtcttctaagtattttttttcccctcgaaattgtcttgctattctagagtctttgcaagtct

SEQ ID NO: 136954 - DNA, 201 bp, Homo sapiens
tttgtgtgccattcagtggggggtgaaattagttttgtttctgttttcttttgttttagagacgggatcttactctgttgcccaggctggagtgcagtggkacaatcatagatcacttcaacctctacttcctgggctcaggcaatcctcctgcgtcagcctcctgagtagctaggactatgggcatgtcccaccacgcct

SEQ ID NO: 136955 - DNA, 201 bp, Homo sapiens
ggttgcacaactccttaaatatactagaaatcactgaattgtacacttgaaaaatatgaatgctgtggtatgagaaatatgtctaataaagctgttgagaaagagagaggaggaaaaaaaagaaatcaggttatgtgagtcttctaagtattttttttcccctcgaaattgtcttgctattctagagtctttgcaagtctg

SEQ ID NO: 136956 - DNA, 201 bp, Homo sapiens
aacaacatatgtgaattttagacattatgtttagtgaaagaagcctgacacagaatagttaatactgtataattccatttgtgtgccattcagtggggggwgaaattagttttgtttctgttttcttttgttttagagacgggatcttactctgttgcccaggctggagtgcagtgggacaatcatagatcacttcaacct

SEQ ID NO: 136957 - DNA, 201 bp, Homo sapiens
ttcattctattaagaaatgagttacattacttttcaaattttgagccaaatttgcattctttgaaattttttgttatatgcattttatatatatatatatrtgtgtgtgtgtgtgtgtgtgtgtgtgtatgtatgtgtgtgtgtgtgtatatacatatatatatatatatatatttttttttttttttgagatggagtctt

SEQ ID NO: 136958 - DNA, 201 bp, Homo sapiens
tttatagattcaatgctatccctatcaagctaccattgactttcttcacagaattagaaaaaaactactttaaatttcatgtggaaccaaaaaagagtcckcatagccaagacaatcctaagcgaaaagaacaaagctggaggcatcacgctacctgacttcaaactatactacaaggctacagtaaccaaaatagcatgg

SEQ ID NO: 136959 - DNA, 201 bp, Homo sapiens
atactacaaggctacagtaaccaaaatagcatggtactggtaccaaaacaaatatatagaccagtggaacagaacagaggcctcagaaataacaccacacwtctacagtcatctgatctttgacaaacctgacaaaaacaagcaataggaaaaggattccctgtttaataaatggtgttgggaaaagtggctagccatata

SEQ ID NO: 136960 - DNA, 201 bp, Homo sapiens
tcaaggatctagaaccagaaataccatttgacccagcaatcccattactgggtatatacccaaaggattataagtcattctactataaagacacatgcacaggtaggtatgtttgttacagcatgttcacaatatcaaagacttggaaccaatccaaatgcccatcaatgatagactagataaaggaaatgtggcacatat

SEQ ID NO: 136961 - DNA, 201 bp, Homo sapiens
caaggatctagaaccagaaataccatttgacccagcaatcccattactgggtatatacccaaaggattataagtcattctactataaagacacatgcacaggtaggtatgtttgttacagcatgttcacaatatcaaagacttggaaccaatccaaatgcccatcaatgatagactagataaaggaaatgtggcacatata

SEQ ID NO: 136962 - DNA, 201 bp, Homo sapiens
aaggatctagaaccagaaataccatttgacccagcaatcccattactgggtatatacccaaaggattataagtcattctactataaagacacatgcacaggtaggtatgtttgttacagcatgttcacaatatcaaagacttggaaccaatccaaatgcccatcaatgatagactagataaaggaaatgtggcacatatac

SEQ ID NO: 136963 - DNA, 201 bp, Homo sapiens
agagtttcatttttacaagcgggagtaaatttatcatgtctgaatcgtgtgctccagggggataagcttgtcataggcgaattggagggttgctggttaaygagcaccactgctgcctgcggagtgcgggaaagtgacaggagagtgggtgtccacatgagtggggaatctgtttaactctccagagggctcagttggttc

SEQ ID NO: 136964 - DNA, 201 bp, Homo sapiens
gaggtggcagagtgaagggcttgaacagggaatgacaaggggcctgccttatcaggaggaaggtgtttgggagaaaggccaagaaacaatattgagagaaygagcctggaaaagtgggccagggtgggtcgtgaggtgtgctggatgctacatcatggagcttagcctctgctgggcagcagtagctggccaaggaaggga

SEQ ID NO: 136965 - DNA, 201 bp, Homo sapiens
ttcttgtttttttctatttcacagagtttctgtgaggattaaatgaaataacatgggtggaagccctaggaccgtatggagcaaagggagccaacattcaktgagggctcagcctatcaggccctgtgcaaaatattagggacagagcaactctaatcccccactaggcagtgaggaaggaaccactgccttctcaacttt

SEQ ID NO: 136966 - DNA, 201 bp, Homo sapiens
gtttaagaacacagactgcccaacatgctagtagctctgtgaaaagctctcctctgacatcctgcaggttgtgcccgtcggtcttcatgctggggttcccyccccaagcttctccatctccccaagccatgtagttgaacttcaggtttgggtcagctgggccctaagaagaccccaaatgctgttttctgaagaagtgct

SEQ ID NO: 136967 - DNA, 201 bp, Homo sapiens
aatattctccacgaatataggtgaaaatacataatagaatacatcataacaaagtagtgtttattataagaatgcgaggttggtttaatagtcaaaacatrtcaataaaatatacaatactaacaaaggagagagcatatgattatattatggggaaaatatatttgatgaaatccaacatgagctgatgatgaaaagtct

SEQ ID NO: 136968 - DNA, 201 bp, Homo sapiens
aattcaatcttcttgatatttgtaggcatttattgaaaactacacccagagctacagtgctggccataaaacaaatctcaataatccttaaaaagattaawgtaatgcagagtgtattctatgttgacaatgaaattaaattacaaattaataacaaaaagatatctggaaaatcttccaaatatttggctattaagaaac

SEQ ID NO: 136969 - DNA, 201 bp, Homo sapiens
aatgcagatctaaagtaaggaagaacactgaaaatgctaaacatataaggaactattaaggactactttttttgtcttaagcctttttgaattcaattgayggtttatagcaaaataattacaattatttagggtttatggcatatataaaagtgaaatgtatggcaaaaataatgtaaaagataggttgtagtgtaaatg

SEQ ID NO: 136970 - DNA, 201 bp, Homo sapiens
aggagaggatgaaaaacaaacaaatataaaaataagagcccattatagtataattgctgaaaactaaaaataaagaataaatcttaaaagttagaagagawcaaagaacattagatgcaagaaataatggtagaatgatggttcacttttcattagaaattgcatagccaaaggacaatagaaagatatctttaccatgct

SEQ ID NO: 136971 - DNA, 201 bp, Homo sapiens
aatattgataaaataatcagagccctcatgacctgtggggtagtaacacacactctaacatatatgtaattggagtctaagaaggagatgagagagagaatagcatagaaaaaggattagccaaatattttttaaatttttatcaataatgacagcacataaattcaagattctagcaggagaggatgaaaaacaaacaaa

SEQ ID NO: 136972 - DNA, 201 bp, Homo sapiens
tgtatgtttacatatttgctcaccccctgtgtacacaacaagtagtttcagaattgctaactcataccctggtgagagacacatttactaactggaatacrgtatttttctttgtgaatttaaccttacagtatctagtcaaaacagtatttccgaagtttctttaattagcctttttttccccctcttttggtgtggttt

SEQ ID NO: 136973 - DNA, 201 bp, Homo sapiens
tcatggcacagaaatatcaattctggtagggacttttgtagttctatgaggtaagtctatggagaaaaagatagattctcagtaatcaatctgtttaacakatttctgtttattttcaaatgtacctaacagaaattgggcaaatggaaggatgagaatacagatggacttaaaatagttctaattctccaagggctgatt

SEQ ID NO: 136974 - DNA, 201 bp, Homo sapiens
aggatctagaaccagaaataccatttgacccagcaatcccattactgggtatatacccaaaggattataagtcattctactataaagacacatgcacaggtaggtatgtttgttacagcatgttcacaatatcaaagacttggaaccaatccaaatgcccatcaatgatagactagataaaggaaatgtggcacatataca

SEQ ID NO: 136975 - DNA, 201 bp, Homo sapiens
agaatttcacttaaaatggagccaggaaatgcccttccttcaatgtgttggtggccatggaaggagtccagcccccttgcttcccttgcttgccccactcyctggttttccaaaatcttgttgcaaacaactcgtcattacagttgctgcatgatttcgacatcagtgggaagaaaaaataaaccaataaacaatggcttg

SEQ ID NO: 136976 - DNA, 201 bp, Homo sapiens
tgatgggtgcagcaaaacacaatggcacatgtatatttgtgtaacaaacctgcatattctgcagatgtaccccagaacttaaactataatagtaaaaaaawaaaaatcacactttgtgttgtatggttctataggttttgacaaagacacagagttgttccattcagtatcagacaaaattgtctaccacttcagtatcaa

SEQ ID NO: 136977 - DNA, 201 bp, Homo sapiens
tttctagtaatggtctttaattttcttcaaaagcacatttttactttagagatgcttggccaacccttctaggcacatgggaagcccatctgccccttacycgggagcaagtgagaagggctagcaatccaaggtcaaagttggagagtcgagaagaccattgagttctcatgaaagaataagcctttgcaatcatttgat

SEQ ID NO: 136978 - DNA, 201 bp, Homo sapiens
gttttgaaatgtgaggacatgagatttgggaagggccaggtgtggaatgatatgatttggctgtgtgcccacccaaatctcatcttgcattgtagctcccrtaattccatgtgttgtgggaaggactcagtgggggctaattgaatcatgggggcagtttccgctatactcttctcatggtagtgaataagtctcatgaga

SEQ ID NO: 136979 - DNA, 201 bp, Homo sapiens
tcagttctcacatctgtaatttgggaaaacaagagtaggttatgatacaaatttgttacaaggatgtattaagataaaatgtattttaaaaagcactaaamattataaaccttgcactcgtgttaaatatcttggttactaccattaatgtaaccatttttatggtcaattcaaataaatattcattaagcacagatagtt

SEQ ID NO: 136980 - DNA, 201 bp, Homo sapiens
acgggagcttctgtccctctggagttggtgtgtaccgccctgcttggcacaaggatgtgttcaccagcctggaagctctctgaaccacttattttagggatttttttttttttttgagatggagtcttgctgtgttgcccaggctggagtgcaatggtgcaatcttggctcaccacaacctccgcctcctgggttcaagca

SEQ ID NO: 136981 - DNA, 201 bp, Homo sapiens
ctgcactccaccctgggtgacagagcaagactccgtctcaaaaaaaaaaaaaaagaaaagaaaagaaaatggagcttgagactgccaagattagtgaaaaygaaggaggaacatcccaaaaagaaagaagccgcagagagggaagcttcaaaatacatgtatgaataccactcaaatccatgactgatccctggaatatcc

SEQ ID NO: 136982 - DNA, 201 bp, Homo sapiens
cgggagcttctgtccctctggagttggtgtgtaccgccctgcttggcacaaggatgtgttcaccagcctggaagctctctgaaccacttattttagggatttttttttttttttgagatggagtcttgctgtgttgcccaggctggagtgcaatggtgcaatcttggctcaccacaacctccgcctcctgggttcaagcaa

SEQ ID NO: 136983 - DNA, 201 bp, Homo sapiens
gctctctgaaccacttattttagggatttttttttttttttgagatggagtcttgctgtgttgcccaggctggagtgcaatggtgcaatcttggctcaccrcaacctccgcctcctgggttcaagcaattctcctccctcagcctcctgagtagctgggattaaggcatgtgccaccatgcccagctaatttttgtacttt

SEQ ID NO: 136984 - DNA, 201 bp, Homo sapiens
gtgcatctgttttctttcttacccttaaaacttggaattaatccacaaaacttggcccccttgatcttttcttgctttattatttttttaccctgaacacttttttttttttaaaaaaacatgattttattgttacttttggagggagaaagaacactgtattgcctacagactactcataatgagagcaatgatgacatt

SEQ ID NO: 136985 - DNA, 201 bp, Homo sapiens
agaaggaaggaagaaaagaagagagggagggaggaaggaaggtaggaaagaggaaggaaaggaagaaggaaggaaagaaggaagaaagagaaagaaaaagaaaaagggagggagggaaagaaggaaggaaggaaagagaaaggaaaggaagaaggaaggaaagaaggaagcaagaaagagaaagaaaaagaaaagaaagga

SEQ ID NO: 136986 - DNA, 201 bp, Homo sapiens
tttttctagcaattgtgctattttaaggagacacccaggttctgccctaacaccagaggtgcctaaggtcgcagctgctcaggacctgtggcagctgtgarcagctgagctcagtttgctctgttctttcttcttgcaagaatcacacagaccatgttggtcctatggaatagaatcacaatattgcctcagaccatagga

SEQ ID NO: 136987 - DNA, 201 bp, Homo sapiens
aaggaaggaagaaaagaagagagggagggaggaaggaaggtaggaaagaggaaggaaaggaagaaggaaggaaagaaggaagaaagagaaagaaaaagaaraagggagggagggaaagaaggaaggaaggaaagagaaaggaaaggaagaaggaaggaaagaaggaagcaagaaagagaaagaaaaagaaaagaaaggagg

SEQ ID NO: 136988 - DNA, 201 bp, Homo sapiens
aggaaggaagaaaagaagagagggagggaggaaggaaggtaggaaagaggaaggaaaggaagaaggaaggaaagaaggaagaaagagaaagaaaaagaaaragggagggagggaaagaaggaaggaaggaaagagaaaggaaaggaagaaggaaggaaagaaggaagcaagaaagagaaagaaaaagaaaagaaaggaggg

SEQ ID NO: 136989 - DNA, 201 bp, Homo sapiens
cctatggacgactgtccaggctggtgtttgtgacaggtctgctgggtgtggggaggcacagggttaactactgcagggctagagcccattgctgacttctrtatattcccttgactggcaccgtgtcgccctggcctggtggatcgcttgacagtaagcctgaggctggtgcctacccatttcatggcgtggtggaggggg

SEQ ID NO: 136990 - DNA, 201 bp, Homo sapiens
ggcgtggtggaggggggctaccaaggtcttgctcgtatttctgttgagagggacaccggggagctctctggtcaggctgcgcgtgggggccctggctcccyggctcatattctgtggcctgacctgcaagcccagcttcaggctctcgacttcctcctgaagggcgtttctcaagtttgaatgaacggcttaaattggcaa

SEQ ID NO: 136991 - DNA, 201 bp, Homo sapiens
gatgcttgaggtctggaaatccaggagctggcagaatatggagggacacgaaagtgagaactcaccttctgactatactcacacacaaaattgctttgagrgagagcgacgaagcttgtggccaattggaagtcggagggaggcgcctggtgaaatggagaccagcagaagtaggagcatggaggtcccttgtgctcacat

SEQ ID NO: 136992 - DNA, 201 bp, Homo sapiens
gagtctcgctctgtggcccaggctggagtgcagtggtgcaatctcggctcactgcaagccccgcctcccgggctcacgccattctcctgcctcagcttccygagtagctgggactacaggcacccaccaccacacctggctaattttttgtattttttagtagagacggggtttcatcacgttagccaggatggtctcgat

SEQ ID NO: 136993 - DNA, 201 bp, Homo sapiens
ctgatttattttccaaaaatttactaatttttccagtaactaacatcatgaaataagggtgcaagggtttggaaaaaaacaaacccaagttcagagactcrgggaggagggccgggtggaggtcattcagtgctgccaggcctttggtgggacacgggatcctcgattgaccaggactgaggctggcggaaggaccaatgc

SEQ ID NO: 136994 - DNA, 201 bp, Homo sapiens
tccaggtttatgttaattcctcacatatatcaaacatggcagctagtcagtgccaattcttgagacataacatgtttgagaaacactttggaaacaaatgkaagctcctgactgcaagggaaggaaggagggaacgtgggctggttatgttgaggattagattcaagtagtttgttctggtattttgaattcttcaggcag

SEQ ID NO: 136995 - DNA, 201 bp, Homo sapiens
ctgacactgtcactcagttccccaaagcgcctggataaaggcagctcttcagacagcagccaaggccctggtgtctagccctgcccctgccccttcctgcygtacaccctggccgcccaggcttctccatgctgctgcgtctctaaagccgctctgcccgcggccctgaaagcctttgttgctgctaccgttccttctcag

SEQ ID NO: 136996 - DNA, 201 bp, Homo sapiens
ccttcttcctcctcccctatttttagcaggagtcagtaagcagtggagccttcacctcatccagcatcaatgaggcacaatgaggtggtgggaaaaggggrtagttggccctgtgcttccccactcccttccctgacgtcagcagggcctagagggaacagaacttgcccccaacctgtctccaacaaggcaatgtgcatc

SEQ ID NO: 136997 - DNA, 201 bp, Homo sapiens
tgcctttgtttttcttgggcaccggctcaaagtccctttaagtgcgaagtctttattcctggtttcctccttctccacttcctccccctgaaaacagctgrtggcccgttgtcactagagcccaggaggggctccttccttccctcccacctgggctatttttctgtgccacacctgtcctggtctttgtgaggcatggcc

SEQ ID NO: 136998 - DNA, 201 bp, Homo sapiens
aaaaaaaaaaaaaaaaaaagaatcacagaactagcttttaccacttccgagcttcagttctcacatctgtaatttgggaaaacaagagtaggttatgatayaaatttgttacaaggatgtattaagataaaatgtattttaaaaagcactaaacattataaaccttgcactcgtgttaaatatcttggttactaccattaa

SEQ ID NO: 136999 - DNA, 201 bp, Homo sapiens
taggtaactaatataacatccaaaaacaaacaaacaaaaaactgttcaaaagttttggcattgatatacacatttttgaagcaaaatataaagaggaattrcaatatttttcaaccaatatttccatttaataatataatgtggttatctttctatgtcaataaaaacatgattgcatgaggttctgatgcttctatgttt

SEQ ID NO: 137000 - DNA, 201 bp, Homo sapiens
gtagccacactgttgcctgaagttatgtggaaagtagaaaatgtacccaatcaatgaagtgatctagcaaaggagatgtccatcccgcaagttgaaggtgytgcctgccttcttattgtggctttcagtgatgtgcaagaagagagagagaatctcaaggaaagagcttttaatatgcaggacctggcagttaatatggtt

SEQ ID NO: 137001 - DNA, 201 bp, Homo sapiens
aattattaccagaaacctttatgatcttaacctgtgggtgaggacttgtaggaaaatgaggtaaaaattattggaaactggaggagggggatccttgttaygtagtggcatagctgtagccacactgttgcctgaagttatgtggaaagtagaaaatgtacccaatcaatgaagtgatctagcaaaggagatgtccatccc

SEQ ID NO: 137002 - DNA, 201 bp, Homo sapiens
cactaggtttggggcaggttgttgcacagcagcagatacctaatccagatttgggcacccaaaagttgggtgctgacataacaaaagcctaaatgggagtgtgggtttgcacctatgcagttagctttgagaagagtcctagtagaagcctaaagtaccttgacgaaattattaccagaaacctttatgatcttaacctgt

SEQ ID NO: 137003 - DNA, 201 bp, Homo sapiens
aacaacatttcatattttttccccaaatggttaaagattctgatatctatctatttgaaagttcatattgtactatcagattttaccttagcccatgttaraagatggcgatcttgatttctggatgttttaacattctcctaatgtaaaatgttatagaacattaggagatgagaaataaaacttcctcctctctgaggc

SEQ ID NO: 137004 - DNA, 201 bp, Homo sapiens
ggagggagggaaagaaagaaggaaggaaggagaaagaagagagaaagagaaaaagaaaaagaaggaaaggaaggagggaaggggaaggaagagaaagaaaraaaagagagaaaattgaggctctgagcaattgggtggacccaaatcccattaggggatttgaagtctgatttatctgaccctagagcccacggtgatatg

SEQ ID NO: 137005 - DNA, 201 bp, Homo sapiens
ttttaaggtaagatgaaagacaaagtaaaaacatactgaatttcttacattaattacagggtaagcaaaagaccttgttttgttctgactttagtaattasagaaacataggttaaaatatatgttttattaaattgaaagctaacataactactgaacacagaatgcttgttttccaaatcactgcagcagacaaagcag

SEQ ID NO: 137006 - DNA, 201 bp, Homo sapiens
tggggaatccactggccctgtcctttggaagctacagtctaatgtggccaggtccggtgggacactgggatgtcagcgtgtttgaatgttgggacatgggsatttttcacagtgacaacactgttaggttgtggctgacgtggacagttgtccttggtcctgtctaggggccacagaaatacaagctgttcatgttggagg

SEQ ID NO: 137007 - DNA, 201 bp, Homo sapiens
tttcaccttcctggttagctgtattcctttttgtggcatcacgttttgtggcataacatgtgaacgttagctttattctttttgtggcaattgtgaatagmactgcctttctgatttggctctcagtttgaacgttgctggtgtatagatgctactgatttttgtacatcaattttctatcctgaaactttgctgaagttg

SEQ ID NO: 137008 - DNA, 201 bp, Homo sapiens
acccaagatcacacagctcctgaattggcggagctgagattcaaatccaggctgtttgactagggagtataactaccatacactagtggctttttttttastcacagttcttgttgttgttattatcattataattacttttatacatatatatatatatatttcaattaattccatcgtagagaaaatggcccgtgtcat

SEQ ID NO: 137009 - DNA, 201 bp, Homo sapiens
gttgtctaggttatctaaaggttcatggtgggtccataaaattggcatgaaatagagtttcatgatgaaaagctcacgagcttttaattgtgaacttggtkgttttgagtctgtgcttacctctcttaactcctctgtgcctcagtttcctcatttgccaaatgggaaagatgggaattgctgcctgctgaagaaagctac

SEQ ID NO: 137010 - DNA, 201 bp, Homo sapiens
acacagctcctgaattggcggagctgagattcaaatccaggctgtttgactagggagtataactaccatacactagtggctttttttttagtcacagttcttgttgttgttattatcattataattacttttatacatatatatatatatatttcaattaattccatcgtagagaaaatggcccgtgtcataaagatcttt

SEQ ID NO: 137011 - DNA, 201 bp, Homo sapiens
agaatctcacaatcctgattaaacacatggaaaacacagtaaatgatggcctgggattctttatagccattgggatgacgtgaaattgagaaatctgttayctgtcttttttttttcctttttttattgctgctcaggaccctgtttattcaaactgtggtccatcttaaagcttgaaaacacgagctcctacatgttagg

SEQ ID NO: 137012 - DNA, 201 bp, Homo sapiens
gtggtactgcctggtgggggagttcagagagagggtataggaaatgttctatatcttgatctgggtgattccatgggcatatgtgcatgtaaggaatcctrgagctttaaacttaagacttacgtgtgctacacatctgactgtatgtgttttctacttcagtgaaaacatttacaattataacttaaacaggtcctcaca

SEQ ID NO: 137013 - DNA, 201 bp, Homo sapiens
gacatcagggtgctctctgtatcctttctcccatattccctttttctcatatgtagcaggatgttgagggagatttgtttaccctgctgtcttggaattckagctcagtttcaaagcttagggcaaaggtgccaagaatcccacattctcatctcagaagccaccagtgagccgctggctactgggcccagcccccttatt

SEQ ID NO: 137014 - DNA, 201 bp, Homo sapiens
cacagctcctgaattggcggagctgagattcaaatccaggctgtttgactagggagtataactaccatacactagtggctttttttttagtcacagttcttgttgttgttattatcattataattacttttatacatatatatatatatatttcaattaattccatcgtagagaaaatggcccgtgtcataaagatctttt

SEQ ID NO: 137015 - DNA, 201 bp, Homo sapiens
acagctcctgaattggcggagctgagattcaaatccaggctgtttgactagggagtataactaccatacactagtggctttttttttagtcacagttcttgttgttgttattatcattataattacttttatacatatatatatatatatttcaattaattccatcgtagagaaaatggcccgtgtcataaagatcttttg

SEQ ID NO: 137016 - DNA, 201 bp, Homo sapiens
gaattggcggagctgagattcaaatccaggctgtttgactagggagtataactaccatacactagtggctttttttttagtcacagttcttgttgttgttrttatcattataattacttttatacatatatatatatatatttcaattaattccatcgtagagaaaatggcccgtgtcataaagatcttttgaaatttttt

SEQ ID NO: 137017 - DNA, 201 bp, Homo sapiens
atcaggccctgtgcaaaatattagggacagagcaactctaatcccccactaggcagtgaggaaggaaccactgccttctcaactttcatctgaggaaaccraggcacagagaggttaatgagttgtctaaggtcacacagttaaaagaggcagaaggaagactcaaatcccagcaggctgctaccatctgcccatgttgca

SEQ ID NO: 137018 - DNA, 201 bp, Homo sapiens
ccaggctgtttgactagggagtataactaccatacactagtggctttttttttagtcacagttcttgttgttgttattatcattataattacttttatacatatatatatatatatttcaattaattccatcgtagagaaaatggcccgtgtcataaagatcttttgaaatttttttatggcctgctctgtggtctagagg

SEQ ID NO: 137019 - DNA, 201 bp, Homo sapiens
tggctgggagcagcctggggagtcgagggagtccagggacactgggtctctgatgcttgaggtctggaaatccaggagctggcagaatatggagggacacraaagtgagaactcaccttctgactatactcacacacaaaattgctttgagggagagcgacgaagcttgtggccaattggaagtcggagggaggcgcctgg

SEQ ID NO: 137020 - DNA, 201 bp, Homo sapiens
caggctgtttgactagggagtataactaccatacactagtggctttttttttagtcacagttcttgttgttgttattatcattataattacttttatacatatatatatatatatttcaattaattccatcgtagagaaaatggcccgtgtcataaagatcttttgaaatttttttatggcctgctctgtggtctagaggc

SEQ ID NO: 137021 - DNA, 201 bp, Homo sapiens
ttgaagttttgcttatctggatttccttattgctgaggaatcagctatctaatagtaatttttcatggcaatctgttttttctttctgtttctttttaagtattttatttgttgtcatgacctatggtttcactataatatgtataaatataaatttggttgtatttttcctatttggattcatttgaggttagtaagtac

SEQ ID NO: 137022 - DNA, 201 bp, Homo sapiens
gaggtaggcagggcagttggagacaagatccttgcctggagcctggcctcctccagcctcccaccctgagtgccagctgccccaggctcctcctctgcccygtgtgtgctgtgggggtgggcagcccctggccttgcagcggggaagcctagctcgcacctctgctccctgtgccttgggatatggccacctatgccccgg

SEQ ID NO: 137023 - DNA, 201 bp, Homo sapiens
aggcccctgcccatgtgcctggctctcctgaggccacatgggtgcctttttctcccagccctgccagtcttcctactgctactgtcaggaggtgctggacmggctcatccaatgcgggctcctggttgctgaggaggtaggcagggcagttggagacaagatccttgcctggagcctggcctcctccagcctcccaccctg

SEQ ID NO: 137024 - DNA, 201 bp, Homo sapiens
ctcccctacggcccacttggtcctaggccttcccctcttggtggtaggaatggcccatccctgcccatgctctacctctgaaacctcctgggtggtaggtstggccttgcccggtctttggctaggcccctgcccatgtgcctggctctcctgaggccacatgggtgcctttttctcccagccctgccagtcttcctactg

SEQ ID NO: 137025 - DNA, 201 bp, Homo sapiens
gtcaggcctcccctacggcccacttggtcctaggccttcccctcttggtggtaggaatggcccatccctgcccatgctctacctctgaaacctcctgggtrgtaggtctggccttgcccggtctttggctaggcccctgcccatgtgcctggctctcctgaggccacatgggtgcctttttctcccagccctgccagtctt

SEQ ID NO: 137026 - DNA, 201 bp, Homo sapiens
ctagagccagaagatggagaggaggctgcaaacccttagctgctctataaatataatcattgaggcttgattgtcccttgccatctcttgctttttccctyctttgatgtgataaacaaggggacgagacgagttgtcttttccccagcccagcagcatctttttggcgtatgtgtgtgtatttgctctcttcttccccag

SEQ ID NO: 137027 - DNA, 201 bp, Homo sapiens
tttattttttcttttcttttctttttttttttgagacggagtctcactcttttgcccaggctggagtgctgtggtgcaatctcggctcacggcaacctccrcctcctgggttcaagcaattcttctgcctcagcctcccgagtagctgggagtacaggcatgcaccaccacgcccagctaatgtttatattttgactagag

SEQ ID NO: 137028 - DNA, 201 bp, Homo sapiens
ggagtcagcagtcaaagggcagccagggagggcaggtgccacatgtacctgaacccatgctcctccctggagggctgttcatctgtgcaatggtaggtacmagggggcagggaccagggacctacctgctacactgtccttggtcaccaaggcagggcccagagggcagaaggtgtcgaaggtttttcccagcagccactg

SEQ ID NO: 137029 - DNA, 201 bp, Homo sapiens
ggaggtggtagggaggcggtggggagctgcactcaccccggcctgtcccctccagctcagccagcagtcacactgcccagatttctttcttttcctctgcygcctgctcagcccgctgctcaaggcctttgcacaggctgccgccttcctccgccagggccagctgcccgatactggtgaggcccttgttcccttgcagtc

SEQ ID NO: 137030 - DNA, 201 bp, Homo sapiens
tcttttttattttattttttcttttcttttctttttttttttgagacggagtctcactcttttgcccaggctggagtgctgtggtgcaatctcggctcackgcaacctccacctcctgggttcaagcaattcttctgcctcagcctcccgagtagctgggagtacaggcatgcaccaccacgcccagctaatgtttatatt

SEQ ID NO: 137031 - DNA, 201 bp, Homo sapiens
tgcatgtacctggtctgggggtgtagggttgatccctggccagcttgtcagagaacaatggctccgggtccggccagcctgtgacacagggcaacggcgaytgagcagaaagctgctgtggaaaccgagtggggattttactgatagtgacagtgatgacttcaaagagaccgagggccagtactccagggtgtgtttcaa

SEQ ID NO: 137032 - DNA, 201 bp, Homo sapiens
gtttcacctgcatgtacctggtctgggggtgtagggttgatccctggccagcttgtcagagaacaatggctccgggtccggccagcctgtgacacagggcracggcgactgagcagaaagctgctgtggaaaccgagtggggattttactgatagtgacagtgatgacttcaaagagaccgagggccagtactccagggtg

SEQ ID NO: 137033 - DNA, 201 bp, Homo sapiens
ggctcctcctctgccctgtgtgtgctgtgggggtgggcagcccctggccttgcagcggggaagcctagctcgcacctctgctccctgtgccttgggatatrgccacctatgccccggttctgtgtgtgctctctggatagcactggacatgtgtgcctctgaggttctctgcacacctcctgctccccacatttcttggcc

SEQ ID NO: 137034 - DNA, 201 bp, Homo sapiens
atgctagatattagacctttgttagatgcatagtttgcaaaacttttctctcattctttaggttgtctgtttactctgctgttagtttcttttgctgtgtrgaaactctttagtttaattagatcccatttgtcaattttggcttttgttgcgattgcttttggcatctttgtcatgaaatctttgcccatgtctatgttc

SEQ ID NO: 137035 - DNA, 201 bp, Homo sapiens
gatgctagatattagacctttgttagatgcatagtttgcaaaacttttctctcattctttaggttgtctgtttactctgctgttagtttcttttgctgtgyggaaactctttagtttaattagatcccatttgtcaattttggcttttgttgcgattgcttttggcatctttgtcatgaaatctttgcccatgtctatgtt

SEQ ID NO: 137036 - DNA, 201 bp, Homo sapiens
gtgagccaccatgcccagccaagtttcttacagatgctagatattagacctttgttagatgcatagtttgcaaaacttttctctcattctttaggttgtcygtttactctgctgttagtttcttttgctgtgtggaaactctttagtttaattagatcccatttgtcaattttggcttttgttgcgattgcttttggcatc

SEQ ID NO: 137037 - DNA, 201 bp, Homo sapiens
accagtagtgttttgtgagtatgtattgtgcacatatgtacacaaatatatatttcatgtggaatatatagttcgtatatgcgtattacatcatgaatttrtttataatagctgttccatgtcttatgcatgaaatctccaagtaaagggcatctaaattcagtacaattagaagtagaataaactgttgcaaataagatc

SEQ ID NO: 137038 - DNA, 201 bp, Homo sapiens
tggagtcagcagtcaaagggcagccagggagggcaggtgccacatgtacctgaacccatgctcctccctggagggctgttcatctgtgcaatggtaggtaycagggggcagggaccagggacctacctgctacactgtccttggtcaccaaggcagggcccagagggcagaaggtgtcgaaggtttttcccagcagccact

SEQ ID NO: 137039 - DNA, 201 bp, Homo sapiens
ggtgagcgcactcatggcgcatcttccatggcccaggttctgcagcagacgccgagccctgcaggccccaggctccacctatcccctacttttgccagccwggacaatcaggaaaaactagaacagttcatccggcagttcatttgtagctagaactgtgaggaggagcctgtgctgagacttctcagccccagaacacag

SEQ ID NO: 137040 - DNA, 201 bp, Homo sapiens
ctaggtggggctgctttgcggcagcatttgcatgcaaacactgaggtctaaggggccagaggtctcaaggcaggtttctgggggacaggcctggcccctgrgccatgcagacacagtccctgtggtgagcgcactcatggcgcatcttccatggcccaggttctgcagcagacgccgagccctgcaggccccaggctccac

SEQ ID NO: 137041 - DNA, 201 bp, Homo sapiens
catgcagacacagtccctgtggtgagcgcactcatggcgcatcttccatggcccaggttctgcagcagacgccgagccctgcaggccccaggctccacctrtcccctacttttgccagccaggacaatcaggaaaaactagaacagttcatccggcagttcatttgtagctagaactgtgaggaggagcctgtgctgagac

SEQ ID NO: 137042 - DNA, 201 bp, Homo sapiens
gattttactgatagtgacagtgatgacttcaaagagaccgagggccagtactccagggtgtgtttcaaaaagctgcccctggagggaggtggtagggaggyggtggggagctgcactcaccccggcctgtcccctccagctcagccagcagtcacactgcccagatttctttcttttcctctgctgcctgctcagcccgct

SEQ ID NO: 137043 - DNA, 201 bp, Homo sapiens
gctgtgaggcactagggtctttggtatcctggcatggctggcccatgtggacaccccccacctccaccacagttgtgggtggctgtgtgttaagaggctgygctctgccctctggcacactgcctccaacctggcgctgtcccctcactgtgtgtggtcaatgctgttgtttccacagtggctgggtgagtcacactggct

SEQ ID NO: 137044 - DNA, 201 bp, Homo sapiens
gcacaagccaagctgctgctttgacccgacgcatttattgaagagagctctgtccttctcccttctaccgagaagaggcggcttgcagggctggcacctgyccacacctgccactgggcctttccctgggctaggctgagtgggagcagatgccctcatcctatgtcgggcctgtgcaggagccatcacaccaccttgttg

SEQ ID NO: 137045 - DNA, 201 bp, Homo sapiens
tctcaccccgccaggctttggcactggctctttcctcatccaacggacaccctttccctcaactcctaccttatctggagaactcttatgttacctgcaamacctaatcccattgtacccttccctgtcagagttataaattcaatcctcaactcaggggtactgggggcatttatgacaagctgtgtcataaattataac

SEQ ID NO: 137046 - DNA, 201 bp, Homo sapiens
gcatttatgacaagctgtgtcataaattataacagcttctctcaggacacgtggccaggaagtgggtgatcttccttaatgaccctcactcctctctcctstcttcccagatactctgacccatggatcccctgggcccagccaagccacagtggctgtggcgccgctgtctggccgggctgctgtttcagctgctggtgg

SEQ ID NO: 137047 - DNA, 201 bp, Homo sapiens; identical to SEQ ID NO: 24219

SEQ ID NO: 137048 - DNA, 201 bp, Homo sapiens; identical to SEQ ID NO: 24220

SEQ ID NO: 137049 - DNA, 201 bp, Homo sapiens; identical to SEQ ID NO: 24222

SEQ ID NO: 137050 - DNA, 201 bp, Homo sapiens; identical to SEQ ID NO: 24225

SEQ ID NO: 137051 - DNA, 201 bp, Homo sapiens; identical to SEQ ID NO: 24224

SEQ ID NO: 137052 - DNA, 201 bp, Homo sapiens; identical to SEQ ID NO: 24226

SEQ ID NO: 137053 - DNA, 201 bp, Homo sapiens; identical to SEQ ID NO: 24229

SEQ ID NO: 137054 - DNA, 201 bp, Homo sapiens; identical to SEQ ID NO: 24237

SEQ ID NO: 137055 - DNA, 201 bp, Homo sapiens; identical to SEQ ID NO: 24239

SEQ ID NO: 137056 - DNA, 201 bp, Homo sapiens
tctgagggccctgggctccctccagttccgtgctgggtgtctccagaacaagcggggttccatgtcttccctgaaagcctgctcctccctggggccccagrtccccccactccctgcctggtcagcccctgcctctcctgagtcttcacacctgcccattctccctcctatcctccccacctctccccagcctcagcctct

SEQ ID NO: 137057 - DNA, 201 bp, Homo sapiens
ggctttggcactggctctttcctcatccaacggacaccctttccctcaactcctaccttatctggagaactcttatgttacctgcaaaacctaatcccatygtacccttccctgtcagagttataaattcaatcctcaactcaggggtactgggggcatttatgacaagctgtgtcataaattataacagcttctctcagg

SEQ ID NO: 137058 - DNA, 201 bp, Homo sapiens; identical to SEQ ID NO: 24216

SEQ ID NO: 137059 - DNA, 201 bp, Homo sapiens; identical to SEQ ID NO: 24217

SEQ ID NO: 137060 - DNA, 201 bp, Homo sapiens; identical to SEQ ID NO: 24218

SEQ ID NO: 137061 - DNA, 201 bp, Homo sapiens; identical to SEQ ID NO: 24221

SEQ ID NO: 137062 - DNA, 201 bp, Homo sapiens; identical to SEQ ID NO: 24223

SEQ ID NO: 137063 - DNA, 201 bp, Homo sapiens; identical to SEQ ID NO: 24227

SEQ ID NO: 137064 - DNA, 201 bp, Homo sapiens; identical to SEQ ID NO: 24228

SEQ ID NO: 137065 - DNA, 201 bp, Homo sapiens
cttttcaaggaagcaccaaactgttttctaccccgaatgtaatttacaatttcccagcaataggccaggcacagtggctcacggtgactccatctcaaaaaataataataattttaaaaagaaagaaagaaagaaaacttcccagcaaccacattaaaaaagaataccaggaaatttaatgtttttctttttctttttttt

SEQ ID NO: 137066 - DNA, 201 bp, Homo sapiens
ttttcaaggaagcaccaaactgttttctaccccgaatgtaatttacaatttcccagcaataggccaggcacagtggctcacggtgactccatctcaaaaaataataataattttaaaaagaaagaaagaaagaaaacttcccagcaaccacattaaaaaagaataccaggaaatttaatgtttttctttttcttttttttt

SEQ ID NO: 137067 - DNA, 201 bp, Homo sapiens; identical to SEQ ID NO: 24230

SEQ ID NO: 137068 - DNA, 201 bp, Homo sapiens
tttcaaggaagcaccaaactgttttctaccccgaatgtaatttacaatttcccagcaataggccaggcacagtggctcacggtgactccatctcaaaaaataataataattttaaaaagaaagaaagaaagaaaacttcccagcaaccacattaaaaaagaataccaggaaatttaatgtttttctttttctttttttttt

SEQ ID NO: 137069 - DNA, 201 bp, Homo sapiens; identical to SEQ ID NO: 24233

SEQ ID NO: 137070 - DNA, 201 bp, Homo sapiens
caagctgtgtcataaattataacagcttctctcaggacacgtggccaggaagtgggtgatcttccttaatgaccctcactcctctctcctctcttcccagmtactctgacccatggatcccctgggcccagccaagccacagtggctgtggcgccgctgtctggccgggctgctgtttcagctgctggtggctgtgtgttt

SEQ ID NO: 137071 - DNA, 201 bp, Homo sapiens; identical to SEQ ID NO: 24231

SEQ ID NO: 137072 - DNA, 201 bp, Homo sapiens; identical to SEQ ID NO: 24234

SEQ ID NO: 137073 - DNA, 201 bp, Homo sapiens; identical to SEQ ID NO: 24235

SEQ ID NO: 137074 - DNA, 201 bp, Homo sapiens; identical to SEQ ID NO: 24236

SEQ ID NO: 137075 - DNA, 201 bp, Homo sapiens; identical to SEQ ID NO: 24238

SEQ ID NO: 137076 - DNA, 201 bp, Homo sapiens
cacccaggctggcgttcagtggtgtgatctccgctcatttcaagtgattttcctgcctcagcctcccaagtagctgggattacaggcaccaccaccacatycggctaatttttgtattttttagtagagacagagtcttgccatgttggccaggctggtcttgaactcctgacctcaggtgatctgcccgccttggcctcc

SEQ ID NO: 137077 - DNA, 201 bp, Homo sapiens; identical to SEQ ID NO: 24240

SEQ ID NO: 137078 - DNA, 201 bp, Homo sapiens; identical to SEQ ID NO: 24242

SEQ ID NO: 137079 - DNA, 201 bp, Homo sapiens
agaatgtatagccacaggtttactccctcggggtttgagattgaaaattgcactccttgcattgtccaagaaactacaagcagagacattccacaaggtgrtccccacagccagtgttcccaggtccgctctggagggacacagctgcaactcagacccccataggatccccacttgagctcaccatcccacattacaaaa

SEQ ID NO: 137080 - DNA, 201 bp, Homo sapiens
ccagcactgcagaactgagccagagtgcacagcaaccctcaggatggctctgcctaagggaactctgtgaaagtccactttttataccatcttttacccayctcttttcttaccccaaagttcctttatgtagctcgaaatgccaaagactgtatggtttcctactaccatttccaaaggatgaaccacatgcttcctgac

SEQ ID NO: 137081 - DNA, 201 bp, Homo sapiens
gctttagccaggttctatcactccccgtgcaggcctccaacaagagcaatacagtgggatccatagttcactggacagccaagcccttaaccgccctggtmctcagcagcagcaggtgcccttccacacatgttcacagctgtgcccaggccctcggtcatcagctacctgcccagagcacaacgcctaccacagagttgg

SEQ ID NO: 137082 - DNA, 201 bp, Homo sapiens
ctgtgtgattttacaaaaatgaaaattatattaataatcccattgtaaaatcccaaaagaaagtcaagagactagcagaaagacaggtgggtgatgggatrtcctggacagagcctggatcatgaggtccccatgtagtgcttgtactacgcagatgtttcctcttgagctattttaaaggtgtggaaaaagccaaagcaa

SEQ ID NO: 137083 - DNA, 201 bp, Homo sapiens
agcccttaaccgccctggtcctcagcagcagcaggtgcccttccacacatgttcacagctgtgcccaggccctcggtcatcagctacctgcccagagcacracgcctaccacagagttggtcaatgtgttgcgtggattattctcagggcattagttcaaggccagagccctaagctcacatgtacacctgcctacaggtg

SEQ ID NO: 137084 - DNA, 201 bp, Homo sapiens
gcacagcaaccctcaggatggctctgcctaagggaactctgtgaaagtccactttttataccatcttttacccacctcttttcttaccccaaagttccttyatgtagctcgaaatgccaaagactgtatggtttcctactaccatttccaaaggatgaaccacatgcttcctgaccctggtacctgggaagagtattttga

SEQ ID NO: 137085 - DNA, 201 bp, Homo sapiens
attaatctactcatgtggaatccacccttatggcccaaacacctctcacaagaccccgtgtcctagcactgccacactggcagttaaacttcaacagagarttttggtggggactaaccacatccaaaccacagcagtatccaaaaagtgttttgtagttttatgtttatatatatgtatactttttgttcataactatgt

SEQ ID NO: 137086 - DNA, 201 bp, Homo sapiens
gtatggtttcctactaccatttccaaaggatgaaccacatgcttcctgaccctggtacctgggaagagtattttgaaaccttcatcaatggaaaaggtacrggaacatccttcacacccttgcattctcactccagctaggctgggtctagggaaccacaggcagcattttatcccctagaatgcctgtacttcatcaggt

SEQ ID NO: 137087 - DNA, 201 bp, Homo sapiens
gagaaatccttaaagtgtgttgggactatcataggtctacttttctatgtttttgaagggttcaattatcacatatgatagacccagaaacttgcacaggragcccccatttaaaaattgactgcgctcaaagtatactttcagtcttttgaaacttgaaagatattttcccaaaaaacaatgctgaaatgagtactaggt

SEQ ID NO: 137088 - DNA, 201 bp, Homo sapiens
cttggaccagtcaatttcctccttcatgagaaaaggtgtgtggggcctctttatcatacattcagattgtctcgtaacatcctgtctgcctcttagcagamaatattgagttttattaattccaagccaatgcatttcaactattcctaatatgtgtttctaataaaaccagggatttgatcctgttgtagaagagagctt

SEQ ID NO: 137089 - DNA, 201 bp, Homo sapiens
agataaaattgtccaggagacgtcatttgagaaaatgaaagaaaatcccatgacaaatcgttctacagtttccaaatctatcttggaccagtcaatttcckccttcatgagaaaaggtgtgtggggcctctttatcatacattcagattgtctcgtaacatcctgtctgcctcttagcagacaatattgagttttattaat

SEQ ID NO: 137090 - DNA, 201 bp, Homo sapiens
ctttctcttttattcctttgcacttttttttgagacagggtctcactctgtcacccaggctagagtgcagtagtgcaaacacagctcactgcagcctcaatctctcgagctcaagcgatcctcccatctcagcctcccgagtaagtagctgggactacaggtgcgtatcaccatgcccagctaattttggtattttttttt

SEQ ID NO: 137091 - DNA, 201 bp, Homo sapiens
ccatgttgcccaggctggtctcaaactcctgagctcaagcaatccacctgcctcaacctcccaaagtgccaagattacagacgtgagccactgcccctggycttctttgcatattttaaacatagttatttatattctctattaggtacccaataactgaggtcactaggggtttagttcttccacctgttttttttctag

SEQ ID NO: 137092 - DNA, 201 bp, Homo sapiens; identical to SEQ ID NO: 24251

SEQ ID NO: 137093 - DNA, 201 bp, Homo sapiens; identical to SEQ ID NO: 24252

SEQ ID NO: 137094 - DNA, 201 bp, Homo sapiens; identical to SEQ ID NO: 24241

SEQ ID NO: 137095 - DNA, 201 bp, Homo sapiens; identical to SEQ ID NO: 24243

SEQ ID NO: 137096 - DNA, 201 bp, Homo sapiens
ttcatgacagccaaaagtttccatcaatagatgactgggtaaacaaaatataggctgggcacggtggctcacgcctgtaatcccaacactttgggaagccraggtgggtggatcacctgaggtcaggagctcaagaccagcctggccaacatggcgaaactcggtccctactaaagtcacaaaaattagtcaggcatggtg

SEQ ID NO: 137097 - DNA, 201 bp, Homo sapiens
atttatattctctattaggtacccaataactgaggtcactaggggtttagttcttccacctgttttttttctagctcttgttcatagggcttttccctcayttgttttgtaattttgtataaaaagctcttttctccctgtcttgatctcacacctacattggaacatttccaatctagaatagtttaagttaacttctgg

SEQ ID NO: 137098 - DNA, 201 bp, Homo sapiens
tttctctctcacctttcactgaggtagcagacatttgagtttctccggctaatgcatgggtctctgttcctaatctgtgcctcactaaagtccagggctaycagcctcttccctgagcagaggtcactgaactgagcactgggtgtccagagggtgaacccactcagggcagctgtcatcaaagcctttgcccacttctcc

SEQ ID NO: 137099 - DNA, 201 bp, Homo sapiens
agggagccacaggggcgtggggcagcaggaccagggcatgtggaaggtcagagtgtgagctggcgtagaggtggagctgagaaaagagactagaggcaggrgagctttgcagttcttctaaggaatatggacttcaaaaatggttaaaggtggttttccaacttttctttttagtaccaaaacacttttttatttaacaaa

SEQ ID NO: 137100 - DNA, 201 bp, Homo sapiens
cctatgtgattgcacataataggaagccactttagggacgatgttggggcaagtaaccctaaggctgtccccatctacaccaccctcaaaatcaaacagaycagaacccttaggacatatctaatacagaatttgggttttctctctctaactcacttcaggaaaatccctaatactcagaaggttttgtgtgatgcctat

SEQ ID NO: 137101 - DNA, 201 bp, Homo sapiens
cttcctcttctatgaggacataaagagggtgagtgaaggctctgcagaagaaccattttaaagtggttcttcaggtgcagagaaattcaaagttgtttcaraggacatcccagagaattgtagtatttctttatgatactctcattcattccagtccaatgttacccttgccgcaggacccaaagcatgaaattcggaagg

SEQ ID NO: 137102 - DNA, 201 bp, Homo sapiens; identical to SEQ ID NO: 24248

SEQ ID NO: 137103 - DNA, 201 bp, Homo sapiens
agagttttggtggggactaaccacatccaaaccacagcagtatccaaaaagtgttttgtagttttatgtttatatatatgtatactttttgttcataactmtgtataaacagttttctatcactatcactgccataacaaattatcaaaaatttagcagcttaagacaatacaagtttattatctcacacctctgtaagtc

SEQ ID NO: 137104 - DNA, 201 bp, Homo sapiens
tctcttcctgctttctttccctctctcttctgttttcccctgtcttttctcacttttctcctcttctctcctctctctctcccccatctctccttcctcttctctttctctctcattttcactgtcatatgtttcttccttttatcttcctctcatcctctgtctacatattatttaagattttttaccaaaagtgaatca

SEQ ID NO: 137105 - DNA, 201 bp, Homo sapiens
tctgctttctccttttggtgcatttaaaagtcttccctcaatacaacaatgacaacacacacacacacacacacacacacacacacacacacacacacacaatgcaaaactgggcaaagcagatatttctcccacaaatggccaataagcatgagaagatgctcaacatcattagacattaggggaatgcaaatcaaaacc

SEQ ID NO: 137106 - DNA, 201 bp, Homo sapiens
gtggggactaaccacatccaaaccacagcagtatccaaaaagtgttttgtagttttatgtttatatatatgtatactttttgttcataactatgtataaayagttttctatcactatcactgccataacaaattatcaaaaatttagcagcttaagacaatacaagtttattatctcacacctctgtaagtcagaagtcca

SEQ ID NO: 137107 - DNA, 201 bp, Homo sapiens
ttctgctttctccttttggtgcatttaaaagtcttccctcaatacaacaatgacaacacacacacacacacacacacacacacacacacacacacacacacaatgcaaaactgggcaaagcagatatttctcccacaaatggccaataagcatgagaagatgctcaacatcattagacattaggggaatgcaaatcaaaac

SEQ ID NO: 137108 - DNA, 201 bp, Homo sapiens
cttctgctttctccttttggtgcatttaaaagtcttccctcaatacaacaatgacaacacacacacacacacacacacacacacacacacacacacacacacaatgcaaaactgggcaaagcagatatttctcccacaaatggccaataagcatgagaagatgctcaacatcattagacattaggggaatgcaaatcaaaa

SEQ ID NO: 137109 - DNA, 201 bp, Homo sapiens
tcttctgctttctccttttggtgcatttaaaagtcttccctcaatacaacaatgacaacacacacacacacacacacacacacacacacacacacacacacacaatgcaaaactgggcaaagcagatatttctcccacaaatggccaataagcatgagaagatgctcaacatcattagacattaggggaatgcaaatcaaa

SEQ ID NO: 137110 - DNA, 201 bp, Homo sapiens
agcccctctggctcctctggctttcgaagaagagaaaatggtcactaggtaggtaactactcgctttgtaacccagtgcctgttcccgccctgctctgaamtacctgtggggctctgaccccatagacaggccagcctctgcctgcttaaccatgatctcactccatgtgccatgaggacctgctgttttgtgtgtgtctg

SEQ ID NO: 137111 - DNA, 201 bp, Homo sapiens
tgacatagactcatggctgtcggccaaaggtctcaaccacccttggagcattctggagtggtcagacactactggacaatggatgagcttgtgccctgcayggtcagtctcccttccaggcccccttctgctctcccatcaactcccagccttgtagccgttctgtgacaaaagggattacatctgtgacccacagagaat

SEQ ID NO: 137112 - DNA, 201 bp, Homo sapiens
ctgaaatacctgtggggctctgaccccatagacaggccagcctctgcctgcttaaccatgatctcactccatgtgccatgaggacctgctgttttgtgtgygtctggtcttctgctccttgagcagcaggatggtataatagttaaggactaccagggtttaaatcctgactccatcactcacctcacaacgtttaaatcc

SEQ ID NO: 137113 - DNA, 201 bp, Homo sapiens
ctatcactccccgtgcaggcctccaacaagagcaatacagtgggatccatagttcactggacagccaagcccttaaccgccctggtcctcagcagcagcasgtgcccttccacacatgttcacagctgtgcccaggccctcggtcatcagctacctgcccagagcacaacgcctaccacagagttggtcaatgtgttgcgt

SEQ ID NO: 137114 - DNA, 201 bp, Homo sapiens
tacagtttccttagctgcaaagtgtagatagaatcaaggcctatctcaaagagttgttgtgagcattaacaaattcagtataggtaaaaagcttgaagcartgcctgacactcagaggatactatctacgtgttagctatctttactaaccacttctccaggccccatgaccccatgtgttccctgattatctaagaccag

SEQ ID NO: 137115 - DNA, 201 bp, Homo sapiens
cctcctgcccctgccgctgcccagtgtcttacctctggcaatttgagagattaaagaaagaggagaggcctaagcaagatttctaatgaagtattcttagmagtagagagcagagtgttcaatcactaaatcggcataaaaaccaggatagagctgtagaatccagagaaaggatggtaatcaaacggccagcttggcatg

SEQ ID NO: 137116 - DNA, 201 bp, Homo sapiens
tggtttttttttttgagacaaagtctggctctgttgcccaggcaggagtgcaatggcatggtcttggctcactgcaacctctgcctcccgggttcaagcarttctcctgcctcagcctcccaagtagctggaattacaggcacctgccagcacgcccagcaaatttttggtatttttagtacagtcagggttttaccatgt

SEQ ID NO: 137117 - DNA, 201 bp, Homo sapiens
ctctgcctcccgggttcaagcaattctcctgcctcagcctcccaagtagctggaattacaggcacctgccagcacgcccagcaaatttttggtatttttaktacagtcagggttttaccatgttggccaggctggtctcgaactcctgacctcatgatatacccgcctcggcctcccaaagcactgagattataggcgtaa

SEQ ID NO: 137118 - DNA, 201 bp, Homo sapiens; identical to SEQ ID NO: 24246

SEQ ID NO: 137119 - DNA, 201 bp, Homo sapiens; identical to SEQ ID NO: 24245

SEQ ID NO: 137120 - DNA, 201 bp, Homo sapiens; identical to SEQ ID NO: 24247

SEQ ID NO: 137121 - DNA, 201 bp, Homo sapiens; identical to SEQ ID NO: 24250

SEQ ID NO: 137122 - DNA, 201 bp, Homo sapiens
ggagggctgtgtctctggggctctgcaggggtgagacggaggtgggctcaaatggtgtacaagtcattcctcaatccttattttatttatttaattttttwaaaaaaaaattaaaccaatagagatggggtctcactatgttgaccaggctggtcttaactcctgacttcaagcagtgcccccatctcagtctcccaaagt

SEQ ID NO: 137123 - DNA, 201 bp, Homo sapiens
actagcctcagcatcttcagcatggggagagccaggcacatggctgggggccaggggaaggttcacaccaagccctgcccctttccaccctgatcccttgractttggggccaggccctcccttactggggctgggcagtgacactacctaggatcagccaccagggggtgccacgaccctggcactttcttaggcagagg

SEQ ID NO: 137124 - DNA, 201 bp, Homo sapiens
gccatatccactgggccacaggttaccctcggcaatgcccacatcagccgtcagcctgagcctccccaggagagcaaggctcacacgacaaaggctgcccrtagccaatgaggtggctgagctttctcggacctttctcggactcccaggatgtggctctgcttgtgagctgcctggtcagctctctcggggtgagagggg

SEQ ID NO: 137125 - DNA, 201 bp, Homo sapiens; identical to SEQ ID NO: 24268

SEQ ID NO: 137126 - DNA, 201 bp, Homo sapiens
ttattttatttatttaatttttttaaaaaaaaattaaaccaatagagatggggtctcactatgttgaccaggctggtcttaactcctgacttcaagcagtscccccatctcagtctcccaaagtgctaagattacaggggtgagccactgcacccggcctcaatccttattttggcctgagaggaaaggccgtggccccat

SEQ ID NO: 137127 - DNA, 201 bp, Homo sapiens
gagggctgtgtctctggggctctgcaggggtgagacggaggtgggctcaaatggtgtacaagtcattcctcaatccttattttatttatttaatttttttwaaaaaaaattaaaccaatagagatggggtctcactatgttgaccaggctggtcttaactcctgacttcaagcagtgcccccatctcagtctcccaaagtg

SEQ ID NO: 137128 - DNA, 201 bp, Homo sapiens
ccgccaactcggccaaaggcgaagccagcagtttcttctgctgccgggcaacgcgccttttaaacctgagggagtgggcgcgtgagcacttaatggcgccsgtgacagagtgagcttaacggattaataagcgcagccaggtacccgcgcaaggcacttgctggcaatggcgggaggcggacgtggggggtcgtgcaatag

SEQ ID NO: 137129 - DNA, 201 bp, Homo sapiens
taatggcgcccgtgacagagtgagcttaacggattaataagcgcagccaggtacccgcgcaaggcacttgctggcaatggcgggaggcggacgtggggggycgtgcaataggtactggaaggagagacacgggcacaaaggtcgcgggaggaacaggtgcccacaatggcggcagatctgcccgtggatcactgaagattc

SEQ ID NO: 137130 - DNA, 201 bp, Homo sapiens
atggcgcccgtgacagagtgagcttaacggattaataagcgcagccaggtacccgcgcaaggcacttgctggcaatggcgggaggcggacgtggggggtcrtgcaataggtactggaaggagagacacgggcacaaaggtcgcgggaggaacaggtgcccacaatggcggcagatctgcccgtggatcactgaagattcct

SEQ ID NO: 137131 - DNA, 201 bp, Homo sapiens
gcccgtgacagagtgagcttaacggattaataagcgcagccaggtacccgcgcaaggcacttgctggcaatggcgggaggcggacgtggggggtcgtgcartaggtactggaaggagagacacgggcacaaaggtcgcgggaggaacaggtgcccacaatggcggcagatctgcccgtggatcactgaagattcctgctct

SEQ ID NO: 137132 - DNA, 201 bp, Homo sapiens
cgggaggaacaggtgcccacaatggcggcagatctgcccgtggatcactgaagattcctgctctcctgctgaggtggagattgcagtgagctgagatcgcrccattgcactccagcctgggcaacaagtgcaaaactcagtctccaaataaagaaaaagaaaaaaaagaggccgggcgtggtggcttatgcctataatcct

SEQ ID NO: 137133 - DNA, 201 bp, Homo sapiens
gtgagacggaggtgggctcaaatggtgtacaagtcattcctcaatccttattttatttatttaatttttttaaaaaaaaattaaaccaatagagatggggwctcactatgttgaccaggctggtcttaactcctgacttcaagcagtgcccccatctcagtctcccaaagtgctaagattacaggggtgagccactgcacc

SEQ ID NO: 137134 - DNA, 201 bp, Homo sapiens
gctggggagcagggctccactctgagacgggggcagccttgccggatccagggcagagttaagcggccccagctctgctttcctagagctgctgagaaccygggaaatggtgtggaggttccggggagccctgcccctacctggcaaccgcaatgcagcaggcaccaagttctcctgcacattgcgacagtgtgaccctgg

SEQ ID NO: 137135 - DNA, 201 bp, Homo sapiens; identical to SEQ ID NO: 24270

SEQ ID NO: 137136 - DNA, 201 bp, Homo sapiens
aatgaaatggatgacttcagctctaccagcatcaccaacgagtttggggtacccccctcacctgccaatttcatccagccaggtatggggtggaggtccgrgggtgggggactggggtggagaggggcgggtgtcctgggcaggcagctgacgggcatccctgtcttctcccattggccgcagggaagcagccgctctcgt

SEQ ID NO: 137137 - DNA, 201 bp, Homo sapiens
catggctgggggccaggggaaggttcacaccaagccctgcccctttccaccctgatcccttggactttggggccaggccctcccttactggggctgggcastgacactacctaggatcagccaccagggggtgccacgaccctggcactttcttaggcagagggtggccagctgatgctgggaacccgggcgccttctcag

SEQ ID NO: 137138 - DNA, 201 bp, Homo sapiens
atcttcagccttttctccccaccccactccattcactctctgcctatcactcaccagcctataccacctgcctcagggcctttgcactgaccatttaggcmacattccaggctcttttcacacgttgcctcctctgagaagctctccctaaccactctgcccatacctcatgcctcttgattccccttacctggcttgtgg

SEQ ID NO: 137139 - DNA, 201 bp, Homo sapiens
ccagggcatcgtgggctggaggcctggatcatcacagagtggacaatggttggtgtcctctctctagtgcctgggccatctggagcccctgtgccatgagrgccaaaccccttgctccaatgagacccagcaggccccaacctgctcttcctgatgacctggcctgaaatggcaccacctgggctgaggcctgtgaccaca

SEQ ID NO: 137140 - DNA, 201 bp, Homo sapiens; identical to SEQ ID NO: 24272

SEQ ID NO: 137141 - DNA, 201 bp, Homo sapiens
ggccaggcaaggtcgggcactgtctgacctggctgggcgatagctttggctccaaggtgcgctccccagtcagcgggatcctgctcaataatgaaatggaygacttcagctctaccagcatcaccaacgagtttggggtacccccctcacctgccaatttcatccagccaggtatggggtggaggtccgagggtgggggac

SEQ ID NO: 137142 - DNA, 201 bp, Homo sapiens
gggctgggcagtgacactacctaggatcagccaccagggggtgccacgaccctggcactttcttaggcagagggtggccagctgatgctgggaacccgggygccttctcagacccgtaggcgtccagctcaccctgccgatgacactggaggtgaagctgaggtccgaggaatggggactgggcaacaggctggaggaaaa

SEQ ID NO: 137143 - DNA, 201 bp, Homo sapiens
gacactggaggtgaagctgaggtccgaggaatggggactgggcaacaggctggaggaaaacatctcggtcagagccacgcccctggggggtttccaagagyaagcccagagtgaaacccaagcttgtgatcctctccagagggaggcctggttctcagggaacagcaaacgggaagatgtccccagatcccagggatcagg

SEQ ID NO: 137144 - DNA, 201 bp, Homo sapiens
ccactgggccacaggttaccctcggcaatgcccacatcagccgtcagcctgagcctccccaggagagcaaggctcacacgacaaaggctgcccatagccartgaggtggctgagctttctcggacctttctcggactcccaggatgtggctctgcttgtgagctgcctggtcagctctctcggggtgagaggggcttgtca

SEQ ID NO: 137145 - DNA, 201 bp, Homo sapiens
cagtgggtggatagggaccaggctgggccaggcaaggtcgggcactgtctgacctggctgggcgatagctttggctccaaggtgcgctccccagtcagcgrgatcctgctcaataatgaaatggatgacttcagctctaccagcatcaccaacgagtttggggtacccccctcacctgccaatttcatccagccaggtatg

SEQ ID NO: 137146 - DNA, 201 bp, Homo sapiens
catatccactgggccacaggttaccctcggcaatgcccacatcagccgtcagcctgagcctccccaggagagcaaggctcacacgacaaaggctgcccatrgccaatgaggtggctgagctttctcggacctttctcggactcccaggatgtggctctgcttgtgagctgcctggtcagctctctcggggtgagaggggct

SEQ ID NO: 137147 - DNA, 201 bp, Homo sapiens
acccgggcgccttctcagacccgtaggcgtccagctcaccctgccgatgacactggaggtgaagctgaggtccgaggaatggggactgggcaacaggctgsaggaaaacatctcggtcagagccacgcccctggggggtttccaagagcaagcccagagtgaaacccaagcttgtgatcctctccagagggaggcctggtt

SEQ ID NO: 137148 - DNA, 201 bp, Homo sapiens
ccaggccctcccttactggggctgggcagtgacactacctaggatcagccaccagggggtgccacgaccctggcactttcttaggcagagggtggccagcygatgctgggaacccgggcgccttctcagacccgtaggcgtccagctcaccctgccgatgacactggaggtgaagctgaggtccgaggaatggggactggg

SEQ ID NO: 137149 - DNA, 201 bp, Homo sapiens
gatcagccaccagggggtgccacgaccctggcactttcttaggcagagggtggccagctgatgctgggaacccgggcgccttctcagacccgtaggcgtcyagctcaccctgccgatgacactggaggtgaagctgaggtccgaggaatggggactgggcaacaggctggaggaaaacatctcggtcagagccacgcccct

SEQ ID NO: 137150 - DNA, 201 bp, Homo sapiens
aggaggcagcatcaaaggctcccctcgcctgcgtggcagcaggggaaacttgtgtctacagggcctagaggcctgggatctggggaagccacccctggggkcgagtgtctgccctggtgctgtatctgccgtcttttcacaatgggtgtgacccgaagagacagcctgaggtccgtcctcactcactgtgtttgaggaact

SEQ ID NO: 137151 - DNA, 201 bp, Homo sapiens
atggagccatctggctggggaggaacagagaggtgggattcggagatcttcacaatgcgggcactggaactagcctcagcatcttcagcatggggagagcmaggcacatggctgggggccaggggaaggttcacaccaagccctgcccctttccaccctgatcccttggactttggggccaggccctcccttactggggct

SEQ ID NO: 137152 - DNA, 201 bp, Homo sapiens
cagtgacactacctaggatcagccaccagggggtgccacgaccctggcactttcttaggcagagggtggccagctgatgctgggaacccgggcgccttctyagacccgtaggcgtccagctcaccctgccgatgacactggaggtgaagctgaggtccgaggaatggggactgggcaacaggctggaggaaaacatctcgg

SEQ ID NO: 137153 - DNA, 201 bp, Homo sapiens
ggtgtggaggttccggggagccctgcccctacctggcaaccgcaatgcagcaggcaccaagttctcctgcacattgcgacagtgtgaccctgggctctggygggcggtaggtggggcctttggacctaccagcagtgagggagttaacacagcagctgacttctgtaggcaaggaaaactcccctcagacactttgctgcc

SEQ ID NO: 137154 - DNA, 201 bp, Homo sapiens
ccggggagccctgcccctacctggcaaccgcaatgcagcaggcaccaagttctcctgcacattgcgacagtgtgaccctgggctctggcgggcggtaggtsgggcctttggacctaccagcagtgagggagttaacacagcagctgacttctgtaggcaaggaaaactcccctcagacactttgctgcctggcctcctgcc

SEQ ID NO: 137155 - DNA, 201 bp, Homo sapiens
ccctggccgtgcccaccctgcacagcccccaagccatgctgatcacactcccatgccccaggccatcatctacaacctctggttcggctatgacgtgaagygggccgtggaggagccccggctgcacaaccagcttctgcccaacgtcacgacagtggagagaaacattgaccaggtgggctgggggttggagaaactgag

SEQ ID NO: 137156 - DNA, 201 bp, Homo sapiens
ttcagccttttctccccaccccactccattcactctctgcctatcactcaccagcctataccacctgcctcagggcctttgcactgaccatttaggccacwttccaggctcttttcacacgttgcctcctctgagaagctctccctaaccactctgcccatacctcatgcctcttgattccccttacctggcttgtggttt

SEQ ID NO: 137157 - DNA, 201 bp, Homo sapiens
gcttggaccagccggggacgcagcccagagggagtgggtccagaaggaaacagctagacacagcagccttcaccatccgcagcccctccaggcctccctcrgggcctgctccctcctctgtgcacagttccaacacctggggcagggttctgggaagggctggtggaggtgggctggtgggaggcggtgatcacagcccag

SEQ ID NO: 137158 - DNA, 201 bp, Homo sapiens
atagctttggctccaaggtgcgctccccagtcagcgggatcctgctcaataatgaaatggatgacttcagctctaccagcatcaccaacgagtttggggtrcccccctcacctgccaatttcatccagccaggtatggggtggaggtccgagggtgggggactggggtggagaggggcgggtgtcctgggcaggcagctga

SEQ ID NO: 137159 - DNA, 201 bp, Homo sapiens
tgacactggaggtgaagctgaggtccgaggaatggggactgggcaacaggctggaggaaaacatctcggtcagagccacgcccctggggggtttccaagakcaagcccagagtgaaacccaagcttgtgatcctctccagagggaggcctggttctcagggaacagcaaacgggaagatgtccccagatcccagggatcag

SEQ ID NO: 137160 - DNA, 201 bp, Homo sapiens
atgacactggaggtgaagctgaggtccgaggaatggggactgggcaacaggctggaggaaaacatctcggtcagagccacgcccctggggggtttccaagwgcaagcccagagtgaaacccaagcttgtgatcctctccagagggaggcctggttctcagggaacagcaaacgggaagatgtccccagatcccagggatca

SEQ ID NO: 137161 - DNA, 201 bp, Homo sapiens
gtgccacgaccctggcactttcttaggcagagggtggccagctgatgctgggaacccgggcgccttctcagacccgtaggcgtccagctcaccctgccgakgacactggaggtgaagctgaggtccgaggaatggggactgggcaacaggctggaggaaaacatctcggtcagagccacgcccctggggggtttccaagag

SEQ ID NO: 137162 - DNA, 201 bp, Homo sapiens
cctggcactttcttaggcagagggtggccagctgatgctgggaacccgggcgccttctcagacccgtaggcgtccagctcaccctgccgatgacactggakgtgaagctgaggtccgaggaatggggactgggcaacaggctggaggaaaacatctcggtcagagccacgcccctggggggtttccaagagcaagcccaga

SEQ ID NO: 137163 - DNA, 201 bp, Homo sapiens
cagaaggaaacagctagacacagcagccttcaccatccgcagcccctccaggcctccctcggggcctgctccctcctctgtgcacagttccaacacctggrgcagggttctgggaagggctggtggaggtgggctggtgggaggcggtgatcacagcccagcacctggatatcaccaggggcactggggccaggggccagg

SEQ ID NO: 137164 - DNA, 201 bp, Homo sapiens; identical to SEQ ID NO: 24313

SEQ ID NO: 137165 - DNA, 201 bp, Homo sapiens
gtcgcctgctcccacaaccgagctgagctcccctccacccacgcaggctgcggcagcctccagcgcctgccaccttgtcccggagcgcaagccccgcagtygggaagggggtcttcctccgtagcctggcagccgctgccgcctccaagcccaactgccctccccactcccttcttcatggctcccactgacatcacctag

SEQ ID NO: 137166 - DNA, 201 bp, Homo sapiens
aaaccttcccattttccacccacagcccagaggagggagggctcccagtcaactcacctgccgaagtgaggttatcggggccatcagaggtgttgctggcrttgggaccagtgggcagcagcgaggcttccaggtccatccagccagtgccggtcgcctgctcccacaaccgagctgagctcccctccacccacgcaggct

SEQ ID NO: 137167 - DNA, 201 bp, Homo sapiens
agcctcagtctgtccccaacagctgcagctcaactacctgggaaactacgtccccaatggctggactcctgagggaggctgtggcttctgcaaccaggacyggaggacactcccgggggggcaggtgaggtgggggtgccagggaggggcacgagagggcagcgtgctgagcaggaggtacaaggacagcggactgggggg

SEQ ID NO: 137168 - DNA, 201 bp, Homo sapiens
ttttgaactcaggaggcagaggttgcagtgagccgagaccacgccattgcactccagcctgggtgacagagtgagactccatctcaaaaaataaaaataawaaaaaaaaaaaacaaggagagagagaatatgaggaggggtagggatgctgaggctcctactggcctcccgctcagctcaccctccccttcctcgcccagc

SEQ ID NO: 137169 - DNA, 201 bp, Homo sapiens
tccgggcttctctctgagtccctgcgtgttgcatcttccagcctcccccccgggtgtttctggccgtgtttgtggaacagcctactccgtttctgccccgyttcctgcagcggctgctactcctggactatccccccgacagggtcacccttttcctgcacaacaacgtgagactcccctgttggagcctctcctgaggga

SEQ ID NO: 137170 - DNA, 201 bp, Homo sapiens
caggtggatcacctgaggtcaggagttcaaggccagcctggtcgacatggtgaaaccctgtctctactaaaaacacaaaaattagccgggcatggtggtgygcgcctgtaatcctggctacccgggaggctgaggaaggagaatcgcttgaaccctggaggtggaagttgcaatgagccaagatcgtgccactgcactcca

SEQ ID NO: 137171 - DNA, 201 bp, Homo sapiens
tgggaggccgaggcaggtggatcacctgaggtcaggagttcaaggccagcctggtcgacatggtgaaaccctgtctctactaaaaacacaaaaattagccrggcatggtggtgcgcgcctgtaatcctggctacccgggaggctgaggaaggagaatcgcttgaaccctggaggtggaagttgcaatgagccaagatcgtg

SEQ ID NO: 137172 - DNA, 201 bp, Homo sapiens
tccaagacttttgggaggcttaggcaggaggattgcttgagtccaggaatttaagaccagcctggacaacatagttgagacctcatctctacaaaaaaaaagaaagaaaaaattagccaggcttcatggtgtacgcctgtaatcccagctacttgggaggctgaggtgggaccatcacttgagcccaggagtttgaggatg

SEQ ID NO: 137173 - DNA, 201 bp, Homo sapiens
agctctgtgggagtggaggcctcaggctgaatgggatttggggagcaaagggggttgcaaagagaaaaatgtgtgcctgggcgtggtggctcacgcctgtmatccaagacttttgggaggcttaggcaggaggattgcttgagtccaggaatttaagaccagcctggacaacatagttgagacctcatctctacaaaaaaa

SEQ ID NO: 137174 - DNA, 201 bp, Homo sapiens
acggtctggcctgggggcagtcccccagactccaggcatcgcctgcatcacggacacccccaccccactacagggcatcttcctccatctgagcaatcagyatgaatttggccggctcctggccacttccagatacgacacggagcacctgcaccccgacctctggcagatcttcgacaaccccgtcgtgagtggggaccc

SEQ ID NO: 137175 - DNA, 201 bp, Homo sapiens
ttgtcaaggccccgctgcctcagtggtggccaggtggctgtcctggcgtgggagggcccctgcaggcgctggaggcaaaacccggacaactgagcttgccsattcggaatcagaagagattggttaagtcagctctggaactcgggtgaggacccgagcgtgacccggtggggacgccccagggctgccgggccggggagg

SEQ ID NO: 137176 - DNA, 201 bp, Homo sapiens
gcatgagaattgcttgaaaccgggaggcagaggttgcagtgagccaagatcgagccaagatcgcaccactgcactccagcctgagtgacagagcgagactmtctcaaaagaataataataatacaaaataaaagaccccctgcgcccgcagctgtccctgcagcctcttccctcctctcccccaggcgcgggcggtgatga

SEQ ID NO: 137177 - DNA, 201 bp, Homo sapiens
gtgtgagttctacttcagcctggacgccgacgctgtcctcaccaacctgcagaccctgcgtatcctcattgaggagaacaggtggcttaccccctctcccygcagccggagggcaccccaacaggccccgggaaccccactcctgccctgggcaccgggctccccaggcctgctcccgtctgcccagccctcacccccacc

SEQ ID NO: 137178 - DNA, 201 bp, Homo sapiens
ctggcccttgcctcacctgtcacccatccagcccctcctgggcctccccattcgcatccttgcagcccccatgctgtcactcctgcccttgccagctcacscagacagcagagagcctggggaaggaaggatagacactgcctccctcctcttctcctgggggcatgggccagttaccccatccacaccgcctccccacct

SEQ ID NO: 137179 - DNA, 201 bp, Homo sapiens
ggcggcctctgcttcctcctggatcttcctgtctgcaggcaccccagcctccggtgtctgccatatctgccatctcccttgtcaccccggtctgctgcacygtgccccccggtctggccgccctgccccgtgtatctgcctgctccccaggccccacgtctgctcactccatgtttcctttcccttctctttccagggagg

SEQ ID NO: 137180 - DNA, 201 bp, Homo sapiens
cttctgggcaggcggcctctgcttcctcctggatcttcctgtctgcaggcaccccagcctccggtgtctgccatatctgccatctcccttgtcaccccggyctgctgcaccgtgccccccggtctggccgccctgccccgtgtatctgcctgctccccaggccccacgtctgctcactccatgtttcctttcccttctctt

SEQ ID NO: 137181 - DNA, 201 bp, Homo sapiens
cactaaggtgccaccagtggtctcaacccccgccccgccctgccccaacccccaggcacctccaacccttctgagaagctggcccttcccagcccccatakcagaggtgcctgacccccacctccacccctggaggcctcagccactcagcctcagtctgtccccaacagctgcagctcaactacctgggaaactacgtcc

SEQ ID NO: 137182 - DNA, 201 bp, Homo sapiens
tgcccttccgcgcgcccatccgcaccgtaggtgagccccggcctccgccccgcgatcctggcccagggcccgctccctccccgtcccgggttggggcctcgccacccagactggcctttggccaccgcgccagccctgaactctgttcccgcctatccccaaggaggaaaagaggaggagaaccggggatcccagcccaga

SEQ ID NO: 137183 - DNA, 201 bp, Homo sapiens
agtctcgaggtcaacactccccctccccgccaggattcatcggttttgccaccaccatccaccaaatcgtgcgccagtggaagtacaaggatgatgacgaygaccagctgttctacacacggctctacctggacccaggactgagggtagggaaggcagaggagtgggcgcatcccgcagctctgtgggagtggaggcctc

SEQ ID NO: 137184 - DNA, 201 bp, Homo sapiens
ctggccggcagccccacagagctgctgaagaagttcgtccagagtggcagccgcctgctcttctctgcagagagcttctgctggcccgagtgggggctggyggagcagtaccctgaggtgggcacggggaagcgcttcctcaattctggtggtgagtggcagagtgcccaaggcagaggggccaagagcggtgggacacag

SEQ ID NO: 137185 - DNA, 201 bp, Homo sapiens
gagacagcctgggggacaggccctgggaccctgggagtctcgaggtcaacactccccctccccgccaggattcatcggttttgccaccaccatccaccaartcgtgcgccagtggaagtacaaggatgatgacgacgaccagctgttctacacacggctctacctggacccaggactgagggtagggaaggcagaggagtg

SEQ ID NO: 137186 - DNA, 201 bp, Homo sapiens
ctcgggcagtgacacagacccggacatggccttctgtaagagctttcgagacaaggtgagcgcgggtgcacggtctggcctgggggcagtcccccagactmcaggcatcgcctgcatcacggacacccccaccccactacagggcatcttcctccatctgagcaatcagcatgaatttggccggctcctggccacttccag

SEQ ID NO: 137187 - DNA, 201 bp, Homo sapiens
tggatcacctgaggtcaggagttcaagaccagcctggccaagatggtgaaacctcgtctctactaaaaatacaaaaattagccgggtgtggtggcaggtgyctataatcccagctactcgggaggctgaggcatgagaattgcttgaaaccgggaggcagaggttgcagtgagccaagatcgagccaagatcgcaccactg

SEQ ID NO: 137188 - DNA, 201 bp, Homo sapiens
tttataggggcaaaaccacttccggcctcagtgtggaggtgtaaatcttgtgggagccacgaaatgggtcattttaaagatgtggtcacggtgttcttacragaaatcttattttcctttggtccttgtgaagatgctgtgatcacaaaggcagcccctggagcttctccgggcagaagaggaggtgggctggactgtcaa

SEQ ID NO: 137189 - DNA, 201 bp, Homo sapiens
tgcttcctcctggatcttcctgtctgcaggcaccccagcctccggtgtctgccatatctgccatctcccttgtcaccccggtctgctgcaccgtgcccccyggtctggccgccctgccccgtgtatctgcctgctccccaggccccacgtctgctcactccatgtttcctttcccttctctttccagggaggtggctgccg

SEQ ID NO: 137190 - DNA, 201 bp, Homo sapiens
caaccacaagggcctggactatgaggtgcgccccagtcacactacccacccacgcttcacctcaggaccctcgggtccccacctagagcccctgcgtgcaycccccagctcccctccctgcccatttcccagtgactttgtgggtatcagctcctggatcgcttctgggcaggcggcctctgcttcctcctggatcttcct

SEQ ID NO: 137191 - DNA, 201 bp, Homo sapiens
acaagggacatgcaggggccttatgttcagggactgggataccctgagggaagaaggacttcccgggatgagctgggcagaatttggggggctgtcctccmagctgaccgcggtgtcggtgcctccaggggtgtgtggaatgtaccatacatctcccaggcctatgtgatccggggtgataccctgcggatggagctgccc

SEQ ID NO: 137192 - DNA, 201 bp, Homo sapiens
cagacgagcagccgtctctgcggccacaccacgactcatccaccttcaccctcaacgttgccctcaaccacaagggcctggactatgaggtgcgccccagycacactacccacccacgcttcacctcaggaccctcgggtccccacctagagcccctgcgtgcatcccccagctcccctccctgcccatttcccagtgact

SEQ ID NO: 137193 - DNA, 201 bp, Homo sapiens
tcctgcacaacaacgtgagactcccctgttggagcctctcctgagggaccctttccctgccctgatcagaactctcgtgcccccacccccatctccttccygcacccccatccctcaggtgccgcctccctgccctctgagcccatccccctatgtcttcccctcccaggaggtcttccatgaaccccacatcgctgactc

SEQ ID NO: 137194 - DNA, 201 bp, Homo sapiens
gtgacacagcgagaccctgtctcaaaaaaaaaagaaaagaaaaaattagcttggcatggtggcatgtgcctgtagttccagctacttgggagtctgaggcrggaggatcgcttgagcccagaaggtcgaggctgtagtgagctatgattgtgccactgcactccagcctggttgacagagcaataccctatctcaaaaaaa

SEQ ID NO: 137195 - DNA, 201 bp, Homo sapiens
aacaggtggcttaccccctctccccgcagccggagggcaccccaacaggccccgggaaccccactcctgccctgggcaccgggctccccaggcctgctccsgtctgcccagccctcacccccacctgtccgcaggaaggtgatcgcccccatgctgtcccgccacggcaagctgtggtccaacttctggggcgccctgagc

SEQ ID NO: 137196 - DNA, 201 bp, Homo sapiens
ctactcgggaggctgaggtgggagaatcgcttgaacctgggaggcagaggttgcagtgagccaagatcacgccactgcactccaccttgggtgacacagcragaccctgtctcaaaaaaaaaagaaaagaaaaaattagcttggcatggtggcatgtgcctgtagttccagctacttgggagtctgaggcgggaggatcgc

SEQ ID NO: 137197 - DNA, 201 bp, Homo sapiens
gagttcaagaccagcctggccaagatggtgaaacctcgtctctactaaaaatacaaaaattagccgggtgtggtggcaggtgcctataatcccagctactygggaggctgaggcatgagaattgcttgaaaccgggaggcagaggttgcagtgagccaagatcgagccaagatcgcaccactgcactccagcctgagtgac

SEQ ID NO: 137198 - DNA, 201 bp, Homo sapiens
acggggaagccttgacccagacttgggaggagtagggagcttcacaggacaggtgacatcttagctgagacttgaagggccgggagcagtgagtcaggccragaagtagcaaagaagactgttctgcacagaggaacacaggtgtgaaggctggaggacgggaggaaggaggctggactgccctggggtggggagcgccat

SEQ ID NO: 137199 - DNA, 201 bp, Homo sapiens
gatctgagggttttctgttcagacaagatgaaggcagaggccgaacagaaaggactcttgcccccaaagccagcattgatcagacagcctcttctcctgtrtattgggtatactggtgttatgcttgaaatcacatcttaaaagaagaatggggctgggctcagtggctcatgcctgtaatcccagcactttgggaggcca

SEQ ID NO: 137200 - DNA, 201 bp, Homo sapiens
cggagggcaccccaacaggccccgggaaccccactcctgccctgggcaccgggctccccaggcctgctcccgtctgcccagccctcacccccacctgtccrcaggaaggtgatcgcccccatgctgtcccgccacggcaagctgtggtccaacttctggggcgccctgagccccgatgagtactacgcccgctccgaggac

SEQ ID NO: 137201 - DNA, 201 bp, Homo sapiens
aggaggactgcttgagcctgggagtttaagatcagcctgagcaacgtagcaagagcctatctctacaaaaaacttaaaatattagctgggcacggtggtgygtgcctgtggtcccagctactacggaggctgaggtgggagaatcacttgaacttgggaggttgaggctgcagtgagccatgtttccaccactgcactcca

SEQ ID NO: 137202 - DNA, 201 bp, Homo sapiens
cccttccgcgcgcccatccgcaccgtaggtgagccccggcctccgccccgcgatcctggcccagggcccgctccctccccgtcccgggttggggcctcgccacccagactggcctttggccaccgcgccagccctgaactctgttcccgcctatccccaaggaggaaaagaggaggagaaccggggatcccagcccagatc

SEQ ID NO: 137203 - DNA, 201 bp, Homo sapiens
gcccttccgcgcgcccatccgcaccgtaggtgagccccggcctccgccccgcgatcctggcccagggcccgctccctccccgtcccgggttggggcctcgccacccagactggcctttggccaccgcgccagccctgaactctgttcccgcctatccccaaggaggaaaagaggaggagaaccggggatcccagcccagat

SEQ ID NO: 137204 - DNA, 201 bp, Homo sapiens
ctgcccttccgcgcgcccatccgcaccgtaggtgagccccggcctccgccccgcgatcctggcccagggcccgctccctccccgtcccgggttggggcctcgccacccagactggcctttggccaccgcgccagccctgaactctgttcccgcctatccccaaggaggaaaagaggaggagaaccggggatcccagcccag

SEQ ID NO: 137205 - DNA, 201 bp, Homo sapiens
gggggtcccagcaggaggggtgggctgaagtctggatgcccaggtccccacggtaagcctggtcaggagttccccccacaactccccaccccttgcctggsacggggcaatcttctccacagaccctgggcctgggagaggagtggcgagggggtgatgtggctcgaacagttggtggaggacagaaggtccggtggttaa

SEQ ID NO: 137206 - DNA, 201 bp, Homo sapiens
gctgcccttccgcgcgcccatccgcaccgtaggtgagccccggcctccgccccgcgatcctggcccagggcccgctccctccccgtcccgggttggggcctcgccacccagactggcctttggccaccgcgccagccctgaactctgttcccgcctatccccaaggaggaaaagaggaggagaaccggggatcccagccca

SEQ ID NO: 137207 - DNA, 201 bp, Homo sapiens
tccctcagcccctacctggcgggtccccggctgctctcacaaagccttccctgctcctccctgccccttcccattctgcctgctgcctgtccccttccccrttctgcggcgtcagctagccctgttctccctcgccccatcctcagccatgcccggacgtgtactggttcccactgctgtcagaacaaatgtgtgatgagc

SEQ ID NO: 137208 - DNA, 201 bp, Homo sapiens
ttggaaggcagaggcaggtggattactcgaggtcaggagttcgagaccagcctggccaacatggtgaaaccccatctctaccaaaaatacaaaaatcagcygggcatggtggctggcacctctaatcccagctatttgggaggctaaggtgggagaattgcttgaacctgggaggtggaggttgcagtgagccaagatcac

SEQ ID NO: 137209 - DNA, 201 bp, Homo sapiens
ggctggcacctctaatcccagctatttgggaggctaaggtgggagaattgcttgaacctgggaggtggaggttgcagtgagccaagatcacaccactgcaytccagcctgggtgacagagcaagactccgtctcaaaaaccaaaaacaagaaacaaaaaagaagtgccacagcttggggtaggaactgaccgcattttggg

SEQ ID NO: 137210 - DNA, 201 bp, Homo sapiens
tgcgtatcctcattgaggagaacaggtggcttaccccctctccccgcagccggagggcaccccaacaggccccgggaaccccactcctgccctgggcaccrggctccccaggcctgctcccgtctgcccagccctcacccccacctgtccgcaggaaggtgatcgcccccatgctgtcccgccacggcaagctgtggtcca

SEQ ID NO: 137211 - DNA, 201 bp, Homo sapiens
tgtttctggccgtgtttgtggaacagcctactccgtttctgccccgcttcctgcagcggctgctactcctggactatccccccgacagggtcacccttttyctgcacaacaacgtgagactcccctgttggagcctctcctgagggaccctttccctgccctgatcagaactctcgtgcccccacccccatctccttcctg

SEQ ID NO: 137212 - DNA, 201 bp, Homo sapiens
cctcgtctctactaaaaatacaaaaattagccgggtgtggtggcaggtgcctataatcccagctactcgggaggctgaggcatgagaattgcttgaaaccrggaggcagaggttgcagtgagccaagatcgagccaagatcgcaccactgcactccagcctgagtgacagagcgagactatctcaaaagaataataataat

SEQ ID NO: 137213 - DNA, 201 bp, Homo sapiens
cagagcaagactccgtctcaaaaaccaaaaacaagaaacaaaaaagaagtgccacagcttggggtaggaactgaccgcattttgggaggtggggtggttgkgaccagcagtgcttgacaagggacatgcaggggccttatgttcagggactgggataccctgagggaagaaggacttcccgggatgagctgggcagaattt

SEQ ID NO: 137214 - DNA, 201 bp, Homo sapiens
gccccctactctcaggggtttggagtggtcaccagtcagaggtgccatgaggctggctgcagtggctcacacttttgatgccaccactttgggaggctgargtaggaggactgcttgagcctgggagtttaagatcagcctgagcaacgtagcaagagcctatctctacaaaaaacttaaaatattagctgggcacggtgg

SEQ ID NO: 137215 - DNA, 201 bp, Homo sapiens
gaggcagaggttgcagtgagccgagaccacgccattgcactccagcctgggtgacagagtgagactccatctcaaaaaataaaaataaaaaaaaaaaaaaacaaggagagagagaatatgaggaggggtagggatgctgaggctcctactggcctcccgctcagctcaccctccccttcctcgcccagctgcggtgtgatc

SEQ ID NO: 137216 - DNA, 201 bp, Homo sapiens
ggaggcagaggttgcagtgagccgagaccacgccattgcactccagcctgggtgacagagtgagactccatctcaaaaaataaaaataaaaaaaaaaaaaaacaaggagagagagaatatgaggaggggtagggatgctgaggctcctactggcctcccgctcagctcaccctccccttcctcgcccagctgcggtgtgat

SEQ ID NO: 137217 - DNA, 201 bp, Homo sapiens; identical to SEQ ID NO: 24321

SEQ ID NO: 137218 - DNA, 201 bp, Homo sapiens
aggaggcagaggttgcagtgagccgagaccacgccattgcactccagcctgggtgacagagtgagactccatctcaaaaaataaaaataaaaaaaaaaaaaaacaaggagagagagaatatgaggaggggtagggatgctgaggctcctactggcctcccgctcagctcaccctccccttcctcgcccagctgcggtgtga

SEQ ID NO: 137219 - DNA, 201 bp, Homo sapiens
cttgaggctgagtcgcgccaagcccctcgcccatcactaccctgaactggggtttccagcctccctatgcaaagggactcggaattcctgggcaccactcscaccctgccctccttggggtcagagtgttcctgggtgagaagagtttaagaatgggaaggaagaaagggagggaagtcgagtgagagggaggacagcaaa

SEQ ID NO: 137220 - DNA, 201 bp, Homo sapiens
tcccctcccctccctggacagggaccgtcatctccctgaagacaccctgcgatggccgggcgtggtggctcacacatgtaatcccagcactttgcgaggcygaggtgggtggatcacctgaggtcaggagttcaagaccagcctggccaagatggtgaaacctcgtctctactaaaaatacaaaaattagccgggtgtggt

SEQ ID NO: 137221 - DNA, 201 bp, Homo sapiens
caggaggcagaggttgcagtgagccgagaccacgccattgcactccagcctgggtgacagagtgagactccatctcaaaaaataaaaataaaaaaaaaaaaaaacaaggagagagagaatatgaggaggggtagggatgctgaggctcctactggcctcccgctcagctcaccctccccttcctcgcccagctgcggtgtg

SEQ ID NO: 137222 - DNA, 201 bp, Homo sapiens
aggagaatcgcttgaaccctggaggtggaagttgcaatgagccaagatcgtgccactgcactccagcctgcgtgttgggagtgagactccatctcagcatraaaaacaaaaaatacaaatacaaaaattagccaggtgtagtggcatgtgcccatagtctcagctacctgaaaggctgaggcaagagaatcttttgaactc

SEQ ID NO: 137223 - DNA, 201 bp, Homo sapiens
ctagagccggccccttgtctctgcagaacttgagtgtggccgagggccctaactacctgacggcctgtgcgggacccccatcgcggccccagcgccccttytgtgctgtctgtggcttcccatccccctacacctgtgtcagctgcggtgcccggtactgcactgtgcgctgtctggggacccaccaggagaccaggtgag

SEQ ID NO: 137224 - DNA, 201 bp, Homo sapiens
gaaaggatcgaaggctggggaaaggttacattttgaaaggcattatacacactgcccaggagtttgaactctgtagggaaacactggagagccagcaaagrctttttttttttagacagagtcttgctctgtcacccaggctggaatgcagtggttctatataactcactgcagcctcaacctcccatgctcaagtgattc

SEQ ID NO: 137225 - DNA, 201 bp, Homo sapiens
ccccccagtccgctgtccttgtacctcctgctcagcacgctgccctctcgtgcccctccctggcacccccacctcacctgcccccccgggagtgtcctccrgtcctggttgcagaagccacagcctccctcaggagtccagccattggggacgtagtttcccaggtagttgagctgcagctgttggggacagactgaggct

SEQ ID NO: 137226 - DNA, 201 bp, Homo sapiens
cagggggagctcttcctggaccaagggaggagccgctcattcacccaacaaaactgtgtcttatctgccaggaaagaccagcctcactcctgggaactgtytggcaggtaggctgggccccccagtgctgttagaataaaaagcctcgtgccggaagccttcctgtttggtcgtggtgtgtttgaggtgatggtaatgggt

SEQ ID NO: 137227 - DNA, 201 bp, Homo sapiens
tccctcaggagaggctccaacaggggagtctcacgttgttgtgcaggaaaagggtgaccctgtcggggggatagtccaggagtagcagccgctgcaggaarcggggcagaaacggagtaggctgttccacaaacacggccagaaacacccgggggggaggctggaagatgcaacacgcagggactcagagagaagcccgga

SEQ ID NO: 137228 - DNA, 201 bp, Homo sapiens
ccggccttcagaaagacagaatttcatcacccaatgcagggggagctcttcctggaccaagggaggagccgctcattcacccaacaaaactgtgtcttatytgccaggaaagaccagcctcactcctgggaactgtctggcaggtaggctgggccccccagtgctgttagaataaaaagcctcgtgccggaagccttcctg

SEQ ID NO: 137229 - DNA, 201 bp, Homo sapiens
gggatgagatcagagagctgcagcttccaccccgggtgccttcctcgccctgcccagagcggcggccacactgctctttcttggaagccctgtaactttgygtgccctgctccatccagttcgctcccaggaccccgggcagcggcgggtgctggaccgggctgcccggcagcgtcgcatcaaccggcagctggaggccct

SEQ ID NO: 137230 - DNA, 201 bp, Homo sapiens
cctcccaccgcagcctcccaagtaactgggactacaggcatgtgcaaccacgcctggcttattttttaattttttgtagagatggggtttggctatgctgyccaggctggtttctaactcctggcatcaagcgatcctttggcctcccaaagtgctgagattacaggcgtgcgccaccacacccggcctcaccaggcgctg

SEQ ID NO: 137231 - DNA, 201 bp, Homo sapiens
cctcggccttccaaaatgctaggattacaagtatgagccactgcgcttggcccttttagtttttctttctttctttttttttctttttgagacggagtctygctctgtcccccaggctggagtgcagtggcgcaatctcggttcactgcaagctctgcctcccgggttcacaccattctctggcctcagcttctggagtag

SEQ ID NO: 137232 - DNA, 201 bp, Homo sapiens
tggggcccagagcgtgggtgggtggtcccccaggatgaccaggcaggtgtcagattttggggttcaaggagaggatgggaggtgaaaaagtgacacatcaygtgagttgctgtgaaggagaaggagctgtgaagccgagtagacacatgagcgtcgccagctctttgatggaaagtgccggttgaggaggaggggttgaag

SEQ ID NO: 137233 - DNA, 201 bp, Homo sapiens
caggaaggagatgggggtgggggcacgagagttctgatcagggcagggaaagggtccctcaggagaggctccaacaggggagtctcacgttgttgtgcagraaaagggtgaccctgtcggggggatagtccaggagtagcagccgctgcaggaagcggggcagaaacggagtaggctgttccacaaacacggccagaaaca

SEQ ID NO: 137234 - DNA, 201 bp, Homo sapiens
gaggcctccactcccacagagctgcgggatgcgcccactcctctgccttccctaccctcagtcctgggtccaggtagagccgtgtgtagaacagctggtcrtcgtcatcatccttgtacttccactggcgcacgatttggtggatggtggtggcaaaaccgatgaatcctggcggggagggggagtgttgacctcgagact

SEQ ID NO: 137235 - DNA, 201 bp, Homo sapiens
ctgtgtcccaccgctcttggcccctctgccttgggcactctgccactcaccaccagaattgaggaagcgcttccccgtgcccacctcagggtactgctccrccagcccccactcgggccagcagaagctctctgcagagaagagcaggcggctgccactctggacgaacttcttcagcagctctgtggggctgccggccag

SEQ ID NO: 137236 - DNA, 201 bp, Homo sapiens
acgcgcagaagtacaagctaccggaagtgatggcgcccctactaaagccttggggttagtacgcgtgcgcagcagtttcttccgacagttgtgttgtgccratggtggagaagaaaacttcgggtatgtgagcccccgcggttcgcccccttccccttcccaagtcagtcctagaattttcttacctagtcattcctcttt

SEQ ID NO: 137237 - DNA, 201 bp, Homo sapiens
cactcctctgccttccctaccctcagtcctgggtccaggtagagccgtgtgtagaacagctggtcgtcgtcatcatccttgtacttccactggcgcacgayttggtggatggtggtggcaaaaccgatgaatcctggcggggagggggagtgttgacctcgagactcccagggtcccagggcctgtcccccaggctgtctc

SEQ ID NO: 137238 - DNA, 201 bp, Homo sapiens
gcatcaaccggcagctggaggccctggagaatgacaacttccaggatgacccccacgcgggactccctcagctcggcaagagactgcctcagtttgatgaygatgcggacactggtgaggcggatggaggaggaagcgggggatgggactgagaggagggcgggagagtccgcccaactcaggctgtgggaggacccagga

SEQ ID NO: 137239 - DNA, 201 bp, Homo sapiens
gcagccgagctggagccggaggattcctggacatggagaaggcctgcagttttgtcaaggaagcaagcaaagggtctctttctactcgatgaaggtagtcrgcaccgccacagggtggacagggctcaggtccaaggaggaggaggaaggcacactggagccgctctggggcccagagcgtgggtgggtggtcccccagga

SEQ ID NO: 137240 - DNA, 201 bp, Homo sapiens; identical to SEQ ID NO: 24335

SEQ ID NO: 137241 - DNA, 201 bp, Homo sapiens
gaccaagggcttggcaatggggatgagatcagagagctgcagcttccaccccgggtgccttcctcgccctgcccagagcggcggccacactgctctttctyggaagccctgtaactttgcgtgccctgctccatccagttcgctcccaggaccccgggcagcggcgggtgctggaccgggctgcccggcagcgtcgcatca

SEQ ID NO: 137242 - DNA, 201 bp, Homo sapiens
agaggtttaaaataacttctaggtttctggtttggatgtctgcatagacggttccatttgcgtagagagaatctgcaggagaagcagacttggatgggaatttttttttttttttgagttgcagtgtccacagggccagtgggtgatttcttttttccttctttctttttttttttttttggagacagtcttgctttgtca

SEQ ID NO: 137243 - DNA, 201 bp, Homo sapiens
cgtaatgagtcaaagctgtggcgcacgcgcagaagtacaagctaccggaagtgatggcgcccctactaaagccttggggttagtacgcgtgcgcagcagtytcttccgacagttgtgttgtgccaatggtggagaagaaaacttcgggtatgtgagcccccgcggttcgcccccttccccttcccaagtcagtcctagaat

SEQ ID NO: 137244 - DNA, 201 bp, Homo sapiens
cacgcgcagaagtacaagctaccggaagtgatggcgcccctactaaagccttggggttagtacgcgtgcgcagcagtttcttccgacagttgtgttgtgcyaatggtggagaagaaaacttcgggtatgtgagcccccgcggttcgcccccttccccttcccaagtcagtcctagaattttcttacctagtcattcctctt

SEQ ID NO: 137245 - DNA, 201 bp, Homo sapiens
ggtctccaactcttggcctcaaagcgatcctcctgcgtgggccttccaaagtgctgggattacaggcgtgagctgccgcgcccggccccagctattcctcktaaatcccttcctcagccctcgggtcctggcgttgacccttcattcacgttttattggtgcctgctccaagccgggcgctggggatgaagaggagaaaga

SEQ ID NO: 137246 - DNA, 201 bp, Homo sapiens
actgcccggccttcagaaagacagaatttcatcacccaatgcagggggagctcttcctggaccaagggaggagccgctcattcacccaacaaaactgtgtyttatctgccaggaaagaccagcctcactcctgggaactgtctggcaggtaggctgggccccccagtgctgttagaataaaaagcctcgtgccggaagcct

SEQ ID NO: 137247 - DNA, 201 bp, Homo sapiens
tgaattgagtcttgaaagtctagttagggtttctctcagtgggaacctcacgtgcaaaggcagtgaagcaagaaaaagcaagtcgcttaggaagccaagtycacagtttggatcttacagagtaataagaaaggatcgaaggctggggaaaggttacattttgaaaggcattatacacactgcccaggagtttgaactctg

SEQ ID NO: 137248 - DNA, 201 bp, Homo sapiens
cctggcttcccctctgtctgcaggtgtctgaagtggactgtgtgagcctgggcattcccagagaggaagggccgctgtgcactgcccggccttcagaaagrcagaatttcatcacccaatgcagggggagctcttcctggaccaagggaggagccgctcattcacccaacaaaactgtgtcttatctgccaggaaagacca

SEQ ID NO: 137249 - DNA, 201 bp, Homo sapiens
caactgcatccctgagaaacgatagtgacagtgaaggccagggtaaatgaatttagtggtgttgatgtccggtcaccagggttgcttttaactccagtaamgtggatattgtcaccattaatgacactttcattgacctcagttacatgatttccacgttcctgtgtgatttcacccacggcaagtttcagggcattgtca

SEQ ID NO: 137250 - DNA, 201 bp, Homo sapiens; identical to SEQ ID NO: 24351

SEQ ID NO: 137251 - DNA, 201 bp, Homo sapiens
ccaatagagtcacacctaaaagaagcctaagggaggatattccaaactgcctctgctcttgatttttttttttttttcctttcaaaaggctcagactgaaraccactgctgttagctctctggatgatttttgaaagtcctgaggtgcagcataagaaaggcaataatctcccaggtaactagatctgcaacctcacaggg

SEQ ID NO: 137252 - DNA, 201 bp, Homo sapiens
gagcataccaatagagtcacacctaaaagaagcctaagggaggatattccaaactgcctctgctcttgatttttttttttttttcctttcaaaaggctcaractgaagaccactgctgttagctctctggatgatttttgaaagtcctgaggtgcagcataagaaaggcaataatctcccaggtaactagatctgcaacct

SEQ ID NO: 137253 - DNA, 201 bp, Homo sapiens
tttaacagtgacacccacccttccagctttgatgttagagctggcattgctctcaaagaccactttgtcaagctcattacctggtaatggcaatgaagttkgttgtagcaacagggtattggacctgacgggccacatggccaccaaggaatgaaagctccctgctctaccagccttagagagagcatgagagggagagag

SEQ ID NO: 137254 - DNA, 201 bp, Homo sapiens; identical to SEQ ID NO: 24349

SEQ ID NO: 137255 - DNA, 201 bp, Homo sapiens
actggactcttgaatgatacattcaaaaaaacattcacctcccataccagcctcaaacaagaggcctacagaacatggtgatggtttatttaagcaagttsaaattcagttaactgaaacattgcacactttagctactagtgaaatatcagaggtgaattgcagcagggtcagattccatttttaatatttgactgctgg

SEQ ID NO: 137256 - DNA, 201 bp, Homo sapiens
caaattttacttaagccttttatactgttgctgacaaatcagcaaaccttgattgtagcatcctacactgaaatgctccaaaatccatctaaattgcaagrcaacaggcatttccattaaggcctattagagactctttcactctagaggctctattaacatccagttttctggggtctttggaccacccaaaatacccac

SEQ ID NO: 137257 - DNA, 201 bp, Homo sapiens; identical to SEQ ID NO: 24352

SEQ ID NO: 137258 - DNA, 201 bp, Homo sapiens
agcctgtctgtcttgatggtggagaggaggctccagctgggcgggaccaccaggggaggggcttgtgctctgctggctcagcctggtgtggacccacctcscgggcgctggctgcaatgactttctctttccctttgcaattgccttgggtcctgccgcacagagcggcctgtctttatcagaggtccctctgccaggggg

SEQ ID NO: 137259 - DNA, 201 bp, Homo sapiens
caggtccaggtctcagccgtccccactcctgctgtgctctgagagggtcagggcagaggaaaagggtctgcaccagggccaagtgggatcaaagaaaaagygcttccggccgggcacggtggctcatgcctgtaatcccagcactttgggaggccgaggctggcgatcacaaggtcaggagatcaagaccatcctggctaa

SEQ ID NO: 137260 - DNA, 201 bp, Homo sapiens
ctgaccctggggagaccctgacaaggcttagacaggccccagggctgccgtgatctcccagtgagccccagaaggggtcagagggggaggtttggaggctstagcaagtgagtgggagccccttctgacaggtgctaagggatgtggggagccgggggaaggaaggagggtggggtgcaagggaggaagcgtggagaggga

SEQ ID NO: 137261 - DNA, 201 bp, Homo sapiens
aaaaactccctggcaggctcttctccccgctggtcccgctcaggagtgtctctgccctgatgctgggtgtggcaagagttaaccctgtaggcaggaggggrgccccagtgggtccacctccagcaaggactgagagcaagcagagccaggactggggtctatggtgaggccagggaagaagacccagctgtaccccaggga

SEQ ID NO: 137262 - DNA, 201 bp, Homo sapiens
aggcaggagaatggcatgaacctgggaggcagagcttgcagtgagccaagatcgtgccactgcactccacctgggcaacagagcgagactccgtctcaagaaaaaaaaaaaaagtgcttcctgaggaccctcccaggatcccctcacagacacagctcccaccaggaatgattcagaactgtgggatttgaggatcagggc

SEQ ID NO: 137263 - DNA, 201 bp, Homo sapiens
accctggccgaggctggggccaaaatttcaataatgacatacagtggtgagaatggaagcctggagtaggatggggtcagccagggcaggagagggccccvggaagttactagaaagtggggagggtcggcatccctgtgggaaaggccttgatcctctgcctgcagaggcgatggctgcactctggacctgactttgggg

SEQ ID NO: 137264 - DNA, 201 bp, Homo sapiens
gttttgtaaggacaggtatttttggcaacagaagaaatcctgtgagttatttaaaaaaaaacaaaaaaactccctggcaggctcttctccccgctggtccygctcaggagtgtctctgccctgatgctgggtgtggcaagagttaaccctgtaggcaggaggggtgccccagtgggtccacctccagcaaggactgagagc

SEQ ID NO: 137265 - DNA, 201 bp, Homo sapiens
ggcaggagaatggcatgaacctgggaggcagagcttgcagtgagccaagatcgtgccactgcactccacctgggcaacagagcgagactccgtctcaagaaaaaaaaaaaaagtgcttcctgaggaccctcccaggatcccctcacagacacagctcccaccaggaatgattcagaactgtgggatttgaggatcagggcc

SEQ ID NO: 137266 - DNA, 201 bp, Homo sapiens
ggtgtggtggtgcatgcctgtaatcctagctacttgtacactccagcctgggcaacaagagtgaaactctgtctcaaaaaaaaaaaagattacctcatggyttgctttcttttctaggctccacataaacacggtttccttgaaggccgccatgcagagctgtgcttcctggacgtgattcccttttggaagctggacctg

SEQ ID NO: 137267 - DNA, 201 bp, Homo sapiens
tgtcatccattctaccccgagtcctctctgcactggactcctgggcttgactagttcccagtcgaaatttggacaaaacaccatcattccttgggctcaayaaggacaatcaccccatgactggggcccttcccaatgtggggttagtcctgctgggggcccctcatccccacttctccctgcaaagggagccctctggcc

SEQ ID NO: 137268 - DNA, 201 bp, Homo sapiens
atcttgataactggggtttggtgcccccgtctaattttgtgctggaggctgccccgcacccaccctgatccaggctgtccctcctgactcactaaaaattmcctcggccgggcgctgtggctcatgcctgtaatcccagcactttgggaggctgaggagggcagatcacctgaggttgggagtttgagaccagcctgaacc

SEQ ID NO: 137269 - DNA, 201 bp, Homo sapiens
ctatgtcactcgtgggcttaatacagggtaaagcacaatgtggaagcttctagaattataggtcacagaaggggtggggcaaggggaattgacgggtagasaggtcagcctccccatgagggaagcacacgcagctcagtggcatctgtcctccctcccccagctctacagcccctccctgcaggcctggggcggagtgag

SEQ ID NO: 137270 - DNA, 201 bp, Homo sapiens
gacaccagaatcgcttgaacccgggaggtggaggttgcagtgagccaagatggcgccactgcactccagcctgagtgacagaaccagactctgtctcaaaraaaagaaaggaaaagaaaagaaaagtcatcttgataactggggtttggtgcccccgtctaattttgtgctggaggctgccccgcacccaccctgatccag

SEQ ID NO: 137271 - DNA, 201 bp, Homo sapiens
aaagtagaattgggtactacatggaggcttgagatgttcagagctttttgagaaagcagaacagaaagtagaagggcaaccaggaaccagaggggccagasaaccggaagagcgggccctccgaggagacagggagtgggcacctggatcttgggcctgtcaacgaagagtcaaactcagtaaaatatttgaagagatgta

SEQ ID NO: 137272 - DNA, 201 bp, Homo sapiens
ctcccaggatcccctcacagacacagctcccaccaggaatgattcagaactgtgggatttgaggatcagggcctacctgacctcacaaggccaggattccycagtgcctgctcctgggcttcatcctgcgggaaaagagactgaggcaggagaggccgaccagggattctgtcctgaccaggatggagcccacagcaaggc

SEQ ID NO: 137273 - DNA, 201 bp, Homo sapiens
aggaatgattcagaactgtgggatttgaggatcagggcctacctgacctcacaaggccaggattccccagtgcctgctcctgggcttcatcctgcgggaaragagactgaggcaggagaggccgaccagggattctgtcctgaccaggatggagcccacagcaaggccagaacaggccccaagtcaggatgcagggatggc

SEQ ID NO: 137274 - DNA, 201 bp, Homo sapiens
gtgtccaccccttcctgagtccacctcctagagagggagcccagggaaggccatggctgagacccaggacaggcccagtcaggggaaggagcccagggagsgggcaggtgtccaggctgggcccagagagagggctgggaagaggagcagcccaggaggcagagcccagccacagaggggaggggagctgagtcccaggga

SEQ ID NO: 137275 - DNA, 201 bp, Homo sapiens
agcaatgcactcctgaccaagtagattcttttaaaaattagagtgcattactttgaatcaaaaatttatttatatttcaagaataaagtactaagattgtrctcaatacacagaaaagtttcaaacctactaatccagcgacaatttgaatcggttttgtaggtagaggaataaaatgaaatactaaatctttctgtatat

SEQ ID NO: 137276 - DNA, 201 bp, Homo sapiens
agaggaggatgcagatgaccccaaacacacgctcctcctccactatcagcattcactgtttataaatgacaccagtaacatggaatatagtggccgggtgyggtggctcacacctgtcatcccagcactttgggaggctgaggtgggcggatcgcctgcggtcaggagttcaagaccagcctgaccagcatggataaaccc

SEQ ID NO: 137277 - DNA, 201 bp, Homo sapiens
tttttcttagaatttcagcactgttggagcaagttcgtgtacagccaaagagagctatttgagccttggaataatctgcctaaatattatatattactgcrcatcatgctgggggagattctcaggtgagggtctccctccaggctcatcgcctcgctcctctcacctcctgctcatcctcttgaggcctcccctctgttc

SEQ ID NO: 137278 - DNA, 201 bp, Homo sapiens
cctggccccttccatctccctggcataaccgaatttgtcgtaaaactggacgtagtaagtgggcatgaatagtcacaagcccggcagtcagaagctttgakcaacatccttaaaggccaacctgagcccctgagaaggagctgcctccatggaaacagagcttcaggcttcggctgccatagaagatggccgggctgggtg

SEQ ID NO: 137279 - DNA, 201 bp, Homo sapiens
attactgcacatcatgctgggggagattctcaggtgagggtctccctccaggctcatcgcctcgctcctctcacctcctgctcatcctcttgaggcctccyctctgttccagaccaggtcctctcctggccaggccctcctgccttccctcctgccccctgcctgccctcgtggttacactccctcacccacactcctcgt

SEQ ID NO: 137280 - DNA, 201 bp, Homo sapiens
gctcaggagtgtctctgccctgatgctgggtgtggcaagagttaaccctgtaggcaggaggggtgccccagtgggtccacctccagcaaggactgagagcragcagagccaggactggggtctatggtgaggccagggaagaagacccagctgtaccccagggagagggcctgagcacactgagctgaccctggggagacc

SEQ ID NO: 137281 - DNA, 201 bp, Homo sapiens
ctgtcccttttcagaatttaagcactgctgggacacctttgtggaccaccagggatgtcccttccagccctgggatggactagatgagcacagccaagacytgagtgggaggctgcgggccattctccaggtgagggcttcttccctctgcccagtgccccatcggcctccccctcctcccctctcccctgcgccgtgcct

SEQ ID NO: 137282 - DNA, 201 bp, Homo sapiens
ctttcttttctaggctccacataaacacggtttccttgaaggccgccatgcagagctgtgcttcctggacgtgattcccttttggaagctggacctggacsaggactacagggttacctgcttcacctcctggagcccctgcttcagctgtgcccaggaaatggctaaattcatttcaaaaaacaaacacgtgagcctgtg

SEQ ID NO: 137283 - DNA, 201 bp, Homo sapiens
cttcccacacatacctgtgggtctgctctgatgcctgcaaaggccaagtgtcccaggggagcctgtggggttgggtctggcgctgactgtaactagtatcyagaatatgtctgggaggggagggtcccgaggtcacagaagagaggccagctgggcttgactgcgttctctcttctttttcttagaatttcagcactgttg

SEQ ID NO: 137284 - DNA, 201 bp, Homo sapiens
ttttttttgttgttgtttgtttttgttttttttgagacagagtctcgctgtgtcacccaggctggagtgcagtggcgcgatctcagctcactgaaacctcygcctcgcaagttccaggattctcctgcctccacctctcgagtagctaggattataggtgtgcaccaccacacccagctaatttttgtagttttagtaaag

SEQ ID NO: 137285 - DNA, 201 bp, Homo sapiens
cagccttccagggaacaactctgggcaggagatgtggaaggaaggagctcagtgtgggggcacccatggcatcctggggggacatctgagggccacccccmcccgctattcctccctccaatggtggcctctgagtgtgaaggcatgggggaaggcagacacctgcccctgactctccctcactaccacatagctgctggg

SEQ ID NO: 137286 - DNA, 201 bp, Homo sapiens
gctccctgccctgggagggtgctccctgtatatgcttcccaccattcctgagctctggaactgggagaattgaaccaaaggatgattggagcaatcaggcrttttgttcttagcattttgatggaatttctgtaagatttactttgtttcaacacaaagtcttaggagagggtgtgggggaggaaatggtctctgtaccag

SEQ ID NO: 137287 - DNA, 201 bp, Homo sapiens
tccatatttagactaataaaacattaagaatcttccataattgtttccacaaacactagcaaatgtgtagatgtctttccttgtgtagcggacctgtagcygggaaaggtcacacaacatccctctggatccagaaaactcagctaaaccacacaggagaggaacctaaatgcagaccccaccctcactcacagagccccg

SEQ ID NO: 137288 - DNA, 201 bp, Homo sapiens
ctcccgggagggctccctgcatgggccggtttctctcttgtgccttcagaaatccgatggagcggatgtatcgagacacattctacgacaactttgaaaaygaacccatcctctatggtcggagctacacttggctgtgctatgaagtgaaaataaagaggggccgctcaaatctcctttgggacacaggggtctttcgag

SEQ ID NO: 137289 - DNA, 201 bp, Homo sapiens
acaacatccctctggatccagaaaactcagctaaaccacacaggagaggaacctaaatgcagaccccaccctcactcacagagccccgcccaccctcactyacagagccccgggcgctgattggaagggacaggcccagcagtaagaggacagccagcagccagtctccctgttggaaaggaaccacaaacgtgcagtcag

SEQ ID NO: 137290 - DNA, 201 bp, Homo sapiens
aaaaatcagagtcaattaattttaattgaaaatttctcttatgttccaagtgtacaagagtaagattatgctcaatattcccagaatagttttcaatgtaytaatgaagtgattaattggctccatatttagactaataaaacattaagaatcttccataattgtttccacaaacactagcaaatgtgtagatgtctttcc

SEQ ID NO: 137291 - DNA, 201 bp, Homo sapiens
ggtgtctaggctgggcccagagagagggctggggagaggagcagcccaggaggcagagcccagccacagaggggaggggagctgagtcccggggacaggargctccagaggcagagacggagcccagggctagggcggcaggtgtcagggctgtggcttcagcttggcgtctgtcctgggccttctgcgctggttcccaac

SEQ ID NO: 137292 - DNA, 201 bp, Homo sapiens
ttacgaccccctatataaggaggcgctgcaaatgctgcgggatgctggggcccaagtctccatcatgacctacgatggtaagaatggaaggttcaggtggkgtggggtgggtgggggcaggagaggttcctgggaagaaaaggagaaaggccttggtctgctgcctgcagaaacgatggctggactctgggacctgacttt

SEQ ID NO: 137293 - DNA, 201 bp, Homo sapiens
tgttaccctacaacaccctcgccccatgaaggctccacctccagccctgggctcgccggagttacccagtcagacgatgccatttctgctccctcctgaargaggaagtgtccaggatgagaacttcaggcaaagaggtgcctgtggatgggcagtgggagaagacttggagacagagcatctgtggctaaggacagggag

SEQ ID NO: 137294 - DNA, 201 bp, Homo sapiens
ccagcatcccctcctcttcctctcccctcagtcttcctgcctgggaaggcagcagaaattctcagggctgtggaggggtcggggaggcccagggccatccygggagctgtgttcagtggacatgagccccgaggactcccgggagggctccctgcatgggccggtttctctcttgtgccttcagaaatccgatggagcgga

SEQ ID NO: 137295 - DNA, 201 bp, Homo sapiens
cctgccagcatcccctcctcttcctctcccctcagtcttcctgcctgggaaggcagcagaaattctcagggctgtggaggggtcggggaggcccagggccrtcctgggagctgtgttcagtggacatgagccccgaggactcccgggagggctccctgcatgggccggtttctctcttgtgccttcagaaatccgatggag

SEQ ID NO: 137296 - DNA, 201 bp, Homo sapiens
cagtgtttgtcacttgtgcttcctgcagctgctgctgcttggccctggagttggggggagactttggcttcagtgactctccatggccaggtggggttgastctgcccaatggcaaagtgcttcctgaggaccctcccaggatcccctcacagacacagctctcaccaggaatgattcggaactgtgggatttgaggactc

SEQ ID NO: 137297 - DNA, 201 bp, Homo sapiens
gttggggagtgggttggcagaaatactaggagggtggggaatgtacccctggaaaggccagagttggacccgagctgggagagatcaccccagcccgcctrccagcatcccctcctcttcctctcccctcagtcttcctgcctgggaaggcagcagaaattctcagggctgtggaggggtcggggaggcccagggccatcc

SEQ ID NO: 137298 - DNA, 201 bp, Homo sapiens
taggcagggcacggtggcttatgcctataatcctagctctttgggaggctgaggtgggtggatcacttgaggtcaggagttggagatctgcctggccagcrtggcaaaacctcctctctactgaaaatacaaaaaatgagccaggcatggtagcgggagccggtaatcccagctacttgggaggctgaagcaggagaatcg

SEQ ID NO: 137299 - DNA, 201 bp, Homo sapiens
cacacacaacacatacacacacaacacatgcacaaaacacatacacacacgcacccacacacagtgacagagacttcacaaaaagaaacctcctccaggtkccccagagcacctgtccccggacggggactcccttgcatgagacagctggccaaggagaggactcccttctcccctgccagctttgtcaccttctacttg

SEQ ID NO: 137300 - DNA, 201 bp, Homo sapiens
gatgactccatggtgagcagatgtccccagacaggttccactccaaggtcactcttcatcttttagaacatgaccagtggttgagcgtggtggctcacacytgtaatcccaacactttgggaggccaaggcgggcggatcatgaggtcgggagtttgagaccaacctggcccatatggtgaaaccccgtctctactaaaaa

SEQ ID NO: 137301 - DNA, 201 bp, Homo sapiens
aaaaacatacaaaaattagccaggcatggtggcgcatctctagtcccagatactcaggaggtttaggcaggagaattgcttgaacctgggaggtggaggtygcagtgagctgagatcatgccactgcactccagcctgggcgacagagtgagacttcatcaaaaaaaaaaagaaagaacatgatcagtaacatggaatgtg

SEQ ID NO: 137302 - DNA, 201 bp, Homo sapiens; identical to SEQ ID NO: 24368

SEQ ID NO: 137303 - DNA, 201 bp, Homo sapiens
gtttaggcaggagaattgcttgaacctgggaggtggaggtcgcagtgagctgagatcatgccactgcactccagcctgggcgacagagtgagacttcatcaaaaaaaaaaagaaagaacatgatcagtaacatggaatgtgagaatgtgggaaaaaagtgcaatgatgaggagaaatgctctgattttaaaatttagtgaa

SEQ ID NO: 137304 - DNA, 201 bp, Homo sapiens; identical to SEQ ID NO: 24369

SEQ ID NO: 137305 - DNA, 201 bp, Homo sapiens
aagcagctggaaatgcagaaaacacaacaataagtaaaatgcccagcactgggctctcaattgtgtatttttcccacatttcttttttctctttttttcctttttttttttttttttttttccgagatggagtctcgctctggcacccaggttggagtgcaattgcacaatcttggctcactacaacctccacctctcagg

SEQ ID NO: 137306 - DNA, 201 bp, Homo sapiens
tcctgtcctggcccctcctctccctgccccacccctgcactcctcctgctccccctctcagagcatcccctgccccctgctcctctcccaggtgtatttcragcctcagtaccacgcagaaatgtgcttcctctcttggttctgtggcaaccagctgcctgcttacaagtgtttccagatcacctggtttgtatcctggac

SEQ ID NO: 137307 - DNA, 201 bp, Homo sapiens
tggggacaagaggaggcaagagctcagccttccagggaacaactctgggcaggagatgtggaaggaaggagctcagtgtgggggcacccatggcatcctgkggggacatctgagggccacccccacccgctattcctccctccaatggtggcctctgagtgtgaaggcatgggggaaggcagacacctgcccctgactctc

SEQ ID NO: 137308 - DNA, 201 bp, Homo sapiens
tccctccaatggtggcctctgagtgtgaaggcatgggggaaggcagacacctgcccctgactctccctcactaccacatagctgctgggtggctggggacggggggggtccctgggatgattcctgagggcaggatccaggggtccctccagatgtcctcccatccaggtgagaaagcagcataaagtgaggcttgcactc

SEQ ID NO: 137309 - DNA, 201 bp, Homo sapiens
ccacctcccccacctgccccaggccagaccccctgctgagactcttccctgaaagtcaccgctgggctggtgctccctgccctgggagggtgctccctgtmtatgcttcccaccattcctgagctctggaactgggagaattgaaccaaaggatgattggagcaatcaggcattttgttcttagcattttgatggaatttc

SEQ ID NO: 137310 - DNA, 201 bp, Homo sapiens
ctcctccgtgagcaccattcaccttttagaatgacacctgcaacatggagtgtaggaaaacatatgatcaggagaaatgctcttattttaggcagggcacrgtggcttatgcctataatcctagctctttgggaggctgaggtgggtggatcacttgaggtcaggagttggagatctgcctggccagcgtggcaaaacctc

SEQ ID NO: 137311 - DNA, 201 bp, Homo sapiens
aatgtcaccctgaccatctccgccgcccgcctctactactactgggaaagagattaccgaagggcgctctgcaggctgagtcaggcaggagcccgcgtgamgatcatggactatgaaggtgagaggtggaggggtcaggggagcgtgagcgggaggaacagcatgaaagatggatggatctgcaatgccatggctgggggt

SEQ ID NO: 137312 - DNA, 201 bp, Homo sapiens
ccgtgagcaccattcaccttttagaatgacacctgcaacatggagtgtaggaaaacatatgatcaggagaaatgctcttattttaggcagggcacggtggyttatgcctataatcctagctctttgggaggctgaggtgggtggatcacttgaggtcaggagttggagatctgcctggccagcgtggcaaaacctcctctc

SEQ ID NO: 137313 - DNA, 201 bp, Homo sapiens
tagtcccaggaggagtcttagggcttttggtttcccctgtctttgtccacagatacctgatggatccagacacattcactttcaactttaataatgacccyttggtccttcgacggcgccagacctacttgtgctatgaggtggagcgcctggacaatggcacctgggtcctgatggaccagcacatgggctttctatgca

SEQ ID NO: 137314 - DNA, 201 bp, Homo sapiens
acatcctttcaagggtgccagtctccatcaccgcctaagcagtgggactcccccaggaatgacccacagccccttctcagcacaaaccatgtcatccactycaccctgcatcccctctgatggaatccctccctgtctttgtccccatcacaatcacagtccttgctgccctgctgtccccaacttgaccgattcctagtc

SEQ ID NO: 137315 - DNA, 201 bp, Homo sapiens
tatggggagcagggaaggagtggggggtgcaggagaggagcgagaggtagtcccaggaggagtcttagggcttttggtttcccctgtctttgtccacagayacctgatggatccagacacattcactttcaactttaataatgaccctttggtccttcgacggcgccagacctacttgtgctatgaggtggagcgcctgga

SEQ ID NO: 137316 - DNA, 201 bp, Homo sapiens
tccagatcacctggtttgtatcctggaccccctgcccggactgtgtggcgaagctggccgaattcctgtctgagcaccccaatgtcaccctgaccatctcygccgcccgcctctactactactgggaaagagattaccgaagggcgctctgcaggctgagtcaggcaggagcccgcgtgaagatcatggactatgaaggtg

SEQ ID NO: 137317 - DNA, 201 bp, Homo sapiens
acaatggcacctgggtcctgatggaccagcacatgggctttctatgcaacgaggtgaccgacccagccacctgcatccaggcagggccctcccaatccagrgacactcatagatagaaggttctgggtggtgcctgtggtttcctgcagtgtttgtcacttgtgcttcctgcagctgctgctgcttggccctggagttggg

SEQ ID NO: 137318 - DNA, 201 bp, Homo sapiens
ctggggagggggtggtggagagggggctccagcctgcccaaccaccaggcaacggggcacctgcccctctctcagctgggtctggacccgcctcccaggckcaggctgcaatgcctttctctttctctttgcaattccgttgggtcctgcccaggacagataaagacagagcagcctgtctttattggaggttcctctgcc

SEQ ID NO: 137319 - DNA, 201 bp, Homo sapiens; identical to SEQ ID NO: 24381

SEQ ID NO: 137320 - DNA, 201 bp, Homo sapiens; identical to SEQ ID NO: 24382

SEQ ID NO: 137321 - DNA, 201 bp, Homo sapiens
tatttaatttaaagaaaagtaaagagaagaaaaatgaaaacccagtctttatgtaagctccaaggatattagggcttagagggcttttctagttttatgasaatttatactactgatttttatattatatattattggggttttgttgttgttgttttgttttgtttttttgagatggagtctcactctgtcacccaggct

SEQ ID NO: 137322 - DNA, 201 bp, Homo sapiens
tgatttttatattatatattattggggttttgttgttgttgttttgttttgtttttttgagatggagtctcactctgtcacccaggctggagtgcagtgaygcgatctcagctcactgcaacctctgcctcctgggttcaagcgattctcctgcctcaacctgctgagtagctgggactacagatgcgcgccaccacacct

SEQ ID NO: 137323 - DNA, 201 bp, Homo sapiens
ttccttacctaccctttgggtgtccactgggtcgtgcccctggagcggcctttacccttgagccatggtgctcacacataggcttttgagctccttggagytatccagaccctgctcacttttctttccagagatcagaacaaatcactccctcactcctactccaaacaaggtcttgttgataaactagtccttttcaaa

SEQ ID NO: 137324 - DNA, 201 bp, Homo sapiens
tctctattgctcctgcaacctttgttttctgattttctaaaaatcatttctcctccgggtgctgtggctcatacctataatcccagcaccttgggaggccraagtgggcaaatcaccagaggtcaggagttcaagaccagcctggcccaatatagtgaaaccccatctctactaaaaacacaaaaattagccaggcgtggt

SEQ ID NO: 137325 - DNA, 201 bp, Homo sapiens
cccaggtccaaggggatttcctctacaccgcagacttctctttgatcttcccttctttgaaattacagggcagggatgcgatttccatccaggtagttttgtttgtttgtttgtttgtttgtttgtttgtttgatgcggtttcgctctgttgcccaggctggagtgcagtgacgcgatctatactcactgcaacctccacc

SEQ ID NO: 137326 - DNA, 201 bp, Homo sapiens
gcaggtgcagagactcatagcagagcaccccccacacctgacccccagcataagtaagaggagccgctgctccaggtgtatttcagcaccagtgttggggrgcatgtcctcctgagagcatctaacgattgctttagagagccctctgggtggtttatttattttcatttttattttttaattttattattttaaaaatat

SEQ ID NO: 137327 - DNA, 201 bp, Homo sapiens
tttaaaaatatttatttatttatttatttatttatttatttatttatttattgaggcagagtctcgctctgtcgcccagactggagtgcaatggtacgatmtcggctcactgcaacttctgcctcccgggttcaagtgattctcctgcctcagcctcctgagtagttgggatttcaggcacccaccatgccaggctagttt

SEQ ID NO: 137328 - DNA, 201 bp, Homo sapiens
cacgtcactgtattccagcctgggtaacagaacaagactgcatctcaaaacatatatgaagtttttaccacctagtttcctgagatctaaaaatagggatwgtctaaaaaataaaaataaaaaaatgatagtctttgtgaatgatgaatgaaaaagagttaaaaggaacctttttggctggatgcgaaggtgactattgcc

SEQ ID NO: 137329 - DNA, 201 bp, Homo sapiens
tacaaagtgttttaagagtggagagtcaattaaacacctttactcttaggaatatagattcggcagccttcagtgaatattggtttttttccctttggtakgtcaataaaagtttatccatgtgtcagaacagatttgtggaatttgcagttctgcctcttggatattggaatatccaatatttcaggtactgtgttgaag

SEQ ID NO: 137330 - DNA, 201 bp, Homo sapiens
gggtttcgccatgttggccaggctggtctcgaactcttcatctcaagtgatccacctgcctcggcctcccaacgtgctgagattacaggtgtgagtcaccrcacctggcttattatttttttttttagattcagagtctcattctgttgcccaggttggagtacagtggtataatcatggcccactgcagcctcgaactcc

SEQ ID NO: 137331 - DNA, 201 bp, Homo sapiens
ctctcaaagtgctgggattacaggcatgagtcaccgcgcctggcccaccatgcctaattttaaaaaaaaaaatttttttatagacatagcatctcactacrttgcccaggctggtcttgaacttgtgggcttaagtgaccaattttcacaactcagcctcccaaagtgttggaattataggtttgagacactatacccagc

SEQ ID NO: 137332 - DNA, 201 bp, Homo sapiens
catagcatctcactacgttgcccaggctggtcttgaacttgtgggcttaagtgaccaattttcacaactcagcctcccaaagtgttggaattataggtttragacactatacccagcctttaagaatcttcttgtagagatggaatcttgctgtgttgcccaggctgttctcaagctccttgcctcaagtgattttctacc

SEQ ID NO: 137333 - DNA, 201 bp, Homo sapiens
ctgcaacctccccctcccaggttccagcaattctcctgcctcagcttcccaagtagctgggattacaggcatgcaccaccacacctggctaatttttgcattttttttttattagagatggggttttgtcatgttggccaggctggtctcgaactcctggcttcagatgagctgcccacctcagcttcccaaagttttggc

SEQ ID NO: 137334 - DNA, 201 bp, Homo sapiens
ctgtgagccgagatcatgccagtgcactccagctagggcaacagagcaagattccatctcaaaaaaaaaaaaaaaaaaaaattagccgggcattgtggcaygggcctataatactcaggaggctgaggcaggagaagcgcttgaacccgggaggtagaggttgcagtgagccaagattgcagccttgcactccagcctggg

SEQ ID NO: 137335 - DNA, 201 bp, Homo sapiens
attacaggtgcccatcaccacgcctggctaatttttgtacagtgcccaaccgtacttttgttttagacagctggtttgtcctataatcccagcactttggraggctgaggtaggaagatcgcttgagcacaggagtttgagaccagcctgggcaatatagtaagaccccatctctacaaaataaataaataaaataaaata

SEQ ID NO: 137336 - DNA, 201 bp, Homo sapiens
caacagagcaagattccatctcaaaaaaaaaaaaaaaaaaaaattagccgggcattgtggcatgggcctataatactcaggaggctgaggcaggagaagcrcttgaacccgggaggtagaggttgcagtgagccaagattgcagccttgcactccagcctgggtgacaagagtgaaactctgtctcaaaaaataaagagaa

SEQ ID NO: 137337 - DNA, 201 bp, Homo sapiens
ttttgttttagacagctggtttgtcctataatcccagcactttgggaggctgaggtaggaagatcgcttgagcacaggagtttgagaccagcctgggcaayatagtaagaccccatctctacaaaataaataaataaaataaaataaaaacagctgatttagaactatataagatttaaaacaggagttaaacaaaaacaa

SEQ ID NO: 137338 - DNA, 201 bp, Homo sapiens
atgcattcaggagaagaaaatacatcttatttccctcttcatgtttcgttttttttttttgttttcttttgtattactcagtgttgggtattttgtatttyattttgcagggagctggtaagtcgcctacaggagcgaaatgttcaggttttcctaatatctggtggctttaggagtattatagagcatgttgcttcaaag

SEQ ID NO: 137339 - DNA, 201 bp, Homo sapiens
gcccaatatagtgaaaccccatctctactaaaaacacaaaaattagccaggcgtggtggcaggtgcctgtaatcccagctacttgggaggctgaggcaggrgaaccacttgaacccgggaggcggaggttgcagagagcagagatcacaccactgcgctccagcctgggcaacagagcctccaaaaaaataaataaaaata

SEQ ID NO: 137340 - DNA, 201 bp, Homo sapiens
atatagtgaaaccccatctctactaaaaacacaaaaattagccaggcgtggtggcaggtgcctgtaatcccagctacttgggaggctgaggcaggagaacyacttgaacccgggaggcggaggttgcagagagcagagatcacaccactgcgctccagcctgggcaacagagcctccaaaaaaataaataaaaataaaaat

SEQ ID NO: 137341 - DNA, 201 bp, Homo sapiens; identical to SEQ ID NO: 24384

SEQ ID NO: 137342 - DNA, 201 bp, Homo sapiens
acggtcatcagtgaagaaggaatcggtgagctagccaaaatctgtggtgtagaggatgcggtgtcagaaatgtagggatagcatttattcactttatgaartgataaagaatttctttttttttttttttttttttttttgagacagagtctcactctattgcccagactggagtgcagtggcacaatcttggcttactgc

SEQ ID NO: 137343 - DNA, 201 bp, Homo sapiens
agactaggaggtggaggttgcagtgagccgagattgcaccactgcactccagcctgggtgacagagccagaccctgtctcaaaaaaaaaaaaaaaaaaacktagagcactaccaacagttctccctcatcccagaatagaaaatcccccaccatttcttatgcacacactgcgactcttggcctcccaggcagggcggtgc

SEQ ID NO: 137344 - DNA, 201 bp, Homo sapiens
aaacaagtttaatcacaaaggccagcattttcccctaaatgaattaaatattaataactcctaacagcctatataaacacatttcttttttataaatgacktggaaatacttgaaagccaggtttgtgtttgttttgagcagagccaagcaagggaaatttcagaacacgctttgaacgtgtgagattctataccctccct

SEQ ID NO: 137345 - DNA, 201 bp, Homo sapiens
ttaatagagacggggtttcaccatgttagccaggatggtctcaatctcctgaccttgtgatccacctgcctcagcctctcaaagtgctgggattacaggcrtgagtcaccgcgcctggcccaccatgcctaattttaaaaaaaaaaatttttttatagacatagcatctcactacgttgcccaggctggtcttgaacttgt

SEQ ID NO: 137346 - DNA, 201 bp, Homo sapiens
gtggcgcgatctcggctcactgcaagctccgcctcccgggttcacgccattctcctgcctcagcctcccgagtagctgggactacaggcgcccgctaccaygcccggctaattttttgtatttttagtagagacggggtttcaccgtgttagccaggatggtctcgatctcctgacctcgtgatccgcccgcctcggcctc

SEQ ID NO: 137347 - DNA, 201 bp, Homo sapiens
ggtctcaatctcctgaccttgtgatccacctgcctcagcctctcaaagtgctgggattacaggcatgagtcaccgcgcctggcccaccatgcctaattttaaaaaaaaaaatttttttatagacatagcatctcactacgttgcccaggctggtcttgaacttgtgggcttaagtgaccaattttcacaactcagcctccc

SEQ ID NO: 137348 - DNA, 201 bp, Homo sapiens
tcatcacctgtcttagctttattatctataacatcacctgtctgtacataaatgtctgcatttcgtgaaacattaattcctacatagcccctatgacttaytttgctatgtgttgtatttcaattttatgggagcttctatgcatttgaagcaatttagactcaagaaggagacttttggctgggcacggtggctcacgcc

SEQ ID NO: 137349 - DNA, 201 bp, Homo sapiens
ctcctgcaacctttgttttctgattttctaaaaatcatttctcctccgggtgctgtggctcatacctataatcccagcaccttgggaggccgaagtgggcraatcaccagaggtcaggagttcaagaccagcctggcccaatatagtgaaaccccatctctactaaaaacacaaaaattagccaggcgtggtggcaggtgc

SEQ ID NO: 137350 - DNA, 201 bp, Homo sapiens
tttggctgggcacggtggctcacgcctgtaatcccagcactttgggagcctaaggcaggaggatcacttgaggtcaggagttcgagaccaccctggccaamgtggtgaagccccaactctgctaaaaaaaaaaaaaaaaaaaaaataggaaaattagctgggcatggtggcacatgcctgtagtcccagctacttgggagg

SEQ ID NO: 137351 - DNA, 201 bp, Homo sapiens
caagtagctgggattacaggcatgcaccaccacacctggctaatttttgcattttttttttattagagatggggttttgtcatgttggccaggctggtctygaactcctggcttcagatgagctgcccacctcagcttcccaaagttttggcattataggcatgagtcactgcacccagcttgttaatgttattttcaagc

SEQ ID NO: 137352 - DNA, 201 bp, Homo sapiens
tcctgaccttgtgatccacctgcctcagcctctcaaagtgctgggattacaggcatgagtcaccgcgcctggcccaccatgcctaattttaaaaaaaaaawtttttttatagacatagcatctcactacgttgcccaggctggtcttgaacttgtgggcttaagtgaccaattttcacaactcagcctcccaaagtgttgg

SEQ ID NO: 137353 - DNA, 201 bp, Homo sapiens; identical to SEQ ID NO: 24383

SEQ ID NO: 137354 - DNA, 201 bp, Homo sapiens
gcctgtaatcccagcactttgggagcctaaggcaggaggatcacttgaggtcaggagttcgagaccaccctggccaaagtggtgaagccccaactctgctaaaaaaaaaaaaaaaaaaaaaataggaaaattagctgggcatggtggcacatgcctgtagtcccagctacttgggaggctgaggcaggagaatcacttgaa

SEQ ID NO: 137355 - DNA, 201 bp, Homo sapiens
tcctccgggtgctgtggctcatacctataatcccagcaccttgggaggccgaagtgggcaaatcaccagaggtcaggagttcaagaccagcctggcccaayatagtgaaaccccatctctactaaaaacacaaaaattagccaggcgtggtggcaggtgcctgtaatcccagctacttgggaggctgaggcaggagaacca

SEQ ID NO: 137356 - DNA, 201 bp, Homo sapiens
gatcccaggtccaaggggatttcctctacaccgcagacttctctttgatcttcccttctttgaaattacagggcagggatgcgatttccatccaggtagttttgtttgtttgtttgtttgtttgtttgtttgtttgatgcggtttcgctctgttgcccaggctggagtgcagtgacgcgatctatactcactgcaacctcc

SEQ ID NO: 137357 - DNA, 201 bp, Homo sapiens
accttgtgatctgcccgccgtggcctcccaaagtgctgggattacaggcatgagccaccacgcccagccctggttttatttattttttgagacggagtctygctctgtcacccaggctggagtgcagtggcgcggtctcagctcactgcagcctcgacctcccggactcaagcgatcttcccatctcagcctcctgagtag

SEQ ID NO: 137358 - DNA, 201 bp, Homo sapiens
atcccaggtccaaggggatttcctctacaccgcagacttctctttgatcttcccttctttgaaattacagggcagggatgcgatttccatccaggtagttttgtttgtttgtttgtttgtttgtttgtttgtttgatgcggtttcgctctgttgcccaggctggagtgcagtgacgcgatctatactcactgcaacctcca

SEQ ID NO: 137359 - DNA, 201 bp, Homo sapiens
tcccaggtccaaggggatttcctctacaccgcagacttctctttgatcttcccttctttgaaattacagggcagggatgcgatttccatccaggtagttttgtttgtttgtttgtttgtttgtttgtttgtttgatgcggtttcgctctgttgcccaggctggagtgcagtgacgcgatctatactcactgcaacctccac

SEQ ID NO: 137360 - DNA, 201 bp, Homo sapiens
ccgtggcctcccaaagtgctgggattacaggcatgagccaccacgcccagccctggttttatttattttttgagacggagtctcgctctgtcacccaggcyggagtgcagtggcgcggtctcagctcactgcagcctcgacctcccggactcaagcgatcttcccatctcagcctcctgagtagctgggactgctggcaca

SEQ ID NO: 137361 - DNA, 201 bp, Homo sapiens
gagtctcgctatctttcccatgctggtcttaactcctgggctcaagcgatgctcctgcttaggcctcccaaagcactgggattatcagtgtgagccactgygcctggccccaggaaccccttcttttcagtgttttcacactgctgatatctggacatggaggagataggaagagctaactggtaacaatgataggcactg

SEQ ID NO: 137362 - DNA, 201 bp, Homo sapiens
tcccaaagcactgggattatcagtgtgagccactgtgcctggccccaggaaccccttcttttcagtgttttcacactgctgatatctggacatggaggagmtaggaagagctaactggtaacaatgataggcactgtggattgatattttttccccgtaaaagaattgtaaagtacattgttcttcctaccaatcccagaa

SEQ ID NO: 137363 - DNA, 201 bp, Homo sapiens
tcttttcagtgttttcacactgctgatatctggacatggaggagataggaagagctaactggtaacaatgataggcactgtggattgatattttttccccrtaaaagaattgtaaagtacattgttcttcctaccaatcccagaagaaacgctttaaaaattgttgtatattctggccgggtgcggtggctcatgcctgta

SEQ ID NO: 137364 - DNA, 201 bp, Homo sapiens
gtattactagggaacaaggtggtgttctccttgatttttgttactctgggatttttccatactaatacatagagagaaatcctttattttttacatctacrtggcgtcccattgggtgagtatattgtatttagataaccattcccctattgatgaatatttgagttgtttttatctttttctgttaccaaaaaaaaatca

SEQ ID NO: 137365 - DNA, 201 bp, Homo sapiens
cctctattctattccttaatttaaaaaataactaaacgctggtcaccaccctctaaactgatttcgtgagtcattaacgggccactgcctacagtgagaargtgactagcctctgctccgctttcttgctttggtcagaagtcccactctgagtgaggctgctggaggttggggtgggtgctggttgttgggcttgactgc

SEQ ID NO: 137366 - DNA, 201 bp, Homo sapiens
cttggctaatttataggagaaaacaatgatacctgtggttttaatctgaattttctattgctattgggattgaaattcctttgggtgtttatttgagtacyttcttttgtgaactacctgttcgggtcctttgcctatttttctatttagggcattggcatttgtctgtttcttgttgatttgaagagctctacacattaa

SEQ ID NO: 137367 - DNA, 201 bp, Homo sapiens
accctctaaactgatttcgtgagtcattaacgggccactgcctacagtgagaaagtgactagcctctgctccgctttcttgctttggtcagaagtcccacyctgagtgaggctgctggaggttggggtgggtgctggttgttgggcttgactgctgcctgccggctgacaccgcctcccgctcctgtcacctggacagatg

SEQ ID NO: 137368 - DNA, 201 bp, Homo sapiens
caatgatacctgtggttttaatctgaattttctattgctattgggattgaaattcctttgggtgtttatttgagtaccttcttttgtgaactacctgttcrggtcctttgcctatttttctatttagggcattggcatttgtctgtttcttgttgatttgaagagctctacacattaaaaatattaattattttatggctg

SEQ ID NO: 137369 - DNA, 201 bp, Homo sapiens
gtcattaacgggccactgcctacagtgagaaagtgactagcctctgctccgctttcttgctttggtcagaagtcccactctgagtgaggctgctggaggtyggggtgggtgctggttgttgggcttgactgctgcctgccggctgacaccgcctcccgctcctgtcacctggacagatggagaagtgcccggcagtgccgt

SEQ ID NO: 137370 - DNA, 201 bp, Homo sapiens
gcagtgccgtattagtgtttgacattgagctgctggagctggtggctggccttcctgaggggtacatgttcatatggaatggtgaggtgtcacccaacctytttgaagaaattgacaaggatggcaacggagaagtcctcctggaagaggtaactaactggcctctgtaggaaggtgggaccgaagagctcagggagcctg

SEQ ID NO: 137371 - DNA, 201 bp, Homo sapiens
tctgaggagctatgaatggaggcgttctctctcatttcttctctgttccctcttgctccctctctcctccctcacctcctctaaccttcctcctctgcagygttctcacactttcccgtctgggtagtttgccggttcattaactgcttttcttttctccctggcatgtctcattagctactggtagagatggctgtttga

SEQ ID NO: 137372 - DNA, 201 bp, Homo sapiens
tatggctgcatattattaaaaacattttcctcattttcctcaatttatttgtttgttaattttggttatgttgatttttggcccatttaactgtaaacctkttatgttgttaaatacattagacttcctcattatggttcctggctttggtgacttgttacaaagtctgtcctcttcctagagtatataaatgtttgcttg

SEQ ID NO: 137373 - DNA, 201 bp, Homo sapiens
catgtgcatagtatgggttacattaatgaccctttgtcttctggctttggttgggttcagccattgggacattgtgataagccattcctgcatcactggaragaaatacccaaggctgggtaatttataagaaaagaggtttaattggctcacagttctgcaggctgtacaggaagcattgcatgctgtcgtcagcttctg

SEQ ID NO: 137374 - DNA, 201 bp, Homo sapiens
tttatttgtttgttaattttggttatgttgatttttggcccatttaactgtaaaccttttatgttgttaaatacattagacttcctcattatggttcctgkctttggtgacttgttacaaagtctgtcctcttcctagagtatataaatgtttgcttgtatttccctcaagccttttaatggttttttttttctattcttt

SEQ ID NO: 137375 - DNA, 201 bp, Homo sapiens
cctgtatgtgctgagtgtattctctgatttggccctcacagcagctgttttttagaagaaactgcacagagaaggtaaatgacttgtccaaggtcacacakctactcagttgtttgagccaggaccacactcctctttgtgaagctgggcaatagaaccatctgttctgtcccacccctggggaattccagctccctgcct

SEQ ID NO: 137376 - DNA, 201 bp, Homo sapiens
gtcatggtggaagggaaaaggggagcagacatctcacatggcaagagcaggagcaagagagagggtgggaggtgccacacacttttaaacaagcagatctstgaactcattcatcaccgaggggatggcgctaagccctcccaccaggccccacctccaacactggggattacatttcaacatgagatttggcatggacac

SEQ ID NO: 137377 - DNA, 201 bp, Homo sapiens
cttttatgttgttaaatacattagacttcctcattatggttcctggctttggtgacttgttacaaagtctgtcctcttcctagagtatataaatgtttgcytgtatttccctcaagccttttaatggttttttttttctattctttaagatattctttattagaatttttattttcaaaagtaatatgttctttttttttg

SEQ ID NO: 137378 - DNA, 201 bp, Homo sapiens
aactgcacagagaaggtaaatgacttgtccaaggtcacacatctactcagttgtttgagccaggaccacactcctctttgtgaagctgggcaatagaaccrtctgttctgtcccacccctggggaattccagctccctgcctcttccacatctgctattgaagcacatcctccagccttttcctctctctctccacatcat

SEQ ID NO: 137379 - DNA, 201 bp, Homo sapiens
ggaagagagtgaggtgaaggtatgtattcctctggcttcctgtctgtagggtcaccatggattgtggccctaaactaaagggcccggttcctgtcaggtarcccctagctgccctctctgtctctgtcattcaagctcaggtgtgatagcagcattccccacccagccacagaggtactatcccttgtgttttgctgtgtt

SEQ ID NO: 137380 - DNA, 201 bp, Homo sapiens
accacactcctctttgtgaagctgggcaatagaaccatctgttctgtcccacccctggggaattccagctccctgcctcttccacatctgctattgaagcrcatcctccagccttttcctctctctctccacatcatcagcccttctggatctttctcatttgcatacaaatgtgctattattttcccttccctggatgtg

SEQ ID NO: 137381 - DNA, 201 bp, Homo sapiens
aacattccactttctgtttctatgagtttaactactttagatacctcatataattcgtggaatcatgcagtatttgtctttctgtgactggcttatttcaytttacgtaatctcctcaaggttcatccatattgtagcatgtgataggatttccttcctttttaaggcggaataatatttcattgtgtgtgtataccacat

SEQ ID NO: 137382 - DNA, 201 bp, Homo sapiens
tctctatgctcataaatgctttcatatttaagtctttaatccatctggaatttattgtggtatcactgtgacaggaaggatttaactttatttttttccakatggttagctagtttttccaacatccgtcatgaatgactctgtcatttcctcactgctctaaaaggtgatttttgttatgaactaaattcttatatgtac

SEQ ID NO: 137383 - DNA, 201 bp, Homo sapiens
ttctgtttctatgagtttaactactttagatacctcatataattcgtggaatcatgcagtatttgtctttctgtgactggcttatttcattttacgtaatstcctcaaggttcatccatattgtagcatgtgataggatttccttcctttttaaggcggaataatatttcattgtgtgtgtataccacatattttttatcc

SEQ ID NO: 137384 - DNA, 201 bp, Homo sapiens
atctggaatttattgtggtatcactgtgacaggaaggatttaactttatttttttccagatggttagctagtttttccaacatccgtcatgaatgactctrtcatttcctcactgctctaaaaggtgatttttgttatgaactaaattcttatatgtacttttgagtctttgtgtagaatttttatcctttaccttctatc

SEQ ID NO: 137385 - DNA, 201 bp, Homo sapiens
atcgtgctgagttgaacatgtgtgtgcaaatatctgagttgttgttttgtttttgttttagtttagacagagtggtttttttgttttgttttgttttttgrgacagagtttcgctcttattgcctgggctggagtacagtagtgcgatctcagctcatcgcaacctccgcctcccaggttcaagtgattctcctgcctcag

SEQ ID NO: 137386 - DNA, 201 bp, Homo sapiens
ggtatcactgtgacaggaaggatttaactttatttttttccagatggttagctagtttttccaacatccgtcatgaatgactctgtcatttcctcactgcyctaaaaggtgatttttgttatgaactaaattcttatatgtacttttgagtctttgtgtagaatttttatcctttaccttctatctattcctagggcagca

SEQ ID NO: 137387 - DNA, 201 bp, Homo sapiens
ttgggagagattagttgcaagttcttgaaatactggctttacctcatcctcacagtggttatgttttactccatcatttcagccacaatgtgtcctccacrtggggattcaataactttttttttttcagcgacagggtctcactctgtcacccaggctggagtgcagtggcaccatcatggctaactgcagccttgaact

SEQ ID NO: 137388 - DNA, 201 bp, Homo sapiens
gtgctgagttgaacatgtgtgtgcaaatatctgagttgttgttttgtttttgttttagtttagacagagtggtttttttgttttgttttgttttttgagayagagtttcgctcttattgcctgggctggagtacagtagtgcgatctcagctcatcgcaacctccgcctcccaggttcaagtgattctcctgcctcagcct

SEQ ID NO: 137389 - DNA, 201 bp, Homo sapiens
agttgaacatgtgtgtgcaaatatctgagttgttgttttgtttttgttttagtttagacagagtggtttttttgttttgttttgttttttgagacagagtktcgctcttattgcctgggctggagtacagtagtgcgatctcagctcatcgcaacctccgcctcccaggttcaagtgattctcctgcctcagcctcctgag

SEQ ID NO: 137390 - DNA, 201 bp, Homo sapiens
gtgtgtgcaaatatctgagttgttgttttgtttttgttttagtttagacagagtggtttttttgttttgttttgttttttgagacagagtttcgctcttaktgcctgggctggagtacagtagtgcgatctcagctcatcgcaacctccgcctcccaggttcaagtgattctcctgcctcagcctcctgagtagctgggat

SEQ ID NO: 137391 - DNA, 201 bp, Homo sapiens
gaatcttggaagctttagattgggggaaaatgaaaagcagtgaactcatacacagctaaaatttccatcttaggtttatttcttctagatgtgaaagaaastgtcattaacacagatgtattgaatgataccctcaatgagaagaaaactgttttttctcttttctttcaatttcatttggaggaaagagggaggaagaat

SEQ ID NO: 137392 - DNA, 201 bp, Homo sapiens
ctggtgtgatcccccccaattcagtgcttcattttgatgtacttctgatggatatttggaattctgaagaccgggttcagattcacacctatttcaagccsctgagttgccctcagaccatccaggtgtctgattttgtgaggtaccactacaacgggacgttcctggacggaactctgtttgattcgaggtaagtcctgt

SEQ ID NO: 137393 - DNA, 201 bp, Homo sapiens
tggaatggataaagggctgctggggatgtgtgtgggtgagaagcgcatcatcaccattcctccttttctggcctatggagaggatggagatggtaagtccktctccttcttggagccactctctcctacccttatttttattgcagtggttaattcaattgtcaccacatgaaactcactagaccttttggtctagaccta

SEQ ID NO: 137394 - DNA, 201 bp, Homo sapiens
ttctgtcccacccctggggaattccagctccctgcctcttccacatctgctattgaagcacatcctccagccttttcctctctctctccacatcatcagcmcttctggatctttctcatttgcatacaaatgtgctattattttcccttccctggatgtgtctgtttctttcattgctttccttcctttacagcaaaaact

SEQ ID NO: 137395 - DNA, 201 bp, Homo sapiens
aaacccactcctttctggcatttgtccctctatgcctctgagcctgaccttgccagggtggccaatgtcttccgtatcgcggaatccagtggtcagctctyacgctcctcttaacttcaacacagctgattcccctacaggatgcatctttctctggcttccaggacaccacacttcatggtgttccttctacctccctgg

SEQ ID NO: 137396 - DNA, 201 bp, Homo sapiens
acgtccctctcaggcctcttgtccctgatcgcttcatgttggagtaccccgggctaagtcttgacctctgttcttttctctgtctttaagtcactcgctcmgtggtcttatcgggtccatatcctgatggcgtctggatttgtagctccagtccagtcttctctctccacttcacactcatgtgttcagctgcctgcttga

SEQ ID NO: 137397 - DNA, 201 bp, Homo sapiens
ggtccatatcctgatggcgtctggatttgtagctccagtccagtcttctctctccacttcacactcatgtgttcagctgcctgcttgatgtcctcatttayggaacccctgctatccacccgcacaccccgcttggggcctgctttacccaaagcctttcccgtcgcagtcagtggcatcactggcctccagtggctcagg

SEQ ID NO: 137398 - DNA, 201 bp, Homo sapiens
cacaccccgcttggggcctgctttacccaaagcctttcccgtcgcagtcagtggcatcactggcctccagtggctcaggcgagagcactcggtgatctctsactcctctttctctcgtaggccgtaatggtcctcaggaaatcattccagctctaccttgagagcacacgcagaacctgacacttcttaccacccccaccc

SEQ ID NO: 137399 - DNA, 201 bp, Homo sapiens
atcccagcactttgggaggccgaggcaggtggatcacttgaagacaggagttcaagaccagcctggccaacatggtgaaaccccgtctctaccaaaaatayaaaaattagctgagtgtggtggtgcatgcctgtaatcccaactacttgggaggctgaggcaggagaatcgcttgaacccaggagacagaggttgcagtga

SEQ ID NO: 137400 - DNA, 201 bp, Homo sapiens
gtggctcaggcgagagcactcggtgatctctcactcctctttctctcgtaggccgtaatggtcctcaggaaatcattccagctctaccttgagagcacacrcagaacctgacacttcttaccacccccaccctgtagcatcttagcccggggcctgtcatccctttcccgggtcacatcacagcagtggtgttcatgaagc

SEQ ID NO: 137401 - DNA, 201 bp, Homo sapiens
caggagttcaagaccagcctggccaacatggtgaaaccccgtctctaccaaaaatacaaaaattagctgagtgtggtggtgcatgcctgtaatcccaactrcttgggaggctgaggcaggagaatcgcttgaacccaggagacagaggttgcagtgagccgagatcttaccattgcactccagcctcagcaacagagtgag

SEQ ID NO: 137402 - DNA, 201 bp, Homo sapiens
agagcactcggtgatctctcactcctctttctctcgtaggccgtaatggtcctcaggaaatcattccagctctaccttgagagcacacgcagaacctgacrcttcttaccacccccaccctgtagcatcttagcccggggcctgtcatccctttcccgggtcacatcacagcagtggtgttcatgaagctcctcctgccct

SEQ ID NO: 137403 - DNA, 201 bp, Homo sapiens; identical to SEQ ID NO: 24399

SEQ ID NO: 137404 - DNA, 201 bp, Homo sapiens
ccatggaatctttgcaactattccagtgggcagcaatccccgctgtgggtacctgccatctctctcactacttggtgtccctttgtcgggagcccaccacrtaggtatccttctcttccctgaatgtctggcagtggctgcacattgctggtgatccccagggtcctgcaggtgggaacctcgggagggtgagccctgctc

SEQ ID NO: 137405 - DNA, 201 bp, Homo sapiens
tcctcaggaaatcattccagctctaccttgagagcacacgcagaacctgacacttcttaccacccccaccctgtagcatcttagcccggggcctgtcatcyctttcccgggtcacatcacagcagtggtgttcatgaagctcctcctgccctcacagtggccgttctcacacagaagctgggtcagacctgcagaggcccc

SEQ ID NO: 137406 - DNA, 201 bp, Homo sapiens; identical to SEQ ID NO: 24401

SEQ ID NO: 137407 - DNA, 201 bp, Homo sapiens
ttctcttccctgaatgtctggcagtggctgcacattgctggtgatccccagggtcctgcaggtgggaacctcgggagggtgagccctgctctggctgaagsatgctgggagccgacacggtcctcctcttccctgctgtgttcccctccaggccttcctggccagtgcaccaggaggaggattggagctgctcagcgtggg

SEQ ID NO: 137408 - DNA, 201 bp, Homo sapiens
acccccaccctgtagcatcttagcccggggcctgtcatccctttcccgggtcacatcacagcagtggtgttcatgaagctcctcctgccctcacagtggcygttctcacacagaagctgggtcagacctgcagaggcccctgtctacagggcctcacagtggcctgtgaagaccctgcactttctgctcgctgtaacctct

SEQ ID NO: 137409 - DNA, 201 bp, Homo sapiens; identical to SEQ ID NO: 24404

SEQ ID NO: 137410 - DNA, 201 bp, Homo sapiens
gagccctgctctggctgaaggatgctgggagccgacacggtcctcctcttccctgctgtgttcccctccaggccttcctggccagtgcaccaggaggaggmttggagctgctcagcgtggggtgctgttctcagtgggtgggaagggggactcacagcctcgtctgggagtttatgtggacaatctcctgcttcctgggtg

SEQ ID NO: 137411 - DNA, 201 bp, Homo sapiens
ggcctgtcatccctttcccgggtcacatcacagcagtggtgttcatgaagctcctcctgccctcacagtggccgttctcacacagaagctgggtcagaccygcagaggcccctgtctacagggcctcacagtggcctgtgaagaccctgcactttctgctcgctgtaacctctttgccggctgtctccctctgcccacttt

SEQ ID NO: 137412 - DNA, 201 bp, Homo sapiens
aacccaggtagttcatggccataatctatggtctgtagtccacccatgtatatgacagaagaaaggtaagtagctatgaaagcacagagaaggtttaactrtatatttttgtgtctgtgtgtgggggaggttaggatggaatcctggtatggcagggataagacccaaggatgacgaaaattcacctgggaggagctcagg

SEQ ID NO: 137413 - DNA, 201 bp, Homo sapiens
agccctgctctggctgaaggatgctgggagccgacacggtcctcctcttccctgctgtgttcccctccaggccttcctggccagtgcaccaggaggaggaytggagctgctcagcgtggggtgctgttctcagtgggtgggaagggggactcacagcctcgtctgggagtttatgtggacaatctcctgcttcctgggtga

SEQ ID NO: 137414 - DNA, 201 bp, Homo sapiens
gattctttcttcgtgccccatgactttgtggtctttgaggggtattgagaagggagaacccccacagctctgcctgtgtatcggcctggccccgctcggcrgtccttcttctccggggcatcatgccctggctttgaggtgagggaatggcaggaccgactggctctttcaggacaggctttctgcctcatcggcaccagg

SEQ ID NO: 137415 - DNA, 201 bp, Homo sapiens
ggtgcttctcataacccacactgcattcataacctgatgaaactggagggccacatggcgtgtccctacaggtggctgttcacatgctgtgtgggggttcytatttacccttccaggggagcatgtttcctggctgtgtcgtcagatactgtggtttacgctgttccggagtctggaggcctctgtgtgcctttgcatctc

SEQ ID NO: 137416 - DNA, 201 bp, Homo sapiens
cacctcagcctcccaaagtgctgggattgcaggcgtgagccaccatgcctggcctgcattgtggtttttgatttgcatttctctgctgtttagtgatgtgkagcatcttttcatatgcttgttggccatttgtatatcttctttggagaaatattcattcaatccctttgctcattttaaaattggattattttgtggtcg

SEQ ID NO: 137417 - DNA, 201 bp, Homo sapiens
aaagtgctgggattgcaggcgtgagccaccatgcctggcctgcattgtggtttttgatttgcatttctctgctgtttagtgatgtgtagcatcttttcatwtgcttgttggccatttgtatatcttctttggagaaatattcattcaatccctttgctcattttaaaattggattattttgtggtcgttgagttttaggag

SEQ ID NO: 137418 - DNA, 201 bp, Homo sapiens
aagtgctgggattgcaggcgtgagccaccatgcctggcctgcattgtggtttttgatttgcatttctctgctgtttagtgatgtgtagcatcttttcataygcttgttggccatttgtatatcttctttggagaaatattcattcaatccctttgctcattttaaaattggattattttgtggtcgttgagttttaggagt

SEQ ID NO: 137419 - DNA, 201 bp, Homo sapiens
caccatgcctggcctgcattgtggtttttgatttgcatttctctgctgtttagtgatgtgtagcatcttttcatatgcttgttggccatttgtatatcttytttggagaaatattcattcaatccctttgctcattttaaaattggattattttgtggtcgttgagttttaggagttctttatatattctagatattaatc

SEQ ID NO: 137420 - DNA, 201 bp, Homo sapiens
tatatttatgcatttaatccattttgaattgattgtttcctatggtataaagtaagaatctccaactttattcttttgcatgtggagatccaattttcccwgcaccgtttattgaagagaccatccttacccactgtgtagccttagcccttgtcaaagatcatttgaccatataggcaaaagtttatttctgggctattt

SEQ ID NO: 137421 - DNA, 201 bp, Homo sapiens
ttaatcctaagtatttcattcttcttgatgctattgtaaatagaattattttgttcatttccttttttaagattgttcattattagtgtatagaaatgcawctgattttggggtgttgattttgtatcctgcaactttgccaaatttgtttattagttgtttttttcccccacagaaccatcaagtccaatgtttattagt

SEQ ID NO: 137422 - DNA, 201 bp, Homo sapiens
cacacttcatggtgttccttctacctccctggtacgtccctctcaggcctcttgtccctgatcgcttcatgttggagtaccccgggctaagtcttgacctytgttcttttctctgtctttaagtcactcgctccgtggtcttatcgggtccatatcctgatggcgtctggatttgtagctccagtccagtcttctctctcc

SEQ ID NO: 137423 - DNA, 201 bp, Homo sapiens
ctgcaactttgccaaatttgtttattagttgtttttttcccccacagaaccatcaagtccaatgtttattagttttaacagctttttttatggactcttayagggttttctatatataaagttatttcgtcagttaaaagagatatttttacttcttcctttccaatttctgtgccatgtatttctttttcttgcttaatt

SEQ ID NO: 137424 - DNA, 201 bp, Homo sapiens
gttgtttttttcccccacagaaccatcaagtccaatgtttattagttttaacagctttttttatggactcttacagggttttctatatataaagttatttygtcagttaaaagagatatttttacttcttcctttccaatttctgtgccatgtatttctttttcttgcttaattgctctagctaggagttccaggaccatg

SEQ ID NO: 137425 - DNA, 201 bp, Homo sapiens
ccagatcccaggacaggttgtataaatgcttactccagagtgtgcagaagtaattttcatgaccagttctgggcttgatgctgcccatgagtttgtgccakttgtgctgatcagaataaatttgttcagaacaactttatttttccagatggtcagaattttaagcagtagataagactggtcttgcattgttagcctctt

SEQ ID NO: 137426 - DNA, 201 bp, Homo sapiens
catgctggtcttaactcctgggctcaagcgatgctcctgcttaggcctcccaaagcactgggattatcagtgtgagccactgtgcctggccccaggaaccscttcttttcagtgttttcacactgctgatatctggacatggaggagataggaagagctaactggtaacaatgataggcactgtggattgatattttttcc

SEQ ID NO: 137427 - DNA, 201 bp, Homo sapiens
ggagttgtttagagtgtgactgcacattgcagctctttttatggagaaggggagtgctgaaacggaggctgctaccgtgcattagccctgtgcgtttctgytaactaggggaagatcctagctacttctcactgtggtctcctgaggccattggcagctggccaagcacccctggtgaagacttcttagcggggccttgaa

SEQ ID NO: 137428 - DNA, 201 bp, Homo sapiens
cagggcctcacagtggcctgtgaagaccctgcactttctgctcgctgtaacctctttgccggctgtctccctctgcccactttacccggccacaccaaccyccagtgctgtctgtgaccacccaggcatgcgtccaccttgagccctggcaccggctgccatctctgctcaggagacatctaccccagataacttgttcgg

SEQ ID NO: 137429 - DNA, 201 bp, Homo sapiens
tctacagggcctcacagtggcctgtgaagaccctgcactttctgctcgctgtaacctctttgccggctgtctccctctgcccactttacccggccacaccwacctccagtgctgtctgtgaccacccaggcatgcgtccaccttgagccctggcaccggctgccatctctgctcaggagacatctaccccagataacttgt

SEQ ID NO: 137430 - DNA, 201 bp, Homo sapiens
ccttgtccgctgataacaacattccactttctgtttctatgagtttaactactttagatacctcatataattcgtggaatcatgcagtatttgtctttctrtgactggcttatttcattttacgtaatctcctcaaggttcatccatattgtagcatgtgataggatttccttcctttttaaggcggaataatatttcatt

SEQ ID NO: 137431 - DNA, 201 bp, Homo sapiens
ctacagggcctcacagtggcctgtgaagaccctgcactttctgctcgctgtaacctctttgccggctgtctccctctgcccactttacccggccacaccarcctccagtgctgtctgtgaccacccaggcatgcgtccaccttgagccctggcaccggctgccatctctgctcaggagacatctaccccagataacttgtt

SEQ ID NO: 137432 - DNA, 201 bp, Homo sapiens
tagtgtcctgtttgtagttttactgtgaaggaaaacacataatatggactgataaatggaatgtctcaggtactcatgtttgaatttcaggtgcgtttagycatattgacatgctggcacaacatagagacctgtaggcatttaaacagcagatggatacagtgatgtgttgattcataatggggatatgttctgcgaaag

SEQ ID NO: 137433 - DNA, 201 bp, Homo sapiens
ggctgtctccctctgcccactttacccggccacaccaacctccagtgctgtctgtgaccacccaggcatgcgtccaccttgagccctggcaccggctgccmtctctgctcaggagacatctaccccagataacttgttcggccctttccttctcatctttcaagcctttgcacaaatcttcccttctccttaaagttttat

SEQ ID NO: 137434 - DNA, 201 bp, Homo sapiens
gctattttgatctattggtctatgtgtctgtatttgggtcagtaccatgctgccttgattatgatagcttcataatatgtttcaaaatcaggaagtgtgargcctccagttttgttcttctttctcaggattgttttggctctttagagtccttcaagattccaaggccaggcaccgtggctcacacctgtaatcccagca

SEQ ID NO: 137435 - DNA, 201 bp, Homo sapiens
ccagtgctgtctgtgaccacccaggcatgcgtccaccttgagccctggcaccggctgccatctctgctcaggagacatctaccccagataacttgttcggycctttccttctcatctttcaagcctttgcacaaatcttcccttctccttaaagttttatcctgaccactgaattcaacacttcatccctttctcccttcc

SEQ ID NO: 137436 - DNA, 201 bp, Homo sapiens
atgaatgacctctttctttcctttcttcttttctagctactctcggaaccgcacgtttgacacgtacattgggcagggctacgtgattcctgggatggatraaggtctacttggtgtttgcattggagaaaagcgaaggattgtggtcccgcctcacctggggtatggagaggaaggaagaggtgagcatcagcatcacct

SEQ ID NO: 137437 - DNA, 201 bp, Homo sapiens
cgagtgcagtggcatgatcacagcttactgcagccttgacctcctgagctcaagtgatcctctcacttcaacctcccgagtacctgggactacagtacctktgcaccaccacacatggctaatttttgtgtttttgtaaagatggtgtttcaccaggttgcctaggctggtcttgaactcttgggctcaagcttcaacctt

SEQ ID NO: 137438 - DNA, 201 bp, Homo sapiens
ggcatgcgtccaccttgagccctggcaccggctgccatctctgctcaggagacatctaccccagataacttgttcggccctttccttctcatctttcaagmctttgcacaaatcttcccttctccttaaagttttatcctgaccactgaattcaacacttcatccctttctcccttccttactgagctccgctttttgatt

SEQ ID NO: 137439 - DNA, 201 bp, Homo sapiens
tggaaagtgtagtgtgtgatcatcgtgtactatggcctggaactcttggcctcaagtgatcctcttgcctcagccttcagagtagctggcactacaggcaygcaccaccacaccctgcacagaacttcttgagagccaaaatattgaagctaaagtccagcttaagactggaattcccaaatagatttagtttctagagtt

SEQ ID NO: 137440 - DNA, 201 bp, Homo sapiens
agctactggtagagatggctgtttgagggaaatagtcttaggcaaagggtccagaaagcccagagtcccctttgggagtgaatgtgtggagagggaggtgktaggcagaaaagccaaactctgcctccctgctttcaagtctgcagtaagatcagtctcagtggtgaaactcagccagcagagggggtgagtctcagctgg

SEQ ID NO: 137441 - DNA, 201 bp, Homo sapiens
attcaacacttcatccctttctcccttccttactgagctccgctttttgatttttttctggagcatttcactttgtaacttaatgtgtaatttacctattyttatgttcatgtctaattgtctgtttccactagaatgcaagcatcacaggggcagggtgtttgtttgtttgtgtattgatatatttcaagatctagaaca

SEQ ID NO: 137442 - DNA, 201 bp, Homo sapiens
ccacgcctggctaatttttttttttaattttcagtagagatggagtttcactatgttggccaggctagtctcaaactcctggcccaagtgatctgcccacyttggcttcccaaagtgctgggattatagatgtgagcgccatgccatgccagaaacaaatattgttaatcttaatctggtaggcagaatattcagcccctc

SEQ ID NO: 137443 - DNA, 201 bp, Homo sapiens
ctgatagtgtaagcagaaattctagagatcagcctcattggggcttcattttacacaggcattcatccagcttctaacattccaggtactgggatacagcrgaggataaagctgacaaaagtccctgccctcaagtcagggttggggtgaacacaagcccgtcctgcagacttaagcagaaaagagtgggaatttgttgga

SEQ ID NO: 137444 - DNA, 201 bp, Homo sapiens
tgccaaaaagatcttgtctgtgttggtagcccagactcaagttccagccctgtcacccccagactgctctgtttctggccccaggcctggcgttcatggcrgctgaactcatggtctttcctgtccccttcttttccagttctcagagtacattcacgcccaggtggcatctggcaaagggaaactcgctcctggctttga

SEQ ID NO: 137445 - DNA, 201 bp, Homo sapiens
ttggccaggctagtctcaaactcctggcccaagtgatctgcccaccttggcttcccaaagtgctgggattatagatgtgagcgccatgccatgccagaaayaaatattgttaatcttaatctggtaggcagaatattcagcccctccaagtatctatgttctaatccccagaacctgtgagtatgttaccttactttattt

SEQ ID NO: 137446 - DNA, 201 bp, Homo sapiens; identical to SEQ ID NO: 24402

SEQ ID NO: 137447 - DNA, 201 bp, Homo sapiens
ggctctctgacccatatgtgtcctagacagacagaaagaatgagtccccattaggtagtgacttgttgatacccatatgtggagaaccgagacctcaaacyagaagtcctagagctctcagaggaaacacacccgctcagaggaaacccaccttcctcagaggaaacccactcccctcagaagaaacccacccccgcagag

SEQ ID NO: 137448 - DNA, 201 bp, Homo sapiens; identical to SEQ ID NO: 24403

SEQ ID NO: 137449 - DNA, 201 bp, Homo sapiens; identical to SEQ ID NO: 24405

SEQ ID NO: 137450 - DNA, 201 bp, Homo sapiens
gacatctgccctgtgtttgggggcaaagatccataaatgtctatctctaggatgggtatgggatcatcgtttagctgatatttgggtaagaaaaaccgtayagagagatgagttggaaatatcctcatggtgtggaactttttccctttctcattacctttcagtcacaatcgcatgaaaacatatgacacgtatgtggga

SEQ ID NO: 137451 - DNA, 201 bp, Homo sapiens
ctgactcacgttaacttcctagaagctgacatactcacctgatgctacatggttccttgactgggtgtgaatcgacctctacactggttggaattcttgtkcctggaatcctcggggcctgagaggctgagttcatttgactgctgacatcagatcccagggatgtgggtggttccagatgcattcccttttgccctggag

SEQ ID NO: 137452 - DNA, 201 bp, Homo sapiens; identical to SEQ ID NO: 24406

SEQ ID NO: 137453 - DNA, 201 bp, Homo sapiens; identical to SEQ ID NO: 24407

SEQ ID NO: 137454 - DNA, 201 bp, Homo sapiens
ttggaattcttgtgcctggaatcctcggggcctgagaggctgagttcatttgactgctgacatcagatcccagggatgtgggtggttccagatgcattccyttttgccctggagaaggccctgcacctgaatgcatcttggaggggagattatatttgaattgataaaatttggtgactgcttagctcagtgttagaagtt

SEQ ID NO: 137455 - DNA, 201 bp, Homo sapiens; identical to SEQ ID NO: 24408

SEQ ID NO: 137456 - DNA, 201 bp, Homo sapiens; identical to SEQ ID NO: 24409

SEQ ID NO: 137457 - DNA, 201 bp, Homo sapiens
agatcccagggatgtgggtggttccagatgcattcccttttgccctggagaaggccctgcacctgaatgcatcttggaggggagattatatttgaattgayaaaatttggtgactgcttagctcagtgttagaagtttttaaaatttgtggtaaaatatacttaacatctttaccttgttaaccattttaagtgtacagtt

SEQ ID NO: 137458 - DNA, 201 bp, Homo sapiens
atgtgttcttctcatgggaacactctcagtgccaatgggttggtgacctaacatgaggctcttctgtttcattttaggtggaatttaggcaaaacttacartattgttctgggatctgggcaagttgtgttggggatggacatgggtctcagagagatgtgcgttggcgagaaacggacagtgatcattccgcctcacctg

SEQ ID NO: 137459 - DNA, 201 bp, Homo sapiens
gtataaccattactatcatctacactcagaactctttcatcatccccaacataaacccattacacaataactcccgattcctccctcctatcaacctctgrcaaccacctttctttctgtctctaccaatttgcctattctaagtgcctcacttgagtggaatcatacaatatttctctttctgtgtctgtcttattttac

SEQ ID NO: 137460 - DNA, 201 bp, Homo sapiens
cccagcactttgagagaacgaggcgggaggatcgcttgagcccaggagtttggggctgctgtgagctatgatcgtgccattgcactgcagcctgggagacrgagagagatcccatcacaaaacaaaacacaacacgacacctctcgtgggcaggaggtagtccaggaccgtcactctgctttataccaggccctatatcaa

SEQ ID NO: 137461 - DNA, 201 bp, Homo sapiens
tattgaagagcttagtttgctactgtgcccaacaaataatagatactctgtaaacagtagttagtattaaaaagttttgttaaatttaggaagtatattckggttctgtgaatgaaaaaaataatttttaaagtagtttcttgccggtgcattgttgctgcttgcctgtgttctgtgcttgggagtctttgaagtcttgct

SEQ ID NO: 137462 - DNA, 201 bp, Homo sapiens
attaaaaagttttgttaaatttaggaagtatattctggttctgtgaatgaaaaaaataatttttaaagtagtttcttgccggtgcattgttgctgcttgcstgtgttctgtgcttgggagtctttgaagtcttgctttctggcccattattataataaatctgccagtttgatgatagcttagtggcagggcgagtcccca

SEQ ID NO: 137463 - DNA, 201 bp, Homo sapiens
tgtcctctggcttgttggcctgtacttgaaatcttgctttctgttcactgaccttgaagaaaggaaacttattaaaataggctgtaaaactaggaggagarggagaagagggccaggtctcaggaagctgccctgaggggagtggtgaggtggactctgttgctcgcccaaactgttcattagggaaaaagaggaaaaagt

SEQ ID NO: 137464 - DNA, 201 bp, Homo sapiens
gtcctctggcttgttggcctgtacttgaaatcttgctttctgttcactgaccttgaagaaaggaaacttattaaaataggctgtaaaactaggaggagagrgagaagagggccaggtctcaggaagctgccctgaggggagtggtgaggtggactctgttgctcgcccaaactgttcattagggaaaaagaggaaaaagtg

SEQ ID NO: 137465 - DNA, 201 bp, Homo sapiens
cccaggctggatgacagtgcagtggcaccatctcagctcactgcaaccttcacctcccaggttcaagcaatgcttgtacctcaggctcccaagtagctggsactacaggtgcacaccaccacgcctggctaattttgtatttttagtagagatggggtttcaccatgttggccaggctggtctcgaactcctaatctcaag

SEQ ID NO: 137466 - DNA, 201 bp, Homo sapiens
ggctcccaagtagctgggactacaggtgcacaccaccacgcctggctaattttgtatttttagtagagatggggtttcaccatgttggccaggctggtctygaactcctaatctcaagtgatccaccgtccttggcctcccaaagtgctgagattacaggcatgagccaccacgcctggcattgtaacctgccctttactc

SEQ ID NO: 137467 - DNA, 201 bp, Homo sapiens
tccaccgtccttggcctcccaaagtgctgagattacaggcatgagccaccacgcctggcattgtaacctgccctttactcttattgtatatatccctccgmgtcagtgagtaaaaatctgttataaaatgccatagagcattttattttatgtcttctgaaaccctgtgggtctctatcagtatataaggtacttgtaggc

SEQ ID NO: 137468 - DNA, 201 bp, Homo sapiens
ggtacttgtaggcaaagtccatgccttgtactttatatcccccaaagcacctggcacagtcccctaataggcaaacccctgttgattgctaaatttgacaytgaagaagataaaggtgtgagtcacagccatgatttccttatttatcttttgatctaaggctgttgcctatcagcctttaaaacacgtatattagtgatc

SEQ ID NO: 137469 - DNA, 201 bp, Homo sapiens
tgcctatcagcctttaaaacacgtatattagtgatcctaagactacatcatactttctattacctgtgataattatagcaatattggcataacacttaggktttcagagcatttttcacgttgttacacagatcctggggaggctgttattatttcttgcattttgcagtggaggaaactgaggttaagagagtttaagta

SEQ ID NO: 137470 - DNA, 201 bp, Homo sapiens
gtataatagtgttagctatattcacactgttgtgcaatatatctctagaatttttccatcttgcaaaattgaaactttgtgcccactgaacaacttctctkcatttttccttcttccttgtccgctgataacaacattccactttctgtttctatgagtttaactactttagatacctcatataattcgtggaatcatgca

SEQ ID NO: 137471 - DNA, 201 bp, Homo sapiens; identical to SEQ ID NO: 24395

SEQ ID NO: 137472 - DNA, 201 bp, Homo sapiens; identical to SEQ ID NO: 24397

SEQ ID NO: 137473 - DNA, 201 bp, Homo sapiens; identical to SEQ ID NO: 24398

SEQ ID NO: 137474 - DNA, 201 bp, Homo sapiens; identical to SEQ ID NO: 24400

SEQ ID NO: 137475 - DNA, 201 bp, Homo sapiens
aactctttcatcatccccaacataaacccattacacaataactcccgattcctccctcctatcaacctctgacaaccacctttctttctgtctctaccaayttgcctattctaagtgcctcacttgagtggaatcatacaatatttctctttctgtgtctgtcttattttacttagcataatgttttcaaggtctatttgt

SEQ ID NO: 137476 - DNA, 201 bp, Homo sapiens
tagttcatgaaaatgctgtgcactcattccatggaataaatgttggaaagctgatcttttctgatataaaatgttgaatgatattatctggttttctgatrttttattggaaggctgaagacctatgagaatgcaccatgcagtcagaatccccttgatgaaaacagcaggacttcactgcatttactgagggagcgcact

SEQ ID NO: 137477 - DNA, 201 bp, Homo sapiens
gtctctactaaaaacacaaaaattagccaggtgtggtggtacgcgtctgtaatctcagctgaggcagggaaatcgcttgaacccgggggacggaggttgcrgtgagctgagaacatgccaatgcactccagcctggatgacagagcaagactccatctcaaaaaaaaaaaaattaattcctcatttctggctaataaattt

SEQ ID NO: 137478 - DNA, 201 bp, Homo sapiens
aactatcagcggtcactctccgtaccctgtcctcatccatccactgcccccacgctggcaacaggtagtctatttcttgtctgtatggatttgcttatgcyggaggtttccatatccctggaatcctacagtatgtggccttttgtgtctggcttctttcacttagcataatgttttcgggttcattcccaggtgattttt

SEQ ID NO: 137479 - DNA, 201 bp, Homo sapiens
aatcctacagtatgtggccttttgtgtctggcttctttcacttagcataatgttttcgggttcattcccaggtgatttttaacaggttaccaaggttgagraaccatagatctgcctctgcagacacccaccctgtccatgtgtgttagcttcccacacagagccatccgtggcctggctttgagcagccttctggccaat

SEQ ID NO: 137480 - DNA, 201 bp, Homo sapiens
caggctcaacgattccatggggcaatagtccatagtcttgaattttagtccaaactgtgctcattacaggctgtgagacccacggcaaatctgtgcctccrtttatccacctgtaaaatgaggatgaggttacatctaacagccctttcagcgtcagtcttggagtcctcctagggttctgtatctgggtgcccgttttcc

SEQ ID NO: 137481 - DNA, 201 bp, Homo sapiens
cttgactgggtgtgaatcgacctctacactggttggaattcttgtgcctggaatcctcggggcctgagaggctgagttcatttgactgctgacatcagatyccagggatgtgggtggttccagatgcattcccttttgccctggagaaggccctgcacctgaatgcatcttggaggggagattatatttgaattgataaaa

SEQ ID NO: 137482 - DNA, 201 bp, Homo sapiens
cctggtactcaataaacgcctattaaatatgagcgtgagtgtgtttctattagagataggagagagaccaatcaagaagcagacacagaaaagtacgtgtkgggacaggaggtaaggagggactgttggagtttgtgtatctctatctgaattttgtcattagctgtgttattctcttgaataagtaatatcatgtctgaa

SEQ ID NO: 137483 - DNA, 201 bp, Homo sapiens
gtacgtgttgggacaggaggtaaggagggactgttggagtttgtgtatctctatctgaattttgtcattagctgtgttattctcttgaataagtaatatcrtgtctgaatttttcatttctttctttctttcttttttgaggacggagtctcactctgttgcccaggctagagtacagtggtgcaatcctaactcactgta

SEQ ID NO: 137484 - DNA, 201 bp, Homo sapiens
ggactacaagtgctcaccaccacgcccagctaatttttttgtagagacatttggctgtgttgcctaggctggtctcaaacccctggcctcaagtgatcctsccacctcggcctcccagagttgagattataggcatgagccaccaccatacctaacctgagttggtttttttatatgtaaaatgctgatgataataaaata

SEQ ID NO: 137485 - DNA, 201 bp, Homo sapiens
gggaggagaggagtgggagtgagccggagagggtgaagcaggcaggaagctgcaggccggcggtggatggggccaggaagcatgcagggggagtgaggacygtgtttgagagaaacactgcccaagagagaaagaaagaaaatcacaggacccgaggaaaaagaatgagtggtgtgttcagagatgacacatgacaacaaa

SEQ ID NO: 137486 - DNA, 201 bp, Homo sapiens
atatgaggtttgcaaacattttctcccattttttaggttgcctttttactctgttgattgttttctttgctgttcagagttttaaagtttgacaaagtccyctttgtctgtttttgtttttgttacctgtgcttttggtgtcatatccaatccaatgtcatgatgcttttcccttgtgtttttttcctagttttatagttt

SEQ ID NO: 137487 - DNA, 201 bp, Homo sapiens
gctctagcccctgtctgtggtgcactagctgtatgactttggatagtgtttgactgccttggacttcatttttccctattccagcaactttgtcaagtagrtggttagattaaagagataagatatgtgtcacagtgctttacaaatttcagaggctgatcagctggacggcactggttggatgcattcagctcccttctc

SEQ ID NO: 137488 - DNA, 201 bp, Homo sapiens
cacgttgttacacagatcctggggaggctgttattatttcttgcattttgcagtggaggaaactgaggttaagagagtttaagtatgttttatgctgttaycatgctgcctctgtgtttaacttagctggatgacttttaaaaaaaatcaagtgtgtgtgtgtgtgtgtgtgtgtgtgtgtgtgtgttaactttggccatt

SEQ ID NO: 137489 - DNA, 201 bp, Homo sapiens
gagtcttgctctgtcacctaggctggagtgcagtggcgttatctcggctcactgcaatctccacctcccaggttcaagcaattctcctgcctcagcctccygagttgctgggactacaggcatgtgccaccacgcctggctaattttttgtatttttagtagagatggggtttcaccgtgttggccaggctggtttcaaac

SEQ ID NO: 137490 - DNA, 201 bp, Homo sapiens
ggctcaagcgatcctcctacctcagcttccaaagtagctgggactataggcatgcaccaccacacctggctaattatatgtatttatttatttagtagagrcgggggggcctcactttgttgccccggctggtctcgaactcctaacttcaacttaactcctcttgccttggccttccaaagccctggcctgaccacagcc

SEQ ID NO: 137491 - DNA, 201 bp, Homo sapiens
gctcaagcgatcctcctacctcagcttccaaagtagctgggactataggcatgcaccaccacacctggctaattatatgtatttatttatttagtagaggsgggggggcctcactttgttgccccggctggtctcgaactcctaacttcaacttaactcctcttgccttggccttccaaagccctggcctgaccacagcca

SEQ ID NO: 137492 - DNA, 201 bp, Homo sapiens
tgcaccaccacacctggctaattatatgtatttatttatttagtagaggcgggggggcctcactttgttgccccggctggtctcgaactcctaacttcaasttaactcctcttgccttggccttccaaagccctggcctgaccacagccaactctttcttttttgtgtgtgtgaaagaataggtaactattttgcaaaatc

SEQ ID NO: 137493 - DNA, 201 bp, Homo sapiens
atttagtagaggcgggggggcctcactttgttgccccggctggtctcgaactcctaacttcaacttaactcctcttgccttggccttccaaagccctggcmtgaccacagccaactctttcttttttgtgtgtgtgaaagaataggtaactattttgcaaaatcagtttaacacatttttttttttctggagagagttatg

SEQ ID NO: 137494 - DNA, 201 bp, Homo sapiens
tggccttccaaagccctggcctgaccacagccaactctttcttttttgtgtgtgtgaaagaataggtaactattttgcaaaatcagtttaacacatttttktttttctggagagagttatgctgattcttattgaactagatttgctggcaatattcaaggtagtctaaaatttccaaccctacaagtactgtccagtgga

SEQ ID NO: 137495 - DNA, 201 bp, Homo sapiens
ggtgtccaccctattgggtgttaagtcacatggtcctaagtgggggcccaggctcaccctttcagcaggactggtccacagggaagagccagtaggctggrcagcagccaggatgcagtcaggggggcctgacaggggcagtggtgtcagaacaactggccaggtcaggacatgctaacttaggagttgtttagagtgtga

SEQ ID NO: 137496 - DNA, 201 bp, Homo sapiens
ctcaccattcctctctgaagaaaccgattccctaagaggtgtagggcatgattccagggcatacagtctgcatttagttctcgttactgggtgctcaatgmctgcctgtatgtgctgagtgtattctctgatttggccctcacagcagctgttttttagaagaaactgcacagagaaggtaaatgacttgtccaaggtcac

SEQ ID NO: 137497 - DNA, 201 bp, Homo sapiens
tccaaagccctggcctgaccacagccaactctttcttttttgtgtgtgtgaaagaataggtaactattttgcaaaatcagtttaacacatttttttttttytggagagagttatgctgattcttattgaactagatttgctggcaatattcaaggtagtctaaaatttccaaccctacaagtactgtccagtggagatgtt

SEQ ID NO: 137498 - DNA, 201 bp, Homo sapiens
tggcaatattcaaggtagtctaaaatttccaaccctacaagtactgtccagtggagatgttcctgtatcagtaactcctaggcagggtttttgctttgctrtggccccattacatctgtgggcacatttttacaggttggtttttactgaggaagggactatttatacttttctttctctttccctaccctttgggccttc

SEQ ID NO: 137499 - DNA, 201 bp, Homo sapiens
aaggacttctaagggtgaggccagctggctggagggcttgtgagatgaccagcacacttgtgtgccaagcgcttttacacacaccctctcgatggaagctyaccattcctctctgaagaaaccgattccctaagaggtgtagggcatgattccagggcatacagtctgcatttagttctcgttactgggtgctcaatgcct

SEQ ID NO: 137500 - DNA, 201 bp, Homo sapiens
ttttacaggttggtttttactgaggaagggactatttatacttttctttctctttccctaccctttgggccttcagctatgacagagactccactttcaaygtgtttgtgggaaaaggacagctgatcacagggatggaccaggctcttgttgggatgtgcgtaaacgagagacatttcgtgaagattcccccaaagcttg

SEQ ID NO: 137501 - DNA, 201 bp, Homo sapiens
gggatgtgtgtgggtgagaagcgcatcatcaccattcctccttttctggcctatggagaggatggagatggtaagtccttctccttcttggagccactctytcctacccttatttttattgcagtggttaattcaattgtcaccacatgaaactcactagaccttttggtctagacctacgctggccaatatggtaaccac

SEQ ID NO: 137502 - DNA, 201 bp, Homo sapiens
tgccggtgcattgttgctgcttgcctgtgttctgtgcttgggagtctttgaagtcttgctttctggcccattattataataaatctgccagtttgatgatrgcttagtggcagggcgagtccccagccaagtgtaattcaagagcaggcattccagggggtggggattggggccccggaggtagagggtggaggtgtaaag

SEQ ID NO: 137503 - DNA, 201 bp, Homo sapiens
atctattggtctatgtgtctgtatttgggtcagtaccatgctgccttgattatgatagcttcataatatgtttcaaaatcaggaagtgtgaagcctccagytttgttcttctttctcaggattgttttggctctttagagtccttcaagattccaaggccaggcaccgtggctcacacctgtaatcccagcactttgggag

SEQ ID NO: 137504 - DNA, 201 bp, Homo sapiens
agctatgacagagactccactttcaacgtgtttgtgggaaaaggacagctgatcacagggatggaccaggctcttgttgggatgtgcgtaaacgagagacrtttcgtgaagattcccccaaagcttgcctacggaagtgaaggagtttgtaagcttttcttcctcgtttataaacacatcagcagaaacaatgagaacact

SEQ ID NO: 137505 - DNA, 201 bp, Homo sapiens
attacagaagaatttgtatatggcattatttcatttgaataattcattcttgttccttggatctcttttaaatttgtcatttaaattttttggaaaagagwaatagttacatagctcaaaaccaaaacaaagtatgcattaagatatgttgtaaattagccaggcgtgctggcgggtgcctgtaatcccagctactcagga

SEQ ID NO: 137506 - DNA, 201 bp, Homo sapiens
aagtgctcaccaccacgcccagctaatttttttgtagagacatttggctgtgttgcctaggctggtctcaaacccctggcctcaagtgatcctcccacctyggcctcccagagttgagattataggcatgagccaccaccatacctaacctgagttggtttttttatatgtaaaatgctgatgataataaaatatgtcctt

SEQ ID NO: 137507 - DNA, 201 bp, Homo sapiens
agtgctcaccaccacgcccagctaatttttttgtagagacatttggctgtgttgcctaggctggtctcaaacccctggcctcaagtgatcctcccacctcrgcctcccagagttgagattataggcatgagccaccaccatacctaacctgagttggtttttttatatgtaaaatgctgatgataataaaatatgtccttg

SEQ ID NO: 137508 - DNA, 201 bp, Homo sapiens
tcaaacccctggcctcaagtgatcctcccacctcggcctcccagagttgagattataggcatgagccaccaccatacctaacctgagttggtttttttatrtgtaaaatgctgatgataataaaatatgtccttgactctaggtaacatgattttaaaatattttacatttaaacttctctgaaatgatttgggctggggg

SEQ ID NO: 137509 - DNA, 201 bp, Homo sapiens
ggaaaaggacagctgatcacagggatggaccaggctcttgttgggatgtgcgtaaacgagagacatttcgtgaagattcccccaaagcttgcctacggaartgaaggagtttgtaagcttttcttcctcgtttataaacacatcagcagaaacaatgagaacacttttaggatgttaagtcaaacagactggagaatcttg

SEQ ID NO: 137510 - DNA, 201 bp, Homo sapiens
gaaatgatttgggctgggggatgtattacaactgatgcatatgtttaagtgtcccccacgcccctgggaagctgtcgttaaattcctggggttatggccaygcctaccccataaggttgctgcagggatttaaagggaaaatgtaggtgaaaaatactttggcaaactgtaaaacattattcagatgtgagctactgtctt

SEQ ID NO: 137511 - DNA, 201 bp, Homo sapiens
tgggatgtgcgtaaacgagagacatttcgtgaagattcccccaaagcttgcctacggaagtgaaggagtttgtaagcttttcttcctcgtttataaacacrtcagcagaaacaatgagaacacttttaggatgttaagtcaaacagactggagaatcttggaagctttagattgggggaaaatgaaaagcagtgaactcat

SEQ ID NO: 137512 - DNA, 201 bp, Homo sapiens
ccccataaggttgctgcagggatttaaagggaaaatgtaggtgaaaaatactttggcaaactgtaaaacattattcagatgtgagctactgtcttcaaaaktggaaattatggaaaagttaataaataatttagtatagaacaaataggatgtattctaaaagcaccttgtgactgttaggtgtatgatcataaggggcca

SEQ ID NO: 137513 - DNA, 201 bp, Homo sapiens
tgggggaaaatgaaaagcagtgaactcatacacagctaaaatttccatcttaggtttatttcttctagatgtgaaagaaagtgtcattaacacagatgtaytgaatgataccctcaatgagaagaaaactgttttttctcttttctttcaatttcatttggaggaaagagggaggaagaatgggtcattttgggattgtat

SEQ ID NO: 137514 - DNA, 201 bp, Homo sapiens
ttacgaagtttatgttatgtttttcttgagcagtggtaggacattggagtgatttcactctacggctgattttctcaccccacctcttacttccagtgggyaaggggcaagtattaatttggctgggtttgagtttcctcatctgtgatcaacttagccactcatctttcaggctcaacgattccatggggcaatagtcca

SEQ ID NO: 137515 - DNA, 201 bp, Homo sapiens
catacacagctaaaatttccatcttaggtttatttcttctagatgtgaaagaaagtgtcattaacacagatgtattgaatgataccctcaatgagaagaaractgttttttctcttttctttcaatttcatttggaggaaagagggaggaagaatgggtcattttgggattgtatagcagtgactgcttgaacccttttgg

SEQ ID NO: 137516 - DNA, 201 bp, Homo sapiens
tacgaagtttatgttatgtttttcttgagcagtggtaggacattggagtgatttcactctacggctgattttctcaccccacctcttacttccagtgggcraggggcaagtattaatttggctgggtttgagtttcctcatctgtgatcaacttagccactcatctttcaggctcaacgattccatggggcaatagtccat

SEQ ID NO: 137517 - DNA, 201 bp, Homo sapiens
atgataccctcaatgagaagaaaactgttttttctcttttctttcaatttcatttggaggaaagagggaggaagaatgggtcattttgggattgtatagcrgtgactgcttgaacccttttggcccacattcaccttgggagcatcctaggtgtttatttatctggcctgaaaggcagcaactgtgaactcagtgtgtaat

SEQ ID NO: 137518 - DNA, 201 bp, Homo sapiens
acttagccactcatctttcaggctcaacgattccatggggcaatagtccatagtcttgaattttagtccaaactgtgctcattacaggctgtgagacccasggcaaatctgtgcctccgtttatccacctgtaaaatgaggatgaggttacatctaacagccctttcagcgtcagtcttggagtcctcctagggttctgta

SEQ ID NO: 137519 - DNA, 201 bp, Homo sapiens
agcagtgactgcttgaacccttttggcccacattcaccttgggagcatcctaggtgtttatttatctggcctgaaaggcagcaactgtgaactcagtgtgwaatctttaatttctagctggtgtgatcccccccaattcagtgcttcattttgatgtacttctgatggatatttggaattctgaagaccgggttcagattc

SEQ ID NO: 137520 - DNA, 201 bp, Homo sapiens
tctaacagccctttcagcgtcagtcttggagtcctcctagggttctgtatctgggtgcccgttttcctcacttggagggccttgaggacatacctggtgayactggggaggcccatgtgctgcagcctgcaggggtcattcattaattccccgtgtctgtcctttagggaatatccccggctcggctgtgctggtgtttga

SEQ ID NO: 137521 - DNA, 201 bp, Homo sapiens
ctgcccctgttgtacctgccatggccttggccaccaacctctctggctttaacatttgtgaaatgagacttgaattagacactataaaagttgcagatatscaggtagaaatttagccatacagtgtcagaattgccagatttccccgtttgcacctctacaatgagttttacctatggcattaactccatatggacaaaa

SEQ ID NO: 137522 - DNA, 201 bp, Homo sapiens
gccttggccaccaacctctctggctttaacatttgtgaaatgagacttgaattagacactataaaagttgcagatatgcaggtagaaatttagccatacartgtcagaattgccagatttccccgtttgcacctctacaatgagttttacctatggcattaactccatatggacaaaagcaaagtgtaatgttagaaaaca

SEQ ID NO: 137523 - DNA, 201 bp, Homo sapiens
agccagtaggctggacagcagccaggatgcagtcaggggggcctgacaggggcagtggtgtcagaacaactggccaggtcaggacatgctaacttaggagwtgtttagagtgtgactgcacattgcagctctttttatggagaaggggagtgctgaaacggaggctgctaccgtgcattagccctgtgcgtttctgctaac

SEQ ID NO: 137524 - DNA, 201 bp, Homo sapiens
aaatgagacttgaattagacactataaaagttgcagatatgcaggtagaaatttagccatacagtgtcagaattgccagatttccccgtttgcacctctayaatgagttttacctatggcattaactccatatggacaaaagcaaagtgtaatgttagaaaacacattaattacaactagtgtcctgtttgtagttttact

SEQ ID NO: 137525 - DNA, 201 bp, Homo sapiens
accattgtaactgttttgaactgtataatagtgttagctatattcacactgttgtgcaatatatctctagaatttttccatcttgcaaaattgaaactttrtgcccactgaacaacttctctgcatttttccttcttccttgtccgctgataacaacattccactttctgtttctatgagtttaactactttagatacctc

SEQ ID NO: 137526 - DNA, 201 bp, Homo sapiens
ttgccagatttccccgtttgcacctctacaatgagttttacctatggcattaactccatatggacaaaagcaaagtgtaatgttagaaaacacattaattrcaactagtgtcctgtttgtagttttactgtgaaggaaaacacataatatggactgataaatggaatgtctcaggtactcatgtttgaatttcaggtgcgt

SEQ ID NO: 137527 - DNA, 201 bp, Homo sapiens
aatgagacttgaattagacactataaaagttgcagatatgcaggtagaaatttagccatacagtgtcagaattgccagatttccccgtttgcacctctacratgagttttacctatggcattaactccatatggacaaaagcaaagtgtaatgttagaaaacacattaattacaactagtgtcctgtttgtagttttactg

SEQ ID NO: 137528 - DNA, 201 bp, Homo sapiens
tgctgaggaccaccatagtggacagtgcagatacagacccagatcatttccatcactcagaaagttctatttgacagtgctagtctggattgtctgctgtstgatgattgagttgcagaaatttccacttacttatagtcattggcattcataagtaaccccctctgcccctgttgtacctgccatggccttggccaccaa

SEQ ID NO: 137529 - DNA, 201 bp, Homo sapiens
attatatttccaattgaaagaccacttttctgtgtacaccagatttctgttcatataatggaaccacagttttcttaggtttcaagagctttccattttartacagtgggatctagcccattctaacagctgcatatatttcattgtatagatttgcctatatttaggtaatcaatccttgttgtttgtcctgtatgtttc

SEQ ID NO: 137530 - DNA, 201 bp, Homo sapiens
atcagcggtcactctccgtaccctgtcctcatccatccactgcccccacgctggcaacaggtagtctatttcttgtctgtatggatttgcttatgccggakgtttccatatccctggaatcctacagtatgtggccttttgtgtctggcttctttcacttagcataatgttttcgggttcattcccaggtgatttttaaca

SEQ ID NO: 137531 - DNA, 201 bp, Homo sapiens
ttttagaatcagtgaaatatgtgctaggcttccagggcccagatgtacagggacctggcttacaacagaccttgcaaagaaatcccaaccactgactattrgaagctagcgggaggcagggcagcagggaaggggcatggcttgtagtgcttttgtggatcaagtgagctcctaagagtgaaaatggtccatgaggttaga

SEQ ID NO: 137532 - DNA, 201 bp, Homo sapiens
ggaaggggcatggcttgtagtgcttttgtggatcaagtgagctcctaagagtgaaaatggtccatgaggttagaagggtctgtaaggtccgtggctgctgycactgctcctgctgatgttcatattcctgtccgctgatcctgaggctgaggaaaggggaagtgggtgtggggaatgaacaaaggaattccttctcagagg

SEQ ID NO: 137533 - DNA, 201 bp, Homo sapiens
gctgtcactgctcctgctgatgttcatattcctgtccgctgatcctgaggctgaggaaaggggaagtgggtgtggggaatgaacaaaggaattccttctcrgaggctccaggatctgcttctcacgtggggcggggagagtcagtctccctgcctcctgcttgtgtttggaggactcataacatcctggcagagcactgag

SEQ ID NO: 137534 - DNA, 201 bp, Homo sapiens
ccccgtctctactaaaaatacaaaatttagccaggcgtggtggcaggtgcctgtaatcccagctactcgggaagctgaggcaggagaatcgcttgaacccrggaggcgaaggttgcagtgagccaagattgtgctattacactccagcctgggcaacagagcgagactccatctcaaaaaaaaaaaaagaaaagaaaaatt

SEQ ID NO: 137535 - DNA, 201 bp, Homo sapiens
gtgtggggaatgaacaaaggaattccttctcagaggctccaggatctgcttctcacgtggggcggggagagtcagtctccctgcctcctgcttgtgtttgraggactcataacatcctggcagagcactgaggagccacatgagccagagctccttatcaggaagtgcattttgtactctgagagcctctgtattacatgt

SEQ ID NO: 137536 - DNA, 201 bp, Homo sapiens
caggcgtggtggcaggtgcctgtaatcccagctactcgggaagctgaggcaggagaatcgcttgaacccgggaggcgaaggttgcagtgagccaagattgwgctattacactccagcctgggcaacagagcgagactccatctcaaaaaaaaaaaaagaaaagaaaaatttaaaccccatggttacttttaagactttcat

SEQ ID NO: 137537 - DNA, 201 bp, Homo sapiens
caaaccagaagtcctagagctctcagaggaaacacacccgctcagaggaaacccaccttcctcagaggaaacccactcccctcagaagaaacccaccccckcagaggaaacccaccccctcagaggaaacccacccccctcagaggaaactgactctctgcagaggaaacccaccccccgcagaggaaacccacccaccgc

SEQ ID NO: 137538 - DNA, 201 bp, Homo sapiens
tcagaggctccaggatctgcttctcacgtggggcggggagagtcagtctccctgcctcctgcttgtgtttggaggactcataacatcctggcagagcactsaggagccacatgagccagagctccttatcaggaagtgcattttgtactctgagagcctctgtattacatgtaaatctgcagcagaagagtagcggctggc

SEQ ID NO: 137539 - DNA, 201 bp, Homo sapiens
aagattgtgctattacactccagcctgggcaacagagcgagactccatctcaaaaaaaaaaaaagaaaagaaaaatttaaaccccatggttacttttaagrctttcatttttctcttaaatgaaaagatacagtaaggcacaaaagattaatattctatctcccacgcatgcgatttagggattgaccacacctcgctttc

SEQ ID NO: 137540 - DNA, 201 bp, Homo sapiens
attttgtactctgagagcctctgtattacatgtaaatctgcagcagaagagtagcggctggcgtccctgctggtgtcttcctggtgtgagcttcagaatastgggctaatggaaagcttggccagcacctgcctatctggtcccagctagagccccgtgtgggctgggccccattcatcaggactaaggcagcagctgctg

SEQ ID NO: 137541 - DNA, 201 bp, Homo sapiens
gaggggaaggagatgcagggtgggctttgccaaaggccactggaaggagctcaggcttggcggcatctggtttgcttgtctgggcctgctcctttgcatgrtataacaaacggcaagtaaaactgagggattggtttgttggttaactttctactatcccaaattactggattttgagttatttattggttgatgttgatc

SEQ ID NO: 137542 - DNA, 201 bp, Homo sapiens
tctggtcccagctagagccccgtgtgggctgggccccattcatcaggactaaggcagcagctgctgcctagaagggaggagaggagtgggagtgagccggrgagggtgaagcaggcaggaagctgcaggccggcggtggatggggccaggaagcatgcagggggagtgaggaccgtgtttgagagaaacactgcccaagag

SEQ ID NO: 137543 - DNA, 201 bp, Homo sapiens
agatgcagggtgggctttgccaaaggccactggaaggagctcaggcttggcggcatctggtttgcttgtctgggcctgctcctttgcatggtataacaaayggcaagtaaaactgagggattggtttgttggttaactttctactatcccaaattactggattttgagttatttattggttgatgttgatctttgcaggaa

SEQ ID NO: 137544 - DNA, 201 bp, Homo sapiens
gagaggagtgggagtgagccggagagggtgaagcaggcaggaagctgcaggccggcggtggatggggccaggaagcatgcagggggagtgaggaccgtgtwtgagagaaacactgcccaagagagaaagaaagaaaatcacaggacccgaggaaaaagaatgagtggtgtgttcagagatgacacatgacaacaaattgtt

SEQ ID NO: 137545 - DNA, 201 bp, Homo sapiens
cagggtgggctttgccaaaggccactggaaggagctcaggcttggcggcatctggtttgcttgtctgggcctgctcctttgcatggtataacaaacggcargtaaaactgagggattggtttgttggttaactttctactatcccaaattactggattttgagttatttattggttgatgttgatctttgcaggaagaact

SEQ ID NO: 137546 - DNA, 201 bp, Homo sapiens
cactgcccaagagagaaagaaagaaaatcacaggacccgaggaaaaagaatgagtggtgtgttcagagatgacacatgacaacaaattgtttgcttggagrattttcttacgcttgcgtgtttaaactggcctcaaggaggaagaagaaacatgcgttcctggatgactgagttctggaatattctgtcataagactttgc

SEQ ID NO: 137547 - DNA, 201 bp, Homo sapiens
tggattttgagttatttattggttgatgttgatctttgcaggaagaactagtgtcctgtaatctcttcatgtggatttcattttgcagatattcaaaataytcccactggcaggaacatccaagagaagcagtactacccagaagtgagatagaagtgatttgaggactatttatttatattttggattgtgggtgccatt

SEQ ID NO: 137548 - DNA, 201 bp, Homo sapiens
agaaagaaagaaaatcacaggacccgaggaaaaagaatgagtggtgtgttcagagatgacacatgacaacaaattgtttgcttggagaattttcttacgcktgcgtgtttaaactggcctcaaggaggaagaagaaacatgcgttcctggatgactgagttctggaatattctgtcataagactttgcaactggagtagcc

SEQ ID NO: 137549 - DNA, 201 bp, Homo sapiens
gtctgtgtacagttctccagaaccagaccagagatttggaattttctcctttaaatgtctgtggtttgcatttattcacaaacagaaacccacagaggtaygtatttgggtttgcctgtgggtgcctgcccacctacataaagccttgattttccagcatgagtccagaaaatatggtcatggtagtctcttatgtcatta

SEQ ID NO: 137550 - DNA, 201 bp, Homo sapiens; identical to SEQ ID NO: 24394

SEQ ID NO: 137551 - DNA, 201 bp, Homo sapiens
tatgaaagcacagagaaggtttaactatatatttttgtgtctgtgtgtgggggaggttaggatggaatcctggtatggcagggataagacccaaggatgaygaaaattcacctgggaggagctcaggggtgtgtctgcagaccccaaggtccaggcttgtcttttgataaatattattatgtgcctaccacataccttttt

SEQ ID NO: 137552 - DNA, 201 bp, Homo sapiens
agatttggaattttctcctttaaatgtctgtggtttgcatttattcacaaacagaaacccacagaggtatgtatttgggtttgcctgtgggtgcctgcccwcctacataaagccttgattttccagcatgagtccagaaaatatggtcatggtagtctcttatgtcattaataccaattttctccttttgctgagtcaggt

SEQ ID NO: 137553 - DNA, 201 bp, Homo sapiens
attttctcctttaaatgtctgtggtttgcatttattcacaaacagaaacccacagaggtatgtatttgggtttgcctgtgggtgcctgcccacctacataragccttgattttccagcatgagtccagaaaatatggtcatggtagtctcttatgtcattaataccaattttctccttttgctgagtcaggttttagatta

SEQ ID NO: 137554 - DNA, 201 bp, Homo sapiens
tgtgcctaccacatacctttttgggtatacagagttctagatgctctagcacagtagtgtttaaactacatatacttctgaatcacgtagagagcttgttwtacagtttccgattcagtagctctgggatagggcctaggaatttgcttttctgacaagttcccagctgatgctactggtctgaggaccacactttgagaa

SEQ ID NO: 137555 - DNA, 201 bp, Homo sapiens
ttcgaagccttggtgctgcctggggtaggtggggtctatggttcaaggctctgatcttcatttttgcaggcggagaaactccatctatccatccatcaaakatttattgagtttcttcatgaccaggccctgctcacggtgttagggattcagcagaaagaaacacaaacaaaacttcctacgcacacagagagtgtttcc

SEQ ID NO: 137556 - DNA, 201 bp, Homo sapiens
ttatacagtttccgattcagtagctctgggatagggcctaggaatttgcttttctgacaagttcccagctgatgctactggtctgaggaccacactttgasaaccactgctctaaaacaggggtactgaaatgggatatcaatttacaaaaataaataaatagtaaataaataaatagaacaggggtccctaacccctgag

SEQ ID NO: 137557 - DNA, 201 bp, Homo sapiens
agtttccgattcagtagctctgggatagggcctaggaatttgcttttctgacaagttcccagctgatgctactggtctgaggaccacactttgagaaccaytgctctaaaacaggggtactgaaatgggatatcaatttacaaaaataaataaatagtaaataaataaatagaacaggggtccctaacccctgagccatgg

SEQ ID NO: 137558 - DNA, 201 bp, Homo sapiens
ctggtctgaggaccacactttgagaaccactgctctaaaacaggggtactgaaatgggatatcaatttacaaaaataaataaatagtaaataaataaataraacaggggtccctaacccctgagccatggacctgttgtggtctgtggcctgttaggaaccgggctgcacagccggaggtgagcagcaggtgagcaagcaa

SEQ ID NO: 137559 - DNA, 201 bp, Homo sapiens
aagtgggggcccaggctcaccctttcagcaggactggtccacagggaagagccagtaggctggacagcagccaggatgcagtcaggggggcctgacagggkcagtggtgtcagaacaactggccaggtcaggacatgctaacttaggagttgtttagagtgtgactgcacattgcagctctttttatggagaaggggagtg

SEQ ID NO: 137560 - DNA, 201 bp, Homo sapiens
gaaaggcatcattaggcaattgcattgttgtgcaaatgccatagagtgcacttacacaatcctaggtgctacagcctgctgcacacttaggctgtgtggtrtaacctgtttcctctaggctacaaacctgcacagcatctgtactgaatcctgtgagctactgtaacacaatggtaagaatttgtgtatctaaacatagaa

SEQ ID NO: 137561 - DNA, 201 bp, Homo sapiens; identical to SEQ ID NO: 24411

SEQ ID NO: 137562 - DNA, 201 bp, Homo sapiens
gctggtgtgcagtgatgcagtctcacatcactgcagcctctgcttcctgggttcaagcaattcttgtgcctcagccccctgagtagctgggattacaggtstgcaacaccacacctggctaatttttgtatgtttagtagagatggggtttcgccaccttggccaggctggaattcatttattcatccaacaggtatttac

SEQ ID NO: 137563 - DNA, 201 bp, Homo sapiens
ggaggtaaggagggactgttggagtttgtgtatctctatctgaattttgtcattagctgtgttattctcttgaataagtaatatcatgtctgaatttttcwtttctttctttctttcttttttgaggacggagtctcactctgttgcccaggctagagtacagtggtgcaatcctaactcactgtagccttgacctcctgg

SEQ ID NO: 137564 - DNA, 201 bp, Homo sapiens
caccgcctcccgctcctgtcacctggacagatggagaagtgcccggcagtgccgtattagtgtttgacattgagctgctggagctggtggctggccttccygaggggtacatgttcatatggaatggtgaggtgtcacccaacctctttgaagaaattgacaaggatggcaacggagaagtcctcctggaagaggtaacta

SEQ ID NO: 137565 - DNA, 201 bp, Homo sapiens
ggtctcaaactcctgacttcaggtgatccgcccgccttggcctcccaaagtgcagggattacatgcatgagccactgcacctggccctctttaatttcttwcagcaatgtttttctagtttccattgtagtcttttgcctccttggttaggtttaatcctaagtatttcattcttcttgatgctattgtaaatagaattat

SEQ ID NO: 137566 - DNA, 201 bp, Homo sapiens
gtttaaactggcctcaaggaggaagaagaaacatgcgttcctggatgactgagttctggaatattctgtcataagactttgcaactggagtagccccagaraaaggcaggcagtgagagttggctccctccccaaagccatccctgagttggctttgtttggggttcctcccaggtgggaaaacacaaaccctgtcttggt

SEQ ID NO: 137567 - DNA, 201 bp, Homo sapiens
tttgcatttacttgtctttaacttttattcagcatttactacaattcaagcccaccccgccactccgtctctccttctgaggctcttatatcctgcctctyggcttggcccttgctgccagaccattgctcttcccttaggcagatcccacagccttcggtgtctgctatctcccctctgccatggaatctttgcaactat

SEQ ID NO: 137568 - DNA, 201 bp, Homo sapiens
gaagatgacagccagacatttttcagcatgtgccccaatttgtttttgtctgatgtttcctcatgattagatagggatttgcatttctttggtagaaataycctagaagtgatgtgttcttctcatgggaacactctcagtgccaatgggttggtgacctaacatgaggctcttctgtttcattttaggtggaatttaggc

SEQ ID NO: 137569 - DNA, 201 bp, Homo sapiens
agctggctggagggcttgtgagatgaccagcacacttgtgtgccaagcgcttttacacacaccctctcgatggaagctcaccattcctctctgaagaaacygattccctaagaggtgtagggcatgattccagggcatacagtctgcatttagttctcgttactgggtgctcaatgcctgcctgtatgtgctgagtgtatt

SEQ ID NO: 137570 - DNA, 201 bp, Homo sapiens
gacagccagacatttttcagcatgtgccccaatttgtttttgtctgatgtttcctcatgattagatagggatttgcatttctttggtagaaatatcctagragtgatgtgttcttctcatgggaacactctcagtgccaatgggttggtgacctaacatgaggctcttctgtttcattttaggtggaatttaggcaaaact

SEQ ID NO: 137571 - DNA, 201 bp, Homo sapiens
ttaaatgtctgtggtttgcatttattcacaaacagaaacccacagaggtatgtatttgggtttgcctgtgggtgcctgcccacctacataaagccttgatyttccagcatgagtccagaaaatatggtcatggtagtctcttatgtcattaataccaattttctccttttgctgagtcaggttttagattataccatcagc

SEQ ID NO: 137572 - DNA, 201 bp, Homo sapiens
catgtgccccaatttgtttttgtctgatgtttcctcatgattagatagggatttgcatttctttggtagaaatatcctagaagtgatgtgttcttctcatrggaacactctcagtgccaatgggttggtgacctaacatgaggctcttctgtttcattttaggtggaatttaggcaaaacttacaatattgttctgggatc

SEQ ID NO: 137573 - DNA, 201 bp, Homo sapiens
attctagggaaagacattcccggtcaggcatctctggtgtttgatgttgcattattggacctccataaccccaaggacagcatttccattgagaacaaggyagtacctgaaaactgtgagcggttaagtcaaagtggggactttctcaggtatcattacaatggcacgcttctggatggcaccctctttgattccaggtaa

SEQ ID NO: 137574 - DNA, 201 bp, Homo sapiens
ttgtctgatgtttcctcatgattagatagggatttgcatttctttggtagaaatatcctagaagtgatgtgttcttctcatgggaacactctcagtgccartgggttggtgacctaacatgaggctcttctgtttcattttaggtggaatttaggcaaaacttacaatattgttctgggatctgggcaagttgtgttgggg

SEQ ID NO: 137575 - DNA, 201 bp, Homo sapiens
tcaggcatctctggtgtttgatgttgcattattggacctccataaccccaaggacagcatttccattgagaacaaggcagtacctgaaaactgtgagcggwtaagtcaaagtggggactttctcaggtatcattacaatggcacgcttctggatggcaccctctttgattccaggtaaggaaatgattaaagtcttcaact

SEQ ID NO: 137576 - DNA, 201 bp, Homo sapiens
ccgcttactatctgaattttgtgctttttggggtgccatagttagaatcacagcatgcttcttacatgtaatacccaaagagtgtgtggtttctatttttwaaaaattatttagtatttttgtttggagacccctgtgaattcagtgagccacgtcaatgctccattaccctcttgagaaagaaccagtttgagtgaaata

SEQ ID NO: 137577 - DNA, 201 bp, Homo sapiens
accccaaggacagcatttccattgagaacaaggcagtacctgaaaactgtgagcggttaagtcaaagtggggactttctcaggtatcattacaatggcacrcttctggatggcaccctctttgattccaggtaaggaaatgattaaagtcttcaactgccagaacattgtattaaataaagtctgccattggctggaccat

SEQ ID NO: 137578 - DNA, 201 bp, Homo sapiens
ggtgccatagttagaatcacagcatgcttcttacatgtaatacccaaagagtgtgtggtttctatttttaaaaaattatttagtatttttgtttggagacscctgtgaattcagtgagccacgtcaatgctccattaccctcttgagaaagaaccagtttgagtgaaataaatcttggatcttcagacccatgtgtgggag

SEQ ID NO: 137579 - DNA, 201 bp, Homo sapiens
cttgtaaccatttctttcttgggggctgttttagatggttctgcaggaagacaggagagactcaccctcgactcccaccatccccctatactgtgcttagytatccagttataaacctcattatggggcccaagatgaggagtggccagaagtgatgtcaaggaggtacagtgggcagagaatgggcttaatgccaagaga

SEQ ID NO: 137580 - DNA, 201 bp, Homo sapiens
tacaggtgtgcaacaccacacctggctaatttttgtatgtttagtagagatggggtttcgccaccttggccaggctggaattcatttattcatccaacagrtatttactgagtaccaactcttgcaggtgccaaggatgtaacagtgaataaaacagaaatctctgccctcatggagcttacatactagtgagaggacagg

SEQ ID NO: 137581 - DNA, 201 bp, Homo sapiens
tactggctttacctcatcctcacagtggttatgttttactccatcatttcagccacaatgtgtcctccacatggggattcaataactttttttttttcagmgacagggtctcactctgtcacccaggctggagtgcagtggcaccatcatggctaactgcagccttgaactcctgggctcaagcaatctgcccacctcagt

SEQ ID NO: 137582 - DNA, 201 bp, Homo sapiens
cactagctgtatgactttggatagtgtttgactgccttggacttcatttttccctattccagcaactttgtcaagtagatggttagattaaagagataagrtatgtgtcacagtgctttacaaatttcagaggctgatcagctggacggcactggttggatgcattcagctcccttctcgatgctgggtgccatagaggct

SEQ ID NO: 137583 - DNA, 201 bp, Homo sapiens
atttactgagtaccaactcttgcaggtgccaaggatgtaacagtgaataaaacagaaatctctgccctcatggagcttacatactagtgagaggacaggcrtactcttaagttatatggtaaagtagaagttggtgaggactatggagaaaaagcagtaggagtgaggggtgggagggtggggcgacaggcccagaaaggt

SEQ ID NO: 137584 - DNA, 201 bp, Homo sapiens
ttttttttcagcgacagggtctcactctgtcacccaggctggagtgcagtggcaccatcatggctaactgcagccttgaactcctgggctcaagcaatctkcccacctcagtctcccgagtagctgggactacaggcatgcaccacctcgcctggctaattttttattttttagagacagagtctcgctatctttcccatg

SEQ ID NO: 137585 - DNA, 201 bp, Homo sapiens
atggttagattaaagagataagatatgtgtcacagtgctttacaaatttcagaggctgatcagctggacggcactggttggatgcattcagctcccttctsgatgctgggtgccatagaggctaattactggcctcttttgttgttcaaagttttcttttgtttatcaggcatggcctgcagttgtagagatggcttgtgt

SEQ ID NO: 137586 - DNA, 201 bp, Homo sapiens
atggagcttacatactagtgagaggacaggcgtactcttaagttatatggtaaagtagaagttggtgaggactatggagaaaaagcagtaggagtgagggktgggagggtggggcgacaggcccagaaaggtgagaggacagtggccacccagctaatataactgaccttcagattctggactggggagctctcatgcctc

SEQ ID NO: 137587 - DNA, 201 bp, Homo sapiens
ttttttattttttagagacagagtctcgctatctttcccatgctggtcttaactcctgggctcaagcgatgctcctgcttaggcctcccaaagcactgggrttatcagtgtgagccactgtgcctggccccaggaaccccttcttttcagtgttttcacactgctgatatctggacatggaggagataggaagagctaact

SEQ ID NO: 137588 - DNA, 201 bp, Homo sapiens
ctctgaggtgatagacttctagttaatgtagtcatccaaaaccattacagaagaatttgtatatggcattatttcatttgaataattcattcttgttcctwggatctcttttaaatttgtcatttaaattttttggaaaagagtaatagttacatagctcaaaaccaaaacaaagtatgcattaagatatgttgtaaatta

SEQ ID NO: 137589 - DNA, 201 bp, Homo sapiens
aggacaggcgtactcttaagttatatggtaaagtagaagttggtgaggactatggagaaaaagcagtaggagtgaggggtgggagggtggggcgacaggcycagaaaggtgagaggacagtggccacccagctaatataactgaccttcagattctggactggggagctctcatgcctcacacaaagcagccagcatgcag

SEQ ID NO: 137590 - DNA, 201 bp, Homo sapiens
tgttcagaggagtaaggggattgaggtgctcagtggacggactgatagtgtaagcagaaattctagagatcagcctcattggggcttcattttacacaggsattcatccagcttctaacattccaggtactgggatacagcagaggataaagctgacaaaagtccctgccctcaagtcagggttggggtgaacacaagccc

SEQ ID NO: 137591 - DNA, 201 bp, Homo sapiens
cagctactcaggaggctgagtcaggagaatgacttgaacccaggaggcggaggttgcagtgagctgagatcacaccactgcactccagcctgggcaacagwgcgagactctgtctcaaaaaaaaaaaaaagaaaagatatgttgtatacctgttcctgtctgcctaacctccctgtctcccctaccccttagagttaacca

SEQ ID NO: 137592 - DNA, 201 bp, Homo sapiens
acccagctaatataactgaccttcagattctggactggggagctctcatgcctcacacaaagcagccagcatgcagtgagtgccttgtgagtattatgcayagatacctctacccgttccagggagggaaggatttcttcttgctgaagccatatgaaaggctttgaggaggagctgatgcttgagttgggccttgagcat

SEQ ID NO: 137593 - DNA, 201 bp, Homo sapiens
gctactggtagagatggctgtttgagggaaatagtcttaggcaaagggtccagaaagcccagagtcccctttgggagtgaatgtgtggagagggaggtgtkaggcagaaaagccaaactctgcctccctgctttcaagtctgcagtaagatcagtctcagtggtgaaactcagccagcagagggggtgagtctcagctggg

SEQ ID NO: 137594 - DNA, 201 bp, Homo sapiens
ctgacctcaggtgatccacccaacgcagcctcccaaagtgctgggattatagtcatgagccactgggcccagcctaatgtgtggattttttaaaatgcaartataagcaaacacaaatgttattttcttctccttaaattatacggatttcagaatatagtattactagggaacaaggtggtgttctccttgatttttgtt

SEQ ID NO: 137595 - DNA, 201 bp, Homo sapiens
gattctggactggggagctctcatgcctcacacaaagcagccagcatgcagtgagtgccttgtgagtattatgcacagatacctctacccgttccagggarggaaggatttcttcttgctgaagccatatgaaaggctttgaggaggagctgatgcttgagttgggccttgagcatggatgggatttcattccttgaagtg

SEQ ID NO: 137596 - DNA, 201 bp, Homo sapiens
agggaaggatttcttcttgctgaagccatatgaaaggctttgaggaggagctgatgcttgagttgggccttgagcatggatgggatttcattccttgaagyggggagtgtgtttaagagagtggatggggtggaccagagtctgggcctgagtagtgcatgctcaaggaacagtgagaggctccaatatttgggtcaggag

SEQ ID NO: 137597 - DNA, 201 bp, Homo sapiens
agtgtgtttaagagagtggatggggtggaccagagtctgggcctgagtagtgcatgctcaaggaacagtgagaggctccaatatttgggtcaggaggcagrggacctggcactggaagggtgtgggagaaccagtccttgggaggcctgggtggctgagctaggtgttgtggactttggtatttttttttttcatcccatg

SEQ ID NO: 137598 - DNA, 201 bp, Homo sapiens
cccatggattcaagttgccctgaatatatgcttctgttcagaatcttgtgaagggaaggtttttgttcagaggagtaaggggattgaggtgctcagtggayggactgatagtgtaagcagaaattctagagatcagcctcattggggcttcattttacacaggcattcatccagcttctaacattccaggtactgggatac

SEQ ID NO: 137599 - DNA, 201 bp, Homo sapiens
acacttcttaccacccccaccctgtagcatcttagcccggggcctgtcatccctttcccgggtcacatcacagcagtggtgttcatgaagctcctcctgcsctcacagtggccgttctcacacagaagctgggtcagacctgcagaggcccctgtctacagggcctcacagtggcctgtgaagaccctgcactttctgctc

SEQ ID NO: 137600 - DNA, 201 bp, Homo sapiens
tgtactgatgtagccctgaggtagttcatgaaaatgctgtgcactcattccatggaataaatgttggaaagctgatcttttctgatataaaatgttgaatkatattatctggttttctgatgttttattggaaggctgaagacctatgagaatgcaccatgcagtcagaatccccttgatgaaaacagcaggacttcactg

SEQ ID NO: 137601 - DNA, 201 bp, Homo sapiens
atgtttcaaaatcaggaagtgtgaagcctccagttttgttcttctttctcaggattgttttggctctttagagtccttcaagattccaaggccaggcaccrtggctcacacctgtaatcccagcactttgggaggccgaggcagtctgatcacctgaggtcaggagttcaagaccagcctggccaacatggtgaagccctg

SEQ ID NO: 137602 - DNA, 201 bp, Homo sapiens
gcatgtctcattagctactggtagagatggctgtttgagggaaatagtcttaggcaaagggtccagaaagcccagagtcccctttgggagtgaatgtgtgsagagggaggtgttaggcagaaaagccaaactctgcctccctgctttcaagtctgcagtaagatcagtctcagtggtgaaactcagccagcagagggggtg

SEQ ID NO: 137603 - DNA, 201 bp, Homo sapiens
tgataaatattattatgtgcctaccacatacctttttgggtatacagagttctagatgctctagcacagtagtgtttaaactacatatacttctgaatcaygtagagagcttgttatacagtttccgattcagtagctctgggatagggcctaggaatttgcttttctgacaagttcccagctgatgctactggtctgagg

SEQ ID NO: 137604 - DNA, 201 bp, Homo sapiens
cctgaccttgccagggtggccaatgtcttccgtatcgcggaatccagtggtcagctctcacgctcctcttaacttcaacacagctgattcccctacaggaygcatctttctctggcttccaggacaccacacttcatggtgttccttctacctccctggtacgtccctctcaggcctcttgtccctgatcgcttcatgttg

SEQ ID NO: 137605 - DNA, 201 bp, Homo sapiens; identical to SEQ ID NO: 24417

SEQ ID NO: 137606 - DNA, 201 bp, Homo sapiens
ttcttcctcagcctcccagtggctgggactataggcacctgggttgttgctggtgtgtgtgtgtgtgtgtaggcacctgggttgttgctggggtgtgtggkgtgtgtgtgtatgtgtgtgttgctggggtgtgtgtgtgtgtgtgtgtgtgtgtgtgtgttttatgaggctgtgattccaggaggcttccagcacgtggcg

SEQ ID NO: 137607 - DNA, 201 bp, Homo sapiens
gctgcccacaagcccagggtgagtgcagctcccagggctctgaggccagcccagtccctcctccctggagaagcttcaggagaccaaggcgtcctgggcaygtgcccaggaagcaccccaggtcctggctcactccctaggtgaccccgggccagcctgggcctcctgcatccgcagtgaggtggggtccagcctgtgatg

SEQ ID NO: 137608 - DNA, 201 bp, Homo sapiens
agtaagcccctccccttcacccctgggacccccaagcacccctgtcctgctgccccagtagcctccacgctcccctccctgggatggctgtgagctcgggygcctgccgggccccagtctgcaccgctccgactctagctttggcaggaagccatgtcgcttcaaccctggctttatccacagcctgctctgtggcctcgg

SEQ ID NO: 137609 - DNA, 201 bp, Homo sapiens
tcacccagtggcgggtatgtccctgtcccaatgtgcagggagtcactggctctcgtatctctagctgcctggaggtccctggccatgaagggctgaggggytgtgggagtggggtgagtcagggtgggcagccctgttggctggagaggcccttccccaactctggaagcataagctccccctgactatgcatcggcaggg

SEQ ID NO: 137610 - DNA, 201 bp, Homo sapiens
gtcctggcgcggctgcaatggtcgtccaccgagttggcctacttctcgctcagcgcctgccctggtgagcctgcccccctgcccgccccatcccgcgggcytccgggagctctgcccccactcagactccacctctgtcccggcagataaggggattgtgctctgtggggatgaggagggcaacgtgtggctctacgacgt

SEQ ID NO: 137611 - DNA, 201 bp, Homo sapiens; identical to SEQ ID NO: 24418

SEQ ID NO: 137612 - DNA, 201 bp, Homo sapiens
gccagccggacgcccctgaaacaggtcatctgcctgcatcaagcctgacaatccatttgcttgcgaagtcaccgctgctcaagtccacatccaggtctctyccgctatactttattaggaatataaaacctaatctatgtacaggacacgtcggtgtcagggtgaggggtggccacaaggcgggccatggctgggaccggc

SEQ ID NO: 137613 - DNA, 201 bp, Homo sapiens
tgttgaaaggagcagcaggggccttggcggcagaggtggtggcggcggtagttatgggcttctctttctcaccagcagcccctgggccgccgcctccctcyctgcccgtatgtctggtccctgtgtctaagatgcttcttctcttaccctctgcccaactggctcaggcctggcccatggttagctgctgggccactctcc

SEQ ID NO: 137614 - DNA, 201 bp, Homo sapiens
gcaggggagccagctggcctgctccaccatgtggccacagctgggtggacccagcccagaacaaggtggcaagggtgcctgggcggggcacgccgggcttygtcagccacggtaagctttgcatttctatttatttactttttatttgagatagagtctccctcttgtcacccaggctggagtacagtggctcgatctcgg

SEQ ID NO: 137615 - DNA, 201 bp, Homo sapiens
atgacctccccttcacctggggcttcagcaccatgctgtgcccacgtgatccagcccactcctgccactcatcagcagtgtgatggtcctctgtgctggcrtaatgtcctcatctgtaaagaggggccgatggctagcggagggcaggtgaggtggtgtctgggcaggcaggctttggaagtgccacgttgaggctttctg

SEQ ID NO: 137616 - DNA, 201 bp, Homo sapiens
gcagggacagctcactgatgaggtcggtgatggcgttggtaaaggcttcctgggggctgtagtccggcgtggtctgcactcggatgatgatcttgtgctcyaaggggtgggggactttgtagccagcaaatagcacttgcgggtcttttaggagttgtctgaggtccagggacagacagtgtgagggtctagcctcatgcc

SEQ ID NO: 137617 - DNA, 201 bp, Homo sapiens
ggcaaggggtccctgtcctcttggggcccccagcctactggggaagacagatgctcagcaaaggtggccaatcaaaatcccacagtgtgatgccagctacraaggagacggaaaaagagtaacgggcagagggacactagcgtgggggtctcaggggactctgctgaggtgaccagcggcagatggatattctggggctca

SEQ ID NO: 137618 - DNA, 201 bp, Homo sapiens
gctggagaggcccttccccaactctggaagcataagctccccctgactatgcatcggcagggctgggggcacctgggactctgcccagcttcctgatggcytggccccacccaggtgcggatgatctctgaggagctggtggccgccagtaggacccaggtgcaaaaggctaacagcccagagaagcccccagaagctgga

SEQ ID NO: 137619 - DNA, 201 bp, Homo sapiens
gaatctgtgcaccctaatctctttaggtctttgctgatgccaccccggtgtcccaggggttggcccgtgcctatcaccagcgtgagggtcacctaggaggkcagccaacttccctacagagctgagcgttcagttgagctcctcagtgtcccaacctcccttctcctcactcttgtcctcagggcacctttccagacccag

SEQ ID NO: 137620 - DNA, 201 bp, Homo sapiens; identical to SEQ ID NO: 24421

SEQ ID NO: 137621 - DNA, 201 bp, Homo sapiens
gctctcccttctcccccacagcctccaaggggagcggcctgggcaccatctgcctgtggagctggaggcagacgtgggggggccggggcagccagtccacrgtggcagtggtggtcctggcgcggctgcaatggtcgtccaccgagttggcctacttctcgctcagcgcctgccctggtgagcctgcccccctgcccgccc

SEQ ID NO: 137622 - DNA, 201 bp, Homo sapiens
ctttggtggcatcttctgtgcagccttcacacagggcagggtccccagcaggtgcgctgcagatgcctgggtgagtgggcagctctctatctgcaaggaawggccaactagcatctcgtgctgccccacagggtgtgtgaagtggaattcgtcttctctgagggctccgaggcatctggacggagagtggatgggctggca

SEQ ID NO: 137623 - DNA, 201 bp, Homo sapiens
gccagcggctggccacgcacactgggccttgtgccatggggctgcgtcgcgtactgtgccctgggcacgcaggggtctcctctagagcggctcagagtggygtgagcaccacaagggggacccgtgcataggtggcaacactgagctcaagagcaggggagcagcagggccccaggagagcttgggtgccccactggctgg

SEQ ID NO: 137624 - DNA, 201 bp, Homo sapiens
agccagcaaatagcacttgcgggtcttttaggagttgtctgaggtccagggacagacagtgtgagggtctagcctcatgcccaagctgggtagcagccagmtcagagcagaagaacagactttctagccaaaaatcccccccaacttttttcccaaaaagtcttcaaggaaagtaacacttttaggaagatacctcatgtg

SEQ ID NO: 137625 - DNA, 201 bp, Homo sapiens
gccttcgagccggcctgggaggagggtacatggtggcgggcaggcggggcaagggccgctggaaatagggccgcctggatgggtgggggatcaggagacaragcttaaaaggcgccatcaaggctgggaggaggaggctgcagggaggacctagatgggaaatgtctctgctcatccgacctctcaaaaccgggcactcag

SEQ ID NO: 137626 - DNA, 201 bp, Homo sapiens
agattggtgtagggtgcaaagcctgcccgccccctaagccttctgcccccaactccagcctgtcaggattggagctgctttccgagcacctggaccccaarctcctgtgccgcctgacgcagctgcaggagcttgacctgtctaacaaccacctggagacgctgccggacaacctgggcctgtcccacctgcgtgtcctcc

SEQ ID NO: 137627 - DNA, 201 bp, Homo sapiens
cctgggccatggcctggaaacacctgctctacttggctgccaggaggcccctgttcatctcacactcggtcccagaggcactggctcgcttcagagccttwtccaaccccctggcctagccccgtcctggaagagccacccctcgtgcctctgggtcactactgtgactcgggacactcaggtgctggctcccccttccag

SEQ ID NO: 137628 - DNA, 201 bp, Homo sapiens
ggagtcagaggccccagaggcttcctggtgagcagacgactcagacgttgaaatcccccaagctgtggctctttcccctctaaactgttctagattcccakgcgccctgccaggaacaggtgtgggccaccctggggtgagctgcctcccagagacctggaaggaccaggccttgccaatcaccaacaagggacgtagaag

SEQ ID NO: 137629 - DNA, 201 bp, Homo sapiens
gagcagacgactcagacgttgaaatcccccaagctgtggctctttcccctctaaactgttctagattcccaggcgccctgccaggaacaggtgtgggccaccctggggtgagctgcctcccagagacctggaaggaccaggccttgccaatcaccaacaagggacgtagaagagcacccccaaaggacagtaggtccccgc

SEQ ID NO: 137630 - DNA, 201 bp, Homo sapiens
tgactatgcatcggcagggctgggggcacctgggactctgcccagcttcctgatggcctggccccacccaggtgcggatgatctctgaggagctggtggcsgccagtaggacccaggtgcaaaaggctaacagcccagagaagcccccagaagctggagctgcccacaagcccagggtgagtgcagctcccagggctctga

SEQ ID NO: 137631 - DNA, 201 bp, Homo sapiens
agacgactcagacgttgaaatcccccaagctgtggctctttcccctctaaactgttctagattcccaggcgccctgccaggaacaggtgtgggccaccctggggtgagctgcctcccagagacctggaaggaccaggccttgccaatcaccaacaagggacgtagaagagcacccccaaaggacagtaggtccccgcccgg

SEQ ID NO: 137632 - DNA, 201 bp, Homo sapiens
tgagtgacaccccgtctctaaaaataaagtaacggggggatgggcggggcggctacacttgtacgagaaatgtcaggtgaaaaagccttctgaggtacccrgggcagattggtgtagggtgcaaagcctgcccgccccctaagccttctgcccccaactccagcctgtcaggattggagctgctttccgagcacctggacc

SEQ ID NO: 137633 - DNA, 201 bp, Homo sapiens
caaaagaggaggtgaggctgggcagggggcgccttggaagccaggccactgcagagggtggctgttggcccagatgggctcacagcagcctgggcacaccsgggtaaccataagggttgtttttagaggcctcttcgcagagctggcttgtcccacctttctgccaggctctggaggaaaggactctgaccctgctctcac

SEQ ID NO: 137634 - DNA, 201 bp, Homo sapiens
tggggtgagctgcctcccagagacctggaaggaccaggccttgccaatcaccaacaagggacgtagaagagcacccccaaaggacagtaggtccccgcccsgatctggcccacagcacccgagggaccctgcagcactacagaagtcccatggggcagacgggagccacaggcccagactccacagcccctcagtccacat

SEQ ID NO: 137635 - DNA, 201 bp, Homo sapiens
caggtgcggatgatctctgaggagctggtggccgccagtaggacccaggtgcaaaaggctaacagcccagagaagcccccagaagctggagctgcccacargcccagggtgagtgcagctcccagggctctgaggccagcccagtccctcctccctggagaagcttcaggagaccaaggcgtcctgggcatgtgcccagga

SEQ ID NO: 137636 - DNA, 201 bp, Homo sapiens
tggccggctgcgagggcggctgctgctgctgggacgtgcggctggaccagccccaaaagaggaggtgaggctgggcagggggcgccttggaagccaggccwctgcagagggtggctgttggcccagatgggctcacagcagcctgggcacacccgggtaaccataagggttgtttttagaggcctcttcgcagagctggct

SEQ ID NO: 137637 - DNA, 201 bp, Homo sapiens
gcatcaggttagatggaggaaacagggattgggggcccaggagtgttcctgtctcctagcctcggcccgccctccccgcctcggaggggctggccttgggwccgtgggctcagcctgggatgcagccagcaggagggagcagggtcatctcagggccacttctcccctaccccaccccctcttcagcggcctcctatgaca

SEQ ID NO: 137638 - DNA, 201 bp, Homo sapiens
tggcttctcttttttttctgtccaccagggagtaactattcccagtcagaggcgctatgtgtattattatagctacctgttaaagaatcatctggattatwgaccagtggcactgttgtttcacaagatgatgtttgaaactattccaatgttcagtggcggaacttgcagtaagtgcttgaaattctcatccttccatgt

SEQ ID NO: 137639 - DNA, 201 bp, Homo sapiens; identical to SEQ ID NO: 24432

SEQ ID NO: 137640 - DNA, 201 bp, Homo sapiens
cagcatatattttggtagtggaaaaaaaggtaaaaaattttttgtaataaaatagaaaaattttgtaatgtggaggcgcagaacactagatttaagccagkgggtcttaaattgtgttacattccttttaaagtctgatggaaggtataaatgttctcccctcaaaaaatgtgcatagtgtacataaaattttgcagtttt

SEQ ID NO: 137641 - DNA, 201 bp, Homo sapiens
gcagcatatattttggtagtggaaaaaaaggtaaaaaattttttgtaataaaatagaaaaattttgtaatgtggaggcgcagaacactagatttaagccakggggtcttaaattgtgttacattccttttaaagtctgatggaaggtataaatgttctcccctcaaaaaatgtgcatagtgtacataaaattttgcagttt

SEQ ID NO: 137642 - DNA, 201 bp, Homo sapiens
atccaactctcagcatttccgaatcagctctctcacggtgacaggtcagcccaatcggggctgtaaacagacttgacaggtttgttctgggctgacggccrttgactaggttctcagaccagataagtcacttggctgagtccacagtaggtggggcgcgctcaccagctcaggggtagtgactggacgtttgttgcaaca

SEQ ID NO: 137643 - DNA, 201 bp, Homo sapiens
aggtggaaggagggcatttatcagagattttaatttaagaagaaagtcttcatccttatcctaccaacccccattccctgagcatatttatcattactagkcccagcatatttgctcccatatttcctatgcttacctgtgaagattttcataactttttccttgctttttactgtcactgttggttctgtgatttatgac

SEQ ID NO: 137644 - DNA, 201 bp, Homo sapiens
ttcctgacaaagtgtatggtttgagatttcgctgattttaaaatgcccttattatatagtcacacttgatttatagtctgtcttggtatagaattctaggstgagaagagttttccctcaaaatcagaaggttttgcccaattgttttttagctgctagtattgctgttaaaaaggataatgtcattttgattctagattc

SEQ ID NO: 137645 - DNA, 201 bp, Homo sapiens
tacgctagcagtgagcaaggctctgtgggcgtaggacctgctgagccaggcacgggatataatctcctgttgtgccatttgctaagaccgttggaaaagcrcagtatttgggtggcagtgtcccaattttcccggtatagtgtgtcacagcttcccttggcttggaaagggacatcccccgaccccttgtgcttcctgggt

SEQ ID NO: 137646 - DNA, 201 bp, Homo sapiens
agatacgttccatcaatacctaatttattgagagtttttagcatgaagggctgttgaattttgtcaaaggccttttctgcatctattgagataatcatgtrgttttttgtctttggttctctttatgtgatggattatgtttattgatttgcgtatgttgaaccagccttgcatcacagggatgaagccaacttgatcttg

SEQ ID NO: 137647 - DNA, 201 bp, Homo sapiens
atctagcccatatttgagcccataaccgtgtggtaatttgaagtgtaattcacagtagagcttctgttaaagcactaatagcatcttccatggaggtatamttcagagtgaatataattttgtttatcctgtgtctctagagctattgactgaaaaagctgttagggcattctctaactgtacatcacctaagttatttaa

SEQ ID NO: 137648 - DNA, 201 bp, Homo sapiens
gcccataaccgtgtggtaatttgaagtgtaattcacagtagagcttctgttaaagcactaatagcatcttccatggaggtatacttcagagtgaatataawtttgtttatcctgtgtctctagagctattgactgaaaaagctgttagggcattctctaactgtacatcacctaagttatttaaaattgctgaattaggtg

SEQ ID NO: 137649 - DNA, 201 bp, Homo sapiens
tttgaagtgtaattcacagtagagcttctgttaaagcactaatagcatcttccatggaggtatacttcagagtgaatataattttgtttatcctgtgtctytagagctattgactgaaaaagctgttagggcattctctaactgtacatcacctaagttatttaaaattgctgaattaggtggcttgtcttgtctaggaca

SEQ ID NO: 137650 - DNA, 201 bp, Homo sapiens
ttggcagtgcgggctcttttttggctccatatgaactttaaagtagttttttccaattctgtgaagaaatttattggtagcttgatggggatggcattgtwtctataaattaccttgggcagtgtggccattttcacgatattgattcttcctacccatgagcatggaatgttcttccatttgtttgtgtcatcttttatt

SEQ ID NO: 137651 - DNA, 201 bp, Homo sapiens
atgtgccgtgttggtttgctgcacccattaactcgtcatttacattaggtatttctcctaatgttatccctctcccaaccccccaccccaggacaggcccyggtgtgtgatgttccccgccctgtgtccaagtgttctcgttgttcagttgccacctgtgagtgagaacatgcggtgtttggttttctgtccttgcgatag

SEQ ID NO: 137652 - DNA, 201 bp, Homo sapiens
gccagtggttcttttagccgatggatcttgtcacctcttatgatactattaatagcatgtcaacatgaagaattatctgctgaatataatagctatgctgkccttgtttccttttgtctcattcttttttgattgggggataattggccaataaagctttgatagcctctattgcccaggcccctcctcttcttttatgag

SEQ ID NO: 137653 - DNA, 201 bp, Homo sapiens
gactgtttaagaagctgaaaatagagaaatgaatttatcttctcatagttaggcagggcacagtagaaggatgcttaacattgcaagctgatgggaacagyaggttgatatagcttgtgataacacttctaaagaaaaagcaatgagccatagaaaaaagaaaaagatacattttgaattaaggaagatggtgaatctggg

SEQ ID NO: 137654 - DNA, 201 bp, Homo sapiens
accttaagaattcgtggcgtattttatgaaaggaattcatgtctgatgtgcaaatagtcttaacatatttgctaatttcagagcaaaaatatatgtgtatyaataaatcaactgtaaattgtcagtaagaaccttaatggctttaaaagttaaaatttcaggtcaagcattgtggtgtgctcctgtagtcccagctacttg

SEQ ID NO: 137655 - DNA, 201 bp, Homo sapiens
aaggcccatgtaaatattatttttaaaatatacagtcttaagaattcatggcatattttatgaaaggaggaattcatgtctgatgtgcaaatagtcttaasatattttctaatttcagagcaaaaatatatatgtatgaataaattaactgtaaattgtcagtaggaaccttaagaattcgtggcgtattttatgaaagga

SEQ ID NO: 137656 - DNA, 201 bp, Homo sapiens
gtcatttagcttgttttatcctatgtatttcctgcaaattaaaatttgtatctgaatccttggtggatttgagttgaagatccttaaccatcatagatgaygctgtgtcctttatattgcatgtcagaagttacatgatctttacttgattcatgatgaggagatggccactgaaattggacagtgacagtcttttctgcc

SEQ ID NO: 137657 - DNA, 201 bp, Homo sapiens; identical to SEQ ID NO: 24447

SEQ ID NO: 137658 - DNA, 201 bp, Homo sapiens; identical to SEQ ID NO: 24434

SEQ ID NO: 137659 - DNA, 201 bp, Homo sapiens; identical to SEQ ID NO: 24435

SEQ ID NO: 137660 - DNA, 201 bp, Homo sapiens
agtttttttttcttattctgaggttatctttttaccacagttgcacaatatccttttgaagaccataacccaccacagctagaacttatcaaacccttttrtgaagatcttgaccaatggctaagtgaagatgacaatcatgttgcagcaattcactgtaaagctggaaagggacgaactggtgtaatgatatgtgcatat

SEQ ID NO: 137661 - DNA, 201 bp, Homo sapiens
tcagaaaaagtagaaaatggaagtctatgtgatcaagaaatcgatagcatttgcagtatagagcgtgcagataatgacaaggaatatctagtacttacttwaacaaaaaatgatcttgacaaagcaaataaagacaaagccaaccgatacttttctccaaattttaaggtcagttaaattaaacattttgtgggggttgtt

SEQ ID NO: 137662 - DNA, 201 bp, Homo sapiens
ttctgtgatgtataaaccgtgagtttctgtttttctcatatacctgaatactgtccatgtggaagttaccttttatctttaccagtattaacacataaatrgttatacataaatacattgaccaccttttattactccagctatagtggggaaaactttcttttcataactagctaatgttttaaaaagtattcttttagt

SEQ ID NO: 137663 - DNA, 201 bp, Homo sapiens
cttaacttttttcttttgagtgtctttatagactcaaggacttttatttaattcagggtgttagtaccatttaaatgttttctttgatgctcagattatcmcagctagtcatttggacctttataccacctcctatgtccatttgatataggccattaatctctataagccttcctccttctcttggaatgaaaaggtatc

SEQ ID NO: 137664 - DNA, 201 bp, Homo sapiens
ctggatcttgttatttattttttggaacatagtcatatatatccaaggatatatattgtagaagtccacagaaccatactaatattggacttctgcttagytaggtcttatctatctgaaacatgatattcatattgcagagaagattattttctttagtgattgaggaaatctttactacttatacatttttaatataat

SEQ ID NO: 137665 - DNA, 201 bp, Homo sapiens
cctaattcttatttcccttcatctgtactttaacacatgcaaaattgaaggttagattaaatatttatgatttatttgtttatccttgactacataaattyccattttattgattttccctgccttatttaagaatatgctatgattaaaacacaaaaaattttagtataacccatatatatatagaattcacctttttgt

SEQ ID NO: 137666 - DNA, 201 bp, Homo sapiens
tatacaagattactttgccaggtactgttaaaagatgcaatgacatttaagacgtaacatccttaaggatcttattttctgggggataaaaaactttaagrtaaattagaataaaagatttaaatggcattttaaggtaccaggtaccagataagatgtcacaaggctgtatatcattaattgccaaatgatttatacagg

SEQ ID NO: 137667 - DNA, 201 bp, Homo sapiens
aatgatttatacaggccagatttctttgttggtcaatagaggtttaaagtgatgaacttctgttgtgtttttttattaagaaggtattatcttattagtargaagtgattttttttaagaacaagcattttataacatcaaaagaaatcagtagtactctttcctaccccctcatatttattctgaaagtattcaagcatt

SEQ ID NO: 137668 - DNA, 201 bp, Homo sapiens
caaacccttttgtgaagatcttgaccaatggctaagtgaagatgacaatcatgttgcagcaattcactgtaaagctggaaagggacgaactggtgtaatgrtatgtgcatatttattacatcggggcaaatttttaaaggcacaagaggccctagatttctatggggaagtaaggaccagagacaaaaaggtaagttattt

SEQ ID NO: 137669 - DNA, 201 bp, Homo sapiens
cctcagtttgtggtctgccagctaaaggtgaagatatattcctccaattcaggacccacacgacgggaagacaagttcatgtactttgagttccctcagcygttacctgtgtgtggtgatatcaaagtagagttcttccacaaacagaacaagatgctaaaaaaggtttgtactttactttcattgggagaaatatccaaa

SEQ ID NO: 137670 - DNA, 201 bp, Homo sapiens
gaggtcaggagatcgagaccatcctggctaacacggtgaaaccccgtctctactaaaaatacaaaaattagccgggcatggtggtgcgcgcctgtagtccyagctacacgggaggctgaggcaggagaatggcgtgaacccgggaggcagagcttgcagtgagccgagatcgcaccactgcactccagcctgggcgacaga

SEQ ID NO: 137671 - DNA, 201 bp, Homo sapiens
tttaggagaaagtggagacagactgacctgagtaactaaggtcttggaacagcttacaggtcagaaccaggtgttttccaaagctagatatactgttagcscctttggcaacagaagaaatgaaaagactgttgtctgctgcacagttcgaggggccaaggcagacgaaatcctggagaatgatctaaaggtgcaggagtg

SEQ ID NO: 137672 - DNA, 201 bp, Homo sapiens
aagatgaagcatctgtctgaaatggccagcagctacagctgtacctatctactgtacatatcaagcaagtcactttattcttataatgtctatgacttctytctttgaaagcgcttccatcatcactgttggcacttcatatgggtctcatggtgttaaggtttacggcattgcactagacacaatgaaaactacacaaga

SEQ ID NO: 137673 - DNA, 201 bp, Homo sapiens; identical to SEQ ID NO: 24430

SEQ ID NO: 137674 - DNA, 201 bp, Homo sapiens
ctattgaaagaatagggtttttttttttttttttttttttttttaaatgtgcagtgttgaatcatttcttcatagtgctcccccgagttgggactagggcytcaatttcacttcttaaaaaaaatcatcatatatttgatatgcccagactgcatacgattttaagcggagtacaactactattgtaaagctaatgtgaag

SEQ ID NO: 137675 - DNA, 201 bp, Homo sapiens
tttcctctcgttgggcagtatggtgtcaaaagcttgggctttggagcttcgtatataatctgggttcaaattataacttactagttactaacttgggcaarttacccagtctttttgactctcaatttctttgtctatgaaatgtaatactatttaggattgttaggattaaatgagaatatatttggcatactgtctggt

SEQ ID NO: 137676 - DNA, 201 bp, Homo sapiens
ttttgtctatatatgtctatatggatatatacgtattctttttatccaaatggtattacattgtacattctgttttgaaacctgccttttttagtcatttrcatctacttttccatctcagtaacttttcatcttgtgtaatgcccggatcacattaaaatgtttccaattagctcaaaaatgtcctttatggctggtttg

SEQ ID NO: 137677 - DNA, 201 bp, Homo sapiens
ttgccatattgcccagcctagcctcaaactcctgggctgaaggaatccacccatctcagcctcccaaagtgctaggattacagacgtgaccaacaatatcyggccttaacttttttcttttgagtgtctttatagactcaaggacttttatttaattcagggtgttagtaccatttaaatgttttctttgatgctcagatt

SEQ ID NO: 137678 - DNA, 201 bp, Homo sapiens
cccttttgtgaagatcttgaccaatggctaagtgaagatgacaatcatgttgcagcaattcactgtaaagctggaaagggacgaactggtgtaatgatatrtgcatatttattacatcggggcaaatttttaaaggcacaagaggccctagatttctatggggaagtaaggaccagagacaaaaaggtaagttattttttg

SEQ ID NO: 137679 - DNA, 201 bp, Homo sapiens
tatttttctctggaatccagtgtttcttttaaatacctgttaagtttgtatgcaacatttctaaagttacctacttgttaattaaaaattcaagagttttkttttcttattctgaggttatctttttaccacagttgcacaatatccttttgaagaccataacccaccacagctagaacttatcaaacccttttgtgaaga

SEQ ID NO: 137680 - DNA, 201 bp, Homo sapiens
catcaggtgagggtaactaccatggtttgtttgctatactgtgttagggttattttcgttttttttttcttttataaactatagttgtgaatatgtttatrtagtttacttttggtttattagaatatattgctagagtgggattacaggattaaagagtgtacagtattttagttttttttttttttttacaagttgcag

SEQ ID NO: 137681 - DNA, 201 bp, Homo sapiens
actttccactcattggaaatcctatattgcaggtgttaattcaattttagtgagtgtgcatcatggctcagagagataggactagaatgaggaggtcacaytggagactctgaaacagatacatgtgagcctcccaactttttaatatttgttaatctagaagtgttgaattttgggtgctgacaaggcagcaggtagata

SEQ ID NO: 137682 - DNA, 201 bp, Homo sapiens
atatggcagcgaattcattatcatcagattgtggtgtctgtatgttgggggtgggagagaattgtggtggcaataggcaacaagataaaagaaagtaaaasgtgttatggaaacttaatgggtccagcttacaaatgatctatgcatttaggggtctttctcttttcctgataaacctctcctacaaagagccttgttgcg

SEQ ID NO: 137683 - DNA, 201 bp, Homo sapiens
aatcaggattatcagattctgaattaatggagtttaaatcaaaaagattacaaggcagtttttcagttttattctggttaattttatcacagctttggaawcctactttgtttatttgcttcttgaagttagatttcccagtgaaatttcagtatcacataaagtcttatgaaatggctcattgcactttgaactttgagt

SEQ ID NO: 137684 - DNA, 201 bp, Homo sapiens
ctgtctttggaatatgttttgtgatgatgaaataaatactataaatagtattattccttttgcattgagagtcctgacgaaatgtccatgtgacagttcaytttgggtttagctctacctctaatatgtgacctatgctaccagtccgtatagcgtaaattcccagaatatatcctcctgaataaaatgggggaaaataat

SEQ ID NO: 137685 - DNA, 201 bp, Homo sapiens; identical to SEQ ID NO: 24436

SEQ ID NO: 137686 - DNA, 201 bp, Homo sapiens
ttgcaggtgttaattcaattttagtgagtgtgcatcatggctcagagagataggactagaatgaggaggtcacattggagactctgaaacagatacatgtsagcctcccaactttttaatatttgttaatctagaagtgttgaattttgggtgctgacaaggcagcaggtagataagaattgcaaagttaagaaaatagac

SEQ ID NO: 137687 - DNA, 201 bp, Homo sapiens
gctcttagggcagggatcaattccttaatatcttaggaagactaggtattgacagtaatggtgacaaagcaatgaaaaggaaaggaagaagtgataagacrtggcagcaagctgaagtatgatgagtaaagaataggaatcaaagtatgtggagtgttagagaaaacctggatttagatccagattctagtcctatctctg

SEQ ID NO: 137688 - DNA, 201 bp, Homo sapiens
ctgttctgtggtcttatgtagtgacacaaaccactttttctccattttggcttatgtttctttttctttccttttttttttttttcctttttgttagagasagggtcttgttctattgcccaggctgagtagctaagactacaagcatgtgccaccacacccagctaattttttttatttttatttttgtagggacagggt

SEQ ID NO: 137689 - DNA, 201 bp, Homo sapiens
gtgaaaaggataaccccatgcaggaattttgcatctgcaggctccgcttcaacatctgtttaggagaaagtggagacagactgacctgagtaactaaggtsttggaacagcttacaggtcagaaccaggtgttttccaaagctagatatactgttagcgcctttggcaacagaagaaatgaaaagactgttgtctgctgca

SEQ ID NO: 137690 - DNA, 201 bp, Homo sapiens
aaggtcttggaacagcttacaggtcagaaccaggtgttttccaaagctagatatactgttagcgcctttggcaacagaagaaatgaaaagactgttgtctsctgcacagttcgaggggccaaggcagacgaaatcctggagaatgatctaaaggtgcaggagtgtgagttaagaaaaaataacttctcagatactggaaac

SEQ ID NO: 137691 - DNA, 201 bp, Homo sapiens
ggcagacgaaatcctggagaatgatctaaaggtgcaggagtgtgagttaagaaaaaataacttctcagatactggaaactttggttttgggacccaggaayacattgatctgggtatcagatatgacccaagcattgatgtctacagcctggacttctatgtggtgctggaaaagccaggtttcatcattgcaggtaagaa

SEQ ID NO: 137692 - DNA, 201 bp, Homo sapiens
acatattcaaagaaagggaaggaaattcttttcattcctgtgtgtagtgacttcctgctttaagaacttaggacttcagctgtactatcagtattgtaggycacttaacattattatggttaaagttggcattggagagagcctaggaacctaactgcctgtttgtttttatatttccaaccattggattcccaagttaat

SEQ ID NO: 137693 - DNA, 201 bp, Homo sapiens
caacagggagtaaggtctggtttaaaaaaaaattagtaagcatttggccaagtagattaacaacattcagtttttctttactgtccttatgcttttactayttttaacatatatctttttgaagaatagtttgagaattatgtatgcttaactatgagatacagatactattgaaactagtcagttgtttataggtacttg

SEQ ID NO: 137694 - DNA, 201 bp, Homo sapiens; identical to SEQ ID NO: 24427

SEQ ID NO: 137695 - DNA, 201 bp, Homo sapiens
ttgaagaatagtttgagaattatgtatgcttaactatgagatacagatactattgaaactagtcagttgtttataggtacttgtaaaattaaaaatatatyccaatagcatgcagatttttcatagaggaaatttgaaagcatggaagcacctgaatttacagtactctgtattagtggcatcacaagtttttaagcaaat

SEQ ID NO: 137696 - DNA, 201 bp, Homo sapiens
gtgcacagttaattttgcccaagtttttgttttgaaatgaatgtaaaacttactgaagaagtagcttcccaaaatttagttttctgttaagccaaaaatawtattttaaaagagtatttgcaaattttgaagttgacattaattgagaatgttactaaggctaaactggacccgcttgcccagaagataattatggaaaaa

SEQ ID NO: 137697 - DNA, 201 bp, Homo sapiens
acattcagtttttctttactgtccttatgcttttactatttttaacatatatctttttgaagaatagtttgagaattatgtatgcttaactatgagatacmgatactattgaaactagtcagttgtttataggtacttgtaaaattaaaaatatattccaatagcatgcagatttttcatagaggaaatttgaaagcatgg

SEQ ID NO: 137698 - DNA, 201 bp, Homo sapiens
tgtgaatcaccattataggagatacatgcattttatctacttttcagtttgtatggggttaactttattagaattatctttaatgttattttgcttatatmcttaattttaattatagacaaacattaagaagctggagaaaattatgttctagtgacatttatatagaagaagaatcttttttccccctttcttttttga

SEQ ID NO: 137699 - DNA, 201 bp, Homo sapiens
atttgttctttggtgagaaaggattcttgtaacacctaaatcaagactgtccaaacatggcatatgcagtttaccagtcaaaacaaactaatcacttaagwtctgtgtattttgttttatttgaattatacctcaattaaaacaaatttagcatgtttacacaaaggtggggggaaactgtctaatatatctgagatctgt

SEQ ID NO: 137700 - DNA, 201 bp, Homo sapiens
taatttagtgatctttctagtgtgataaaacgtcagaagtactgagagtggagtggacattgatattgttactctcagtaagttttcactgatttttctcagagtcatgaaggaacaaacgtttgttaagtccttatcacttattagataacacaaaacatgttgggggggtgtgtacagaggtgagtaagatgtagctcc

SEQ ID NO: 137701 - DNA, 201 bp, Homo sapiens
acccttaacatgttatactcctttaggttattagaatttatacatgcattatttcatttgacctgtaaactctaagtaactttgcatggaaaatgttatcytgattttatagacgagatagtgagtttagaaaggcagtatggtggaatggagcatagatttggagttggctagacctaaagtccagattaaatctctgct

SEQ ID NO: 137702 - DNA, 201 bp, Homo sapiens
tggtccacttgatgatggtgttccacaggtgtcttaggctcttgtcttcaattttccttcagttttttttttctgttcctcagacacgtggtattttcagytgttctgccttccaagtttactgattcttctgcctgcccaaattggcttttgaattcctctagtaaatttttatttcagtttttgtacttttcagctcca

SEQ ID NO: 137703 - DNA, 201 bp, Homo sapiens
gtaatttagtgatctttctagtgtgataaaacgtcagaagtactgagagtggagtggacattgatattgttactctcagtaagttttcactgatttttctcagagtcatgaaggaacaaacgtttgttaagtccttatcacttattagataacacaaaacatgttgggggggtgtgtacagaggtgagtaagatgtagctc

SEQ ID NO: 137704 - DNA, 201 bp, Homo sapiens
gtacctcagttggaaatgcagaaatcacctgtcttccgcgtggatcatgctgggagctgcagacaggagctgttcctatttgaccatcttggaatgccacytttttttttttttttttttttttaaggcagtttcttgctctgtcacccaggctggggtgcagaggcatgatcacggctcactgcaacctctgccttctgg

SEQ ID NO: 137705 - DNA, 201 bp, Homo sapiens
gttcgttttaacctctccaaattttactgacttcagaagtttctagaactaagttatagcatgttttgagttctaatgtcactttccgatcttctttaccktttttctacctctgtttgtatttctggttctggttaagtgagtctggtaagcagcaggtgttctattttatttcttttatttttaggatagtattacatg

SEQ ID NO: 137706 - DNA, 201 bp, Homo sapiens
tgggcctgcatggtctgagtgctgccctgtgagtttcagaaggcgcagcaacctgtatacctgaaagccatctctgctggggcaggtacctagtgtccccrcctacctgggtcgtagtcaggccctgggcaagcctgctatgcttttccttccctaatccctcaggggtgggatagagagcacagtggcctcccagggagg

SEQ ID NO: 137707 - DNA, 201 bp, Homo sapiens
attttctagtttatttgcatagaggtgtttatagtattctctgatggtagtttgtatttctgtgggatcagtggtgatatcccctttatcattttttattrcatctatttgattcttctctcttttcttccttattagtcttgctagcagtctatcaattttgttttttaaaaaaaccagctcctggattcattgattttt

SEQ ID NO: 137708 - DNA, 201 bp, Homo sapiens
gtgccccactactacactcccttaagtagccccacattcttgtgcttgtttcttttttctgctctctttccttgcccaggtaagaggtctgcccataaggsatattttgcagcatgtgaagctttttaaaaagttaggcttattgaagtataatttacacacaaagtacaaaaaaaaaaagactgtgttctcaaatctgtg

SEQ ID NO: 137709 - DNA, 201 bp, Homo sapiens
tgatggacatttgggttggttctaattctttgctattgtgaatagtgctgcagtaaacatacgtatgcatgtgtctttatagtagcatgatttataatccwttggatatatacccagtaatggaattgctgggtcaaatggtatttctagttctagatccctgaggaattgccacactgtcttccacaatggttgaactag

SEQ ID NO: 137710 - DNA, 201 bp, Homo sapiens
gggagaacttcaggcttgagaccctaacctgtgaaagctgcatgggctaagtacagcaaagccatggaggtggggcttcccagggtctattgggatgaaaygaatgtattttgtaggtgagaaggacatgagttttgaggcccaggggcagaatgctatggtttggttgtttccttcaaaactcatgttgaaacttcattg

SEQ ID NO: 137711 - DNA, 201 bp, Homo sapiens
gcctatatttagggacaagagaagagacaaccaataagggttgaaagaaaccttgagagagtaagtcctatgacagaagcagggaagtttcagaatgattrcagaaagatcagccaggctcttcctgttctccatcgtggtgcaggatcaaggtgaaaaggataaccccatgcaggaattttgcatctgcaggctccgctt

SEQ ID NO: 137712 - DNA, 201 bp, Homo sapiens
gcatgtaaaggcacttgactctctgttatagaccactgtattatgttaatgtccctctccttcctccctttaggtaaagtttttagggctaataaatcccraatatcaatgttgatcagtagtttgtgtttgtgtagtgttgtttatatcaaaaactacattgaagccgggcacagtggttcacgcctaaaatcgcaacac

SEQ ID NO: 137713 - DNA, 201 bp, Homo sapiens
taggtggaaggagggcatttatcagagattttaatttaagaagaaagtcttcatccttatcctaccaacccccattccctgagcatatttatcattactartcccagcatatttgctcccatatttcctatgcttacctgtgaagattttcataactttttccttgctttttactgtcactgttggttctgtgatttatga

SEQ ID NO: 137714 - DNA, 201 bp, Homo sapiens
cctaccaacccccattccctgagcatatttatcattactagtcccagcatatttgctcccatatttcctatgcttacctgtgaagattttcataacttttyccttgctttttactgtcactgttggttctgtgatttatgacagatactgctcttgtaggaatgctggctttgactgaaatttgttactgcttttgtattt

SEQ ID NO: 137715 - DNA, 201 bp, Homo sapiens
atttgctcccatatttcctatgcttacctgtgaagattttcataactttttccttgctttttactgtcactgttggttctgtgatttatgacagatactgytcttgtaggaatgctggctttgactgaaatttgttactgcttttgtatttaaaactttttttttattataagtagaattatggaacagtagtagaaaaag

SEQ ID NO: 137716 - DNA, 201 bp, Homo sapiens
cactttataaggaccttgtgtttttttttttaccatgacctacaaggcccagcataatttagcacagggctacctcctacatcagcactagtcaccttctytccttgtttcttgagattcagtcatactggtctttcttcagttcttcaaaatgctaagcttctgcctcttctagtctttccagttattttccttctccct

SEQ ID NO: 137717 - DNA, 201 bp, Homo sapiens
tatttccagccttagcttcaatctcatattctctgaagtcctttgattgtcctcccgttattctttttttaaaaatcctatttccttatattgtatcttakaattatttggtttgtttcatttttgcctatgtgtgatatatgtatttctacataggtatatatatctacttatagacaagaattcttcagattaaaaaaa

SEQ ID NO: 137718 - DNA, 201 bp, Homo sapiens
tagttgaataaatagcatcaccattctttgctgtggcacaggttataaacttaagtggagtttaccggcagcatcaaatgtttcagctttaaaaaataaawgtagggtacaagtttaatgtttagttctagaaattttgtgcaatatgttcataacgatggctgtggttgccacaaagtgcctcgtttacctttaaatact

SEQ ID NO: 137719 - DNA, 201 bp, Homo sapiens; identical to SEQ ID NO: 24449

SEQ ID NO: 137720 - DNA, 201 bp, Homo sapiens
aatgtactgtactatgttgtataacttaaacccgatagactgtatcttactgtcataacaataatgagtcatccagattatcgagtgagatacatatttargaattatctttaaaaatttcaaaaattttaattttactgttgtgttttaggaaaaagtattgcataaagctattaatattgtcaggaagactaaagtgca

SEQ ID NO: 137721 - DNA, 201 bp, Homo sapiens
tagactgtatcttactgtcataacaataatgagtcatccagattatcgagtgagatacatatttaagaattatctttaaaaatttcaaaaattttaatttkactgttgtgttttaggaaaaagtattgcataaagctattaatattgtcaggaagactaaagtgcagcatagactaagaattaggaaaattcctagactaa

SEQ ID NO: 137722 - DNA, 201 bp, Homo sapiens; identical to SEQ ID NO: 24426

SEQ ID NO: 137723 - DNA, 201 bp, Homo sapiens
ccatctgtctcggcctctggaattacaggtgtgagccgccacgcctggctaaattgatcagtattatttaactttgagggatatgatttgttatggaatgmgaagttttatacttgaggtactcagagtccttttgagacaaatatttaacttctccttttgaggttaccgcctacgattgggaattaatgtaaaaaataa

SEQ ID NO: 137724 - DNA, 201 bp, Homo sapiens
cttaactcttctgtgttgaggaatgacataaaaggtaggaaaggatataacaaatgttgataagaggagtctgatggatgagaggagggaactgctttaamtgagtttctacttcagacataagttaattctcagagcccacaaaaactttcacttttatttgtgaaatacaactcagttctcatggcttaacactttaaa

SEQ ID NO: 137725 - DNA, 201 bp, Homo sapiens; identical to SEQ ID NO: 24429

SEQ ID NO: 137726 - DNA, 201 bp, Homo sapiens
gaagatcttgaccaatggctaagtgaagatgacaatcatgttgcagcaattcactgtaaagctggaaagggacgaactggtgtaatgatatgtgcatattkattacatcggggcaaatttttaaaggcacaagaggccctagatttctatggggaagtaaggaccagagacaaaaaggtaagttattttttgatgtttttc

SEQ ID NO: 137727 - DNA, 201 bp, Homo sapiens; identical to SEQ ID NO: 24431

SEQ ID NO: 137728 - DNA, 201 bp, Homo sapiens
tatgggttcgaatctaggtaggagatatatcgatattttgggcatcatcaggaaagggagagtagttaagcctttcatataaataatggtgtggcgtttgkgcatgggaagtcttggaggaaaggaagaaaaggagagggtgaggactgagataagaatggcaacttgggtttaggaagaagaagaggaatcaatgtagag

SEQ ID NO: 137729 - DNA, 201 bp, Homo sapiens
ggaggttgcagtgagccgagatcacaccagtgcacgtgcacttcagcctgggcaacagagcaagactctgtcttaaaaaaaaaaaaaaaaaaaaaatatayacacacacacacacacacacacacacacacacacacactattactaccaatatacatacatatatgtatgtatgtatgtatgtatattggtagtaatagt

SEQ ID NO: 137730 - DNA, 201 bp, Homo sapiens
ggtatatatatctacttatagacaagaattcttcagattaaaaaaatctgatttgtaaacattcccaagtggttgtttaccatttttttcttcccccttcytatttcttattctacctgattttcccctgttcattcaccacactcgtttctttctcttttttactctctcttaatttttcattcaatttttataacatgt

SEQ ID NO: 137731 - DNA, 201 bp, Homo sapiens
ccatgtggaagttaccttttatctttaccagtattaacacataaatggttatacataaatacattgaccaccttttattactccagctatagtggggaaarctttcttttcataactagctaatgttttaaaaagtattcttttagtttgattgctgcatatttcagatatttctttccttaactaaagtactcagatatt

SEQ ID NO: 137732 - DNA, 201 bp, Homo sapiens
aacttggcgaaattatgttcatatcctaagactttatggaatgcagaatttaagagtgatgaactaggatatgctgcagaagaaataactcagcagcagarcatttaggttactggatggctacttttaaccacttaaactaagctgggggaagggaatgacttgaagacagaatttataattaaaagagaggcagaatgg

SEQ ID NO: 137733 - DNA, 201 bp, Homo sapiens
agattcatgttacttgatctgctttaaatgacttggcatctagcccatatttgagcccataaccgtgtggtaatttgaagtgtaattcacagtagagcttytgttaaagcactaatagcatcttccatggaggtatacttcagagtgaatataattttgtttatcctgtgtctctagagctattgactgaaaaagctgtta

SEQ ID NO: 137734 - DNA, 201 bp, Homo sapiens
gatacatatttaagaattatctttaaaaatttcaaaaattttaattttactgttgtgttttaggaaaaagtattgcataaagctattaatattgtcaggargactaaagtgcagcatagactaagaattaggaaaattcctagactaaaaatagtataaggagagggtttacctactatttgaggcagttggtctaatagt

SEQ ID NO: 137735 - DNA, 201 bp, Homo sapiens
ttcttcaaatatgccatttcttaaaaaaaaatgttttatgtatcccgattaatatttagccagtggttcttttagccgatggatcttgtcacctcttatgmtactattaatagcatgtcaacatgaagaattatctgctgaatataatagctatgctgtccttgtttccttttgtctcattcttttttgattgggggataa

SEQ ID NO: 137736 - DNA, 201 bp, Homo sapiens
ctcttgtttcctgttatgatggtggcattatatacctttaaaatgtgagctataggaaaatgaatgatggttaattttttaataaatatttagacttgtgkttttgaaattttttataacattgttataggttttatcctctttctcttgtgaacatgtagtgatttgtattttgtgatctttgccgcatgctagagactt

SEQ ID NO: 137737 - DNA, 201 bp, Homo sapiens
tgacattgggacatgtgtgaacatcttcaaggtattaggacatcttcaaggcattactttttggcagtgttgagaatttttttttttttttttttttttttgagatggaatctcgctctatcgcccagtctggggtgcagtggcaggatctcggctcactggaacctctgcctcccaggttcaggcgattctcctgcctga

SEQ ID NO: 137738 - DNA, 201 bp, Homo sapiens
tttagctcagtgttttatgagccaggcagcttcagactttgcttttgatgctctttgttcattacctctaaagctgtattatcactttcattttatcattratgtttcatgtatatgttatagtttcatattgttactgcaacttttacttagctataatttaaaaaatatctgtgatctgtggaaataattattctatgg

SEQ ID NO: 137739 - DNA, 201 bp, Homo sapiens
acccttttgtgaagatcttgaccaatggctaagtgaagatgacaatcatgttgcagcaattcactgtaaagctggaaagggacgaactggtgtaatgataygtgcatatttattacatcggggcaaatttttaaaggcacaagaggccctagatttctatggggaagtaaggaccagagacaaaaaggtaagttatttttt

SEQ ID NO: 137740 - DNA, 201 bp, Homo sapiens
gaccagaggaaacctcagaaaaagtagaaaatggaagtctatgtgatcaagaaatcgatagcatttgcagtatagagcgtgcagataatgacaaggaatakctagtacttactttaacaaaaaatgatcttgacaaagcaaataaagacaaagccaaccgatacttttctccaaattttaaggtcagttaaattaaacatt

SEQ ID NO: 137741 - DNA, 201 bp, Homo sapiens; identical to SEQ ID NO: 24442

SEQ ID NO: 137742 - DNA, 201 bp, Homo sapiens
tcctgtgaaataatactggtatgtatttaaccatgcagatcctcagtttgtggtctgccagctaaaggtgaagatatattcctccaattcaggacccacaygacgggaagacaagttcatgtactttgagttccctcagccgttacctgtgtgtggtgatatcaaagtagagttcttccacaaacagaacaagatgctaaa

SEQ ID NO: 137743 - DNA, 201 bp, Homo sapiens
agatcctcagtttgtggtctgccagctaaaggtgaagatatattcctccaattcaggacccacacgacgggaagacaagttcatgtactttgagttccctyagccgttacctgtgtgtggtgatatcaaagtagagttcttccacaaacagaacaagatgctaaaaaaggtttgtactttactttcattgggagaaatatc

SEQ ID NO: 137744 - DNA, 201 bp, Homo sapiens
tttgctcccatatttcctatgcttacctgtgaagattttcataactttttccttgctttttactgtcactgttggttctgtgatttatgacagatactgcycttgtaggaatgctggctttgactgaaatttgttactgcttttgtatttaaaactttttttttattataagtagaattatggaacagtagtagaaaaagt

SEQ ID NO: 137745 - DNA, 201 bp, Homo sapiens
tgtgtttcctagtcctacatctctgattccttataaaatattccattatgaattcttcactattgacaatttctccccttttatcttaaaagtaccaaagraagtgtaaaatgtgactgtcttgtcagtcctctttttcctgtttttcatgtcagtgggtatgaaattactagcaaggatgcatatatgtgcatatgtcat

SEQ ID NO: 137746 - DNA, 201 bp, Homo sapiens
tacatctctgattccttataaaatattccattatgaattcttcactattgacaatttctccccttttatcttaaaagtaccaaagaaagtgtaaaatgtgrctgtcttgtcagtcctctttttcctgtttttcatgtcagtgggtatgaaattactagcaaggatgcatatatgtgcatatgtcattactaaatgcatttt

SEQ ID NO: 137747 - DNA, 201 bp, Homo sapiens
tgtacgttttgaatctgagctttgaaggtaaattcactgcagctgtgttggttgattttagataatttgtgtatttcctcctttgtcttttttaaactggrgtcatttgtagttgtttatacagaattttagtttttaaaaccacaagtctttcattataggttgagttatgaattcatagcctgttatttaaatgaagct

SEQ ID NO: 137748 - DNA, 201 bp, Homo sapiens
agatataagacatacttctcacatatttagatgacacaggttagtacattgaatatcagccagggtttttaaggatcttaatagagtggaactaaggtagraactattaagagcaattaatagtgatatatctatagtcctgtttctaaacaagtttttttaaaaacctcaactctgactatagtgaacagagaagtcttg

SEQ ID NO: 137749 - DNA, 201 bp, Homo sapiens
taaaaaggataatgtcattttgattctagattcttttatgaaacctgtttcttctctggcagcttttaggatcttctgtttctttggtattcagaaatttmatgagatatgtgtgcttctattttggtcttattttcatctgttttgccaggtactcatgcaactttccagtttgaaaactcacatccttcacttttgagt

SEQ ID NO: 137750 - DNA, 201 bp, Homo sapiens; identical to SEQ ID NO: 24433

SEQ ID NO: 137751 - DNA, 201 bp, Homo sapiens
aaagcccttagacaagagaatgagcttggtatatctgaagagtggataagtcattttgactgaaacagagtggacaagaaaaccagtccaagtgtaaagayactagtgtgtgttcagcataggaaggatgtaatctgaattttgtgtttaatattccctgtgttcatgctttcaaaatacagatgagtgaggaaagtaggg

SEQ ID NO: 137752 - DNA, 201 bp, Homo sapiens
tcctcccgttattctttttttaaaaatcctatttccttatattgtatcttagaattatttggtttgtttcatttttgcctatgtgtgatatatgtatttcyacataggtatatatatctacttatagacaagaattcttcagattaaaaaaatctgatttgtaaacattcccaagtggttgtttaccatttttttcttccc

SEQ ID NO: 137753 - DNA, 201 bp, Homo sapiens
gacataaaaggtaggaaaggatataacaaatgttgataagaggagtctgatggatgagaggagggaactgctttaaatgagtttctacttcagacataagytaattctcagagcccacaaaaactttcacttttatttgtgaaatacaactcagttctcatggcttaacactttaaaccatgagaaaactgaagagttgag

SEQ ID NO: 137754 - DNA, 201 bp, Homo sapiens
ttcgaagcagtgtttacgtagcagtaacatgaaagtttctaataaaatacccaatgtacacagcgtcaaaaaagctgcatttttccttttcctaattcttygttgtttgctgaaatctggggcaaaggtgcgggagggggctaaatgactgggatatgaagtaggaatgggagaggaaagaaatagatgggaactcagtca

SEQ ID NO: 137755 - DNA, 201 bp, Homo sapiens
ttaacaaaaaatgatcttgacaaagcaaataaagacaaagccaaccgatacttttctccaaattttaaggtcagttaaattaaacattttgtgggggttgktgacttgtatgtatgtgatgtgtgtttaattctaggagtacagctgatgaagaacttgcttgacaagtttttaacttatgtattatttcgaagcagtgtt

SEQ ID NO: 137756 - DNA, 201 bp, Homo sapiens
tagccgggtgtggtggcaggcgcctgttttcccagctactcaggaggcttgaggcaggataattgctgaacccgagaggcggaggttgcagtaagccaagratgcaccattgtactccagcctgggcaacaagagtgaaactccatctcaaaaaaaaagaaaaaaaaaacaacaactatcttcatttaaaatattaaatgt

SEQ ID NO: 137757 - DNA, 201 bp, Homo sapiens
ttggaattacaggtgtgcgccatcatgcctggccttaacgtttcttaagacttgattattttctatttagcttctgtggatttactgattaattttttaamtaggagagaaatcagtatgaagaggaagtaataaagaatgaaaacatggtatttaaatgtgcaggtttagaaagttaatgaagtttgaatttgattgatc

SEQ ID NO: 137758 - DNA, 201 bp, Homo sapiens
agttggaattacaggtgtgcgccatcatgcctggccttaacgtttcttaagacttgattattttctatttagcttctgtggatttactgattaattttttwactaggagagaaatcagtatgaagaggaagtaataaagaatgaaaacatggtatttaaatgtgcaggtttagaaagttaatgaagtttgaatttgattga

SEQ ID NO: 137759 - DNA, 201 bp, Homo sapiens
aaaatcaggattatcagattctgaattaatggagtttaaatcaaaaagattacaaggcagtttttcagttttattctggttaattttatcacagctttggratcctactttgtttatttgcttcttgaagttagatttcccagtgaaatttcagtatcacataaagtcttatgaaatggctcattgcactttgaactttga

SEQ ID NO: 137760 - DNA, 201 bp, Homo sapiens
tagcactatcaccctagagctgtctcgcgaaagagttctcctgagatctgcttgtatataagtgtgtagcacctcccctctttgctctctctcttcctccwactcctgccgcggggacgtgcttgctttcccttggccttctgccatgattgtaagtttcctgaggcctctgattaaacctttcttcttctaaaagattac

SEQ ID NO: 137761 - DNA, 201 bp, Homo sapiens
ctactaaaaacacaaaaattagctgggcatagtggcacacacctgtagtcccagcttcttgggaggctgaggcaggagaatcgcttgaatccaggaggcakaggttgcagttagccgagatcatgccactgcactgcagcctggacatcggagcaagactttgtcttagaaataaataaataaatataaaataaaataaat

SEQ ID NO: 137762 - DNA, 201 bp, Homo sapiens
ctctttgctctctctcttcctcctactcctgccgcggggacgtgcttgctttcccttggccttctgccatgattgtaagtttcctgaggcctctgattaamcctttcttcttctaaaagattacccagtctcaggtagttctttatagcagtgtgagaatggactaatacaaggggaaatatatatggttaccaaatagcg

SEQ ID NO: 137763 - DNA, 201 bp, Homo sapiens
attgttttaagggaggagagttattctgatatcctttgtattgatattgctcttatttattattgagctggatttaagtattaatcatttaaggtcaaatktctaatgtatatatgttcttaaatggctacgacccagttaccatagcaatttagtgaaataactataatggaacattttttttcaatttggcttctcttt

SEQ ID NO: 137764 - DNA, 201 bp, Homo sapiens
tatagtagttgactagaagctgtggagtttgagtgctgggattatatctagttccattacttatgaagattatatctagttccattacttcacctcatctrtaaaatggtttaccaatagtacctaccttacatggttttatgagtattaaattatgtatttctaaagacatttagaacaatacaaagaatatagtgtggg

SEQ ID NO: 137765 - DNA, 201 bp, Homo sapiens
ctggcattaagtctttttccaaggagtttggtaccttttagtttattatgatattagagatgaaaatctgtgttctaggaatgtttattactgctagagtratgttgcttttaggccatttcagagaaaagacctagaaaacagatttttacaaacatgaattcatactgatatttttagttttttacatgatttcttgat

SEQ ID NO: 137766 - DNA, 201 bp, Homo sapiens
aacagatttttacaaacatgaattcatactgatatttttagttttttacatgatttcttgattttacaatattatctgctttcttaacttaaaattatgamccttaaagtcattagcataacttctttgcttatttctacaacataaagaaaatagtcctggtgcggtggctcacactgtaatcccagcactttgggagat

SEQ ID NO: 137767 - DNA, 201 bp, Homo sapiens
cttcactattgacaatttctccccttttatcttaaaagtaccaaagaaagtgtaaaatgtgactgtcttgtcagtcctctttttcctgtttttcatgtcartgggtatgaaattactagcaaggatgcatatatgtgcatatgtcattactaaatgcattttctttctagaaaaactcaatatactaaattgtactaaaaa

SEQ ID NO: 137768 - DNA, 201 bp, Homo sapiens
tcagtcctctttttcctgtttttcatgtcagtgggtatgaaattactagcaaggatgcatatatgtgcatatgtcattactaaatgcattttctttctagraaaactcaatatactaaattgtactaaaaaggaaaagcttgttttgttttgagtggtagtatgaaagttgttttattttaggtctgaccagttagaaacc

SEQ ID NO: 137769 - DNA, 201 bp, Homo sapiens
tttgagcatagaatgcctttggataaaataccattacctagtaaagtgtgaacttttataatccataaaaattattcttttataagaatattcataaatgkagttagattaatagaagattctcgattctttgatcagaaaactaaggactatattgaaaaatcagtgacaaatttaattcttatagtacatctgaaagaa

SEQ ID NO: 137770 - DNA, 201 bp, Homo sapiens; identical to SEQ ID NO: 24450

SEQ ID NO: 137771 - DNA, 201 bp, Homo sapiens; identical to SEQ ID NO: 24448

SEQ ID NO: 137772 - DNA, 201 bp, Homo sapiens; identical to SEQ ID NO: 24451

SEQ ID NO: 137773 - DNA, 201 bp, Homo sapiens
aaaaagggtaaatagtgataaagtatatttaggggattagacttgaggaagaatagtagcagaaaatgtgttggatcagtaataaaaagactgcatctttrttcaacttttatggtttacactgctatctcacacttattatccaatgagctccttctttttgccaataagaaaagtgtagctcagaaaaattaaattatc

SEQ ID NO: 137774 - DNA, 201 bp, Homo sapiens
gcttcattttcttaacctctattgtgaaaaatttctacatgaccccaaattggcaatgagcccaataggagatagatagtatataggcaaggatttttttkgtctaccacaacttcatctttaaattacattgaatttaccttcctttttccacaagagggaaactttgcaaaaacgcataagcatttccccgtaaggaga

SEQ ID NO: 137775 - DNA, 201 bp, Homo sapiens
aaagcaggagtagtgtattacatagcatgtgcattgaagtttaatcccaaataatttgaaaatgataacaggaaattacaatccagtaagcattgtttttytaatgggcattttgtttaaaatattaagctttatttttttttcaatacagaaaaaaaatatgtggtggtggaagtaggatttcaccatcaaataaggtat

SEQ ID NO: 137776 - DNA, 201 bp, Homo sapiens
tttggctatgaaaatataaataatttttaaaaagtattgtttatgaaatatacacagcatttaggtgatatacacactatttatttacttaaagattagtrtactttaaatgtagaacaattacaattatttctgtgtaattaatacatatgaatatttatataaattttatataagtcgaaatacctactttgatccacg

SEQ ID NO: 137777 - DNA, 201 bp, Homo sapiens
ttctttacatagttgccttttcttttagaaaagtaatgcctttggtcctttttaatataaaaagacaacgatgactgtattttttctttgaaaattataayagatgtcattgtctcacattagaccttgtgacttgatgaactgtgtaagagaaaaatgaaattttaaaagcttcatgtgactggctgtataggtaaagca

SEQ ID NO: 137778 - DNA, 201 bp, Homo sapiens
tgcatttgtttcaagggaaacagaggaacaattaagtagtttgccagagtaaacacatgcatcaggactatctcattccctgtcactagactataggtttyaagtgttttatttggtttggagacccattaaattacaactgggtggtaaattataagggagtacctagtgctaatttattagatgaaacagattccacag

SEQ ID NO: 137779 - DNA, 201 bp, Homo sapiens
tagtgactttaaataaattctctcttcactaatagggtattaaatataaatgtatagttctgaaattgtgaacatgagtagtggcttttgtaccttttatrgaataagtaactgcagagtctaagaactttcagagggcatttaactggttttatatggtaaaattgcaaaattatagcactaaagtagaattgttgttat

SEQ ID NO: 137780 - DNA, 201 bp, Homo sapiens
gaatctatttaggttttaaggttaaataagaggtatagagctgtctcctgtgatttagaaacagaaatttattctgtcaaagcctttcctatctactctgmctcaaggctttggagaagcacttaagcgtggaggtaattctgagaccatgcagtttgacacgtggatggccttattggtatagttgaggctgatagtgtg

SEQ ID NO: 137781 - DNA, 201 bp, Homo sapiens
atccaccaaaaaagctaactacattttctggtttaccaggcagaactgataagaacccattgaattttaaattggcgagggtaaatgagcacattgttcartggagtgactttgggtatgaaaacttgcctttgccttatatagttagtccagcattgtcaggaagttgcccagaagctgttttagtgaatgttaaatgac

SEQ ID NO: 137782 - DNA, 201 bp, Homo sapiens
tgcctctgtaataaaagactattaatgtagatttagagaatgattaactgacaagccagcattatgttgtaatggttctgtgagatgagtcagcttaaaawtgcatcccaaataaactaacccatggggtggagttgatttggactttcttattgtcattaataagcttacaggtcatgatggtggtttctgggtgtgaga

SEQ ID NO: 137783 - DNA, 201 bp, Homo sapiens
ttgtttcacttcttttggcatcttgtatatttcaggtgttaaaaactggataaaaatttcttgacatctaggcacagcaataattagtgacccataccaayattgttttcttcatgagttgtttttaattaaaatatatagaaatatatcaagacaggtaaatgtaaaggctttgcagtctttataacctgtgttaaaagt

SEQ ID NO: 137784 - DNA, 201 bp, Homo sapiens
gctcagtactttcactttgaaaatttcttttcagtttgaaaaaaaagttttaaattatagtcattttataaaaattgcttctagcaagcaaaaaaagcctrtggaaaacccgtaatttagacaagtacctacattttatttgctctgtgctgctgagatttagaatccctttccatttacagtttacttttcacagaacat

SEQ ID NO: 137785 - DNA, 201 bp, Homo sapiens
agagagctcccaattcaagagagactttgtagtaaagtacttgaagtgcaggttgaattagatggtgactgtactggttgtaaaatgaatgcttggtatcraaacatattagagattgatgtgtgttttgtctcagatggtgaatatctggttctgcatggagacgtacattgcagaatattttttaaaaaggaaggccaa

SEQ ID NO: 137786 - DNA, 201 bp, Homo sapiens
gtgactgcatcggtattccatcatgtggatgtgctatttaaccagtcctctggggtgaacatttagatggtttccagtatttactactgcaaacagttctrcagttcatgcatgtgcaagtgcatctgtaggataaattcctaaaactgcaataattaagtcagagggtatatgctttaaaaactttgaaacattgtaatt

SEQ ID NO: 137787 - DNA, 201 bp, Homo sapiens
tttaatatatgcaaattaaaaatgatgcactgttctgtgtatgataaatagcaatgactttaaaatgatgacagccaatgtatatatggttatggtaaaasagacacaatttaaattgatacagtcctttgaaaactatttggcaatatgtataagaaaacagcgtattaaggaaggcctgagaaataaaaccacataggt

SEQ ID NO: 137788 - DNA, 201 bp, Homo sapiens
gagaagtatcagtagatatgaaaaaagggttaaaactattttgtataaatcaataaaggaatatttaaaaactggcaaaggatttggactgttcacagagsgaatataatttttaagcaaatatataagcatctttaatatatgcaaattaaaaatgatgcactgttctgtgtatgataaatagcaatgactttaaaatga

SEQ ID NO: 137789 - DNA, 201 bp, Homo sapiens
cagcaagagcaaagaagtcccataaggcattggagcctctgggaaaggaaagtgggagggtaaaggcagggaggaagagaagctgtagtagaaggccttgygggcatgagaaggatttgggattttattttgaataacatgagcagtgtttaagcagaagcatggcatgatttcttacacctgtaaataatttctctagtc

SEQ ID NO: 137790 - DNA, 201 bp, Homo sapiens
aaaacaaacagaagcacattttttcaaatgccagccaaacaggcatgcttcatctctcttctggccatatcttgaaggtttctctcttttcctttaacagscagcccctctgcctcactaccagtagtatacagcggaaatgtacattcttgctgtttaatggaacacagccttactgttcttgttcatgaatataaaagg

SEQ ID NO: 137791 - DNA, 201 bp, Homo sapiens
cccttttggaacctccagtccaagggttggcaaacattttctgtaaagcaacagatagtaaatatttcaggctttgcgggccatatgcttgccataactayacagttctgccttagtagtgcaaaagcaaccaatgaataaatgtggctgtgttccaatgaaacttgattgaatgctcccaaatttgaattttatataatg

SEQ ID NO: 137792 - DNA, 201 bp, Homo sapiens
tgcttgagagttactttcatcttgctcttctcccagatcaaaacttatgcagcaggaacaattcagaaaaagacaaaccagccattacagtatagtgcataaaaaggggaaatgaatgagtagaaaaggaaatgaatttggaagaaaataaaattatcatttaaaagaaataaggacatgtatagcaccaaattaggcact

SEQ ID NO: 137793 - DNA, 201 bp, Homo sapiens
tccattttctgtgttatgccctgtaagttagagaggatatgcagatgtaccagaatgtgcaagattcagcttctctgcaggtgggttattttcccaaagartgaaaggaaagaaggtccccttactggagtcagtgagggttccatcacccaagcagccaagctctggttgtgggcagcccctctcctttaggcccaaacc

SEQ ID NO: 137794 - DNA, 201 bp, Homo sapiens
gtatgatatcaacagttaagaatggctactcaaaacggagaatggcttagaactgtcagacctcgttgttgtacatacacctaaattacagagctcacagsagtggcttttaaagaaaactacaaaaagccaaaatgttgttgcttggtctttaaatttttctgaagggcaggcttgatcgttagaactaaaccattgcat

SEQ ID NO: 137795 - DNA, 201 bp, Homo sapiens
ccttgatttaattttggctctcttgaagtgtggcctcatggctgatcttggatacatccctttacttcggattcttctaactttcttttaaaggggaagcytaactttaatgtgaagttcatgatacatttggacccagttatctatatcttaagaaagactttgatttgtcgtaaagagacactatagtgatagagtgac

SEQ ID NO: 137796 - DNA, 201 bp, Homo sapiens
aattttggctctcttgaagtgtggcctcatggctgatcttggatacatccctttacttcggattcttctaactttcttttaaaggggaagcttaactttartgtgaagttcatgatacatttggacccagttatctatatcttaagaaagactttgatttgtcgtaaagagacactatagtgatagagtgactataaaagc

SEQ ID NO: 137797 - DNA, 201 bp, Homo sapiens
atctgatagaggggagtgggtggtggttgaagccatcagtgtgcttgagtccacaaggtgatctgaacagaatgagagatggaaggataagaataaagtcytaggaaccaacgtcattgatatggttttgctgtgtctccacccaaatctcattttgaattgtagctcccataattcccatgtgtcatgggagggacccag

SEQ ID NO: 137798 - DNA, 201 bp, Homo sapiens
agaaaatttccatttgtgaaaatcgtattaagaatacattgtaaagaagaaaaacacttgcagcaagaataaaaccacttgtttatcaaatatcaaaagtrtttcattcaacattttaagtaaattgatattgaaaacaatcctttaaagctattggtagcatccatgtggtttaaatacttatttttgttttcatgcgga

SEQ ID NO: 137799 - DNA, 201 bp, Homo sapiens
gagtaacagcatcgattctggattattatcatatttttatccttttaggcaacattaacaaaaatatctgattttctaagctaaaacaaacagcaagataraattataaaaagtagaaatgaaacaactctaataacagatttattactagaaatatttgttttgtttttcattcaatctgtataatcaattgagtttcca

SEQ ID NO: 137800 - DNA, 201 bp, Homo sapiens
atctggggaaagaattctggggagaggaaacagtagttgccaaggcctggaggtggggctgtgctttttggattcagcaagagcaaagaagtcccataagrcattggagcctctgggaaaggaaagtgggagggtaaaggcagggaggaagagaagctgtagtagaaggccttgtgggcatgagaaggatttgggatttta

SEQ ID NO: 137801 - DNA, 201 bp, Homo sapiens
gagggttccatcacccaagcagccaagctctggttgtgggcagcccctctcctttaggcccaaacctccagaagaaggtggcagccaagggtccccaggcrggtacccatcagaggctgcacagcctgtctctggcctcctcattgacaagtgagacttacggcttggagaaacaatgctgtttctgaggccagtcaagtc

SEQ ID NO: 137802 - DNA, 201 bp, Homo sapiens
ttactgttgaggaaactgaagtccagcaaaagtccagataactgaataaattataagctatcaaggctgctctggaatgtatgcaaccctaatgtgttaayttgtaggttattctgtccactatggtgaaatttgaatgaatccattttctgtgttatgccctgtaagttagagaggatatgcagatgtaccagaatgtgc

SEQ ID NO: 137803 - DNA, 201 bp, Homo sapiens
gggttacatgtgcaggatgtgcaggtttatacctgggtgaacggggcacacctccactattgtggagaagttgtttgtcacatctcatgcacaccatgagycatagaactgttcctgcctttgccctgcatggactgcaagaagacccgtgtggtccatttcctcactggctccattttccccttctgatccacattcttc

SEQ ID NO: 137804 - DNA, 201 bp, Homo sapiens
tacctcactgccacttaaaactcaaaggagaaacttgttattgtcagctggcataacaatatgtcatggctccatgcctccagatattttcagttttaccsttaaacaagatgcctgattccagggttctgcactctgcagtagtgaactccagagttacagagtcagcagtaatcagccttagaagaaagaatcttgtga

SEQ ID NO: 137805 - DNA, 201 bp, Homo sapiens
actgagaatctaaactaatataatgtaatttattcaaggttttgctgaggtccttttttttcttttatgccaaaatctaaaaaaaaaatttaggccaagcrgggtgtctcacgcctgtaatcccagcactttgggaggccgaagagggtggatcacgaagtcaggagtccaagaccagcctggccaagatgatgaaaccct

SEQ ID NO: 137806 - DNA, 201 bp, Homo sapiens
ttagagacccaatgtaataaatactcagcaccatgtctagcataaaaaaaaatttcaacaaataccagttatatttgaaagtaggtgaagcttcactatcaaaaaaaaaacaaaacaaaaacaaaaacttgaattcctgcatagtggccagtgagtaacatggtggcagtgtcctcaaatttatgaattacaagtatacgc

SEQ ID NO: 137807 - DNA, 201 bp, Homo sapiens
tagccacttatatacccaagggacaacactataaagcagtttcatcaataaagaatgcccacaacagatacctctatgatttggtcagattaatcattcasagagagctataaaacagcacaactggcttcctcctgagaatttaatcttagaaacacacattcatacatgaaaacacatgaaaatcaaacatgcactgcc

SEQ ID NO: 137808 - DNA, 201 bp, Homo sapiens
aaaggaagttgtatgaagtaactgcagtgatggctttatcagtcctttaggggactgaacttgcagggtaacagctgtttctttgatcactgtaagtactkatgaatggaaaagttcttcacttctccaaaaattacataaactagacccttactcaaatttacctactgtagaacataattcagcataaagtgtcttgga

SEQ ID NO: 137809 - DNA, 201 bp, Homo sapiens
tagtattcagcaccttagccatctagtgaaattaaaaataattctgtaatatcattaaatgtctaaccaatagttatatttaaaattattttttattttattttttttttgagatggagtttagttcttgttgcccaggctggagtgcagtggagtgatctcagctcactgcaacctccgtctcccgggttcaggcgattc

SEQ ID NO: 137810 - DNA, 201 bp, Homo sapiens
ttaatggcatttcagtatttctgtgcactgcttttgtccagaatatttttcctttttaacattttaatcaagatctactgtgatagctgtgatgaggattaaaaaaaaaatcaataaacaattcaaggtagtggaccagggttgatgctggtgatttgggtacatgatgaaaattttagtctctgcgagcagttctgtgtt

SEQ ID NO: 137811 - DNA, 201 bp, Homo sapiens
attatatgaccagcagcaacaccagcccaacgacaccatccaccaatgccacttaccagcttcaagaaccgccatctggcatcaccagccaagcagttacrgatcccacagcaggtaattatgtgaatattattagtcctgcaggtgatattttcaatggtttcaatgcatttttctacagtcatatattcatgcagtggt

SEQ ID NO: 137812 - DNA, 201 bp, Homo sapiens
tgagtcagacacggtttatccatctctatgtgaggcagacaggataaatatagaaaatgagcttaaggaacttaggtcagaatgaaaacaagactaagggrgacttgcttagtactggtctaatggagaggtcaattacctgctatcaattattagggagctcaggtttccagaagataaactcagtacaaagagtaacag

SEQ ID NO: 137813 - DNA, 201 bp, Homo sapiens
gctttcaacattaccgattcagaaaatctaaaaggtagatttggcatgacagattagaaaaccataacctggcaccagagataatggtcaccttatccatyctctactttttgaatgaagacgaggaccctgcctcagccatctcacatgatgatgttggaaataacctcagaaaatggatgtggaaagattgaactataa

SEQ ID NO: 137814 - DNA, 201 bp, Homo sapiens
aggctacagcagatgggcccctggcaggtgcccagcaaggctccgctcccatctcccaccctttccagcccctgctctctcctaactgtacaaacatgtaygattctgacaaatgaaagacaagattttttttattagtctatgtgagaatattgtgtttgccatcttgctctcagatttattagtgaacaaaccaggctc

SEQ ID NO: 137815 - DNA, 201 bp, Homo sapiens
ctttgtgatgcactgtccctgggacactttatgtaatttacttttaaatttactagcctaaaacggagttacaatgaagaagtcctttaaaaatgggatcmtttgattccaaatgtatttattaaatgtcttaggtatgattatttctgcccttagtgtgtctatgatttttgtgtagccaaaaattaataccacttaata

SEQ ID NO: 137816 - DNA, 201 bp, Homo sapiens
ctaatgttagctgatgagctaaaaaaaaaaaaatcatcacttaggccgggcgcagtggctcatgcctgtaatcccagcactttgggaggctgaggcaggcrgatcatgaggtcagatcaagaccatcctggccaacatggtgaaactccgtctctactaaaaatacaaaaaaaaattagctggtcgtgttggtgcgcgcct

SEQ ID NO: 137817 - DNA, 201 bp, Homo sapiens
agctaccaggaacagtgtggtctgaagggacagtaaacacttcagaggtggagagacctgggttcagtcctagcttcctgctaatgtatggcctccacacagtcaaccctgactggcttcagagagggtgacaggtaggtgtggagttaagggagacaacagaatctggagctcctggccggtgcctgcagcatagtggtg

SEQ ID NO: 137818 - DNA, 201 bp, Homo sapiens
aagccacacgctaaagtgatataatgatgtcttattttttttaattagcacattttaaaagggattaatattataagaaaatatcaaaactttgaaaaacatgtgttcatgcaatcttctagttattaataagtttgggcatcctggaagcctttacttagtgatctcaaatatttaccataattttatgcatataccagc

SEQ ID NO: 137819 - DNA, 201 bp, Homo sapiens
tagatagagctggttggagacatcacagaatcatcacgatggtggtatagaatgcctttctgagtgttttattgtcccagaatatcaataatggtataggrcattcccatcatcccacaccagggaaggtgtcaggatctgccatgatagatcgaaggggctgcacagatgtacatgtactaaactcagagggccctggaa

SEQ ID NO: 137820 - DNA, 201 bp, Homo sapiens
catgcttgagttctcccaaggcccaaagtgttcagtaagtgagcaagcagccatggattttcaatctttgaacattctttgcggtgacagacatagaggcytaattgagccactgttcagttttagagggccaaatggaagtccactgctgtgtgagtttcatagacatgataaatgattttctcaaaagaaaatttccat

SEQ ID NO: 137821 - DNA, 201 bp, Homo sapiens
cactgtgaagtgagtttgctatctgcaggtaaaagcttgaaggtgttgacactaagagctaagctagagattgaacaatacttcaaatgaagtcctcagcytgggaacaaaacgttttaaatgaagctggcaggagaaaacaaatacaggatgtggaagaacaatagcaacaatggggtcgttcacagctgttagaggata

SEQ ID NO: 137822 - DNA, 201 bp, Homo sapiens
ccctagaaatgtgaatgctgtcccaagatttggattcaataatgatttcatcaccttaaaagtctatcacataattttggtcgtgtatttcaaaagtacaktttcagcacgtttagtctgtttttggaataaaaacttattttcccatagaattatgtatgttctgtactctactgaacaccaaattagggtttttaggaa

SEQ ID NO: 137823 - DNA, 201 bp, Homo sapiens
gatggctttcctgctgcagcaaccagtgctaacttatgtttggcaactggtgtacggggcggtgtggactggatgagaaagttggccttccgctacagacrggtaaaagagatctacaacacctacaaaaataatgttggaggcaagtgattaccaccagtacctcagcaagttaagacagtccagatacaattccaaaag

SEQ ID NO: 137824 - DNA, 201 bp, Homo sapiens
agccacacgctaaagtgatataatgatgtcttattttttttaattagcacattttaaaagggattaatattataagaaaatatcaaaactttgaaaaacatgtgttcatgcaatcttctagttattaataagtttgggcatcctggaagcctttacttagtgatctcaaatatttaccataattttatgcatataccagca

SEQ ID NO: 137825 - DNA, 201 bp, Homo sapiens
atgccatctttccttgtgttaatactcgtagatagagctggttggagacatcacagaatcatcacgatggtggtatagaatgcctttctgagtgttttatygtcccagaatatcaataatggtataggacattcccatcatcccacaccagggaaggtgtcaggatctgccatgatagatcgaaggggctgcacagatgta

SEQ ID NO: 137826 - DNA, 201 bp, Homo sapiens
ttccacccttagagggaaccagggaattccaggtcagttttgattccttgaattaaattcttttgaacatacattttcctcttctactagttcctcaacttcctcctcctttttgttcattctcccaagagagaaaatttctccatcatggcgctatggccttcccctctccccccacccccaacgctaaccacacgctct

SEQ ID NO: 137827 - DNA, 201 bp, Homo sapiens
aagcatagcaaaaaaggagccagatgtaattaatatgctggcatggaaggaaacttactatcaacaaaggtcaagctttttgtacatgataccgaaaaagygggggagaaacaacatgaagaaaaaaatcaggagagaggaaaagctgtatggcagcagtggtgaatggggtgttggaaaatgagagtgaggaagcaagga

SEQ ID NO: 137828 - DNA, 201 bp, Homo sapiens
tccacccttagagggaaccagggaattccaggtcagttttgattccttgaattaaattcttttgaacatacattttcctcttctactagttcctcaacttcctcctcctttttgttcattctcccaagagagaaaatttctccatcatggcgctatggccttcccctctccccccacccccaacgctaaccacacgctcta

SEQ ID NO: 137829 - DNA, 201 bp, Homo sapiens
gttttagacctttacaagacagaaacttccagagatattatcaaacatgagaggaaatcaacagcaatcagaaataggtgttctttttagataagtcattrtaagactatgtttccttctgcactgtaatcttgtactacacataaaaaactaaaagcatgtgaagtgtagcattttgtaaactgtaactaattttgctca

SEQ ID NO: 137830 - DNA, 201 bp, Homo sapiens
ccacccttagagggaaccagggaattccaggtcagttttgattccttgaattaaattcttttgaacatacattttcctcttctactagttcctcaacttcctcctcctttttgttcattctcccaagagagaaaatttctccatcatggcgctatggccttcccctctccccccacccccaacgctaaccacacgctctaa

SEQ ID NO: 137831 - DNA, 201 bp, Homo sapiens
caattgaaatctattctgtcatccttattctctttgccaatgtagtccaagggctttcatcagtaatttaactctataatttgcatcataaaaagtacctscttcaaagagaagaagttagaaatacctttgtttcgtaaaagaacaacctcatattgaaaggatctcttgcaggagtttgtgtgagtgcctctttgttct

SEQ ID NO: 137832 - DNA, 201 bp, Homo sapiens
attctaattgtgcttctgcttgatactgttttgtagtattcttttctgtggtatataaaaagaattaatgctcttctttaagtatttcattaataattagraggtaaattactttattccttttaattctatctcaaacaaaatcaactgtatatgaatttcttataaaatatatacaaataatctaaattatgtacgact

SEQ ID NO: 137833 - DNA, 201 bp, Homo sapiens
ccttggtttattcacgtgtatcacaaacattcccacttcttaaactagatttttagattgaggtttaaataacaacaactgcaaaaacctaaaacaaaacaaaaaaaacaacgttagatgttcatttaaaacgttttccatatggtaaagccattttaaggtcaatatgaagaataactgagggaaataaatggaaaaaaa

SEQ ID NO: 137834 - DNA, 201 bp, Homo sapiens
tatgtacatgtatacccataaacgtaaatatgtgtagatatatatgtatgtatatatacacacatatatgtagatttatatatatgtagattcactgtgtwtacaatgaaagaagctgaaactgccattttcaggactttgttaacataggtttttgcttcttcagttcaaaattagagcacaagaacatttgcttggact

SEQ ID NO: 137835 - DNA, 201 bp, Homo sapiens
tgttcagtaagtgagcaagcagccatggattttcaatctttgaacattctttgcggtgacagacatagaggcctaattgagccactgttcagttttagagrgccaaatggaagtccactgctgtgtgagtttcatagacatgataaatgattttctcaaaagaaaatttccatttgtgaaaatcgtattaagaatacattg

SEQ ID NO: 137836 - DNA, 201 bp, Homo sapiens
tcaaaatttaaaactttttgagcactcacgtgattctcaaagaaaatgcttataggagcattctggatttcagatttttgggttaggaatgctcaaccagyatataatgcaaatattccaaaatttgaaaaaaattcaaaatccaaaacatttctggtcccaagcatttcagataagggatattcaacctgtaatatgact

SEQ ID NO: 137837 - DNA, 201 bp, Homo sapiens
tagtttactgtgagtgcaaaatctttcaggagtccttgaaatcactatctctgtcttctctgaggtcccaggccagatccccaaacacagcagggatcccytgggcatctcagacccttccactacagattagcgcataaaatatgctgaactggagtggcccctagaaatgtgaatgctgtcccaagatttggattcaat

SEQ ID NO: 137838 - DNA, 201 bp, Homo sapiens
aaaaattcaaaatccaaaacatttctggtcccaagcatttcagataagggatattcaacctgtaatatgacttccacatattaagccagatgatcatatamtattaatttgaaaattaacttgccaaaatgatgatggataatgctatataatttgctacagaatgtatatggccagatttgggtacttaattgtgattaa

SEQ ID NO: 137839 - DNA, 201 bp, Homo sapiens
taccgaaaaagcgggggagaaacaacatgaagaaaaaaatcaggagagaggaaaagctgtatggcagcagtggtgaatggggtgttggaaaatgagagtgrggaagcaaggaagagccgctggcaaaaaataaactcagctttgcagtggtggtgggagagagacagtcatcaaccaagtccttgttggtcatgggccctg

SEQ ID NO: 137840 - DNA, 201 bp, Homo sapiens
ttgcatataaatagcacatataactttggaacagatggctttcctgctgcagcaaccagtgctaacttatgtttggcaactggtgtacggggcggtgtggrctggatgagaaagttggccttccgctacagacgggtaaaagagatctacaacacctacaaaaataatgttggaggcaagtgattaccaccagtacctcag

SEQ ID NO: 137841 - DNA, 201 bp, Homo sapiens
gccattactacataggataacaagtttcacaccctacataaataaatgttattattaatatataataatcaacgtgctctttaggaagtcaggaaataggttctattttcatattgtgttgatataaagactgtaatatgtattaaaataattttccatggtacagctaatagttaattacctccttagctttactgttaa

SEQ ID NO: 137842 - DNA, 201 bp, Homo sapiens
acccttcacgggagaaagaaaaggcagaggataggaatagaaagggactgagactcctacatcagcatacacagccttcgctaatggtgatgcttctatgytaaacaagccttcaaatatgaggtctaaggagtatctagttgagcccattttacaggttacaaaacttgggttaaatgctttgcccgatgggtcacagcc

SEQ ID NO: 137843 - DNA, 201 bp, Homo sapiens
gtgtgggcagtgctaggggtgggcagtgctggaggaatagccaggttgggttgggttgacctccaggctacagcagatgggcccctggcaggtgcccagcraggctccgctcccatctcccaccctttccagcccctgctctctcctaactgtacaaacatgtacgattctgacaaatgaaagacaagattttttttatta

SEQ ID NO: 137844 - DNA, 201 bp, Homo sapiens
tcaggaagtgaaagatgcccagtgtggctgagacagagtaactagggaagagcggcagggtccagatgatgaagggtcttgtagaccatggtaaagaatattttttttctaattgcagtgcgaagccattggagagttttaagcatggacatgatagaatagtgtttacacttttaaaacatcagtctggttatcaaatgg

SEQ ID NO: 137845 - DNA, 201 bp, Homo sapiens
tctcttgaccagcaccctccctttgaatacaattaggaaaaactggagtggtggctagggatttggagttgggctaacctgggtttgaattctggctctgycactcacttgggaaggccacttagctccttggtgtattatttctctgtggaatgagcataataccactcttgtgtataggatgactatgagaatgaaatg

SEQ ID NO: 137846 - DNA, 201 bp, Homo sapiens
agggggcctaagattgagcattttggtaccaacaattagaaatagggccaagaagaagagctttgaagagagaattgtatggtagagagaattccacaagrtaggtggaaaagtatgagctatcacagaaacctggagaatagtgtttcaagaaggagggagtggtatactcctgtgtcaaatgtggccaaagtcaagtaa

SEQ ID NO: 137847 - DNA, 201 bp, Homo sapiens
aggaggcaagacagcattgtatagaccttaaaaccagacagatctgtgtttgtgtttcaccttcattccttggagctgtgttactgtaacctgaccctccrtttccttatctgcaaaatgggaatgatcatacaccctgtagtatcaagttgttgtggagtataggtgaagcatgtacgggcgagcctacttcctaacata

SEQ ID NO: 137848 - DNA, 201 bp, Homo sapiens
catggtgatggaaataaaagatgaaagtccttcctatattcctgcagagtacagcacaatccacagcccatcaacacccattaaagattcagattctgatygattgcgtcgaggttcagatgggaaatcacgtggacggggccgaagaaacaataatccttcacctcccccagattctgatcttgaggtacgtcatagcca

SEQ ID NO: 137849 - DNA, 201 bp, Homo sapiens
atactcttccctgtaatgccttcttcctcctaagtcccgtaccttgtattacaatcttcacccagttgtgaaaccactgacatgggcatgattttttactkcatctttcttccttatccacttagttattgattttacctcctaatgacgcttcagatctccttatgcccggcacctgcatcaccatccctcacctggatc

SEQ ID NO: 137850 - DNA, 201 bp, Homo sapiens
tacaatcttcacccagttgtgaaaccactgacatgggcatgattttttactgcatctttcttccttatccacttagttattgattttacctcctaatgacrcttcagatctccttatgcccggcacctgcatcaccatccctcacctggatcactgaattatcctcctggccggtctcccattctcagtctcctctccagc

SEQ ID NO: 137851 - DNA, 201 bp, Homo sapiens
ccggcacctgcatcaccatccctcacctggatcactgaattatcctcctggccggtctcccattctcagtctcctctccagcaccctgccacgtggagtgygagcccccactccgttgttgaattctttacctgccactccagcctcatctctgtgttctttttctgtagactcaggtcagattggatttttattttcatt

SEQ ID NO: 137852 - DNA, 201 bp, Homo sapiens
aatttctcaagttatcctgctaatatttcatttctcttgttttcatctgtaaagaaataataagtcttaggtttttttaagttatttggagcattagagaytgaattcttattatgtcccagtgacttcagcagtttatcataattaagtgttagaattaataccattaaaatgcacatactgttattacaaatttgaccg

SEQ ID NO: 137853 - DNA, 201 bp, Homo sapiens
gtagcattacctaaatgctccttctcttccccccacaacacacaaagtgtaattaaaattttaatatgtgtaataatatatataacaaaatatattttagmcatgaaagagaactttaagaaaccaataaccaaataagcatagcaaaaaaggagccagatgtaattaatatgctggcatggaaggaaacttactatcaac

SEQ ID NO: 137854 - DNA, 201 bp, Homo sapiens
gttgtttttccaatagcaatgcgattgcagtgcactgtggattaagttactgatcctttgaattctgaccttctgtctaaaacagctttagaggttactcttttttttttttttttccgatttgggagactggaggaagaaaaaattaatactgcttgaaggaagaaaaaaattctataggttattaggtttgggggttcc

SEQ ID NO: 137855 - DNA, 201 bp, Homo sapiens
ttgtttttccaatagcaatgcgattgcagtgcactgtggattaagttactgatcctttgaattctgaccttctgtctaaaacagctttagaggttactcttttttttttttttttccgatttgggagactggaggaagaaaaaattaatactgcttgaaggaagaaaaaaattctataggttattaggtttgggggttccc

SEQ ID NO: 137856 - DNA, 201 bp, Homo sapiens
gttggtgataacagtaggaacaacccaataaaacacttaaaattcaaatgctggtacaattcatttacaacagtaccaaagaataaattataaggtgtacraaactattctattacaattatttggaaaatccttctttgtacaaaagtattctattacaattatttggaaaatccttttttttttaaccttctttcctag

SEQ ID NO: 137857 - DNA, 201 bp, Homo sapiens
tgcagagtacagcacaatccacagcccatcaacacccattaaagattcagattctgatcgattgcgtcgaggttcagatgggaaatcacgtggacggggcygaagaaacaataatccttcacctcccccagattctgatcttgaggtacgtcatagccaacacccaagtgaatagaaaggtgtcttaatagctaactggtg

SEQ ID NO: 137858 - DNA, 201 bp, Homo sapiens
gatagaatgagatcctgtcccaaagaaaaaaaatgctaccaattataaagcccttattatatcccagtccctcttttaggccttcccatccatttttctcwttaaatcctcataatcctatgaaggaatccttagacctattttacacttgagaaaactgaggcactgtaagggtgaataattcggccaaaatcacacagc

SEQ ID NO: 137859 - DNA, 201 bp, Homo sapiens
aggtgtgaggatcacctgagcctcagaggtcaaagctacagtgagctgtgatgatggcaccactgcactccagcctgggtgacagagtaagaccctgtttaaaaaaaaaaaaagtttcttcaaactataaactacatttatatatcttaaatatgacttgacttacaaaaaagaatttacatggtttttcaaaaaattatt

SEQ ID NO: 137860 - DNA, 201 bp, Homo sapiens
ttcttctctgagaagaaacaatgcttgcattaactgtgggaatgtgctgacagtgtagccaccacaggagcccaaactaagtcatgacacgggaaagatartagacagataagggtattctattacctttattccagttttcctccaggaaagtgcttcattgaacattagatgcctgggtaaggcaggtaccatcttgct

SEQ ID NO: 137861 - DNA, 201 bp, Homo sapiens
acacaccaccatgcccagctaatttttgtatttttagtagagacggggtttctccatgttagccaggctggtctcagactcctgacctcaggtgatctgcyttggccttccaaagtgctgggattacaggtgtgaaccactatgcctggccccagtaatttttattgtaggcaaaatgctaaagtcataggaggagatgac

SEQ ID NO: 137862 - DNA, 201 bp, Homo sapiens
ggaaataaaagatgaaagtccttcctatattcctgcagagtacagcacaatccacagcccatcaacacccattaaagattcagattctgatcgattgcgtygaggttcagatgggaaatcacgtggacggggccgaagaaacaataatccttcacctcccccagattctgatcttgaggtacgtcatagccaacacccaag

SEQ ID NO: 137863 - DNA, 201 bp, Homo sapiens
ctttgtgtcatcttcatgagtgtgtgggattttcaaactttcttcgagggataggttcatgatgcccacttcttttgcatcacaacaacctctagagttgyacctataaagaatgccagtagatgctgttaatgaaactaacttgaaaagctgtgtgtgtgtgcgtatgcgtgtgattagagatatagtatcttcccactt

SEQ ID NO: 137864 - DNA, 201 bp, Homo sapiens
cgggggaccacaatggaggagatgagaagatctgatttacattttactttagctaagtgtgaagaatgaatggtagtggaagaaaaatgggggtccaaatwggaggttgtagcagtgatctgaggcaccagcagtagagatggaaagaattatttggactctggattacattgcaggtagagaactggatttagaaatgat

SEQ ID NO: 137865 - DNA, 201 bp, Homo sapiens
accacaatggaggagatgagaagatctgatttacattttactttagctaagtgtgaagaatgaatggtagtggaagaaaaatgggggtccaaattggaggytgtagcagtgatctgaggcaccagcagtagagatggaaagaattatttggactctggattacattgcaggtagagaactggatttagaaatgatttgaat

SEQ ID NO: 137866 - DNA, 201 bp, Homo sapiens
tctttcgttttagctctaaggaggttgactaagaagaagaaaactcaagagtttggaagttttatgaaccacagattcttaattgatctgaatcaaatatmtgtagccttgctgccagaaaaaaagactgacagttcctgttgcagataattagctcagagctatttttgctgaggtgaagttttgagatgaaactaaacc

SEQ ID NO: 137867 - DNA, 201 bp, Homo sapiens
aggtctgcttggtccagctaagagggaagcctggctgcagttgagggccgaaattgaagccctgaccgactcctggttgacactggccctgaaagcactcycgctcattcactcccggtgaggctctctgcggggtctttgccaggaaatgggcaatgctcgtgcttgttcattttggagatttatttttcaacagtcttt

SEQ ID NO: 137868 - DNA, 201 bp, Homo sapiens
ttgcatatttttgattaaggcttcctcgttacctttagtggacaagtaggtgtcttgagtgactcatgctgagtcacctggcaggtgccacattcctttgwtatcttttcaatagtgtggtgaagttcaatttaccacccttagtttcaagtgagagaactaactgataggatcagtgaattaacatggttagtctatagc

SEQ ID NO: 137869 - DNA, 201 bp, Homo sapiens
tattgctggactttctaaaggaaaccacttaaacttgtgtgagaacattaatttttaacaaaaatcgcagaaggttgttatcacggaatgacacatctgtrggcattgaaatttaatttttatcttatactcaagcgtcttttaaaaattgtttttcatcctgcacgtattgtagaaacatacctagaaattttacgtaac

SEQ ID NO: 137870 - DNA, 201 bp, Homo sapiens
ttacatataattagtatttgttagtttacaggtcaattagtacttggcttaaaatactgattagtaagtcatggatgtgtgtgtgtgtgtgtgtgtgtgtrtatcaaatgtacgtacatcacagagattgataaacacacacatatatcatggagatagatggacagatgataggtggattgattcagcaacccaggttta

SEQ ID NO: 137871 - DNA, 201 bp, Homo sapiens
tggcattcatttttatttatttttttatttgcttgaaattttaaaataaagtatataaacatcaaaagcacatgaaatagagattttatttgtaaatatastcaatttttaagatctgtgtagtttttgagatgcataattataaatacttagctataactataattcattggcaccacatatagagcataaaatggcaat

SEQ ID NO: 137872 - DNA, 201 bp, Homo sapiens
gaatttattaaactaaataattagaaatgacttattaaaaacaatttctgttttgaggtagaattttttacattgttaaaataatgaatgtctctttttgytggaataatttcgggtcttttttttttcttttacttttagtctattgggtttaaagttagtattttataatactggagagttagactctagtcattttct

SEQ ID NO: 137873 - DNA, 201 bp, Homo sapiens
tatggatgtgcagtggttccagattaatttttgaaaaactatcttttctccattatgttgcctttgctgctttgtcaaagaccacttgactgtatttaagwggggctatttcagggctctctcttctgttccattgatccatttgtctattttttcaccaataccactctgtcttgattactacagctttatagtaagtcc

SEQ ID NO: 137874 - DNA, 201 bp, Homo sapiens
atcttttcaactttaaaaatataaggtatgatgactagttattcagagatttacctgttcaaatttaatatcagaattttacaatgatagaagaactattytagtagcccaggggaaatattctagtagccccaaaaactgaagtgtgacatgtatgcatcctctaagtgttttgctgattaatttaaagaaaacttatga

SEQ ID NO: 137875 - DNA, 201 bp, Homo sapiens
gcagagtggaatggttgcaacagagaccgtgtggcccagaaagcctaaaatatttactgtatgactcttgacaggaaaaatttaccgagccttgctctagrgtataggaactctcccctccacacacacacaaaaaaggagaattaaatgtttatagtgttggtaagttagtctccgtgccccatcatatacctgtgacct

SEQ ID NO: 137876 - DNA, 201 bp, Homo sapiens
aagctatattgtcttagcagacagattcagggtcttgccagagatcgtagctaccctggcctcagtccaatgtcattgtacatgtggtgagagcttcctcycggctaggagttcaattacctacttctgtttagggagagtagtctttcacctcacttagacttcaatatgagtgaggagggcctccaccctcccaaagca

SEQ ID NO: 137877 - DNA, 201 bp, Homo sapiens
tcatgcctgtaatcctagtgctttgggaggctgaggcaggaggactctttgaggccaggaattcaagaccagcttgggcaacatagcaagacccccatctstacaaaagatttttttaaaaaattagcctggtgtcacgtcatgtgcctgtagtcctagctgcttgagagcttgagagatatatattgcaggtcccttgaa

SEQ ID NO: 137878 - DNA, 201 bp, Homo sapiens
tttgtctatctgaagtagactatgaagagagggtagttagagataaggttgttgaaggatgactcggtgacaacacttttttcagttagctaacatcgtaragtgctaacgacatgtgcagctccaagtacctttacatgtatgttagttttattttaccccatttattcccgttttacaaatgaaaaaactgagtcatgt

SEQ ID NO: 137879 - DNA, 201 bp, Homo sapiens
gagatattctgatgtatgtattggatagactaaaaagtacaaaattggtgtgagtaaatggctttttgttcagtctgaacacaagataagcatcttccctygctccacaatcactgcccgactcttcctttgagccttttgggggttgttctttattttgtggtttctatgtaattattttagtggcttctctgagttacc

SEQ ID NO: 137880 - DNA, 201 bp, Homo sapiens
cctggacaggcaccatacagctaccagatgcaaggtctgtatatacacattgctattttccttaaccctgtaggttgatagttaacttctaaagtagaacytgatgttccatgtaaatagtaaatgatgatggcaactggattgggcttagaggcaggacacctgcttctagtttgattcatcacttacctattttctagg

SEQ ID NO: 137881 - DNA, 201 bp, Homo sapiens
aattcaagaaacattagctgtgctttttcttgtattatttcttctgtcaatactatcactgttcctatttctagaaaaactactacttaaaaactaaagaytaatatctgaaatatcaacatgtagttagtaggcagaaccttgaagatctccttaactgatccattataaaatccctacacctgtcttctaaggagacca

SEQ ID NO: 137882 - DNA, 201 bp, Homo sapiens
tcttctaactttcttttaaaggggaagcttaactttaatgtgaagttcatgatacatttggacccagttatctatatcttaagaaagactttgatttgtcrtaaagagacactatagtgatagagtgactataaaagcatgggccctggacctagcacagtgtggaatgatttagaagcatttatctttttttattctcac

SEQ ID NO: 137883 - DNA, 201 bp, Homo sapiens
tcacacaagagtgttgaaaagagtaggcacttagaaaatgagcatttgaaaaccacccagaaagtctcctataagctctcgctaagggccaaattgacgcaaaagagagttatctaagagtattctattagccaatgaaagagaccagcttagagttaaggagttaggcatcccatgacctactgaactttcaatctttgg

SEQ ID NO: 137884 - DNA, 201 bp, Homo sapiens
ggcgggtggatcacgaggtcaggagatcgagaccatcctggctaacacagtgaaaccccgtctctactaaaaatacaaaaaattagccaggcgtggtggcrggcgcctgtagtcccagctactcaggaagctgaggcaggagaacggcgtgaacctgggaggcggagcttgcagtgagcagagatcgcgccactgtgctcc

SEQ ID NO: 137885 - DNA, 201 bp, Homo sapiens
gggtggatcacgaggtcaggagatcgagaccatcctggctaacacagtgaaaccccgtctctactaaaaatacaaaaaattagccaggcgtggtggcaggmgcctgtagtcccagctactcaggaagctgaggcaggagaacggcgtgaacctgggaggcggagcttgcagtgagcagagatcgcgccactgtgctccagc

SEQ ID NO: 137886 - DNA, 201 bp, Homo sapiens
tgggcttttcttgcatataaatagcacatataactttggaacagatggctttcctgctgcagcaaccagtgctaacttatgtttggcaactggtgtacggrgcggtgtggactggatgagaaagttggccttccgctacagacgggtaaaagagatctacaacacctacaaaaataatgttggaggcaagtgattaccacc

SEQ ID NO: 137887 - DNA, 201 bp, Homo sapiens
tttgtaattccatctgcaaaactttctaaatgttatatgtgcacatgaaagcacaaataagtatttttttacacaaatgagaagtatacactttttttcayacctgctttttcagttaattcatcctggcagttattctatatcagtccatgaagctttgcatctctaatgcttttaagtgactgcatcggtattccatca

SEQ ID NO: 137888 - DNA, 201 bp, Homo sapiens
acgttgcacaataagtttcataataagttctcccttgatatctttctttacaatttgaaaagtatttgtaattccatctgcaaaactttctaaatgttatrtgtgcacatgaaagcacaaataagtatttttttacacaaatgagaagtatacactttttttcatacctgctttttcagttaattcatcctggcagttatt

SEQ ID NO: 137889 - DNA, 201 bp, Homo sapiens
gcttaaatgtggctctttatcatagggtaacttacttttggtttaaattgtatgcaatagtaattattacatattggatattcaaaagtagtaaccatacmcaatttatgggtaaacgtgattgtttttaatccatctaattttgcttcaggaaaatgaaactctttaaaagtagtaaatatgcacatggatattactttt

SEQ ID NO: 137890 - DNA, 201 bp, Homo sapiens
tttggtacatctgtcaaatggaaggcttcttgtctttaggtctatggaaatgcaggatctaaccagcccgcatagccgtctgagtggtagtagtgaatccsccagtggccccaaactcggtaactctcatataaatagtaattccatgactcccaatggcaccgaaggtgagtgtctgccttctcactatttactttgcac

SEQ ID NO: 137891 - DNA, 201 bp, Homo sapiens
gggctggcgctgggtgctctgtcctcacatgtatgtgtgcctctgctgcagcacgcgatgcccttctggaggatctccagccactcggacctcatggcccygcaccatgccttggaactggagtacctgtaacagcgctcggcactttgacagcgcacagctgctctgtgaccagggacagatccagcaggccccagtctc

SEQ ID NO: 137892 - DNA, 201 bp, Homo sapiens
catgttacaaattttccatttttggtttgggtaggaaaaaattatctgtcatatgtcagtgactgtcaaatattgcctatactatagtagagagaaagcargtcttcataagcttatcaagggtttatgttaacgtttaggacccacaatttataagtgagagcttattatgattatgttcatggtaatttgctagtttta

SEQ ID NO: 137893 - DNA, 201 bp, Homo sapiens
attcaataagtatctagagcctgtttttcaaatttttgaaattgatcatttcagacagttcatatagttgctatgggctgtccatccacaaaacatccacrgtcaacattgttgcctgttttgaatttgatctatagtgactgacttgcttttgacccatagtaaataactgcttcataaatagaaacttcaactgttagt

SEQ ID NO: 137894 - DNA, 201 bp, Homo sapiens
tgttgcctgttttgaatttgatctatagtgactgacttgcttttgacccatagtaaataactgcttcataaatagaaacttcaactgttagtatattaatrgtgataaagcaacttccacatagtccaagaaacaactgaatgatataaggataaggaagttagtacacttagggttagtgtgtagatggtaagatggtaa

SEQ ID NO: 137895 - DNA, 201 bp, Homo sapiens
gtacacttagggttagtgtgtagatggtaagatggtaaaggaataattggaagtaaacattttgaaggtggggaaaactgcagggagaaggatatatatakatatatatatatatatatatatattcactgcagtaaaaaaataaaagtgtgtatgtgtgtgtgtgtatgtgtgtatacatgtagtatatctatactgtat

SEQ ID NO: 137896 - DNA, 201 bp, Homo sapiens
ataaataaaagagcaacgttgcacaataagtttcataataagttctcccttgatatctttctttacaatttgaaaagtatttgtaattccatctgcaaaaytttctaaatgttatatgtgcacatgaaagcacaaataagtatttttttacacaaatgagaagtatacactttttttcatacctgctttttcagttaattc

SEQ ID NO: 137897 - DNA, 201 bp, Homo sapiens
ttaataaattattttcagagaactatttaaaataaatctcttgtttatggcaaagggagaaaaaatggcaagcatccattttctgcacagtgagaaaggcktcattaaatatgttcattttatatgtacattctaaaacttgctgaaatccaagatgaagccgagaacctgattaataatgcccaatttcaagcttattta

SEQ ID NO: 137898 - DNA, 201 bp, Homo sapiens
cactgtcacattaggttacccaaacttcacattttctatcatttatttttgttcactaggaaaagaaagctgttttgagagaataattcaaaggtttggargaaaagtggtgtatgttgttataggagatggtgtagaagaagaacaaggagcaaaaaaggtgagcattcctagatggtgcatcttgtctcatttgttttt

SEQ ID NO: 137899 - DNA, 201 bp, Homo sapiens
ggccttgttaataaattattttcagagaactatttaaaataaatctcttgtttatggcaaagggagaaaaaatggcaagcatccattttctgcacagtgasaaaggcgtcattaaatatgttcattttatatgtacattctaaaacttgctgaaatccaagatgaagccgagaacctgattaataatgcccaatttcaagc

SEQ ID NO: 137900 - DNA, 201 bp, Homo sapiens
agttcccaggtgggagcagttagggatacaagttatcatatttaaagttattggagtttctctactttaagtcttttctgatttttgatatgacagtactmattgagaattgagtgtaatgtccaatgtttcccagtcatacctggctggggttgggtaccactttccacctgtgcttcccccaacaccccatctgagaat

SEQ ID NO: 137901 - DNA, 201 bp, Homo sapiens
aatactcataagtacttcatgaacaagagctattatttattgcttactttgggggttcagaggaggaagcaggaaaccatgcagactttgttattccaggmagcaaagagggagtgggaaacagagaattacaaatggcagaaatcataagcaaaaagggtaaatagtgataaagtatatttaggggattagacttgagga

SEQ ID NO: 137902 - DNA, 201 bp, Homo sapiens
gaatatccttttatcctgtaatgagttcccaggtgggagcagttagggatacaagttatcatatttaaagttattggagtttctctactttaagtcttttstgatttttgatatgacagtactcattgagaattgagtgtaatgtccaatgtttcccagtcatacctggctggggttgggtaccactttccacctgtgctt

SEQ ID NO: 137903 - DNA, 201 bp, Homo sapiens
atttattgcttactttgggggttcagaggaggaagcaggaaaccatgcagactttgttattccaggcagcaaagagggagtgggaaacagagaattacaartggcagaaatcataagcaaaaagggtaaatagtgataaagtatatttaggggattagacttgaggaagaatagtagcagaaaatgtgttggatcagtaat

SEQ ID NO: 137904 - DNA, 201 bp, Homo sapiens
taatcagtaaagcatgctgctgcttgaaaccactgtgtctgaagtttcaaaggagcagaaaaatgaaaatgtaaacagagagtcctaaaggtagtagctgygtagtaaacatcttctttaatcagcactcagcaaaagcatatattatgaggcattcagttaactatgtgttaaatgtttgagctctacttgctgataaaa

SEQ ID NO: 137905 - DNA, 201 bp, Homo sapiens
ttattaacttctctgattttcattatttcataatttttttctgattgcttttgagttaacttgcttttctttttatagtttcctaagagtggtgcttagaygattgatttttagatctttcttttctaatatatgtgttcagtgctgttaattttctcctgagcgctgtttttgtggcatttcacagaattcgatgggttc

SEQ ID NO: 137906 - DNA, 201 bp, Homo sapiens
ttacaggtgtgagccactgcacccggccagaaatatttataagtaaaaagacatcatacacaaaactccaacagaatgtgaggtatatatgcgtatgcatmcacacacacacacacacacacacaagaaatcaaggataaagctaataacatgttggagaatttggatgaaggatatctgggaagtttttgtgctgttctt

SEQ ID NO: 137907 - DNA, 201 bp, Homo sapiens
ttggttagcctgcctagaggtttatcaattttattgatattctcaaacagccaatttcattgattttctctgttgttttcctgtttttaattttattaacktctctgattttcattatttcataatttttttctgattgcttttgagttaacttgcttttctttttatagtttcctaagagtggtgcttagacgattgatt

SEQ ID NO: 137908 - DNA, 201 bp, Homo sapiens
ttgaagcaaacagttgacaatttttaaccttttcattttatgtttttgtactctgcagactgaaaagacaaagtttatcttggccttactgtataaaggtrtgctgtgtccaccgttgtgtacagaatttttcttcattaattttgtgtttaagttaataaaatttatttgtgatgtactgtaagctccctgactgtcggg

SEQ ID NO: 137909 - DNA, 201 bp, Homo sapiens
tcagggctctctcttctgttccattgatccatttgtctattttttcaccaataccactctgtcttgattactacagctttatagtaagtcctaaagtcagrcagtgtctgtcttccaacttttttcttctccttcagcattgtgttggctattctgagtcttttatctctccatataatctttagaatcaatttgtcagta

SEQ ID NO: 137910 - DNA, 201 bp, Homo sapiens
atgccaacaatgaatttctccattattttctgtcccgcaatgcacataaccatcagagtgtttttctgaatgttaatctttcataactagttttctgtccygcaatgcacataaccatcagagtgtttttctgaatgttaatccttcataactagttcagctatcacctcccttcagatattttcccagttcactaggcaa

SEQ ID NO: 137911 - DNA, 201 bp, Homo sapiens
ttttctctcatacccatctagtatgccaacaatgaatttctccattattttctgtcccgcaatgcacataaccatcagagtgtttttctgaatgttaatcyttcataactagttttctgtcccgcaatgcacataaccatcagagtgtttttctgaatgttaatccttcataactagttcagctatcacctcccttcagat

SEQ ID NO: 137912 - DNA, 201 bp, Homo sapiens
atgatgagaaatcagtggcatttgtttgtggagacagagaacaggggctgatgtgaaagctactgagaaagtagtctgggtaggatttgcagatctattcmgtgtaactattcagtgagccagtctcttagtttctggcttgagcaataaggtagagatagaaaacccaggagaatggtctggctctggaaggaagatgct

SEQ ID NO: 137913 - DNA, 201 bp, Homo sapiens
actcaacgccttgattgtttcaacactatctttttattgtttaatgtctgtgtctcacagtgatttgggctagaatggatcttaaaaatatggatattcayttttcattttcaacaaaaaacaaaacatgaacacttaagatagtgtaaagcttagtatgtttaatcataggccctattaagaactttctatatgcccagc

SEQ ID NO: 137914 - DNA, 201 bp, Homo sapiens
gatatgtaagagataagcagcagtattttgacagacaattcttgtgtggtttgatttggtaggactatccgtcttatcccagttttggccagggtcagtasgcacagtattataacagctcaccgtatccagcacattatatgaccagcagcaacaccagcccaacgacaccatccaccaatgccacttaccagcttcaag

SEQ ID NO: 137915 - DNA, 201 bp, Homo sapiens
acatgacaacagattctagtgtcgaagataaaccaaataccaattctgccttttctaaatgctattttcctgtacccacattattccacaagcctggtatratcgtatttcttttcattttgttttaggtagcagttttacaacatcatcaggaatatatacaggaaataattcactcacaaattcctctggatttaatag

SEQ ID NO: 137916 - DNA, 201 bp, Homo sapiens
ggagaatattgagtgccatgccaggaagaaagagagagcttgagctttatagctgtgacgaagacattccgaatggcagaagagtgagtgtgtgtgtgtgygcgcgcacgtgtgcacgtgtgtgtgtgtgtttgtgtgtatgtgtaagatgaggagcatgcacagagatggggtttagacaccaaagatgatgatgaaggg

SEQ ID NO: 137917 - DNA, 201 bp, Homo sapiens
aatattgagtgccatgccaggaagaaagagagagcttgagctttatagctgtgacgaagacattccgaatggcagaagagtgagtgtgtgtgtgtgtgcgygcacgtgtgcacgtgtgtgtgtgtgtttgtgtgtatgtgtaagatgaggagcatgcacagagatggggtttagacaccaaagatgatgatgaagggctcc

SEQ ID NO: 137918 - DNA, 201 bp, Homo sapiens
ttctcttattgacactttgtaaggcttgagtggaccttgaagtttaaaacaagatctgtaaacttttgaattaccatttaaaatatttgccattcaaaatmagtatatgaattgttaatgactcatgggtttatatttattgggaggaggttttgaacacattagagcatagcatttgcaagaattcaataaattcagagc

SEQ ID NO: 137919 - DNA, 201 bp, Homo sapiens
atcaggtccctggtgatcaaagtattcaattacagtacctgataaaatcatgaatatcctggtggttattttatgtacatcctcttctcttcaacagtgarccttttaaaaaactgggttcattgggaaaagggagtctttattccttagtgtatagatgggtatgtttgaacaatggtgaaaagcagtgttattggggcc

SEQ ID NO: 137920 - DNA, 201 bp, Homo sapiens
ggagaccttgcccttgagcatcaggaagacctgctggtgtcgacacccacttacttcctgcttccccacatctttctgttctatccttttgactctgaccraataacagattttttccacaaccccaggaaatgattttatatcacatcatgtagattttgagagataatttatcaataagtaattcagtaaatatgtaaa

SEQ ID NO: 137921 - DNA, 201 bp, Homo sapiens
tcatttacgaagtagaatttatagtgggcagtgaccaatgggtataggggtaagtgaggcagagaaagaagttaagagccaggaaatgcaagaggagcacrgttgacaaaggaagacaggaacctcagttttgggcatgttgactgtgaggcagcatctacctgcagatgccaagtatattagggtttggagctcagagga

SEQ ID NO: 137922 - DNA, 201 bp, Homo sapiens
attagacctaggtatgattgtttaaaaaaaaaaatgtaggaaatagtctcctgtacattgacatctagttttcatttctagagtagtaaaagtggccttgytaataaattattttcagagaactatttaaaataaatctcttgtttatggcaaagggagaaaaaatggcaagcatccattttctgcacagtgagaaaggcg

SEQ ID NO: 137923 - DNA, 201 bp, Homo sapiens
cctctttcgttaatggtcaattgaaatctattctgtcatccttattctctttgccaatgtagtccaagggctttcatcagtaatttaactctataatttgyatcataaaaagtacctccttcaaagagaagaagttagaaatacctttgtttcgtaaaagaacaacctcatattgaaaggatctcttgcaggagtttgtgt

SEQ ID NO: 137924 - DNA, 201 bp, Homo sapiens
cgctgggtgctctgtcctcacatgtatgtgtgcctctgctgcagcacgcgatgcccttctggaggatctccagccactcggacctcatggccctgcaccaygccttggaactggagtacctgtaacagcgctcggcactttgacagcgcacagctgctctgtgaccagggacagatccagcaggccccagtctcgcatcag

SEQ ID NO: 137925 - DNA, 201 bp, Homo sapiens
gttctccacataaatgggcaacaaaataaaatgagcagcataaagtttaacctagtcactagaataaagcaaaatggcatgtgagaatgtactcccttccrctccttcctggggacctagaaaaattcctggtggtttctgtagtgggtaaggtcccctgctaataccatgtggtctccatgttaggactacccaaagttt

SEQ ID NO: 137926 - DNA, 201 bp, Homo sapiens
gatgttagctggcatttcaatgatactgaaaatgggggtcagcatgggagtggatttccaaaaaagctggcagggctggcgctgggtgctctgtcctcacrtgtatgtgtgcctctgctgcagcacgcgatgcccttctggaggatctccagccactcggacctcatggccctgcaccatgccttggaactggagtacctg

SEQ ID NO: 137927 - DNA, 201 bp, Homo sapiens
tcttcgtctataaacgggatgtaacagcatccacctcctggggtggttgtgaggaatcggtgagttctaataggcaaaatgctttatttgggctggctcartgtaagcactcaaaaatgtttaagtattattatttgttcttgtcacttctattttgcttctaacactttttaatataattataaaataatccctgagatt

SEQ ID NO: 137928 - DNA, 201 bp, Homo sapiens
aggctgtctgcctgcctctgctgtaggtgatgctctgagctttgcactggttcattttcctcctgccttccgggacaattcaatgacagcaacaatgtgamtagaccgtgaactcaatgcaggcagtgcatacatgcgcctggggccccaaggaaacacagaccctcacgtgaattcattagggtaggtgaaatggctgtt

SEQ ID NO: 137929 - DNA, 201 bp, Homo sapiens
tttgcctttgctttgtggcgttctaaacttcagtgaaatccatctcgtagtgttggcactgaagtctccattgaattagctatcaaagtggagccccttaytccagatgatctttagctcagctcaagaaccagaaataccccacacagataggctctgagaagcttcagctctgaatgcttgaagagaatgattactttc

SEQ ID NO: 137930 - DNA, 201 bp, Homo sapiens
aaaaaataaaagcacaaggaagaatgtgtgtcagagatgatatggcctgcaaagatagaaatactccctgtccctttagagagaaaggctgtctgcctgcmtctgctgtaggtgatgctctgagctttgcactggttcattttcctcctgccttccgggacaattcaatgacagcaacaatgtgactagaccgtgaactca

SEQ ID NO: 137931 - DNA, 201 bp, Homo sapiens
tgaaaacaagactaagggggacttgcttagtactggtctaatggagaggtcaattacctgctatcaattattagggagctcaggtttccagaagataaacycagtacaaagagtaacagtcaaggaaaagcttattggacagatgagacttgggtgaggccttgaaggatggaaaatatggagtgagggagggaagcatta

SEQ ID NO: 137932 - DNA, 201 bp, Homo sapiens
gtctggatagatccacagacagatatgcattctttttcaagtgctgctaatggcttgacaaaattagctttcagacaatttatgtgagtttgtcactaaartactagaactacccatgtcccatgtataaataaacattttcacatttagaaataagaggaatacttcttttagtgacctatagatgtcaaatatcaggca

SEQ ID NO: 137933 - DNA, 201 bp, Homo sapiens
agatcgcttgatcccaggagtttgagactagcctggcaacgtggcggaaccacatctgtataaaaattacaaaaaatttaaaaattagctggggatggtgrtgctcacttatagactcagctacatgggaggctaaggtggaaggatcacctaagcccaggaggtcaaggctgcagtgaactgtgattatgccacagtatt

SEQ ID NO: 137934 - DNA, 201 bp, Homo sapiens
ctttagtcacttaccacatggattgaaattatcaagcaacagtacagttctggctcccactccagcctagatgaagcccttcaaaggcatgagtcagacayggtttatccatctctatgtgaggcagacaggataaatatagaaaatgagcttaaggaacttaggtcagaatgaaaacaagactaagggggacttgcttag

SEQ ID NO: 137935 - DNA, 201 bp, Homo sapiens
gttgggcagtctcctctttacagagaaaaacacgcaagtaaaaacatggttcctgcaaatttactaattcatggacagagggtctttatcacggagcctasacttgatgtaccaaatcaaattgtcagctagttggaagccagtttcttcaaatctgttccatcaattggcttcttccttgactactcctctccctctgta

SEQ ID NO: 137936 - DNA, 201 bp, Homo sapiens
cacttctggtggcccgggcaggcagatcgcttgatcccaggagtttgagactagcctggcaacgtggcggaaccacatctgtataaaaattacaaaaaatwtaaaaattagctggggatggtggtgctcacttatagactcagctacatgggaggctaaggtggaaggatcacctaagcccaggaggtcaaggctgcagtg

SEQ ID NO: 137937 - DNA, 201 bp, Homo sapiens
aactttctttatataatttaaatctatagtgattataatctgatttctaagataatcctttatacatcatgtagtttgaaagaagccagtcagccgagtgyggtgggacggacacgcttgtaatcccagctactcaagaggctgaggcacgagagtcgcttgaacctgggaggcagaggttgctgtgagccaagatcatgc

SEQ ID NO: 137938 - DNA, 201 bp, Homo sapiens
gaagtttttcttacacaagcaagacttgttttcattaatatacctgtgatatgccaatgtctgagctatgagagtgagtagccttcttaggagggcagaayctggaccatgcgtcagtgttctgttaggatcctgacagctggactaacaaggttaacatcctagcggcatgctccgatggtatgtggatgcgaagttctt

SEQ ID NO: 137939 - DNA, 201 bp, Homo sapiens
tttatattagatgtgtgctgagtttttttaatgttctgaatgataattagcttacacattaattcagcctttagtcttttatcttcatactttgttatatrccattttaaatatgtgtaatattttaatgataaaattgtacaatataatttggcattgtcagcaaacactaatgcattgccctgtgtggtatatgaaggt

SEQ ID NO: 137940 - DNA, 201 bp, Homo sapiens
gtataagttaactgaagttcataaattagcctcttttaaacttcaaaatttcaaccccactctcacccctgcaaaagaaaaagacatttaaaaaggttaaytacaagaaaatatttctttacaaaatgcattgacatatagtttgtagttaaagatgaatctatagacatgtaatggcattaaacagaaactaatatttgt

SEQ ID NO: 137941 - DNA, 201 bp, Homo sapiens
ttttggaaatgttgagaggtaggtcaatagatagagagtggacagaaagacatgttgttgtaatgaacaacgataaaataatattggagcagtccctacaycacagactaaaaagagctactttgcgctgaatgtcctcatgctcactctattctggacactagctaggcactgaggataaaatatgaaacacattctttg

SEQ ID NO: 137942 - DNA, 201 bp, Homo sapiens
aagattgtttttaaaaaactattatatagagacctttttaatggagtttttcactgggcatggtggctcatgcctataatcccagcacttctggtggcccrggcaggcagatcgcttgatcccaggagtttgagactagcctggcaacgtggcggaaccacatctgtataaaaattacaaaaaatttaaaaattagctggg

SEQ ID NO: 137943 - DNA, 201 bp, Homo sapiens
gaacagaaagatgcatcagagatattcagaaacttttaggagcaaaatgttcactagtggtatctcttaaatgacgataccacaaatccctgctgtaggargagaaaggtgccgaatggtgggacagagggagcttcagcagtgttggaggttgcagcccattgtgagtatgaggtggcattaatgaccattcaagaaaaa

SEQ ID NO: 137944 - DNA, 201 bp, Homo sapiens
agtggttttaggaaaatatacattaagcttaaaaaagtaatctgtgataaagcatttgagatttgtactttctgacgtaaaatgaaattgaagaatagctrttgcagcttgcactgatgtgcagaattgccccttaattgctttgccactcttctcatatttattttttagttcttggcattttatgttctagattttttt

SEQ ID NO: 137945 - DNA, 201 bp, Homo sapiens
gttttattgctctcacttagagaagaaaataacacaaattctcactccctctttgtgtataatgttgtttgttctgctaaagagattggggttcaaactastaaggaaagacaataaatcagggcagaggtttgttaaagggtacgtggaagaggcacagctctgcggccatcacacctcatgcatccctgcctcattatg

SEQ ID NO: 137946 - DNA, 201 bp, Homo sapiens
tgaatttttgttttaaacagatgtgatgttaagatgttagctggcatttcaatgatactgaaaatgggggtcagcatgggagtggatttccaaaaaagctrgcagggctggcgctgggtgctctgtcctcacatgtatgtgtgcctctgctgcagcacgcgatgcccttctggaggatctccagccactcggacctcatgg

SEQ ID NO: 137947 - DNA, 201 bp, Homo sapiens
aaaacaaaaccattaaaattaagttgttatttaactggttaagcctcagctctgtggaaaacccagctttccataatagcttagttctagtgattctagaytattaaaggtaatgaacatctttagtcatattttaatctccagtatctagtattatgtctaaaatatacaaatgtttgttagaagtggagaggtctatgt

SEQ ID NO: 137948 - DNA, 201 bp, Homo sapiens
atccgtcttatcccagttttggccagggtcagtacgcacagtattataacagctcaccgtatccagcacattatatgaccagcagcaacaccagcccaacracaccatccaccaatgccacttaccagcttcaagaaccgccatctggcatcaccagccaagcagttacagatcccacagcaggtaattatgtgaatatta

SEQ ID NO: 137949 - DNA, 201 bp, Homo sapiens
gtccagtattcttaggggaggattgagtttgaatttttgttttaaacagatgtgatgttaagatgttagctggcatttcaatgatactgaaaatgggggtsagcatgggagtggatttccaaaaaagctggcagggctggcgctgggtgctctgtcctcacatgtatgtgtgcctctgctgcagcacgcgatgcccttctg

SEQ ID NO: 137950 - DNA, 201 bp, Homo sapiens
gagactatttcaaaaaaataaaataaagagtaaaatttgtattcaacacgtatggcatactaaagaaaaactggaagggaatacattttttaaaagccacsacgatatattttcaagtttaaaagtgatcagtctacaaaatgaatgatagtatataatcctgatttaatgtctatgacatattaaaggtaatatttacaa

SEQ ID NO: 137951 - DNA, 201 bp, Homo sapiens
aatgctaaagaatgcataaaattagtaatttagtttgtatgatatcaacagttaagaatggctactcaaaacggagaatggcttagaactgtcagacctcrttgttgtacatacacctaaattacagagctcacaggagtggcttttaaagaaaactacaaaaagccaaaatgttgttgcttggtctttaaatttttctga

SEQ ID NO: 137952 - DNA, 201 bp, Homo sapiens
attatgtgaatattattagtcctgcaggtgatattttcaatggtttcaatgcatttttctacagtcatatattcatgcagtggttgcacaattttggcagyttttggcaaggactaaatataagtcaagcagcatgactgtggcattcatttttatttatttttttatttgcttgaaattttaaaataaagtatataaaca

SEQ ID NO: 137953 - DNA, 201 bp, Homo sapiens
atggtagtgtgagcctgtaatcccagttactctggaggctgaggcaggagaatcccttgaacccgggaggcggaggttgcagtaagccgagatcatgccaytgcactccagcctggtgacggagtgagactccatctcaaaaaaaaaaaagaaaagaaatgtcaagtcaaacagcctcttgcacatgaaataggcaaaggt

SEQ ID NO: 137954 - DNA, 201 bp, Homo sapiens
gagagtgaggaagcaaggaagagccgctggcaaaaaataaactcagctttgcagtggtggtgggagagagacagtcatcaaccaagtccttgttggtcatrggccctgcagtcacatctctgagtgctaagaatgggtggagaaagaggtctccaccagtcattgaagcatcaaattgtttagttcagaaaattagggaag

SEQ ID NO: 137955 - DNA, 201 bp, Homo sapiens
caggaatatatacaggaaataattcactcacaaattcctctggatttaatagttcacagcaggtaatttaaaaagccagtttaacttctgaaaaatatctktaaatgcaacatgattttcttatgtaaagaaagatctgtttataagtgagagctttcctaaggcttttagtagttttcttttaaaattcactttagcagt

SEQ ID NO: 137956 - DNA, 201 bp, Homo sapiens
tacatctaggactttttactaatcagagataaaggcaagaatttataacaataaacatttctaacttatgaaatccatcatattttgtttcttcatctggktgttagttatacccatgcatttagtttatagaaattcattgagctgtaatatttgtttaataaaaagttaatttttaaaaactaatatttgaggaatata

SEQ ID NO: 137957 - DNA, 201 bp, Homo sapiens
tgtgagatatcattgagattgtctgtaaatcactctgaccaacctgtggtacatagtaagaactcaaatgattgttgtcaattttactgctctcattgcartggtgatgtgattactattattttcattattatcattatggtccagctttctggaatagttccagattaggtagcattacctaaatgctccttctcttcc

SEQ ID NO: 137958 - DNA, 201 bp, Homo sapiens
cttttgtggtgagttgtttggttttcagattggtttaattttacctagtattgcatcatagaaaagcaaaaatatgaagaatgtgtataatcttacataawatttgtttgcaagtctgagctctttagttaatgtgtacttgtatgcccccgtgtgaattcagaaaaggctcagaaacccaaacatacttacagttacact

SEQ ID NO: 137959 - DNA, 201 bp, Homo sapiens
gaaagctgcaatgatttttcttgtaaagcaaagagaagattatcccttggtttaattcagtctttaaagttgcaataatattttcttactttaaaacttargttatcatctataaattattttaatatgtgttatttatgtttatttttagctaggaaaaaattctttctgtaaaatatcagttacgccaatgttaagaaa

SEQ ID NO: 137960 - DNA, 201 bp, Homo sapiens
ctggaatatgggcatgagatctactcccacaatactgttgtgagatatcattgagattgtctgtaaatcactctgaccaacctgtggtacatagtaagaaytcaaatgattgttgtcaattttactgctctcattgcagtggtgatgtgattactattattttcattattatcattatggtccagctttctggaatagttc

SEQ ID NO: 137961 - DNA, 201 bp, Homo sapiens
tggacagacaggatttctcagctatggcacaagcttcagtacccctcaacctggacaggcaccatacagctaccagatgcaaggtctgtatatacacattkctattttccttaaccctgtaggttgatagttaacttctaaagtagaacctgatgttccatgtaaatagtaaatgatgatggcaactggattgggcttaga

SEQ ID NO: 137962 - DNA, 201 bp, Homo sapiens
tttacttatttcaatattttttattttattttatttttgagatagggtcttgctctgtcatccaggctggagtgcagtggcaccatctcagctcactgcamcctctgcctcccaggttcaagcaattctgcctcagcatcccaagtagctgggattacagatacacaccaccatgcgtggctaatttttgtacttttagta

SEQ ID NO: 137963 - DNA, 201 bp, Homo sapiens
ttacctgttcaaatttaatatcagaattttacaatgatagaagaactattctagtagcccaggggaaatattctagtagccccaaaaactgaagtgtgacrtgtatgcatcctctaagtgttttgctgattaatttaaagaaaacttatgatgatcagctctttggttctatcagacttagaaagactggagtaaaggtac

SEQ ID NO: 137964 - DNA, 201 bp, Homo sapiens
atgcaacaagctacagcctatgccacgtacccacagccaggacagccgtacggcatttcctcatatggtgagtaacctgcaactgtagtggtggcgttatygcatgggcatgcgtgtattaacatgtttgagtggtacttaaagacccaatctttggccaatttagaacgtgttgtcaccttctgtgtctaaattcttagt

SEQ ID NO: 137965 - DNA, 201 bp, Homo sapiens
tgagtaacctgcaactgtagtggtggcgttatcgcatgggcatgcgtgtattaacatgtttgagtggtacttaaagacccaatctttggccaatttagaaygtgttgtcaccttctgtgtctaaattcttagtatgattgtttctaaagagcattataagaactggtagctccttatcttgaggtcagaggtagcgaaaag

SEQ ID NO: 137966 - DNA, 201 bp, Homo sapiens
cccaagttcatttcagtgccagtagatgtcatcagggtggcttgtagggagaggctgactactcactgctaatgtccaacacttgaatttttagatagaarccacggtgcactgtggaatgtagcactgctctctgagtatggcatgggctgtttgatgcccgtacagtgtcatgtgaatcttaagatcagctccctgagc

SEQ ID NO: 137967 - DNA, 201 bp, Homo sapiens
cagcctatgccacgtacccacagccaggacagccgtacggcatttcctcatatggtgagtaacctgcaactgtagtggtggcgttatcgcatgggcatgcrtgtattaacatgtttgagtggtacttaaagacccaatctttggccaatttagaacgtgttgtcaccttctgtgtctaaattcttagtatgattgtttcta

SEQ ID NO: 137968 - DNA, 201 bp, Homo sapiens
tacctgcatatcccccaagttcatttcagtgccagtagatgtcatcagggtggcttgtagggagaggctgactactcactgctaatgtccaacacttgaakttttagatagaaaccacggtgcactgtggaatgtagcactgctctctgagtatggcatgggctgtttgatgcccgtacagtgtcatgtgaatcttaagat

SEQ ID NO: 137969 - DNA, 201 bp, Homo sapiens
acatcttctaatttttttacccctgatcacaggtgcaaacatctcaagccagttcagatgttgctgtttcctcaagttgcaggtaaggatattgttgatayttgacatttttggagattacctttctgtgacccatatctatttttgtctagtgtttcttaattatttctattaatagtaacagcctctgttggaaattac

SEQ ID NO: 137970 - DNA, 201 bp, Homo sapiens
gcttatcaagggtttatgttaacgtttaggacccacaatttataagtgagagcttattatgattatgttcatggtaatttgctagttttacagatttggggttttttttttttttttttttttgcatgcctccagtatcccattacaccaaaaaatggtagacagactctaccaaacacattccaaagaggtatgtttatg

SEQ ID NO: 137971 - DNA, 201 bp, Homo sapiens
gcttactgtaacagtttgagaaaagttgtgagatgagcttaggtgctgctggggagggcctgcagctcaccaaggctgctgccttccctgcgcgttgcagygtgaattatttgtaacacacaggctggctcctagtccagcaggcagtactgtcctttgtgggtgaacttgctttattaaaacagcccacttattttatgg

SEQ ID NO: 137972 - DNA, 201 bp, Homo sapiens
cttatcaagggtttatgttaacgtttaggacccacaatttataagtgagagcttattatgattatgttcatggtaatttgctagttttacagatttggggttttttttttttttttttttttgcatgcctccagtatcccattacaccaaaaaatggtagacagactctaccaaacacattccaaagaggtatgtttatgt

SEQ ID NO: 137973 - DNA, 201 bp, Homo sapiens
tgcacctagttgcgggagtctgttgacctttgagtgtctttttaatacatgttttttaatatagcaatttctacaatgtctaaaattattttcaaaattcyctcagttcttttaatccttaatgaataacagtgattatttgcttttatcaatttcatcttatagctattaaaatgtatttgaatcctggatgagaatata

SEQ ID NO: 137974 - DNA, 201 bp, Homo sapiens
ggagtcacctctgcccaaactacacttagaggaatgtaggaaagtaggttccctaaaaagagatgacttctgtaaccaaaccaaataaatacttgtcaaakgaatggtactatgtgaaagatactttgtatactataaatctggaggctggtattcatagtactttttaaatgttaattacttgcaaagccgaagaaatat

SEQ ID NO: 137975 - DNA, 201 bp, Homo sapiens
ggcagcaaagagggagtgggaaacagagaattacaaatggcagaaatcataagcaaaaagggtaaatagtgataaagtatatttaggggattagacttgargaagaatagtagcagaaaatgtgttggatcagtaataaaaagactgcatctttattcaacttttatggtttacactgctatctcacacttattatccaat

SEQ ID NO: 137976 - DNA, 201 bp, Homo sapiens
aggtctccttgaggagaagtggatcctaaaagtgggaaagaggcaagtgaagtgccctgcccagagcagagctacagaattgtatggttctgggcctgcgyccatccacagccttgccattacccgtccaccaaaagctaaagctaagtacagaaactgagagttagcatctagaaactttcatagtcagtcaataataaa

SEQ ID NO: 137977 - DNA, 201 bp, Homo sapiens
agacaaaacataatgtaagtacaagtcaaatggaatgacagctgtcattgtcaaagctggtctcaagaatacatagacattacttaaagttagcacattgytatcttgcaaatagatctttaaagtgcttgagaatagttctcacataatttaaacattttcctaatatcttgtctttactacagttcagttcaacgaatc

SEQ ID NO: 137978 - DNA, 201 bp, Homo sapiens
tttgttttttcagtcctcagtattctcataactggatcatttaaacaggttccatttatgtgaaacgtgatgaatatgtgcagtactctaagcactgaacrgggtaaagtagaattcaataaatatggagtgatctttctgaatagtagtgtgcacaaactcaagggccacaagtggtgttcatagaaggtagaatttggg

SEQ ID NO: 137979 - DNA, 201 bp, Homo sapiens
ggcctagtttaccttcagtgcctctgagttccactaaaatcataatcactgaccctaattttaaactagataatttcatgaatacccataaatacagaatrtatcccagtcacaaacctgcgtgagtctggttggtgctggtagaaacccacacgtgacttcaggtctcctcatgctcaatgtgaagcagcatttgccatt

SEQ ID NO: 137980 - DNA, 201 bp, Homo sapiens
caaaatatttttgtgcatatttgtgataaaacgtctgtgaatgaagtcttttggggtacagattcatttcctatttatcagatgcctagctgtgattaggracgtacaagtagaattcaacaaactcttgctttaaactcgagggtggtaatagtctcaaatttcagcattatcaaccattaggaaaagtgatctatatat

SEQ ID NO: 137981 - DNA, 201 bp, Homo sapiens
catcccagcattggcgaaagtcctgctgtatgggttaggaattgtatttccaatagaaaatatttacagtgcaactaaaataggtgagctgcttttctttyctttttaacaatcagctcttttccttcaggataataaaaacgaaaggcaataaatgaaactttttttccagaatgctacataggtcaaaaaaaaaataca

SEQ ID NO: 137982 - DNA, 201 bp, Homo sapiens
tattttaactgaaggagctgtagtgataaatagcttggattcttgagccagacagcatgagtttgaattatgaccctgccacttacccttcctgtgacttygaacaagttcttaaccctctgtttccctttccttgtctataaatggggatagtaatagcacttagctcattgggctagtttgaggattagatatagtaaa

SEQ ID NO: 137983 - DNA, 201 bp, Homo sapiens
tactgatacttaaactccttgtgaatgagcaatttcttataaatccaagagtaaatgagttagtttttctttacagtaatttgtaaactgtaattctcctraaacctatgaaatttcatagaatttcatagatttcaggtgtattaaaaagggacaatttcagaatgctaaggagtatgaatcatcatacacaaaatttga

SEQ ID NO: 137984 - DNA, 201 bp, Homo sapiens
tgtaacttctgagttcttccccttggtttattcacgtgtatcacaaacattcccacttcttaaactagatttttagattgaggtttaaataacaacaactrcaaaaacctaaaacaaaacaaaaaaaacaacgttagatgttcatttaaaacgttttccatatggtaaagccattttaaggtcaatatgaagaataactga

SEQ ID NO: 137985 - DNA, 201 bp, Homo sapiens
aattcttagtatgattgtttctaaagagcattataagaactggtagctccttatcttgaggtcagaggtagcgaaaagattatgtggttcgtatgccttcytgctctcatttttctcgatttacatctcaaccctgaatttgccatttgagcactgggctctggaatccaaaatatttttgtgcatatttgtgataaaacg

SEQ ID NO: 137986 - DNA, 201 bp, Homo sapiens
ttgtatttccaatagaaaatatttacagtgcaactaaaataggtgagctgcttttcttttctttttaacaatcagctcttttccttcaggataataaaaaygaaaggcaataaatgaaactttttttccagaatgctacataggtcaaaaaaaaaatacaagaataatttaaccaatttgcaaaactggatttagacgtaa

SEQ ID NO: 137987 - DNA, 201 bp, Homo sapiens
ttgatatatgaagaaaaaactttttaaaatcaagttaaaatatgttgccagaattgcctatgtttgagttcagcttatatatagggggaaaaagaagtccsactgcaaaacagtactttcccccaccaccccaattgcaatgctgtgattgactagattccattttttaataaatgagtccttgggaagagagtatttaac

SEQ ID NO: 137988 - DNA, 201 bp, Homo sapiens
taaagacctggtgattttaacatctcagttttggtttaagaacgtgtttttttccttgttcttaatatgccaaaataagccatcaagccagagtaatttaytaactgttcaatgttagcttttttcacatttgacttgtactcgtatgagactttagaaattttaacagtgttaacgtattagctattataataggaaaat

SEQ ID NO: 137989 - DNA, 201 bp, Homo sapiens
ctccaggcaccacattatttttttgcttaagaatcctattctataaggtaaacaaacagaattttgttctcctgagggtgatgattatctttcccttaaamaggttttgctcatgcattagtacttactatagtgctttggagcagtgaaagttcatcacattttcacccttcatggatgatgtaacttctgagttcttcc

SEQ ID NO: 137990 - DNA, 201 bp, Homo sapiens
ttagtgtagaatagaattaataaataatagagcctccgaagatagtaattattggtagaagaataaaataaacattacatcttataataattgcccccaasgaatatgcatcttagcccgatagagattagagaattggaggaaaaaaatatgtacatgtatacccataaacgtaaatatgtgtagatatatatgtatgta

SEQ ID NO: 137991 - DNA, 201 bp, Homo sapiens
tgtatttccaatagaaaatatttacagtgcaactaaaataggtgagctgcttttcttttctttttaacaatcagctcttttccttcaggataataaaaacraaaggcaataaatgaaactttttttccagaatgctacataggtcaaaaaaaaaatacaagaataatttaaccaatttgcaaaactggatttagacgtaag

SEQ ID NO: 137992 - DNA, 201 bp, Homo sapiens
tgaagaagaatatgtttgcttccccttcctccatgattgtaggtttcctgaggcctccccagccatgctgaactgtgagtcagttaaacctcttttctttrtaaattacccagtcttgggtatgtctttattagaagcatgaatggaataatacagacatttaacaagcagatgatgtatacatagattctaggaaaatgc

SEQ ID NO: 137993 - DNA, 201 bp, Homo sapiens
tgtctgtggggaacatatggaacctcagacaattgacatgcaaaagaatttgactgaacctgctctgaaaaaaggcattccactttgcacaagtatttttrtatgtttttatgaagatggttgtcctaaaagtttctagatggattatctgaagagctttcagcatcctttgttacattctgagataatagtacttaagat

SEQ ID NO: 137994 - DNA, 201 bp, Homo sapiens
ttttaagcacacctaactaggtgagtagttataagacagcattgtgggttcttcacatttatttcataaggtatactacttactccaatctatattgccamagaactaagttaggtttattatgtatgtttattaaaaaaacttaaaataattgaaccattcttcacgttattgtggtttgaaacatctactttgcttatg

SEQ ID NO: 137995 - DNA, 201 bp, Homo sapiens
cgctcattcactcccggtgaggctctctgcggggtctttgccaggaaatgggcaatgctcgtgcttgttcattttggagatttatttttcaacagtctttkttttctttttgttctcataggacaaactgtgtgaatattttagtaacaactactcagctcatcccagcattggcgaaagtcctgctgtatgggttaggaa

SEQ ID NO: 137996 - DNA, 201 bp, Homo sapiens
taacagtttcatactaaaactaaaaagaaagaaaaccatactctgaatctaaaaaacaggaggaggaagatacagggattaaacccctggcctgccgagamaagaacacatagagctgtggtaccagcaactgtggagcccagccagcaaggatcagggaggtggagctgcggaactgggaaaggggcccagcggggagcg

SEQ ID NO: 137997 - DNA, 201 bp, Homo sapiens
ggcttttcttgcatataaatagcacatataactttggaacagatggctttcctgctgcagcaaccagtgctaacttatgtttggcaactggtgtacggggyggtgtggactggatgagaaagttggccttccgctacagacgggtaaaagagatctacaacacctacaaaaataatgttggaggcaagtgattaccaccag

SEQ ID NO: 137998 - DNA, 201 bp, Homo sapiens
acctgtctttcaaggagccctagcacctgcaagccttgaggacatagtgactcactctcactcttccagggaagccctcagggatcttggcgtggggagaktgaaagaaaggaagaaaggggaggctggttttccaaggcatgtggctgagttgaaaattgcagcattgtttatcatggtttccaaatatcgtaaagtgag

SEQ ID NO: 137999 - DNA, 201 bp, Homo sapiens
gataattaaagaccacttgacagaggatgaaggcaaaacaattgttttattcctggttctacagacactcagccaatttcatcattatttactttttctayataatgttactttgaattagtagacataatttgcctttgatgtactgaaaacagccatgggtagcctaggatgacaacaagttccttcacttcactttag

SEQ ID NO: 138000 - DNA, 201 bp, Homo sapiens
tgtattatgtttagttttggactctcaccccaccaaaacataagcttgtgttggcagggattctgtcttgtttggttcacttctatatccctgacacctamaacagtacctgccacatattaggcactcacatatttgcctaatatgtgccacatatttgaattaaagaaaacatgaatgaacgaatgatggcttctactt

SEQ ID NO: 138001 - DNA, 201 bp, Homo sapiens
acagacgggtaaaagagatctacaacacctacaaaaataatgttggaggcaagtgattaccaccagtacctcagcaagttaagacagtccagatacaattycaaaagtactgtacacttttgtgtcacactgctttgaatataatagcttctatttgggcagtttcatctcactggccattattctgctgtgatttagtga

SEQ ID NO: 138002 - DNA, 201 bp, Homo sapiens
tatccagtttccccagcaccgtttgttgaaaagactattatttcctcattgaatggtcttagcacccttattgaaaatcatcttatcatacatgtgagggyttatttctggtctctctctatattccattggtctgtacatctgtatttttgccagaaccacattgttttgattactgtgtctttgtaatcagttttgaaa

SEQ ID NO: 138003 - DNA, 201 bp, Homo sapiens
tggcatttaggaggtcagggtggtttcatacggctgacacaaactcaacagaggcagaggttagaggtatgggtaagtagggggataattgatagaggaargcccctgatgggacagcaatagcacaaatccaaaacagaagcggatcaggctagaaaaggaataacttttccactgaaacattggggaagatgcaatatg

SEQ ID NO: 138004 - DNA, 201 bp, Homo sapiens
accaagaggcatcagtttttaatttctttggagtaaatatacctctaatttgtttattatccaaatgaatgtaatttaactttaacaaatttaaaatataratggaaaagaactatatagtcaaatatatatatgtaaggtaaaaaatatgtaaaagagccaaagaagatattatttttaggtctttggcaataagataca

SEQ ID NO: 138005 - DNA, 201 bp, Homo sapiens
ctgggacttggatgagacaatcattgttttccactccttgcttactgggtcctacgccaacagatatgggagggtgagtaccaagaggcatcagtttttamtttctttggagtaaatatacctctaatttgtttattatccaaatgaatgtaatttaactttaacaaatttaaaatataaatggaaaagaactatatagtc

SEQ ID NO: 138006 - DNA, 201 bp, Homo sapiens
tcctcatcacactttctttcaaaacaaatcttgtaatcagatatcttataaattatttaccagcgcaagtaaaagacgatgtaggatttcagcagaatgaratgtgctttactattgaaactccccttgtgaattaaaacaaggctaatcttggcaccatggtgatggaaataaaagatgaaagtccttcctatattcctg

SEQ ID NO: 138007 - DNA, 201 bp, Homo sapiens
ccttattttcttttattccagaaattcaaaatgtaggtagcatatcctgaggaactagtcatgctttctgaaatagttgcactgtcttctgataactcctrtctcaagattaattatttaaatagcacttttttaaagataatatattctttgtgattcaaagtagaatagcaattgctaggagtttgtgtagagtatcat

SEQ ID NO: 138008 - DNA, 201 bp, Homo sapiens
aacacattagagcatagcatttgcaagaattcaataaattcagagctgtcattgaatttaggcaaacgtttttgttttatttcttaaaatggcaaggggtrcaaaaggtcgatagtaagcacatagtgtagttttataggtttgggattgtttttataatgtgtctttcaaagtaggttttattttatgcttgcatgagtc

SEQ ID NO: 138009 - DNA, 201 bp, Homo sapiens
agaaaaatgtctttcaagtacatagtgctaaaaagaagggaaggaaaggaaattcgttagagagagggatggcatttaggaggtcagggtggtttcatacrgctgacacaaactcaacagaggcagaggttagaggtatgggtaagtagggggataattgatagaggaaggcccctgatgggacagcaatagcacaaatcc

SEQ ID NO: 138010 - DNA, 201 bp, Homo sapiens
tggagtggatgctcagtcttaaaaaatgagtaggaaagaagcactgagagagagatgctggacaaatggacactccatgaaaggagacagcagcacagagrgcgtggatctttggggaactgttaatggttcagggttcctggtgtgtgtacagtatgagagcaagggcatgttgcagagggaggcaggggccagagtcta

SEQ ID NO: 138011 - DNA, 201 bp, Homo sapiens
agtttggaatatttcatttaaaaattatttatatcagaggtaattcttagaattttgacttttttttaatattgcctgctataattttagcacctctctaytggaaatgctataattccataaagttgtgattgatttactcaagctctctggatcatttatttaatacataccacaacaaaaagaaattataaatacaaa

SEQ ID NO: 138012 - DNA, 201 bp, Homo sapiens
agaatagtagcagaaaatgtgttggatcagtaataaaaagactgcatctttattcaacttttatggtttacactgctatctcacacttattatccaatgarctccttctttttgccaataagaaaagtgtagctcagaaaaattaaattatctgtccaaaaggcagatccatcaactggcaacaccagtcttgtaattgac

SEQ ID NO: 138013 - DNA, 201 bp, Homo sapiens
tgagaactatttgtagagttgtttaaaaggatgaattataatgtctataaataactgacacatagtaggcactttacaggacctgtttccatggcacctarttctaatcttttgcttagtatgttgtatttgattctgagttcagaatcttagtggtgatctgtctggcagagagtgaaatagaacgattgctttatgtgt

SEQ ID NO: 138014 - DNA, 201 bp, Homo sapiens
tgcttactgggtcctacgccaacagatatgggagggtgagtaccaagaggcatcagtttttaatttctttggagtaaatatacctctaatttgtttattakccaaatgaatgtaatttaactttaacaaatttaaaatataaatggaaaagaactatatagtcaaatatatatatgtaaggtaaaaaatatgtaaaagagc

SEQ ID NO: 138015 - DNA, 201 bp, Homo sapiens
tggtggcagtgtcctcaaatttatgaattacaagtatacgctatgccttagagtgtgatagaaagaggatcggatttgaattcaagtagatctagactcaratccaagctctgacttttcacctctttgaccttaggcaaattatttattcttactgagcctcaattttcttatccataaagccagctacgtgacttgcgg

SEQ ID NO: 138016 - DNA, 201 bp, Homo sapiens
ttgggagtgaaggctacattcgattaagctaatcatatggagaatagctggtgtcaattttaggggtacagaaacaggagtggttttggtgtagtcaagcrttcacaaagtagttgcatctatagaatctgttgaatcatagcccttagatttgacaaagacttggaagtaaccttgattgacatctcacgcagtggaaca

SEQ ID NO: 138017 - DNA, 201 bp, Homo sapiens
ttttctaaatgggaattaactaaagaaaacacattgagttcatggatatatgcacttttaggtgaagcagaaataatcaaatgggtacttgtaatattgartcaatcatgcatttagagtgagatgtcaaatatataaatttagcaatgttgcttttttccactttcatactttatgcaacaattttattctcttcacatc

SEQ ID NO: 138018 - DNA, 201 bp, Homo sapiens
cctctccaggttacaactgagctctcttctctctgaatttgtctttttaattcttcatccctcattgccttacactgtaataaaattgtttcatcagttayatcttgcctgctggtcagctcttggcattggggatatatgtcttttgtgtattacgtatctactgtagctacggtgctatgcaggtaacagactttgttt

SEQ ID NO: 138019 - DNA, 201 bp, Homo sapiens
tttttatcatttttacaaagcttagaacactagtaaattatctggatttgtttttcttggtgtaattttaattttgtaaaatatagtgctatccaactagrttatttttaagaaacctgatttacaagaaatatctaaactggagcaaatgtgtataaaattatggtttgaggctgtattttataggctatgtttatatat

SEQ ID NO: 138020 - DNA, 201 bp, Homo sapiens
atgcatgttgcagttccagctgtcatttctgttaagatttgtgggtagctctgtttttggtcccagggcttcagcaacctgagaaaatatctctgggtaartatcccatgttctacccatctgaatgtctgaatacaagcaaatgaattcagctatcccaaaccagttggcccactcagacatgatttggggttctttgat

SEQ ID NO: 138021 - DNA, 201 bp, Homo sapiens
catggttcatctaagggataaagacagaaagacactgagctacagcctcaagtactgtgcttttttatttcctacatgaaatgttcttcagttataatagytgtttgaatgtttcatatttcaaaactttcaactattcacatttttatacatccttccaacccctctgtgaattgttactgttgaagttaactgttgatt

SEQ ID NO: 138022 - DNA, 201 bp, Homo sapiens
gttgaaaagagtaggcacttagaaaatgagcatttgaaaaccacccagaaagtctcctataagctctcgctaagggccaaattgacgcaaaagagagttayctaagagtattctattagccaatgaaagagaccagcttagagttaaggagttaggcatcccatgacctactgaactttcaatctttggccataaattatt

SEQ ID NO: 138023 - DNA, 201 bp, Homo sapiens
gataaattcctaaaactgcaataattaagtcagagggtatatgctttaaaaactttgaaacattgtaattaacacatttttaataattcagcaaaattctrcttacatatatgtatccacatacccagctttttatatggttgttgttatatgtagtctaaaagtataaatgctaaatatcagatgaggaaggatggagga

SEQ ID NO: 138024 - DNA, 201 bp, Homo sapiens
tgtactcacaggctagtgcctattttcatggttcatctaagggataaagacagaaagacactgagctacagcctcaagtactgtgcttttttatttcctayatgaaatgttcttcagttataatagttgtttgaatgtttcatatttcaaaactttcaactattcacatttttatacatccttccaacccctctgtgaatt

SEQ ID NO: 138025 - DNA, 201 bp, Homo sapiens
aggcatcagtttttaatttctttggagtaaatatacctctaatttgtttattatccaaatgaatgtaatttaactttaacaaatttaaaatataaatggaraagaactatatagtcaaatatatatatgtaaggtaaaaaatatgtaaaagagccaaagaagatattatttttaggtctttggcaataagatacactttgt

SEQ ID NO: 138026 - DNA, 201 bp, Homo sapiens
tctcctgtatcaaaaaccataacttcatctgaagaacaaacaagaagggaatggaatggagaggcagagaatattaagtttcttcttaagtctgctgccarattatcctaagactcaatgtttgtaggttctgtactcacaggctagtgcctattttcatggttcatctaagggataaagacagaaagacactgagctaca

SEQ ID NO: 138027 - DNA, 201 bp, Homo sapiens
gagtcttgctttgtcacccagcatagagtgcaatggcgtgatctcggctcactgcaacctctgcctcccggttcaagcgattcttctgccccagcctcccragtagctgggactacaggcaccaagcccggctaatttttgtatttttagtagagacgtcatttcaccatgttggccaggatggtctccatctcctgacct

SEQ ID NO: 138028 - DNA, 201 bp, Homo sapiens
aattatatacacctagtatccacaaaaattaaaaatacaaaaaataaataaaatccactttttgttgttttgaagatggagtcttgctttgtcacccagcrtagagtgcaatggcgtgatctcggctcactgcaacctctgcctcccggttcaagcgattcttctgccccagcctcccgagtagctgggactacaggcacc

SEQ ID NO: 138029 - DNA, 201 bp, Homo sapiens
gtctggaatttgggagaagaggagatattctgatgtatgtattggatagactaaaaagtacaaaattggtgtgagtaaatggctttttgttcagtctgaayacaagataagcatcttcccttgctccacaatcactgcccgactcttcctttgagccttttgggggttgttctttattttgtggtttctatgtaattattt

SEQ ID NO: 138030 - DNA, 201 bp, Homo sapiens
cagacacacatttattttttaatgacttagaagtaagttctaatttttaatacatatttttgcatgtctgaaaataggtgattggttttaaaataaagatrggatattattttttaatgtataattggaatagtgagacagaggtttgttggtaatatggcaatgtgttttgcctttatgggatttctattttgctttact

SEQ ID NO: 138031 - DNA, 201 bp, Homo sapiens
tattttgaacaatataagattgggctctttttgtttaatcctgatgtagagtggtagacttctggttcatagaaatatagaaagaaaagataccacatgcktagatgtattctaccacttggaaataactcctagcttgaccatgtaacttcaaaaagttatttaacctttctgagtttccattttctcacatatcagata

SEQ ID NO: 138032 - DNA, 201 bp, Homo sapiens
tatttgaaagtcaaaataaagtaatttaaattgaattccccatagaaatggagaattcgcccatttctgaataaaaacaacttaaaatgtcctattacagkttataaaatagtctgtttaaatagtctataatgggtcattatataaataaaaatgcaattgcaattttttggtaagtttgaaattttacaaatttttaga

SEQ ID NO: 138033 - DNA, 201 bp, Homo sapiens
tgagtaaatgggtgaggcttttaattttaaaagtcaagtctagatattagtggtttcttaaagtatttgttaacttgtctctttcctttggtaagttatgrcatagccttatcaaaatagtgacaactataattatgattgatagaaataaaaatctaacttgatatgcatttcagcttttaatacaaaagcaaataaatt

SEQ ID NO: 138034 - DNA, 201 bp, Homo sapiens
tgtactatcttagagcttttctcccgtcctattgcatcttgatagccagtcattttaattcataaccactattcaatttcacttttgcatctctatagatyggagtagctaggagcctgttagtgcttttattagtgccttgggcagtgttactttcttgatgcattagtcctgggtgtaaaaggtagtcaaacacgattt

SEQ ID NO: 138035 - DNA, 201 bp, Homo sapiens
tcttgatgcattagtcctgggtgtaaaaggtagtcaaacacgatttccaaatttcccatgctaattggtagaaggtgtctcatcttctgacagctattttyccattgactggagcaaggcatgtactagtgaaattgaagtagatctgtgactgcacagaaattcttttctctcaaatagtcttccctttcagttctcagt

SEQ ID NO: 138036 - DNA, 201 bp, Homo sapiens
tgaactgcatggatctacttatacgtggattttttttttttttcctacagtaggccctccatatctggcaagtttcacgtccacagccaaatgcagatctraaatactgtattcatagaatgcgaagcctgaggatgtggaggaccaattttttgtatctatgggttccacagggctaattgtgggtcctgagcatgcatg

SEQ ID NO: 138037 - DNA, 201 bp, Homo sapiens
agtggcatgataatattatagctcacttcagccttgaccacctcctgggctcaagcaatcctctttcctcaaccttccaagttagctaggactacaggtgkgctccactgcacgtagctaattttaaatttttcttgtagagacatggtcttgctatgttgcccaggctggtcttgaattcctgacctcaagcagtcctct

SEQ ID NO: 138038 - DNA, 201 bp, Homo sapiens
gttacaacattcattgagtgtaatatattatgttcctggacctttaaatgctaaaagtctattcctgtcttatggagtctctttagaggagtggttccatraactttagcatgtatcagaaccacctggaacacttattaatatctatactgctaggaaactgctagacccctacctaaagatttgcatttcttaaggatt

SEQ ID NO: 138039 - DNA, 201 bp, Homo sapiens
aatgatgctgttatttttgtaggggggaataacttaaatggataggaattaaaaaactggcgtcttgtgcaacactattagttgtagattacttgttgcarctaggtggtatatgtgaggtttaaaaataacttagttatacaggtcttttctgtgatgtgggattttatttgcagaactaattctcagttattcatgaat

SEQ ID NO: 138040 - DNA, 201 bp, Homo sapiens
tgtgatgtgggattttatttgcagaactaattctcagttattcatgaatatggaagatcaaaaaataaaatacagatcattccactttactttttatgatsgtagcttacttgccttatctggactttatttcacatttgctttaaattcatttaagatgcaacgaaggaagcccggtgtgatggctcatgcctgtaatcc

SEQ ID NO: 138041 - DNA, 201 bp, Homo sapiens
aaataattgtattgccataagttaagaatacttacaaatagtttccaaattctggagaaatcaggtagaaacaaatatgctccaaattttgttcacaggartatactttacttaattattaaaagctgttaatagctcaaaagaagagtttccttgattcttaaaaactaaacaaaggatcagcaacattttaagcaaaaa

SEQ ID NO: 138042 - DNA, 201 bp, Homo sapiens
tttcttgtttgtgccctagcaaacaaactttgagggcagagataatggcatactcagtattcccagcatctagaacaacatggtatatagtagatgttacmgaatatggcatggagataggaagaagggagattcagctggaaagattctgaaacacaagggagatttagctggaaagattcagcatagtctttatcccta

SEQ ID NO: 138043 - DNA, 201 bp, Homo sapiens
gtggctcacgcctgtaatcccagcactttggaaggccgaggcgggcaggtcacctgaggtcaggagttccagactagcctgacgaacatggtgaaaccccrtctttactaaaaatacaaaaaattagccggacgtggcaggcacctgtaatcccagctacttgggaggctgaggcaggagaattgcttgaagccagcaggc

SEQ ID NO: 138044 - DNA, 201 bp, Homo sapiens
actgtcttcctgtctagcctggttttctgtagaattgttggtcttctatttctagactatatagacacagacacacacagttctttttttttccccccccmcagacagggtcttgctgtgtagcccaggctggagtgcagtggcctgatcttggctcactgtagcctcaacctcccaggtcacgtgatgctcccaccttag

SEQ ID NO: 138045 - DNA, 201 bp, Homo sapiens
gggactacggtgtgtgtgactctgtgggctctattttctgtttttgttcgtttgtttgtttatagcagccatactaatgggtgtgagatggtatctcattktgttggtttgcatttccctaataattagtgatgttcagtattttttcacatgcttattggtcatttgtatatcttccttggagaaatatttattcaactc

SEQ ID NO: 138046 - DNA, 201 bp, Homo sapiens
cacgcctgtaatcccagcactttggaaggccgaggcgggcaggtcacctgaggtcaggagttccagactagcctgacgaacatggtgaaaccccgtctttrctaaaaatacaaaaaattagccggacgtggcaggcacctgtaatcccagctacttgggaggctgaggcaggagaattgcttgaagccagcaggcggaggt

SEQ ID NO: 138047 - DNA, 201 bp, Homo sapiens
atatctgtctgttttttgtttgtttattgttgttgttgttgttgttgttttgagtcggaatcttgctctgtcgcggggctggagtgcagtggcgcaatctyggctcactgcaacctccacctcccaggttcaagtgattcttctgcctcagcctcccaagtaactgggactacaggcacgtgccaccatacccaactaatt

SEQ ID NO: 138048 - DNA, 201 bp, Homo sapiens
caaacaaaaaatctggacattctcctatagtctattgcagtggatttgacatacgtatacttaatgagttgaatttttttgaattaatctcaaggcaaatscttatgttatactgaacttctggataaaagatatagcatgcagtaaagctgtactaatttgaattaattgagcacaaaggaaagcctcaattataaagaa

SEQ ID NO: 138049 - DNA, 201 bp, Homo sapiens
tgcatttatagtcatacttcatttgaacaatgactggacttgtttaggtactaagataacgggtaaatgaaataacatgtttataaaactatgtatgtttrcaaaataattgcatactttattttacagcgcagcaaaagaaatatcattggatattttgagcaaaaggactcggacaactatagagtttttgaacgagta

SEQ ID NO: 138050 - DNA, 201 bp, Homo sapiens
tcgtttttgtttttttttaattagtccatgtgaccaaaccaatgaccttgatccctagttgccggaaaacagtctggggtcaaaaacaaccttttagtgcyaaaactcccaatctaaacttacacaaaacacaaaaacaactaactaaaattttcctttaaaaagtctgcctcatattaaacgttttctttaaatgtatac

SEQ ID NO: 138051 - DNA, 201 bp, Homo sapiens
agtagggaagaacttcctaactgggtggctgatattattgatctcttcagccttgccccatttgcctctgttgggagtagcctttgttgttttgattctcygttacaggaggggtcccaacttgcagtgtgaaaaatactgttgtagtaacttaaaatgttaaaccaaaagatttcctgacgtgttttttgattcccgaaa

SEQ ID NO: 138052 - DNA, 201 bp, Homo sapiens
tgtggaaaaagaaaaggtagggcttacgtgagaaggatcaggagtgtattaggggagttgtagtttgtaagcatcacgggacaggtgagccttgaagcaaktgagggagttagtcatttggatttcctggaagaagagccttccaggcagggccgttagtcagtgcaaagcccctaatgtgggagtgtcccaggcatattc

SEQ ID NO: 138053 - DNA, 201 bp, Homo sapiens
aactgtcttcctgtctagcctggttttctgtagaattgttggtcttctatttctagactatatagacacagacacacacagttctttttttttccccccccacagacagggtcttgctgtgtagcccaggctggagtgcagtggcctgatcttggctcactgtagcctcaacctcccaggtcacgtgatgctcccacctta

SEQ ID NO: 138054 - DNA, 201 bp, Homo sapiens
tttgtgtgaactgtcttcctgtctagcctggttttctgtagaattgttggtcttctatttctagactatatagacacagacacacacagttctttttttttccccccccacagacagggtcttgctgtgtagcccaggctggagtgcagtggcctgatcttggctcactgtagcctcaacctcccaggtcacgtgatgctc

SEQ ID NO: 138055 - DNA, 201 bp, Homo sapiens
ctcaacctctgaggctgaagcaatcctttcacctcagcctcctgaatagctgggactctgggactacaggtgtgtgctaccacacctggctaattttttttaatttttgtagagacaagggtctcactatattacccaggctggtcttgaactcctggctcaactgatctgcctgccttccaaagtgttaggattatagga

SEQ ID NO: 138056 - DNA, 201 bp, Homo sapiens
tctagctctgtcacccaggctagagtgcagaggagtgatcacagctcactgcagcctcaacctctgaggctgaagcaatcctttcacctcagcctcctgartagctgggactctgggactacaggtgtgtgctaccacacctggctaattttttttaatttttgtagagacaagggtctcactatattacccaggctggtc

SEQ ID NO: 138057 - DNA, 201 bp, Homo sapiens
ctccctcccggacggggcggctggcctggcgggggctgacccccacctccctcccggacggggtggctgccgggcggagacgctcctcacttcccagacgrggtggttgccgggcggaggggctcctcacttctcaggcggggcggctgccgggcggaggggctcctcacttctcagacggggcggccaggcagagacgct

SEQ ID NO: 138058 - DNA, 201 bp, Homo sapiens
gaacggcctccggccctcgcccagggggaacactgctactcctgcccctgcttttccgtcttttcctgcagtgttttggagtgcaccctcccccgctgccytcactctcgcctgtcggcttccaggcgcggagtccccgaggcctgagaaaccagtgtcgggggagaatgggagaattagccctgagggactgatacgtag

SEQ ID NO: 138059 - DNA, 201 bp, Homo sapiens
agatacagagaggctaagttatttcccaaggttgcatagtaaatggagggagccagactggaacccaggacgatacagcttttatcagttaactatgctayttgaaagtcaaaataaagtaatttaaattgaattccccatagaaatggagaattcgcccatttctgaataaaaacaacttaaaatgtcctattacaggtt

SEQ ID NO: 138060 - DNA, 201 bp, Homo sapiens
taggcattttcagtttcttccagcaatgctttgtggtttttcagcctacatgtcttggatagctttatcagatttattcctaagtatttcttatttttttratgctattgtaaatgatactttaaactttatttctggaataattgtagatcatatgtagattatagttgcaaaaataatacagagaattcccttatattc

SEQ ID NO: 138061 - DNA, 201 bp, Homo sapiens
acatttcccgaagtgcaccgaggtgggcaggacccggaagtgagggtgtgagaggcctctctggaagttgtcccgggtgttcgccgctggagcccgggtckagaggacgaggtgccgctgcctggagaatcctccgctgccgtcggctcccggagcccagccctttcctaacccaacccaacctagcccagtcccagccgc

SEQ ID NO: 138062 - DNA, 201 bp, Homo sapiens
tgtgctgcacccattaactcgtcatttagcattaggtatatctcctaatgctatccctcccccctccacccacccaactcctgggctcaagggatcctccyactcagcctcctgagtagctgggactacggtgtgtgtgactctgtgggctctattttctgtttttgttcgtttgtttgtttatagcagccatactaatgg

SEQ ID NO: 138063 - DNA, 201 bp, Homo sapiens
ggtaagtaatcttattgtttgggtttggttttgtttttacttgctaaaggttaatttttctttgctagaaaggggaagggaaggctttttctatttcaagrcagtattccatacataaagtcaattaagtttcatccacaagggaagtagtttaatttggtaaggatttctgttttaagaaagaaatagagctgattctgt

SEQ ID NO: 138064 - DNA, 201 bp, Homo sapiens
attttatgtacaaaagaaaaaatgaactacaacacaaagctttcttatcagttatatttttaattcatatgtgataaacatttatgagatacagagtaatrtttgaatacatgtatataatgtttaatggttacatcaggataatcctctcttctagtactcaaaaatatacaataaattattattaactacagtcaccct

SEQ ID NO: 138065 - DNA, 201 bp, Homo sapiens
cttatatccttgaaccataaatatcatttattccatcttttaaacagataacttttgaagaaaatctgacatcattgctagtaagctttctttttatgggrgcaaatagcacagttcagatgcttttcaatccaccagcaagttatctgaggtattatgcatattttgaggtattatgcatctctctgaatattttttctc

SEQ ID NO: 138066 - DNA, 201 bp, Homo sapiens
tatggaaacaactagtagtagcagcagcagcagtgatgttaataatgacaataataatgataaaatggctctatgagagtagagaccttatgtttttaccyttctattcctagcactggaatggtatctagcacatagtaggtgttcagttgtaattgttgaacagatggatagataaatgaatagtaaacagtaccagca

SEQ ID NO: 138067 - DNA, 201 bp, Homo sapiens
aacccatatctggagtaagtgtctattccagtgaggacaaacctctgccctttccatgatagaagaggtccagtataatcaacctgccaccaggtagctgrctgatcaccctgaggaaaggtgccttattgagggctcagtgttggtctctgctgctggcaaactgggcactcagcagtggccaaagccaggtcagccttg

SEQ ID NO: 138068 - DNA, 201 bp, Homo sapiens
ataatagtgacagtgggcatccttgtattccaaatcttagaggaaaggctttcagtttttccccattcagtatgatactagctgtgggtctattgtacatkgtcttcattaagttgagatatgttccttctctgcaagttccttgggggtgtttatcatgaaggaatgttgaattttatcaaatgctttttcagcatcaat

SEQ ID NO: 138069 - DNA, 201 bp, Homo sapiens
tttggagtggtgagctatgcagtctggggttaacggaggggtgatgccagcagccccttaagccatcctggttggtgtctcagtaggtcatatatctgccygccatgtccattggctctgagtccagttcagccctaagacttgccaagaagttgcagttcttgtggcctacactgcctttcaagtttatttaggggccca

SEQ ID NO: 138070 - DNA, 201 bp, Homo sapiens
cttagctccgacatatgaatgagaacatgcagtatttatttttctgtgcctggcttatttcacttaacataatgtcctctagttccatttatgttgccacraatgacaggatttcatccttttttgttcattttcaacttttattttagaatcgggggtacatgggggtatatgtgcaggattattacagtaaggcatatt

SEQ ID NO: 138071 - DNA, 201 bp, Homo sapiens
gctctccatgtccagtgatcctgtacatgcctaatcctgtcacccacagctgtcagcgaagagtacaaggcagattaatccaaagagaatagtggttaacwccccataatgccaaatccattcatagctgagaggaactttactgagtggggcctctaactccctaaattttaggaagtattctaaccatcctaagctggg

SEQ ID NO: 138072 - DNA, 201 bp, Homo sapiens
agctgtcagcgaagagtacaaggcagattaatccaaagagaatagtggttaactccccataatgccaaatccattcatagctgagaggaactttactgagkggggcctctaactccctaaattttaggaagtattctaaccatcctaagctgggccttgaacccaagttccaccagatgtccttgccttttattaagaggg

SEQ ID NO: 138073 - DNA, 201 bp, Homo sapiens
ttggtacagtaaatgcatggaggagttatctaatgaattatgagagatgattaaagatgccactctgctctgctttcttggcaagaaaatgagctaataarctggagagaatgaccaagttgtaaaatacttcctaagttcatatctgtatatttgtatatgttgtctaaatatttcatcattagagactatattcttcat

SEQ ID NO: 138074 - DNA, 201 bp, Homo sapiens
cacaataccattatcacatctggaaaaattgacagaaattccttcatatcatcaaatatctggtcagtgtttgggttttcctgattgtttccctttttttwaaaaaaaataaacagcattgttcaaagcaagggctatataaagtccatctattccaattggttcatatgtcacttataaaactttttaaatccctaggtt

SEQ ID NO: 138075 - DNA, 201 bp, Homo sapiens
aatctcttccaaaactaaatctgtaaagctaactatatttggataagtctaatttgtttgtctcttttactgtcttatctccctcttaataaaatagcacyttttttttttttttttcttgaggcagagtctagctctgtcacccaggctagagtgcagaggagtgatcacagctcactgcagcctcaacctctgaggctg

SEQ ID NO: 138076 - DNA, 201 bp, Homo sapiens
atttcccgaagtgcaccgaggtgggcaggacccggaagtgagggtgtgagaggcctctctggaagttgtcccgggtgttcgccgctggagcccgggtcgasaggacgaggtgccgctgcctggagaatcctccgctgccgtcggctcccggagcccagccctttcctaacccaacccaacctagcccagtcccagccgcca

SEQ ID NO: 138077 - DNA, 201 bp, Homo sapiens
ccaatcaagttgacactcagtgttaaccatcacaagtccaccccttatcaacttgaacccatatatatctcctgagatcatacataatctttaaataaagrcaatgataaagtcataattatgcctaacataatacaactatccttcgcacaacctgaaaggcaccaatccccaacccaaatactactacataaagttaac

SEQ ID NO: 138078 - DNA, 201 bp, Homo sapiens
ttcctaactgggtggctgatattattgatctcttcagccttgccccatttgcctctgttgggagtagcctttgttgttttgattctctgttacaggagggrtcccaacttgcagtgtgaaaaatactgttgtagtaacttaaaatgttaaaccaaaagatttcctgacgtgttttttgattcccgaaagtgataacacttt

SEQ ID NO: 138079 - DNA, 201 bp, Homo sapiens
gtagaataccagtactttttccatttcttccttattatagtctagtagtgggacctttggtgaatggatttaagaaattttagaaaaaggttgttaggtcrtgtttgacatccttctgggaaaaataaatttttaaaaataaaaaagaggtcattaggaatatagattatgaatgcatctacaaaataaaatgttagagtt

SEQ ID NO: 138080 - DNA, 201 bp, Homo sapiens
accgcacccggccccacattttctttatccattcatctgttgatggccacttaggttgatttcatattttgactattgtaaatagtgctgcagtaaacacrgtggtgcagatatgtccttgctatactgatttccttttctttggataaatacacagtaatggaattgctagatcatgtggtagttctatttttaggtttt

SEQ ID NO: 138081 - DNA, 201 bp, Homo sapiens
tggtgaagatgtgtgggaatggagttttctttgtggaaaggctttgaattagatttgggttctttaataattgtaggattattttttgagatggggtcttkctatgtttcccagtctagtcttgaactcctgggctcgagcaaacctcctgcctcaatcttaccatagccggggctatgggcatgtgtcactgtacctggc

SEQ ID NO: 138082 - DNA, 201 bp, Homo sapiens
atggagtcgttgtgaaatggagaaagcaccttagaaaaggatagtgcttgtgctgaccatccttctgtgattgttatcttttgactctctgaaatgagtaratgggtgaggcttttaattttaaaagtcaagtctagatattagtggtttcttaaagtatttgttaacttgtctctttcctttggtaagttatgacatagc

SEQ ID NO: 138083 - DNA, 201 bp, Homo sapiens
ttatttatggaactatattttagtgatgtgggttatttcgtttttgtttttttttaattagtccatgtgaccaaaccaatgaccttgatccctagttgccrgaaaacagtctggggtcaaaaacaaccttttagtgctaaaactcccaatctaaacttacacaaaacacaaaaacaactaactaaaattttcctttaaaaa

SEQ ID NO: 138084 - DNA, 201 bp, Homo sapiens
ctaaaactcccaatctaaacttacacaaaacacaaaaacaactaactaaaattttcctttaaaaagtctgcctcatattaaacgttttctttaaatgtatrcttttcttggtattgcatagtcttgtaatagggaagatgatggataagtatatatttcaagtctgtaattcctacattgcaaaattctgtcattcaggtt

SEQ ID NO: 138085 - DNA, 201 bp, Homo sapiens
taaagagttaattgacctaaatccaagaaaaagcaataggcttgggtgtcacaggttagattattagctccctggtaatcacagaattatctgctttttgycacccatggccctctttcttggaagttccatgatctatgtttcttttgtattaccagtagattttctgggttcatggatggatataagaatgtacttttt

SEQ ID NO: 138086 - DNA, 201 bp, Homo sapiens
gccctaccaggtgatggtagccataactaagaggcaaaaatcgtagcacatgttatcccaaattcaccaagcgtctgccattgcaattttttttacatacmaaaaaaaattgaaatttatggatattttttcaatttatagttttcattttaatgttgtttacagtgttttgacactgagatttttaatttttatgcagtc

SEQ ID NO: 138087 - DNA, 201 bp, Homo sapiens
ggatggcagagaccaacagaaagtactgacccattcttacaaggtcaagctcccaaagacatagaacaaaatgagaaggaaacttcagcatttttttttttcaggtacttgcagcaaagtctgtaattaaccagttttccaggctggcttgaacctgggcttatgggatcctaagcccgtgttctgtccataaaggtattc

SEQ ID NO: 138088 - DNA, 201 bp, Homo sapiens
ctttttaacaaaagctattctgactggcatggggtggtatctcattgtggttttgatttgcatttctttgatgattagcgataataagcattttttcataygtttgttggctgcttgtatgtcgtcttttgaaaagtgtctgttcacatcctttgtccactttttgtttttttatttactttttgtttttatttttattct

SEQ ID NO: 138089 - DNA, 201 bp, Homo sapiens
ggcaattgtcttaagatgaataaaaccaaaatctattatacattcttagaattggtatacagtctttgaacttaaaattgtcttcatctccattgaacgaygtcagggtccatgattaaattaagtgtgtgattatctcgcagagtcgtttattatgcctatatcaaatgtcagtgggcaataacggaaataagattttat

SEQ ID NO: 138090 - DNA, 201 bp, Homo sapiens
acatgatttcattcttatatatgtggctgcatagtgtaccatggcatatatgtaccacattttctttttcagtctgccattgatggacacctgcagaggamatgattttgttgatttttatggctgcatagtaatcagttgtgtatatgtaccacattttctttatccagtccactgttgatggatacctaggttggttct

SEQ ID NO: 138091 - DNA, 201 bp, Homo sapiens
agtgctgcaatgaacatgggagtgcaaatgtctcttgcatatactgatttcctttcctttgggtgtatacctagcattgggatcatgggatcatatggtcrttctatttttactttttttgagtcacctccaaactgttctccatagcgattgtactaatatacattcctaccaacagtgcaagagggttctcttttcacc

SEQ ID NO: 138092 - DNA, 201 bp, Homo sapiens
agcctgttctgaatagtgctgcaatgaacatgggagtgcaaatgtctcttgcatatactgatttcctttcctttgggtgtatacctagcattgggatcatkggatcatatggtcgttctatttttactttttttgagtcacctccaaactgttctccatagcgattgtactaatatacattcctaccaacagtgcaagagg

SEQ ID NO: 138093 - DNA, 201 bp, Homo sapiens
agatcgaatcatacggtttaagttatttttaaaagtacaattaaattagtttctactatagtcaccctgttgtgctagcaaatactatgtcttatttatcyttttttttttttttttttttttttttttttttgagacagagtctcgctctgttgcccaggctggagtgcagtggcgctatctcggctcactgcaagctcc

SEQ ID NO: 138094 - DNA, 201 bp, Homo sapiens
ccacccaactcctgggctcaagggatcctcccactcagcctcctgagtagctgggactacggtgtgtgtgactctgtgggctctattttctgtttttgttygtttgtttgtttatagcagccatactaatgggtgtgagatggtatctcattgtgttggtttgcatttccctaataattagtgatgttcagtattttttca

SEQ ID NO: 138095 - DNA, 201 bp, Homo sapiens
ctttagaaaaatataatctttctctagttgaatttagtaaggaaagagtagattatactgcagatttctcattactgaaaatatgaaaaaataaaaattcygtttaagtgtggaagattttttgttttgtttttgagacagagtttcgctcttgttgcccaggctagagtgcaatggcatgatcttggctcactgcaactt

SEQ ID NO: 138096 - DNA, 201 bp, Homo sapiens
ggaggaccaattttttgtatctatgggttccacagggctaattgtgggtcctgagcatgcatggattttggtggagtgtcctggtaccaatctcctgtagktacccatggacgactgtatatgttttttcaggtggctgcctgttgttccaaaccagtttattgaagtgcctgtcttttctctctgacttgaggtgtatag

SEQ ID NO: 138097 - DNA, 201 bp, Homo sapiens
aacctcgtctctactaaaaacaaaaaattagccagacgtggtggcgcacacttgtaatcccagctactcaggaggctgaggcaggagaatcgcttgaaccrgggaggcgaaggttgcagtgagccaagatcgctccattgcactccagcttggacaacaagagcaaaactctatctcaaaagaagaaaagagagagttaga

SEQ ID NO: 138098 - DNA, 201 bp, Homo sapiens
gtgccaccacacccagctaatttaaaaaaatatttttagagacaggtctccttatgttgcccaggctggtctcaaactcctgggctaaagtgattgttcckcctcggcttctgaaagtgctgggattacaagcatgagccactgtgccctgccctctgagttttgagagttctttatatattgtgaatacaagtctttttt

SEQ ID NO: 138099 - DNA, 201 bp, Homo sapiens
tctttttctacaaatgcgattactctgggtactccacataagtggaatcatacagtatctgtctttttgtgactggcatatttcacttagcataatgtccrcaaggctcattcgtgttgtagcatgcgtcagaatttccctactttttaaggctgaataatatttcgtggtatgtatataccacgatttgtttatcatcca

SEQ ID NO: 138100 - DNA, 201 bp, Homo sapiens
attatagttaagattgttttcaacccaatgtaatctttaacagttttggactaggtgttaaaaactaaatatgcatttatagtcatacttcatttgaacartgactggacttgtttaggtactaagataacgggtaaatgaaataacatgtttataaaactatgtatgtttgcaaaataattgcatactttattttacagc

SEQ ID NO: 138101 - DNA, 201 bp, Homo sapiens
catctactttccatcactggagattggtttgcattttctagaattttatataagtgaatcatacagtatgaggttttttttgtctgggtttttttttttttctggacttagtatgtttattttgagattgtttcatgttgcatatattatttcttattatttagtggcattctattgtgtggctatataccacaatttgtt

SEQ ID NO: 138102 - DNA, 201 bp, Homo sapiens
ttaaaaataagacagtgttatccttaggcctttcctaagaacagaataaatatatatatttatatatatttctataaatatatatatttctataaatatayacgtttctataaatatatacgtttctataaatatatacgtttctataaatatatacgtttctataaatatatacatttctataaatatatatttatacat

SEQ ID NO: 138103 - DNA, 201 bp, Homo sapiens
ataggttgatgtacagacatacgactggacaaagggggtatgatctaatagtaataaactggggaaactgttagtttagattcttcttggtatctctgtgtccgcagagattgggatattccttttctcagggtctagaggatacgtctcttagcggggtcttaagacctactttagagtaatgtcagagaattattttat

SEQ ID NO: 138104 - DNA, 201 bp, Homo sapiens
cataggttgatgtacagacatacgactggacaaagggggtatgatctaatagtaataaactggggaaactgttagtttagattcttcttggtatctctgtgtccgcagagattgggatattccttttctcagggtctagaggatacgtctcttagcggggtcttaagacctactttagagtaatgtcagagaattatttta

SEQ ID NO: 138105 - DNA, 201 bp, Homo sapiens
agagcccaggaggtggaggtcgcagtgagccgagatcatgccactgcactccagcctaggtgacagaacaagaccttgtctcaaaaaaaaaaaaaaaaaaaccttatataatttaggagatactacaatctgttgagtataaactttgaaaaattgtgtaaaagtcaagtgaaaacattggtatttccaaagtttagtata

SEQ ID NO: 138106 - DNA, 201 bp, Homo sapiens
ccaccaccacgcctggctaatttttgtatttttggtagagagagagtttcaccacgttggccaggctggtcttgaactcctgacttcagatgatctgcccwcctcagcctcccaaagtactggaattacaggcatgagccaccgcacctggcctgaagatattttcttagtacaagtgtatacatacatgcacaaacgttt

SEQ ID NO: 138107 - DNA, 201 bp, Homo sapiens
ctgtcttttctctctgacttgaggtgtatagcatgtctttatttggggttattagtggactttatcttcagttccttttttctgcatatatatatatatattattttttatatttcactctaagttctgggatacatgtgctgaatgtgcaggtttgttacataggtatacatgtgccatggtggttttctgcttatattt

SEQ ID NO: 138108 - DNA, 201 bp, Homo sapiens
cctgtcttttctctctgacttgaggtgtatagcatgtctttatttggggttattagtggactttatcttcagttccttttttctgcatatatatatatatattattttttatatttcactctaagttctgggatacatgtgctgaatgtgcaggtttgttacataggtatacatgtgccatggtggttttctgcttatatt

SEQ ID NO: 138109 - DNA, 201 bp, Homo sapiens
catgaggatttagagcatgctttttaatatacagttaaccccttgaacaatataggtttgaactgcatggatctacttatacgtggattttttttttttttcctacagtaggccctccatatctggcaagtttcacgtccacagccaaatgcagatctaaaatactgtattcatagaatgcgaagcctgaggatgtggagg

SEQ ID NO: 138110 - DNA, 201 bp, Homo sapiens
tcatgaggatttagagcatgctttttaatatacagttaaccccttgaacaatataggtttgaactgcatggatctacttatacgtggattttttttttttttcctacagtaggccctccatatctggcaagtttcacgtccacagccaaatgcagatctaaaatactgtattcatagaatgcgaagcctgaggatgtggag

SEQ ID NO: 138111 - DNA, 201 bp, Homo sapiens
tgttgttaccattcttttgctgttacagatagctctgcaaacaatagcttgtgcttacgtaattttgatagtgtatctttgagatagatttctgtacttgsagttgctagggcaaaaggtaaatgtatatgtagctttgtaggtattgctgtatatttgaaattactctccgtataggggttgtgccattttatgacctca

SEQ ID NO: 138112 - DNA, 201 bp, Homo sapiens
ccggaatctctagggctgctccatttttaatacacatccctgatgatccgggtacacactaaagtttgagacgccagctcattttcctgccaaggagcttygcttattcccccacccaacctcccacacacatccatttcatcggctttattgagcaacagtttctgcaggacaggacatccatgcagctctatggagtca

SEQ ID NO: 138113 - DNA, 201 bp, Homo sapiens
gatcacctctctgatttttgcctcccaccctgggcctggcacacaagtcaggctccaccagtgcactagagaaacaaagacacaaagatgtgattttcccwaagcatgctttctgcaactgcagctcagaaatctcaaacggttcaagataagaaactggcccaaagctgattaattttgcaaaacagaccttccagggta

SEQ ID NO: 138114 - DNA, 201 bp, Homo sapiens
aaggctttcatggccctctggtcccccggtgagcaccctattactgtgctttccaaggctcagctcacatgtcactttctgctccaaatcctccctgatcycagtaaacaggactgaccacttccaccctgtgccccactgacctcatacaaacttctacaacaataacagtgctgctcagactgtcataaaacacacaat

SEQ ID NO: 138115 - DNA, 201 bp, Homo sapiens
gctctgttaaaaacttacccttattttcctcagggcaccatggtctcttgaagctctgttaaggccagtatgggccaagggctggtcattgtgaatgtttmctggtttgttcccatctcccactggaagctgtgagtgactttcaggtgggcactgccaggctgagcctggagatgcaagtgtggggtagtggatgtcaag

SEQ ID NO: 138116 - DNA, 201 bp, Homo sapiens
gtggttcacacctgtaatcccaacacttcgggaggccaaaaagggaagatcatttgaggccaggagtttgggaccagcctgggcaacacagcaagacctcrtctctacagaaaaatttgaaattagccgtgcatggcggtgcacatctgtagtcccagctacttgggaggctaaggcgggaggatcacttgagcctatgag

SEQ ID NO: 138117 - DNA, 201 bp, Homo sapiens
tcaccacaatttaattttttaaaggacataagaaggaaggaggaggagggaagggaaggcaccatctcaaagtgaagggtgttctttaaaacaacaaagtyagctctgttaaaaacttacccttattttcctcagggcaccatggtctcttgaagctctgttaaggccagtatgggccaagggctggtcattgtgaatgtt

SEQ ID NO: 138118 - DNA, 201 bp, Homo sapiens
gtctcttaaaaaaagaaaataataaatgaaataaataaatcaataaacaaatcctaatgtctgctatcaccacaatttaattttttaaaggacataagaargaaggaggaggagggaagggaaggcaccatctcaaagtgaagggtgttctttaaaacaacaaagtcagctctgttaaaaacttacccttattttcctcag

SEQ ID NO: 138119 - DNA, 201 bp, Homo sapiens
tcaagatccttactgaaccttccaacaacacttcttttattctccttcatgctccagctctacgtttgctttttttgtcctccctcaagggcaaggatcayctctctgatttttgcctcccaccctgggcctggcacacaagtcaggctccaccagtgcactagagaaacaaagacacaaagatgtgattttccctaagca

SEQ ID NO: 138120 - DNA, 201 bp, Homo sapiens
acatggaagctgccatcagccaggagacaagatacgtacatggcaaggccaaaaggcagaacaagtcagggtgtgcccatgagacgaaaccagggcagcartgcccctctccttctgttgaggcctccacagggatgtacagtgcaacagcggagtagccatccccaggtcaggtttccaactgcacctgccctgccagtc

SEQ ID NO: 138121 - DNA, 201 bp, Homo sapiens
cagtaaataatgactgagccctcatgatatgccattcaccacaccagagctaaggaccaagagccaaggctgacgtggtccctgccctcctggtctcccayccacatcacccctaatgacatggaagctgccatcagccaggagacaagatacgtacatggcaaggccaaaaggcagaacaagtcagggtgtgcccatgag

SEQ ID NO: 138122 - DNA, 201 bp, Homo sapiens; identical to SEQ ID NO: 24568

SEQ ID NO: 138123 - DNA, 201 bp, Homo sapiens
gcgtccacagcagcaccatgggaggtctgattgatccacatgaattcctaggcattcagacctaagaatcatcttcttcctgcttgcccgcggctccgcckgcatccaaaccgctgctcgccccatgtcgctcggtagctcaacagaagacccctgaaggctatgtgggatttgccaatctcccaaaccaagtatacagaa

SEQ ID NO: 138124 - DNA, 201 bp, Homo sapiens; identical to SEQ ID NO: 24569

SEQ ID NO: 138125 - DNA, 201 bp, Homo sapiens
ccacccaacaatgggctcctcagccccccggagataaagattgggataaagatcaatgccaccccctgcctcctgccctgtaaggccctctgtggcatggycgctgccatttccactgcctaccttgtcccttgctcaccctggtgtcttaggcttcactcacagtcccttgtagctgcatgtctccttcagcatggagcc

SEQ ID NO: 138126 - DNA, 201 bp, Homo sapiens
agttggagcctgcagtaagctatgaaaatgccactgcactccaacctggaggatgaagcgagaccctgtctcttaaaaaaagaaaataataaatgaaatamataaatcaataaacaaatcctaatgtctgctatcaccacaatttaattttttaaaggacataagaaggaaggaggaggagggaagggaaggcaccatctc

SEQ ID NO: 138127 - DNA, 201 bp, Homo sapiens
attaagttaaggatttggggtaccatactgcaaaagtaaaattttccagatgatataagtacctctaggtagtccaacaccaggaatcatgagctttgaarggatcaggagaaacatcattttctgtctctcataacattattccaaaacactgtcaactttcccagaaagatgaggacatttcttttgttatgtacccca

SEQ ID NO: 138128 - DNA, 201 bp, Homo sapiens
gtcaagggtattaatgttttcaataagccctgtaccagtaaccggttattgtccataggttggcattaaaatttgaaggcaaaaaagcgtttacattactrtgtttttataaactaaacatctttaatgcaggggcaagtagtgctaagataatttttcttaatgttcacgaccttttggtcaatgcaagatcagtcttaa

SEQ ID NO: 138129 - DNA, 201 bp, Homo sapiens
ttcattatcttttagtttatcaactttacataagttggaacttctcttaagaaagatgattaggctactttcactactctctccccgtttttttctcacartgtttgctattttaaaattatttgtctataaactacttttgtaactttcaatctttgtacttctgcattagatccattgaattttctcttagatcttttt

SEQ ID NO: 138130 - DNA, 201 bp, Homo sapiens
ttttgaaatttcatttcattttcaagaagtttctcattatccactaatagtaaacgaacatactcttgtataggaggcttaaaatactattctgatgttaratatagtgtcaatttaatagaaactgagtatcaaagaaagtgttttttttaaagaaacaaaatttatttgtactttttctaaccttttgtttatatttcc

SEQ ID NO: 138131 - DNA, 201 bp, Homo sapiens
cagaactagatcgtaaagttgcaaatagtcatttgtcatacacaggaaaattgacctgtagctgtgctgctcttggtaatgtgttaccgagggaagggtgrgaaaagtaaggctaagttctccaaccttgacccaggccttgggcattgcctgtggcagcagcatgaaatgctgacagcttcctgcctccttgcaacaaca

SEQ ID NO: 138132 - DNA, 201 bp, Homo sapiens
tgcagaactagatcgtaaagttgcaaatagtcatttgtcatacacaggaaaattgacctgtagctgtgctgctcttggtaatgtgttaccgagggaagggkgggaaaagtaaggctaagttctccaaccttgacccaggccttgggcattgcctgtggcagcagcatgaaatgctgacagcttcctgcctccttgcaacaa

SEQ ID NO: 138133 - DNA, 201 bp, Homo sapiens
aaggtttttccctctgtactcattattgttatggtaaaataacctcatcaaagttagtggctttacttttaaggaacaactgatggatgaggaatttaatragctattcttgctttagatagtataaacatgtcatgttgtagttataaatatctaactggaggtcatcaggaagaccctaggaaactgccagtggttatc

SEQ ID NO: 138134 - DNA, 201 bp, Homo sapiens
acaatggttgaactagtttacagtcccaccaacagtgtaaaagtgttcctatttctccacatcctctccagcacctgttgtttcctgactttttaatgatygccattctaactggtgtgagatggtatctcattgtggctttgatttgcatttctctgagatgatgccagttaataagatgcaggaagactattagtcacc

SEQ ID NO: 138135 - DNA, 201 bp, Homo sapiens
ctgtgttaactaaaatttcagaatgtagtaaaattaattgataatgaaaatagaccattgacatttactgtttgagctatagttttatcttcttttcttcttttttttttttttcctgtttcttgatttcatccctttagtttccccctttttatattctaatttggccatgatatgaaactgaagtctttttaaagcttg

SEQ ID NO: 138136 - DNA, 201 bp, Homo sapiens
tgtgttaactaaaatttcagaatgtagtaaaattaattgataatgaaaatagaccattgacatttactgtttgagctatagttttatcttcttttcttcttttttttttttttcctgtttcttgatttcatccctttagtttccccctttttatattctaatttggccatgatatgaaactgaagtctttttaaagcttgt

SEQ ID NO: 138137 - DNA, 201 bp, Homo sapiens
taatcccagcactttgggaggctaaggtgggcagatcaccagtggtcgggagttcaagaccagactgaccaacatggagaaactctgtctctactaaaaayacaaaattagctgggcatggtggcgcatgcctgtaatcccagctaactcaggaggctgaggcaggagaatcacttgcagccgggaggcggaggttgcggt

SEQ ID NO: 138138 - DNA, 201 bp, Homo sapiens
aagtgtataaatctttttttttttttttttttgaggcaaggtcctgctccctcacccaggctggagcgtggtggtgatctcagctcactgcaacctctgcytcctggttcaagtgattctcatgcctcagcctcccaagtagctgggattataggcatgtgccaccacacccagctaatttttgtatttttagtagaagca

SEQ ID NO: 138139 - DNA, 201 bp, Homo sapiens
aattcttatgtatggatttggatacaaatctgttcattcagaaacagtctgatttgccttttgggttgatatgatattttttagaattttattttaatttktctattgactttttatctatacttctttgctttttatttttagtggttgctctaatgataaaatatacattctcaacttcttgcaatgtacctaataatg

SEQ ID NO: 138140 - DNA, 201 bp, Homo sapiens
ctttttagcttctagaatttttgctatttttctcctgtctttgttcttgaggcttctagcttttttcagctttatattaagaaaatgatgaaacctatagaaaagttaaaataacagtacatgagcatctagattccaacagttttgtgtgtgtgtgtgtatgtatgtatatacattcaaatgttggcaaaatgtaagtta

SEQ ID NO: 138141 - DNA, 201 bp, Homo sapiens
agccattctagtgggtgtgttgtggtatttcatgttttaatttgcagttctctaataactaatgatgctgagaattttttaatgtgcttatttgacatctrtatcttcagatagacatttggtgtctattagaatcttttgctcatgttttaattgggttgttttaaattttgttgagttataataatttttttttttgag

SEQ ID NO: 138142 - DNA, 201 bp, Homo sapiens
attctactcatgatgctggtattacaaaagcatatagaaatatttaaatatcacacattaaaatgtattggtatacattttaaaacctaagaatttaaagrtgttattaaaatatttgttttataggcctaatttttgaaagattaccaattttattcccaagttaaatttgattgactgtcatggcaaaacagaatttca

SEQ ID NO: 138143 - DNA, 201 bp, Homo sapiens
attgtaggagagaaagggatgctgagcccctctcctctgctcctgggttgcagaatggaagtgagaatgcagtaccttacccctggtggtgctgtgtcacrggagcctccatttcctgctggagatgtgagatttgcaggatccaagatgtcctcgagtaaaagtccattgtgaggagggacaggtaaaggaggcagagag

SEQ ID NO: 138144 - DNA, 201 bp, Homo sapiens
  misc_feature (1)...(201): n = A,T,C or G
gctgataggcttcatgcagttgtaaagaaagaattccctgaaatatgaagggatggtatgaaaaaattagtaacaagaactaaaatgttatataaattttnataattgtcagaataagggtagaggtgggtaaagttgtcttagaattgtttttttttcctcaggaaaggaccaggataccctggtcagttctcaaattgt

SEQ ID NO: 138145 - DNA, 201 bp, Homo sapiens
aaaaagaactcctaaaactcaacaacaacaaaaaacacaacccaatctaacaatgcataggacatttctccaaagaaggtatacaagatatataagtggcsattaagcacatgaagagatgctcagcatcactaatcattagggaaatgcatatcggaactatagtgaggtacaacttcacacacgttggatgactattgt

SEQ ID NO: 138146 - DNA, 201 bp, Homo sapiens
atgatttaaatgagatacaaagatttttaaaaatcattagtggatttagtgaattaaataaagctaatctatacttagagtttataaatttagctgccacmtatgaaatatcttccaaagatctgagattcttaaacacaaggaacatttcacatatctttgttttagagaatttgacaaatgaagttagaattaagatcg

SEQ ID NO: 138147 - DNA, 201 bp, Homo sapiens
agtcctagttgaggatatggagaaattagaacccagaacccttgtgcattgttgatggaaatgtcaagtggcacagctgctgtggaaaacagcatggtggytcctcaaaaaattaaacataaaattaccatgttatccagcaattacacttccactttgggtatataccaaaaagaattgaaagcagagacttgaagagat

SEQ ID NO: 138148 - DNA, 201 bp, Homo sapiens
caaaagaagtacactcctacttaaatatacataaaaaccagttttatgcattctaaacactcagttgtatatacggttctacaactcgctttccccacccyccacactcctctccaaaatgcagttattcacatgaagaaattaactttgataaaacatgatgctgtaatccataggacccattcagtttccccacctctc

SEQ ID NO: 138149 - DNA, 201 bp, Homo sapiens
aaccatccttcagaacaacatgaaggaactgtggtgtgttatggactggtgagagaaaacactttttaaaaaattgtttaatagttcttcagctgaatackgtcttgtttgctaatcattagtttccaaacaaacgaaacagtcatttgtctggttttagatgtgtttgatcccagatgtggtatacacagtagagagtcc

SEQ ID NO: 138150 - DNA, 201 bp, Homo sapiens
tcttttctacgcattttatttttgtcgactgtccaagggtgtgaccatttaactaagtgggtaagaatccaatggagtcatcaaagagtaaaaaggaaaamataattccaaaactttgatagagaaagctactgtctaaaattgtaaggactaagaaaggaagttttctcaacctcacccttcttttttcttactttatag

SEQ ID NO: 138151 - DNA, 201 bp, Homo sapiens
cccaaagtgctgggattacaagcatgagccactgtgcctggctgagttgtaataattctttatatattctgtatacaagtcctgtatcagattatgatttrcaatatagtctgtagcatgtctttttattttcttaatggtgtcattggaagagcaaaagtttttaactttgatgaagtccaacttatcacactattttta

SEQ ID NO: 138152 - DNA, 201 bp, Homo sapiens
aaatgacagaggatgaattaaatcagtctttgtgaaaactagcccctcaagcccagctggagagttgtattaaaatcaactttaatgagagttaatttgtrtagaataattatgccatttcaggaatacaatttgatgaatcttgaccagggattggtaaactttttctgtaaagggccagatagtaaatattttaggctt

SEQ ID NO: 138153 - DNA, 201 bp, Homo sapiens
tgaattggacacctggggatatttcagagtcactgttttacatggaaacagaaaagataatgaattaattcgtgtaaagcagaggaaatgtgaaattgctytaacaacttatgaaacactacgcttatgcctggatgaacttaacaggtaatgggaataataggaataggaatgattgtattaatagtctacttacatccc

SEQ ID NO: 138154 - DNA, 201 bp, Homo sapiens
gtccaacttatcacactatttttaattgactataagttttgtgtcatatctaagaaatacgtgcctaatccagagtcgcaaattttttttcccattttttaaaagtttgagttcatatttaggtctgtgatctgtttttagttaattttcatgtgtggtgtgaagtaagtgtttaaattcatttttttcatagaactcctg

SEQ ID NO: 138155 - DNA, 201 bp, Homo sapiens
ctgtaggataaattcttagtactggaattggatagcaggtagagctggatttaggggattactttttgataactggagttaaattaccccatatccccacragtgatgtataagaatgtctgtttccaccttttcgtttgcactaggtattagcaaacataaatttatgactacctgagagatttaaaatttttatcttgc

SEQ ID NO: 138156 - DNA, 201 bp, Homo sapiens
ggtttctcaggcgcaccaagactcttatcaaggatcagttgcctaagaaggaagaccgggtaagaaccgcatttgtatatattattaatttgtggtcatattttttttttcctttttaagaaaaagtctgtctcctgtggcattttgtaaatacagttttttgccttttattctgtatggaaaaaattgttgcgcgcagaa

SEQ ID NO: 138157 - DNA, 201 bp, Homo sapiens
ttgcagatgagagttcaatgtcaacccgatttttttccttggaaaggattttttttttaattgtttggaagtattaaggacttttttaattgatgaaattyggaaatttccatgagccctaacactcaccatagaattcttccaaataagttttgctttagaaaatatatatacagtgctttatgcagggaaagttgcata

SEQ ID NO: 138158 - DNA, 201 bp, Homo sapiens
tgcctcccaaagtgcttggattacaggcgtgagccaccacgcccggcctgtgtctacatttctgagcctgtttacagaataaacatggcatttagggaaaraaaaaattagcattgttttatagagacattactgtatttgcttgtatgcacctttgcctgtttattgccaataatctgatgtagtgatataagcatacaa

SEQ ID NO: 138159 - DNA, 201 bp, Homo sapiens
attatccataggcttatctgcctatggaattttaagttcaaaattttcttttataatgacaaaacatcttctgtcactccatattgcagatgagagttcartgtcaacccgatttttttccttggaaaggattttttttttaattgtttggaagtattaaggacttttttaattgatgaaattcggaaatttccatgagcc

SEQ ID NO: 138160 - DNA, 201 bp, Homo sapiens
cttatttcccaaaccgaaaatttccatcatcttctgttgcttttaaattatctgacaatggagactctattccttataccatcaataggtatttgagagastaccaaagagaaggaacccggtttctttatggacactacatccatggaggagggtgcattctgggtgatgacatgggacttggaaaaacagtacaggtat

SEQ ID NO: 138161 - DNA, 201 bp, Homo sapiens
ttattattttgtttgaaatgatcacttttttttttttttaagacagtgtctcactctgtggcccaggctgtatggtgcaatcttggctcactgcaacctcygcctcccggatttcaagcaattctcctgcctcagcctcccgagcagctgggactacaggcctgtgccaccccacccagctaatttttgtgtttttagtag

SEQ ID NO: 138162 - DNA, 201 bp, Homo sapiens
atacctcatatacctttcttcccaatctttaaaacaaccttgccaaaattattttttgccatttttacagatattattcagagaggttaacgcccttgccyaacttcacagagcagccaagcaatcagagctaacatttgaatcaaagtcaaatcaatttagtatttcttgctctaatttattatatgaggttatggttcc

SEQ ID NO: 138163 - DNA, 201 bp, Homo sapiens
agacgggagaattgtttgaacccaggaggtggaggctgcagtaagctgagatgacgccactgcactccatcctggacaagacagagcaagactctgtctcaaaaaaaaaaaaaaaagaagtcttgagagcaaaagaactagcatatatgaaaataccttgcatagttcctgatatatagtagatgctcaataaaggttaat

SEQ ID NO: 138164 - DNA, 201 bp, Homo sapiens
tcctgtattataatgttcttgtcaggttttcttatcaaagttacgctgaactcataaaacgaggtcacagtattttcccctttttctaaaccctgaaaggktctgttacagattggcattacatttttcttaagcattaggtagaatttgttggtgaaactatctggcccttaactttctttgtggaaggtttataattac

SEQ ID NO: 138165 - DNA, 201 bp, Homo sapiens
acattattatttatttctccttgtattttttttcacagtttttttggatttcagattttgtttgactcatgagctatttagatgtatgttgtttaatttcyaagtgtttggaattttttttgttgtcctcctgaaatgtattgctagtttgactccattatcgttagagaacatactcagtataataccattatattcagt

SEQ ID NO: 138166 - DNA, 201 bp, Homo sapiens
gaaatgcatgagaaataaaatagtatttatattcacccctattttaacctattctgatcttcctctttcctttctgttctagttccaagccttattctgctttttttttttttccttatgaactttctagccaccaatcttttaggttaagtctgctggtaacaggtgctcttagttttcgttagtctgagaatgtcttat

SEQ ID NO: 138167 - DNA, 201 bp, Homo sapiens
ttaccatgttatccagcaattacacttccactttgggtatataccaaaaagaattgaaagcagagacttgaagagatacttgtacactcatgttcatagcrcctgtattcacaatagctaaaatgtggaagcaactcaaatgtccatcgatggatgaatggataaacaaaatacagtttatacataaaatggaatactatt

SEQ ID NO: 138168 - DNA, 201 bp, Homo sapiens
taaaagccacccacagtgattatgatacaattggttctcaactccactttgaaaaacactggatattaggtgtatcggggaaattcagccagatatcgggygaaattcacccccaatattttacataggtttttttctattttccctaagtgtcggccggtctgagaaataaagagacagtacaaaagagagaaattttaa

SEQ ID NO: 138169 - DNA, 201 bp, Homo sapiens
gagggcggccggaagtggcgttggccgccattggcctgccggccagccaccttgctgtcctccgccgccttccgggtgttacgtgcagccgggctcggccyctccccctggccggatggatccgtcggcgccacagccccgcgcggaaacctcaggcaaaggtaccagctccgcgctcgccccttacgcagaggcctgtgt

SEQ ID NO: 138170 - DNA, 201 bp, Homo sapiens
ccatggattatctcatttaatactcagaatatccatatgtgataggcactattatacccattttacatatgagaaagctgaggcacagtgcacttaagtarcttgctcaaggtcatagccaataagtggcagggtcaggatctgaatccatgtggtcttactgcaaagcttacacttttaatcagcctctctccacagaca

SEQ ID NO: 138171 - DNA, 201 bp, Homo sapiens
ttcccaaagtattgggattacaggcgtgagcctctgcgcccggccagttttcactgttataatctatgaaatcagatgtagattatgatttttattattgktataaacaaaatactaataactaccttgtattttatcttggcagatggtgtattgttctttgacagatttccagaaagctgtctatcaaacagtgttaga

SEQ ID NO: 138172 - DNA, 201 bp, Homo sapiens
actcaagattgtaaaagagttcaacagtacacaagatgttaacatttgccttgtctctacaatgtaagaaaattaaatttaataactagatttttatccarttgtttttgagatttagcataatttttaaaactattactggattaatttttaatggctatgcttatttagaagcagcaaaaatactattatgaccgaaat

SEQ ID NO: 138173 - DNA, 201 bp, Homo sapiens
gtttctttttttttttttcgaggaactgcaatactattttccacaatggctaaaacattttacattcctaccaacaattgtccaggtttcctatgcctccrcatcattgccaacacttgttattttttggttttcttcattatagccatcctactatgtgttaagtggtatttcattacggttttgatttgcatttctgta

SEQ ID NO: 138174 - DNA, 201 bp, Homo sapiens
tttcccccaaattgtgacattttcaagcatataggcagtatggccttgccccggttcccctcagcaactgtaacaggcattgggtgctcatacagagcatyctataaagcctccatatgagagaagctgtggggaatagacctatagttaaaccactgtgatgaatcagtttagaattttaattagcactatggtctgtat

SEQ ID NO: 138175 - DNA, 201 bp, Homo sapiens
tgagatttgcaggatccaagatgtcctcgagtaaaagtccattgtgaggagggacaggtaaaggaggcagagagaacatcaaatgtaacatatgggtgacyttataagttcaaagataaatttcccccaaattgtgacattttcaagcatataggcagtatggccttgccccggttcccctcagcaactgtaacaggcatt

SEQ ID NO: 138176 - DNA, 201 bp, Homo sapiens
aaagaattgaaagcagagacttgaagagatacttgtacactcatgttcatagcacctgtattcacaatagctaaaatgtggaagcaactcaaatgtccatygatggatgaatggataaacaaaatacagtttatacataaaatggaatactattcagccttaaaaagaaatgaaattctgataaatgctacaacatagaca

SEQ ID NO: 138177 - DNA, 201 bp, Homo sapiens
taagattaatcccattttaggaaggaacagatcaataacttttgacatcctgtgtaataagaattttatagattcactcccactgtctttcagaatttcartggactttaaaaataaacatatataaaatgcacaaagtaaaaattaaatcagaatagaaattaacttaaaatgaggaataaaatatacttatgaatgagc

SEQ ID NO: 138178 - DNA, 201 bp, Homo sapiens
taaatttaataactagatttttatccaattgtttttgagatttagcataatttttaaaactattactggattaatttttaatggctatgcttatttagaarcagcaaaaatactattatgaccgaaatttcaatgtcttaagttttagctaagcttttctctcatttcctttatcaacattgaattcctcttagaagtctg

SEQ ID NO: 138179 - DNA, 201 bp, Homo sapiens
gagttcaagaccagtctggtcaagatggtgaaaccccgtctctactaaaaatacaaaaattagccaggcatggtggcaggcgcctataatcccagctactygggaggctgaggcagagaattgcttgaacctgggagacggagcttgcagtgagccgagatgccgagattgtgccactacactccagcctgggagacaggg

SEQ ID NO: 138180 - DNA, 201 bp, Homo sapiens
aaaaaaatataaaaattagccagcatggtggtacatgcctgtagttccagctgcttgcttgggtggccaaggcacgagaatcacttaagcctgggagacgraggttgcagtttgctgagattgcaacactgtgctccagcctgggcaacagagtgactccgtctcaataaaaaaaaaaaaaggaaactacttcaacatata

SEQ ID NO: 138181 - DNA, 201 bp, Homo sapiens
agcactttgggaggccgaggcgggcggatcatgagatcaggaggtcaagaccatcctagctaacacggtgaaaccctgtctctactaaaaatacaaaaaawtagctgggcgtggtggtgggcacctgtagtcccagctacttgggaggctgaggcaggagaatggtgtgaaccaggaggcggagcttgcagtgagcctaga

SEQ ID NO: 138182 - DNA, 201 bp, Homo sapiens
caatcttaaatttatgctattttcttcattctaaaaatagaattgtacacagcagtttttgttttgtcttaaagcttttagctctgtaataaacagttcatttttttttttttttttggtatagcacaactacttgaaaattatttttttctaacctatttaaccaaccttgggaaaaagtgggaagttactcatcttagg

SEQ ID NO: 138183 - DNA, 201 bp, Homo sapiens
gtacctgaaaacattctttagttagtttctttagtgtggctcttttggtgatgaattggctcactttttggttgtctgaaaatctttacccttcattcttgaatatcatccgtaggtataaaaatataggttgcttttattatcactttgaaaatattctgttgtatagtatcttccattctttttcctgcaaggtcagct

SEQ ID NO: 138184 - DNA, 201 bp, Homo sapiens
tgttcttgcgatagtttactgtgatgatttccaatgtcatccatgtccctacaaaggacatgaactcatcattttttatggctgcatagtattccatggtrtatatgtgccacattttcttaacccggtctatcattgttggacatttgggttggttccaagtctttgctattgtgaatagtgtgcatgtgtctttatagc

SEQ ID NO: 138185 - DNA, 201 bp, Homo sapiens
gtattccatggtgtatatgtgccacattttcttaacccggtctatcattgttggacatttgggttggttccaagtctttgctattgtgaatagtgtgcatktgtctttatagcagcatgattcatagtcctttgggtatatacccagtaatgggatggctgggtcaaatggtatttctagttctaggtccctgaggaattg

SEQ ID NO: 138186 - DNA, 201 bp, Homo sapiens
atacccagtaatgggatggctgggtcaaatggtatttctagttctaggtccctgaggaattgccacactgacttccacaatggttgaactagtttacagtsccaccaacagtgtaaaagtgttcctgtttttccacatcctctccagcacctgttgtttcctgactttttaatgattgccattctaactggtgtgagatgg

SEQ ID NO: 138187 - DNA, 201 bp, Homo sapiens
cacaatggttgaactagtttacagtcccaccaacagtgtaaaagtgttcctgtttttccacatcctctccagcacctgttgtttcctgactttttaatgaytgccattctaactggtgtgagatggtatctcattgtggttttgatttgcatttctctgatggccagtgatggtgagcattttttcatgagtttttcgctg

SEQ ID NO: 138188 - DNA, 201 bp, Homo sapiens
ttccacatcctctccagcacctgttgtttcctgactttttaatgattgccattctaactggtgtgagatggtatctcattgtggttttgatttgcatttcyctgatggccagtgatggtgagcattttttcatgagtttttcgctgcaaaaatctccttaagctgataagcaacttcagcaaagtctcaggatacaaaatc

SEQ ID NO: 138189 - DNA, 201 bp, Homo sapiens
cacctgttgtttcctgactttttaatgattgccattctaactggtgtgagatggtatctcattgtggttttgatttgcatttctctgatggccagtgatgrtgagcattttttcatgagtttttcgctgcaaaaatctccttaagctgataagcaacttcagcaaagtctcaggatacaaaatcaatgtacaaaaatcaca

SEQ ID NO: 138190 - DNA, 201 bp, Homo sapiens
caacaacagaaaacaagtcctagttgaggatatggagaaattagaacccagaacccttgtgcattgttgatggaaatgtcaagtggcacagctgctgtggraaacagcatggtggttcctcaaaaaattaaacataaaattaccatgttatccagcaattacacttccactttgggtatataccaaaaagaattgaaagca

SEQ ID NO: 138191 - DNA, 201 bp, Homo sapiens
gggcttgattaccgacgacttgatggaagtacaaaatcagaggaaagactcaagattgtaaaagagttcaacagtacacaagatgttaacatttgccttgyctctacaatgtaagaaaattaaatttaataactagatttttatccaattgtttttgagatttagcataatttttaaaactattactggattaatttttaa

SEQ ID NO: 138192 - DNA, 201 bp, Homo sapiens
agaagagatggtggctatggacaagtggtgcaattgtatcagcatttactaggtcactatgaaccccgaatacagatggtgtgcactcgataggtcctctstagtagttgcttcaaatatacttcaaattttccttattgatatattggacttatgccctcttaaaatgcgtgtgctgttaccacatagataatagcttgt

SEQ ID NO: 138193 - DNA, 201 bp, Homo sapiens
atacacaaaatatttattcagtggtatgacagagacaccaactaatcagaacaggtgctcagtcattcagaagagatggtggctatggacaagtggtgcarttgtatcagcatttactaggtcactatgaaccccgaatacagatggtgtgcactcgataggtcctctgtagtagttgcttcaaatatacttcaaattttc

SEQ ID NO: 138194 - DNA, 201 bp, Homo sapiens
gcttatttttaaatgtagatatcaaggagtatgtgcacttaagtttttaatcaaagtgaacaaatttaagcttaatttaaaataagaactatcttttatgyctttaataatgttcatatctttatttttcaaaacagtctttggtataattactaaataacatatttgatgggtcagttctattcctctaataatgtctgt

SEQ ID NO: 138195 - DNA, 201 bp, Homo sapiens
gacggagtctcactctgtcacccaggctggagtgcagtggcgtgatcttggctcactgcaagctccgcctccctgggttcaagcgattattctgcctcagyctcccaagtagctgggactacaggcgcacgccaccatgcccggttaatttttgtatttgtagtagagacagggtttcaccatcttggccaggctggtctt

SEQ ID NO: 138196 - DNA, 201 bp, Homo sapiens
aatatgaggagtggacttcaagaggattttaaaaaaatatagtagtcttcttttatagttcttcatcttgtgtttcttctagcttgggcaatggaataaakgttctgtagattactatggaactaaacctaattaatgttgtcccaaataagggcaatcctatgaaatgccctctaattttagtgtatcctcttgattgtt

SEQ ID NO: 138197 - DNA, 201 bp, Homo sapiens
gtatttccccaaagaagcaacactctcctaccaacactctaaattttccagtatgtatttccccaaaagaagtacactcctacttaaatatacataaaaamcagttttatgcattctaaacactcagttgtatatacggttctacaactcgctttccccaccctccacactcctctccaaaatgcagttattcacatgaag

SEQ ID NO: 138198 - DNA, 201 bp, Homo sapiens
tattctttggtaccttaattctagctgtaggatcaaagtggttaagagctttttaaaaaatatataggtttgtttcttgtagaatgctatttgcagttacrcaactaacctaacttttagaatttgtaggaaaactacattgttaaattgttcaagaaaatatgaggagtggacttcaagaggattttaaaaaaatatagt

SEQ ID NO: 138199 - DNA, 201 bp, Homo sapiens
gccatgttgtctaggctggtttcgaactcctgacctcaggtgatccacctgcctcggtctcccaaagtactggaattacaggcgtgagccaccgtgcctgscctcatcaaaacttttgatgcagtttttccccagtaaagaaggaagagcttctctctgcagtgtgttttctgttcacacgttgtccttcctatactgtgt

SEQ ID NO: 138200 - DNA, 201 bp, Homo sapiens
tttttttttggtatagcacaactacttgaaaattatttttttctaacctatttaaccaaccttgggaaaaagtgggaagttactcatcttaggagctgttmttttgagtactgtcttagactactctcaagtaagagtctttcctcaattatgtagtaatttttttcagtccattactatatacatttcctttttacctat

SEQ ID NO: 138201 - DNA, 201 bp, Homo sapiens
ggtctctttgattaagttttaaagaggtgattaaaaccgaggctgattgggtggggcctgggtccagtatgactggtatccttataggaagagaaagagayaccaaggacacacacacaccacagaggaagggacttgtgaggacacagcaagaaggcagtcatctgcaagccaaggggagaggcttcaggagaaaccaaa

SEQ ID NO: 138202 - DNA, 201 bp, Homo sapiens
atcatgtgttaggccacaaaacaagtttttaatacattttaaaagattgaaatcattcatttttttccagtcacagtacaatgaaactagaaatcaacagyggaagaaaaattgaaaaattcacaaatatgtagaagttaaacaacacacacttaacaaaagggttgaagaagaattcacaagggaagttagaaaatagct

SEQ ID NO: 138203 - DNA, 201 bp, Homo sapiens
cttttaaatcattgcaggaaaaacagagataaagttcttctcttttctttttccaccaaggtgagttcatctaaagtatatccttgattggccagcctcawcttttgaggcataaagaataaagcatatgcctacatgacaccttacagccacattttctcttatctacacagtaggaaatagtgaggtaagcaacttgaa

SEQ ID NO: 138204 - DNA, 201 bp, Homo sapiens
gaaggtcttccttaccagtttgcaaagacttggggagttggctgtctttccaaatggtagttttcaagaaaagaccacaagacattagaaaaaaaaaaaaraaaagaaaagaaaagaaagaaaatgaaaatacagctcattcagagtaacaaaataaatctctagaaactaactgtccctgaagcaaaacaggcattggag

SEQ ID NO: 138205 - DNA, 201 bp, Homo sapiens
agatgagatgaaataaaagtctttgggaactttacctccttattgacaatatgatgatgaataacatttgatgtaatagctaatactttatttctctaacytggaaaaaatgaaaggaattagaaaaaatgaatgaggttagtattgtatgaaaataattttaaagaaattctcaagtgatgtttatatgtataaagtgta

SEQ ID NO: 138206 - DNA, 201 bp, Homo sapiens
tagatctttgaagggcttgcagcattgttttctgatagatggtgtggctaaatagatgtgcagtgccaatctgattttcattcctttttgggaactcgtargagtttttcttcatctacactattctaaaatttcacggtgatatttgagtcttggtgtggatcttcgttcatttttttgtgctgggtacagtaggcttgt

SEQ ID NO: 138207 - DNA, 201 bp, Homo sapiens
tgattgccattctaactggtgtgagatggtatctcattgtggttttgatttgcatttctctgatggccagtgatggtgagcattttttcatgagtttttcrctgcaaaaatctccttaagctgataagcaacttcagcaaagtctcaggatacaaaatcaatgtacaaaaatcacaagcattctcatacaccaataacaga

SEQ ID NO: 138208 - DNA, 201 bp, Homo sapiens
acaaatttaagcttaatttaaaataagaactatcttttatgcctttaataatgttcatatctttatttttcaaaacagtctttggtataattactaaatarcatatttgatgggtcagttctattcctctaataatgtctgtaatggtatttaatctactgggtaaaatgaggatttataataatttgtatattaaatatt

SEQ ID NO: 138209 - DNA, 201 bp, Homo sapiens
acttacaagggacgtgaaggacctcttcaaggagaactgcaaaccactgctcaatgaaataaaagagggtaccaagaaatggaagaacattccatgctcaygggtaggaagaatcaatatcgtgaaaatggccatactgcccaaggtaatttatagattcaatgccatccccatcaagctaccaatgactttcttcacaga

SEQ ID NO: 138210 - DNA, 201 bp, Homo sapiens
aggcgcgtggcaccacgcccagctaatttttgtatttttagtagagatgaggtttcaccatgttggccaggatggtctttatctcttgaccttgtgatccrccctccttggcttcccaaagtattgggattacaggcgtgagcctctgcgcccggccagttttcactgttataatctatgaaatcagatgtagattatgat

SEQ ID NO: 138211 - DNA, 201 bp, Homo sapiens
cttttgtaactttcaatctttgtacttctgcattagatccattgaattttctcttagatctttttcctggatcccgtgtcttcttctttcttggtttgccrccatgttttactggaaaatgattcaagttttgatgtttggtccattaactttccacatgccttctaagtctttgtaatgtgtggtattagcattagcaca

SEQ ID NO: 138212 - DNA, 201 bp, Homo sapiens
tacaagggacgtgaaggacctcttcaaggagaactgcaaaccactgctcaatgaaataaaagagggtaccaagaaatggaagaacattccatgctcatggrtaggaagaatcaatatcgtgaaaatggccatactgcccaaggtaatttatagattcaatgccatccccatcaagctaccaatgactttcttcacagaatt

SEQ ID NO: 138213 - DNA, 201 bp, Homo sapiens
tcaaaagaacaaagctggaggcatcatgctacctgacttcaaactatactacaaggctacagtaaccaaaacagcatggtactggtaccaaaacagagatrtagatcaatggaacagaacagagccctcagaaataacgccgcatatctacaactatctgatctttgacaaacctgagaaaaacaagcaatggggaaagga

SEQ ID NO: 138214 - DNA, 201 bp, Homo sapiens
atctgtgcttttcggctgttcagtgtttcccccaacatatgcctgaaatcagctgtttctccattcttccgtgaggctctcattcctttcagtaaagagamcactatgggtgctcattgctactggggtaacaatcaactctaaactttcttagtggacagggctatggaatacagcttttaaaaatcatgagtttatatt

SEQ ID NO: 138215 - DNA, 201 bp, Homo sapiens
ttaagcatacatccaaaggacattttcttagatccatttctggttttctttagaacccaaacacattgtaggagagaaagggatgctgagcccctctcctytgctcctgggttgcagaatggaagtgagaatgcagtaccttacccctggtggtgctgtgtcacaggagcctccatttcctgctggagatgtgagatttgc

SEQ ID NO: 138216 - DNA, 201 bp, Homo sapiens
tagttgtagaacatttccatcacctcagaaagttatttgtctatagtcagtccctgcttccatctccagtccctggcaactactgatctgctttctctttytatagatttgccttaactgggtatttcatataaatggagccattcaatataaagtctttggtgtctggcttctttcacttaacataatgtttttgaagtt

SEQ ID NO: 138217 - DNA, 201 bp, Homo sapiens
gaatattgctatggacttgaggattattgaagtatatttgacataaaacgtacccttgtaagttagaatgatttttagtgaattttaaaagttgtgctatyaccacaatctagttgtagaacatttccatcacctcagaaagttatttgtctatagtcagtccctgcttccatctccagtccctggcaactactgatctgc

SEQ ID NO: 138218 - DNA, 201 bp, Homo sapiens
agggagacactgtaattggacttagtaattggaggcctaatttcatatttgaaagttaaaaatggaaatcataggattaaccttcacccaaaggacggacrtacttgagatgaatcaagtataagaagtacttacatatgcttgatgatggcttgggaaaaaggaactctcacgttcagcatgttgattttctttcgtttt

SEQ ID NO: 138219 - DNA, 201 bp, Homo sapiens
atttttctttttaccatcattaaagaatgtctataccctttcttttctacgcattttatttttgtcgactgtccaagggtgtgaccatttaactaagtggktaagaatccaatggagtcatcaaagagtaaaaaggaaaaaataattccaaaactttgatagagaaagctactgtctaaaattgtaaggactaagaaagga

SEQ ID NO: 138220 - DNA, 201 bp, Homo sapiens
ccatcactgtgtgtcatgaggataaatactttctgtaataaggattttctccctttatgaaaaatatagttgtattatgatttaccaaaagtatgcttccrcattagctatttgtggatattttgtgcaatagttgaccatcattttcttggaatttattgtgccaaagtaacccgataataaatgttattgtaagtgata

SEQ ID NO: 138221 - DNA, 201 bp, Homo sapiens
tctgttgcttttaaattatctgacaatggagactctattccttataccatcaataggtatttgagagactaccaaagagaaggaacccggtttctttatgracactacatccatggaggagggtgcattctgggtgatgacatgggacttggaaaaacagtacaggtatttaattatgttataacagtaaagtcactttac

SEQ ID NO: 138222 - DNA, 201 bp, Homo sapiens
gcgatctcggctcactgcaaactccctctcccaggttcacgccattctcctgcctcagcctcccgaatagctgggactacaggtgcccgccaccgggcccrgctaattttttgtatttttagtagagacggggtttcaccgtgttagccaggatggtcttgatctcctgacctcgtgatccacccaccttggcctcccaaa

SEQ ID NO: 138223 - DNA, 201 bp, Homo sapiens
tggcgtgatctcagctcactgcaacctctgactccttggttcaagcgattctcctgcctcagcctcctgagtagctgggactacaggcgcgtggcaccacrcccagctaatttttgtatttttagtagagatgaggtttcaccatgttggccaggatggtctttatctcttgaccttgtgatccgccctccttggcttccc

SEQ ID NO: 138224 - DNA, 201 bp, Homo sapiens
agtttctccactgcaaagttactatttttttctttgtaattgatatgtagtttatggggagatcctctgagactgccagttcctcatcagacctgcacgcrtaacccttagtgttcattcgtgattcctgcctgagtcagctaccactataatggttgtcaggtggtgatttttctatttccattatccttcttggttgtt

SEQ ID NO: 138225 - DNA, 201 bp, Homo sapiens
tggggcatttgagagatgctcatatactactgttgagagtacaactggtataggtatatgtagagtctccatagctaactgacagaaatcctctcacataygcacagtgaaggatgacaagggcttttacttagcattgcttgcatttgtttaaaaaacaaaggaaacaacctaaatgtctgacagtaacagaataaattc

SEQ ID NO: 138226 - DNA, 201 bp, Homo sapiens
tgggtgggaacacagccaaaccgtatcacctacaaaccaatgaaaagaataataggcatttcactgaattaaaaatgcaagtggttaacacatgtgaaaaratctttttaaccacactcataatctagagatagaaaataaaataagaccatttgcattgtatattctgcaaaagcttttttaaaaaatgcatattgaggt

SEQ ID NO: 138227 - DNA, 201 bp, Homo sapiens
ccccacctcagcctcccgagtagctgggactacagatgcgcactaccaggcctgggtaatttttgtactttttgtagaggtgggatttcaccatgctgccyaggctggccttaaactcctgagcttgcccgcttctgcctcctaaagtgctgggattaaaaatagctactgtttgcctgtaatcccagcactttgggaggc

SEQ ID NO: 138228 - DNA, 201 bp, Homo sapiens
aaggaagaggactattgatattgatattgtggatttcactttgggattctttttcagtttttaaaaaacagcaaaatttttttattcttgttttagatgtycttaatagttgctcctctttctgtcctctacaactggaaggatgaattggacacctggggatatttcagagtcactgttttacatggaaacagaaaagat

SEQ ID NO: 138229 - DNA, 201 bp, Homo sapiens
aagttagcataatggtcatctacaatggtggcaaagtttcttacacccttcgcttgcttgcccgcttgcttgcccgcttgcttgctttctctctttctctytttctttctttctgaatattgctatggacttgaggattattgaagtatatttgacataaaacgtacccttgtaagttagaatgatttttagtgaatttta

SEQ ID NO: 138230 - DNA, 201 bp, Homo sapiens
ttagaaaggaatacatgtaaaaacagaaagctttcccagagtgatatttcatttctgaaatgcagtttttggcctttcactattctagaggtgactgattwaaatatttgtttttgttcttttcatctataagcaattttagaactattccacaataaaacatgttctggctttttctttgcagataagttttgtaaacct

SEQ ID NO: 138231 - DNA, 201 bp, Homo sapiens
gctcaaggtcatagccaataagtggcagggtcaggatctgaatccatgtggtcttactgcaaagcttacacttttaatcagcctctctccacagacagctrtcaaggaaattggtcaaaatgaaaaccacagaaaaatttcccccttttttttgatcttgttgtattttgtactttttcattaggtcatcgagacatatta

SEQ ID NO: 138232 - DNA, 201 bp, Homo sapiens
acctcagttgactccagttcctctccttccttctttcctttctttctttttttctctttatatatatatatatgtgtgtgtgtgtgtgtgtgtgtgtgtgygtatgtatgcatatgcgatgtatcatatcacacacacacatatacagttgtcccttggtatccatgtgggattggttccaggacctctcttgggtaccaa

SEQ ID NO: 138233 - DNA, 201 bp, Homo sapiens
atgtatagtaaacctcactcttgagagaaatgggattgctgataattaaaggtttcttaggttattttcagtaccttttttggataataagatcttcagtrgattcaaaacatactaaaatatgaaggttcttgggatctcaagtcatgttattcactcaggaatatagtaataaagagaaaaataatattgtctttattt

SEQ ID NO: 138234 - DNA, 201 bp, Homo sapiens
agctgccagcgtggctagaagtaagcaggcagaaaaatgtgaagagagagactggcctagcctcccagcctgcatctttctcccatgctggatgcttcctrtccttgaacgtcggactcaagttcttcagttttggaacttggactggctctccttgctcttcagcctgcagacatgctattgtggcacttcgtgatcgtg

SEQ ID NO: 138235 - DNA, 201 bp, Homo sapiens
tataacaaattatgccaaatttagcagcttaaaacaatattcatgtattgtctcacagtttctgtgggttgggaatccagctgccgcctagcctggtcctstagctttgcctctcacagggctgcagtcatctcaaggtgactggggaagattcacttcctagcccacctgtttgttggcaggattcagttccttgtgggt

SEQ ID NO: 138236 - DNA, 201 bp, Homo sapiens
ctaataactgactctagagaaaatgtttgccagcctttgctttagagagatagtggcatggaggaaagtgattcatttttgaagtagaaccaggatattcygatggattggatgtaaggagtaatattaaatgaggtttaagggctgactaatggttttctaccttgaaaagttggttagatgatgatgccagttttttgt

SEQ ID NO: 138237 - DNA, 201 bp, Homo sapiens
gctgtgtgactctgtgttggtcctggggataaaatttataacagtacaaacttttcttggaaaggaaattactctctactggaaggaaaagacaaaaaacmagtggacatgataattaaatgttatgataagtgctacagaggcaataaaatgatgagatagagaataatgggtaccctacgctaaataggtggactggga

SEQ ID NO: 138238 - DNA, 201 bp, Homo sapiens
tcaggcaatccacccacctcagccttccaaagtgctaggattataggtgtgagccaccgtgccaagcctatattgtgattttttaaaaaggaataatgatkattcctttgcttgatttaatttcattttagaattattgaaatatttagttcataataacttactctctgagaaggaaaaacctgcatcaggttttctaga

SEQ ID NO: 138239 - DNA, 201 bp, Homo sapiens
gaaaacagctgctgaagtcaggaactaaaaaaagaggttttcctaaataaacaaaaatataaaatgtgttttaattaaaagttaccaaatactccctgagmtgtactctcatgtctcatggagatttttgttttctgttcccaataaaaattccacaccagtattttaaactctccctgttgtgttcatcctcagcataca

SEQ ID NO: 138240 - DNA, 201 bp, Homo sapiens
ccatgaacttcttaacatcataaatgttcttttctttttacttctttctttattttgtctattgttatgatgagatccaagcattttctcccttgtatggrtttttcataagctacgaactaagctacattttttagttactattttccccctaacttcttgaatttgaacatgatttcatttttagttagcctacagatg

SEQ ID NO: 138241 - DNA, 201 bp, Homo sapiens
tgagttagagcccatgatgtggaatttttaactagctcccaggagtcctagtaaaactaatcagcccacattttgagtagcaaggtcacagctccccaaaytacaggccaagatgtaatggtttaccacaaatgggctacaggtgcactgatatgttggtcccacagctttctggacagcaagagtacctaagccagtgtg

SEQ ID NO: 138242 - DNA, 201 bp, Homo sapiens
aatacacttttatgaaacagattctttggttcattgaatttttgagctgaaagttttctagagcagtacctcttaaactttagtgtacatgcgaattaccragggatcttgtcaaaatactgattgtgatttagtaggtctgagttagagcccatgatgtggaatttttaactagctcccaggagtcctagtaaaactaat

SEQ ID NO: 138243 - DNA, 201 bp, Homo sapiens
cttggctacagtgcctgattaaagcatttttccttggcaatacgtgttgtctcagtgattggctggctgtatggtgagcagcaggtcttagaccgaacccrtggtgtttcagtaacgccatctgtgaccaagattacagatgagtactagaggaaaattaataaattaattaaagccctgctgtaactgttttcgcatata

SEQ ID NO: 138244 - DNA, 201 bp, Homo sapiens
aaagctttaaacttgtatttgttttatctgagttccttcctcaggaaaggacccccaggcctctcaaaaagtatcaaagaactgaaactcaccagatcgtrgaattcagacagtgagacaccaggcctctcattcatcagattacttccttagccctcccaacttcctgttttcccatacattgttacatttcttctctgc

SEQ ID NO: 138245 - DNA, 201 bp, Homo sapiens
gccgaagagcgatgctcggagggcggccggaagtggcgttggccgccattggcctgccggccagccaccttgctgtcctccgccgccttccgggtgttacrtgcagccgggctcggcccctccccctggccggatggatccgtcggcgccacagccccgcgcggaaacctcaggcaaaggtaccagctccgcgctcgcccc

SEQ ID NO: 138246 - DNA, 201 bp, Homo sapiens
tggagtgaaagagggagagagagaccctatcaccagaatgagttgagttggtaattagtttaaaccaaaacaaatgatttcgactcattaaattttaggasacttaacccatttccctgttaaatccaacaggaaatcttaacaatttaagcagttgttctgtagtttggatactgagagattccatttctaactcaactg

SEQ ID NO: 138247 - DNA, 201 bp, Homo sapiens
tctttattcttgtatgccccagttgttagtgaatggcagaagtttgttgtaagtagataaatgaaggttgagatatttagttcagttgagttttattgcckattgagtcagggcattatattctgccttaaataggaggtttaaagaaggtgtgattatctaccacaagtcacctgggatgccttctggcacccaaatgag

SEQ ID NO: 138248 - DNA, 201 bp, Homo sapiens
ctgttcagtgtttcccccaacatatgcctgaaatcagctgtttctccattcttccgtgaggctctcattcctttcagtaaagagaccactatgggtgctcmttgctactggggtaacaatcaactctaaactttcttagtggacagggctatggaatacagcttttaaaaatcatgagtttatattgatatttttcattca

SEQ ID NO: 138249 - DNA, 201 bp, Homo sapiens
gataatgtggtaaaatatgcttataatagttacctcagttgactccagttcctctccttccttctttcctttctttctttttttctctttatatatatatrtatgtgtgtgtgtgtgtgtgtgtgtgtgtgtgtatgtatgcatatgcgatgtatcatatcacacacacacatatacagttgtcccttggtatccatgtgg

SEQ ID NO: 138250 - DNA, 201 bp, Homo sapiens
taatgtggtaaaatatgcttataatagttacctcagttgactccagttcctctccttccttctttcctttctttctttttttctctttatatatatatatrtgtgtgtgtgtgtgtgtgtgtgtgtgtgtgtatgtatgcatatgcgatgtatcatatcacacacacacatatacagttgtcccttggtatccatgtggga

SEQ ID NO: 138251 - DNA, 201 bp, Homo sapiens
tttcaccatgttggccaggatggtctttatctcttgaccttgtgatccgccctccttggcttcccaaagtattgggattacaggcgtgagcctctgcgccyggccagttttcactgttataatctatgaaatcagatgtagattatgatttttattattgttataaacaaaatactaataactaccttgtattttatcttg

SEQ ID NO: 138252 - DNA, 201 bp, Homo sapiens
gttttaaatcttactgtattgcggaatttaataagattataaaaattacccttgaatacacttttatgaaacagattctttggttcattgaatttttgagytgaaagttttctagagcagtacctcttaaactttagtgtacatgcgaattaccgagggatcttgtcaaaatactgattgtgatttagtaggtctgagtta

SEQ ID NO: 138253 - DNA, 201 bp, Homo sapiens
ttgtttcttgtagaatgctatttgcagttacacaactaacctaacttttagaatttgtaggaaaactacattgttaaattgttcaagaaaatatgaggagkggacttcaagaggattttaaaaaaatatagtagtcttcttttatagttcttcatcttgtgtttcttctagcttgggcaatggaataaatgttctgtagat

SEQ ID NO: 138254 - DNA, 201 bp, Homo sapiens
ctccgttcagggtccctgacttcccgcaacaggtgtaaaacttccaaaagaaataagagtaccaagaaaatgtaattattttagtacatgataggaaatayatagttgtgttgggaagatggaggaaactcagaaagcatgaccaatgaagtgtcagaactaaatccaaacataaatatgaatatgttgaaacttttttta

SEQ ID NO: 138255 - DNA, 201 bp, Homo sapiens
gtattgtgttatgagactctgcatgtgatttaaatcttccattttagtacacctcctctttgacaccatgccagccaagtaggggtggaaagctaggttcygtctttggcctctgctgatagcctgagagggaagtgctttactactgctcccacctggcgtcccctgacaccatggagggagaccctgttatcattggga

SEQ ID NO: 138256 - DNA, 201 bp, Homo sapiens
ttttttattgtatcattgtgtcttggacattttgagtattgtgttatgagactctgcatgtgatttaaatcttccattttagtacacctcctctttgacamcatgccagccaagtaggggtggaaagctaggttctgtctttggcctctgctgatagcctgagagggaagtgctttactactgctcccacctggcgtcccc

SEQ ID NO: 138257 - DNA, 201 bp, Homo sapiens
tttattgttactaactagatgtcaaaattaaggaagaggactattgatattgatattgtggatttcactttgggattctttttcagtttttaaaaaacagsaaaatttttttattcttgttttagatgttcttaatagttgctcctctttctgtcctctacaactggaaggatgaattggacacctggggatatttcagag

SEQ ID NO: 138258 - DNA, 201 bp, Homo sapiens
ttttattttgctctttatatccatttttgttttgtttgtttttgctgagactcaatttttttgtttgtttcaagcatgtttgtaattgcttgttgaaacayttttatgatggctttgttaaaattcttgtcaggtaattccaacatctgattcatctcagtcttttcttattcaggctgcaattttcctggttcttggtat

SEQ ID NO: 138259 - DNA, 201 bp, Homo sapiens
gaactagatcgtaaagttgcaaatagtcatttgtcatacacaggaaaattgacctgtagctgtgctgctcttggtaatgtgttaccgagggaagggtgggraaagtaaggctaagttctccaaccttgacccaggccttgggcattgcctgtggcagcagcatgaaatgctgacagcttcctgcctccttgcaacaacaga

SEQ ID NO: 138260 - DNA, 201 bp, Homo sapiens
agaactagatcgtaaagttgcaaatagtcatttgtcatacacaggaaaattgacctgtagctgtgctgctcttggtaatgtgttaccgagggaagggtggraaaagtaaggctaagttctccaaccttgacccaggccttgggcattgcctgtggcagcagcatgaaatgctgacagcttcctgcctccttgcaacaacag

SEQ ID NO: 138261 - DNA, 201 bp, Homo sapiens
tttctccaaagaaggtatacaagatatataagtggccattaagcacatgaagagatgctcagcatcactaatcattagggaaatgcatatcggaactatartgaggtacaacttcacacacgttggatgactattgtaaaaataaaagcaacaacagaaaacaagtcctagttgaggatatggagaaattagaacccagaa

SEQ ID NO: 138262 - DNA, 201 bp, Homo sapiens
tatgtttccctttttctgtttcagaggtcaacatttatctgttttcaaaaattaggaacaaatttgtgtaaaatgtaagttttaaatcttactgtattgcrgaatttaataagattataaaaattacccttgaatacacttttatgaaacagattctttggttcattgaatttttgagctgaaagttttctagagcagtac

SEQ ID NO: 138263 - DNA, 201 bp, Homo sapiens
tatagaattctgggttgacagttcttttctttcagcacttgaaagataatgccactttcttctgatatccatggtttctgatgtttctctctgttgttcayatttcgtgaatgatactggttctcatcatgcttactgattctgtcttttgtcttttccactgtactgttcagcccatttggcaagttttgtatttcagct

SEQ ID NO: 138264 - DNA, 201 bp, Homo sapiens
tttgtgtagcttcctggtggttgctctgggtatttacattgtacatagtaacttctcacagtctactggtatacaggtttaccagtttgaatgaagtatasaaattttacttacatttaagcttcttttcctactccacttttaagatattattgtcttagatatttcctctacatgccctaagcagcatatcagattgta

SEQ ID NO: 138265 - DNA, 201 bp, Homo sapiens
ctgacatatacttggactaatattaatatagccagtcttgcttttttctttaataattgcctggtatatcttttatcatcctttcactctcagcctagctktgtcatcatatttaaagtgttttgttttgttttttgtggagagcatattgttttttcaaactaccctgccaatcttacgattttaaatggtatatttagg

SEQ ID NO: 138266 - DNA, 201 bp, Homo sapiens
ttgtttcatttctaatattggtaatttgtgtattctcttttatctttgtcattgctagtttagcaacgaatcagctttttttcactgatttttctctgttrtttttctgtgttcagttttattgattctgcttttttatttattatttcctttcttctgcttgctttttttgcttctttttctagtttcttagggggagga

SEQ ID NO: 138267 - DNA, 201 bp, Homo sapiens
aagcctgaagcatatgcggtagcaccctgactgcctgtcttgtgatcaacatgtgatggtggaaataatctgtacttaagaatccattctgtgttaaggcyatatggatgttagccacatttttaaattaaactttttattctgagatatttctagattcacaagtagttttaagaaataatacagaatgatcccatgcac

SEQ ID NO: 138268 - DNA, 201 bp, Homo sapiens
tggccgggcacggtggctcacgcctgtaatcccagcactttgggaggccgaggtgggtggatcacctgaggttgggagttcgagaccagcctgaccaacayggagaaaccctgtctgtactaaaaatacaaaaaaaattagctgggtgtggtggcgtgtgcctgtaatcccagctacctgggaggctgaggcaggaaaatt

SEQ ID NO: 138269 - DNA, 201 bp, Homo sapiens
aacttttctatttgggctttcaggaatgcctcctccatctagcaatactgactctgagtcaagttcattttcagtgcacccagcccttctgctaattctcrtttcgacttcaagctcttctgagcttccatcttttcagatgaagcgcacttgtttatggctgcacagatcccttccaagcccttctgatctctgtatctt

SEQ ID NO: 138270 - DNA, 201 bp, Homo sapiens
taatacagacggggtttcactatgtcggccaggctgatctcaaactcccaacctcaggtgatccacccacctcagcctcccaaagtgcagggatgacaggygtgagccaccacgcctggccgtagctcaatttaaaatgagtaatagggaggtcccaccactcctcctccaaaccagttaagtcaaggggaacggggacca

SEQ ID NO: 138271 - DNA, 201 bp, Homo sapiens
atccatgccacttggcagcagctgaagaccaaaaaaacacaactccgagaccgctctggagacttccaacagccttgatgtggcgcagccagaatgtgacrcccaaatctcagtggcttccaacaatgaaggtttctgccttattactgctactagtccttcaagaatggctacaggtgtgctccgtgtcatcttcgctct

SEQ ID NO: 138272 - DNA, 201 bp, Homo sapiens
agcgatccgcccatctcggcctcccaaagtacttggattatagacatgagccaccgcgcccagcctccccctgcccttttaacagctgcttatccacttayttgaaagctcttcccctggggagggtgggggtttggggagaaactggtgtgtggcttggaggtgtggggagcactttcaggaaccagccctctgctgccc

SEQ ID NO: 138273 - DNA, 201 bp, Homo sapiens
cttggagttctgtcttgctgtcagtgaatttacagcatgtgggtagatagccctgttcctacagcacccagccaggaactagcactgtgagtagatttatraaccccattctccagcacttccattcagcaagtcctgtgtccttcccatccctagccctggggccagcccaagcttataagtcccttgacaccatctctg

SEQ ID NO: 138274 - DNA, 201 bp, Homo sapiens
ccgccgtggtccatgggaagagcctaatggacagtgatgatgatgccctcctcaagtcccaacacatcaacaccctgggccagttctgggtaagggctatscggggccagagccagccccgggcgtgcagggagcccaggcaggatggaggggaggggatgatttgccagggcttgggctcaggccagcagggatgtccac

SEQ ID NO: 138275 - DNA, 201 bp, Homo sapiens
cctctgagaagccaagtcagcaccgatccagctccaaaacatggggcccatgggacatgagctggcctgccaaagacctgcccagggtctcagatctttcmggggctgccaattataaacagatgctcctcctgggacgcacccagagaccacccagctcatgtcgccggtgggagggtgcgctgcagctgaactccagga

SEQ ID NO: 138276 - DNA, 201 bp, Homo sapiens
tccgggagaaggtctgtagcctgggagggtctattcctagcacagctgaccacaggctaattccgggcaaagagaacattctcatgtggcctggaagagasctctgcttatggcagaatggctttgcccggggcacctttggggactctcccatgaagctggccccagttacataggcagggattagggttgattacgtaa

SEQ ID NO: 138277 - DNA, 201 bp, Homo sapiens
ccccatctctactaaaaatataaaaattagccaggcatggtggcaggagcctgtaatcccagctacttgggaggctgaggcatgagaatcgcttgaacccrggaggcggaggtggcagtgagccgagatggtgccactgcactccagcctggacaacagagtgagactccatctcaaaaacaaacaaacaaaaaacatata

SEQ ID NO: 138278 - DNA, 201 bp, Homo sapiens
ggccctctccctcgcaggaaggctcgggccctagagcatcatgtgtgtccggggtgggctgttctccccgaaagaaaggtggaggggttgtcagagctgcrgctgctccaccctgacaccccatctgccctcagaccaccaaggccttcctgccgcgtatgctggagctgcagaatggccacatcgtgtgcctcaactccg

SEQ ID NO: 138279 - DNA, 201 bp, Homo sapiens
tgggctgttctccccgaaagaaaggtggaggggttgtcagagctgcagctgctccaccctgacaccccatctgccctcagaccaccaaggccttcctgccrcgtatgctggagctgcagaatggccacatcgtgtgcctcaactccgtgctggcactgtctgccatccccggtgccatcgactactgcacatccaaagcgt

SEQ ID NO: 138280 - DNA, 201 bp, Homo sapiens
ggggagcactttcaggaaccagccctctgctgccccgtctcacatggccaccagcgacccagcccctggatcctgccccactaaccatcgctatcttcttktcttcctcctactccagcatacttccacaggctgcactcgaggagatccacaaattctcaggaacctacacctgcatgaacactttcaaagggcggacat

SEQ ID NO: 138281 - DNA, 201 bp, Homo sapiens
aattctctgatgttggagggatgtgatgctctctgaggaccacggaaaatcactttctgtggggctggtgcttgggaaaattcccgcctcaactggccctwtgggccaagggcctggcttttctcccagcatcctggtctttgcagggtgtgctggcctggccatttcccattgaatgtcccgcttcctctgaatcccctg

SEQ ID NO: 138282 - DNA, 201 bp, Homo sapiens
atttccaaactgtcgcttctaaaggaataagggacccaaattccctgactagcatgtcaaacaaaatttcctggtttttttcttctaaattcaccaacttktctatttgggctttcaggaatgcctcctccatctagcaatactgactctgagtcaagttcattttcagtgcacccagcccttctgctaattctcatttcg

SEQ ID NO: 138283 - DNA, 201 bp, Homo sapiens
agcctaatggacagtgatgatgatgccctcctcaagtcccaacacatcaacaccctgggccagttctgggtaagggctatccggggccagagccagccccrggcgtgcagggagcccaggcaggatggaggggaggggatgatttgccagggcttgggctcaggccagcagggatgtccacgaacaaggtggccagacaag

SEQ ID NO: 138284 - DNA, 201 bp, Homo sapiens
actaccttctccaggttgcagctgagaagcacacctataaaatgagaggggttacaatgatccctaagatcccggcacgctcaaaaattctcgtcttacasatcagtcaacccaagaaagcaacggattgccaggcttccctgaattgcaagcaggagacttccaggtgaagaaagcatttgtccccatcactgatctcag

SEQ ID NO: 138285 - DNA, 201 bp, Homo sapiens
cttgaccctggaaaagttactaccttctccaggttgcagctgagaagcacacctataaaatgagaggggttacaatgatccctaagatcccggcacgctcraaaattctcgtcttacacatcagtcaacccaagaaagcaacggattgccaggcttccctgaattgcaagcaggagacttccaggtgaagaaagcatttgt

SEQ ID NO: 138286 - DNA, 201 bp, Homo sapiens
accatgcctggctaacttttgtatttttagtggagacaggctttcaccatgttgcccaggttacctgttgttattattcctctttcccctacagctcataygctgccatgtccactgcccctgcacatgtagagactggatgtgcgggcaacttttagtttggcaggtgtcacctgtctgctggggatgtgtgatacgttc

SEQ ID NO: 138287 - DNA, 201 bp, Homo sapiens
tctcgtgtcacgtagcctctggaaaattctaccattcactgagagaatgaaagtgaaaagacaaataacatcttagtattattacagaaacaatgtggccrggcacggtggctcacgcctgtaatcccagcactttgggaggccgaggtgggtggatcacctgaggttgggagttcgagaccagcctgaccaacatggaga

SEQ ID NO: 138288 - DNA, 201 bp, Homo sapiens
taatggacagtgatgatgatgccctcctcaagtcccaacacatcaacaccctgggccagttctgggtaagggctatccggggccagagccagccccgggcrtgcagggagcccaggcaggatggaggggaggggatgatttgccagggcttgggctcaggccagcagggatgtccacgaacaaggtggccagacaagacga

SEQ ID NO: 138289 - DNA, 201 bp, Homo sapiens
taaacggttaccattagcaactccttatcaatgtgacttttctctataccgtgtaacaaagcaaaatagagaaatcagttggatctgggtctgatgtcatyggagccgccatctgtaacccccagtttaaaatgtttaccttcccaaagcagccattttgttctcattagcaacctttagagtaagaaaatattatggagt

SEQ ID NO: 138290 - DNA, 201 bp, Homo sapiens
attctagaacggaggataaggggccgtaaacctcactgttgaactcagagaagctcctaaataaatgctaattatgatgagtactgttgttatttttttttgttttattttacttgccgagacagagtctcactccatcactcaggctggagtgcattggtgcgatctcaggttattgcagcctcaacctcccaggctcac

SEQ ID NO: 138291 - DNA, 201 bp, Homo sapiens
ctctgggcggtgttcagccccctgcctttctccctctgtgctggtgaagctggttcttagttagggctcttggtccccctgtcatccgactccaggccctyttaccaacagaggcctcactgaccccagtgacacatcgtggggaggtgcgtcgtcctccgttaggtcaaggttaagaattagccaggcttctcttctgag

SEQ ID NO: 138292 - DNA, 201 bp, Homo sapiens
gcgtgccaccatgcccaactcattttgtatttttagtagagatggggtttctccatgttggtcaggctggtctcgaactcccaacctcaggtgatccaccygcctcagcctcccgaagtgctcggattacaggtgtgagccaccgtgcccacccccatcatcttcttataaggacactagttattggattcagggcacaca

SEQ ID NO: 138293 - DNA, 201 bp, Homo sapiens
aggggagcttcttagaagacttccagagctttctagagaaaagttggtctagaacacctcagcgctctccacagtaagccctcagccttcattttccaacmttccccacaactacttttgaacaggaagcaggagccaccccgctccccattctctgaactgcatccctcctcaccttccccaggagaaagcaaggctcaa

SEQ ID NO: 138294 - DNA, 201 bp, Homo sapiens
catcctcccacctcagcctccccagtagctaggactataggcacatgccaccatgcccagctaatttttgtatatttttgtagagacagggtttcaccatrttgcccaggctggtcttgaattcctgggctcaagcgatccgcccatctcggcctcccaaagtacttggattatagacatgagccaccgcgcccagcctcc

SEQ ID NO: 138295 - DNA, 201 bp, Homo sapiens
agtggtgagaagcctctggatttcagaggtcaggctgacagggtgcgtggtggagtgggcatacagtgagagaaaacacttaatgtgggacagtgaagagscttcggaggttaaaaagagcttggcatctgaaaacagggagtggtgtggaggggaagcagcctccgtcacttcccagcctcgggagcctggggctgggcc

SEQ ID NO: 138296 - DNA, 201 bp, Homo sapiens
caggaaccagccctctgctgccccgtctcacatggccaccagcgacccagcccctggatcctgccccactaaccatcgctatcttcttttcttcctcctaytccagcatacttccacaggctgcactcgaggagatccacaaattctcaggaacctacacctgcatgaacactttcaaagggcggacatagagacaggatg

SEQ ID NO: 138297 - DNA, 201 bp, Homo sapiens
gtgtcttaaattggtgtcagggtcaccaaaaacaaaaacaggatccatgggggcctgtgaaacttcgagtgccattcatgctcggttcagtcatctgactygtcaggatgaccagcagtgctccctgtaactcgccattatctgaccaattactggagctactttataatgaggcttctggagctactttataatgaggct

SEQ ID NO: 138298 - DNA, 201 bp, Homo sapiens
catacctgtaatcccagcacttgagaggccgaggtgggaggattgcttgaacccaggagttcaagaccagcctgggcaacataagaatacccctactctasaaaattttttttaaaaaaattagctaggtatggtagcatgcacctgtggtcccagccactccggaggctgggatgggaggatctcttgagcccaggagtt

SEQ ID NO: 138299 - DNA, 201 bp, Homo sapiens
aggatggaggggaggggatgatttgccagggcttgggctcaggccagcagggatgtccacgaacaaggtggccagacaagacgaatgaccagctctaggayacatcagactttgtgaaatatgctcggtgtcctggggcagggagccctcggccctctccctcgcaggaaggctcgggccctagagcatcatgtgtgtccg

SEQ ID NO: 138300 - DNA, 201 bp, Homo sapiens
tcatacctgtaatcccagcacttgagaggccgaggtgggaggattgcttgaacccaggagttcaagaccagcctgggcaacataagaatacccctactctrcaaaattttttttaaaaaaattagctaggtatggtagcatgcacctgtggtcccagccactccggaggctgggatgggaggatctcttgagcccaggagt

SEQ ID NO: 138301 - DNA, 201 bp, Homo sapiens
tcgtgactatgttggctctgttcattgattcagcaaactaggccttggagatgcggcagggaacctcataaacaaggttctctccttgtgacacttagtgytcttggagtgaccaccatccccagactgaaaaatctcctaacactgtggaaggatgagttggcaccaacaagcaggcttctaatggcagtagtgcttaac

SEQ ID NO: 138302 - DNA, 201 bp, Homo sapiens
cccagccagatcctgatctttcttgctggtaacttaggtgaggaagtgacaaccagcttcagggtgacacggctctgaggaatcgtgactatgttggctcygttcattgattcagcaaactaggccttggagatgcggcagggaacctcataaacaaggttctctccttgtgacacttagtgttcttggagtgaccaccat

SEQ ID NO: 138303 - DNA, 201 bp, Homo sapiens
gccgccgtggtccatgggaagagcctaatggacagtgatgatgatgccctcctcaagtcccaacacatcaacaccctgggccagttctgggtaagggctayccggggccagagccagccccgggcgtgcagggagcccaggcaggatggaggggaggggatgatttgccagggcttgggctcaggccagcagggatgtcca

SEQ ID NO: 138304 - DNA, 201 bp, Homo sapiens
gtaatgagtccatgtttgttacctgccgggtgaggccatgcttccttctcagtggcagcctcgtcactgcccttccagaatatccttaggggagtgactgmagctagatgggaggctcggcttagctcctgtgaaccttgaggctggaatggtcccatctatgctaccagctggtcttaataatcctggctctagacctaa

SEQ ID NO: 138305 - DNA, 201 bp, Homo sapiens
gaattctttcttctgctagcagctctgaggggtaccgccaaccggtttgggggtctctgctcagctagttcctggctttgctcttgactaattacttatayttccagggtctcagtgccttgtctctaaaaagaagccgagttcaagtctacagacccttatctgaaacccttaaggctagctgtgtctcataggtctgat

SEQ ID NO: 138306 - DNA, 201 bp, Homo sapiens
atcagtgacctccaagagagggaaacccaccctgactgtctggcacgtggtaatgttaactgtttttatgtcgcagtaaactcatttattataaatatgcygtgtgccaggtacggtgtgtgccataaattatttctcctcctcagaacagtcctggtgcggcattagccccatctcacaaatcaagactggcgctcagag

SEQ ID NO: 138307 - DNA, 201 bp, Homo sapiens
gctggggctggcttcctgggtgtgacccagggattctcactggccctgctctcagaagcgccctacacttggtttgaggctcggctgtcaccatcttgcarttctttacaatttttgaaccagggaccctccgaatgatgtggctggtcctaacgacagccatagcacacaggttgtcaacttcattcctcccaagttccc

SEQ ID NO: 138308 - DNA, 201 bp, Homo sapiens
tacagatgtgtggcttggtgcttaaggccaccaatggtcagcctggtgaaggccactgggccccagcctttcttacctcattggccatccctacttcaagraatgtggccttaaatcctcttttcagcagcctttcggggattttgatgagtgaagcgtatgatgatcttgtccacactgaaacagcctcctagggaacac

SEQ ID NO: 138309 - DNA, 201 bp, Homo sapiens
aggccaaacccctgctgggagtccaagggctgcctgttgctgaggaatgacatcaaacctgggtgattcatcacccttaatcttcctggtgccagagcggmtcacaagctctttgtgggattggggtcagagccagcaacatgagccctgcacctatagatccaggaagggcaggaagagcagtgagcaaaggtgatagag

SEQ ID NO: 138310 - DNA, 201 bp, Homo sapiens
ttgcatcactgtggcttaatgaccatttgttctgcgttgttattatcttcttccagattgttctctggggccggactgagaaatgcctgaaggagacgacrgaggagatccggcagatgggcactgagtgccattacttcatctgtgatgtgggcaaccgggaggaggtgtaccagacggccaaggccgtccgggagaagg

SEQ ID NO: 138311 - DNA, 201 bp, Homo sapiens
atttgccagggcttgggctcaggccagcagggatgtccacgaacaaggtggccagacaagacgaatgaccagctctaggacacatcagactttgtgaaatrtgctcggtgtcctggggcagggagccctcggccctctccctcgcaggaaggctcgggccctagagcatcatgtgtgtccggggtgggctgttctccccga

SEQ ID NO: 138312 - DNA, 201 bp, Homo sapiens
ctcccaagcgggccagttccaggctggacgtccgcctggaggaagtctctgccctgctccaggttgcggtcagggacttgtgggagggcgacaccactggytgatctaatttgaggagcttcatcacaatcctccccaacagctgagccagcggtagccaaaacattctcggcaggccaaaacaggggcctggagccaggg

SEQ ID NO: 138313 - DNA, 201 bp, Homo sapiens
agcagtttcatttccttgaggcgatgccccataaaagggctcctgaagctctttgtgaaggggtctgaaaagggcagatgagggtgtcctttggggcggaygtggggtttgggacaattgcatgtgattgtcattctttagctgtctgcatcccacagaaacttttttctgagtcttccagctggcccaagtcctgggtct

SEQ ID NO: 138314 - DNA, 201 bp, Homo sapiens; identical to SEQ ID NO: 24588

SEQ ID NO: 138315 - DNA, 201 bp, Homo sapiens
gaaggtggtgctgcaaggagggtcctgcccaccaaacacggcctttaactttttggtggtcctggcaccccttgctccaggttttggagacctggtgccasagtggggagagtgggcaggctgtcacccaactcccagcccaggccaggctgactcacgcggtgaccagagccatcaggagagggaggcaggccaggctgt

SEQ ID NO: 138316 - DNA, 201 bp, Homo sapiens
gggttggacccaaagggctgagtgacattacctgtgtgtaaagaatctatttggagagtgatccatggggaagcttttactctaccttctgttgttttttgttttgttttgttttgttttgttttttggtttttgtttttttgagaccggctctctctctgtcatccaggctggagtgcagtggtgagatcttggctcact

SEQ ID NO: 138317 - DNA, 201 bp, Homo sapiens; identical to SEQ ID NO: 24590

SEQ ID NO: 138318 - DNA, 201 bp, Homo sapiens; identical to SEQ ID NO: 24589

SEQ ID NO: 138319 - DNA, 201 bp, Homo sapiens
ggtctgtagatgctggctcctccctcctctccttggcacccccaccccaaggtcacccagcactttccagcaagaggtccagtgggggaaaagggcaaagrttgtgaggtgtcagccatgaactctagcctgagtttctctgcctccgtgttttgccaagtgcggccctgggcagtcagatggaggtggagcccctggcca

SEQ ID NO: 138320 - DNA, 201 bp, Homo sapiens; identical to SEQ ID NO: 24594

SEQ ID NO: 138321 - DNA, 201 bp, Homo sapiens
gccctgggctggctgccctcatggccccgtggctccctctcgcctgcaggtgggtgacatcaccatcctggtgaacaatgccgccgtggtccatgggaagrgcctaatggacagtgatgatgatgccctcctcaagtcccaacacatcaacaccctgggccagttctgggtaagggctatccggggccagagccagccccg

SEQ ID NO: 138322 - DNA, 201 bp, Homo sapiens
gaggaggccgtcaccacagtggattccggccctggggtctgatggagacattggtccgcccttcggtcagactcttgggggcgttatgggggttgggggggtctctgctctgcaacccttagctgaaccccatcctccacttctctcctcccgtctggtcagagtgggaagaggtttggattgggatcccccctcctgcac

SEQ ID NO: 138323 - DNA, 201 bp, Homo sapiens
gcgtaatcatctgttgttcccttggaaatgtagaccgtgtgggtttctctccaggactgtggcggggcaaatgtcccattggcctctgggaaaatccttctgactccagtcatctgtttgggctaaatatatcagtgacctccaagagagggaaacccaccctgactgtctggcacgtggtaatgttaactgtttttatgt

SEQ ID NO: 138324 - DNA, 201 bp, Homo sapiens
agggaggccagtttcagttttccccacttccccagatggagatggtgaagctcagagatgccaagtgactcatccaaaagtcacacagcaaatcaactccwgagcagattccttgaggccccaaccaggctgcttttcattccaaagggcagtgcaggctctcagctctgagcgctggctgccaagttagtgcggtccagg

SEQ ID NO: 138325 - DNA, 201 bp, Homo sapiens
ggcgtaatcatctgttgttcccttggaaatgtagaccgtgtgggtttctctccaggactgtggcggggcaaatgtcccattggcctctgggaaaatccttctgactccagtcatctgtttgggctaaatatatcagtgacctccaagagagggaaacccaccctgactgtctggcacgtggtaatgttaactgtttttatg

SEQ ID NO: 138326 - DNA, 201 bp, Homo sapiens
aggcgtaatcatctgttgttcccttggaaatgtagaccgtgtgggtttctctccaggactgtggcggggcaaatgtcccattggcctctgggaaaatccttctgactccagtcatctgtttgggctaaatatatcagtgacctccaagagagggaaacccaccctgactgtctggcacgtggtaatgttaactgtttttat

SEQ ID NO: 138327 - DNA, 201 bp, Homo sapiens
tgctgtcatggtggggagtttggaattgtggcttcttgcctaacaccaatgagaggactttgggacaaacccccagagccaggagtgttttgaggcctagyggggttgggaacaaagggtcaagtgtcgagggagtggggaaattatgggttggggacaggtgtgaacagtgggcttgggggtggcccaagagtactagac

SEQ ID NO: 138328 - DNA, 201 bp, Homo sapiens
aacccaggaggtgaaggtttcagtgagccaagatcacgccactgcactccagtctgggcaacaagagtgaaacatcatctcaaagcaaaagaaatgactaytctagaaacctaaagtgtcaccactctgggtgactggggcaggagtgaggagaagcctggaatgatatctgcttgctccccaccccaccctcagcacctc

SEQ ID NO: 138329 - DNA, 201 bp, Homo sapiens
gtgtgagaggcagggaacgccctggtatcctgtgacactgaagccagggcaagctcagggtggagagtacagatgtgtggcttggtgcttaaggccaccartggtcagcctggtgaaggccactgggccccagcctttcttacctcattggccatccctacttcaaggaatgtggccttaaatcctcttttcagcagcctt

SEQ ID NO: 138330 - DNA, 201 bp, Homo sapiens
cttgactcaagaagagacccctgtgtgcctggaggagtgagggaatgtggcacctggatgggtgtggggtagagggagtattccaagcaggcctcgaatcyctcagacaggaaaagccaaagggtgacccagacatgtcagcctcataaagacttccagataagcacatgcctctccaggagaaacccactgtgtctcttc

SEQ ID NO: 138331 - DNA, 201 bp, Homo sapiens
tgtgtgacgatggtaacacacgtgacttggtactctacatgactgcacagtgcttttgcacattcattgtcttccttgaccttttttttttttttttttttgagatggagttttgccagtcgcgcaggctggagtgcagtggcacgatctcggttcattgcaacctccacctcctcccgggttcaaatgattctcctgcct

SEQ ID NO: 138332 - DNA, 201 bp, Homo sapiens
ttgaaaacctctcctccctaagaaatccccccgcagcttgctctgcaggtggacagttttgacagctggtctctaccttctcaggcttggggacgtagaaraaggagagccttctaagtaaggtggaaggatggaatcaagaaatagcaagattctgtggttttgccccagtcaaggctgtgcctagggtagtcagatgga

SEQ ID NO: 138333 - DNA, 201 bp, Homo sapiens
cctctcctccctaagaaatccccccgcagcttgctctgcaggtggacagttttgacagctggtctctaccttctcaggcttggggacgtagaaaaaggagrgccttctaagtaaggtggaaggatggaatcaagaaatagcaagattctgtggttttgccccagtcaaggctgtgcctagggtagtcagatggaggtggag

SEQ ID NO: 138334 - DNA, 201 bp, Homo sapiens
tctccctcgcaggaaggctcgggccctagagcatcatgtgtgtccggggtgggctgttctccccgaaagaaaggtggaggggttgtcagagctgcagctgmtccaccctgacaccccatctgccctcagaccaccaaggccttcctgccgcgtatgctggagctgcagaatggccacatcgtgtgcctcaactccgtgctg

SEQ ID NO: 138335 - DNA, 201 bp, Homo sapiens
gctaggtatggtagcatgcacctgtggtcccagccactccggaggctgggatgggaggatctcttgagcccaggagtttgaggctgcagtgagctatgatygcactgctgcgttctagcctgggcaacagaagaagatcctgcctcaaaaaaaacaaaagttatattattaatctatgttgtattctttatctttgggtgg

SEQ ID NO: 138336 - DNA, 201 bp, Homo sapiens
ttctgggtaagggctatccggggccagagccagccccgggcgtgcagggagcccaggcaggatggaggggaggggatgatttgccagggcttgggctcagrccagcagggatgtccacgaacaaggtggccagacaagacgaatgaccagctctaggacacatcagactttgtgaaatatgctcggtgtcctggggcaggg

SEQ ID NO: 138337 - DNA, 201 bp, Homo sapiens
gggcatgacgtcatcgatgaatgaaaaccgggaattactcaaatactattctccctggttttttgcaatccagcgtacagtgcttcaccttctgattatayattgcagctgcttccaaaaatgaggatgacacggaagggtcatgaggagaattcagtgagacaatttagtgtagtgcatgccacgtgggagtcactcatt

SEQ ID NO: 138338 - DNA, 201 bp, Homo sapiens
ctgcgttgttattatcttcttccagattgttctctggggccggactgagaaatgcctgaaggagacgacggaggagatccggcagatgggcactgagtgcmattacttcatctgtgatgtgggcaaccgggaggaggtgtaccagacggccaaggccgtccgggagaaggtctgtagcctgggagggtctattcctagcac

SEQ ID NO: 138339 - DNA, 201 bp, Homo sapiens; identical to SEQ ID NO: 24591

SEQ ID NO: 138340 - DNA, 201 bp, Homo sapiens
cccagcacttgagaggccgaggtgggaggattgcttgaacccaggagttcaagaccagcctgggcaacataagaatacccctactctacaaaatttttttwaaaaaaattagctaggtatggtagcatgcacctgtggtcccagccactccggaggctgggatgggaggatctcttgagcccaggagtttgaggctgcagt

SEQ ID NO: 138341 - DNA, 201 bp, Homo sapiens
cccaccaccacgcccagctaattttttgtatttttggtagagacagggtttcaccgtgttagccaggatggtctcaatctcctgacctcgtgatccgtccrcctcggcctcccaaagtgctgggattacaggcgtgagccaccacgcccagccggcagtctgcagttctaattgggtgtcctgagcacagaagcaagcagg

SEQ ID NO: 138342 - DNA, 201 bp, Homo sapiens
cccagctacttgggaggctgaggcaggagaatcgctcaaacccaggaagcagaggaggcagtgagccgagatcgcgccactgcactccagcctagcccacrgagcaagcctccatctcaaaaaaaaaaaaaaagaaaaagaaaagaaaagaaaaagagtggatgttttaaaccttaattcatagaggttaagatcatgtta

SEQ ID NO: 138343 - DNA, 201 bp, Homo sapiens
aaactactggttcacttaaaagtagatcatatccctttaaaaagttatattgttggctgggggcagtggctcatacctgtaatcccagcacttgagaggcygaggtgggaggattgcttgaacccaggagttcaagaccagcctgggcaacataagaatacccctactctacaaaattttttttaaaaaaattagctaggt

SEQ ID NO: 138344 - DNA, 201 bp, Homo sapiens
attgtgtatgctgaaccaatggagatgtctatggtattggctttttttttttttttttttgctgttaattgtcagtcctcttcagttagagcacaaacaaratgaattttttctttctaatttgatgtggatggtctggcacttcaggctttatcttcaacatcatctcatcccttcttaacaagttatccatttattaac

SEQ ID NO: 138345 - DNA, 201 bp, Homo sapiens
gcttaggttagtctcgaactcttgggctcaagcaatccttccttcttgaccttccaaagtgctgggattacaggtatgagcttccacacccagccaagackgggttcttgaccctggaaaagttactaccttctccaggttgcagctgagaagcacacctataaaatgagaggggttacaatgatccctaagatcccggca

SEQ ID NO: 138346 - DNA, 201 bp, Homo sapiens
tttatttattttaaaaatagagacgggagtctccctatgttgcttaggttagtctcgaactcttgggctcaagcaatccttccttcttgaccttccaaagkgctgggattacaggtatgagcttccacacccagccaagactgggttcttgaccctggaaaagttactaccttctccaggttgcagctgagaagcacacct

SEQ ID NO: 138347 - DNA, 201 bp, Homo sapiens
gcccccctgcagtcttgctcacttgtgcaggaggccagagactgagcttttatttatttatttatttatttattttaaaaatagagacgggagtctccctrtgttgcttaggttagtctcgaactcttgggctcaagcaatccttccttcttgaccttccaaagtgctgggattacaggtatgagcttccacacccagcca

SEQ ID NO: 138348 - DNA, 201 bp, Homo sapiens
acagataataagcggcagagcttggatcttaccccagccatgctaacctcaaacccatactccacgccctggtttagaatgacatgaccggcccagaggcrggacacaggtgaggaccggtgggtgccctctggcctcggcccaaactttctcaggtgacacggtgacaccctggggcctgttcccttgctaagcacatcc

SEQ ID NO: 138349 - DNA, 201 bp, Homo sapiens
tggacacaacgaataaggggaagtcagagttgttctcagcagtttcatttccttgaggcgatgccccataaaagggctcctgaagctctttgtgaaggggwctgaaaagggcagatgagggtgtcctttggggcggacgtggggtttgggacaattgcatgtgattgtcattctttagctgtctgcatcccacagaaactt

SEQ ID NO: 138350 - DNA, 201 bp, Homo sapiens
gaaaacacttaatgtgggacagtgaagagccttcggaggttaaaaagagcttggcatctgaaaacagggagtggtgtggaggggaagcagcctccgtcacytcccagcctcgggagcctggggctgggcctcgcttggcctcctctattgaatgaggataatggagcccatttgtgttagtttcctgtcaatggcacaaca

SEQ ID NO: 138351 - DNA, 201 bp, Homo sapiens
tctaggagcccctagttgatcaggggctcaggtcctcactgaggtcaggctgccaccctccacctcaggggagcttcttagaagacttccagagctttctrgagaaaagttggtctagaacacctcagcgctctccacagtaagccctcagccttcattttccaaccttccccacaactacttttgaacaggaagcaggag

SEQ ID NO: 138352 - DNA, 201 bp, Homo sapiens
gaccactgcctttttttatgcagtttgcaagtctgagtggttttcagttttaaatggttggaaaataatcaaaacaagaatgatatttcatgacgtgtgaragttgcatgaaattcaaatgcctgtgttcataaataaggatttattggaacacgcccacaactcattcatttccagttggtcactgctttcatgctagaa

SEQ ID NO: 138353 - DNA, 201 bp, Homo sapiens
tcaggagttcaagaccagcttgacccaacatggtgaaaccctccttctctactaataatacaaaaaaaaaaaaaaaattgctgggcatggtagagcgcacytataatcccagctacttgggagtctgaggcacgagaattgcttgaacctgggaggcggaggttgcagtgagcagagatcatgccactgcactccagcctg

SEQ ID NO: 138354 - DNA, 201 bp, Homo sapiens
tgggcactgaaggcatgcagggagcaaagcagatgaaaatccccacccatgtagtgagagctggcattttagtaagagagacagataaaaagcaagatcartagaacagtacattctcatgcctgtaatcccagcactttaggaggctaaggcaggcggaacacttgaggtcaggagttcaagaccagcttgacccaacat

SEQ ID NO: 138355 - DNA, 201 bp, Homo sapiens
cacagggtagacatacctggtgaactgtgcactggctcttgaagtttccacctggaaacaacactgtcacttctgctcacatttcattagctggaacaggkcacgtggtggagccgctattaacatagcaggaaatacaatcccgcgtggaggagtagtcgttagttctgaaccaggctctgccatgccagggaagaagac

SEQ ID NO: 138356 - DNA, 201 bp, Homo sapiens
gaaaagtgagtctatttagacactagcatgcccaaatgtgtgctcattgctgtggcacccctgaaatgagtgagatcttagaatctgaaaatgagcacatrcctagattctcaacaagaaagtgccgggttagcaaatgaatgaatggttggtgggaactcattcatttattcacttattcatacattcagcacatttact

SEQ ID NO: 138357 - DNA, 201 bp, Homo sapiens
gaagggggcacccaggggcatccaggccacacctcggcctccctcagtccatcctgacctcgggtctgagatgctcctcagccgtctctaggagcccctarttgatcaggggctcaggtcctcactgaggtcaggctgccaccctccacctcaggggagcttcttagaagacttccagagctttctagagaaaagttggtc

SEQ ID NO: 138358 - DNA, 201 bp, Homo sapiens
cctggaaaggtgcaaacaagcactagcatgtaccgatagcctccagcatgaggcagttctgtaaagtctataagcaagttttcacaaggtatggctctttytcctgtttaagtttcttagaggaggggttctttttctttcccccctttgtaactctatctagtggcttagccatcagtgagaaattggaatccagatatg

SEQ ID NO: 138359 - DNA, 201 bp, Homo sapiens
tccactagaccagggccagcaaactcagtccaatcctgccgttcacctgagtgtcgtctgtgggtgcctttgtgcttccacggcacagtaggcagttgccmgagaccgtggcccgcaaagccggtaacatctcccacctggacccttacggaacacgtttgtcgggctcagcgcctgtgctctgccgagagcttctctccg

SEQ ID NO: 138360 - DNA, 201 bp, Homo sapiens
ggaatgggagagtaataaaaccaccgccaaccgaggaggcttcatatgcttatggcttttccaagtgctcataaatgccttctctattacatgttttctgracatattttcctttactggaacagcagttgcccagataagccaaggcttagaaacgagcctctgaatgcagttgctaattcacgagcttcagggtcgtca

SEQ ID NO: 138361 - DNA, 201 bp, Homo sapiens
catgttccataatgattccttcatagcagatggggtcaggccgcccccctgagggagcctccaccagcctcctcgactgcctgccacgccccagccccacrcagccactgaatccttccaaggcccttcaccccacgctcccctcctgcccaccagatctagccttactggcctccccgtctgtcgcgccaggcccatgcc

SEQ ID NO: 138362 - DNA, 201 bp, Homo sapiens
gatgctcacaggtccactgggtgccttccagcaccccactgcttatggggctgtgtctgtcttctgctagagggactcggcgtgtcaatgctcatgtcccrtgcctgaggtcccctggctgtgagtcacagaggggtttgaccccatccctgccccctggccccgcaactgagttatttctgctgaagcacctgctgaagc

SEQ ID NO: 138363 - DNA, 201 bp, Homo sapiens
ctagagggactcggcgtgtcaatgctcatgtcccgtgcctgaggtcccctggctgtgagtcacagaggggtttgaccccatccctgccccctggccccgcractgagttatttctgctgaagcacctgctgaagcacctgggtctctgcccaaatggagattgagccttagtgggcaggaccctccctcagtcctcaggga

SEQ ID NO: 138364 - DNA, 201 bp, Homo sapiens
gggacactggagccagacccgccatggaggacccccaagcacacgggactgtctgccccgtgcaggagaagccggagcggccttgagcgtctacctgctgygccttgctctgcagaggcaggcccgtctctgaggcagggaacgaccaaggaaaggagagaccttgcccatgatggaggggccccctggctctgggttcca

SEQ ID NO: 138365 - DNA, 201 bp, Homo sapiens
gcccagagtagcagagtggggaggaggggttgctaagtgcatttagcgggtgcaggcagaggggtttcttctcaataaaatgggtcagcgtaagctggatrcaaaatagaccacctccccaggccctggagatggtctgggctgcccctttccaccctgcacgggtgaagtgtctgctcagctgcccttcgcccttcattt

SEQ ID NO: 138366 - DNA, 201 bp, Homo sapiens
cagagtagcagagtggggaggaggggttgctaagtgcatttagcgggtgcaggcagaggggtttcttctcaataaaatgggtcagcgtaagctggatgcamaatagaccacctccccaggccctggagatggtctgggctgcccctttccaccctgcacgggtgaagtgtctgctcagctgcccttcgcccttcatttgta

SEQ ID NO: 138367 - DNA, 201 bp, Homo sapiens
ggaggggtcctgggttctgatccggctgagacggtgaccctgggctgagctgtggagctgacagacacccacagacaccagccccaaggccttggagggawaacagttgccagggcagggcttcgtgttccagacctgccccgggtcgcggagcttttaagagcaggggacatttgtgatagctgagagcccttggggccc

SEQ ID NO: 138368 - DNA, 201 bp, Homo sapiens
agttttgctcttgttgcccaggctggagtgcagtggtgcaatctcggctcactgaaacctctacctcccaggttcaagtgattctcctgcctcagccttcygagtagctgggattacaggcatgcaccaccacacctggctaattttgaatttttttttagtagagatggggtttctccatgttggtcaggctgatctaaa

SEQ ID NO: 138369 - DNA, 201 bp, Homo sapiens
gaagcttcaagtcccatcagaagaggagctgttgggactttttttttttttacctcatacaaaaaaagagacaaatgattaaaaaaaaaataaaaaaattwaaaaagtaggccaaagggagaaacctgtgtttttccttcctttgtaacataccagcagagctgagcttgggcaaaatggctttgcccttagccttgcctg

SEQ ID NO: 138370 - DNA, 201 bp, Homo sapiens
atttggggcagcgtcatagcagcgtcataggccaggcatgcagccgggtcctcctgcagcagtcagtcccccatacaccatatttcatcacttggctggatttttttttttttaattttaaaagtagcacctgctcatcctaacaagtcaagcaatgcgtgtgttgttttcctaatttaaaaaatctggtaagatgataaa

SEQ ID NO: 138371 - DNA, 201 bp, Homo sapiens
agcctgcgggggccttacggcagggggagagggagagaagcctgctttggaggctttggaggacggggtggcagatctttggagaagtgaagtcaattctkagctcagggaggagcctgacaagccccttctccagctcctctgtgtcttcccgtgtggaagaagccaggtcctgggcccttgggggcctcctggtgggcg

SEQ ID NO: 138372 - DNA, 201 bp, Homo sapiens
atggaaaccataaaactaggagtccactgtccagctcttaccattcttctttgctatgactgagctgaatttgatacacattgctcatcttaacctttagrttcccctcatcatcttcttccaaaggcaaaaacgttatggttccattgaggacatctggaaagaaaaagagaagaaggacaaattacaactgcctagcta

SEQ ID NO: 138373 - DNA, 201 bp, Homo sapiens
gagacctactgtcttacctataaacactgtgttcaaggagaaagacactcctttgaatcactacaatgtggtcagacatgcaggctcctagttaagcacgytcccactggttattctccgacaagttaaagataacgctgtttgagcacaaaggagattcatttaaaccgccactgctatagatgacatgtatgatgcact

SEQ ID NO: 138374 - DNA, 201 bp, Homo sapiens
tgcacagtgaggtcatgtgaggtgagcagtgaggtcacaggtgagcggtggagtcacgtgggggagcggtgaggtcacgtggagtgcatggtgaggtcatrtgaggtgggcagtggggtcatatgaggtgagcagtggggttcgtggtgcagacagtgctcccagagggtgggagcacaggctattgggtcagcactgccc

SEQ ID NO: 138375 - DNA, 201 bp, Homo sapiens
gttatagctctattagaagctgtgggtcacggaagagaactgtggaacccagcgactagtgttcacctcaattaggatgaacccaggcacttagctgtgcrggaacaatggcgagtctctagcccgggagcagcaaccggtgcctcgctggatcagaagcgcagtggacaccctgctggatctggaggggggtggaagtca

SEQ ID NO: 138376 - DNA, 201 bp, Homo sapiens
gttctgttccctggccctgcctccctgccaccacatgactctccttggcctccgcttgtccctgaggcctaggtctccctgccagtctttcctcacccgcyttccaccctcccccattggcagtggtcagggaggactgttgtgtggcaggaagtgaagctctgcacctgcggatgtgctcaaccagtcatccatccatca

SEQ ID NO: 138377 - DNA, 201 bp, Homo sapiens
gaatgatgtaacgttgtcccatgagggatgaaagtcatctgtcacctactgtagcaggacaagccacagacaaaactcctcagacaccggattaaagaagraagaggtttattcggccgggagcatcggcagacttgcgtcttaagagctgagctccccaaaaaagaaattcttggcctgtttaaaggcttacgactttaa

SEQ ID NO: 138378 - DNA, 201 bp, Homo sapiens
cctcaggccgccagcagccgcattccgagcaagagaattcactgcccgtcagtgcccgttttcctgcctagtttgtttcagcgatactttttcacttccamattaactctgaaaatgacacacacaacacccacctttcattgtttgctttcatgtgctttttggggatcttctcccctgcacatgaacacatcagactga

SEQ ID NO: 138379 - DNA, 201 bp, Homo sapiens
  misc_feature (1)...(201): n = A,T,C or G
ccctgtgtgcctggtgacccccaggctgtgcctggctctcttctgtgtccttggcatctgtgttcaggagtggacgagggaattcttctcgccttttcttntgggaaaatgatgctagccattcacagagtgattctcttttgccatccttttggatttcaagtttacttttctctgatttgtaaggtgttgcgggctctc

SEQ ID NO: 138380 - DNA, 201 bp, Homo sapiens
acacaagtagtttaggtcgggggttgatgttattattattattttttttaactcctagggccacgtggtggtgccaaggttgtctggctatttatctgacttttgtttctttctaactttttgctttctctcttttcctcctgtcttatgaactaggcaaggtggcagggaggagggcagcaggagtagtagtggtctcct

SEQ ID NO: 138381 - DNA, 201 bp, Homo sapiens
cacaagtagtttaggtcgggggttgatgttattattattattttttttaactcctagggccacgtggtggtgccaaggttgtctggctatttatctgacttttgtttctttctaactttttgctttctctcttttcctcctgtcttatgaactaggcaaggtggcagggaggagggcagcaggagtagtagtggtctcctt

SEQ ID NO: 138382 - DNA, 201 bp, Homo sapiens
tgtcatgtcctaagcaggttagtttttttactgggtcttaaaagcttttttcctagcaagcaacacagtatttcttaataataggagtttttaagagccaratgcttgaacttggcatctgcttggggaaagagttaaagtaatcttgaggcattaaatcttttgcttctcaaggccattggtctctcatgttagcctttt

SEQ ID NO: 138383 - DNA, 201 bp, Homo sapiens
caggctcttatcacgcgatggcatccactgtggaaggaggcgacacagctctgctcccagaattccccagggggcccctcgatgcctaccgagcaagagcrtccttcagctggaaggagctggcgctgttcacggaaggggagggcatgctccgctttaaggtgaggcgtgcggttgtgcgcagcttgtcttttttcccag

SEQ ID NO: 138384 - DNA, 201 bp, Homo sapiens
tccagcaagaccagatctgagagggcccacttgactatcttgacttccttccttggcctcttgaggctccgatcttccccttcaaggtgagacctggggcrtgttagctccttaatctcgtttctcagggggctgttggcctcggtaaaggggggtaggctgggccatatggagaaagaatttctgttatctctggcggct

SEQ ID NO: 138385 - DNA, 201 bp, Homo sapiens
ggcctaaggtggacttttgaagtttttttcctaatgtttgcattacactgtttaactgacaacaaagtggtattggagtgttatagggtcatagagaagaycttcaattatcaattataggttttaaatttaccctggcttttaaaggaatagggtacactgtttttttcttaactacttatatatctctctctttctttc

SEQ ID NO: 138386 - DNA, 201 bp, Homo sapiens
ctcctgcctcagcctcttgagtagctgggactacaggtgcccgccagcacgcctggctaattttttgtttttgtatttttagtagagatggggtttcaccmtattagtcaggatggtctcaatctcctgacctcgtgatctgcccgcctcggcctcccaaagtgctgggattataggcgtgagccaccgcgcccagcaaaa

SEQ ID NO: 138387 - DNA, 201 bp, Homo sapiens
gtgctcctccctgcacctggaaaggagacccctccacgtaggccaggtgtcgctggggcatacttctcctggctcgggttctggtgctcccactagaaggrgactcttggggcagccacagcaccaggtgctggtgtccagggggtgagtccgggccttacaatgcccactccccatcgggggctgcgattagaggactgc

SEQ ID NO: 138388 - DNA, 201 bp, Homo sapiens
gaccagtcttaccaagtttcaaatgtccagacttaaagtgctagttccttcccagtgttcagccactgcgttgatcctccacgggggcttgccatgcaccrctctgacgaggcattccacgggggcaaatgcctacccgggagcactctcaggatctgcatcgcgcaagctggctggagccccccacagggatgctctaca

SEQ ID NO: 138389 - DNA, 201 bp, Homo sapiens
gtgctagttccttcccagtgttcagccactgcgttgatcctccacgggggcttgccatgcaccgctctgacgaggcattccacgggggcaaatgcctaccsgggagcactctcaggatctgcatcgcgcaagctggctggagccccccacagggatgctctacagggcaggcataagctgcctaaggggctggcttgaacg

SEQ ID NO: 138390 - DNA, 201 bp, Homo sapiens
gaggagatagtggacggaagattccagctagacgcacgtaaaggaactgcctgttcacaggcacacaaggatcaagaggtgtccgtgaaaccccctggaawggctgcctgtaatggactccgcccctgccctctggcagtacaggccacatctgattcttgccaaggttaaaggtgggccttggaatctccaggcagatgg

SEQ ID NO: 138391 - DNA, 201 bp, Homo sapiens
gctttagttgctaattataactaacctaaattttcccttgtgcaggaattcatcatacattcccctgatttcgaagctgccaagttttgggttggcaacaygggcaagacagccactcacgcggtggtgtttgctaagctgtgtgtgccaggggaccagtgccatgggctgcatccctttatcgtgcaggtaggacgctgg

SEQ ID NO: 138392 - DNA, 201 bp, Homo sapiens
ggcatgcaccaccacacctggctaattttgaatttttttttagtagagatggggtttctccatgttggtcaggctgatctaaaactcccgacctcaggtgrtctgcctacctcggcctcccaaaatgctgggattacgggcgtgagccactgtgcccagccgaatttcctgtgtttttaacaaaaactttgaggagttgca

SEQ ID NO: 138393 - DNA, 201 bp, Homo sapiens
ggggcaatgtgggctagttttcgggatgacggttctgagaaccacgtcgagctcacgctgcgcctctggctgcgatcccgccccggagctggtgaggaagkccagcaactccgaattgccacgggcgagactttgggagaaatcctcccaaagcgaatccagatctgcggcggggaagtcgccctcccttccttcagcatg

SEQ ID NO: 138394 - DNA, 201 bp, Homo sapiens
agtagagatggggtttctccatgttggtcaggctgatctaaaactcccgacctcaggtgatctgcctacctcggcctcccaaaatgctgggattacgggcrtgagccactgtgcccagccgaatttcctgtgtttttaacaaaaactttgaggagttgcatttgcacactcagccatctaggaatcttttccttcttattt

SEQ ID NO: 138395 - DNA, 201 bp, Homo sapiens
gatgtgctcccgaacgcacaaggccacagccttggacctcttagggccctgccagaaaccacagcggctggaggtgacaccaaggaccaagtccccctgcrgcctctgagtccctgcaggtgcccaccgcccccaactcccctgggtggtcccaggcaccccctcgcccctgcgccccctgccatgcacccctgcttcact

SEQ ID NO: 138396 - DNA, 201 bp, Homo sapiens
gagctccagtgatctgccttcctcagcctcccagagtgcagggattacaggaacgagccacctcacccagccaataatttccaaagaagagggcgaggggkgattttcattataaatgtgttttatagtactttataattgaattgtcctaattgttttctactagaaaaaaaaagaaaatattcatataaatttaaacca

SEQ ID NO: 138397 - DNA, 201 bp, Homo sapiens
ctcccaaaatgctgggattacgggcgtgagccactgtgcccagccgaatttcctgtgtttttaacaaaaactttgaggagttgcatttgcacactcagccrtctaggaatcttttccttcttatttctttgtcttcacttgctgtgtacgtgttgtttgcagctctacaaaaacctctggggcgctgtcctgcaggaaagc

SEQ ID NO: 138398 - DNA, 201 bp, Homo sapiens; identical to SEQ ID NO: 24605

SEQ ID NO: 138399 - DNA, 201 bp, Homo sapiens; identical to SEQ ID NO: 24596

SEQ ID NO: 138400 - DNA, 201 bp, Homo sapiens
cttttgtggaactggaaatttccatcgaggaaatgtttttttaaaaagtctaatgatttgaatgggcaattcagtctccaaccgcccccctccccctgccrccagttatatacaaatcactttattggtaacatgtatgatctgtttgtccctgcagagtctacccagcaagtccttgcacacatgtggcctgtccccatg

SEQ ID NO: 138401 - DNA, 201 bp, Homo sapiens
gagtgttgtgcagggaggccgtggatacggagagagctgctgtcaccccttctccctagcgtcggttcatgaggttatgggtcaccttcagtaatgaagcygctatggggacccaggtccacatctgcctgtctctgggaaggcccagcacctcacagcctgctgctggggggcagccccgcccctcaggccagctcctct

SEQ ID NO: 138402 - DNA, 201 bp, Homo sapiens
ccccaccctgtctagggggcagccggtgggggcagtagggctcccggatgtgtctgtgggtgccatgagcactcttggctggagtgcgccagccctaaccrtagctgtggggagactcaggccatgagtgttgtgcagggaggccgtggatacggagagagctgctgtcaccccttctccctagcgtcggttcatgaggtt

SEQ ID NO: 138403 - DNA, 201 bp, Homo sapiens
ttggacagggctgtctctcatgttccaggaagccacagggaaaaaatagcctgttataaaacaccttgtcatgccaggaaccttccagccctgtcccagcyatctgccctagagcagagcccagcccccaccctgtctagggggcagccggtgggggcagtagggctcccggatgtgtctgtgggtgccatgagcactctt

SEQ ID NO: 138404 - DNA, 201 bp, Homo sapiens
cagaagccatgggacctccctggtgcctgagtgccccagcacagggctgagacgcaataggtaggtgctggtatccattgtcactcgaacccaggagcatmcccacctgaattcatcttactctggtttagaagcttccttgggtttaaacaaactcttcgtgggttacatgtgttttgtctatgatactcttcctgcttt

SEQ ID NO: 138405 - DNA, 201 bp, Homo sapiens
gtgaaggcatccagctaactgataggaaagacaaaaaacagttatcttgaaatttcctgtgttaaaagaagagttcattcagttatggacggaagaagggyagccctgggggcatcagctcgctgagatggctccctcctatcagcgaccccatgccagggggggctctgcagggcttgctgacagcagtgaggagctgga

SEQ ID NO: 138406 - DNA, 201 bp, Homo sapiens
ttgaaatttcctgtgttaaaagaagagttcattcagttatggacggaagaagggtagccctgggggcatcagctcgctgagatggctccctcctatcagcraccccatgccagggggggctctgcagggcttgctgacagcagtgaggagctggaggtgggatatgaagcacaggtggcagttctttgtgtctggtcaagc

SEQ ID NO: 138407 - DNA, 201 bp, Homo sapiens
tccctcacccaaaggcagagcttggacgtgagatccacgccctggcatcggccagcaagcccctggcctcgtggaccacccagcaaggaattcaggaatgycgggaggcgtgtggaggacacggctatctggccagtaggttttggagaagcgcatggtggtttcctgtccttagccctgctgtttgactctagaccaggg

SEQ ID NO: 138408 - DNA, 201 bp, Homo sapiens
aaaagatgggtggtggcgtccccgcagcctgcctccagcctgggaccaacccctgccacaagggctcgaggtttccttcagggatttgcacatcagaaggyggacaaggacgaggacatttgttctccctgagccacacgctggattctgtacctgggtcatttcacgttgtctactttgggagtgaaggaagttgaggcc

SEQ ID NO: 138409 - DNA, 201 bp, Homo sapiens
taatacatcacactgatatggtaaagcctcttgtaagactcagaaatacggtctcctataggatcgccactaacacaataacgaccgccctttgacgctgsttcagagctgctccaccaagccaggtcactgagcccccagagcctttccaccgtgtctctctgcagggtgacagggatgcagtgggattcgtccatcttt

SEQ ID NO: 138410 - DNA, 201 bp, Homo sapiens
gtggctggtttgctacctgctccgagagacttatcaaaaattaaaccaagagaaaagatcaggaagcagtgactttgaagcaaggaacaaatgccaggtamgtatttgttttcaaaattcccttttgtattatttgctcttaattccccggccgttgtgtccctgggagtttgaacatcctggcaattcaggccccagacc

SEQ ID NO: 138411 - DNA, 201 bp, Homo sapiens
gagcccgaaggtggaggctgcgttagcgccaggggcgcggacgcgacggggcgggagcgggggcactgaaagtgccaggcccgggggtgtgggggctgtgmggattcgcgggcgggggggccagggttacccagagcaggggccaggagggccggtggcccacgtgctgggcattcggaggactttacacattgaactagg

SEQ ID NO: 138412 - DNA, 201 bp, Homo sapiens
ggccgatgaccgctgtaactgcttcctgctgaattggggcgtagtagaggtcatgcagttgagatttcctcgggagtggtgccttcgatgtcatcaacatyggagcatgggctagcaggccagtccaggggtccacggtagatcttagtcatggactgcatctggggctccatttgaagaacatttgtagtttcacagctt

SEQ ID NO: 138413 - DNA, 201 bp, Homo sapiens
gaagctcttggtaaggggagctactggtagtatagcggcatggagggggtgaggtgatagtgaaaggggggtaagacaacagtaaagagaaaaatatgacggggggggccatggagctctacgattccagttactttcctcgcagttgtcgcttgaagagcaggtgcagatcctctagaggttcacaggaatagctagcgt

SEQ ID NO: 138414 - DNA, 201 bp, Homo sapiens
  misc_feature (1)...(201): n = A,T,C or G
aaaccctctgccctgtgtgcctggtgacccccaggctgtgcctggctctcttctgtgtccttggcatctgtgttcaggagtggacgagggaattcttctcnccttttcttctgggaaaatgatgctagccattcacagagtgattctcttttgccatccttttggatttcaagtttacttttctctgatttgtaaggtgtt

SEQ ID NO: 138415 - DNA, 201 bp, Homo sapiens
  misc_feature (1)...(201): n = A,T,C or G
tccactttgggaggccaacttgatcagagacctcagcaaaccagcttcaccttggcaggcggctccacactctcagatcagacccagacctctgtgtacanctggtggggcccctgcctggggggctgcctcctctgtgtgaggtcctcctcagcatcctgagcctcccccggctcggcctctgcacacatccatgctgat

SEQ ID NO: 138416 - DNA, 201 bp, Homo sapiens
cttggtaaggggagctactggtagtatagcggcatggagggggtgaggtgatagtgaaaggggggtaagacaacagtaaagagaaaaatatgacggggggkgccatggagctctacgattccagttactttcctcgcagttgtcgcttgaagagcaggtgcagatcctctagaggttcacaggaatagctagcgttgtctc

SEQ ID NO: 138417 - DNA, 201 bp, Homo sapiens
agatactgaaatccctgagatttgggcatgtgggtaaaatctagttgccagtcttctcctgggtaatggcctgttctttgttctcctgaaggagcttggcrataaggcaggggattatttctttgccacacttcataggccctgactatctgcttgatagttttgaaaagtcctgatccagttaataatgatttggccgtc

SEQ ID NO: 138418 - DNA, 201 bp, Homo sapiens
tgactgccaaatgagctcacgagtctggaggtgtgaatcggggagccttgcacacattgaggacgtgatgttttcggttctcttgcgtacatacctcagartggaattgctgagtcatgtggtcactccatgtttaatcacttgtggaactgccacactgttctccagaatggctgggtcactttacattttcactggaag

SEQ ID NO: 138419 - DNA, 201 bp, Homo sapiens
cagtcacaacttagtggctgggagaagtatctagtgactgcctatcctaggacccctcgggtagtgacagatctggaggacggttgtccaggaccagagaytaagactgagaaggccatgccagtgttcaggagacagttaaccttctggcccccaatggtcaagcatacctggggcatgggctggcgcttgccccgggca

SEQ ID NO: 138420 - DNA, 201 bp, Homo sapiens
catgggcaactgttgagtagagacttctggctgcgccataatcttgaccggccaatgccgggaatttgggacgacagctttctgcctctagtcagccctcwgcttccccaagaaaactgtaaaagtggaagctggttccaggcagaccaatgctcccaacccaaaagggttggggattgttagaaagccttttcccagaaa

SEQ ID NO: 138421 - DNA, 201 bp, Homo sapiens
ccaggctagagtgcaatggcacaatctcagctcactgcagcctctgcctcccggttcaaccgattctcctgcctcagcctcctgagcatctgggattacargcatgcgccaccatgcccagctaatttttgtattttcagtagcgatggggtttcaccgtgttggccaggctggtctcaaactcctgacctcaggtgatcc

SEQ ID NO: 138422 - DNA, 201 bp, Homo sapiens
cctgccgccgcccaccaacaggtgctcagacctgcggctcccacctccctgcacagaggggagtcagcatcctgagcggccagactcaggctccagcaccrcaggctgtttcagctcaaaggactcaaaagttcctctttcctctaggccttaaacagtgaaggtgggcggcccacgcccaggactcagacagacttgggt

SEQ ID NO: 138423 - DNA, 201 bp, Homo sapiens
gccagcacagcagagctggcagcccaggaccgggtgacaatgggggtgtgggggcatcctgagcaggactcaaggaagagcccacgcaggaaacgggtgcytctggttcccttccagcatgtgagattattctttatagatgagtcttctgtggtttagtaaaagactattctgtaggcaggggtccccaaccccgtggta

SEQ ID NO: 138424 - DNA, 201 bp, Homo sapiens
gctaacctctcagcacttgttctccaccttggggaaagtgcagtgtggcagggaaccagcgtgggcatggtgttgagtgccgttgtctgttgtgatgttcyggaagagcagtactcttcttacctgccccctgttgataggacgatgttatactttcaggtttttggatcagcagtttacagttctggttctgaaagacat

SEQ ID NO: 138425 - DNA, 201 bp, Homo sapiens
gtcttccaccaaagtcactggaatgtgtgtcctagatggagcttgcttccgcagtccgctgaagtcagtggactttctggacgcctatcccggcatccttraccagaagtttgaggtctccagtgttgccgactgcttggactctgcaggtaaacacacaggtggagggctcccctggcctcctgattttctgtcattccc

SEQ ID NO: 138426 - DNA, 201 bp, Homo sapiens
ggaggtgctgggtcctaggtggggatggaggggagaaagtgaatcgggccagcacagcagagctggcagcccaggaccgggtgacaatgggggtgtggggkcatcctgagcaggactcaaggaagagcccacgcaggaaacgggtgcctctggttcccttccagcatgtgagattattctttatagatgagtcttctgtgg

SEQ ID NO: 138427 - DNA, 201 bp, Homo sapiens
tcatggactatctctttgtgcctgacgccgagttaggcgctgactccacagatgaattgaaggatgcccacttgccaccttataccttgcctcttgccttyccctcccataggataaagggcgtgagaggccacctggcctggtctctgtccactaagcagcctctgccccctgccctggtgcctgggctgctgctgtccc

SEQ ID NO: 138428 - DNA, 201 bp, Homo sapiens
gggatggggcctgggcaggtgggcacaggtctactttggatgaacaaacgagggcaccttcgcctctgagccactctgcccaaggtggccgcgcagccggrcttgagcttatcatctgtgtccctcccgtaggacgtcaggcagcgctttggagcgtccctggggagcctgtcctcgggccgggtctccatcgtgagcctg

SEQ ID NO: 138429 - DNA, 201 bp, Homo sapiens
atctcctgtgggtgcggtggtcggggtggggcgtcctcccagggccccgcacagagctggccacggacagcctcctgcaggtgtgtcatgggagctgctgyaggctccgcctcacccacacggggtctgtggctcagagaggtgggagcgagagctgggaatgaggcgcctggccgtgctggcagcatcgaaagcaaagca

SEQ ID NO: 138430 - DNA, 201 bp, Homo sapiens
ctggggatggggcctgggcaggtgggcacaggtctactttggatgaacaaacgagggcaccttcgcctctgagccactctgcccaaggtggccgcgcagcygggcttgagcttatcatctgtgtccctcccgtaggacgtcaggcagcgctttggagcgtccctggggagcctgtcctcgggccgggtctccatcgtgagc

SEQ ID NO: 138431 - DNA, 201 bp, Homo sapiens
taagccctggcaacccagaatcctttggctacctaaagaaatcctcaatggaaaccataaaactaggagtccactgtccagctcttaccattcttctttgstatgactgagctgaatttgatacacattgctcatcttaacctttaggttcccctcatcatcttcttccaaaggcaaaaacgttatggttccattgaggac

SEQ ID NO: 138432 - DNA, 201 bp, Homo sapiens
gaggggagtcagcatcctgagcggccagactcaggctccagcaccgcaggctgtttcagctcaaaggactcaaaagttcctctttcctctaggccttaaasagtgaaggtgggcggcccacgcccaggactcagacagacttgggttcaccagccattcccttcaatgccttcatcagccaagccacttggaaaaggaccc

SEQ ID NO: 138433 - DNA, 201 bp, Homo sapiens
  misc_feature (1)...(201): n = A,T,C or G
cctggctctgtgctcctccctgcacctggaaaggagacccctccacgtaggccaggtgtcgctggggcatacttctcctggctcgggttctggtgctcccnctagaaggggactcttggggcagccacagcaccaggtgctggtgtccagggggtgagtccgggccttacaatgcccactccccatcgggggctgcgatta

SEQ ID NO: 138434 - DNA, 201 bp, Homo sapiens
ccagaatggttatttggtcaagagagctgagttttgggaggcctgctgtgttagcgggaagccaggtgtctatatgtcgaggagaagccagtgcagaagcstgtgatcagaggttctgtgctggaggccctgtgtccaggtggaccggcggtgggtggagacgtgaggtaccattgtgtgtggccagagtggaccagctgg

SEQ ID NO: 138435 - DNA, 201 bp, Homo sapiens
cttacaatgcccactccccatcgggggctgcgattagaggactgctcgcttccagtgatgcttccctgaggatttgaaggagacgggtctcctggcgaacygtccacaaagggggacgacaaacagagttccccggtgtccagaactcacgcctggcttaagttcacggagagcagaagagagaccgtggtcctggggagc

SEQ ID NO: 138436 - DNA, 201 bp, Homo sapiens
ctgtggaggggtggaggggtggagggagatgggccacagatggatgccttggggctgtcagtgctgtggaggggcgcagaggtgcagtgagacgggacacdgatgccctggggctgtcagtgcatggaggggtgcatggagggttgcggggtggagggagatgggccacagatggatgccctggggctgtcagtgctgtgg

SEQ ID NO: 138437 - DNA, 201 bp, Homo sapiens
ccgagagcctgatccagcagggtgtagacccctctgtgcccacgagatgatttataacttgggggtagtgggacaaggtatgaccatgcctgagcctgatrgcctgaaagatgtctcaggagtgtttctagatatgcgtgtttcatatagtgtttcatagcgaggctggtggagaggagaggagcctgccttacaggagtt

SEQ ID NO: 138438 - DNA, 201 bp, Homo sapiens
aggaagcacggatggaaaaggagcatgatggggatgcccagagacacacagggtgcgcagagtgggaacagcaacacgagaccaggagctgctcacaaacrgagatgttaatccaacatcaattaaaaataaatgattggaagaacaggcacagcatttgggataactatctcaggaggatgaattagggattggaagctt

SEQ ID NO: 138439 - DNA, 201 bp, Homo sapiens
agtgtatcctacagccccaccagcagcgcacagacagctctgcccacagtgcagacagtcctgcccacagtgcacagacagctccacccacagtacagatwgccctgcccacggtgcacagacaggcctgcccaaagtgtatcccacagccccgcccacggtgtatcctacagccctacccgcagcacacagacagctctg

SEQ ID NO: 138440 - DNA, 201 bp, Homo sapiens
tatgtgtttaaagaatgacttaaagactcggaattgttgctgggctggacgggtctgggtttcctgactaagtagtatgtgtacaatggggacaccttatrtaggtgtttcttctagcatggttatggggggtaacaataacaaaacaatatacagcatatttgtatccagcaaggacaaaagaggtccttacctgggaaa

SEQ ID NO: 138441 - DNA, 201 bp, Homo sapiens
ggcagcaccggcccccgtgttagtctctcatggctgccacagcaaagcaccacaaagcagggcgctcgaaacagcataacgtattctcccaactctggagkccggggtctgaaattgaggaatctttagggcggcattccctttaaaggctctaggggaggatccttcctatctctttcagctcctggtggccccaggcct

SEQ ID NO: 138442 - DNA, 201 bp, Homo sapiens
tcttgatagatggattttgggaacacagcggaagaatgttcgctcgttgcccccatttgcctctataggaatatgcgcctccctttaatttactcaattcrctttcttcctgatctattctgttgtcgtagacacagttccagttgttaaagtactgggtcatcaattctaaggccctggccaaggagtctaggcttagag

SEQ ID NO: 138443 - DNA, 201 bp, Homo sapiens
acctctcctctgcctcccgggttcaagtgattctcctgcatcagcctcctgagtagctgggactacaggcacccgccgccaggcctggctaatttgcgtayttttagtagagacggtgtttcaccatgttggccaggctggtcttgaactcctgacctcaggtgatctgcccacctcagcctcccaaagcattgggattac

SEQ ID NO: 138444 - DNA, 201 bp, Homo sapiens
gggtggccggggagaagtggccagtgattttggaatgtgcagcgtttcaggtggaggaagcagtgggaagtgtcaggcccaggcctgtgctgggatgcagrcggggtagggaggccaggccgcaagggccttgagggtctttgagggattggattttggagctccaggtcattagcagcatgacttttggaatgagacaga

SEQ ID NO: 138445 - DNA, 201 bp, Homo sapiens
gaatcagagattccaatctttggaaacacagttcccgtcttttctgttgaatatctggagttctgtacttggagtacaacttaccatatacacaatgcttttattattattattattattattattattattgaggtggagtcttgctctgtcaccaaggctggagtgcagtggcgtgatcttggctcactgcaacttccg

SEQ ID NO: 138446 - DNA, 201 bp, Homo sapiens
aatcagagattccaatctttggaaacacagttcccgtcttttctgttgaatatctggagttctgtacttggagtacaacttaccatatacacaatgcttttattattattattattattattattattattgaggtggagtcttgctctgtcaccaaggctggagtgcagtggcgtgatcttggctcactgcaacttccgc

SEQ ID NO: 138447 - DNA, 201 bp, Homo sapiens
atcagagattccaatctttggaaacacagttcccgtcttttctgttgaatatctggagttctgtacttggagtacaacttaccatatacacaatgcttttattattattattattattattattattattgaggtggagtcttgctctgtcaccaaggctggagtgcagtggcgtgatcttggctcactgcaacttccgcc

SEQ ID NO: 138448 - DNA, 201 bp, Homo sapiens
attctcctgtctcagcctcctgagtagctgggactacaggcacatgccaccactcctggctaatttttttttgtatttttagtagagacggggtttcaccrtattggtcaggctggtttcgaactcctgacctgaggtgatccacccacctcggcctcccaaagtgctgggattacaggcgtaagccaccacacccagcct

SEQ ID NO: 138449 - DNA, 201 bp, Homo sapiens
gggactcagcctccaatttaaatttgtttcctggcagtttccttgtttattatattcttttacctatgtcacccaggaaatcagagggccccaaccccacrttctgatccggcatctctcttccatccggggacagaagctgcagtgctgtgctgtttagcacggcagccgctgggttgggggaaggcggctgtgtgagtg

SEQ ID NO: 138450 - DNA, 201 bp, Homo sapiens
ggtcatttcacgttgtctactttgggagtgaaggaagttgaggccaagagaaatgcccaaggtcccccagctcgcccgtgccggggccaggattgcacccsggccagctgtcacagagtccaaccctttccccaggctgcatggctgcagtctgaatttggacagtttggggtttgtttttttgcctgaagtatgcattgc

SEQ ID NO: 138451 - DNA, 201 bp, Homo sapiens
gagcctgttttccttctgcgagacagtggggagggaatgcggtcaccccatgccacctggcaggggccaggccatggtgccctcggtggggggctgctgcrtgtggggggccacagtcctgaacacttccttggaaacaacagatgcaggtgaggtctgccttggtgggtcagggaatgtctcccacaaaactggcacctg

SEQ ID NO: 138452 - DNA, 201 bp, Homo sapiens
agcctttgggctcagactcagtgtggctgatccccattctcctgcctgggatctctgagcaagaccggctgccaggcagaaggcccctgcagcctggaggygcctcgtgtctgggcgccaggccctctgtgcctgggcagggggtgggtgtgagcgtggcctccacatgtgggtggtctgcacccctccctcacatgctcg

SEQ ID NO: 138453 - DNA, 201 bp, Homo sapiens
gtgcagtggctcacacctgtaatcccagcactttgggaggctgagacgggtggattacaaggtcaggagatcaagaccatcctggctaatacagtgaaacytggtgtatcctaaaaatacaaaaaattggccaggcatggtgtcatgcgcctgtagtcccagctacttggcaggctgaggcaggagagtcgcttgaacctg

SEQ ID NO: 138454 - DNA, 201 bp, Homo sapiens
gaagatccccctagagcagagcccagccccgccctgtctagggggcagctggtgggggcagtggggctcccggatgtgtctgggtgccgtgagcactctcrgctggagtgcgccagccctaaccgtagctgtggggacactttgtccgtgggggagggactgcacctgaggcattactgtccccccgggtcgccagagtcc

SEQ ID NO: 138455 - DNA, 201 bp, Homo sapiens
ggctatgggtgaaagccgaactggctgagttgagagcgtgtcagggtgaaggctttctgatgtgccgggaagacatgtgaagaccttcagcgctagtgggwgtgtggccctgacggcctctccctgcactggctttcatggtccctgggatgggctgcccttcatgggaaccacgatgtgttcacgcaggtgtcttgtctg

SEQ ID NO: 138456 - DNA, 201 bp, Homo sapiens
gttaaaaccagagccagctggaggtgtcgctggcaggatggtttattaaacgtgcattcctggctgagcatggtggctcacacctgttatcctagcacttwggaaggctgaggcgggcggatccctttagcccaggagtttgagaccagcctaggcaacatactgaaaccccatccataaaaattacaaaaactgaggtga

SEQ ID NO: 138457 - DNA, 201 bp, Homo sapiens
tgcccacagtgcacagacaggcccgcccaaagtgtatcccacagccctccccacagtgtatcctacaggcccacccgcagtgcacagacagctccacccayagtgcagacagtcctgcccacagtgcagacagccccgcctatggtatatcccacagccccttccagggtgcataggcagccccacccacagtgtatcccg

SEQ ID NO: 138458 - DNA, 201 bp, Homo sapiens
ccaactggggcaggggtgggttctcctggcctcactgattcagctgttctgtgaatgcatcctaggtttgcagaaggaaagaaatgttattagatagtgcygaccaactccccaaggcatgggcaaaggctggggtggggagggtccttgagacccagaccctcgcctgtgggtctgtggccgtcgggtcctctggacact

SEQ ID NO: 138459 - DNA, 201 bp, Homo sapiens
gatggatgccctggggctgtcagtgctgtggaggggcgcaggggttcagtgagacgggccacagatggatgccctggggctgtcagtgctgtggaggggcrcaggggtggagggagatgggccacagatggatgccctggggctgtcggtgctgtggaggggcgcaggggtgcagtgagacgggacacggatgccctgggg

SEQ ID NO: 138460 - DNA, 201 bp, Homo sapiens
caagggctatgggtgaaagccgaactggctgagttgagagcgtgtcagggtgaaggctttctgatgtgccgggaagacatgtgaagaccttcagcgctagkgggtgtgtggccctgacggcctctccctgcactggctttcatggtccctgggatgggctgcccttcatgggaaccacgatgtgttcacgcaggtgtcttg

SEQ ID NO: 138461 - DNA, 201 bp, Homo sapiens
ggactcgtgaatatactgtattatatggcaaaaggggcacttgcaaacatgattatggttacagacctcaagaggaagagtactctggattatccaggtgrgcccggcctaactccatgggccacgaagagcagagaattttctctggctggaggcggaggagagaagcagcaggagaggaaggcagagagattccaagta

SEQ ID NO: 138462 - DNA, 201 bp, Homo sapiens
ctgagcttgggcaaaatggctttgcccttagccttgcctgcattgtttgatgggctggtgggctctgctctccttacagctctccctgctgtcctcagacscccaggactccttgcaggcatcttaattcccaggtgatttctgtgtgccttatacaaggtgctcggcacagagatgtaggtcttaccactcacatgaact

SEQ ID NO: 138463 - DNA, 201 bp, Homo sapiens
gagctgagcttgggcaaaatggctttgcccttagccttgcctgcattgtttgatgggctggtgggctctgctctccttacagctctccctgctgtcctcaracccccaggactccttgcaggcatcttaattcccaggtgatttctgtgtgccttatacaaggtgctcggcacagagatgtaggtcttaccactcacatga

SEQ ID NO: 138464 - DNA, 201 bp, Homo sapiens
gaagctgctatggggacccaggtccacatctgcctgtctctgggaaggcccagcacctcacagcctgctgctggggggcagccccgcccctcaggccagckcctctaggaacctgctagacacacctgccctgggatgaggagagaaggcaggaaggatgggctcctgtcaagctcaaagaaacccagattgggccaggtg

SEQ ID NO: 138465 - DNA, 201 bp, Homo sapiens
gaggatcactagagcccaggaagtcaggctgcagtgagctatgattgcatcactgcactccagcgtgggcaacagagcgagaccctgtctcaaaagagaargaaagaaagaaatgaagtttagagaaataaaggagagaaatgtctctaaatgagaggggaagaaggcttttggttgaagggactcttggaggaccaaaga

SEQ ID NO: 138466 - DNA, 201 bp, Homo sapiens
ttccaggcagaccaatgctcccaacccaaaagggttggggattgttagaaagccttttcccagaaagcctcacacctgagtcttaagtccggtggccacaytaatcatttttaaccagccaacaggtgcccagtattttcctccaattctaaggaagggtaggacagaatagcaagtgaaagtggttcaatattactcacc

SEQ ID NO: 138467 - DNA, 201 bp, Homo sapiens
gctggcattataggcgtgagccactgtgcctggcccagcctcttaagttttcatcattagatatcaagcagaagcaaaggagtcttctttctttttttttyccccttaaaaaaaagcctgcagcacctgctattcccaggcggtctcccatccaaatactaaccacgcccgaccctgcttagcttcacgagatcaggctca

SEQ ID NO: 138468 - DNA, 201 bp, Homo sapiens
ttataggcgtgagccactgtgcctggcccagcctcttaagttttcatcattagatatcaagcagaagcaaaggagtcttctttcttttttttttccccttaaaaaaaagcctgcagcacctgctattcccaggcggtctcccatccaaatactaaccacgcccgaccctgcttagcttcacgagatcaggctcattcaggg

SEQ ID NO: 138469 - DNA, 201 bp, Homo sapiens
gcatcctgagcaggactcaaggaagagcccacgcaggaaacgggtgcctctggttcccttccagcatgtgagattattctttatagatgagtcttctgtgrtttagtaaaagactattctgtaggcaggggtccccaaccccgtggtactagtctgtggcctgttaggaactaggccacccagcaggaggtgagcatcggg

SEQ ID NO: 138470 - DNA, 201 bp, Homo sapiens
actcccacctccccctcattcgtggaaaaattgtcttccataaaaccggtccctggtgccaaaaaggttgcggactgctgccctaaggcattgcaagtgawcttaggaatcagacaagttgctataggaactattgatattttgaagtttgttttggggggtttttgcacagtttatgtaatattcttaacctagcatagc

SEQ ID NO: 138471 - DNA, 201 bp, Homo sapiens
gcagacaacaaagacgatggaatcaagattaatacatatacatatacatatacatatacatatacacatacatatacatatacacatacatatacatatgytgggattgagaccaatatgaccgaggctccatctaggtttagaaaatcaattgcaaatgtttctgctgaggcctctcccagctcttgttcagtggccaac

SEQ ID NO: 138472 - DNA, 201 bp, Homo sapiens
actaaaggtgcgtgccactatgcccagctaatttttttttttcattttttatagagatagggtctcactatgttgcccaggctggtctcaaactcatggctttttttttttttttttttttgttgagacagggtcttgctctgtcacccgggctggagtgcagttgcgcaatctcggctcactgcaacctccgcctcccag

SEQ ID NO: 138473 - DNA, 201 bp, Homo sapiens
ctaaaggtgcgtgccactatgcccagctaatttttttttttcattttttatagagatagggtctcactatgttgcccaggctggtctcaaactcatggctttttttttttttttttttttgttgagacagggtcttgctctgtcacccgggctggagtgcagttgcgcaatctcggctcactgcaacctccgcctcccagg

SEQ ID NO: 138474 - DNA, 201 bp, Homo sapiens
gcgtgccactatgcccagctaatttttttttttcattttttatagagatagggtctcactatgttgcccaggctggtctcaaactcatggctttttttttktttttttttttgttgagacagggtcttgctctgtcacccgggctggagtgcagttgcgcaatctcggctcactgcaacctccgcctcccaggctcaagcg

SEQ ID NO: 138475 - DNA, 201 bp, Homo sapiens
tgggccaggtgcagtggctcacacctgtaatcccagcactttgggaggctgagacgggtggattacaaggtcaggagatcaagaccatcctggctaatacrgtgaaacctggtgtatcctaaaaatacaaaaaattggccaggcatggtgtcatgcgcctgtagtcccagctacttggcaggctgaggcaggagagtcgct

SEQ ID NO: 138476 - DNA, 201 bp, Homo sapiens
ggatgaccttatcttgatgctcttaaattcattatatctgcaggaccctatttccaaataagcttccattcccaggtcctggggttaggacttggatgtaycatttctggaggatggtttaacccacagccgcccagcgttgagcccatggcccaccctgtgggtttctgaacacatttgttttgatttttgtgtgattgt

SEQ ID NO: 138477 - DNA, 201 bp, Homo sapiens
gccaggctggtcttgaactcctgacctcaggtgatctgcccacctcagcctcccaaagcattgggattacaggcgtgagccgccgcacccggcttaaatayatttttaaacacaacgagactgtgattcctatgtgagagtgtgattaatacgctcagacacacaattaccatgctgccttggaagaaggacctagatggt

SEQ ID NO: 138478 - DNA, 201 bp, Homo sapiens
tgccactatgcccagctaatttttttttttcattttttatagagatagggtctcactatgttgcccaggctggtctcaaactcatggcttttttttttttkttttttttgttgagacagggtcttgctctgtcacccgggctggagtgcagttgcgcaatctcggctcactgcaacctccgcctcccaggctcaagcgatt

SEQ ID NO: 138479 - DNA, 201 bp, Homo sapiens
tatcctaaaaatacaaaaaattggccaggcatggtgtcatgcgcctgtagtcccagctacttggcaggctgaggcaggagagtcgcttgaacctggaaggyggaggttgcagagagccgagatcgcaccactgcactccagcttgggtgacagagcaagactccatctcaaaaaaaaaaaaaaaaaaggaacccatattga

SEQ ID NO: 138480 - DNA, 201 bp, Homo sapiens
ttttccaagtgctcataaatgccttctctattacatgttttctgaacatattttcctttactggaacagcagttgcccagataagccaaggcttagaaackagcctctgaatgcagttgctaattcacgagcttcagggtcgtcacttttaagggccttttctaccttgttgggaagaaacaagccctagaagtcctgagt

SEQ ID NO: 138481 - DNA, 201 bp, Homo sapiens
cacctcagcctcccaaagcattgggattacaggcgtgagccgccgcacccggcttaaatacatttttaaacacaacgagactgtgattcctatgtgagagwgtgattaatacgctcagacacacaattaccatgctgccttggaagaaggacctagatggtcagaggagtggcccgatggggcagcacggggcagggcagg

SEQ ID NO: 138482 - DNA, 201 bp, Homo sapiens
cactatgcccagctaatttttttttttcattttttatagagatagggtctcactatgttgcccaggctggtctcaaactcatggctttttttttttttttktttttgttgagacagggtcttgctctgtcacccgggctggagtgcagttgcgcaatctcggctcactgcaacctccgcctcccaggctcaagcgattctc

SEQ ID NO: 138483 - DNA, 201 bp, Homo sapiens
cagacacacaattaccatgctgccttggaagaaggacctagatggtcagaggagtggcccgatggggcagcacggggcagggcaggaaggacggtcagatyacgtggcaagggctgtagattagatgtgcccaccgcagcctggacaggccttagcaacagcctctgctgacgccgctgatgcgtgcgaggagatagtgga

SEQ ID NO: 138484 - DNA, 201 bp, Homo sapiens
gactccgcccctgccctctggcagtacaggccacatctgattcttgccaaggttaaaggtgggccttggaatctccaggcagatggtttgcaagtccccamagtgggagcaccctcacccagcgctgtcataccattccctctgctaggactgtaccttctccaggcagctgggtgtcccctccccggcacccccattcca

SEQ ID NO: 138485 - DNA, 201 bp, Homo sapiens
ctctggcagtacaggccacatctgattcttgccaaggttaaaggtgggccttggaatctccaggcagatggtttgcaagtccccacagtgggagcaccctyacccagcgctgtcataccattccctctgctaggactgtaccttctccaggcagctgggtgtcccctccccggcacccccattccatccacggttcatcag

SEQ ID NO: 138486 - DNA, 201 bp, Homo sapiens
caccaggtccacggtgaggctctgctgcacactggtgggggcgctggaacccaactggggcaggggtgggttctcctggcctcactgattcagctgttctrtgaatgcatcctaggtttgcagaaggaaagaaatgttattagatagtgccgaccaactccccaaggcatgggcaaaggctggggtggggagggtccttga

SEQ ID NO: 138487 - DNA, 201 bp, Homo sapiens
gtttgcaagtccccacagtgggagcaccctcacccagcgctgtcataccattccctctgctaggactgtaccttctccaggcagctgggtgtcccctcccyggcacccccattccatccacggttcatcagtgacatctctacccgcctgccgcaccgtcctgtgtcttgggcgccctggggatggggcctgggcaggtgg

SEQ ID NO: 138488 - DNA, 201 bp, Homo sapiens
tcagtgacatctctacccgcctgccgcaccgtcctgtgtcttgggcgccctggggatggggcctgggcaggtgggcacaggtctactttggatgaacaaaygagggcaccttcgcctctgagccactctgcccaaggtggccgcgcagccgggcttgagcttatcatctgtgtccctcccgtaggacgtcaggcagcgctt

SEQ ID NO: 138489 - DNA, 201 bp, Homo sapiens
taaaagaagagttcattcagttatggacggaagaagggtagccctgggggcatcagctcgctgagatggctccctcctatcagcgaccccatgccaggggrggctctgcagggcttgctgacagcagtgaggagctggaggtgggatatgaagcacaggtggcagttctttgtgtctggtcaagctgagttcagggctttt

SEQ ID NO: 138490 - DNA, 201 bp, Homo sapiens
ttcatggtttccctgcaaacaattgcaaccttccatggtgtgtcattcactttgacgtttgtgaactttatataaagtgggccatgacgcacattcttctrcagtttgcttctgggacccgtgttagggccctgagagctatttgctgtgtagagctgtgttttcattgttgtgaaatggtatgagcataccacagtgtat

SEQ ID NO: 138491 - DNA, 201 bp, Homo sapiens
ggcttacttttgcctcaaatgcctgggctcttaagcaatcctcccacctcagcctcctgggtagctgggactaaaggtgcgtgccactatgcccagctaatttttttttttcattttttatagagatagggtctcactatgttgcccaggctggtctcaaactcatggctttttttttttttttttttttgttgagacagg

SEQ ID NO: 138492 - DNA, 201 bp, Homo sapiens
ttacccagagcaggggccaggagggccggtggcccacgtgctgggcattcggaggactttacacattgaactaggcagctgttcacgaaagggaagtgatycacatcgcagagaagactggaggcagctgttgccagaatagtgatcttgaagccccacttccttgccagaaactgctccaagcgtctcatgtgaatgaca

SEQ ID NO: 138493 - DNA, 201 bp, Homo sapiens
agtgacacctttacatgttcaacagccagtagatacaaaagatgggtggtggcgtccctcctccctacctctagcctgggagtaaaaagatgggcgatggygtccccgcagcctgcctccagcctgggagtaaaaagatgggcggtggcgtccctgcagcctgcttccagcctgggagtaaaaagatgggtggtggcgtcc

SEQ ID NO: 138494 - DNA, 201 bp, Homo sapiens
aatgttattagatagtgccgaccaactccccaaggcatgggcaaaggctggggtggggagggtccttgagacccagaccctcgcctgtgggtctgtggccktcgggtcctctggacactctctgtgctttggggtgcccccagcttggggttcccaatggtttgggttcccgtcttccaccaaagtcactggaatgtgtgt

SEQ ID NO: 138495 - DNA, 201 bp, Homo sapiens
taccttgcacgactatttccctcctgggagttgtaagggggcaatgtgggctagttttcgggatgacggttctgagaaccacgtcgagctcacgctgcgcytctggctgcgatcccgccccggagctggtgaggaaggccagcaactccgaattgccacgggcgagactttgggagaaatcctcccaaagcgaatccagat

SEQ ID NO: 138496 - DNA, 201 bp, Homo sapiens
gttcttggcctcacggattccaaggaatggaaccttgggccatgcggtgagtgttatagctctattagaagccgtgggtcatggaagagaactgtggaacycagggactagtgttcagctcaattaggacgaacccaggcacttagccatgcaggaacaatggtgagcctctagcccgattgggagcagcaatgggtgcct

SEQ ID NO: 138497 - DNA, 201 bp, Homo sapiens
ctgcgttgatcctccacgggggcttgccatgcaccgctctgacgaggcattccacgggggcaaatgcctacccgggagcactctcaggatctgcatcgcgmaagctggctggagccccccacagggatgctctacagggcaggcataagctgcctaaggggctggcttgaacgtcccttaatcacctcgcttctcagtcag

SEQ ID NO: 138498 - DNA, 201 bp, Homo sapiens
ggagtgtgcaagttccaaagaccagtcttaccaagtttcaaatgtccagacttaaagtgctagttccttcccagtgttcagccactgcgttgatcctccaygggggcttgccatgcaccgctctgacgaggcattccacgggggcaaatgcctacccgggagcactctcaggatctgcatcgcgcaagctggctggagccc

SEQ ID NO: 138499 - DNA, 201 bp, Homo sapiens
agtgcagcacttggcgccacatcagtgctcagctcagcagccacagagtttggacaggaaccgccctcgaggtgccacacgttcaactgggcagatagagyggggacttggagatggaggatgctcttggctttgcattcaggagaccagaatgtgaggcttccctggggttctgggaggcccctggatcctcgggaggag

SEQ ID NO: 138500 - DNA, 201 bp, Homo sapiens
gagggaaaacagttgccagggcagggcttcgtgttccagacctgccccgggtcgcggagcttttaagagcaggggacatttgtgatagctgagagcccttrgggccctgggctgaatgctaagggggcccaggggagacgcagccccttcccctgcaatacggcataccaagaaagcctcagcctagaccagccttttcag

SEQ ID NO: 138501 - DNA, 201 bp, Homo sapiens
ttgggcctcgggtctaagagggtactgcctttggtggggaaaggaggcggaatcctttagtttaacttgaacgggacgggcattcttccctcatccatatygtccttctgttgcccagacttcaggattaattccttcctcaagtaggggacagcaaacggtgttccttctcccatgttcaggtgtataatggcccctgct

SEQ ID NO: 138502 - DNA, 201 bp, Homo sapiens
atctctgggttcgcagaggacccatggcgagaggagaggccctcgtggtgtgggagcacgttttggggtgtgggcaggattcaatggaattatcgtgttcycgtggacacaggagcagcctacgggggtgcagatgccgtcacccgcttgtttcatggaaggtggaaggaggaagggctgaggcctggagctgcagcacca

SEQ ID NO: 138503 - DNA, 201 bp, Homo sapiens
accttgtcatgccaggaaccttccagccctgtcccagccatctgccctagagcagagcccagcccccaccctgtctagggggcagccggtgggggcagtasggctcccggatgtgtctgtgggtgccatgagcactcttggctggagtgcgccagccctaaccatagctgtggggagactcaggccatgagtgttgtgcag

SEQ ID NO: 138504 - DNA, 201 bp, Homo sapiens
tgagcccaggagttccagaccagcctgggcaatatggcaaaaccccgtctctactaaaaatgcaaaaattagccgggcatggtagcgtgtgcctgtggtcygttacttggtgggaggtgggaggatcactagagcccaggaagtcaggctgcagtgagctatgattgcatcactgcactccagcgtgggcaacagagcgag

SEQ ID NO: 138505 - DNA, 201 bp, Homo sapiens
tatgcccagctaatttttttttttcattttttatagagatagggtctcactatgttgcccaggctggtctcaaactcatggcttttttttttttttttttkttgttgagacagggtcttgctctgtcacccgggctggagtgcagttgcgcaatctcggctcactgcaacctccgcctcccaggctcaagcgattctcctg

SEQ ID NO: 138506 - DNA, 201 bp, Homo sapiens
atttggaaagtgcactcagggcatgttggtattgggggtggttttggactggacccagcccccatgtgaccgaggctgtgcttgcaggaggatacttctcyggtgagcaggcgggagaagtgttggagagcgccgtcctggctttgtgttcccaggtgagccgtgggtgctgtcgcgttctctacatccatgttacacaac

SEQ ID NO: 138507 - DNA, 201 bp, Homo sapiens
tttttagtagagatggggtttctccatgttggtcaggctgatctaaaactcccgacctcaggtgatctgcctacctcggcctcccaaaatgctgggattaygggcgtgagccactgtgcccagccgaatttcctgtgtttttaacaaaaactttgaggagttgcatttgcacactcagccatctaggaatcttttccttct

SEQ ID NO: 138508 - DNA, 201 bp, Homo sapiens
gtttctccatgttggtcaggctgatctaaaactcccgacctcaggtgatctgcctacctcggcctcccaaaatgctgggattacgggcgtgagccactgtrcccagccgaatttcctgtgtttttaacaaaaactttgaggagttgcatttgcacactcagccatctaggaatcttttccttcttatttctttgtcttcac

SEQ ID NO: 138509 - DNA, 201 bp, Homo sapiens
gccagaaagaagcaaggatggggcggctctgggaggtgggtgtgtgcacggccgcacgttcaggtgaggccgccacagcttggcgggtagtggccttgcaygccctgtgcacactctttgacactttcatcccatccctaagaaatgattcctggcaggtgatctggaagaagcagcagctgagcgtgcagccctgttcac

SEQ ID NO: 138510 - DNA, 201 bp, Homo sapiens
gtctgaagggcatggtccagaatgtttttaaaaactgaatttccagcactggaaatcacttctgaagccattttcatgttagaaaagggtcaggacaccacccccccaccacatcccacccgtctggggctccaggggcatctgaggggtaattagtgacttctttgatgatcacctaccgcctgccagcaccttactgag

SEQ ID NO: 138511 - DNA, 201 bp, Homo sapiens
ttctcaagtgatagtttcagccagactcttaaggtgggctgcaccttaagggtctttcttcgtgcgtttgccctgagctgaggcggtggctgggaggatgsctgccgaactcaacggcctgctctggcggcttggctgggctgggcttggggggcccttccaggccccaaaggaggaaggaagctgctgcaataagaagca

SEQ ID NO: 138512 - DNA, 201 bp, Homo sapiens
gcaaagctcgggatctctcgttactgctcctggatgcttcttgcccagtggtctgggtgcgatttgacagaagagcagggctggagctgcccccacctccrtgccacccgtgtccctgtcaaatgccttcctcccaccacagcccccgtctgtaaagccgcgtatcacagagaacagctcaaagccgcagcaacgcctcca

SEQ ID NO: 138513 - DNA, 201 bp, Homo sapiens
ctgcgttagcgccaggggcgcggacgcgacggggcgggagcgggggcactgaaagtgccaggcccgggggtgtgggggctgtgcggattcgcgggcggggkggccagggttacccagagcaggggccaggagggccggtggcccacgtgctgggcattcggaggactttacacattgaactaggcagctgttcacgaaagg

SEQ ID NO: 138514 - DNA, 201 bp, Homo sapiens
ctgcccccacctccatgccacccgtgtccctgtcaaatgccttcctcccaccacagcccccgtctgtaaagccgcgtatcacagagaacagctcaaagccrcagcaacgcctccatctcgccatcgcctcactcagcagtatttagtgaatgtcttcactttgccaccaaagcacctatttgtgcagaagagaagggccga

SEQ ID NO: 138515 - DNA, 201 bp, Homo sapiens
cacctccatgccacccgtgtccctgtcaaatgccttcctcccaccacagcccccgtctgtaaagccgcgtatcacagagaacagctcaaagccgcagcaaygcctccatctcgccatcgcctcactcagcagtatttagtgaatgtcttcactttgccaccaaagcacctatttgtgcagaagagaagggccgagaggggt

SEQ ID NO: 138516 - DNA, 201 bp, Homo sapiens
catctcgccatcgcctcactcagcagtatttagtgaatgtcttcactttgccaccaaagcacctatttgtgcagaagagaagggccgagaggggtcccgaygccctgtcccggcgggccaggtagaaactgactgctcccgtgacacccgagacgtggaagagtagcccaccttcctgagtgagagagacgtcagctcccg

SEQ ID NO: 138517 - DNA, 201 bp, Homo sapiens
gacccgttgctagtgggtcctggcaaccacacacggggctgttatgctttggtcaccatggaaattcccgggaggtgccaagtgtctgggctttgttttcyaacagctgaaagacgatgcagttgccctggtagacgtgatcgctcctcctgactttgttctggactcaccgattggcagagccgacggcgaggtaaaggg

SEQ ID NO: 138518 - DNA, 201 bp, Homo sapiens
tccagccctacaggctacttccttgttcacacggcaaagaacaggacaacagccgtggccgaagccggtgtggagcctgggccggtccggcttcccggcgycttcccctgcccgcaccgtcagcatcgtcatcaggaagcgtctgcatcactgcttgctttctcgtggtcactgcgctgggttacagcttctgacggtaac

SEQ ID NO: 138519 - DNA, 201 bp, Homo sapiens
acccagaccctcgcctgtgggtctgtggccgtcgggtcctctggacactctctgtgctttggggtgcccccagcttggggttcccaatggtttgggttccygtcttccaccaaagtcactggaatgtgtgtcctagatggagcttgcttccgcagtccgctgaagtcagtggactttctggacgcctatcccggcatcctt

SEQ ID NO: 138520 - DNA, 201 bp, Homo sapiens
tgtgtgtggccagagtggaccagctggcactggctggattccagagggaatgcttcctgaccctgggtttagtgagccttggggatgagtctggatgtccrgggtgctcccaagagggcagggtactctcaggcaaggctgtgtgacagaaaacaagactctgacaaaccctctgccctgtgtgcctggtgacccccaggc

SEQ ID NO: 138521 - DNA, 201 bp, Homo sapiens
aagggtgtgggggtttcaggcataattagaaaggcaagtgaaaagaatgaagttccccagtcacaacttagtggctgggagaagtatctagtgactgcctrtcctaggacccctcgggtagtgacagatctggaggacggttgtccaggaccagagactaagactgagaaggccatgccagtgttcaggagacagttaacc

SEQ ID NO: 138522 - DNA, 201 bp, Homo sapiens
aagtttgctttcctttgaaactcacgggaatgtttttgcaagtataaatatattctgtgtggtgagaatgggggaataatttccactccttaaaaagggcrctgactgtgaccggatcatactggaaaaggcattccttggctttcaagtaacaggctggagcacgctggggccattggcaccgaggcaaggtttttctca

SEQ ID NO: 138523 - DNA, 201 bp, Homo sapiens; identical to SEQ ID NO: 24598

SEQ ID NO: 138524 - DNA, 201 bp, Homo sapiens
caattctcctgcctcagcctcccgagtagctgggactacagctacccgccaccacgcccagctaatttttttgtgtttttttttttttagtagagacaggktttcaccatgttagccaggatggtctcgatctcctgacctcttgatctgcccacctcggccttccaaagggctgggattataggcgtgagccaccagcct

SEQ ID NO: 138525 - DNA, 201 bp, Homo sapiens
ctttcctggaagaacagcgcagtatcatgcaggcaaatcctggggactgagatgccgttgagtacagtagagctgccatcgcaggcgcttcctgtgagagrgccgccctgaccccagcagcaccacgcaggagacaacgctgaggcttggagccatgacgccttttgctcacgcgcagagctgcagagccgagtgacgctg

SEQ ID NO: 138526 - DNA, 201 bp, Homo sapiens
acgcacacgtctcccgctggagacactggatctggcttgtatttgagttggccacatgtgaccaccactgtaatagcttttgtggaacagaagggatcccytgagaattcgtggaagtttgctttcctttgaaactcacgggaatgtttttgcaagtataaatatattctgtgtggtgagaatgggggaataatttccact

SEQ ID NO: 138527 - DNA, 201 bp, Homo sapiens
aatgtctctaagaagctccagtttcctcacctggaaaaggagactactgatagtacttgggcttggtgggcacagttgaggtctatgtagctgcttaacayagtcacctgcacacagcaccagctcagtaactggaggttgttatgagggttttatcaggctggagagaaatgagaagattccgtaaggtgttagagatgc

SEQ ID NO: 138528 - DNA, 201 bp, Homo sapiens
ttgtaagggggcaatgtgggctagttttcgggatgacggttctgagaaccacgtcgagctcacgctgcgcctctggctgcgatcccgccccggagctggtraggaaggccagcaactccgaattgccacgggcgagactttgggagaaatcctcccaaagcgaatccagatctgcggcggggaagtcgccctcccttcctt

SEQ ID NO: 138529 - DNA, 201 bp, Homo sapiens
ttgtatgaccatggtcaatgtctctaagaagctccagtttcctcacctggaaaaggagactactgatagtacttgggcttggtgggcacagttgaggtctrtgtagctgcttaacacagtcacctgcacacagcaccagctcagtaactggaggttgttatgagggttttatcaggctggagagaaatgagaagattccgt

SEQ ID NO: 138530 - DNA, 201 bp, Homo sapiens
tgctgttttggccaggccggtctcgaactcctgacctccagtgatccacctgcctcagcctcccaaagtgctgggattatgggcatgagtcactgtgcccrgccagaaagaagcaaggatggggcggctctgggaggtgggtgtgtgcacggccgcacgttcaggtgaggccgccacagcttggcgggtagtggccttgca

SEQ ID NO: 138531 - DNA, 201 bp, Homo sapiens
gattggtctggtgtgagctgagttacaagccccatgtttaaaggtgggtgtggtcaccttccccagctaggcttaggaattcttagtcagccttggaaatycagctagtcctgtctctcagcatcactgtattatcacccccaaggtgcacagatcttaggaaggtcacccagctagaaagctgtaacattgagatttgaa

SEQ ID NO: 138532 - DNA, 201 bp, Homo sapiens
caggctaactcaggcccaggtcccaggccaagctgtgcatgaataaaggtagatttgggtgaaacttccaggaaattgtaacagaattgcagttgtttctktccacatcctttgaccagggctatgagcctgtttagtaagtgttgccattcatgcctgtgtggcacccatcccctcccgtgtgtggtcacagcactctgg

SEQ ID NO: 138533 - DNA, 201 bp, Homo sapiens
cgcacccccttagcatcacccagagctgacacacaccgccttagcgtcacccatgagccgacacacaccgcctttgcaacccaaacattcacgtgtgttcrgtgtttagtaaaaactgtaggattacaagaaaatatggctacatcagaaatttttgcaaaagaaacctgtcggggcgtctccagatctgcacacacccag

SEQ ID NO: 138534 - DNA, 201 bp, Homo sapiens
ctttgcaacccaaacattcacgtgtgttcggtgtttagtaaaaactgtaggattacaagaaaatatggctacatcagaaatttttgcaaaagaaacctgtyggggcgtctccagatctgcacacacccaggccctctcacacaccttttgcagctactttgagaattctctgagcattcgggggactcagcctccaattta

SEQ ID NO: 138535 - DNA, 201 bp, Homo sapiens
tcctcatcagtggggtagtagcagtacagcctggtggggtctcaggaccatgcctggtccatacggagtactgtgggaggccagctctggctgtgctgtgsggggccccgcagatgtgggcaccactgccaggggaaggggaggacgaaggggggtctccagctgtcctgcctgacaccccaccccggggcctccctgtct

SEQ ID NO: 138536 - DNA, 201 bp, Homo sapiens
gtgtcactttcatggaaaaacactgaagcagtgccgctctaacacagcaactgtgcaggcgacggggagagtggtgcggggcacagggctcactcagattmggttcaaggacggcctctctgtgcctgggccctgctgggattggcctcatctctgggttcgcagaggacccatggcgagaggagaggccctcgtggtgtg

SEQ ID NO: 138537 - DNA, 201 bp, Homo sapiens
ttatgctttggtcaccatggaaattcccgggaggtgccaagtgtctgggctttgttttccaacagctgaaagacgatgcagttgccctggtagacgtgatygctcctcctgactttgttctggactcaccgattggcagagccgacggcgaggtaaagggaggacagggcctcacgggagtgccccaagggttgatgggca

SEQ ID NO: 138538 - DNA, 201 bp, Homo sapiens
ctggcccagcctcttaagttttcatcattagatatcaagcagaagcaaaggagtcttctttcttttttttttccccttaaaaaaaagcctgcagcacctgstattcccaggcggtctcccatccaaatactaaccacgcccgaccctgcttagcttcacgagatcaggctcattcagggtagtttggccatggacagcaaa

SEQ ID NO: 138539 - DNA, 201 bp, Homo sapiens
cagccttctgggaatggactggtcccggcccttccctgtcctgggagcgagcactgtctgcggtgctgagtctggttccctggcctttcttcatggtttcsctgcaaacaattgcaaccttccatggtgtgtcattcactttgacgtttgtgaactttatataaagtgggccatgacgcacattcttctgcagtttgcttc

SEQ ID NO: 138540 - DNA, 201 bp, Homo sapiens
agtccataccgcatgggatgcttcctgggccccagcccaccttggttaatgctgtggtcagctctgctggttgccatggcagacactgtttagggagcccwtccccagagcctgtgtcccccccggtgactgctggccttacgtggacctttcctggaagaacagcgcagtatcatgcaggcaaatcctggggactgagat

SEQ ID NO: 138541 - DNA, 201 bp, Homo sapiens
tgagacgtcatgagtgcaaatgccgttgcccagaataagaaaaaaaaaacattaaagcaagaggcctgtccacatacacttgtgtagaaatacccactgakattcatcacactgaaaagtggggcccaggagatcaggcattggaggacaaagcctgtgcccaccatgaactttatggggaattgatcgtggtttggattt

SEQ ID NO: 138542 - DNA, 201 bp, Homo sapiens
tgcattatttgacagcagcaaggttccaggaggggctgtctttctggcccccgcagcatgtctggcctgtgccatcgctgtatcaagctgtgtcactttcrtggaaaaacactgaagcagtgccgctctaacacagcaactgtgcaggcgacggggagagtggtgcggggcacagggctcactcagattcggttcaaggac

SEQ ID NO: 138543 - DNA, 201 bp, Homo sapiens
  misc_feature (1)...(201): n = A,T,C or G
attaagccacggcagtaataccaaggccattcgcacaactgcccactacgatcctgccactgaggtaggtattaccttcccccgggtccctgagtttggancatatgagacgtcatgagtgcaaatgccgttgcccagaataagaaaaaaaaaacattaaagcaagaggcctgtccacatacacttgtgtagaaataccca

SEQ ID NO: 138544 - DNA, 201 bp, Homo sapiens
cctactgccccagagcaagtccagatcctgccaccagccctcactcaccaaaaccaaggcccagagctatagcgcatgtgagatcagaagagggcaggaarccccaaggccccatgctggcatgctccatgctcagacagcagggagcaggacgggccttcctggcaccgacaggacggcccacccaggagtgtgcggggc

SEQ ID NO: 138545 - DNA, 201 bp, Homo sapiens
aggcttagaaacgagcctctgaatgcagttgctaattcacgagcttcagggtcgtcacttttaagggccttttctaccttgttgggaagaaacaagccctrgaagtcctgagtgaaaagcagcatggtgagaacattccagtgcacagcaagggcctcgaatccaggccggtgaagagatcacgcatgggcagcagagccg

SEQ ID NO: 138546 - DNA, 201 bp, Homo sapiens
ggaagccccaaggccccatgctggcatgctccatgctcagacagcagggagcaggacgggccttcctggcaccgacaggacggcccacccaggagtgtgcrgggcccagcgggggtcttgggacaggaccagtcagcctggcatgaagcacagcgggaaaggcgcttctcccggtttctgttttcccgaggctcctgatcc

SEQ ID NO: 138547 - DNA, 201 bp, Homo sapiens
ttagtgggcaggaccctccctcagtcctcagggaatgctgaagtctgtacatgagcccttaccggcttagccagggagggcccagcgcctggcctcagcgyggcccaggctacacctgggttgggctaggtgtgccaagaggcaggtagtgccaggagccgggtgggcagggcaggaggtgagagttccccgtagtaggag

SEQ ID NO: 138548 - DNA, 201 bp, Homo sapiens
tcagacagcagggagcaggacgggccttcctggcaccgacaggacggcccacccaggagtgtgcggggcccagcgggggtcttgggacaggaccagtcagsctggcatgaagcacagcgggaaaggcgcttctcccggtttctgttttcccgaggctcctgatcccagcagggccctggaggacactggctttgtgactgg

SEQ ID NO: 138549 - DNA, 201 bp, Homo sapiens
caatttttctttcacttggggttcggttcagagaacacttccagaaggccccctcatgccaggcagcctgccgggctctgcagagagcagaagcccacccmctaggtcccataaggcacagacagacacgagccaggagtgcctagacttgggaatactggaaggcttcctggaggagggggtgctggggctgattcctgg

SEQ ID NO: 138550 - DNA, 201 bp, Homo sapiens
aggatttgaagagactgtgccctgctgtagggagagaagacttggcgggagccttgggtcctgggggagcgcataggagagggacttgccctacccacctycctgggagaggcagtctccccaggaggtgggggctcaccaggcagacaggcattcgaagggacactggagccagacccgccatggaggacccccaagcac

SEQ ID NO: 138551 - DNA, 201 bp, Homo sapiens
  misc_feature (1)...(201): n = A,T,C or G
agagaaaagatcaggaagcagtgactttgaagcaaggaacaaatgccaggtaagtatttgttttcaaaattcccttttgtattatttgctcttaattcccnggccgttgtgtccctgggagtttgaacatcctggcaattcaggccccagaccccgagctcccgtgaccttgggcagatgacttgatgactttgctgcttg

SEQ ID NO: 138552 - DNA, 201 bp, Homo sapiens
tgctgtagggagagaagacttggcgggagccttgggtcctgggggagcgcataggagagggacttgccctacccaccttcctgggagaggcagtctccccrggaggtgggggctcaccaggcagacaggcattcgaagggacactggagccagacccgccatggaggacccccaagcacacgggactgtctgccccgtgca

SEQ ID NO: 138553 - DNA, 201 bp, Homo sapiens
cactgcggagaatgagtgacaggtggaggtatcagaactgccgcgtgctgaagaatgaatggggagggcctggctgagactgggagccctccttaccctcrcaggcgaagagctggtggtcccctgagagaagagaacagaaggcatggctggcagccaccccacctcctacttctcctcagtgaaacttcaggatctata

SEQ ID NO: 138554 - DNA, 201 bp, Homo sapiens
cggtctggataatgggtgagtgacagaggctgctgagccctgagcttcctgccaaggcccaggctgcgttgtcgctcatgtctgagatctcactggccccrtggatgccatgccctgccctcttagactcaaatgcggtggggacctacgcctagcccccgtgcatgcactggccacgtcctgcttgaactccactttggg

SEQ ID NO: 138555 - DNA, 201 bp, Homo sapiens
gactccacacgctgtctcccccgagagcctgatccagcagggtgtagacccctctgtgcccacgagatgatttataacttgggggtagtgggacaaggtakgaccatgcctgagcctgatagcctgaaagatgtctcaggagtgtttctagatatgcgtgtttcatatagtgtttcatagcgaggctggtggagaggagag

SEQ ID NO: 138556 - DNA, 201 bp, Homo sapiens
aggggctcattccccactgaggctgccacccacaggcctcacgggcccggggtccccagccccactgcctgggggtcccagcccaagagcagttgggcctrcgtgggctgtcaactggggtcatgcagatttccaccaggggtccccctcataggatgcctcaggccgtgtgtgtgtggacggctcctttacctagacctg

SEQ ID NO: 138557 - DNA, 201 bp, Homo sapiens
tcaagaaagtcatggttaggacccaggaggtatgggccagaaggagagataggggtgcacgcatgggcaactgttgagtagagacttctggctgcgccatratcttgaccggccaatgccgggaatttgggacgacagctttctgcctctagtcagccctcagcttccccaagaaaactgtaaaagtggaagctggttcca

SEQ ID NO: 138558 - DNA, 201 bp, Homo sapiens
ctttcacacttgatctgggaccagtggaacgtccctgtgactggctctgagcctctctcgggattcgttgtataaagcccttccctgagcctgcggttccrgagaggggcgtgtctgattgtggcgcacgtatgtggccacatttactcgtcttaacatcgaactggccacagggaggggttttccttggctcctccaaga

SEQ ID NO: 138559 - DNA, 201 bp, Homo sapiens
tcatggttaggacccaggaggtatgggccagaaggagagataggggtgcacgcatgggcaactgttgagtagagacttctggctgcgccataatcttgacyggccaatgccgggaatttgggacgacagctttctgcctctagtcagccctcagcttccccaagaaaactgtaaaagtggaagctggttccaggcagacca

SEQ ID NO: 138560 - DNA, 201 bp, Homo sapiens
aaaaattagccaggcttggtggcacatgcctgtagtcccagctgctcaagaggctgaggtagggtggcttgagcccaggtgttcgaggctgcagtgagccrtaattgcaccatcacactccagcctggacaacagagcaagaccccgtctcaaaaaaatgacagccacaactgatttcccagtgaggctatggccaaggct

SEQ ID NO: 138561 - DNA, 201 bp, Homo sapiens
gggtggcttgagcccaggtgttcgaggctgcagtgagccgtaattgcaccatcacactccagcctggacaacagagcaagaccccgtctcaaaaaaatgamagccacaactgatttcccagtgaggctatggccaaggctggatgaccgttgtgtgccactctgtgtgtgcccatccataccactgtcttggggaggccaa

SEQ ID NO: 138562 - DNA, 201 bp, Homo sapiens
atggccaaggctggatgaccgttgtgtgccactctgtgtgtgcccatccataccactgtcttggggaggccaaggtcagccaggtggagaagttgccagcsatccactagaccagggccagcaaactcagtccaatcctgccgttcacctgagtgtcgtctgtgggtgcctttgtgcttccacggcacagtaggcagttgc

SEQ ID NO: 138563 - DNA, 201 bp, Homo sapiens
ggtatacaccccaaagaaaagcaatcatcctgccagccagatacatgtacctgtatgtccatcgcagcgctattcacaatagcaaaaatgtgaaatcaacrcaggtgcccatcagcggtggactggataaagaaaatggggtacatagacaccatgggataccgtgcagccatcactacgaacagtcatgtcttttgcagc

SEQ ID NO: 138564 - DNA, 201 bp, Homo sapiens
ccggcatccttgaccagaagtttgaggtctccagtgttgccgactgcttggactctgcaggtaaacacacaggtggagggctcccctggcctcctgatttyctgtcattcccaccaggaaacgcaccgtgcctcggtgaggggacccttggcagttccagccggggcagcagtggtggtgggaggccccgcatgcagcttg

SEQ ID NO: 138565 - DNA, 201 bp, Homo sapiens
catcctgccagccagatacatgtacctgtatgtccatcgcagcgctattcacaatagcaaaaatgtgaaatcaacgcaggtgcccatcagcggtggactgsataaagaaaatggggtacatagacaccatgggataccgtgcagccatcactacgaacagtcatgtcttttgcagcaacatggatgcagctgcacgccatt

SEQ ID NO: 138566 - DNA, 201 bp, Homo sapiens
gtgagtggtgaggtcacgtggagtgcacagtgaggtcatgtgaggtgagcagtgaggtcacaggtgagcggtggagtcacgtgggggagcggtgaggtcaygtggagtgcatggtgaggtcatgtgaggtgggcagtggggtcatatgaggtgagcagtggggttcgtggtgcagacagtgctcccagagggtgggagcac

SEQ ID NO: 138567 - DNA, 201 bp, Homo sapiens
acatagacaccatgggataccgtgcagccatcactacgaacagtcatgtcttttgcagcaacatggatgcagctgcacgccattatcctcagcagactaaygcagcaacagaaaatcaaatgctgcatgttcacatgtacaagtgggagctaaacatggggcactcatggacataaagatgggagcggcagagcctgcggg

SEQ ID NO: 138568 - DNA, 201 bp, Homo sapiens
ggaggacgaaggggggtctccagctgtcctgcctgacaccccaccccggggcctccctgtctgcaacatctgctccctcctgcccttttgagctttgtggraggggccacgcagggggtgaggccttaggttcccccctcccccaccatgtcagtccccagttccacagctccagcatgcggtgaggtccaagggccaggc

SEQ ID NO: 138569 - DNA, 201 bp, Homo sapiens
accccagtcccagacgggagctgagctgagactgaggccttggagggcgtcggtggagccagagcagtcccagctccatcttcataggcctcttccattgygttctggaaacatgtctcgtgctgcgccgcatctgtgctctgcctcaccttatgttactgtcctaggacatgcacgggaacgcagacccgcgttcgtgtt

SEQ ID NO: 138570 - DNA, 201 bp, Homo sapiens
ccatcttcataggcctcttccattgtgttctggaaacatgtctcgtgctgcgccgcatctgtgctctgcctcaccttatgttactgtcctaggacatgcaygggaacgcagacccgcgttcgtgtttcctgagaacttcctcccccgggaatctgggcggggctgggaccctcacggtcctcacggtgccgtcctgtgttc

SEQ ID NO: 138571 - DNA, 201 bp, Homo sapiens
ggcttggagcccttctccccacttctcagcggagggggtttgggaaacacagcctctctgagcttccgtttctccatctttcatggggggcagtagtactkggctcacagctgttggagggtgaaataagataagactatagaaggcaggattcctgccgccgcccaccaacaggtgctcagacctgcggctcccacctcc

SEQ ID NO: 138572 - DNA, 201 bp, Homo sapiens
tgcctagacttgggaatactggaaggcttcctggaggagggggtgctggggctgattcctggaggattggtgggaataggctaaaccaaagtttgtcaackttttgttcgtctttgccccccaggaagctttttaggtggtttttcccaatggctggcacccatgcatctttggtactaggatacactgcatatccattca

SEQ ID NO: 138573 - DNA, 201 bp, Homo sapiens
tgaggcaggagagtcgcttgaacctggaaggtggaggttgcagagagccgagatcgcaccactgcactccagcttgggtgacagagcaagactccatctcaaaaaaaaaaaaaaaaaaggaacccatattgaatttataactgaaaagaaatgaagtcagcaggtggccagggtctgtaaaacttgtagtttagggccatg

SEQ ID NO: 138574 - DNA, 201 bp, Homo sapiens
atggcatccactgtggaaggaggcgacacagctctgctcccagaattccccagggggcccctcgatgcctaccgagcaagagcgtccttcagctggaaggmgctggcgctgttcacggaaggggagggcatgctccgctttaaggtgaggcgtgcggttgtgcgcagcttgtcttttttcccagtggggtcttagttcgtt

SEQ ID NO: 138575 - DNA, 201 bp, Homo sapiens
ttgtttacccaccttgggtgatacacagcaggttgggtcattcagaaaccagtggatgcctgtcagcttccactgctccctcctctgcaggccacatcctygcgttaaggtggaataggctgctgcactggctcatgtctgtaatgccagcactttaggaggctgaggcaggaagatcgcttgagcccaggaggttgaggc

SEQ ID NO: 138576 - DNA, 201 bp, Homo sapiens
tatcaagctgtgtcactttcatggaaaaacactgaagcagtgccgctctaacacagcaactgtgcaggcgacggggagagtggtgcggggcacagggctcrctcagattcggttcaaggacggcctctctgtgcctgggccctgctgggattggcctcatctctgggttcgcagaggacccatggcgagaggagaggccct

SEQ ID NO: 138577 - DNA, 201 bp, Homo sapiens
gcaaataaagacaggaggcaaagacaacattctggagaaagtttggccctgaaggggaggagaggtgggtggcactggaaggctttgcttggtgtccccasacagctgactcatgagtgggatttggaaaaagcgtggactcctgcccatggcctgagtcctttaagatcagaaattatgtctcccatcatggcctctcca

SEQ ID NO: 138578 - DNA, 201 bp, Homo sapiens
aggagcagttctatttccagcatgttgagtttaggggcctccagcacccagggaggggtccagcaggcagctgtctatacaaatgcagctcaggggagaaktcaggactgggacacagattcagaagccagcagcagagacctgagaggtgggtgtgatcactcatttgctgtttaaaggcccagaaaggagacagagaag

SEQ ID NO: 138579 - DNA, 201 bp, Homo sapiens
atgtgcatgatttgatatgtatgagagggtgtgtgtgcatgagtgtgttgagtgagtatgtgagtgtagtgtaagagaggatgttggcactatcaggtaaktacgagagtgtgtgtatgtgggcataggtgtgttaacatgtatgtgtttgggaacttgtgtatgtggaaggggttagaaggcctagaagagagaggttga

SEQ ID NO: 138580 - DNA, 201 bp, Homo sapiens
catggggttctccacaggtctgagggcctgatgtgtgtgaaaccattctgcagagctgggaacgggtcaggaggtggttgtgtgtgtgtgtgtgtgtgtgygtggcattgctggagggcactccttgtgtgctctgagtgtgacagaggaagtcaccctggacttaggttggatgggagagcatgtctgtgtgtctcagag

SEQ ID NO: 138581 - DNA, 201 bp, Homo sapiens
tccttccaggcctactgcaggcccatgggaatttggtgaatttccacagaatgatcaagttgacgacaggaaaggaagccgcactcagttatggcttctayggctgccactgtggcgtgggtggcagaggatcccccaaggatgcaacggatcggtgaggccacctatccctccctaccctcctagactctggcccaggca

SEQ ID NO: 138582 - DNA, 201 bp, Homo sapiens
tctcttgaacctgggaggcggaggttgcagtgagccgagatctcacaactgcactccagcctggcgacaaagcgagactccgtctcaaaaaaaaaaaaaaacgaaaacaacaacaacaacaaaaacctgcttatgcagatattgatttggcaaaagaaaaaaacttgtcaatatgctgattcttttagttattaataatgc

SEQ ID NO: 138583 - DNA, 201 bp, Homo sapiens
tgtgctcgacttcttgccgggccttagctgcctccccgaggggcagggctggggacctacagccggccatgcctgagcctcccctctccgccgccgtgggytcctgcgcggcccgagcctcccccacgagcgccatcccctgctccatggcgcccagtcccattgaccacccaagggctgaggagtgtggcacacagcgca

SEQ ID NO: 138584 - DNA, 201 bp, Homo sapiens
gtccaagatatgatgattctcatttgctgccaccccaggcaggtgctcctgctgacagggtttcatcattgaacatctgggaagcagcagccctggcaggwagcagcactccaaagctgttaccggccctccctgagatggggcagggcggaagggggaacagtgcaggatgagatgagggaatgaatggctgagggcact

SEQ ID NO: 138585 - DNA, 201 bp, Homo sapiens
atgcaacggatcggtgaggccacctatccctccctaccctcctagactctggcccaggcagggctgggagctgcaaagacagtgccggttcctgatgggcrcagaggtctcaggatggcctggctggaaaagcagccggcatgttggaacttctgctctagactgttgcaaagtcactgggtctctgcccagggtccaagg

SEQ ID NO: 138586 - DNA, 201 bp, Homo sapiens
acagaaccccatgccccatcaccagacaactcccaaatttccttccaggcctactgcaggcccatgggaatttggtgaatttccacagaatgatcaagttsacgacaggaaaggaagccgcactcagttatggcttctacggctgccactgtggcgtgggtggcagaggatcccccaaggatgcaacggatcggtgaggcc

SEQ ID NO: 138587 - DNA, 201 bp, Homo sapiens
gaaagtttggccctgaaggggaggagaggtgggtggcactggaaggctttgcttggtgtccccagacagctgactcatgagtgggatttggaaaaagcgtrgactcctgcccatggcctgagtcctttaagatcagaaattatgtctcccatcatggcctctccatagaggcatgtatcttcagcaggcgttaggtcacaa

SEQ ID NO: 138588 - DNA, 201 bp, Homo sapiens
cagcatcccaagggcaagaattctgtctccccattggtcagaaatatctggagcgcaggtgtttgtctccaactaggagcttctggaggacagggctgtgycttctaccccagggttcccacaagaagccactgaatattaataaactcccatcttgtgtttattttcttatgatttcagcaaaacaggactcctgcagaa

SEQ ID NO: 138589 - DNA, 201 bp, Homo sapiens
gcccttctatacccacccagaatgagacatccagcagatttccagccttctactgctctcctccacctcaactccgtgcttaaccaaagaagctgtactcyggggggtctcttctgaataaagcaattagcaaatcatgtatatgtgtgtgtgtatgcattgccctatgcactgttagcatgagaacaaacaggggtaggg

SEQ ID NO: 138590 - DNA, 201 bp, Homo sapiens
ccttaatcattttttttttgagacagggtctcacactgtcatccaggctggagcgcagtggcgcaatcactcactacagcctccatctcctgggctcaagygatcttcccgcctcagcctcccgagtagctgggactacaggtgtgtgccatcacacccagctaaattttttatgttttttttaatgttttgtagagttgc

SEQ ID NO: 138591 - DNA, 201 bp, Homo sapiens
ccggcatgttggaacttctgctctagactgttgcaaagtcactgggtctctgcccagggtccaagggggtgagaccacaggcaccaggcctcctggagctrtgggacaagagccccaacagggtgtctcctcacagctgctgtgtcactcatgactgttgctacaaacgtctggagaaacgtggatgtggcaccaaatttc

SEQ ID NO: 138592 - DNA, 201 bp, Homo sapiens
cgaccaatcctgagtccaccaactgaccacgcccatccccagccttgtgcctcacctacccccaacctcccagagggagcagctatttaaggggagcaggwgtgcagaacaaacaagacggcctggggatacaactctggagtcctctgagaggtaaagagccagcgaagctgatgtcctgtcaagagcagaattcctgct

SEQ ID NO: 138593 - DNA, 201 bp, Homo sapiens
gaaccccatgccccatcaccagacaactcccaaatttccttccaggcctactgcaggcccatgggaatttggtgaatttccacagaatgatcaagttgacsacaggaaaggaagccgcactcagttatggcttctacggctgccactgtggcgtgggtggcagaggatcccccaaggatgcaacggatcggtgaggccacc

SEQ ID NO: 138594 - DNA, 201 bp, Homo sapiens
ctagactctggcccaggcagggctgggagctgcaaagacagtgccggttcctgatgggcgcagaggtctcaggatggcctggctggaaaagcagccggcaygttggaacttctgctctagactgttgcaaagtcactgggtctctgcccagggtccaagggggtgagaccacaggcaccaggcctcctggagctgtgggac

SEQ ID NO: 138595 - DNA, 201 bp, Homo sapiens
tactggtcgaatttgaattgaggaaagacaaatgaccttaatcattttttttttgagacagggtctcacactgtcatccaggctggagcgcagtggcgcartcactcactacagcctccatctcctgggctcaagtgatcttcccgcctcagcctcccgagtagctgggactacaggtgtgtgccatcacacccagctaaa

SEQ ID NO: 138596 - DNA, 201 bp, Homo sapiens
gaaaggaagccgcactcagttatggcttctacggctgccactgtggcgtgggtggcagaggatcccccaaggatgcaacggatcggtgaggccacctatcyctccctaccctcctagactctggcccaggcagggctgggagctgcaaagacagtgccggttcctgatgggcgcagaggtctcaggatggcctggctggaa

SEQ ID NO: 138597 - DNA, 201 bp, Homo sapiens
ctcttgtcccttagttttctctcccattgcagtgatcctctctcagggggaaaaaagaagccatttgggaggaaggagagtagcagagaggggcagagagrgagggcacagaaccccatgccccatcaccagacaactcccaaatttccttccaggcctactgcaggcccatgggaatttggtgaatttccacagaatgat

SEQ ID NO: 138598 - DNA, 201 bp, Homo sapiens
cccttagttttctctcccattgcagtgatcctctctcagggggaaaaaagaagccatttgggaggaaggagagtagcagagaggggcagagagggagggcrcagaaccccatgccccatcaccagacaactcccaaatttccttccaggcctactgcaggcccatgggaatttggtgaatttccacagaatgatcaagttg

SEQ ID NO: 138599 - DNA, 201 bp, Homo sapiens
ccagagctggttatgggaatttactccatggaaagactgcaaaactgcctgaaatgtgttttggcatcagctactgacacgtaaggtttcccaatcctcamctctgtcctgccagctgatgaggggaaggaaagggattacctaggggtatgggcgaccaatcctgagtccaccaactgaccacgcccatccccagccttg

SEQ ID NO: 138600 - DNA, 201 bp, Homo sapiens
ttatggcttctacggctgccactgtggcgtgggtggcagaggatcccccaaggatgcaacggatcggtgaggccacctatccctccctaccctcctagacyctggcccaggcagggctgggagctgcaaagacagtgccggttcctgatgggcgcagaggtctcaggatggcctggctggaaaagcagccggcatgttgga

SEQ ID NO: 138601 - DNA, 201 bp, Homo sapiens
agaaggaacaaactccggacacgccgcctttaagaactgtaacactcactgtgagggaccgcggcttcattcttgaagtcagtgagaccaagaacccaccrattccggtcacagtatggtgagaaaagggacatttgaaccatctcaaagtatctccccacaacatatttattaattacaaaaggaaaaatagtaacttta

SEQ ID NO: 138602 - DNA, 201 bp, Homo sapiens; identical to SEQ ID NO: 24628

SEQ ID NO: 138603 - DNA, 201 bp, Homo sapiens
agctgaccctgacctctgagcatggggggacagccccagaagggaagcactcttgtcccttagttttctctcccattgcagtgatcctctctcagggggamaaaagaagccatttgggaggaaggagagtagcagagaggggcagagagggagggcacagaaccccatgccccatcaccagacaactcccaaatttccttc

SEQ ID NO: 138604 - DNA, 201 bp, Homo sapiens
atttccagccttctactgctctcctccacctcaactccgtgcttaaccaaagaagctgtactccggggggtctcttctgaataaagcaattagcaaatcawgtatatgtgtgtgtgtatgcattgccctatgcactgttagcatgagaacaaacaggggtaggggttaaaaatacaggctctgagtctggtgtagtgctgt

SEQ ID NO: 138605 - DNA, 201 bp, Homo sapiens; identical to SEQ ID NO: 24632

SEQ ID NO: 138606 - DNA, 201 bp, Homo sapiens
gcttcccattgtgctcatgaacaaaatgaaaatccttcacatgaacttctgggccttgtgtgatccagtttctgctacttttttagcctccttactccttragctgtagcaacactggccttcttggtcctcaagtcagtcgaactccttctggaatcagggcctttgcacatgcccttccacctgtctggactgcccttt

SEQ ID NO: 138607 - DNA, 201 bp, Homo sapiens
acactggccttcttggtcctcaagtcagtcgaactccttctggaatcagggcctttgcacatgcccttccacctgtctggactgccctttctttctctttscctggttagcttcagctcagttgacatgacacctccacagggaagccttccctaatattcaggtcttaactggtgctccctggcaggtgctcctatagca

SEQ ID NO: 138608 - DNA, 201 bp, Homo sapiens
ctagtctctacaaaaaaatggaaaagttagcctagtgcgatggcgagcacctctagtccaagctactcaggaggctgaggtgggaggatcgcttgaacctkggggctacagtgaattgtaatcatgctactgtcctccagtccttgcagcagagcctgagaccctgtctcgaagtaaaataaaataaaataacatacgaag

SEQ ID NO: 138609 - DNA, 201 bp, Homo sapiens
gggggagtcaatcctcctttcacaacctcagcttcctcatctgaaacatgaaaataagaacacttacagccagggcaacatagtgagaccccctctctacraaagataaaaaaaattagctgggtatggtggtgcatgccagtaatcccagatactcaggaggctgaggtgcgaggattgcctgagcccaggagttcaaga

SEQ ID NO: 138610 - DNA, 201 bp, Homo sapiens
cccccaccatttctggcctggacagtcgcagtagcctccacactggtctctagctgtggctcttgccctctgtggtctattcattacacagtagccagackgaccttttattatttatttatttatttatttatttatttatttatttatttttgagatggagtctcacacttgtcgcctgggctggagtgcagtggcgca

SEQ ID NO: 138611 - DNA, 201 bp, Homo sapiens
ctttgcctccatgggaagcattgggtcatctctcaccagctgaacagacctattcatagggtggcagcctgaggaattgtaagaataactaaattaagtgrtttatttttttttctttttgagacaaggtcttgctctgtagcgcaggctggagtgcagtggcgcataatggctcactgcagccttgacctcctgggctca

SEQ ID NO: 138612 - DNA, 201 bp, Homo sapiens
agggtggatcacttgagctcaggagttcgagaccagcctgaccaacatggtaaaacccttctctactaaaaatacaaaaattagtgggacgtggtggcgcsggcctgtagtcccagttacttgggaggctgaggcaggagaatagcttaaacccaggaggtgcaggttgcagtgacctgagattgcaccactgcattccag

SEQ ID NO: 138613 - DNA, 201 bp, Homo sapiens
attggttgcccccagggaggggacagggtgagagagagattttcgactgtaaattaatgtgtatctttgaattttgaaccacatggattaaaaaaaatagratcgttaaaatagaataaaaaaaataagtcaacaggaactctcagaatcttagacttcagaaagggaacttggaaggcaagatcagcctcccacatggtg

SEQ ID NO: 138614 - DNA, 201 bp, Homo sapiens
aaagtacagtttactgagttttgacatatgtatacatctgtgaaaccacagtacaatcactatggacatattcatcactctcaaacatttcctcatgtccscttgtaattcctcctctcgcctctccctgattccccaccctcacccccaagcaaccactggtctgctttctgtctctatggatgtttatattttcaagga

SEQ ID NO: 138615 - DNA, 201 bp, Homo sapiens
agcactttgggaggccgaggcaggtagattgcttgagtccaggagttagagaccagcctggccaacatggtgaaaccccatctccgtttctttaaaaaaawttttttttaaagtaaacaacaacacacaaaaaagaaatttagtcccagaagttgtcaaaatatatcattaagtgaaaaaaaaaaaaagccaataccaaga

SEQ ID NO: 138616 - DNA, 201 bp, Homo sapiens
tgttgcccaggctggtcttgaactcctggcctcaagcactcctcctgccttggcctcccaaagtattgggattacaggtgtgagccaccatgcccaaccartgaattaataaatgatatatgttatggtgaccaagtcagtggagacagatacctctggctatgagagaattagtttagggtctgggcaataacctaatcc

SEQ ID NO: 138617 - DNA, 201 bp, Homo sapiens; identical to SEQ ID NO: 24654

SEQ ID NO: 138618 - DNA, 201 bp, Homo sapiens
cactttgggagacagaggtgcgaggatggcttgagagcccagtagtggagaccagcctgggcaacacagtaagaccctagtctctacaaaaaaatggaaaagttagcctagtgcgatggcgagcacctctagtccaagctactcaggaggctgaggtgggaggatcgcttgaacctgggggctacagtgaattgtaatcat

SEQ ID NO: 138619 - DNA, 201 bp, Homo sapiens
gcactttgggagacagaggtgcgaggatggcttgagagcccagtagtggagaccagcctgggcaacacagtaagaccctagtctctacaaaaaaatggaaaagttagcctagtgcgatggcgagcacctctagtccaagctactcaggaggctgaggtgggaggatcgcttgaacctgggggctacagtgaattgtaatca

SEQ ID NO: 138620 - DNA, 201 bp, Homo sapiens
cactttctatataccaggcgttggataccagcctgggcaacatggcgagaccccgcctctacgaaaaatccaaaaagtagctgggcgtggtgacgcgtgcytgtggtcccagctattcaggagcctgaggtagaagaatcgcttgagcccgggaggcggaggttgcagtgaggcgagattggccactgcactccagcctgg

SEQ ID NO: 138621 - DNA, 201 bp, Homo sapiens
caaaggagggtgtcttggctgtgcttgaaggcgaaaccctgccatatccccagtgccagtcccctcagcctgtggtggccttgcatcctgactggatgttytcagccccttgttctgggcaagaacccagagctccccagtgtggatactaataaacctcttggagcacactctcagagctgcttgtctctcatttccttg

SEQ ID NO: 138622 - DNA, 201 bp, Homo sapiens
ttggctgtgcttgaaggcgaaaccctgccatatccccagtgccagtcccctcagcctgtggtggccttgcatcctgactggatgttctcagccccttgttytgggcaagaacccagagctccccagtgtggatactaataaacctcttggagcacactctcagagctgcttgtctctcatttccttgatgccaagctggcc

SEQ ID NO: 138623 - DNA, 201 bp, Homo sapiens
tttttttaaagtaaacaacaacacacaaaaaagaaatttagtcccagaagttgtcaaaatatatcattaagtgaaaaaaaaaaaaagccaataccaagatrtagaacagtgtgtagagaatgctacatttgtctaaaactgaagaggcactttgtgaccaagaattgtaaaagaattctaaatatatctgctcatatattt

SEQ ID NO: 138624 - DNA, 201 bp, Homo sapiens
ggggtgaaggggaaggcactgagccttccctagtggggcctaggcacttccaaaggcctcccaggagcactttcaaaactgatcttccaaagttcccagayaggtcttgcttctgtcctactgagtgagactggtggggttgggtggggggcgggaggaagaaggagcaggagtttgcatttttatttatttatttatttt

SEQ ID NO: 138625 - DNA, 201 bp, Homo sapiens
tcgacgtactcagctggggcaacccgtcacctactgcgggaagaggcagaaccggggatgcagggaaaggacagattattcttatcctgcctctcaaactyctggctgggagccagacttcggatgaaaccaggcaatctcatctagggattcaacgctcccttactattgatgtcacccacgccgtttgcttccgaaaac

SEQ ID NO: 138626 - DNA, 201 bp, Homo sapiens
tccaggactttggagctgtggctgctgcctgagtcactggcatgattcccgtcaccactgctggcagggtggtggccagctcttggttttctgtgagtggrcctttcgggggcattttcagcttatatttctttcctaatagcctccctcccttcagagtgagttcaggaaggtgtgcccaggaaaggctgtcgacactcg

SEQ ID NO: 138627 - DNA, 201 bp, Homo sapiens
gttagaagttagtagtggagaggaagttctgctgggagcttcagtggtgcaagcccaggacccgctctgtgggcttcagaagcacagctcaggcttccttsctgccctagatcactgtgacttagagcagcagttcagatccaatgggtatgaccactactaatgctgctcatttctggggcactcacatgtccaggcctg

SEQ ID NO: 138628 - DNA, 201 bp, Homo sapiens
acccacctcggcctcccaaaatgctgggattacaggcatgagccaccatgcctggccaggacctttctgtaacagacaaaatgactatggttggggcgcasaggggagcaaacgtagagtggagagaaggggtcaattttgcgtgtattttgaagagaaaaccaacaggatttgcccttgggttggctgtggggtgtgaga

SEQ ID NO: 138629 - DNA, 201 bp, Homo sapiens
cttcccattgtgctcatgaacaaaatgaaaatccttcacatgaacttctgggccttgtgtgatccagtttctgctacttttttagcctccttactccttargctgtagcaacactggccttcttggtcctcaagtcagtcgaactccttctggaatcagggcctttgcacatgcccttccacctgtctggactgccctttc

SEQ ID NO: 138630 - DNA, 201 bp, Homo sapiens; identical to SEQ ID NO: 24655

SEQ ID NO: 138631 - DNA, 201 bp, Homo sapiens
tttggtggcttcccattgtgctcatgaacaaaatgaaaatccttcacatgaacttctgggccttgtgtgatccagtttctgctacttttttagcctccttrctccttaagctgtagcaacactggccttcttggtcctcaagtcagtcgaactccttctggaatcagggcctttgcacatgcccttccacctgtctggact

SEQ ID NO: 138632 - DNA, 201 bp, Homo sapiens
tctagctgtggctcttgccctctgtggtctattcattacacagtagccagactgaccttttattatttatttatttatttatttatttatttatttatttwtttttgagatggagtctcacacttgtcgcctgggctggagtgcagtggcgcaatcttggctcactgcaacctctgcctcctgggtttaagtgattcttct

SEQ ID NO: 138633 - DNA, 201 bp, Homo sapiens
gcttgaaggcgaaaccctgccatatccccagtgccagtcccctcagcctgtggtggccttgcatcctgactggatgttctcagccccttgttctgggcaaraacccagagctccccagtgtggatactaataaacctcttggagcacactctcagagctgcttgtctctcatttccttgatgccaagctggcctgggtggg

SEQ ID NO: 138634 - DNA, 201 bp, Homo sapiens
tttagcctccttactccttaagctgtagcaacactggccttcttggtcctcaagtcagtcgaactccttctggaatcagggcctttgcacatgcccttccrcctgtctggactgccctttctttctctttccctggttagcttcagctcagttgacatgacacctccacagggaagccttccctaatattcaggtcttaac

SEQ ID NO: 138635 - DNA, 201 bp, Homo sapiens
gactttcctgtgttttttttttttttttttttttttttttgagacagagtctcactcttgtcaccaaggctggagtgcggtggcgcgatctcagctcactstaccctctgccttgtgggtttaagcgattcttgtgcatcagcctcccgagtagctgggattacaggcatgtgccatcatgcccaactaattttttttgta

SEQ ID NO: 138636 - DNA, 201 bp, Homo sapiens
gaggcgccccgcggctggtactgctgttcagcggcaagaggaaatccgggaaggacttcgtgaccgaggcgctgcagagcaggtgtccgtgaggcgggaarggtggaagggggagctctccgcatcacgtgacacgaggagtgcttttgggtgtcacggagtgagctttggagtacgggtcgtccgtttgcaaggcaggag

SEQ ID NO: 138637 - DNA, 201 bp, Homo sapiens
gatatatgttatggtgaccaagtcagtggagacagatacctctggctatgagagaattagtttagggtctgggcaataacctaatccagctagaatattgygcgcctgttcacactgtaattagcactttataggttttacctgttagtttcagggctcttttatattctttagagtttcataataatcctgtgtgggaga

SEQ ID NO: 138638 - DNA, 201 bp, Homo sapiens
gctcctggaaattctaggctaactggattctgatctccctgtcctgcagacttggagctgatgtctgtgctgtcctccggctctctggtccactcaaggarcagtatgctcaggtaggtggtgctttgtggcatccggtgtgttgggcggggccggctccaggactttggagctgtggctgctgcctgagtcactggcatg

SEQ ID NO: 138639 - DNA, 201 bp, Homo sapiens
gacacagtagtccagggccacagtcgcaacgctggaagatttctggagcttgagcagtgtctttatgccctcttctggagcagacctgtccctccaaaagractggcttacaaattttcgtccaaaaatgacgagcacagcaaagtccagggccacagtcaaaagttctcagacaactttctccctcttgtcctgtaacaa

SEQ ID NO: 138640 - DNA, 201 bp, Homo sapiens
aacgggtggtcactgtctcttagaggctgccatatccccttccagaaaacagttctcgtttgtttactcgtggttcttgttcacccgagccttctgttgcytttcagaactcgcaaactttgagaagaacgtgagccaagctatccacaagtacaatgcttacaggtgggacagtgcagcattctcgggtagcatacgttc

SEQ ID NO: 138641 - DNA, 201 bp, Homo sapiens
agggctcatgccctagaaaagggtttcacaatcaatgagtacaccatccgtcccttgggagtcactggtgagtgtccatgtgtgtattagagatcatctcscatctggagagaaggttattttcaaagatactttggtttagcaaaccttctaataactatgccagttagtgtagtttctttgtatttttagtccttcagg

SEQ ID NO: 138642 - DNA, 201 bp, Homo sapiens
tctgaacactctggggttctcgggtgcaggccgccatgagcaaacggaaggcgccgcaggagactctcaacgggggaatcaccgacatgctcacaggttarcaccgggccgggccccgctggctttcttctttccttccagcctcttcccctgccttccttctctcccacaccgacagtccagtgggtagggtaggttcct

SEQ ID NO: 138643 - DNA, 201 bp, Homo sapiens
ggtgtttgccagcttcccagtaaaaatgatgaaaaagaatatccacacagaagaattgatatcaggtattgttcagactttgttgctgacctgttaacttytccaaacttgtctcgttttctccctccctgtttgtatcttggagttcacattcatatctagagcctttttttactcccaagagccatatgttcttgccaa

SEQ ID NO: 138644 - DNA, 201 bp, Homo sapiens; identical to SEQ ID NO: 24663

SEQ ID NO: 138645 - DNA, 201 bp, Homo sapiens
ctgttattcacctattactccttaggttacttgtgaataattttgtgtgggtcacccaggcaaatgtaaatagctcttcatgtcttttagcagactggtaygtttccaataagatcatttaagtcctcaaagcattcctaaatcattgttagacttttttttttcttaaagattcggcaggatgatacgagttcatccatc

SEQ ID NO: 138646 - DNA, 201 bp, Homo sapiens
agagtatccatgagactttaaagaaaaataatagcaggggccgggcgcggtggctcacgcctgtgatcccagccctttgggaggccgaggcgggtggatcrcctgaggtcgggagctcaagaccatgctgaccaacatggagaaaccccgtctctgctaaaaacacaaaattggccgggcgtggtggcgcatgcctgtaat

SEQ ID NO: 138647 - DNA, 201 bp, Homo sapiens
aaaattggccgggcgtggtggcgcatgcctgtaatcctagctactcaggaggatgaggcgggaaaatcacttgaacccaggagacggaggtgcggtgagcrtagatcgtgccactgcacttcagcctgggccacaagagagaaactccgccaaaaaaaaaaaaagaaagaaaaataatcagcaggatgcctgattctcata

SEQ ID NO: 138648 - DNA, 201 bp, Homo sapiens
ctgggattacatgtatgagccactgtgcccgggcctcttctttcttaaggtgacatttagtgttctgtcacttatatacatcattcgagtccattttctcmacaccccacttttcccgggtgatatgactgaaaggaaagagactgtgcttttggagagtggatgtgctaaaattagtaagagtctcagtgcatagatttg

SEQ ID NO: 138649 - DNA, 201 bp, Homo sapiens
ggagcagttacaaaaggttcattttatcacagataccctgtcaaagggtgagacaaagttcatggtaagtacttgttagagttagcacatctaaaaaaaaacttggagactgttcagtagccattctgagtgtgtgacttcatggtagctttgaattacagtcaccaaatagagtatccatgagactttaaagaaaaataa

SEQ ID NO: 138650 - DNA, 201 bp, Homo sapiens
acaacagtgtgaatgtacttaatgccacagaatggtacacttaaaaatggttaaaatagtaggcacagtggctcatgtctataatcccagtgacttgggargctaaggtgggagaatggcttgagcccaggagttcgagggtatagtgagccatgatcgcactactgcactccagcctgggtgacagagcaagaccccatc

SEQ ID NO: 138651 - DNA, 201 bp, Homo sapiens
tcccaggttcaagcaattctcctgcctcaacctcctgagtagctgaggttacaggcaaacaccaccatgcccggctaatttttgtatttttttttttttttagtagaaaaggggtttcaccatgttggccaggctggtcttgacctcctgacctcaagtgatccgcccaccttggcctcccaaagtgctaggattacacgt

SEQ ID NO: 138652 - DNA, 201 bp, Homo sapiens
tgctttattatgctgtaaactggtatggtgagaagagagtcaggaaatctggataatggtctagagctagcaccagctagatttgtgaccttagcaaatcrcttcatctttctaggtttcagtgtccttccttatgaaataagagagaaatttggttaatcagtaagcttccttctgtccccatcctataagagcatcttc

SEQ ID NO: 138653 - DNA, 201 bp, Homo sapiens
agcattttccccccaaaaagcatttaaattaacatgtcaactttatttatcttctatacagatctcagaaaaaatgaagataaattgaaccatcatcagcraattgggctgaagtaagatggcagattttcttttgacacttgagatataaaagtaaattttttatagacattcttttatacaccagaaggactcttcaaa

SEQ ID NO: 138654 - DNA, 201 bp, Homo sapiens
cactctatgcatcctagtttttctcttctcttgaacaggccaagctcatgccagccttagggcccttgcactaattgtttccttttcccgaaacgtttttmtctttgatcccctagatagctggttctttagtcattcaaacctcagcttagataccatctcagagaccttctaccactcagtctaaagtaggacccagcc

SEQ ID NO: 138655 - DNA, 201 bp, Homo sapiens
attcttaaacctagtatgttgaaaatgaaaatgactgcttggggactcaaggccattataaaattttcattggaagaattacaaaaattttttttttttttagagatagtgtcttattctgctatctaggctagagtgcagtggtgctattatagctcactgtaaccttgaactcttggggtaaagtgactctcctgcctt

SEQ ID NO: 138656 - DNA, 201 bp, Homo sapiens
tcaatacacctgaatagttggacagaaaattgaaatcttttaactaattctaactatgaagcacagtgaaatagaaagttaggctgtaagaagtaaggctyttctgtgtgtcatcagcttggttccatttgcccaattgatacatttacatggacaatctcatatgtgtcttctgtcatcacaggtgcagagtccagtggt

SEQ ID NO: 138657 - DNA, 201 bp, Homo sapiens
ttttctttgattagtttcttgcttagaatcacacaaagaccaaatcctcataatgagaatccttatttgcagttttgtgtagttctctaattatcgtgaartgtaatagaaaggtagggatagtgtattgctcacagaagctgctaagttaaaagtgctcagaattctagagctgctaacattaaaaacaaaaatggcctt

SEQ ID NO: 138658 - DNA, 201 bp, Homo sapiens
cttccttctctcccacaccgacagtccagtgggtagggtaggttccttgcagcgggtcgtcttccgtggggatctccctccggcgcccctggctggttgtsagtcctgccggctacacctgggccatcgcttgggctgcttttggtctggcccttggaggaaacgggtggtcactgtctcttagaggctgccatatcccct

SEQ ID NO: 138659 - DNA, 201 bp, Homo sapiens
ccggcgcccctggctggttgtcagtcctgccggctacacctgggccatcgcttgggctgcttttggtctggcccttggaggaaacgggtggtcactgtctyttagaggctgccatatccccttccagaaaacagttctcgtttgtttactcgtggttcttgttcacccgagccttctgttgcctttcagaactcgcaaact

SEQ ID NO: 138660 - DNA, 201 bp, Homo sapiens
attttttgtattttttagtagagacagggttttacagtgttggccagtctggtctcaaactcttgacctcgtgatccacccacctctgcctcccaaagtgmtgggattacaggcgtgagccaccatgcctggcttcaattcttaaagatttgaattaattgagtccctagattagaaataatttttttggttacagagtcc

SEQ ID NO: 138661 - DNA, 201 bp, Homo sapiens
aaaggacaatcatgagtgaggatgacttgagtggccctagctgggatccccaggttccctttgtggcactgatgactcacgagatgaagctccagcacagsctcctgggagaggatagaggtagtcagtgtctttttttttgaaatggagtttcgctcttgttgcccaggctggagtgcaatggcacattctcggctcact

SEQ ID NO: 138662 - DNA, 201 bp, Homo sapiens
agataaattgaaccatcatcagcgaattgggctgaagtaagatggcagattttcttttgacacttgagatataaaagtaaattttttatagacattctttyatacaccagaaggactcttcaaacttagctaaaccacaaccattttcctattcagaagtgctaagatttgtggactcttacagagtatctgcctgtgttc

SEQ ID NO: 138663 - DNA, 201 bp, Homo sapiens
ctatacagatctcagaaaaaatgaagataaattgaaccatcatcagcgaattgggctgaagtaagatggcagattttcttttgacacttgagatataaaastaaattttttatagacattcttttatacaccagaaggactcttcaaacttagctaaaccacaaccattttcctattcagaagtgctaagatttgtggact

SEQ ID NO: 138664 - DNA, 201 bp, Homo sapiens
tgagtcaagatggcgccactgcactccagcctgggtgactccatctcaaaaaaaaaagtaacataggtatccataagcagatctggtgtctaataattcamatgtggcacatttttatgaggaagttatgaacaatttctaaaaactagctattttaaaaagggcccaatgatgatttctacttactcccaaagaaagaca

SEQ ID NO: 138665 - DNA, 201 bp, Homo sapiens
atctcttaaagtaggccttattcttaacaactttaacaaagtccatcctgtggaacagagacctgcaggcccagcagcactagggggtggaaaggcgggarcaatttttaaaaactgatgtaggggccaggcacagtggctcacgtctgtaatcccaccactttgggatgccaaggcgggtggatggcatgaacccaggag

SEQ ID NO: 138666 - DNA, 201 bp, Homo sapiens
cacagtggctcacgtctgtaatcccaccactttgggatgccaaggcgggtggatggcatgaacccaggagttcaagaccaacctgggcaacatagcaacaycccatctgcattaaaaaaaaataaattgatatagggacataagggaatgcagtttgaaactatgaattttaaaatagctatccaagggctgcgtgtggtg

SEQ ID NO: 138667 - DNA, 201 bp, Homo sapiens
gtccacgagtccacgaaccctccgagttctctctcctcacctgccgagggctcgcccctctagccccgccccgccccgcccaggacgcgtgacgtcacaamaagcgccgtgcgccccgccccccatcgggggcaaccattgttccgccggtcgcgccggagctgggttgctcctgctcccgtctccaagtcctggtacctc

SEQ ID NO: 138668 - DNA, 201 bp, Homo sapiens
aaacctagttaatcagaaaacattcagaagttatggttactactgttgctcttaacaataaattaaaccactatagtcagtaaaatttggtgtgattctgkttttttttgttgtcgttgttgtttttcgagacggggtcttgctctgttgcccaggctggattgcagtggcgcaatctcggctcactgcagcttccacctc

SEQ ID NO: 138669 - DNA, 201 bp, Homo sapiens
aagcgttagttccagctttgttaaaatggattaaatccttgcatgctcagtaaaatatcttattcatctaaaagggtttttttttttttttttttttttttgctgttgtttaatgtacctctaggacccctgaaaaactcaagtatcattgttttcagtgccacatactttgcttttagtgccatggtatctttggcccca

SEQ ID NO: 138670 - DNA, 201 bp, Homo sapiens
ccagaaggactcttcaaacttagctaaaccacaaccattttcctattcagaagtgctaagatttgtggactcttacagagtatctgcctgtgttcacacartgctttcacttttgctttctagtttacttgttttgaggatttcccttattcttttgactttagcagggaacttcctcttaaaatacctaggactgagtgt

SEQ ID NO: 138671 - DNA, 201 bp, Homo sapiens
tcatcgtttcttccacgttgctctcttctgtttattttgatgtctgtgtttcgtgttcagggttttctttgattagtttcttgcttagaatcacacaaagrccaaatcctcataatgagaatccttatttgcagttttgtgtagttctctaattatcgtgaagtgtaatagaaaggtagggatagtgtattgctcacagaa

SEQ ID NO: 138672 - DNA, 201 bp, Homo sapiens
tatttggatcacagcaggtctcagaaaggaggtgtttagtttgaagaagctcatcgggataagtgagagggccagcagtctagacaaataaaatgtgccaragcattgagacatgaagggtataacgttttctggaagtcagatgttcagtttgcttaacgggtatggtatgagtgggaaataagtctggaaaagcaggtg

SEQ ID NO: 138673 - DNA, 201 bp, Homo sapiens
tggctcatgctgtgaatatctcttgacttctgtaatggcactctttctggtctttcatctcttcttctgtcttaccttttaatgttggtataggttgagcmtccctaatctgaaaatttgaaatgctctaaaatctggatgattgccgacatgatgacacaagtggaaaattccacatccgatctcatgtagtaggtggca

SEQ ID NO: 138674 - DNA, 201 bp, Homo sapiens
cagtttgcttaacgggtatggtatgagtgggaaataagtctggaaaagcaggtgattccctaccactcctgcatgctcctccctaccccagtagacatttmtgttgattgtggccaaagtattcttttgaaaatagttatctgatcttgtcagtcaaataattaaataatattttctctttaccttgataaaacccaaata

SEQ ID NO: 138675 - DNA, 201 bp, Homo sapiens
ggtcaccaaaaactttattgccagtggtagttctggcaaggcctgcatccaaatagcaggtgaaagcacctggctgaccatcaatgctttctacattgtaktatcgccagtcacctccacttggccttcatagatcttgtccatgccaaacctattgagaagcctgtgggccagcagcaggccagtacaatatgttgcagc

SEQ ID NO: 138676 - DNA, 201 bp, Homo sapiens
gatagttgggtattttcagaataagttttgttttcgccttcctgaaaagtctgaagagctttgtactgattgaattctgcgaaaggcaaatttctcgaaarggatacctattattcttccatgagttgctgggaggacagtctaacatttgaaagagaaaacattgaatacaatagttttagaacgatttactgtctgtga

SEQ ID NO: 138677 - DNA, 201 bp, Homo sapiens
gtgcctatttcccccgcgccgtgtccacgtccacgagtccacgaaccctccgagttctctctcctcacctgccgagggctcgcccctctagccccgcccckccccgcccaggacgcgtgacgtcacaacaagcgccgtgcgccccgccccccatcgggggcaaccattgttccgccggtcgcgccggagctgggttgctcc

SEQ ID NO: 138678 - DNA, 201 bp, Homo sapiens
ctgacctcgtgatctgcccgcctcggcctcccaaagtgctgggattacaggcatgagccaccatacccggccatcttttagaatttctatgtttacactcwcccaagcatttttatggttttatttcaccccatgatagtaattatatcacttctgatctgttaagaatagaccttttaaaagtattggataacttagaga

SEQ ID NO: 138679 - DNA, 201 bp, Homo sapiens
tctttatgccctcttctggagcagacctgtccctccaaaaggactggcttacaaattttcgtccaaaaatgacgagcacagcaaagtccagggccacagtmaaaagttctcagacaactttctccctcttgtcctgtaacaaggttaatgtgggctttagtgataaataaggaaagtggcctgctgggggtttgctactgg

SEQ ID NO: 138680 - DNA, 201 bp, Homo sapiens
taaatgattcaaagttccttaaatttaaggaccatatcttattcatcttttgtgaaagatgtcaaattatcatggcttttttgtttgttggttttgagacrgagtctcaccctgttgctcaggctggagtgcagtggcacgatcttgggtcactgcagcctccgcctccagggttcaggtgattctcctgcctcagcctcc

SEQ ID NO: 138681 - DNA, 201 bp, Homo sapiens; identical to SEQ ID NO: 24666

SEQ ID NO: 138682 - DNA, 201 bp, Homo sapiens
cagcccagcgcccgccacctcctggagtgcgttttccgtgtcttcacccgcggtcgtattggagaccgtcaagcaggcaaggggtgggacgtgctggggayggggttccgaactgggcctgccctcggcccctcccaccagacgtgttcctctgcaggcggagagcagcccccagcgccgctcgctggtcctgaggctgta

SEQ ID NO: 138683 - DNA, 201 bp, Homo sapiens
aaaaaaacaaagttttacatttaatttgatactcatgatcattcgatggggtgagtactattatttattcccgtttcacagataaggaaactgaggcttakgcaggttgggtggcatgcccagggccccgtacagtgggagctggagttcagttgtgtggttctagagcttgtgctcggcctagtgacaggagctctggag

SEQ ID NO: 138684 - DNA, 201 bp, Homo sapiens
ggaccctggcagtgggcaccgagggcggcctgcggggcagcgcctggttcttgctacagatcagccccaacagtcggcttagccaggaggttgtgctggaygttggctgcccctatgtccgcttccacaccgaggtagtcggggggtagggggtggctgttttccccaagtgtgcttggtaaggaggggccagccccaggc

SEQ ID NO: 138685 - DNA, 201 bp, Homo sapiens
ccttggtgtgtctcttccttccctgactcccaccctccttcccactcccaggtacactggcatgaggcccacaagttcctgaaggtggagttccctgctcrcgtgcggagttcccaggccacctatgagatccagtttgggcacctgcagcgacctacccactacaatacctcttgggactgggctcgatttgaggtctga

SEQ ID NO: 138686 - DNA, 201 bp, Homo sapiens; identical to SEQ ID NO: 24664

SEQ ID NO: 138687 - DNA, 201 bp, Homo sapiens; identical to SEQ ID NO: 24665

SEQ ID NO: 138688 - DNA, 201 bp, Homo sapiens
accccctcaggcagatggacagtcaggcctgaaggacaggggcccttcctgagttctggctgtaactcccatgtttgagcagccctggcttctcctgcagsgattgggttggcctgagcgcctgcctgctccccgtccagcgctgacctgggctgcctcccacttccttcactgccaggatgggaacctgcccagtggaga

SEQ ID NO: 138689 - DNA, 201 bp, Homo sapiens
cctaaacttccccctgttggctctgccagcccccagcccagcgcccgccacctcctggagtgcgttttccgtgtcttcacccgcggtcgtattggagaccrtcaagcaggcaaggggtgggacgtgctggggacggggttccgaactgggcctgccctcggcccctcccaccagacgtgttcctctgcaggcggagagcag

SEQ ID NO: 138690 - DNA, 201 bp, Homo sapiens
ggatgctggcgttatccaagctgcctacagcctaaacttccccctgttggctctgccagcccccagcccagcgcccgccacctcctggagtgcgttttccrtgtcttcacccgcggtcgtattggagaccgtcaagcaggcaaggggtgggacgtgctggggacggggttccgaactgggcctgccctcggcccctcccac

SEQ ID NO: 138691 - DNA, 201 bp, Homo sapiens; identical to SEQ ID NO: 24669

SEQ ID NO: 138692 - DNA, 201 bp, Homo sapiens
caaccctcccacatgcactcttgtcacactgtgggatcctctgggtagtggatcctggaagcagacaggttgggctcagctggatgcctcctgggtgcccyttccccaagtccccggagtactgtgccagtcccttagcctgaggctgtctccccatctttgtagcctcactctctatgtggaagtagcctgcaatgggct

SEQ ID NO: 138693 - DNA, 201 bp, Homo sapiens
ccttcatggcccctcctgttctccagctgcgatctcttggagcgaccagaccctgctggccacttgacccttcgggacaaccgcctgaagctcaccttttytcccttccaagtgctgtccctgttgctcgtgcttcagcctccgccacactgagtccctggggctggggttttgtttgtagaaggctctggggactcctaa

SEQ ID NO: 138694 - DNA, 201 bp, Homo sapiens
cagcaccctctgctgggaacagctctctggtccctgggtcttcaggggatggttttcattcccacgtggccgcctctggacatcccttaggaagggcaccytagggatcacgaacctttgacgcctctgcctgtttccctcatcttgcttctcaccttgttgctcctttcttgtgactcaaagctgagtaccttgtgacac

SEQ ID NO: 138695 - DNA, 201 bp, Homo sapiens
gtgctatttgatgatgtccccttgtactgggatgcatgggacgtcatggactaccacctggagacacggtataggctgggcagcatgtggggatggtggargtggtgggaacacaggctgctctggatcagtatgtccacccctgtcccataggaagcctgtgctgggccaggcagggaccctggcagtgggcaccgaggg

SEQ ID NO: 138696 - DNA, 201 bp, Homo sapiens
gtccgcttccacaccgaggtagtcggggggtagggggtggctgttttccccaagtgtgcttggtaaggaggggccagccccaggccttggtgtgtctcttscttccctgactcccaccctccttcccactcccaggtacactggcatgaggcccacaagttcctgaaggtggagttccctgctcgcgtgcggagttcccag

SEQ ID NO: 138697 - DNA, 201 bp, Homo sapiens
acgtcatggactaccacctggagacacggtataggctgggcagcatgtggggatggtggaggtggtgggaacacaggctgctctggatcagtatgtccacycctgtcccataggaagcctgtgctgggccaggcagggaccctggcagtgggcaccgagggcggcctgcggggcagcgcctggttcttgctacagatcagc

SEQ ID NO: 138698 - DNA, 201 bp, Homo sapiens
ggctttgctggtgagtttccacgggccactcatccccgctgtgtggcagggctggctcattagtccctgggatctcaaggcctgggacttcaagggggagragagcctccagcgctgtgacaagttgcatggcctagtcctgggcaccccctcaggcagatggacagtcaggcctgaaggacaggggcccttcctgagttc

SEQ ID NO: 138699 - DNA, 201 bp, Homo sapiens
cctcatttattctttcaacaaaatctgatgcctcatggggcccatgctagatattgagggtaggattacagagacagattcagcaggcagagttggtgtcacaatggtggggagtctgaggcactggagagcacaggagaggtacttactccagctgggttgggggattccagagaggcttcctggacaagtttgcagtgt

SEQ ID NO: 138700 - DNA, 201 bp, Homo sapiens; identical to SEQ ID NO: 24682

SEQ ID NO: 138701 - DNA, 201 bp, Homo sapiens
gtgccattgcactccagcctgggcaacaagagcaaaactccatctcaaaaaaaaaaaaaacaaaaaaacagtgtttcctccaagctgcccatgagacaggyaggacaaggattcttttatatatttatacacacacacacacacacacacacacagcacgtttatatatatttttggtagagataggatcttgccatgttg

SEQ ID NO: 138702 - DNA, 201 bp, Homo sapiens
gcctggggctggcccctccttaccaagcacacttggggaaaacagccaccccctaccccccgactacctcggtgtggaagcggacataggggcagccaacrtccagcacaacctcctggctaagccgactgttggggctgatctgtagcaagaaccaggcgctgccccgcaggccgccctcggtgcccactgccagggtcc

SEQ ID NO: 138703 - DNA, 201 bp, Homo sapiens
tcagacctcaaatcgagcccagtcccaagaggtattgtagtgggtaggtcgctgcaggtgcccaaactggatctcataggtggcctgggaactccgcacgygagcagggaactccaccttcaggaacttgtgggcctcatgccagtgtacctgggagtgggaaggagggtgggagtcagggaaggaagagacacaccaagg

SEQ ID NO: 138704 - DNA, 201 bp, Homo sapiens
taggctagagtacagtggcgccatcacagctcattgcagccttaacctccagggctcaggtgattctctcacctcaacctcctgattaactggaaccacakgagtgcatcactaagcccctggctacttcttaaatttttggtagagatggggtcttccttgttgcccaggctggtctcctgggctgaagtgatcctcctg

SEQ ID NO: 138705 - DNA, 201 bp, Homo sapiens
ctgctctccgcctgcagaggaacacgtctggtgggaggggccgagggcaggcccagttcggaaccccgtccccagcacgtcccaccccttgcctgcttgayggtctccaatacgaccgcgggtgaagacacggaaaacgcactccaggaggtggcgggcgctgggctgggggctggcagagccaacagggggaagtttagg

SEQ ID NO: 138706 - DNA, 201 bp, Homo sapiens
gtgggaggggccgagggcaggcccagttcggaaccccgtccccagcacgtcccaccccttgcctgcttgacggtctccaatacgaccgcgggtgaagacayggaaaacgcactccaggaggtggcgggcgctgggctgggggctggcagagccaacagggggaagtttaggctgtaggcagcttggataacgccagcatcc

SEQ ID NO: 138707 - DNA, 201 bp, Homo sapiens
ttaggagtccccagagccttctacaaacaaaaccccagccccagggactcagtgtggcggaggctgaagcacgagcaacagggacagcacttggaagggaraaaaggtgagcttcaggcggttgtcccgaagggtcaagtggccagcagggtctggtcgctccaagagatcgcagctggagaacaggaggggccatgaagg

SEQ ID NO: 138708 - DNA, 201 bp, Homo sapiens
ggacaaggattcttaatcccactccaggatgggaaacccatggccgagtgggaagaaaccagctgaggtcacatcaccagaggagggagagtgtggcccctgactcagtccatcagcttgtgtagctgaggtctgggccaggtctaaccaggctccccactcctcccaacctgagcctgccctctgatctctgcctgttcc

SEQ ID NO: 138709 - DNA, 201 bp, Homo sapiens
aggacaaggattcttaatcccactccaggatgggaaacccatggccgagtgggaagaaaccagctgaggtcacatcaccagaggagggagagtgtggcccctgactcagtccatcagcttgtgtagctgaggtctgggccaggtctaaccaggctccccactcctcccaacctgagcctgccctctgatctctgcctgttc

SEQ ID NO: 138710 - DNA, 201 bp, Homo sapiens
gacagggtctccctatgttgcccaggctggtattgaactcctggcccctagggattctcccatctaagcttcccaaagtgtcgggattacaggtgtggccmctgcacagggccaggacaaggattcttaatcccactccaggatgggaaacccatggccgagtgggaagaaaccagctgaggtcacatcaccagaggaggg

SEQ ID NO: 138711 - DNA, 201 bp, Homo sapiens; identical to SEQ ID NO: 24683

SEQ ID NO: 138712 - DNA, 201 bp, Homo sapiens
aaaaaacaaaaaaacagtgtttcctccaagctgcccatgagacaggcaggacaaggattcttttatatatttatacacacacacacacacacacacacacmgcacgtttatatatatttttggtagagataggatcttgccatgttgcctggactagcctcaaactgggctcaagtgatcctcccacatctgcctctaagt

SEQ ID NO: 138713 - DNA, 201 bp, Homo sapiens
aaaaaaacaaaaaaacagtgtttcctccaagctgcccatgagacaggcaggacaaggattcttttatatatttatacacacacacacacacacacacacamagcacgtttatatatatttttggtagagataggatcttgccatgttgcctggactagcctcaaactgggctcaagtgatcctcccacatctgcctctaag

SEQ ID NO: 138714 - DNA, 201 bp, Homo sapiens
gaggtcctgtggccacactgttctcatgtcctgaggagtctgaggtgataaacacacaacctcatatacaacctcatgttgctttttttttttttttttttgagacagggtctcgctctgttgcctaggctagagtacagtggcgccatcacagctcattgcagccttaacctccagggctcaggtgattctctcacctca

SEQ ID NO: 138715 - DNA, 201 bp, Homo sapiens
tggggtggctcacctgaggtcaggagttcgagaccatcctggccaacatggtgaaaccccatctctactaaaaatgcaaaaaattagccaggtgtggtggygggcacctgtaatctcagctactcgggaggatgaggcaggaaaatcgcttaaacccaggaggtggaggttgcagttgagctgagatcgtgccattgcact

SEQ ID NO: 138716 - DNA, 201 bp, Homo sapiens
ttggatgcttccctaacttgtgatgacaaagaatgaaaacaagttggcgaggggctggatggagatggggaactgaaatgtttgagaactgaaagttctcrtatgtactggacacagttttgagaagacctggtaggtgtgttatagaaaccaaaagaggactcgtatccatatacagttgtctcaaagcaaataagcctg

SEQ ID NO: 138717 - DNA, 201 bp, Homo sapiens
cagcgtgctccagccaacagcaagcctcctatgaggccactgtcagtggggtgggacatcaagtcactaaacgttctcccctccctttcaggccaaggcckactagatggagcactgtgctccttttccagagaaaaaaagttagactacttgaagagagcatttaaagctggtgtcaggaatattgaaatggaatctaca

SEQ ID NO: 138718 - DNA, 201 bp, Homo sapiens
ccttgtaggatgggagatttctatgggctaggactggaaatggtacccattacttctgctcaaattctagtcactggaacccagacaaatgaccttgtctmactggaaaggaggctgagatgttaagtttagctgggtgcccagaaagaagagcaaactgtttaggtgaacagctaatcaatctctgccatactcactaga

SEQ ID NO: 138719 - DNA, 201 bp, Homo sapiens
aagaaggaaattctctcatttgcaacaacatggatgaatttggaggccattttgttaagtgaaataagccaggcacagatagacaaatactgtatgatttyacttatatgtggaatctagaaaaatcaaactcatggaagtagagagtagaatggtggttaccagagtataggggagcaggatggggaacggagagaaact

SEQ ID NO: 138720 - DNA, 201 bp, Homo sapiens
aacttctgtaagccttggcttctttgtaaactaaattattaatcttacccagctaagagggcagttatgggacaaatgagttaatgcatttgttatatgcrgttttcttgccattttcatgctcagtgctatgcttggcacatagtgtgggcaaatattagccataattactgttatactacattgcttctcaacaaataa

SEQ ID NO: 138721 - DNA, 201 bp, Homo sapiens
gattaagtgatatcataaatgcttggcatgtagcaataactaagtcaaacaaaaaagatacatggattggagaaatgtggagaaacgcatggagaaaacayttctaaactgatacatctgataagaggtaatacacagaacatacaaggaactcaaacaactcaatagcaagaaaacaaattaagaaatgggcaaaggatc

SEQ ID NO: 138722 - DNA, 201 bp, Homo sapiens
aaggttgcacaattaggatatatatggttgaacttgtactggaacccaggcaatctgaatccagagcccagtagtttatattccacagcctcccatgcaargaaattagatgaccgttacagtcagaactgaatagaaatggctgttttgtaatttactggttgttaatcttgcacaagtttctcaacttctgtaagcctt

SEQ ID NO: 138723 - DNA, 201 bp, Homo sapiens
tcgggaggctgagggaggagaatggcgtgaacccaggaggcagagcttgcagtgagctgagattgcaccactgcactccagcctgggtgacagagcaagamtccgtctcaaaaaaaaaaaacaaacaaaaaaaaaccactgtgcattatacagccaccattagctagtaaaaacatttgcggtttgtcacaaaatcttgat

SEQ ID NO: 138724 - DNA, 201 bp, Homo sapiens
ggaacacagtgagaaaaaaattaatactgatcaaggagagaagatgcttggaaaagccttcacggaagaggtaatatttgaattggaccataaaggaaaaytggaatttgataggtgaaaagtggaagaaagggggaaggatgtttgaaggacaaaggcctgaagcaggggttctcaactttggcttcaccaaagatcatt

SEQ ID NO: 138725 - DNA, 201 bp, Homo sapiens
aaagaggaatgcataataatataatttaaacagaggtaaaaaaaaaaataggaggcatttatttaaggaaatagataggaaggtttttttttgtttgtttkttttttgagacaaggtctctgtctgtaactcagattggaacacagtggtatgaccacagctcactgcagcctccacctcttgggctaaagccatcttccc

SEQ ID NO: 138726 - DNA, 201 bp, Homo sapiens
atgcagattttgattcagcaggtatggggtagaatctaagactttgcattcctaatgagctccccagatgttcctgatgctgctggttcactgaccacacrctgtataacaagggactagggataaattcttgcctcacaagagaagaaaggaaatgtccctttgctttgagattttgaagcttgttctgtagtagtaatg

SEQ ID NO: 138727 - DNA, 201 bp, Homo sapiens
aagatgacctgtactgcctctatttaaaaaagcatttgtggcagctttcaatgaaagaggaatgcataataatataatttaaacagaggtaaaaaaaaaaataggaggcatttatttaaggaaatagataggaaggtttttttttgtttgttttttttttgagacaaggtctctgtctgtaactcagattggaacacagtg

SEQ ID NO: 138728 - DNA, 201 bp, Homo sapiens
ttggcagagtgaaacagaaagtgtaatagaatttggaagaaaaagtttatggcagtgtttgtcaaactttaatgtgcatgtgaatcacacagagtttgttraaatgcagattttgattcagcaggtatggggtagaatctaagactttgcattcctaatgagctccccagatgttcctgatgctgctggttcactgaccac

SEQ ID NO: 138729 - DNA, 201 bp, Homo sapiens
atatttgtctacgcttaggttctgcttaaatcctcttctatgtctagttgtttgcagcactcacagtggcttttctttaaagaattcagtgttatttcctyggacagacactggtaacttagggaaatatttagtctttataatattaccttagtacagttcaatgagagggagcagaatcttgactttaattccatgttt

SEQ ID NO: 138730 - DNA, 201 bp, Homo sapiens
tttccaggtcgtgaaagtagtcttggcagagtgaaacagaaagtgtaatagaatttggaagaaaaagtttatggcagtgtttgtcaaactttaatgtgcaygtgaatcacacagagtttgttaaaatgcagattttgattcagcaggtatggggtagaatctaagactttgcattcctaatgagctccccagatgttcctg

SEQ ID NO: 138731 - DNA, 201 bp, Homo sapiens
ccatcaaacagcaactctactgattgagccattttgatgaataggaggcaaaagcgtgtgtgtgtgtgtgtgtgtgtgtgtgtgtgtgtgtgtgtgtgtgkttgtaaattgaggagcaggtaacctagctccaaatgttcagaactggccatttaatctgaagtagaattttttcaaggcagcgtgtaaagtctgatttat

SEQ ID NO: 138732 - DNA, 201 bp, Homo sapiens
ttaggaatccaaaggaatatttccaggtcgtgaaagtagtcttggcagagtgaaacagaaagtgtaatagaatttggaagaaaaagtttatggcagtgttygtcaaactttaatgtgcatgtgaatcacacagagtttgttaaaatgcagattttgattcagcaggtatggggtagaatctaagactttgcattcctaatg

SEQ ID NO: 138733 - DNA, 201 bp, Homo sapiens
gttccactttctgaacagttaaatttaattcaacaatagaatttgttaaaacttagggattcaagaaggatatttgagatagcttgcatcaggggattcgmagtctttctagagggatggaaacttaactatattgcaatgtgaaatgctatctaccagcattagcatgaaacaaatgctttgggaacacagtgagaaaaa

SEQ ID NO: 138734 - DNA, 201 bp, Homo sapiens
ttttgaagcttgttctgtagtagtaatgtgtactaacaccacggaatactttatttttgaaactaggtacgtatgacccagtaactaattaaaaatctatwactctagatgtttttgagaaggaaattaatagtattttgttccactttctgaacagttaaatttaattcaacaatagaatttgttaaaacttagggattc

SEQ ID NO: 138735 - DNA, 201 bp, Homo sapiens
tcatagattcagttaggaatccaaaggaatatttccaggtcgtgaaagtagtcttggcagagtgaaacagaaagtgtaatagaatttggaagaaaaagttkatggcagtgtttgtcaaactttaatgtgcatgtgaatcacacagagtttgttaaaatgcagattttgattcagcaggtatggggtagaatctaagacttt

SEQ ID NO: 138736 - DNA, 201 bp, Homo sapiens
gtataccacaccatccccaccttctgctcttgctgatgagggctgaagtcaacagaactggcagtgagatgcctccctctgatcttcacagatggacacakctgtcagcatgtcatgtaggtgccaattagggaggacttacattttcctcagcattggcaaagtcttaatgattatgtaaatgtatctgaggcctgttaa

SEQ ID NO: 138737 - DNA, 201 bp, Homo sapiens
actaacacatttaaatattaagatggcatataaataacatcatttttatgtatatattttcaacttccctctcaatcactttcttaggacattgtgaacaattcaaggagccacttacttggattgtttaaaaactatctggccaggcatggtggctcacatttataatcccagtactttgggaggccgaggcagtggatc

SEQ ID NO: 138738 - DNA, 201 bp, Homo sapiens
tgggggtgcttagctgcggggacaagtgggactgagatccaccctgtccagctagctgtgagacctggacagggtgaatctcagtccaccctgagccacartgactgagaggggccttttcctgatttatacaatggtgttatatgggatagtgggaactcttagtgccaatgtcccttcccatttcagagccttttgctg

SEQ ID NO: 138739 - DNA, 201 bp, Homo sapiens
agcaataactaagtcaaacaaaaaagatacatggattggagaaatgtggagaaacgcatggagaaaacatttctaaactgatacatctgataagaggtaayacacagaacatacaaggaactcaaacaactcaatagcaagaaaacaaattaagaaatgggcaaaggatctgaataggttctaaaagaagacatacaaaag

SEQ ID NO: 138740 - DNA, 201 bp, Homo sapiens
aaagctaatctttgctgcttttcctttttccaaagaccagccctgtttgacttctgctgtgcaatgggcatttgtgcccagccctgctatctttgcccacwgttcatgggaaaaccttgttgaaagttcattctgaatcagagaggtggggttaaagtggtggtccataggggtgcgtggattcctaaggattcatgagtg

SEQ ID NO: 138741 - DNA, 201 bp, Homo sapiens
ctatttcatttatctgcatcacatttaccactactgactatatttccagtctgtttatatgttaacttatatattatttcatgcatattagtgcataaagscatatattgattatttctctccattagtgccataagaacagggaccttgtttgtcattgctgtatccccagtacttagaataatgcctgccatatgggct

SEQ ID NO: 138742 - DNA, 201 bp, Homo sapiens
agctagcattaatactagaataagttacatactatgtgtcaaaagtaaactctaaacgatattcttctgtaatcatttattcccacattgcagggattgcmccagggactgttgtaataacggatatagctgtagactccttctttaagccccggtttgaacaggtcattttggacaacattgtcacccgaagtactgaac

SEQ ID NO: 138743 - DNA, 201 bp, Homo sapiens
gatgcaaattagctaattcatggaacataaaccatgacatctacacgtgttcttaagtaaattaactaaaaagtaaaataaaaacattagagttgaaactracccgtggttcttatcccagttactatggcaggcccttgtttatttttattaacagtttgtctgtgtcggtgggagccccaacagaatgaaagcatttgc

SEQ ID NO: 138744 - DNA, 201 bp, Homo sapiens
atactttatttttgaaactaggtacgtatgacccagtaactaattaaaaatctataactctagatgtttttgagaaggaaattaatagtattttgttccamtttctgaacagttaaatttaattcaacaatagaatttgttaaaacttagggattcaagaaggatatttgagatagcttgcatcaggggattcgcagtctt

SEQ ID NO: 138745 - DNA, 201 bp, Homo sapiens
gataaagtgatcatcttagaagtgcttctggatgagcccaatgaaacaagaaacttctatagacagtcccccaaattttctgacggagaaatcattagacrttgggacagggcatcaaggaaaactaatcctaatgaattaatagtattataattaatataagtgaaaataattaatggctctgctggttggagaatttct

SEQ ID NO: 138746 - DNA, 201 bp, Homo sapiens
agcctccattatgtcagcatttcagaaaacactccatttgcccatcccaaacagaggtagcctcctgcatgttcccttcttcagggaagcccaggagaaaragaaaaggaaaaattatgaagatgaaggtaatggcaaatggaaagacttctgctcagccagcactttcttttggttaccaatatttaatactcatcatgt

SEQ ID NO: 138747 - DNA, 201 bp, Homo sapiens
tttgctggttccctctgatttcctgagagttgtgtgaaatgtcttgcttagagcctccattatgtcagcatttcagaaaacactccatttgcccatcccaracagaggtagcctcctgcatgttcccttcttcagggaagcccaggagaaaaagaaaaggaaaaattatgaagatgaaggtaatggcaaatggaaagactt

SEQ ID NO: 138748 - DNA, 201 bp, Homo sapiens
gaccatgggctgcaaatgagaaataattaaaagggcctcccagtgcctgagggaggtttaattgtattgcaggatattgtggagtgatttcatatgcttcrtgatggaccttacatagaatttacttctgaaataccgtctatgtgattcatctcatgggtagatataaaattgctgaagctgtctacaaatttagctcca

SEQ ID NO: 138749 - DNA, 201 bp, Homo sapiens
aatgtattttcaatgacatttttactccttggttttgggggttagggtttggctcatctaagaaaatggggcaaaataaattataaaaaacatgcaaaagyttagccaaccttcagtagtaaacaaattcaaggttcagcctgggactcactatagagttcagcccttaattctaagaccatgggctgcaaatgagaaata

SEQ ID NO: 138750 - DNA, 201 bp, Homo sapiens
ctggatgcagctcataaagcaataaaaacagtggaaaatgtattttcaatgacatttttactccttggttttgggggttagggtttggctcatctaagaawatggggcaaaataaattataaaaaacatgcaaaagtttagccaaccttcagtagtaaacaaattcaaggttcagcctgggactcactatagagttcagcc

SEQ ID NO: 138751 - DNA, 201 bp, Homo sapiens
ttgatcagatggttgctccttggattttgtattaaatgattagataatgggcctctacagttaagcaaatttcttaaatgtagagattatatcactggatrcagctcataaagcaataaaaacagtggaaaatgtattttcaatgacatttttactccttggttttgggggttagggtttggctcatctaagaaaatgggg

SEQ ID NO: 138752 - DNA, 201 bp, Homo sapiens
gcttcagttatacctgcctccaataggtccatgagatctgacaggaatacatatgttgggtgagtaattttgattttgtaaatttgttttgatcagatggwtgctccttggattttgtattaaatgattagataatgggcctctacagttaagcaaatttcttaaatgtagagattatatcactggatgcagctcataaag

SEQ ID NO: 138753 - DNA, 201 bp, Homo sapiens
aggacatcttttatttgataggaaaatttaaaatgctaaaggaaaaattttcttagcaatttcacaggaaaacctaagttttaagagaggttatcattctractgggaactgaactattatgactaggtctataatttaataacaagtcacaatatctctctttcttgacatcaatttaaggtgacttttcacatagtaga

SEQ ID NO: 138754 - DNA, 201 bp, Homo sapiens
atttaataacaagtcacaatatctctctttcttgacatcaatttaaggtgacttttcacatagtagagagaatggcttcagttatacctgcctccaatagktccatgagatctgacaggaatacatatgttgggtgagtaattttgattttgtaaatttgttttgatcagatggttgctccttggattttgtattaaatga

SEQ ID NO: 138755 - DNA, 201 bp, Homo sapiens
tgagagctgggctgtggtataaaagtcatgtcagggaggacatcttttatttgataggaaaatttaaaatgctaaaggaaaaattttcttagcaatttcasaggaaaacctaagttttaagagaggttatcattctgactgggaactgaactattatgactaggtctataatttaataacaagtcacaatatctctctttc

SEQ ID NO: 138756 - DNA, 201 bp, Homo sapiens
gatctgacaggaatacatatgttgggtgagtaattttgattttgtaaatttgttttgatcagatggttgctccttggattttgtattaaatgattagatartgggcctctacagttaagcaaatttcttaaatgtagagattatatcactggatgcagctcataaagcaataaaaacagtggaaaatgtattttcaatgac

SEQ ID NO: 138757 - DNA, 201 bp, Homo sapiens
cattgtactaacttagatgaattactcactgagtttggaccattgcagaaacagatctttctagatctacttagcacaaggaggccttgggtccacgtggwttaccacttattatctttgcagttagtattacacatctcaccctaaatctcacctcctcaaaaaagtcttgcatgactacctacactcactcactcacaa

SEQ ID NO: 138758 - DNA, 201 bp, Homo sapiens
aatgactttcactctgggtgaaatgagaagccactggagagctctgaatagagaggtggctggatctgacctgtgtgttaacagaatcacagtggcggctsagctgggaagacccgaatggggtcaagggcagaagcagggagaagaacgagaaggcgaacgcagtagtctagtgagagttgatggacaaagtgatagcag

SEQ ID NO: 138759 - DNA, 201 bp, Homo sapiens
gtgagtggccaggacattattcttattatgcaaataaggaaactaaacctcagggttcaacagctaattggtgacatgttcagggcttgacagcaagttcrgtttccttcatcctggtggtggctagtagtttctattacaattgaatttattgagacaagatacaaacaaaatattcctaaaatagtccatcaatcataa

SEQ ID NO: 138760 - DNA, 201 bp, Homo sapiens
agaaaaagaggtccagctatatattaccttgggctgaaggcatgacttataattgtatataatatacattatctcataatatcttgtgagtggccaggacwttattcttattatgcaaataaggaaactaaacctcagggttcaacagctaattggtgacatgttcagggcttgacagcaagttcagtttccttcatcctg

SEQ ID NO: 138761 - DNA, 201 bp, Homo sapiens
gatacagctgaaattcagcgatgaatgaacactgggagcagcctggaaaggaaaatgtgatcacaaggggtggcgtgcagcctgagaagtgtgcggaaagsgggaaggtggacaatgtcgcaaaggcatatggagaggcgcaatgtccaaacactgtcctgatcctcaagtagcttagcatcatcgaaacctctttttttt

SEQ ID NO: 138762 - DNA, 201 bp, Homo sapiens
aggtctatttctgggtgtgcacagggtacggaaggagtaatgacatcaaggtttcctttccttgcttctgtccgcactggtagatacagctgaaattcagygatgaatgaacactgggagcagcctggaaaggaaaatgtgatcacaaggggtggcgtgcagcctgagaagtgtgcggaaagggggaaggtggacaatgtc

SEQ ID NO: 138763 - DNA, 201 bp, Homo sapiens
aatcagcttaaatagaggtggtggcacgcagctctaatgagaagagaaggaacaaggggaagcagactgccaggggtgaaagtagcgtgaaagagatagargaaagggagaaaaagagaggaaagagcaccaaaaaggggattgtgaaaataatggatggcaacagagtgctattagcccacttgcttgaatccaggtctt

SEQ ID NO: 138764 - DNA, 201 bp, Homo sapiens
tttgccaacatttacaatatctggagattttatattaacacccacatttctggctttttgaaataactagcatttaaaaatgtacaccagtatatgcatgrcagccttgacaagccctgacccacatctggggctacatttgctgaaggtgaggtgaagctgctcccctcagaccagacactcgcatcgacattacctgct

SEQ ID NO: 138765 - DNA, 201 bp, Homo sapiens
atatacagttgtctcaaagcaaataagcctgtttgcaacatcaaacctgtgttgggatcaaggacagatgtaagggaaagttctcaccaatagttaacaasctaaccaacctggtcaaagagctaggatgccacaccttcaaagggggcctatcttcttgaggaagtgctgctctgagagctgggctgtggtataaaagtc

SEQ ID NO: 138766 - DNA, 201 bp, Homo sapiens
aaaattaatatttgtgggttaaaaaggaaatgaaacagccttttttacttactaaagcatagaaacacaaggacataatgagcagcagaatgaatttataytgagggtggatttaatcctccaagaacacattgaacactaaaatgcaattagtgatgttcacagaatcttatctctgtttatgcctttaacttaaattag

SEQ ID NO: 138767 - DNA, 201 bp, Homo sapiens
ctgggaaataagttttgtttaattatcagttcttctgtgtgaactggaatgagcaaagttcagataaagggacattctgaggtccagactttggatgcttycctaacttgtgatgacaaagaatgaaaacaagttggcgaggggctggatggagatggggaactgaaatgtttgagaactgaaagttctcgtatgtactgg

SEQ ID NO: 138768 - DNA, 201 bp, Homo sapiens
catcagctcactgtcttgaatttcgtggtatttcacaaagaaaagggaggaaggattggtgttctagctagcactgccgtgatgggggtttgagccagggscatggccagtggggtagaaagaaagtggtgtgttcagcatggttggtggagtcctcaatggcagcgctattcaaagtgttgtccatagaccatcaacatc

SEQ ID NO: 138769 - DNA, 201 bp, Homo sapiens
tgaaatctaaaccccatcacattgtaaatgtgcatttgaaaagacaacaaatgtaaatgcctcttctgaatgttatttaattgcatttggaaaagaaaatrattttaaagttgaaaacagggagactcattagcagctagcattaatactagaataagttacatactatgtgtcaaaagtaaactctaaacgatattcttc

SEQ ID NO: 138770 - DNA, 201 bp, Homo sapiens
caatttgcttagggtgattcacagaaatggtcaaagagactgaatttttaaagaacttttgttttccaaaagactgtatctatttacagttgcactaatgragaatcgcgctgttttcatctgactttttcgtttctttagcaattacgagaacaaaaataaaagcgtcacatctactatctcactaacatctgcagattt

SEQ ID NO: 138771 - DNA, 201 bp, Homo sapiens
ccataatttatattaacaactctacttaagaaaattaatatttgtgggttaaaaaggaaatgaaacagccttttttacttactaaagcatagaaacacaasgacataatgagcagcagaatgaatttatattgagggtggatttaatcctccaagaacacattgaacactaaaatgcaattagtgatgttcacagaatctt

SEQ ID NO: 138772 - DNA, 201 bp, Homo sapiens
caacttcccaaccctcgttggacatacaatgtgtacctatgatttttatgaaggtgagaacaatttataaactgtgaaggaaacagaaaaatgccagcaastctttgttattcaaacccataatttatattaacaactctacttaagaaaattaatatttgtgggttaaaaaggaaatgaaacagccttttttacttacta

SEQ ID NO: 138773 - DNA, 201 bp, Homo sapiens
gttctatcagagaaaaagataaacaaatgggtaattataaaaagtgttaggacagagagagtctagggcatttatgaagatatatcttcttattcaggctytaaatagaaaccagactgggtcaaaagctgggtcaaaaatgggcctggggaaatttagtgtaacctatctgtgttgccttttaattttttcatttgtttg

SEQ ID NO: 138774 - DNA, 201 bp, Homo sapiens
attaagtctactttgatcaatatcaaaatttatgccaccctgaaggataagtctatactctatagaaaggattgtcaagctttttctgtaaaggacaagayagtacatattttaggatttgctgactgtgtgatttctattgcaacttctcaactctgcctctagagcttgaaagcagctatagacaatatgtaaataaat

SEQ ID NO: 138775 - DNA, 201 bp, Homo sapiens
atgatcatccagctcttgattagggtattttatttcatggcaacacgatacatatagcacacaatgaaggcccatggatggtggcaaattaacccactgtrctggtgtggacaccttcattttgaagttttatcctcattaagaactcttagcttaccaaaaagatgtatttgcttattttcttttaagcagtattgcgtt

SEQ ID NO: 138776 - DNA, 201 bp, Homo sapiens
catagagagaagtagagtgctagcaataagtgtcagatcaggcatccttctagattgtagtttatccaacaataccccaaataatcagtagtagggaactrctcatttgggcatgaatttcagataacatagctattaaagttgctcataattcttgggttgtgggttacaaggatctgccttcatagccaacattcatgc

SEQ ID NO: 138777 - DNA, 201 bp, Homo sapiens
aagtaggacctttgtggatgttcatccatagagagaagtagagtgctagcaataagtgtcagatcaggcatccttctagattgtagtttatccaacaataycccaaataatcagtagtagggaactgctcatttgggcatgaatttcagataacatagctattaaagttgctcataattcttgggttgtgggttacaagga

SEQ ID NO: 138778 - DNA, 201 bp, Homo sapiens
tcatttagtatggttgaaaaagactgatgatttggcaaccaaaattatatttcctcaaaatcaagtcaatcgtgcaaaaagctctttttcaaaggctcatsatgaagagcccagtgggaagatgggaaatggcaccgccctgacacacctgtataccacaccatccccaccttctgctcttgctgatgagggctgaagtca

SEQ ID NO: 138779 - DNA, 201 bp, Homo sapiens
acatgctaaagaataaagttagatccctatctcacaccatattcaaaaattaactcaaaatggatgaaagacctaaatgtaaggcttaattctataaaatsttagaagaaaacatagacataaatctttgtgaccttggattaggaaatgatttcttatgtaagataccaaaacacaagcaataaaataaaaataaataaa

SEQ ID NO: 138780 - DNA, 201 bp, Homo sapiens
agctctaagtaaatgggaagacatcctatgcttatggattgcaagatttaatattgttaagataactatactaccaaaaatattctacagattcaatgcartccccattaaaattccagttgcctattttgcagaacttgacaagcttctaataaaatccacgtcaaaatgcctggaatgcaggatagccaaaatagtttt

SEQ ID NO: 138781 - DNA, 201 bp, Homo sapiens
atcacattgtacctcataattatatataattactatttgtcatttaaaaataaagatagcatgtactattataattacagtatactacttcttcccaaatstagatcttacaaagaagtctggagtagcagagaggtcaaagaaataaacactaccctcatgcccaactctctccatgccttccaagtttgttaatacaga

SEQ ID NO: 138782 - DNA, 201 bp, Homo sapiens
tcatgtgaggcatgtaagctgaggatgtggacttgcaagaagcctttgagatctaacctgctccttgctcagaggatgaaatgaggtctagagagtgtaaytgacctgcctgaggaaacagactaaaacagagatgaattagaatagacatctcctgtctcctgatcaccactctctccactattccataaggtgcaaaaa

SEQ ID NO: 138783 - DNA, 201 bp, Homo sapiens
tgtgtgcagggactcttctaagttatgttcctcaagtagattatataaataacctattaaatgattttggaatcaaaaaaggataaaaagaggccgggcgyggtggcttacgcctgtaatcccagcactttgggaggccgaggcacgtggttcacctgaagtcaggagtttgagaccagcctggccaacatgatgaaaccc

SEQ ID NO: 138784 - DNA, 201 bp, Homo sapiens
ctaccaaaaatacaaaaattagccacgcatggtggcacacacctgtggtcccagctactcgggaggctgaggtgggaggatcgctggagcctgggaagttraggctgcagtgagccgtgatcatgccactgcattccagcctgtgtgatggagagagaccctgtctcaaaaaaaataaagatgtttgttgggtgaatgcac

SEQ ID NO: 138785 - DNA, 201 bp, Homo sapiens
tcggaactgagtactaaacagcctccacagttctccctggtgccgtctccggcttggcgccgcatcctcctctgggctcgcgatggccgcgtcccctcccrctgcggacgggtcctttggtacatgcagtccgaggtgagtcccctcctttccacttcacccttccgagcgcctgcgtgcgcatgcgcggagcgcggcgcg

SEQ ID NO: 138786 - DNA, 201 bp, Homo sapiens
gatacaccatccgctgaccccgtctgctcctctaggctggccccttgtccacccctctccacaccccttccagcccagggttcccatttggcttctggcaktggcccaactagccaagtctggtgttccctcatcatccccctacctgaacccctcttgccactgccttctaccttgtttgaaacctgaatcctaataaag

SEQ ID NO: 138787 - DNA, 201 bp, Homo sapiens
gtgtgagattgaggagggtaggagatgagaagaaaacagaatttcattgcttagggtgagataggaaccacaagaggatttcgaacaaaagagggttgtgrtctgactaaacacgtctgcatgggggtaggggggatggagacagatgggggctggaccctctgggatggtctccatcttacactcccctctttgtcttgc

SEQ ID NO: 138788 - DNA, 201 bp, Homo sapiens
ctctgccaagtgaggatatgttgctgtagaacagggtttcttagcttcagcactactgacatttggggctggttatttatttgtcatgggagaggggatgycctgtgcactgtaggatgtttctcagcattcctgacttctgcccactagatgccaatagcactctccctccatcatgacatctcaaaatgtctccagaca

SEQ ID NO: 138789 - DNA, 201 bp, Homo sapiens
ggctgtggggactgaggggtgttcatcgcttagagcaggtagcaggaggcctaacaccagccccaccgggactgcagagttaccgtgctctgtccttggtyttggctgagtgctccagacaattgaaagcaccagtctggccactgctacatctttgccttcttctattgtactggctcctggtgcctgaggagtccattc

SEQ ID NO: 138790 - DNA, 201 bp, Homo sapiens
catcctggtgtttgagatgaactacagacaatcctgtggggtccaataagagctggtgggcatgggggagaggtactgtgtttgagctattcctgggagartgtgtccctggtatctgagctgagtggggaaaaagtctctggtgtttgaacagggcagatcagcggatctacttgtgtgtgagctgatttggatgggaag

SEQ ID NO: 138791 - DNA, 201 bp, Homo sapiens
cgggtttgagagcggggactttgtctccttttcagaagtacagggcatggttgaactcaacggaaatcagcccatggagatcaaagtcctgggtgagctgsgaccatgggggaagcagaggggaactagaagatatgttcctgggttctggccggggagttgaagggagaagacatggcccttggttcagagttgggaaga

SEQ ID NO: 138792 - DNA, 201 bp, Homo sapiens
tttgagatgaactacagacaatcctgtggggtccaataagagctggtgggcatgggggagaggtactgtgtttgagctattcctgggagaatgtgtccctrgtatctgagctgagtggggaaaaagtctctggtgtttgaacagggcagatcagcggatctacttgtgtgtgagctgatttggatgggaagcagagaaggt

SEQ ID NO: 138793 - DNA, 201 bp, Homo sapiens
ccgcctcgctgagctcaacagctatgtgcctgtcactgcctacactggacccctcgttgaggacttccttagtggtttccaggtatcttgggggtactacscagccttctgcccagttttctcagagcccatctctggtttattcagtagtgttcaatattgatttaatgggtcggcctgaatgtcaggttttgtgctggg

SEQ ID NO: 138794 - DNA, 201 bp, Homo sapiens
cttggttcagagttgggaagacacatcctggtgtttgagatgaactacagacaatcctgtggggtccaataagagctggtgggcatgggggagaggtactrtgtttgagctattcctgggagaatgtgtccctggtatctgagctgagtggggaaaaagtctctggtgtttgaacagggcagatcagcggatctacttgtg

SEQ ID NO: 138795 - DNA, 201 bp, Homo sapiens
tatggtttctatggttaccaaggtaaggagaccagccctagggttcctggcaggcaggtgggctgcagtagtccttcctgtctgctcttggtaccctgggsctgtttctgagactcactcttcctttaaccaggacaaccccggtgtggttacctgcctggatgaggcccgacacgggtttgagagcggggactttgtctc

SEQ ID NO: 138796 - DNA, 201 bp, Homo sapiens
atttgaaaccaggtctgtcctgaatccacatccttcccctgacctcgacacaagtacattcttgtcattcctttcactccaggattggagtctctccctcrttatgctgggctgggaagaagcaaatggcttagtggtcagcagtgtggatttgcaaatcagaccacctgggttcagatcttaggtctgacagctgtgtta

SEQ ID NO: 138797 - DNA, 201 bp, Homo sapiens
gcccagtccgtgttgtccgaagtgccctcggtgccaaccaacgtgagtgtcctctccgtggagactggcagacgaggtggtgggtgggaaagtcttttgtrtcactgtctgtctatccatgctccactcctgtgtgtctccctaaacttgttcttttcctctattcctagggaatggccaagaacggcagtgaagcagaca

SEQ ID NO: 138798 - DNA, 201 bp, Homo sapiens
ggtacctcttcctagcacccttccccctttcccccttcccgaggcaccactgttcccggtgccacagccatttcatctttttccctactgcacacccttamagttctacctgcgggaggaggacatcggtaaaaaccgggccgaggtatcacagccccgcctcgctgagctcaacagctatgtgcctgtcactgcctacac

SEQ ID NO: 138799 - DNA, 201 bp, Homo sapiens
gtgaggtggtcacgggcaaagttgtgtgtgtttcggtgtgtatataccaagaggggtgtccgtctttctgtcctctcctgatgtttctttcctagctctcrctttgtgctccccacaggcatgtacatggaccgccgctgtgtctactaccggaagccactgctggagtcaggcacactgggcaccaaaggcaatgtgcag

SEQ ID NO: 138800 - DNA, 201 bp, Homo sapiens
gcaaccggtggcgcattctctttgccattctccttatcttgaagggaagcccagtgcatccctcgtttccccttctggtgcctccttcctcacatgactgygtgtcatttcttagagtcctgcaacctgaagatgtggtgttagcccctctccccgtctctcaggggagtgaggggtgatgggtagcttcacactaacctg

SEQ ID NO: 138801 - DNA, 201 bp, Homo sapiens
catgcccatcatgcagtggctatactttgatgcccttgagtgtctccctgaggacaaagaggtcctcacagaggacaagtgcctccaggtatgtgggtggsacctgtggggagggcatcattggggacatttctggggaggcctctctaaccctcctccctttgcattccttagcgccagaaccgttatgacgggcaagtg

SEQ ID NO: 138802 - DNA, 201 bp, Homo sapiens
acgacgagagcggcgaggatgtcgaggttccctatgtccgatacaccatccgctgaccccgtctgctcctctaggctggccccttgtccacccctctccamaccccttccagcccagggttcccatttggcttctggcagtggcccaactagccaagtctggtgttccctcatcatccccctacctgaacccctcttgcca

SEQ ID NO: 138803 - DNA, 201 bp, Homo sapiens
ccctgaagaacttccctaatgccatcgagcacaccctgcaggtgataagctgtgggagaagggaaagaggccaggcatctggccaggctgctgcctctccrcccccaggcccttgccttgccttcagatgttgcatgcctaagtgtaagatgtgccttttctccaaacctccctccctcacttcccaccaggcagcctagg

SEQ ID NO: 138804 - DNA, 201 bp, Homo sapiens
gtgctgtaacgacgagagcggcgaggatgtcgaggttccctatgtccgatacaccatccgctgaccccgtctgctcctctaggctggccccttgtccaccmctctccacaccccttccagcccagggttcccatttggcttctggcagtggcccaactagccaagtctggtgttccctcatcatccccctacctgaacccc

SEQ ID NO: 138805 - DNA, 201 bp, Homo sapiens
ggtcacgggcaaagttgtgtgtgtttcggtgtgtatataccaagaggggtgtccgtctttctgtcctctcctgatgtttctttcctagctctcgctttgtsctccccacaggcatgtacatggaccgccgctgtgtctactaccggaagccactgctggagtcaggcacactgggcaccaaaggcaatgtgcaggtggtga

SEQ ID NO: 138806 - DNA, 201 bp, Homo sapiens
caagtgcctccaggtatgtgggtgggacctgtggggagggcatcattggggacatttctggggaggcctctctaaccctcctccctttgcattccttagcrccagaaccgttatgacgggcaagtggctgtgtttggctcagacctgcaagagaagctgggcaagcagaagtatttcctggtaagtggtccccttggatgt

SEQ ID NO: 138807 - DNA, 201 bp, Homo sapiens
atgccctggacaacgtggatgcccgtgagtttggaggcgggtgaggtggtcacgggcaaagttgtgtgtgtttcggtgtgtatataccaagaggggtgtcygtctttctgtcctctcctgatgtttctttcctagctctcgctttgtgctccccacaggcatgtacatggaccgccgctgtgtctactaccggaagccact

SEQ ID NO: 138808 - DNA, 201 bp, Homo sapiens
tttaaatatatatgtatttgctcatttcttcctagcaaccccatgaaggtaggtatcactgttgtaacacctgttttagagacaaggcacagaggtaaagrtgttatcctgtgtgcctgaagtcacaaaactaggtaatacgtggcatagctggaatctgaacctgaatttctaacatctgtacactccaaaccacctcgc

SEQ ID NO: 138809 - DNA, 201 bp, Homo sapiens
ggcatagctggaatctgaacctgaatttctaacatctgtacactccaaaccacctcgctaatgactgcgaactgtcctaggaattctcagaggccagaagytctgtcttgtttgctattttattttttgagacaggtctcattctgccattcaggctgaagtgtattggcacaatcatagctcactgcaaccttccaactc

SEQ ID NO: 138810 - DNA, 201 bp, Homo sapiens
ctggggactgggttctcagcaagttaccgctcctgccatcatgccaccctgatggatgtccaagcctcacttccctcctgcactccccgctcccgccgccrtccctgggattaagggagaggagaatggctgcttgttactgcctacctactctgtgccaggttctatgctctgtgttatttatcatctcgataaccccgt

SEQ ID NO: 138811 - DNA, 201 bp, Homo sapiens
gtgacagtgaggaggagcaggagcgtgggggccctgagcgggaggagaagctcaccgactggcagaagctggcctgtctgctctgccgacgccagttcccyagcaaagaggcgctcatccggcaccagcagctctcagggctccacaaggtaacagcggatggttggcagggcatgctggggcctggcccactgaggctca

SEQ ID NO: 138812 - DNA, 201 bp, Homo sapiens
ggttctatgctctgtgttatttatcatctcgataaccccgtggggaaggtaagtggtattatcacccctgtttcacaggtgagaaaactgaggcctgtggsggttaattattactgttagtgcgtggcaggctcaagatttgaaaccaggtctgtcctgaatccacatccttcccctgacctcgacacaagtacattcttg

SEQ ID NO: 138813 - DNA, 201 bp, Homo sapiens
ggatctggcacccataaacgccttcattgggggcctggctgcccaggaagtcatgaaggtcagcacgggtggggagaggcaggattggggtgggccaggtkcctccatgactctgtcacttgctctctgtctgtgtcaggcccctgttaaccactgaccaccccctctctcccttcccctctccaggcctgctccgggaag

SEQ ID NO: 138814 - DNA, 201 bp, Homo sapiens; identical to SEQ ID NO: 24712

SEQ ID NO: 138815 - DNA, 201 bp, Homo sapiens; identical to SEQ ID NO: 24713

SEQ ID NO: 138816 - DNA, 201 bp, Homo sapiens; identical to SEQ ID NO: 24714

SEQ ID NO: 138817 - DNA, 201 bp, Homo sapiens; identical to SEQ ID NO: 24715

SEQ ID NO: 138818 - DNA, 201 bp, Homo sapiens
agggtgttgccaaaggagattaacatttgactccgtgggctgggaaaggcagacccatccttaatctgggtgggcactgtctaattagctgccagaatgamcagaataaaagcaggtagaagaatgtggagagatgagactggcttagcctcccagcctgtatctttgtcccatgctggatgctttctgccctggtacatc

SEQ ID NO: 138819 - DNA, 201 bp, Homo sapiens
agtgccatagcacaatcatggctcactgcagccttggcctcccaggctcaagcagtcctcccacctcagcctcctgggtagctgtgactataggaacacamtgctacatccagctaattttttgtattttgtagagacagggttttgccatgttgcccaggctggtcttgaactcctgagctcaagtgatccacctgcctc

SEQ ID NO: 138820 - DNA, 201 bp, Homo sapiens
cctcccgagtagctgggattacaggtgtgtaccaccacgcccagctaatttttgtatttttagtggaaacggggtttcaccatgttggccaggctggtctygaactcctgacctcaaatgatccacccactttggccttctgaagtgctgggattacaggcatgaaccaccatgcccagcctactcttaattaatttatat

SEQ ID NO: 138821 - DNA, 201 bp, Homo sapiens
ggtcttgaactcctgacctcaaatgatccacccactttggccttctgaagtgctgggattacaggcatgaaccaccatgcccagcctactcttaattaatktatatttaaatttaaaaatctacatgtagctaatggctactgtattagacagacagttttctaccattaaaaagaatgtggatagggtgactatgaactt

SEQ ID NO: 138822 - DNA, 201 bp, Homo sapiens
ggaggctgaggcaggagaatggcatgaacccagaaggcggagcttgcagtgagccgagatggcgccactgcactccagcctgggcgacagagcaagactcygtctcaaaaaaaaaaaaaaaaaaaaaaaaaattagccgggtgtggtggcatgtgtctgtaatcccagctactctggaggctgaggcaggagaatcgcttg

SEQ ID NO: 138823 - DNA, 201 bp, Homo sapiens
cggaggctgaggcaggagaatggcatgaacccgggaggcggagcttgcagtgagcagagatcacgccactgcactccagcctgggtgacagagtgagactmtgtctcaaaaaaaaacaaaaaacaaagagataggatcagcaatcaaaaagcttccaacaaagaaaagtccaggactagacaagcttctggaaaattctac

SEQ ID NO: 138824 - DNA, 201 bp, Homo sapiens
tggccaccctgagtcacaagacaaggttatattatgttctgaatcatctgtttaagaaggcaaagcaggccaggtgcagtggcttacgcctgtaatcccarcactttgggaggctgaggtgggtgggttacttgaggtcaggagttcgagatcagcctggtcaacatggtgaaaccccatctctaataaaaacacaaaaat

SEQ ID NO: 138825 - DNA, 201 bp, Homo sapiens
ttgaggtcaggagttcgagatcagcctggtcaacatggtgaaaccccatctctaataaaaacacaaaaattagctgggcatggtagtgggcatctgtaatyccagctactcagaaggttgaggaacaagaatcactggaacccgggaggtagagactgcagtgagccgagattgccactgtactctagcctgagcaacaga

SEQ ID NO: 138826 - DNA, 201 bp, Homo sapiens
tggagaacgggttaagttctaggtttctgttccaatctgtgaagctgatgcagtccctggagcagggtacaggggtcaacacactgccttctgttttttgyaccagggcaggtagagggaggccacaattttggaagacggtgattgcccagctgccagctttttcagcagatggtataaccaccatgagataattagcgt

SEQ ID NO: 138827 - DNA, 201 bp, Homo sapiens
aggctttgctttggttaatatatcgagcccccagttttttgtttatgggtgcatccatatccctatgtgtgtgggtgtgtgtgtgtgtgtgtgtgtgtgtstgtgtttgagaagaaaagttggcagagattagccctgaaataactgtattacagtagccaaacactctgataggatattgagttagctgtggatttgtct

SEQ ID NO: 138828 - DNA, 201 bp, Homo sapiens
ccccatctctaataaaaacacaaaaattagctgggcatggtagtgggcatctgtaattccagctactcagaaggttgaggaacaagaatcactggaacccrggaggtagagactgcagtgagccgagattgccactgtactctagcctgagcaacagaatgagactctgtctcaaaaaaaaagaagacaaagtagtgaata

SEQ ID NO: 138829 - DNA, 201 bp, Homo sapiens
gcatggtttctgtggaatattatgcagcagttaaatatgtaagatatcagctgggcgtggtggctcacgtctgcaatcccagcactttgggaggcccaggygggcagatcacctgaggtcaggagtttgagaccagcctggccaacatggcaaaaccccgtctctactaaaaatacaaaaatcagccaggcgtggtggcag

SEQ ID NO: 138830 - DNA, 201 bp, Homo sapiens; identical to SEQ ID NO: 24722

SEQ ID NO: 138831 - DNA, 201 bp, Homo sapiens
tccctgaggtcctgcatttgggtccagtccctgggatcattattatcccatttaggatcgacatttggaaatttttgtttggttggcaagactccttgccygggagggtgttgcctctcccagatggtcatggctgctctcctaatcattcccctttcttctcctgtgaacagaatattcatgatagacatcatttcagcc

SEQ ID NO: 138832 - DNA, 201 bp, Homo sapiens
tgccagcttggaatgattttccagtgtaacacctaagttccttgcttctattctgaagtttaagaatacttttagagagggggtgtgaataaagatcacgycgcctttcttttttattgtttctttttttgagatagagtcttgctttgccacccaggctggagtgcaaaggcatgatctcagctcactgcaacctcaaac

SEQ ID NO: 138833 - DNA, 201 bp, Homo sapiens
tttttggggggcaaagagaagctcagaaggctttgctttggttaatatatcgagcccccagttttttgtttatgggtgcatccatatccctatgtgtgtgkgtgtgtgtgtgtgtgtgtgtgtgtgtgtgtgtttgagaagaaaagttggcagagattagccctgaaataactgtattacagtagccaaacactctgatag

SEQ ID NO: 138834 - DNA, 201 bp, Homo sapiens
acaatccagtagttcctcaaaatgttaaacacggagttaccatatgacccagcaatcccactcctagatacacacccaaaagacatgaaaatatatgtccmcacaaaaactggaacatgaatactcatagccatgttatttataatagccaaaaagtagaaactggctgggtgcagtggctcatgcctgtaatcccaaaac

SEQ ID NO: 138835 - DNA, 201 bp, Homo sapiens; identical to SEQ ID NO: 24723

SEQ ID NO: 138836 - DNA, 201 bp, Homo sapiens; identical to SEQ ID NO: 24725

SEQ ID NO: 138837 - DNA, 201 bp, Homo sapiens
tggtgcgatctcagctcactgcaagctccgcctcccgggttcacgccattctcctgcctcagcctcccaagtagctgggactacaggcgcccaccaccacrcctggctaattttttgtatttttagtagagatggggtttcattgtgttagccaggatggtctcgatctcctgacatcgtgatccacccacctcggcctcc

SEQ ID NO: 138838 - DNA, 201 bp, Homo sapiens; identical to SEQ ID NO: 24726

SEQ ID NO: 138839 - DNA, 201 bp, Homo sapiens
atttttagtagagatggggtttcattgtgttagccaggatggtctcgatctcctgacatcgtgatccacccacctcggcctcccaaagtgctgggaccacrggcgtaagccaccgcgcctggcctagaatggggttttatcattcacatagagaattaaagcttggcacacccagttctcatctgagccaaacttaaatca

SEQ ID NO: 138840 - DNA, 201 bp, Homo sapiens
ttacctcaattatttctacccttttagggtcattacttggttaactatttccaccaataacagcataaccattatgtctcttgccatttgtcacttgggamaactcatccacaaacagccttatcccatcatgtagtggagcttccttaaggtctggtctaactttgatttggtattctatgatatctaagcagttatggt

SEQ ID NO: 138841 - DNA, 201 bp, Homo sapiens
ggatcattttttcttcttttttccattcaggacattctctcttaaaatgccctggttttccgcacttgtaacatcaactcatagtcttaggagcttttccyttctttctctgtgtcgaaatctattatcccattgtttccttcaagagggatcttgatctaaccttcttctgactaccttttccacagtggaaaccatgat

SEQ ID NO: 138842 - DNA, 201 bp, Homo sapiens
ttttttcttcttttttccattcaggacattctctcttaaaatgccctggttttccgcacttgtaacatcaactcatagtcttaggagcttttcccttcttyctctgtgtcgaaatctattatcccattgtttccttcaagagggatcttgatctaaccttcttctgactaccttttccacagtggaaaccatgattcttgc

SEQ ID NO: 138843 - DNA, 201 bp, Homo sapiens
ttttttccattcaggacattctctcttaaaatgccctggttttccgcacttgtaacatcaactcatagtcttaggagcttttcccttctttctctgtgtcraaatctattatcccattgtttccttcaagagggatcttgatctaaccttcttctgactaccttttccacagtggaaaccatgattcttgctttttgtttc

SEQ ID NO: 138844 - DNA, 201 bp, Homo sapiens
tagatgcctgctgtgtggacaggataaggaagttcttaatatccctcttacactgttctttttcttaaatttggatgaggacttaaaggagcaattggttyggttcccccatggtctccaggtctttcttcctctaaccctcctgttgcccccttgatcttcctgtcccctattttgtgagctgtatggaggggcaagcat

SEQ ID NO: 138845 - DNA, 201 bp, Homo sapiens
tgataaaaacagtatcatccagtatatatctgtctacaacttgctttaaaaaaaaaaaaaaaaaaaacctcattgcttcctaatgtatatggattttattwattaattaattaatttggaaacggggcctcactctgtcactcaggctggagcacactggcacaatctcagctcactgcaacctccctttcccaggctcaa

SEQ ID NO: 138846 - DNA, 201 bp, Homo sapiens
gagagagagattagctaggcgtggtagttcatgcctctaatcccagcactttgggaggccaaggcgggcagatcacctgaggtcaggagttcaagaccagyctggccaacatggtgaaaccctgtctatactaaaaatacaaaaattagccaggtgcggtggcgggcacctgtaatccctgctactcgggaagctgaggtg

SEQ ID NO: 138847 - DNA, 201 bp, Homo sapiens
atatttatgaaataggcaaagtttgtactcagcatgcccccactcctcctttggctctttcctccccttctggcccacctctctgagtcccagcatctccygctgacacctggctgggcagggtcattccctgtcccacctcttaatgtaagctggagttcctatttcttagcattgagcaccatttcagacctctcacac

SEQ ID NO: 138848 - DNA, 201 bp, Homo sapiens
tatttgcaaactatatatccaataagggattaatacccaaaatatataaggaacctgtatagctcaatgccaaaaacacaaataagccaattaaaaagtgrgcaaaggacctaaatagacacttctcaagaaaagaaattaaaattgctaataggtatattaaatgattctcaatatctctaatcagggaaaggaaaatca

SEQ ID NO: 138849 - DNA, 201 bp, Homo sapiens
gatatgccggctcctgctttgccttccaacatgattggaagcttcctgaggcctccccagaagtagatgccactatgcttcctgtacagcctgcagaaccrtaagccaattaaatctcttttcttgtaaattacccagcctcaggtatttctttatagcaatacaaaattgaccccgtcccaaaaaaaagcctctcaaaac

SEQ ID NO: 138850 - DNA, 201 bp, Homo sapiens
gaaaggctcaacatgaaaggctcctgactgcatcagcactaaagatgcatttctttcccgttctcatttgggtctcagaatgccttactagcttcctgagkgtattttatttctgctcttcctcaaattgcacttcctttatgactactaatgtgaagaggtctggaatatcctaatgctcagatctcccacttcctgggg

SEQ ID NO: 138851 - DNA, 201 bp, Homo sapiens
tgctcttcctcaaattgcacttcctttatgactactaatgtgaagaggtctggaatatcctaatgctcagatctcccacttcctggggcacacgtaaacayacctgcttggtgtacaggtgtcatggccagaacccatcaggaatgggactgtgcctgcctcaatacctctgctggcaatctgtcattttgcttgtttaac

SEQ ID NO: 138852 - DNA, 201 bp, Homo sapiens; identical to SEQ ID NO: 24724

SEQ ID NO: 138853 - DNA, 201 bp, Homo sapiens; identical to SEQ ID NO: 24729

SEQ ID NO: 138854 - DNA, 201 bp, Homo sapiens
cctagaatggggttttatcattcacatagagaattaaagcttggcacacccagttctcatctgagccaaacttaaatcaaaagactgaaggcttgcgaatsgggtctttgggacaggtaaaacagcaatactttatcatcttttccttttccttgtccctggttcaagggttgtccctccaaacctgcagcattctcctta

SEQ ID NO: 138855 - DNA, 201 bp, Homo sapiens; identical to SEQ ID NO: 24730

SEQ ID NO: 138856 - DNA, 201 bp, Homo sapiens
gctgccagtacttagatttatcataccttgaaaatggaccatttaaaatgttttctcacagaaaataagattttaaaacattatcctccctttatataaarccttgggatatcagcatactctgtgctggaccagcatactctggtcctggaaaataaggaccactggatcactgtccatcacaggaaaacaaaatgccac

SEQ ID NO: 138857 - DNA, 201 bp, Homo sapiens
gaataacagtctcaggtttgtctatggcctctgcagggagccgggattcccagacagagcaggccacttaaatcaggtgggacgcctctcccctcttggcyggagtccaactccacgcaggcacagagatcccagatgggcccccaagtttgtgagaaacacattcatctgtccaaacccaaagaatggactcagagacac

SEQ ID NO: 138858 - DNA, 201 bp, Homo sapiens
tcacgtgactatggaggcggaggtcagagagtcacagagagacttgaagatgctacgctgcaggctttgaagacggaggaaggagctatgaactaaggaaygtaggcagcatctagaagctggaaaatggctgattttgaacttcaatctccaaaactgtattgccttagttggttttgtgtggctataaaggaacacctg

SEQ ID NO: 138859 - DNA, 201 bp, Homo sapiens
tttatgttgttttaagccactaaacttgtgatgatttgttatagtagccataggaaattaatactaatagagagcaaatgacaatgatcaggggttggaartcagagagtgttggagaatagtatgagcatggttgcttgtacaaggatgcacttaaaccatgagactctagtttggaaacaagaagcctgagaagagact

SEQ ID NO: 138860 - DNA, 201 bp, Homo sapiens
tttaaaaatctacatgtagctaatggctactgtattagacagacagttttctaccattaaaaagaatgtggatagggtgactatgaacttattcattaaartgttcaatgctagaaaactagcttgccaaaaatagtctatgccaaattaaagaagtaccaacacttctctagagatcagatttcttataatctctgccat

SEQ ID NO: 138861 - DNA, 201 bp, Homo sapiens
tagttcagtgtttggcacacagtaagtactcactgcaaggaagggttgccattgggctgtttattgttatttgtatttgaccagcctcccttcctggattyaaagtagttcctattcccagaaagaggcagataagagatagtcacacagccacatgaaggtcaaaaccaagtttcccaattctggactccccaggaagtg

SEQ ID NO: 138862 - DNA, 201 bp, Homo sapiens
agttcagtgtttggcacacagtaagtactcactgcaaggaagggttgccattgggctgtttattgttatttgtatttgaccagcctcccttcctggattcraagtagttcctattcccagaaagaggcagataagagatagtcacacagccacatgaaggtcaaaaccaagtttcccaattctggactccccaggaagtgc

SEQ ID NO: 138863 - DNA, 201 bp, Homo sapiens
cccgtctctactaaaaatacaaaaattagctgcacgtggtggtgggcccctgtagtcccagctacttgggaggctgaggcacaagaatcacttgaacccakgaggcagaggttgcagtgagctgagatcgtgccactgcactccagcctgggcaacagagtgagactccacctgaaaaaaaaaaaaatagtggaaacaaac

SEQ ID NO: 138864 - DNA, 201 bp, Homo sapiens
actgttacaaacagatggaatggtttctctaaagatgggagggccaggaccggggcagtaatgagggcctgctttagctctttcactacctgaatttcctmtggggatcattgcatgggatcgggttcctcttctagtaacttgagatacagaatttttgtcttttgagcatatgagtcaattcacaacctgcagtagcca

SEQ ID NO: 138865 - DNA, 201 bp, Homo sapiens
tcgggttcctcttctagtaacttgagatacagaatttttgtcttttgagcatatgagtcaattcacaacctgcagtagccagttgaacctaaaaattttcrgagttctctctgtcttaggcaaaggcaggcccactattccagatattctctctgggtttattctccacttcccttcactaatcaggtgtcctaaatattt

SEQ ID NO: 138866 - DNA, 201 bp, Homo sapiens
tatttctaacaggtccctgaggccctatcttttttttcagtctattttctctctgttgttcaggctgggtaaattctattgatctataaacaagtttactrattttgtcctctgccatctctgctctataattgatcctatccagcaatttttaaaaatctatttttcagttctgtaattttcatttggttctttagaaaa

SEQ ID NO: 138867 - DNA, 201 bp, Homo sapiens
ggcggaggttgcagtgagctgagatcgtgccactgcatttcagcctgggctacagagtgagactgtcacacacacacacacatacacacacacacacaagmtatctatatatactgatacagaaaaaaatccatacacattaaataaaaaagcaagtgaaatcacagtccctagtatggctataatcaaaaggacagatac

SEQ ID NO: 138868 - DNA, 201 bp, Homo sapiens
ataaagaggcgatagctaaaggatacagggtttccttctgaggtgatgaaaatgttctaaaaattgactatggcagtggttgcacacatccatgaatataytaaaaataattgaactgcacactttaaatgtgtgaattgtgtagtgtgtgaattatagctcaataaagctgttatttcttttttaaaaaaaagcaaatga

SEQ ID NO: 138869 - DNA, 201 bp, Homo sapiens
ccacacgtctggtactcttctcaattactttcaccatattgaccgtgtcatcgggtccaccacctaggcaatgtgtagacataggctgagtcccaaaaccycagtacggaaccccacaggaggctccagcttggagaacgggttaagttctaggtttctgttccaatctgtgaagctgatgcagtccctggagcagggtac

SEQ ID NO: 138870 - DNA, 201 bp, Homo sapiens
cacatccatgaatatattaaaaataattgaactgcacactttaaatgtgtgaattgtgtagtgtgtgaattatagctcaataaagctgttatttctttttwaaaaaaaagcaaatgatagaataatacatgtactatgagctcatttatataaaaaccaaaactacatatgcatgtaatataaacatttgtgaatgtatgt

SEQ ID NO: 138871 - DNA, 201 bp, Homo sapiens
aatctgtctggttttggtggccatgtgtattttcgggtatcttatggaatgccagggtgaaaggaatggccaattggactaaagcacaagtcctggtccarttggacagtaactaacaggttatggaggtcccctttcccacaataccaccagacaacagcccagagtatatggagagctgagtaattgccattgcctgac

SEQ ID NO: 138872 - DNA, 201 bp, Homo sapiens
tgcggcacttgcgggccagctggagttctgggtgggcgtgggcttggtgggcccccacactcggagcagccagccagccctgctggccccgggcaatgggsgacttagcaccggggccagtggctgcggagggtgtactgggtcccccagcagtgcgggcccaccggcgctgtgctcgatttctcgccgggccttagctgc

SEQ ID NO: 138873 - DNA, 201 bp, Homo sapiens
ctggagtgcggtggcatgatctcggctcactgtaaactccgcctcccgggttcaagcgattctcctgcctcagcctcagcctcatcctcacgagtagctaygattacaggcacgtgccaccacgcctggctaattttttgtatttttagtagggacggggtttcactgtgttagccaggatggtctcgatctcctgacctc

SEQ ID NO: 138874 - DNA, 201 bp, Homo sapiens
caccggggccagtggctgcggagggtgtactgggtcccccagcagtgcgggcccaccggcgctgtgctcgatttctcgccgggccttagctgccttcccgyggggcagggctcaggacctgcagcccaccatgcctgagcctcccacccactccatgggctcctgtgcggcccgagcctccccgacgagcaccaccccctg

SEQ ID NO: 138875 - DNA, 201 bp, Homo sapiens
tatttttagtagggacggggtttcactgtgttagccaggatggtctcgatctcctgacctcgtgatctgcctgccccagcctcccaaagtgttgggattayaggcgtgagccactgcgcccagccagcaattactcttgttgagggcttgtactgaaaatttgaaccaggcattcacatccctgtaccctgtctcaatttc

SEQ ID NO: 138876 - DNA, 201 bp, Homo sapiens
cttactttttttttttaagacgtattctcgcactgttgcccaggctggagtgcagtggcacaatctcagctcactgcaacctctgcctcctgggttcaagygcctcattacaggtgcacaccaccatgcccgggtaatttttgtatttttcctagagacaaggtttcgccatgttagccaggctggtctcgaacgcctgac

SEQ ID NO: 138877 - DNA, 201 bp, Homo sapiens
aagaatgtggatagggtgactatgaacttattcattaaaatgttcaatgctagaaaactagcttgccaaaaatagtctatgccaaattaaagaagtaccarcacttctctagagatcagatttcttataatctctgccataatataactaaaaacctagatgagaaaaaagcatctaagcagcatgtaaaattgctgtcat

SEQ ID NO: 138878 - DNA, 201 bp, Homo sapiens
actactaagcacttgaaatgtggctagtacaataagggaattttttctttcttttttttttttttgagatggagtcttgctctgtcacccaggttgaagtkcagtggcggatttcagctactgcaaacctctgcctcctgggttcaaggaattctcctgcctcagcctcccgagtagctgggattacaggtgtgtaccacc

SEQ ID NO: 138879 - DNA, 201 bp, Homo sapiens
tgtttctatttccagactgctgcgccctggtggaagaaataacacaatgatataggcaggaatatcttgaaaagcatggtttctgtggaatattatgcagyagttaaatatgtaagatatcagctgggcgtggtggctcacgtctgcaatcccagcactttgggaggcccaggtgggcagatcacctgaggtcaggagttt

SEQ ID NO: 138880 - DNA, 201 bp, Homo sapiens
aaatgtggctagtacaataagggaattttttctttcttttttttttttttgagatggagtcttgctctgtcacccaggttgaagtgcagtggcggatttcrgctactgcaaacctctgcctcctgggttcaaggaattctcctgcctcagcctcccgagtagctgggattacaggtgtgtaccaccacgcccagctaattt

SEQ ID NO: 138881 - DNA, 201 bp, Homo sapiens
tggctataatcaaaaggacagatactaacaagtgttggcaaagatgtggagaaactggaagcctcatatactgctggtgggaatgtaaaatggatcagccmctttgaaaaacaatccagtagttcctcaaaatgttaaacacggagttaccatatgacccagcaatcccactcctagatacacacccaaaagacatgaaaa

SEQ ID NO: 138882 - DNA, 201 bp, Homo sapiens
aatgtaaaatggatcagccactttgaaaaacaatccagtagttcctcaaaatgttaaacacggagttaccatatgacccagcaatcccactcctagatacmcacccaaaagacatgaaaatatatgtccacacaaaaactggaacatgaatactcatagccatgttatttataatagccaaaaagtagaaactggctgggt

SEQ ID NO: 138883 - DNA, 201 bp, Homo sapiens
tgtaaaatggatcagccactttgaaaaacaatccagtagttcctcaaaatgttaaacacggagttaccatatgacccagcaatcccactcctagatacacmcccaaaagacatgaaaatatatgtccacacaaaaactggaacatgaatactcatagccatgttatttataatagccaaaaagtagaaactggctgggtgc

SEQ ID NO: 138884 - DNA, 201 bp, Homo sapiens
aatccagtagttcctcaaaatgttaaacacggagttaccatatgacccagcaatcccactcctagatacacacccaaaagacatgaaaatatatgtccacmcaaaaactggaacatgaatactcatagccatgttatttataatagccaaaaagtagaaactggctgggtgcagtggctcatgcctgtaatcccaaaactt

SEQ ID NO: 138885 - DNA, 201 bp, Homo sapiens
aaagtgttgaaattacaggtgtgcaccaccatgcctggcctccaagagcaattttattcagcaataaaaagaatgaagttctgattcatgctacaacataratgaaccttgaaaacactgtgctaagtaaaataagccagtcacaaaagatcacatattcttccattaatatcaaagtccagaatagggaaatctatagag

SEQ ID NO: 138886 - DNA, 201 bp, Homo sapiens
tctggaataatggttaccaatcgtttatgtctacactttggcagaattcggctcctttatcctcctaacctggtggtctctcattagcttttaaaaggcakttgagttttgggtaagggctattagcatttaaactataggcccagcgtggtagcacacatttgtaatcccagaactttgggaggctgaggtgggcagatc

SEQ ID NO: 138887 - DNA, 201 bp, Homo sapiens; identical to SEQ ID NO: 24727

SEQ ID NO: 138888 - DNA, 201 bp, Homo sapiens
aggggaacaatgtagacagatacatatgggagagtagatttgttatatggtctacaatttacttaaaaatactccgcagagacagtgtgagatacacatasacttacacacatgtacatgtagatatacacatactctaggggcagttaatatctgaagtacccccagtgacaaacactttccagcagcacttagtttgca

SEQ ID NO: 138889 - DNA, 201 bp, Homo sapiens; identical to SEQ ID NO: 24720

SEQ ID NO: 138890 - DNA, 201 bp, Homo sapiens
aaaagtgtgtggtggcgctctcttctctctctctctgtctctccacacacatacacacttccctctctctgccctggccaccccattctcaccatgtgatrtgccggctcctgctttgccttccaacatgattggaagcttcctgaggcctccccagaagtagatgccactatgcttcctgtacagcctgcagaaccataa

SEQ ID NO: 138891 - DNA, 201 bp, Homo sapiens
tcccaaacactcccagaatgtggccacttgttccttgggacccccatgttgttctatcccaggaacttgcttgcccccacctgctgtgagctctagtcacrtgtgtctatgaagggtgtcatcacagtatcacctatacctgtacccggcacaggtccttgtaggctggtagataccccaggtgtctactgagggaacttt

SEQ ID NO: 138892 - DNA, 201 bp, Homo sapiens
cccttgtcagataatttcaacatctaattcatcttggtgttggtatcagttgattgttttagggtgatttttatcatattctggatatgttgactattatrttagaagactctaattcctacttaaatatttgattttagcaggcagtcagtttgtttaggtttagcatgcaggtcctggcctacttttgaaggctgtgat

SEQ ID NO: 138893 - DNA, 201 bp, Homo sapiens
gtatctttcagtggggtaggggagtctctgaccttgtgggaaaggacagcacttctgctggctgcttattgtcagtgaggcaccttgctaaatcccacttrccggagttgccaggcttacctgttggtgtcagtaggactcccattcaatgcagaggagaaaggaacctacaggaaccattttctattgctacgttggggt

SEQ ID NO: 138894 - DNA, 201 bp, Homo sapiens
gcctcctgggtagctgtgactataggaacacactgctacatccagctaattttttgtattttgtagagacagggttttgccatgttgcccaggctggtctygaactcctgagctcaagtgatccacctgcctcaccctcccaaagtgttgaaattacaggtgtgcaccaccatgcctggcctccaagagcaattttattca

SEQ ID NO: 138895 - DNA, 201 bp, Homo sapiens
atctttcagtggggtaggggagtctctgaccttgtgggaaaggacagcacttctgctggctgcttattgtcagtgaggcaccttgctaaatcccacttacyggagttgccaggcttacctgttggtgtcagtaggactcccattcaatgcagaggagaaaggaacctacaggaaccattttctattgctacgttggggttt

SEQ ID NO: 138896 - DNA, 201 bp, Homo sapiens
acacactgctacatccagctaattttttgtattttgtagagacagggttttgccatgttgcccaggctggtcttgaactcctgagctcaagtgatccaccygcctcaccctcccaaagtgttgaaattacaggtgtgcaccaccatgcctggcctccaagagcaattttattcagcaataaaaagaatgaagttctgattc

SEQ ID NO: 138897 - DNA, 201 bp, Homo sapiens
gacagaaattagctgtgttgctggacatacacacccttacttcattagttgtatatgtctgtagttgggaggggagctataaaataacactggtgatgggygtggtggctcacacctgtaatcccaacactttgggaggccgaggcaggcagatcacctgaggtcaggagtttgagaccagcctggccaacatggtgaaac

SEQ ID NO: 138898 - DNA, 201 bp, Homo sapiens
ctctgtcattaccatactctcttttttttctttttatttgtacaatattggggtacatgtgcaattttatcatatgcatagattgcacagaggccaagttrgttagggctttgagtgtatccatcacatgaataacatatattgtacccattagccaatttctcatcatcctcctcccttccacccctcactcttccaagt

SEQ ID NO: 138899 - DNA, 201 bp, Homo sapiens
tgaggagggaggatcacttgggcccaggaggttgaggctgcagtgaaccatgtttgtgccactgcactccagcctgcgtaacaaagcgagaccctgtctcaaaaaaaaaaaaaaagtttgaatgttatcatcaaatgctttttctgtgccagttgatatggttaaatgattttagtctgctgatatggtggattacattga

SEQ ID NO: 138900 - DNA, 201 bp, Homo sapiens
cctcagcctcctgagaagccggggctacaggtgtgtgccaccatgccgagataatttttgtatttttagtagagacggggtttcaccatgttggtcaggakggtctcgatctcttgacctcatgatacgcccacctcagtctcccaaaatgctgggattacaggcgtgagccactgtgcctggcctgttttctgaaaacta

SEQ ID NO: 138901 - DNA, 201 bp, Homo sapiens
tttctctgtgtcgaaatctattatcccattgtttccttcaagagggatcttgatctaaccttcttctgactaccttttccacagtggaaaccatgattctygctttttgtttctgcttctcttcctctctccttacaaagaccttctgagcttccctcagtaattcttcaactggtttctcattccattcattactctttt

SEQ ID NO: 138902 - DNA, 201 bp, Homo sapiens
caataaaacaggacaaggaagaatgagagcactaatttagaacttgagttaaataaaattttacttgttaatgctgctgttcttgctcaactgaatccgtrgactaagattcattctcattaaatttgatttaatgttacacaagagaatgaaatggataattgggtaactttcccttatgtatctgatagagaagattca

SEQ ID NO: 138903 - DNA, 201 bp, Homo sapiens
ttattttgccttcacatttgattgatagtttggctgtttacaaaaatatagtttcaaaataattttcctttagaaatgtaaaagcagagcaacatttctgygaggagcttggcaaaatctttctccaaactgcaatgataaaactttataaacatgacaaaaatgataaatttctggaaattgactcaatgcatatgttta

SEQ ID NO: 138904 - DNA, 201 bp, Homo sapiens
taatctcacacagctgcaaaacttaaaaatctggttccaatgaaatagaaagtagcataagtggtcaccagaattggtcaagggtgaaaaattacgatagwtaggaataataagacctggtattgtattacatagtagggtgattatagttcaaatattatattgtacatttcaaaatatgtagaagagaagattttgaat

SEQ ID NO: 138905 - DNA, 201 bp, Homo sapiens
acattcacaatagccaagctatggagcaacctaattgtccatcaatgaatgaatgcatagaaatatatatatatatacacacacatacatatgtatatgtrtatacacacacaatgaaacactgttcagccacaaaaaggaataaaatcttgtcatttgcagcaacctggataaactcagaggacattaacctaagtgaaa

SEQ ID NO: 138906 - DNA, 201 bp, Homo sapiens
cactctacctgattcccagttccactccccagaatactgcatttagttctttaagtgtatattcttgtttatgcttctgtaattttttgggttttttttttggttgttatttgaatgttacatactatgcagtggacaaattatttcgatgtagatttagttaagtgacatatattttccttgacttcccttcctttcctc

SEQ ID NO: 138907 - DNA, 201 bp, Homo sapiens
aattatcctggcatggtggctcacacctgtaatcccaactactctggaagcaaagaatcgcttgaacccgggaagcggaagttgcagtgagccgagattgygccactgcactccagcctgagtgtcacagtgagactctgtctcaaaataaacaaataaataaatgaataaatcatgagttgtttacttctgggattttcc

SEQ ID NO: 138908 - DNA, 201 bp, Homo sapiens; identical to SEQ ID NO: 24731

SEQ ID NO: 138909 - DNA, 201 bp, Homo sapiens
aacttaatttattaaaaggataaatttatatatattgatttatatagatgtaaaatataatatatacacagtatataaatattatgcaaaataatatatayacacatgcaggtgaatttcactattcatagtagttatgttctataaattcaccaaaaacactgacttagagaatactaagcccctatggaaaatacaggg

SEQ ID NO: 138910 - DNA, 201 bp, Homo sapiens
ataagcagtctacagaataagagaaactcaacccctttccttcaaaaacccaatccctttccttcaaactttagccctagttagattaggatctctgacayatttaactgaaagagtcctaaataatacgatacatttagattctttgatagcaaggcagaaaatatatagcactaattatatgattgcttgagtttttaa

SEQ ID NO: 138911 - DNA, 201 bp, Homo sapiens
tagaatcaacaacaaaaaaaatggatttaaactgtatcctaactcaaatgaaccttatagacacagaagttctatgatgaaagtttatagcaataaatgtstacatcaaaaaaattagaaagatcttcaataaacaacctaacattgcacatccaagaactagaaaggccagagcaaagttaatccaaaataactatagta

SEQ ID NO: 138912 - DNA, 201 bp, Homo sapiens
ttccactataaagacacatgtacacgtatgtttattgcagcactgttcacaatagcaaatacttggaaccaacccaaatgcccatcaatgatagactggayaaagaaaatgtggcatatatacaccagggaatactgtgcagccataaaaaaggatgagttcatgacctttgcagggacatggatgaagctagaaacatca

SEQ ID NO: 138913 - DNA, 201 bp, Homo sapiens
cttaaggtctaaggttaaaaataagattatctggtagcaagtaaggaaggcaagagggatgtctgcaggagacagggcatgtataaatgcttatatttaargcccctagttttgaagacaatataatacaaagatggtttcctgaaatgaggcaattcactggaaatgcaacacaaaatggctttaggtctcctatacttt

SEQ ID NO: 138914 - DNA, 201 bp, Homo sapiens
atcatccatgcagtgtcgacaaatttcttacagataaaatttctgaaatgtggacagccttaaattactcagttgacagaattttgtcaagaattgtttcrtagtttttggcaaccttgtagcctaaacagatgcctatcaacatgcctgtatccattttatgcctgatctgtgagaggagagagaaggaaaaatatactc

SEQ ID NO: 138915 - DNA, 201 bp, Homo sapiens
gcaaccttgtagcctaaacagatgcctatcaacatgcctgtatccattttatgcctgatctgtgagaggagagagaaggaaaaatatactctcctatgcayatttatcatggcttgaaaagagagcctcagtctatttcacacttattgccacaagtaatttaagtttgaaatcttgaatctttctttcagttttggccag

SEQ ID NO: 138916 - DNA, 201 bp, Homo sapiens
atcaacagagttaatgacaacctataaaatgggagaaaatatttgcaaattatgcatcttacaggaggttaatatctagaatatataggaattcaaacaartcaattgcaaacaaacactctgattttaaaataggcaaaataaatagacatttctcaaaagcagacatgcaaatgagcagcaagtttatgaaaaaatgct

SEQ ID NO: 138917 - DNA, 201 bp, Homo sapiens
aacagcttgtacacaacaaagaaaacatcaacagagttaatgacaacctataaaatgggagaaaatatttgcaaattatgcatcttacaggaggttaatawctagaatatataggaattcaaacaaatcaattgcaaacaaacactctgattttaaaataggcaaaataaatagacatttctcaaaagcagacatgcaaat

SEQ ID NO: 138918 - DNA, 201 bp, Homo sapiens
cagcttgtacacaacaaagaaaacatcaacagagttaatgacaacctataaaatgggagaaaatatttgcaaattatgcatcttacaggaggttaatatcyagaatatataggaattcaaacaaatcaattgcaaacaaacactctgattttaaaataggcaaaataaatagacatttctcaaaagcagacatgcaaatga

SEQ ID NO: 138919 - DNA, 201 bp, Homo sapiens
aaagcacaggcaaagaaagcaaaactaaagaaataagattatataaaactaaacagcttgtacacaacaaagaaaacatcaacagagttaatgacaacctmtaaaatgggagaaaatatttgcaaattatgcatcttacaggaggttaatatctagaatatataggaattcaaacaaatcaattgcaaacaaacactctga

SEQ ID NO: 138920 - DNA, 201 bp, Homo sapiens
acacattggagtaaaaacagtctcttcaataaatggtgctatgaaaactggatattctcatgcagaagaatgaaacaagcccctatctctcaagatatacktaagtcaactcaaaatgaattaaatacttaaatataagatgcaaaaactataaaactattggaagaaaacatgtgaaaagtgcttcacataatttgtctg

SEQ ID NO: 138921 - DNA, 201 bp, Homo sapiens
agtgtctttatcattttcattaataattattttagctctcatgcaatacttcttccccaaatctaacatagttatattttctaattttgtatataattgarctgtcaaaattgaaaatcaataactttttatattattgtgatcagagttttattgtaatgtgaaatgatacctgataatatatactactcttgtttaatt

SEQ ID NO: 138922 - DNA, 201 bp, Homo sapiens
tggggaacccagaaatcaatccatactcatacaaccaattgatttttgaaaaaggcaacaaaaatacacattggagtaaaaacagtctcttcaataaatgktgctatgaaaactggatattctcatgcagaagaatgaaacaagcccctatctctcaagatatacttaagtcaactcaaaatgaattaaatacttaaatat

SEQ ID NO: 138923 - DNA, 201 bp, Homo sapiens
caaaaatacacattggagtaaaaacagtctcttcaataaatggtgctatgaaaactggatattctcatgcagaagaatgaaacaagcccctatctctcaaratatacttaagtcaactcaaaatgaattaaatacttaaatataagatgcaaaaactataaaactattggaagaaaacatgtgaaaagtgcttcacataat

SEQ ID NO: 138924 - DNA, 201 bp, Homo sapiens
aaactggatattctcatgcagaagaatgaaacaagcccctatctctcaagatatacttaagtcaactcaaaatgaattaaatacttaaatataagatgcaraaactataaaactattggaagaaaacatgtgaaaagtgcttcacataatttgtctggccaagaatatttgtataataactcaaaagcacaggcaaagaaa

SEQ ID NO: 138925 - DNA, 201 bp, Homo sapiens
tccttagggatctagaaccagaaataccatttgacccagcaatcccattactaggtatatacccaaaggattataaatcattccactataaagacacatgyacacgtatgtttattgcagcactgttcacaatagcaaatacttggaaccaacccaaatgcccatcaatgatagactggataaagaaaatgtggcatatat

SEQ ID NO: 138926 - DNA, 201 bp, Homo sapiens
gaaaccagtgtggtgattccttagggatctagaaccagaaataccatttgacccagcaatcccattactaggtatatacccaaaggattataaatcattcyactataaagacacatgtacacgtatgtttattgcagcactgttcacaatagcaaatacttggaaccaacccaaatgcccatcaatgatagactggataaa

SEQ ID NO: 138927 - DNA, 201 bp, Homo sapiens
tatacttaagtcaactcaaaatgaattaaatacttaaatataagatgcaaaaactataaaactattggaagaaaacatgtgaaaagtgcttcacataattkgtctggccaagaatatttgtataataactcaaaagcacaggcaaagaaagcaaaactaaagaaataagattatataaaactaaacagcttgtacacaaca

SEQ ID NO: 138928 - DNA, 201 bp, Homo sapiens
ctatgctaatagtaaagtacctaaaaaaaaatcaagaaagcaggggaggagccaagatggccaaataggaacagctctggtctacagctcccagcgtgagygacgcagaagatgggtgatttctgcatttccatctgaggtaccgggttcatctcactagggagtgccagacactgggcgcaggtcagtgggtgcgcgcac

SEQ ID NO: 138929 - DNA, 201 bp, Homo sapiens
ttctctatgctaatagtaaagtacctaaaaaaaaatcaagaaagcaggggaggagccaagatggccaaataggaacagctctggtctacagctcccagcgygagcgacgcagaagatgggtgatttctgcatttccatctgaggtaccgggttcatctcactagggagtgccagacactgggcgcaggtcagtgggtgcgc

SEQ ID NO: 138930 - DNA, 201 bp, Homo sapiens
attgtatctttttctggatgagcaataaataagtgctgttctgataacaatggtgacatgacataggataaagagcaggcatcaaaaaagcgagcatttcrtttaggtcactacgtccaaatagtaaacattttctctgaatcatactaaggtttccttgaaagtactgtccaatactcattaaatttctctacatttctt

SEQ ID NO: 138931 - DNA, 201 bp, Homo sapiens
aacaccctctcatgattgaaaactctcaaccaattaagtatagtaaagatctatctctatgtaatacaggccctacgtggcaaacctacagctaatatccwgaaagggtaaaagttgaaagcttttctttgaagttcaggaacaagaaacgactttcagtcaacatagttctagaagtcctagccagggtaattaagcaag

SEQ ID NO: 138932 - DNA, 201 bp, Homo sapiens
ttctagcagcagcttcaatatttatattaaatgcttattattttgacagctcaaatgtcattaaaatgacagattactagtttgagttcagaaaccattgrcataaaaggagtaatgcgtattttgcaaaatttactgtgcaaaatagaaggacatatattttaagttgtcaatgttaattgtatctttttctggatgagc

SEQ ID NO: 138933 - DNA, 201 bp, Homo sapiens
cttaacagaatactagcaaatgaaaatcaaaagaacattaaagtcattattcaccataatgaattggggtttattccagggatgcaaggatgattcacatrtgcaaatcaataaatatgatacatcacatcaacagagtcaagaaccagcaatacataatcgtttcaataaatgcacaaaaatcatttgataaaattcaac

SEQ ID NO: 138934 - DNA, 201 bp, Homo sapiens
aaaattcttaacagaatactagcaaatgaaaatcaaaagaacattaaagtcattattcaccataatgaattggggtttattccagggatgcaaggatgattcacatgtgcaaatcaataaatatgatacatcacatcaacagagtcaagaaccagcaatacataatcgtttcaataaatgcacaaaaatcatttgataaaa

SEQ ID NO: 138935 - DNA, 201 bp, Homo sapiens
caattcccttgatcaacgtaatggtaaaaattcttaacagaatactagcaaatgaaaatcaaaagaacattaaagtcattattcaccataatgaattgggrtttattccagggatgcaaggatgattcacatgtgcaaatcaataaatatgatacatcacatcaacagagtcaagaaccagcaatacataatcgtttcaat

SEQ ID NO: 138936 - DNA, 201 bp, Homo sapiens
ataccatttttatataaccacttctagatttctcaatttttttggcatatagttgtttcaaagtctttcaaattcatttcatgaggccagcatcaccctamtatcagaaccagacaaggatacagtaaagaaagaaaagtacaggccaattcccttgatcaacgtaatggtaaaaattcttaacagaatactagcaaatga

SEQ ID NO: 138937 - DNA, 201 bp, Homo sapiens
gtgtgaacctgggaggcaaggcttgcagtgagctgagatcgtaccactgccctccagcctgggtgacagagcgagactccgtctcaaaaaaaaaaaaaaaagttaaccacaatgccacatagtaagaatatataaagaataataccatcttacaaatatcaatgtttcagttggttaatgctttcgttgattcatcaatct

SEQ ID NO: 138938 - DNA, 201 bp, Homo sapiens
atttcagtctctctgctcttctggttcgacagacagctgcatcttctcatgcaccaccagcctcttccctgagacaccatggtgaaggtgaaggccagagycaacggattggactatattgggcacccggtcactagggctgcttttaattctggtaaagtggatattgtcaccatcaatgaccccttcattgacctcaac

SEQ ID NO: 138939 - DNA, 201 bp, Homo sapiens
gaggccgaggtaggcagatcacgaggtcaggagattgagaccatcctggcgaacacggtgaaaccctgtctctactaaaaatacaaaaaattagccaggcrtggtggcaggcagctgtagtcccagctgctcaggaggccaaggcaggagaatggtgtgaacctgggaggcaaggcttgcagtgagctgagatcgtaccac

SEQ ID NO: 138940 - DNA, 201 bp, Homo sapiens
taagaacaatttcagtctctctgctcttctggttcgacagacagctgcatcttctcatgcaccaccagcctcttccctgagacaccatggtgaaggtgaakgccagagtcaacggattggactatattgggcacccggtcactagggctgcttttaattctggtaaagtggatattgtcaccatcaatgaccccttcattg

SEQ ID NO: 138941 - DNA, 201 bp, Homo sapiens
tacaagggaaagagggttataattgacttgcagttccacctgccgggcgaggcctcaggaaacttacaataatggtggaaggggaatcaaatcggtccttyttcacaaggcagcagaagagtgcggtgctgagcaaaggtggaatccccttgtaaaaccatcagatcttgttggaattcactcactatcacgaaaacagca

SEQ ID NO: 138942 - DNA, 201 bp, Homo sapiens
cccccagccacccctaagaggactggtgcctacacttgtcattgggacatttatgggaaagctcactggtatgactctgcccagctttgtcctcctgaccrtggactgaacagggaactcaggtcactgggcattctacagaccaacccatcacctgaagcaccagagagcacatcttattaaagaaagatcaagctcata

SEQ ID NO: 138943 - DNA, 201 bp, Homo sapiens
atgcaacacaggagcacccatattcttaaaacaaatactactagacctaagaaaagagataaacagcaatgcaataatagcaaaagacttcaacacactartaacagcactagacagatcaacaaggcagaaaatcaacaaagaaactggaattatactagattctagacaaaatgtacctaacagacatttaccattcat

SEQ ID NO: 138944 - DNA, 201 bp, Homo sapiens
ctactcaaaaactttagaatatacacttttctcatctgtgcatggaacattctcccaaatagatactatgtttggccataaggcaagtttcaataaatttwaaaaatatgaaattgtattaagtatctctttggaccatagtgatataaagttagaaatcaataccaagaaaaactctcaaaactccacaaatgtggctga

SEQ ID NO: 138945 - DNA, 201 bp, Homo sapiens
gcctataatcacagttctttgggaggctgagctgagaggatcacttgtggccaggagttttagactagcaagaccccatcattttgtacttttttgtacamgaaaatttaaaaacagttagctgggcatggtggcacatgactgtagtcccaactacttgcgaagctgaggccagaggatcacttgagcacagaagattga

SEQ ID NO: 138946 - DNA, 201 bp, Homo sapiens
agaattacaaatcaatgctcaaagaagtcagagatgacaaaaataaagggaaaagcatttcatactcatggattaaagaaatcaatgttgttaaaatggcyatactgcctaaactaatttacagattccatgctattcctatcgaactaccatgacatttttcacagaattagaaaaatctattccaaaattcatataaac

SEQ ID NO: 138947 - DNA, 201 bp, Homo sapiens
ctaaagactctaccaaaaggcttctagaactggtagatgacttcagtaaatttccaggatacaaaatgtatgtacaaaaattagtaatatttctataccartaatgttcaatctgagagccaaatcaagtacacaatccaatttataataatcataaataaaaaaataaatacctaggaatacagatagcccaataggtga

SEQ ID NO: 138948 - DNA, 201 bp, Homo sapiens
gcagcaagtttatgaaaaaatgcttagcatcactgtattagttgattctcatgctgctatacctaagactgggtaatttacaagggaaagagggttataaytgacttgcagttccacctgccgggcgaggcctcaggaaacttacaataatggtggaaggggaatcaaatcggtccttcttcacaaggcagcagaagagtg

SEQ ID NO: 138949 - DNA, 201 bp, Homo sapiens
acctctcacgttcatttctggtctagatttgttactttctgaggctttccacaggtttatccattcatgattcatcattttttccacaactctcttcagtygtattcattgtaccttatgtcttctttctaaatgtaatcctttgtgtttcttgaattcatcaccaagtaatttgcttagagtttgtggataaaacatttc

SEQ ID NO: 138950 - DNA, 201 bp, Homo sapiens
acaactcattctgatcatttagtacctcttcctggtgattgctttctggaaagtgtcaataagcaaagatctttacgttttcttccccacttaatatgtcyatccatgccatgtgctattttcccattcctcctcctcctaatttttctctctctcccatttcagaactctagccaaacaaacaagtcagtcaccattacc

SEQ ID NO: 138951 - DNA, 201 bp, Homo sapiens
ctcacctttaacatctaaagcctcgattttaataaaagtaattgtttacatagccttctttatgactatcaaccttggatttatcctgtttatacatcctycctgttttccaagaaaaaaattccaaatgttgttttttggtctgtgtatgttattatatctattatctgagttttgaaaattattctgctacagcaatcc

SEQ ID NO: 138952 - DNA, 201 bp, Homo sapiens
gtaaaagcagagcaacatttctgcgaggagcttggcaaaatctttctccaaactgcaatgataaaactttataaacatgacaaaaatgataaatttctggraattgactcaatgcatatgtttatttttaaaaaaatgcattagtggatcattggaagggatagtcaataaacccacttctacttcttcattttctcatct

SEQ ID NO: 138953 - DNA, 201 bp, Homo sapiens
cattagattatcagcagatttcttaacagaaaacttgcaggccaaaagaatgggattatacattcaaagtgctgaaagaaaaaaaaatcctgccattcagyacagttatttttcagaaatgaagaaataaagtcttttctaaacaaatgaaggctgaggaaatttttcactaaaccagactttgcaacaaaatgcttaaaa

SEQ ID NO: 138954 - DNA, 201 bp, Homo sapiens
tttcaaatctctagtagaaaagctaaatttcaaaatagtaagctataatcctagttacaataagttgtcaagaagatatgaaaaatgtaaattatggcaayaaaattataaattttatggtggggtagatgtctgaattatatgcatgcaatcaaaattaatttttatcagtttaaaatatacttacataactacaagaat

SEQ ID NO: 138955 - DNA, 201 bp, Homo sapiens
aacaccgcatgttctcactcataagtgggagtttaacaatgagaacacatggacacgaggaagggaacatcacacaccagagcctgtcaggggtggggggrctaagggagggatagcattaggagaaatacctaatgtagatggctggttgatgggtgtagcaaaccaccacggcatgtgtatgcttatgtaacaaacctg

SEQ ID NO: 138956 - DNA, 201 bp, Homo sapiens
acaatttaatatacatttatgacaaaaccctcaagaaactaggcatcaaaggggcatacctcaaaataataagagctatcataacctcaaaatgataagagctgtctgtgacaaacccatagccagtatcatactgaatgagtgaaagctggaagcattctcttgagaatcagaacaaggtaaggatatcaattccaacca

SEQ ID NO: 138957 - DNA, 201 bp, Homo sapiens
caaaattaatttttatcagtttaaaatatacttacataactacaagaatttttcatgaaagtgccagattagtcacaaaggaaaaaattacaatatatacmcaaatgagaaagagaaaagaatcaaatcttactactacaggaaaccacttaatcacaaagttatacaacagaagaagaagaaaaaaacatttttttctac

SEQ ID NO: 138958 - DNA, 201 bp, Homo sapiens
tacaatttaatatacatttatgacaaaaccctcaagaaactaggcatcaaaggggcatacctcaaaataataagagctatcataacctcaaaatgataagagctgtctgtgacaaacccatagccagtatcatactgaatgagtgaaagctggaagcattctcttgagaatcagaacaaggtaaggatatcaattccaacc

SEQ ID NO: 138959 - DNA, 201 bp, Homo sapiens
tagggaagttcaacaaccacattcagtaatggacagatcatccagacatagaatcaacaacaaaaaaaatggatttaaactgtatcctaactcaaatgaamcttatagacacagaagttctatgatgaaagtttatagcaataaatgtctacatcaaaaaaattagaaagatcttcaataaacaacctaacattgcacatc

SEQ ID NO: 138960 - DNA, 201 bp, Homo sapiens
gtgttttcacctttatttctacaattcaattatatcaagtgaattttagaatgtagacaaaagtgattgtgttttgtcattttaatatgttgtctgaagtwgctgaatacctgtgagatgttaacatttagtgtatattgggttctgtagccagagaagacttaaatctgattacagcaggattgatgggtcaggtaagag

SEQ ID NO: 138961 - DNA, 201 bp, Homo sapiens
aatgaaccttatagacacagaagttctatgatgaaagtttatagcaataaatgtctacatcaaaaaaattagaaagatcttcaataaacaacctaacattscacatccaagaactagaaaggccagagcaaagttaatccaaaataactatagtaaaagaaataataaagatcacagcagaaatacacaaaatagaagtta

SEQ ID NO: 138962 - DNA, 201 bp, Homo sapiens
caaattcatttcatgaggccagcatcaccctaatatcagaaccagacaaggatacagtaaagaaagaaaagtacaggccaattcccttgatcaacgtaatrgtaaaaattcttaacagaatactagcaaatgaaaatcaaaagaacattaaagtcattattcaccataatgaattggggtttattccagggatgcaaggat

SEQ ID NO: 138963 - DNA, 201 bp, Homo sapiens
aggcatcaaaaaagcgagcatttcgtttaggtcactacgtccaaatagtaaacattttctctgaatcatactaaggtttccttgaaagtactgtccaataytcattaaatttctctacatttctttgatgtaacatgtactgaatgtgttttcacctttatttctacaattcaattatatcaagtgaattttagaatgtag

SEQ ID NO: 138964 - DNA, 201 bp, Homo sapiens
gcccacggagtctcgctgattgctagcacagcagtctgagatcaaactgcaaggcggcagcgaggctggggaggggcgcccgccattgcccaggcttgctyaggtaaacaaagcagcctggaagctcgaactgggtggagcccaccacagctcaaggaggcctgcctgcctctgtaggctccacctctgggggcagggcac

SEQ ID NO: 138965 - DNA, 201 bp, Homo sapiens
gaaaggggtgacggacacacctggaaaatcgggtcactcccacccaaatattgcgcttttcagacctgcttaaaaaacggcgcaccacgagattatatccygcacctggctcggagggtcctacgcccacggagtctcgctgattgctagcacagcagtctgagatcaaactgcaaggcggcagcgaggctggggaggggc

SEQ ID NO: 138966 - DNA, 201 bp, Homo sapiens
attactagtttgagttcagaaaccattgacataaaaggagtaatgcgtattttgcaaaatttactgtgcaaaatagaaggacatatattttaagttgtcawtgttaattgtatctttttctggatgagcaataaataagtgctgttctgataacaatggtgacatgacataggataaagagcaggcatcaaaaaagcgagc

SEQ ID NO: 138967 - DNA, 201 bp, Homo sapiens
taacatttagtgtatattgggttctgtagccagagaagacttaaatctgattacagcaggattgatgggtcaggtaagaggctaaaaggtaaaaagtaaartactgaactaattgcagagagaagcagacttctaaatttcgtgtgatattttaaaagaataaaatgttgatttaaaaaagttaatgacaaggccaggcgc

SEQ ID NO: 138968 - DNA, 201 bp, Homo sapiens
aatacaatttaatatacatttatgacaaaaccctcaagaaactaggcatcaaaggggcatacctcaaaataataagagctatcataacctcaaaatgataagagctgtctgtgacaaacccatagccagtatcatactgaatgagtgaaagctggaagcattctcttgagaatcagaacaaggtaaggatatcaattccaa

SEQ ID NO: 138969 - DNA, 201 bp, Homo sapiens
aaaatatgaaattgtattaagtatctctttggaccatagtgatataaagttagaaatcaataccaagaaaaactctcaaaactccacaaatgtggctgagyatggtgactcatgcctataatcacagttctttgggaggctgagctgagaggatcacttgtggccaggagttttagactagcaagaccccatcattttgta

SEQ ID NO: 138970 - DNA, 201 bp, Homo sapiens
caaatggattttcaaagtcctgttaattaaaataacagcctttacaatgtagcatggaaatatagatgcaaaaaaatacatttgagtgtcttattgttaayagaaggccacatatatattttaatatatctactgtaatcctcattaagattactctcagcaagctacagttcatcatatcaaatggtaatgtaatgcaca

SEQ ID NO: 138971 - DNA, 201 bp, Homo sapiens
cagaagctatcaaaaggttgtctccacacctggatttaaagcattggtaagtttgtatgcttttttctcacaattaatttttgtctttatcctatttctgyatcttcagtaaaatttagtgggctaataagaaaaaattcaagatttaaaatatgtatgcttattaacaatatttaattacttattttatccacacattta

SEQ ID NO: 138972 - DNA, 201 bp, Homo sapiens
aaggggcatgtcagaggcttttggttgtctcactaatattgcttattcatctgaatattgattttgtgttttttgtaaagaaaattgtaattaattaatayagtggtgtaataatctgcatatatttctgcttgccgtctatattttgatgaatatctatgtaaaatgtattctgtgtatttccaagtattgtttactcta

SEQ ID NO: 138973 - DNA, 201 bp, Homo sapiens
cgggcagttgacctgtgtgcagccccaggcagctggagccaggtgctgagccagaagatcgggtaagtgtgggggtcccagatgggagacccaggagggcyggctgggtgggaggggcccgggagcgaaactaggctgatgtgggccatgttgtccacaggggccaagggtccggccacgtggtggctgtggacctgcagg

SEQ ID NO: 138974 - DNA, 201 bp, Homo sapiens
aatagaaaaaagtaaagcagggtgaagagaatcaggaattctaggcatggcagttttcatcttttggtgtttttgttttgagacaaggtctcactctgtcrcccaggctggagttcagtggtgtgatttcccgggctcaaaaaatcctcccacctcagcctctcaagtagctgggactacaggcatgtaccaccatgccta

SEQ ID NO: 138975 - DNA, 201 bp, Homo sapiens
aagtgggaggccaggcggggccccctgtgtgtgtccttctctgtatctcccaccttggttgacttattcacctcttcagttactccctgcctctcccttcygcactcagctttctcccacatctggcaacttctccctacctctgctgcctgttctctctctgcctctctcttcctcccacttgcaccccaccctttgagt

SEQ ID NO: 138976 - DNA, 201 bp, Homo sapiens
tgaaggcccttacctggggtctatgcagagtggaagagaaacagagaggtgatagaaacagagagagaaagagagtgagagagtaaccatggagaaacagycagcaggtcatcattgcacagacacagcagaaaatgatgatgctgggtccccagaggtggagcccagtcttagagaggcaaagcctgggaatttggctga

SEQ ID NO: 138977 - DNA, 201 bp, Homo sapiens
cagcagagtggacacgtttccccagcccctggccgcccctcagtgccacaccctgctggcccctgaggtctggaaatgtgactctcagcctgccttgaccycttccccgtgtgcctttttctgacccaaatctcatggtttctggggccaaaattccctttcctgcctcccaatagctataaaaaattggtaaagccaagc

SEQ ID NO: 138978 - DNA, 201 bp, Homo sapiens
gtaaatagcaacagaaagtgggaggccaggcggggccccctgtgtgtgtccttctctgtatctcccaccttggttgacttattcacctcttcagttactcyctgcctctcccttccgcactcagctttctcccacatctggcaacttctccctacctctgctgcctgttctctctctgcctctctcttcctcccacttgca

SEQ ID NO: 138979 - DNA, 201 bp, Homo sapiens
agcagagtggacacgtttccccagcccctggccgcccctcagtgccacaccctgctggcccctgaggtctggaaatgtgactctcagcctgccttgacccyttccccgtgtgcctttttctgacccaaatctcatggtttctggggccaaaattccctttcctgcctcccaatagctataaaaaattggtaaagccaagca

SEQ ID NO: 138980 - DNA, 201 bp, Homo sapiens
ggtcagtgccagggcttcagtcagcccatcttctgtgtgagctgtcatgtgggtcagatgagcccagtttagtttgtgtggttctctccgccctacagagrtaggtggtagcccattcatctggttactgatactggccggcatcagtggactgtcggcaggtccttgagcaactggtgtgtgaaatgggacggacgtcaa

SEQ ID NO: 138981 - DNA, 201 bp, Homo sapiens
catcggtcagtggggtggaggggccaggcaggcagagggggatctctgggacgccgactgcacgaggaggaagcggcagtcatgcctcactccaccttccyctggcagaggccttcgctgtctgtcagggctatgaccctcccgagggcttcatcccggacctgagcaaacccctgctggaccattcttacggtgagagct

SEQ ID NO: 138982 - DNA, 201 bp, Homo sapiens
gaagatgcacagagccagatgggacccccctaacgctgttcctcttgccacagtaaccggtctccatgatgttgatgagtatatgcaggcccagctcctcytagctgtgagtaaccctggccacccctgacccactttggccccctcctggctgtctccacctcagcctcagccgtctgtcctgcccacaggctctgaaca

SEQ ID NO: 138983 - DNA, 201 bp, Homo sapiens
atgagtatatgcaggcccagctcctcctagctgtgagtaaccctggccacccctgacccactttggccccctcctggctgtctccacctcagcctcagccrtctgtcctgcccacaggctctgaacattgctacacatgtcctgaagccagggggctgctttgtggccaaggtaagtctcaaggaacttggtggagtagag

SEQ ID NO: 138984 - DNA, 201 bp, Homo sapiens
aaggaacttggtggagtagagggaggtcgctgagggccaccctcacccgctgtctttgccttctcaccctgcagatattccgaggccgggatgtgacgctyctctacagccagctgcaggtcttcttctccagcgtgctgtgtgccaagcccaggagcagccggaactctagcatcggtcagtggggtggaggggccaggc

SEQ ID NO: 138985 - DNA, 201 bp, Homo sapiens
tttcttgggtagatggaagacaatgaaatgagttgttcaccttaacccattacggtaagtttgccttgttatctaagagtttgagtaagggcaacctttaygaaaaacctcagtaaaatttcacctttgaaatttttatgtcaactgataagattttaatcaacaaacccttttctaaacatctgttgttgtatgccagga

SEQ ID NO: 138986 - DNA, 201 bp, Homo sapiens
cagggagcaaaacagaaatatcttggctctcacagtacttccagtttggaaaagaggcaacaatcaaaacagtctgtaagtgcaagagtttacatacacayatatactatatagcttgcatttctcaatttacatatcttgcaatatatataatatataagagtaatatgggatataaaaaatagaaaaaagtaaagcagg

SEQ ID NO: 138987 - DNA, 201 bp, Homo sapiens
gtgatggatgggaaaatgatcccccaggtattgatggaggtatgatattcaacgggttaatggaaagtgatggggcatcgtaatggcaaggatgatggtgrggttgtggggggaataatagatggatggaggtcatgatcaaggggccttggtgaaagaaaagataatgagaggctgatggtgttgtagtcagagtcagta

SEQ ID NO: 138988 - DNA, 201 bp, Homo sapiens
ggaggtaggtcaggagtttggttgtggatgtattggagatgtagaatctgatttgtgaatctggagttcagaggaacagtctgggctggaggtggaaatgwtaatgatgcttgtgtgtgaggttgttttagaattgaaatgagttcctaagggttaggagctcagaatatgcatccagttggcagacagtaatttgcatct

SEQ ID NO: 138989 - DNA, 201 bp, Homo sapiens
cccagcccctggccgcccctcagtgccacaccctgctggcccctgaggtctggaaatgtgactctcagcctgccttgaccccttccccgtgtgcctttttytgacccaaatctcatggtttctggggccaaaattccctttcctgcctcccaatagctataaaaaattggtaaagccaagcataatgaatggaaaagtttc

SEQ ID NO: 138990 - DNA, 201 bp, Homo sapiens
caagcccaggagcagccggaactctagcatcggtcagtggggtggaggggccaggcaggcagagggggatctctgggacgccgactgcacgaggaggaagyggcagtcatgcctcactccaccttcccctggcagaggccttcgctgtctgtcagggctatgaccctcccgagggcttcatcccggacctgagcaaacccc

SEQ ID NO: 138991 - DNA, 201 bp, Homo sapiens
agtgccacaccctgctggcccctgaggtctggaaatgtgactctcagcctgccttgaccccttccccgtgtgcctttttctgacccaaatctcatggtttytggggccaaaattccctttcctgcctcccaatagctataaaaaattggtaaagccaagcataatgaatggaaaagtttcgccaaatatgtgagtcacttt

SEQ ID NO: 138992 - DNA, 201 bp, Homo sapiens; identical to SEQ ID NO: 24737

SEQ ID NO: 138993 - DNA, 201 bp, Homo sapiens
tgtgccaagcccaggagcagccggaactctagcatcggtcagtggggtggaggggccaggcaggcagagggggatctctgggacgccgactgcacgaggargaagcggcagtcatgcctcactccaccttcccctggcagaggccttcgctgtctgtcagggctatgaccctcccgagggcttcatcccggacctgagcaa

SEQ ID NO: 138994 - DNA, 201 bp, Homo sapiens
agccccaggcagctggagccaggtgctgagccagaagatcgggtaagtgtgggggtcccagatgggagacccaggagggccggctgggtgggaggggcccrggagcgaaactaggctgatgtgggccatgttgtccacaggggccaagggtccggccacgtggtggctgtggacctgcaggctatggctccactaccaggt

SEQ ID NO: 138995 - DNA, 201 bp, Homo sapiens
tagtggaaacttatgcactaaacttgttttctttagcacattcatagaaagatgcttattttactgactagaaaatggtatacatggtctttatagagaaraagcactaagaagaaaataattgtaatcttatcactcagagataaattattaacatgactttttctctaatggatataagaataagggcacacttaagta

SEQ ID NO: 138996 - DNA, 201 bp, Homo sapiens
tataacattgaacaggtaagatgctctttgtaagtttttatatttaccacaatattttcttctctattagatttaacattgttagttatcctaattcaaaktatcgagcaaatacaactctgtcaagcaaatacaacaataaccctagaaacatcttggtcaaactgagcattctcttcccctaaggatcaggaccctgga

SEQ ID NO: 138997 - DNA, 201 bp, Homo sapiens
acaacaatcttacgacgtaagagccacagatattttgtctttttccttcccaatttttggactgattatatgataggcttttcattataaggcagagatartgttcccattgagtaattagggaggggtagaatatgcctgtaatcccagcactttgggaggctgaggcaggcagaccaagaggtcaggagatcaagacca

SEQ ID NO: 138998 - DNA, 201 bp, Homo sapiens
tctcccagatcaaaggtgtctgttatgctcctagaaagtggccaccttcatcccagattggctttatcttgtccacagcatattggtatggtggaaagaasagaagactgcattaaagcctgtgctttaggtgctttgtaaagcctcttttggtcataccactctaggatgcattccttataaactcttgtcacaggcatt

SEQ ID NO: 138999 - DNA, 201 bp, Homo sapiens
aaactctttgagctgagtttttacaatgaagttcatgtgaacaaataaataaggatcttgcttataaataattttcattttattgagctcattagccattkcattccagcagccatttaatagcatcataaaaattattcagacagaaagatgaaattatgtataattttaactaaatctctataatatgccagaatgtaa

SEQ ID NO: 139000 - DNA, 201 bp, Homo sapiens
aaataagggaaagtaactgaacatttggagtatggacataaattttgcatggtgactcacaaaacatgtaagcaaatagttgaaggttgtaaagagcttakttttttaaaaaaaatctgttgatccttgtcactatttataatagcaagaagctgaaaaatggaaaaagcactctaaatagtttagaaaggggcccaattg

SEQ ID NO: 139001 - DNA, 201 bp, Homo sapiens
ggaaagtaactgaacatttggagtatggacataaattttgcatggtgactcacaaaacatgtaagcaaatagttgaaggttgtaaagagcttagttttttwaaaaaaatctgttgatccttgtcactatttataatagcaagaagctgaaaaatggaaaaagcactctaaatagtttagaaaggggcccaattgtacttac

SEQ ID NO: 139002 - DNA, 201 bp, Homo sapiens
atctaatgtgaagttgtgaaaaactctaaagaatgaggttcatgtcaccatatattataaaagaggcttttaaaaaatagtactttttgaattgcttcttyttcatattttaccaagtatactcagtattcgtgaatagttcttgtatacacttatattagtttttattcttccttggttaatttaaaaggttctgaagat

SEQ ID NO: 139003 - DNA, 201 bp, Homo sapiens
aaaaattagaaaagcaacccagtaagtgttgacattaaatcaacatttgttttaatgtgaaaatgtatgcttctttgtattaagtgattattaaaaatatrcatttatttgaaaaacagatgaacatttatattattatacaaaaatgtatttgaacaggataattgctgtgtacatttattgaacaattgtgtctgccag

SEQ ID NO: 139004 - DNA, 201 bp, Homo sapiens
cttatctctgttaagatgcaaacatgtccatgtgtttttcaaagttgtgttagccactgtacagttgttctgtggaggttgaatgagtgaaatcagaggasataaatgggttgtatattttgatgtttctagggagcctaaaaatggttttggacacttgatgtcttgcaaagtggtagcatacagtccagggactgatcc

SEQ ID NO: 139005 - DNA, 201 bp, Homo sapiens
tatgttggtaattatttaccctttacaactagctcaacaaaaacattgtctttatgcagtctgcagctaatcaaggcatcaaaatgagaacaaatatattyagaggtccttaatttctaatttggtccaagatacctcagttaaagcctcaagatggtagccagatggattaatttaaagatgacaaaaacagtattaaaa

SEQ ID NO: 139006 - DNA, 201 bp, Homo sapiens
aaatcttgactaattttgctttttatttatacagaattttgcagctatgagaggtaaattattaagttaatcctttcaaaatttttataaacatgttcttyaattatgaggtaaaagcttgtgtttaggtttcttctttaaatagatctttaggaatttttctaattttctaaaatatgctgttgactaatcatatttcag

SEQ ID NO: 139007 - DNA, 201 bp, Homo sapiens
aaacaaaacaaaagcaaactataaagaattaaggaccagcaccaggcgcatagaattcttgtagagtcatcattctccaaattcccatgtgagtccagatrttttaaagctaaacatgtaactctccttgaataaagagtaagtctcagcaaaatgactgaaaaagcctctagtggtgaacactgtgagtagataaagcag

SEQ ID NO: 139008 - DNA, 201 bp, Homo sapiens
agatcttaggttgcaagaatgggtttcctaagctttaataaaccttatatagaaacagatactcttcattaaaaaatgtttatgctgcatattaagtaaamcatcaggagaaactgatgtcctgtagctaaagatggtctgaaccatatctaaatataagattgtactatataggcttttttgggttgcaaggaacagaat

SEQ ID NO: 139009 - DNA, 201 bp, Homo sapiens
ctacaataggccccatgtggcatcaggttcaccatgaagctatgggacaggaaaacacagctttccagtgaggtggcatcaggcatttctctttggtgccrgtcttttcagcagttcatgcagcagtccatgtggttgcccaggatctattctctttgtcccctagcaatgggtcagatatgagagaatgagtcctacatt

SEQ ID NO: 139010 - DNA, 201 bp, Homo sapiens
caagtgtgagagcccagaaaccccccatctactccttggataagtggaatgttatttgtagaattcatggctgtgacccatcttctctctttaaatatctrctactgatgtttctatcactgttactgctgacctccctttgattacctcatagctgtgcttacaaataatatttgcactgatctactctccttgtccctc

SEQ ID NO: 139011 - DNA, 201 bp, Homo sapiens
ctcttggtgtccctttctcgtctcctgctggggcgatgtcgaagggagtgggctggtggatttgggaactgggtccccgaagagggcagggaatgaggcgrcagctgtgcaggtgcagatatttgcagctttgggggacagcgagagtcgtacggggtcatttcggccctcaagatcgggggtggtggagagggaggtcat

SEQ ID NO: 139012 - DNA, 201 bp, Homo sapiens
aggtgcctacctactcttcttatttaaagtgtgccccttttcttcattgcaccccttttatttgtaaaccttgactttttattaacagacagtttaggatygccttctttccagcaggtgcgcttaggctgcttaccttggtgatagaatcagttttccacaaggctacacaaacatttccttttcaaaggaaattttccg

SEQ ID NO: 139013 - DNA, 201 bp, Homo sapiens
cttccctgatagaatgtctccttgcttctgttctggggtacaggccagaaggaggagaggctaaaaaggggcccttctaaaccaagtcaactgtctgtcttttttttttttttttttttttaagcagcagcaagatttattgcaaagagcgaaagaacaaagcttccacagaatggaaggggacccgagcaggttgtcccc

SEQ ID NO: 139014 - DNA, 201 bp, Homo sapiens
ttgtttttttgttttttttttgagacagagtcttgctctctcgcccaggctggcaggctggcaggctggagtgtagtggcatgatctcggctcactgcaasctttgcctcccaagttcaagcgattctggtgcctcagcttcatgagtagctgggactacaggtgcgcaccatcactcctgtcaggactctgagcccaagc

SEQ ID NO: 139015 - DNA, 201 bp, Homo sapiens
aaagtaatcacaacgtatatattgggttatttagctaaaatagaagtcctagttcactgaatttcaggactggagagctttgtggtaggcagaatagtggycttccaaagtgtctatatctgaatccccagaacctaatgactattttaccttacatggcaaaagggactttgtagatttgatgaaggtgaggattttgag

SEQ ID NO: 139016 - DNA, 201 bp, Homo sapiens
cagcttgcatgtgtggtatattttgaagaaaagattgctcctttcaattttctgaaatctgtttttaaacattttttgtttgtttttttaccaaatatatattttttttgcctttgcttgtttctaggaattccatataagcaactgactgttggagtccccaaagagatattccaaaatgagaagcgagtggcattgtct

SEQ ID NO: 139017 - DNA, 201 bp, Homo sapiens; identical to SEQ ID NO: 24742

SEQ ID NO: 139018 - DNA, 201 bp, Homo sapiens
tttaaacattttttgtttgtttttttaccaaatatatattttttttgcctttgcttgtttctaggaattccatataagcaactgactgttggagtccccaragagatattccaaaatgagaagcgagtggcattgtctcctgctggtgttcagaacttggtcaagcagggttttaatgttgtcgtggaatcgggtgcgggc

SEQ ID NO: 139019 - DNA, 201 bp, Homo sapiens
ttatttgaaggttgattttaaacttggatataaaacattttaaaatacatttaaaatacagttttaaaaatttggctttaaaaaatggatggccgggcgcrgtggctcacgcctgtaatcccagcactttgggaggccgaggcgggtggatcatgaggtcaggagatcgagaccatcctggctaacaaggtgaaaccccgt

SEQ ID NO: 139020 - DNA, 201 bp, Homo sapiens
aaatgctaagcctcctgcaaccaaagcaaacagggaagtaactcattttttcaggagatacagcttttttctacattaatttctatgaggtatcaatcacatagtttttttatttccttacataaagcccactgaataacttgacaggatcctaacacttgacaggtggtttttgctaaagttacaaaaccaatttttgct

SEQ ID NO: 139021 - DNA, 201 bp, Homo sapiens
aatacatttaaaatacagttttaaaaatttggctttaaaaaatggatggccgggcgcagtggctcacgcctgtaatcccagcactttgggaggccgaggcrggtggatcatgaggtcaggagatcgagaccatcctggctaacaaggtgaaaccccgtctctactaaaaatacaaaaaattagccgggcgcggtggcgggc

SEQ ID NO: 139022 - DNA, 201 bp, Homo sapiens
ggcgtgaacccgggaagcggagcttgcagtgagccgagattgcgccactgcagtccgcagtccggcctgggcgacagagcgagactccgtctcaaaaaacaaaaaaaaataaataaaataaaaaataaaataaaaaatggatattggaaactttcaagcatatggagtgtatattcattgacttagttgatacttcttaat

SEQ ID NO: 139023 - DNA, 201 bp, Homo sapiens
aaggttatatgagtgaacacgagcattgttcctaaagttatttcctttctcctgccctttcccatactatttctttttttaaaaaagtttttatttcttaytttttaatagagacaggatctcactatgttgcttaggctggtcttgagctccaaagctcaagcgatcctcctgtcttggcctcccaaagcgctgggatca

SEQ ID NO: 139024 - DNA, 201 bp, Homo sapiens
tggtctataagctctttccatttaaaaatgtttccactttttaaaagttaatgcaaagtgaaaatgtattacttaaactaacaactcacagctctgttttyttgggtggattgacagtgggaccagaattctttctatcctgagtttctaacatgttgctttacctatttctgttcagaatgcttttaggcactagttagg

SEQ ID NO: 139025 - DNA, 201 bp, Homo sapiens
tcaaattcctggtgatcagtagtcttgggagtatattttggttatttcaatataatgcattttctttctaaatctatttttaattttcatgcttaaacctkcatatgaaaagatatttatgtttagagctgaggtttagaaaaatacctcttatttaatgagcatgcactttgattgctggagaaatttttttccaaatat

SEQ ID NO: 139026 - DNA, 201 bp, Homo sapiens
gattccttttaaaataatcttagagtattaatagttcattctctgcagtttgtttctacttgctatcagtgctaataaaaaatacctatttagtctttgtstcccattcctgacataaagcttataaaacccatggaatttcgtaatgtggaattttgtaatgttcctgatttggctagagttggctattgtttgtgtata

SEQ ID NO: 139027 - DNA, 201 bp, Homo sapiens
ttagggatccattttaatttcagaaaatacattaacagggctgggcgcaatggctcatgcctgcaatccagcactttgggaggctgaggtgggaggctctyaagcccaggagttcaagaccagcctgggcaacatagcgagaccctatctctactttttataaaaaataaaatattactactaataaaaaagattaaaaaa

SEQ ID NO: 139028 - DNA, 201 bp, Homo sapiens
aaattaatatgcatatattagtggatttgctgtcttaattaggttttgcttaggtaaatttataaaatatttaaagaataggaaaaaggtctggactagargaagtttcatctgatgtcaaaacccatattgataactgagggctatgtcttcgacctttaaggtcaagatggtaataagcttcatttgcccaatagcact

SEQ ID NO: 139029 - DNA, 201 bp, Homo sapiens
gtaaatttataaaatatttaaagaataggaaaaaggtctggactagaggaagtttcatctgatgtcaaaacccatattgataactgagggctatgtcttckacctttaaggtcaagatggtaataagcttcatttgcccaatagcactaatacattctatgttgattgcctggagtactatgttgagaaggattctaaggc

SEQ ID NO: 139030 - DNA, 201 bp, Homo sapiens
ctgatgtcaaaacccatattgataactgagggctatgtcttcgacctttaaggtcaagatggtaataagcttcatttgcccaatagcactaatacattctmtgttgattgcctggagtactatgttgagaaggattctaaggcccattctgcttggaggaatgtggctatgattgagtaatcatgcctgccatgggtgagg

SEQ ID NO: 139031 - DNA, 201 bp, Homo sapiens
atgtgaaagaatatcaaaaccagtcgctctagatcaagtggttttagctgttgaatcttttgagcaaatgaaatattatgagacaatataaataaatccartaagagctgagtagctttgggtacactgagtatggcaggattgtgcagaaacattcctactctccatctcatccactatggccccagatttgtctgaagt

SEQ ID NO: 139032 - DNA, 201 bp, Homo sapiens
aggaatcactcttctatgtcctgagctgatatatgcagagagcatagtgtgaaaggaatcatctagtatacatatccatacaatgtatgataaatcattayccgtctcattcatacacacagccatattacagtgaagatgtgctacttccacttcattactgttcattctgaacttttttgctgtcatgaagaaaatgtc

SEQ ID NO: 139033 - DNA, 201 bp, Homo sapiens
tgaaagttctagtcttttctgttttttgactttactaatttgaatttttaaaagaattttggataacttgttctctgtagcctatatattattaatttttwaaaaaaactttcaagataccattcagcagattctgggtttctcaatttttgcaacattttggcacatatacaaggtatttttggtttcttcacttcttgt

SEQ ID NO: 139034 - DNA, 201 bp, Homo sapiens
aaaaaaactttcaagataccattcagcagattctgggtttctcaatttttgcaacattttggcacatatacaaggtatttttggtttcttcacttcttgtyaatttttggatcaagaagacaggaaatgggaggtggtgtaatcagagtatttggcagagagaaatggtgccagtttctttaatccacactgaaagcagag

SEQ ID NO: 139035 - DNA, 201 bp, Homo sapiens
tacctgagactgggtaatttattttaaaaaagaggtttatttggctcataattctggtagctggaattcaagatttggcagctgcatctggtgagggcctmaaggctgcttcaactcatggtggacagtgtaaagggagcaggcgtgtgcaaaaaagatcacatggtgagagaggaatcaagagagagaaactgagggagc

SEQ ID NO: 139036 - DNA, 201 bp, Homo sapiens
ttccttttgtttgtaaaatcctgtttgctgacttggtgttgaggctggagctgactgccctggccaacagtccagtccagattcaggagcaattgcaaaayttgtgtcccgggtgggtggaagccatatgttttggggaggtgctggagtgaatgaaattcttcctactcttttaaaacccctattcctcagccaaatctg

SEQ ID NO: 139037 - DNA, 201 bp, Homo sapiens
ttaatgcaaagtgaaaatgtattacttaaactaacaactcacagctctgttttcttgggtggattgacagtgggaccagaattctttctatcctgagtttytaacatgttgctttacctatttctgttcagaatgcttttaggcactagttagggcataaacaaagatgtttgtgaatctgaagaaagagtaaaatagcag

SEQ ID NO: 139038 - DNA, 201 bp, Homo sapiens
tgctatagtttctatgagaatgtatatttccttatttgtgctaccatttaagtttggagaattcctgtaacctgtgaaaccatggtaaaatcttgactaattttgctttttatttatacagaattttgcagctatgagaggtaaattattaagttaatcctttcaaaatttttataaacatgttctttaattatgaggtaa

SEQ ID NO: 139039 - DNA, 201 bp, Homo sapiens
agatatatgtgtagctatatatacgtatatatagatatatatacacatatatatctacacatctatctatctatctctctctctctctctctctctctctmtatatatatatatatatatatatatatatatttttttttttttttttttttttgagacggagtctcgctctgtcgcccaggctggagtgcagtggcgcga

SEQ ID NO: 139040 - DNA, 201 bp, Homo sapiens
atatatgtgtagctatatatacgtatatatagatatatatacacatatatatctacacatctatctatctatctctctctctctctctctctctctctctmtatatatatatatatatatatatatatatttttttttttttttttttttttgagacggagtctcgctctgtcgcccaggctggagtgcagtggcgcgatc

SEQ ID NO: 139041 - DNA, 201 bp, Homo sapiens
acaggcattagccaccatgcccagccatctccctacctttgaacaaagtggttaaagttgaatgtgaagtcagcttttgatagaataatgttgatttttcrtgggaaacatttaattccaggctaggtaaataggtttttaaagattcaatatttaccagaaagtatgagagaacacagtgatttttaaatgtaaggtgat

SEQ ID NO: 139042 - DNA, 201 bp, Homo sapiens
atatgtgtagctatatatacgtatatatagatatatatacacatatatatctacacatctatctatctatctctctctctctctctctctctctctctatmtatatatatatatatatatatatatatttttttttttttttttttttttgagacggagtctcgctctgtcgcccaggctggagtgcagtggcgcgatctt

SEQ ID NO: 139043 - DNA, 201 bp, Homo sapiens
agaataatgttgatttttcgtgggaaacatttaattccaggctaggtaaataggtttttaaagattcaatatttaccagaaagtatgagagaacacagtgmtttttaaatgtaaggtgatattatttattaacattattggaagttcactgcactgaaaacaaagttaagcttttatttttctgagggaagttatagtttc

SEQ ID NO: 139044 - DNA, 201 bp, Homo sapiens
gatatatatacacatatatatctacacatctatctatctatctctctctctctctctctctctctctctatatatatatatatatatatatatatatattyttttttttttttttttttttgagacggagtctcgctctgtcgcccaggctggagtgcagtggcgcgatcttggcttactgcaagctccccctcccgggtt

SEQ ID NO: 139045 - DNA, 201 bp, Homo sapiens
gataatttagtgtctgattcttgccagtctctgagattttactggttttcaattgtactaacgtatgactggtgaagtaattttctctttcttttcttttwaaaaagtactagaatttccctagataaggtgctgtacgttatagctgtcatagggtagatgttgaatggtaatgacatttggcccaagcctatgcttgtt

SEQ ID NO: 139046 - DNA, 201 bp, Homo sapiens
tgggcctgcagagtaagaggccgtgggagtgtgtcagctctttgggctgctcccatttcaagcagtgcagagccactgttatttcttccaagtttgatcctttttttttttttttaaagaaaaggattccactgataaaatttgaaaaccagtgttccacagaatcatagctgcaacatcctatagggctctccttggatt

SEQ ID NO: 139047 - DNA, 201 bp, Homo sapiens
gaggtagtgagcatagtaccccacagtttttcaacccttgcccatatccctcactccccattctggtagtctccaggttctattgttgccgtatttatgtycctgagtacccagtgtttagctcccacatataagtgagaatgtgcagtatttgattttcttttcctgtgttaatttgcttaggataatggcctccagctg

SEQ ID NO: 139048 - DNA, 201 bp, Homo sapiens
cttcagctttgttctgaactctgtattttctatttcttttcaatggctgtcttttagtttcttctatgtttccaacctgcagtatttattgaatgaacaattttttttttttttttgagaagagttggagcagtgagtcagaaagaccttagtctgaattccagatttccaatttattgatcatttgccttggagaaaata

SEQ ID NO: 139049 - DNA, 201 bp, Homo sapiens
tgctggaaaggacacgatttccatcctttttatggctgtgtagtattccatggcacatatgtaccatatttttttttatccagtgcaccattgatggacayctaggttgattccatgtctttgctattgtgaatagtgctgtgatgaacatgctagtgaatgtgtctttggtagaaagatttgttttcttttggatatgta

SEQ ID NO: 139050 - DNA, 201 bp, Homo sapiens
ggtgtatatgtgccacattttcttaatccagtctatcattggtggacatttgggttggttccaagtctttgctattgtgaatagtgccgcaataaacataygtgtgcatgtgtctttatagcagcatgatttataatcctgtgggtatataccccagtaatgggatggctgggtcaaatggtatttctagttctagatccc

SEQ ID NO: 139051 - DNA, 201 bp, Homo sapiens; identical to SEQ ID NO: 24745

SEQ ID NO: 139052 - DNA, 201 bp, Homo sapiens; identical to SEQ ID NO: 24746

SEQ ID NO: 139053 - DNA, 201 bp, Homo sapiens
tttcaagggtttaatttgcactcttgcttatatggtcctgtacacatacaaattacatatatatgattgtatatgtaacatggatattagtatttgtataygtatgtgacatatttatgtaaaatgatgttacaaattatatgaatttatatatttacataaaattatatttaaaagaacagggttttaaaaaatagtata

SEQ ID NO: 139054 - DNA, 201 bp, Homo sapiens
ataaaagatattaaaaagtgaaacaaaagaggcttaaagaaaagagaatcagcctttaaaaggtggaaaagtgactatctttattgaaaatttaaattgcrgcttaagggactttggttacatgacagaaatagttttctgaaattgaaggcactggtatagctcattaaggtggattgcataatactgtcttttatttgg

SEQ ID NO: 139055 - DNA, 201 bp, Homo sapiens
aaatatgtgcaaagggaggagttgatgaattccccattttggcttaaacaattgtgcatagttactgcctttactcagatggggaaggccagaggaggggmaggttatatgagtgaacacgagcattgttcctaaagttatttcctttctcctgccctttcccatactatttctttttttaaaaaagtttttatttcttat

SEQ ID NO: 139056 - DNA, 201 bp, Homo sapiens
acaggactttactctggaaggcccgttccagactggagacaatgttcttactttgtttcttagaaggcgggggtagggggagacttgtttctgaggaattytttggttctcttgttgctgatccttccatgattagggacattagttacattgcttcagacttacggagagttgctcaaaatggttcagaattgtggttgc

SEQ ID NO: 139057 - DNA, 201 bp, Homo sapiens
ctcattgcccaatggtatttaaatggtctgatttttgaattctttcaaacaataactaggagatacccctcttagcaatagtgattatcttgcctaatgcytgtatcacaaagtttaaatatataaaatccttgctttctttcctatcataaaatagtacatgattattcttccaattcggaaaaatgtgaaaaagcacaa

SEQ ID NO: 139058 - DNA, 201 bp, Homo sapiens
ccctatggctgccacaaatggaacaccaactcagattggcttaaaccattagaaaatgtattatttcttctaactgagaatccaggggaatgacttccttytcacattagagtgagatgctcctccgtgctatcaaggaccagtttctgtcactcctctctgctgtccttggctttgtcttcctcctaaggctgattccac

SEQ ID NO: 139059 - DNA, 201 bp, Homo sapiens
tcctttaataatacacgtaaagacatttcaggttttattttgtatgtaacaatcttagacaaatttgtcagactttgggctctgtaaaatgtcaatgttgygtctgataaacgagtttagattgaaagaacaattacaattctggcaacattttgattcatcatctttgaaatttacgttatttaggctttattaaagtat

SEQ ID NO: 139060 - DNA, 201 bp, Homo sapiens
catataaagagttatttttgtgggaaaggtctctagtaagaacaaattcagaatatttacaagtgaaaaacctcatcctgagtgatttgaatgatatcaawtcctgatgtatatgaggtatcacatcatcatccacatcggggtcataaggaacataattgattactggagttggcaattgtgaaatcgcttttgcaactt

SEQ ID NO: 139061 - DNA, 201 bp, Homo sapiens; identical to SEQ ID NO: 24748

SEQ ID NO: 139062 - DNA, 201 bp, Homo sapiens
tgtttggttgcatagaaaagttctttagtggtgatttctgagattttggtgcacctgtcacctgagcagtatacactgtacacaatgtttagtcttttatycctcaccccccctcccactcttaacccctgagtccccaaagcccattatatcatagcttagcttccacttttaacaatgtttagtttttaattcctgagt

SEQ ID NO: 139063 - DNA, 201 bp, Homo sapiens
gcatagaaaagttctttagtggtgatttctgagattttggtgcacctgtcacctgagcagtatacactgtacacaatgtttagtcttttatccctcacccmccctcccactcttaacccctgagtccccaaagcccattatatcatagcttagcttccacttttaacaatgtttagtttttaattcctgagttacttcact

SEQ ID NO: 139064 - DNA, 201 bp, Homo sapiens
tattttgtactcagtgcatgactgatgtcaaaccaataagtgtttattaatcagtaagcagtagcttgatctaacaagatttgggagtgaagaaactgtcyaccttttatagtctcacctcttctcttcacctatcctttccttttgttattgaataatgaataacatactgactctaattttttcctttctgaaagaaag

SEQ ID NO: 139065 - DNA, 201 bp, Homo sapiens
tgtaaaatgatgttacaaattatatgaatttatatatttacataaaattatatttaaaagaacagggttttaaaaaatagtatattccttaagcaattttkaaatgctggattgactttttaatacgtactattttttaatgtctattaggatggtaaagtgattttcccagctcccacaccgaaaaatattcctcaaggt

SEQ ID NO: 139066 - DNA, 201 bp, Homo sapiens
aatcctgtatcctgagaatgcatcttccttaggagcagaaaagaggcagctttggagcagattcgccacctttctgggttttgctttccaggacagtaccrgctccgcctcctcgcttgctttgacttcttgcacattcttacctcacagctggtcagacaaaagctttttgctgaggattttcatttctcaaagactaca

SEQ ID NO: 139067 - DNA, 201 bp, Homo sapiens
gaaggttcagttgttgtggatttagctgctgaggctggtggaaactttgaaaccactaagccaggagaactctacattcataaggtatagcaagatgcgtyttctatctgtgatcacttctcatgtcttgagttatgggggggtgtttatttctttaaatatttagagacattaaggcttgaaattttaaaattaaaaata

SEQ ID NO: 139068 - DNA, 201 bp, Homo sapiens
aaattgggaactcatatcaacatggcaaacctattgaaaacagtggtgactggctgctcgtgtcctctacttagcaatttggggtcctgtaagggtctacrtgtgaagaaggattttttacgaacattttatactcaccaagaactgtggtgtaaagcgcctgtaaaaccaggtaaagtctcacttcagtgattgtaaatg

SEQ ID NO: 139069 - DNA, 201 bp, Homo sapiens
agatttggaggtgatattggggtctctgtacattatgtcctgtcaagtaaggccagctcttcatttgtttcatgtctaggtttggaattcacccagttgcrggccgaatgcctggtcagcttaatgtgctgctggctgaggctggtgtgccatatgacattgtgttggaaatggatgagatcaaccatgattttccaggta

SEQ ID NO: 139070 - DNA, 201 bp, Homo sapiens
caactctattattgcaggcatgccagtccttgaggtctggaaatcaaagcaggtaaagtttcagacttgtatttcattctgataatcaaaggtcacttcaratatacacacagaactttctttgatcatttgataagaaatgatgatgccttctaggaggccaggagtaagagcatgtttagggcccagtttcctatatcc

SEQ ID NO: 139071 - DNA, 201 bp, Homo sapiens
tgatttgatagggaaaaagataatgtggttctcagatatcttctgtcatttcaatttttgaagtgattttcagaaaccagctgaaatttatctgattaaartgttttaaatgatcaaataaaccttttaaaatgattccaaatatcatatacacaacatttgtactattctcacaaagttatgtgtgttaaactctcacag

SEQ ID NO: 139072 - DNA, 201 bp, Homo sapiens
gaggttgcagtgagccgagatggcgacagtacagtccagcctcagctcggcatcagggggagaccgagcagagagggagggggagggggagggagagaagragagggagagggagatctatttttttttttcctgcctcaggtttatttgtacaaatagcacaggaggaccccagccccatgcagatggtagcccagggac

SEQ ID NO: 139073 - DNA, 201 bp, Homo sapiens
cttgatctaacaagatttgggagtgaagaaactgtctaccttttatagtctcacctcttctcttcacctatcctttccttttgttattgaataatgaatamcatactgactctaattttttcctttctgaaagaaagtgggtcatataatgagagcttaaagggttcttggttgcttatgttagatcctagtgaaggagcc

SEQ ID NO: 139074 - DNA, 201 bp, Homo sapiens
agagggagatctatttttttttttcctgcctcaggtttatttgtacaaatagcacaggaggaccccagccccatgcagatggtagcccagggacgggggtggggggtcgcaccagtccttctgtcctcacgttggcagagatatctactctgaaggctttgtaggggcctcggtacctttgggagcctgagctggaactga

SEQ ID NO: 139075 - DNA, 201 bp, Homo sapiens
tcttaaaccgtcatctcacccccctattgggttgagtgatgggttaaaggtgagaatttcacttaatgcaggtaacttgaggatggggccaagctgacagmcccgctttgtggtgctgtgcacacaaagaaaagctctctactttcctgtccagctcgttgacctttggggctaccattaaaaagtaaggcagccctgctg

SEQ ID NO: 139076 - DNA, 201 bp, Homo sapiens
tttagttctttgtagattctggatattagccctttgtcagatgagtagattgcaaaaattttctcccattctgtaggttgcctattcactctgatggtggtttttttttttttttgctgtgcagtagctctttagtttaattagatcccatttgtcaattttggcttttgttgccattgcttttggagttttatacatgaa

SEQ ID NO: 139077 - DNA, 201 bp, Homo sapiens
tttagagaaacttttcatagacatagaatagttaatcaggaagggactgaatcaggttgaaaatctgataagtacgttggggaggggagtatggtgtgggrtgagaaggaatcatggtgattttgcactgactgtgtcttgggcaaatttcacctaagttccaatgagaatgaagagaactatggagcacatgctaagtcc

SEQ ID NO: 139078 - DNA, 201 bp, Homo sapiens
acctggcaatgtgagctcttttttggttccatatgaactttaaagtagttttttccaattctgtgaagaaagtcattggtaacttgatggggatggcattsaatctataaattaccttgggcagaatgaccattttcacgatattgattcttcctatccatgagcatggaatgttcttccatttgtttgtgtcctctttta

SEQ ID NO: 139079 - DNA, 201 bp, Homo sapiens
agctattctaaggcctgggtttttgtttagcaatgatgacagtagcttgggcgacttgggttcccagcatcattagatgaaacaagccatctaaactgaayagagttggatcatagtctcccactccccaattacctgtggtataaagtttgcattccttggaggtatttcttggctttcattatctggtcctgatttagc

SEQ ID NO: 139080 - DNA, 201 bp, Homo sapiens
accttgggcagaatgaccattttcacgatattgattcttcctatccatgagcatggaatgttcttccatttgtttgtgtcctcttttatttcgttgagcastggtttgtagttctccttgaagaggtccttcacatcccttgtaaggtggattcctaggtattttattctctttgaagcaattgtgaatgggagttcagtc

SEQ ID NO: 139081 - DNA, 201 bp, Homo sapiens
gaattctttctatcctgagtttctaacatgttgctttacctatttctgttcagaatgcttttaggcactagttagggcataaacaaagatgtttgtgaatytgaagaaagagtaaaatagcaggctgagttgggggcatgccctaccgtgaatgaatagaagcaaataaagctgactggcacttcacctgactagcaacgc

SEQ ID NO: 139082 - DNA, 201 bp, Homo sapiens
attccttggaggtatttcttggctttcattatctggtcctgatttagcttttgggtctggtgttaaactaatatcttattctctgggcctgatttcagccrtgttgactgctattatctcctcaaatgggccaagatacttttttgcctttgcacatattgctccttctctttggaatactatccttgcccttccctgctt

SEQ ID NO: 139083 - DNA, 201 bp, Homo sapiens
atcttagttatttctagactcctgtaggcttttgaatgtgtttgctcttgcttctctagttcttttaattgtgatgttagggtgtcaattttagatctttyctgctttctcttgtgggcatttagtgctataaatttccctctacgcactgctttgaatgtgtcccagagattctggtatgttgtgtctttgttctcattg

SEQ ID NO: 139084 - DNA, 201 bp, Homo sapiens
gtagtgttcttttttcttttttctgcactcaaagaactttgcttgttcttcctattacagcagtgcttagtcccatcattcctcagttatcttgtctcccrgtgagtgcagcaggagtctttgatttatgccagcgcttggcatagtggtttgtacacaatggtggcttagcaaatgttgctgaactaataattctggata

SEQ ID NO: 139085 - DNA, 201 bp, Homo sapiens
tttagatcttttctgctttctcttgtgggcatttagtgctataaatttccctctacgcactgctttgaatgtgtcccagagattctggtatgttgtgtctytgttctcattggtttcaaagaacatctttatttctgccttcatttcattatgtacccagtagtcattcaggagcaggttgctcagtttccatgtagttga

SEQ ID NO: 139086 - DNA, 201 bp, Homo sapiens
attcttatagaacactctgttggttcacttttggataggaacattgcagaggctaatttaagcttgggaacttaactttcttaaattattcaaaactggarcacatgcccagtctgcagtttgaggtggctggctagctagacctctcaggagatagaattaggaagtagtggaagggctgtttgggaattagaaagtgtc

SEQ ID NO: 139087 - DNA, 201 bp, Homo sapiens
aggctatgaaggttgctctgggactgtctctatttaagccagctatagggaaagtgggatggaggagtgtgcatggaaggccaggaagtggtacacatcaytcttgctttgcattcttttgctaagacttagtcatgtggccaaacttaactgtgaaggaagctgggaattgtctagctctgtgcccaggaataagagaac

SEQ ID NO: 139088 - DNA, 201 bp, Homo sapiens
gcctgactttctgtctggttccttatacaaataattatgcagacaaagttttcctgtggttccagggataaagctcacatataaagtactctgcttgactrtttaagcttgggccagaatctctttaggctcatgaacacagctttcatatctgtgataaacagagtagaggggttgctgtatgtactatggagccagcta

SEQ ID NO: 139089 - DNA, 201 bp, Homo sapiens
cggttaatttttttgtatttttagtagagacggggtttcaccatgttggcgaggatggtctcgaactcttgaccttgtgatccgcccgccttggcctcccraagtgctgggattacaggcttgagccaccatgcccggctgcttcctgctcttaagtactttgttatataaagcccagagttctcacacaaaataaatctc

SEQ ID NO: 139090 - DNA, 201 bp, Homo sapiens
ttttttttttttaaagaaaaggattccactgataaaatttgaaaaccagtgttccacagaatcatagctgcaacatcctatagggctctccttggattcarctcagcattcagcctagcaaggctacaataggccccatgtggcatcaggttcaccatgaagctatgggacaggaaaacacagctttccagtgaggtggca

SEQ ID NO: 139091 - DNA, 201 bp, Homo sapiens
tatttgataaaaaagaatatctgtcatttgatgtatttttcctccaattacaagacccctaatggtagcttagagtcttcattattagctttaaagatgtmgaaaacaatttctcacttgtctgggcaaaataaatcaccatctatagctcttttcaggtcttccttttaggaaggggtcaagtcctatgctctttaacct

SEQ ID NO: 139092 - DNA, 201 bp, Homo sapiens
ctcaaggattttaatatctaataggggaaataacccatataagttacattaaacatacatatgaaagcaatgcttaaaaagttgtgcttttgggccgggcrcggtggctcacgcctgtaatcccagcactttgggaggccgaggcgggtggatcatgaggtcaggagatcgagaccatcctggctaacaaggtgaaacccc

SEQ ID NO: 139093 - DNA, 201 bp, Homo sapiens
tgatacagcagaacttacaggcagagttagcagtgttagctgagtttggctgataaaattctaagtccttggctgctttctattctttttttttttgagayggtgtctcactctgtcacccaggctggagtgcagtggtgcaatcttggctcactgcatcctccacctcccaggttcaaccaattctcctgcttcagcctc

SEQ ID NO: 139094 - DNA, 201 bp, Homo sapiens
tggtctgttaaatacactctctcatttaatctctggttctcaggtgattgttatgaagaggtctttgggtgttggctatgctgcagtggacaatccaatcwtctacaaacctaacacggccatgcttctaggtgatgccaagaaaacatgtgacgcgctccaggcgaaagttagagaatcctatcagaagtaaatattaag

SEQ ID NO: 139095 - DNA, 201 bp, Homo sapiens
tgtggttctcagatatcttctgtcatttcaatttttgaagtgattttcagaaaccagctgaaatttatctgattaaagtgttttaaatgatcaaataaacmttttaaaatgattccaaatatcatatacacaacatttgtactattctcacaaagttatgtgtgttaaactctcacagctgataatttggctttctaggca

SEQ ID NO: 139096 - DNA, 201 bp, Homo sapiens
cttttgatatttgttggtttaaagtctgttttatcagcgactaggattgtaacccctgcttttttttgctttccatttgcttggtaggtcttcctccatcyctttattttgagcctatgcgtgtctctgcatgtgagatgagtcttgtgaatacagcacactgatgggtcttgactctttatccaatttgccagtctgtgt

SEQ ID NO: 139097 - DNA, 201 bp, Homo sapiens
atcctgttattatgatgttagctggttattttgctcgttagttgatgcagtttcttcctagcctcgatggtctttacaatttggcatgtttttgcagtagstggtactggttgttcctttccatgtgtagtgcttccttcaggagctcttgtaaggcaggcctggcggtgacaaaatctctcagcatttgcttttctgtaa

SEQ ID NO: 139098 - DNA, 201 bp, Homo sapiens
gatggtctttacaatttggcatgtttttgcagtagctggtactggttgttcctttccatgtgtagtgcttccttcaggagctcttgtaaggcaggcctggyggtgacaaaatctctcagcatttgcttttctgtaaaggattttatttctccttgacttatgaagcttagtttggctggatatgaaattctgggttgaaaa

SEQ ID NO: 139099 - DNA, 201 bp, Homo sapiens
ttaaggtaggtgatttcttgggttctgttaacagaacgtagtccagttatagctgtggataggtgtgggctgggacactctgactgtgctccttcatgctytcctctctgagttggcttcatcctcagtgctgtgcagaaggcagcaacaatttcaggctccagtgtgtacaacacaatatctagaggaggtagtccagtg

SEQ ID NO: 139100 - DNA, 201 bp, Homo sapiens
cagtagctggtactggttgttcctttccatgtgtagtgcttccttcaggagctcttgtaaggcaggcctggcggtgacaaaatctctcagcatttgctttkctgtaaaggattttatttctccttgacttatgaagcttagtttggctggatatgaaattctgggttgaaaattcttttctttaagaatgttgaatattgg

SEQ ID NO: 139101 - DNA, 201 bp, Homo sapiens
ctgcctctggagtggtgatatgatttggttgtgcccccacccaaatctcatcttgaattgttgttcccataatccccacgtatcacgggaaggaccaggtrgagagaattgaaccaagggggcagtttcccccatcctgttctcgtgatagcgagctagttctcatgagatctgatggttttataaggagcttcccccttc

SEQ ID NO: 139102 - DNA, 201 bp, Homo sapiens
tccatgtgtagtgcttccttcaggagctcttgtaaggcaggcctggcggtgacaaaatctctcagcatttgcttttctgtaaaggattttatttctccttsacttatgaagcttagtttggctggatatgaaattctgggttgaaaattcttttctttaagaatgttgaatattggcccccactctcttctggcttgtaga

SEQ ID NO: 139103 - DNA, 201 bp, Homo sapiens
ttcagtctgtacaccaaataagttaacctatgtgaaagaatatgctattgttttaaaagtgattgaatttctgagcaataatagggacaaaacacccaacktatctctgttaagatgcaaacatgtccatgtgtttttcaaagttgtgttagccactgtacagttgttctgtggaggttgaatgagtgaaatcagaggaga

SEQ ID NO: 139104 - DNA, 201 bp, Homo sapiens
ctattttttttactgaaaatatatcagtgtgcaattgatttgatagggaaaaagataatgtggttctcagatatcttctgtcatttcaatttttgaagtgrttttcagaaaccagctgaaatttatctgattaaagtgttttaaatgatcaaataaaccttttaaaatgattccaaatatcatatacacaacatttgtact

SEQ ID NO: 139105 - DNA, 201 bp, Homo sapiens
gattttatttctccttgacttatgaagcttagtttggctggatatgaaattctgggttgaaaattcttttctttaagaatgttgaatattggcccccactstcttctggcttgtagagtttctgctgagagatcagctgttagtctgatgggcttccctttgtgggtaacccgacctttctttctggctgcccttaacatt

SEQ ID NO: 139106 - DNA, 201 bp, Homo sapiens
aggaaggttcagttgttgtggatttagctgctgaggctggtggaaactttgaaaccactaagccaggagaactctacattcataaggtatagcaagatgcrttttctatctgtgatcacttctcatgtcttgagttatgggggggtgtttatttctttaaatatttagagacattaaggcttgaaattttaaaattaaaaa

SEQ ID NO: 139107 - DNA, 201 bp, Homo sapiens
gctgagagatcagctgttagtctgatgggcttccctttgtgggtaacccgacctttctttctggctgcccttaacattttttccttcatttcaactttggygaatgtgacaattatgtgtcttggagttgctcttcttgaggagtatctctgtggtattctctgtatttcctgaatttgaatgttggcctgccttgctagg

SEQ ID NO: 139108 - DNA, 201 bp, Homo sapiens
gtggaaactttgaaaccactaagccaggagaactctacattcataaggtatagcaagatgcgttttctatctgtgatcacttctcatgtcttgagttatgrgggggtgtttatttctttaaatatttagagacattaaggcttgaaattttaaaattaaaaataggcatatttaaagctcctgttgaaatatgtatttgtt

SEQ ID NO: 139109 - DNA, 201 bp, Homo sapiens
attcagctgagagataaaattgttcaatcagcattcagacagtaataaatagatgtgattttttcattagtttattaattttattgataattttttcttgrtttctattttttttactgaaaatatatcagtgtgcaattgatttgatagggaaaaagataatgtggttctcagatatcttctgtcatttcaatttttgaa

SEQ ID NO: 139110 - DNA, 201 bp, Homo sapiens
gttggcctgccttgctaggttggggaagttctcccggataatatcctgcagagtgttttccaacttggttccattctcctcatcactttcaggtacaccartgagacgtagatttggtcttttcacatagtcccatatttcttggaggctttcttcatttctttttactattttttctctaaacttctcttctcgcttcat

SEQ ID NO: 139111 - DNA, 201 bp, Homo sapiens
taaatgcagtcatttatatatatactaaaaatatacatatatgtatttttgagacagaatctttttttgttgctcaggtaggagtgcagtggtgtgattayggctcaccatagcctcaacttcctggggttgaggaaggaagcttctcacttcagcctcctgagtagctgggactacaggcgcatgccaccacgcccagct

SEQ ID NO: 139112 - DNA, 201 bp, Homo sapiens
ctcccagttaggctactcaggggtcagggacccacttgaggaggcagtctgtccgttttcagatctcaaactccatgctgggagaaccactactctcttcaaagctgtcagacagggacatgtaagtctgcagaggtttctgctgccttttgttcggctatgccctgcccccagaggtggagtctacagaggtaggcaggc

SEQ ID NO: 139113 - DNA, 201 bp, Homo sapiens
ctccctctttcatattaaaaataagtatttttcttttatatgtatcaggaatgtatttgaacagcattcttcaaagaatgtgatttgctttctcttctttygtcagcctttctcttcctctgttatacagatatagaaatatagtctgacatacgttactaaatatattatagaaaatacattagtttattgaatagttga

SEQ ID NO: 139114 - DNA, 201 bp, Homo sapiens
tgaggcaggaaaatctcttgaacccaggaggcggaggttgcagtgagctgagatcattccactgcactccagcctgggtgacagagcaagactccatctcaaaaaaaaaaaaaaaagacatcactttaattctttcaccctcttatcctttaataatacacgtaaagacatttcaggttttattttgtatgtaacaatctt

SEQ ID NO: 139115 - DNA, 201 bp, Homo sapiens
tggaactttggatacatgatatgtgggtaggaaaataaattaaaactacagtcatattgaatgatttaatgtaaaattaatgtcaatccctagatattccrgtggtgccacttccaaagtaatagtttacatcaaggaaaaaggtaccttattcaggaaagttaacttctagttccctggtcacccactgtcattttcttt

SEQ ID NO: 139116 - DNA, 201 bp, Homo sapiens
aaagttaaaacagggaagaggacaaactacacagaggaaaatgtgcaaattgttattagtgtgactcataaatattactagatctttatagcttattttgkgggggtggtcagaaagttgggttttgtccacagtattcctccatccccccacttctcaactgtcaaatgtctaaaaaatctgctcattactggcaaggga

SEQ ID NO: 139117 - DNA, 201 bp, Homo sapiens
ccttccctgatagaatgtctccttgcttctgttctggggtacaggccagaaggaggagaggctaaaaaggggcccttctaaaccaagtcaactgtctgtcttttttttttttttttttttttaagcagcagcaagatttattgcaaagagcgaaagaacaaagcttccacagaatggaaggggacccgagcaggttgtccc

SEQ ID NO: 139118 - DNA, 201 bp, Homo sapiens
gatccattttaatttcagaaaatacattaacagggctgggcgcaatggctcatgcctgcaatccagcactttgggaggctgaggtgggaggctctcaagcscaggagttcaagaccagcctgggcaacatagcgagaccctatctctactttttataaaaaataaaatattactactaataaaaaagattaaaaaaaatgc

SEQ ID NO: 139119 - DNA, 201 bp, Homo sapiens
aaacacttctggtcccaagcatatcagataagggatactcaacctgtatacaactagtgcccttaccttctgtacagcccctgtagagaatatttagcccrtactaggaactagataatatttatttgtgacaatggtggaaatccttaagggtgatctttgttgtggttacttctcaaaagtttgtcaagttttaattta

SEQ ID NO: 139120 - DNA, 201 bp, Homo sapiens
gatattctgattattaggctatttttagtgaattgttgttggcctttgctagcagttgtttctttgataaaatttcaagatcagtggtggttcagttaaaraatagtctatgtactccatacagttactaagggctgatcatcattatcaccatctgcaccgccatttattgatgctaaacttatactaggcaccaataat

SEQ ID NO: 139121 - DNA, 201 bp, Homo sapiens
tctcatgtcttgagttatgggggggtgtttatttctttaaatatttagagacattaaggcttgaaattttaaaattaaaaataggcatatttaaagctccygttgaaatatgtatttgtttatgggtatgtatgtatattcataaagatatataattacaaaacttagcattgaatatgaatgataattgttctagaatga

SEQ ID NO: 139122 - DNA, 201 bp, Homo sapiens
ataaagtcagttatgattatgtagaatgacagtttcaatcacatgcagtgatttgaattcttaaaatgcatttgattactcagaacaactagttttttttyccctttcttttactaccccacctccagaggtctacaaatgaactgttttcaaaaccagatcagttactgtaacatatttcagcagtggcattcctatggt

SEQ ID NO: 139123 - DNA, 201 bp, Homo sapiens
gtgtgatctcggctcactgcaacctccgcctcctaggtttaagcgattctcccacctcagcctcccaagtagctgggattacaggcatgcgccaccacgcctgactaatttttgtatttttagtggaaatgggatttcatcatgttggccaggctggtctcaaactcctgacctcaggtgatctgcccaccttggcttccc

SEQ ID NO: 139124 - DNA, 201 bp, Homo sapiens
tgtgatctcggctcactgcaacctccgcctcctaggtttaagcgattctcccacctcagcctcccaagtagctgggattacaggcatgcgccaccacgcctgactaatttttgtatttttagtggaaatgggatttcatcatgttggccaggctggtctcaaactcctgacctcaggtgatctgcccaccttggcttccca

SEQ ID NO: 139125 - DNA, 201 bp, Homo sapiens
cagctctaggaggactatcaatgccgtttataaagtgtgttttcaagttgttttgcttggcatctgagtcatctgctttggtgatctaagggctcccagastctgagagggtatgggatatgggcctgcagagtaagaggccgtgggagtgtgtcagctctttgggctgctcccatttcaagcagtgcagagccactgtta

SEQ ID NO: 139126 - DNA, 201 bp, Homo sapiens
gtgatctcggctcactgcaacctccgcctcctaggtttaagcgattctcccacctcagcctcccaagtagctgggattacaggcatgcgccaccacgcctgactaatttttgtatttttagtggaaatgggatttcatcatgttggccaggctggtctcaaactcctgacctcaggtgatctgcccaccttggcttcccag

SEQ ID NO: 139127 - DNA, 201 bp, Homo sapiens
ggactttgaaagttccaacttgtaatataacagaccttcagctttgttctgaactctgtattttctatttcttttcaatggctgtcttttagtttcttctrtgtttccaacctgcagtatttattgaatgaacaattttttttttttttttgagaagagttggagcagtgagtcagaaagaccttagtctgaattccagat

SEQ ID NO: 139128 - DNA, 201 bp, Homo sapiens
tgatctcggctcactgcaacctccgcctcctaggtttaagcgattctcccacctcagcctcccaagtagctgggattacaggcatgcgccaccacgcctgactaatttttgtatttttagtggaaatgggatttcatcatgttggccaggctggtctcaaactcctgacctcaggtgatctgcccaccttggcttcccaga

SEQ ID NO: 139129 - DNA, 201 bp, Homo sapiens
ctgcctgggcatccaggtgtttctatgcatcttctgaaatctaggcagaggttcccaaacctcagttcttgacttctttgcacatgcaggctccacatcaygtggaagctaccaaggcttggggcttccaccttctgaagtaacagcccaagctataccttggccccttttagtcatggctggatggctgagacacagggc

SEQ ID NO: 139130 - DNA, 201 bp, Homo sapiens
gcttttggcttaaatgagtaatacatgaatatgctctcattgtaacaaacaaaaaaaggtaaaaacatgtgaaataaaaagcaaaaagctttttcctttcmtgtgtttagtaatttcgagttgtatcacggacattgttaatgatacattatagacattttggatgttatgttatattccttcaaagggtattgattatta

SEQ ID NO: 139131 - DNA, 201 bp, Homo sapiens
tttgacctttcataacaggattgacaattgccaaacgcatccagatttctgatttacctcaattagttgctgcttttcacagtttagtgggtttggcagcygtacttacttgcatagctgagtacattatagaatatccacattttgctacggatgcagcagcaaatctcaccaagattgtggcctacctcggcacttaca

SEQ ID NO: 139132 - DNA, 201 bp, Homo sapiens
accttggaaaaaaatgaggtggagtttctctttggatatatacacacacacacacacacatatacatacatatacacacatataacttatttatctggctyaatatggatgaatatattatataatatataatcttgtattaagactgaatatattaatatatgaaaatatatatatattgcaaatcctcaaataacgtca

SEQ ID NO: 139133 - DNA, 201 bp, Homo sapiens
atgaaacaaaaggaaatggcttcctgaaaacatggatgtgcatgtcatttcttttattacccataaaaatgaatattgtaggctgggcatggtagctcacrcctgtaatcccagcactttaggaggccaaggcaggtggatcacgagctcaggagttcaagaccagcctgcccaagatagtaaaaccctgtctctactaaa

SEQ ID NO: 139134 - DNA, 201 bp, Homo sapiens
catcacatgtcttctgtgatgtggagtagtattttatatcattctctgagtggctgtaggctttaacatcatgtgtatgacaacattttatctccctaccttttttttttttttttttgagacaaagtcttgctctgtcacccaggctggagtgcagtggcacaatcttagctcactgcaatctcctcctcctgggtacaa

SEQ ID NO: 139135 - DNA, 201 bp, Homo sapiens
gcttacaatcatggcagaaggtgaatgggaagcaagcacatcttaccatagcggagaaggggagagagtgaagggggatgtgccacacacttttaaagcascagatctcgtgagaactcactagcataagaacagcaaggcggaagtcagcccccataatccatcaccttccaccaggtccccccgtggcatgtggggatt

SEQ ID NO: 139136 - DNA, 201 bp, Homo sapiens
aacaaagcctatggcatgctgatatggggagaggagggaagaagacttgtttctagttcttgaaatgtcagcatgggtaatttctcattttatcctttttwaaaaatggttttctttaggtttttaaatttataaagagtattccccacatttctgtctgtgtctctcttattactctctttttccttcttcacttagtgt

SEQ ID NO: 139137 - DNA, 201 bp, Homo sapiens
aatatcatatagacattaacctctttatgattttacagtttctttgtttgtgatagtatccagattgcctcagaaatagaggtcttacaaaaattgaacarcattttcagatcgaattttctgatttttgcactttgctgcttggttccaaataaaaatagaacagaatgaagtggatcaaaagccaaatcaaaaatattt

SEQ ID NO: 139138 - DNA, 201 bp, Homo sapiens; identical to SEQ ID NO: 24744

SEQ ID NO: 139139 - DNA, 201 bp, Homo sapiens
aaaaatagctcactgcatcctcgagttcctgggctcaagtgatcctcctttctcagactcctgggtggttaggactataggcatgtgccaccacgtccagmtaagtttttttatttttgtagagatggggtcttgctatgtgctggtttggaactcctgggctcaagtgatcctccccacctcagcctcccaaattgttgg

SEQ ID NO: 139140 - DNA, 201 bp, Homo sapiens
tcttattaaggtgaaggaacaggatggatattttggggggcaacctttgtcacctagaataatgccctcttttgttttttaagtttgtaggactgtttgtsgattcattaaggacctctaaactgctaggtgttttgagatcttatgtctgccttgaatagattttatagcctcttttcttgttctcagatgacaagtcac

SEQ ID NO: 139141 - DNA, 201 bp, Homo sapiens
gtcttttttttttttttttttttttaagcagcagcaagatttattgcaaagagcgaaagaacaaagcttccacagaatggaaggggacccgagcaggttgycccccaagtcaactctctttcatcagtcttgcccaaagatcatcccagtacttctgtcacttcacctcactgtccagaactcagacatgtagctgtaagg

SEQ ID NO: 139142 - DNA, 201 bp, Homo sapiens
tggaaggggacccgagcaggttgtcccccaagtcaactctctttcatcagtcttgcccaaagatcatcccagtacttctgtcacttcacctcactgtccaraactcagacatgtagctgtaagggagacttggacattttgctgtaagggagacttggacattttgtcttttattctagatggcaatgtacccagctaaaa

SEQ ID NO: 139143 - DNA, 201 bp, Homo sapiens; identical to SEQ ID NO: 24747

SEQ ID NO: 139144 - DNA, 201 bp, Homo sapiens
gctgtagactggagctcttcctattcggccatcttggaacccaatcctcactggactctttttttaaaaaagttatctatgacagaaatatcttaatgtcygaaatagtcctttaaatcaattttaagggcaaaaatttggtagaacatatattttgataacaatttcagaactgtataattcaaaactagaaaggattaa

SEQ ID NO: 139145 - DNA, 201 bp, Homo sapiens
ctgtagactggagctcttcctattcggccatcttggaacccaatcctcactggactctttttttaaaaaagttatctatgacagaaatatcttaatgtctraaatagtcctttaaatcaattttaagggcaaaaatttggtagaacatatattttgataacaatttcagaactgtataattcaaaactagaaaggattaat

SEQ ID NO: 139146 - DNA, 201 bp, Homo sapiens
taaaagcatttctttagctgggcactgtggctcattcatgtaatcccagcactttgggaggccgaggcaggcagatcacttgtggtcaggagtttgagacyagcctggccaacatggtgaaaccacatttctaccaaatatataaaaagttagccaggtgtggtggcatgcacctgtaatccccactactctggaggctga

SEQ ID NO: 139147 - DNA, 201 bp, Homo sapiens
ttaaaatgcatttgattactcagaacaactagttttttttcccctttcttttactaccccacctccagaggtctacaaatgaactgttttcaaaaccagahcagttactgtaacatatttcagcagtggcattcctatggtacattcttgagtgattataaatgagcatgagaagttcatttattttatttttcttttgag

SEQ ID NO: 139148 - DNA, 201 bp, Homo sapiens
tatgattactaagtgaaaaatactgagaattctcagtttaaattaatattttggagatcacatggaaattctataaattcttacagtgggttctagccatrtctttctgtgattatgtgtacatgtttacatcattttcgagtcttttttcttctcattggtaatttttgggcccgttgtcaagattaaattagatatagt

SEQ ID NO: 139149 - DNA, 201 bp, Homo sapiens
ttgagtgttaaagtgtaagccttctcaacttgggacaatatcactttttaggggcatttgaaataggtggatttgggtttttggttgtccaaagatgggamtgctactgtcaattagtggatggaagcagataaatgaaatgtactgtaacgtgtgggacactgctgcataatgaatcatcacacccaaagtagcattggt

SEQ ID NO: 139150 - DNA, 201 bp, Homo sapiens
tatagtatgttgaattttcaacatgaactttgtaacaaattatgtaaatcttccatttgaattaaatggaagaggactattcttgctaaaattatgacagyagatcatcatatttttctgtgtgaattttttttattgaaagagatttgtagaaactttgtgattttgctttgtgcgtgtgttagcttttcacaggagaaa

SEQ ID NO: 139151 - DNA, 201 bp, Homo sapiens
ggaccccagcatgcctagcatccagatgtggtgacatattcacacacatcccctgtggaaatgtgccagtgtggacatatgattgtcatcaattagttatrcccaagtggtgccaagaaaaatcgcatctgtcatacagtctgtctggcttcatggcccatgattgatttagagacactcctgttttcctttactttgccc

SEQ ID NO: 139152 - DNA, 201 bp, Homo sapiens
aaatgtttttcatgtttaaaagacaaatagtttttttcttggcatatatacatcctattttcttttttcttagtgatttgccttcaaggaaactggggagycagaaaattgggaactcatatcaacatggcaaacctattgaaaacagtggtgactggctgctcgtgtcctctacttagcaatttggggtcctgtaagggt

SEQ ID NO: 139153 - DNA, 201 bp, Homo sapiens
ttacatatctgttaaattgtcaccttggatattctggaggactaaatacatcctttagggggaaaagtgtgattgtatcaaagttttaagcatggagtgtrtgggatggtggaaggggaaggcacttggtatctgttggttggcagtgagtagggtgggaaagttataatggagaacttagaataactttgatcatttcat

SEQ ID NO: 139154 - DNA, 201 bp, Homo sapiens
ccctgaaaggtaggaggcccctgggaagggagccctccctgaaccagcctggttcaagcatattctgcctctctacaggacagtctgggcttgtacaatcrtttgcttgtctttttatgtttaaaaggttttttcaaatcatgaaattgatcattgtcacactttacaaaccacagactagataaaagaaaactatagcca

SEQ ID NO: 139155 - DNA, 201 bp, Homo sapiens
tcttctttttttctatccatggaataaaaaattaagaggaaagaatgttaatagaatcgcattatttcttcaaaatacgttgtgagttttaaaagtattayctaccttttttattatactttttttagggtacatgtgcacaacgtgcaggtttgttacatatgtatgcatgtgccatgttggtgtgctgtactcattaac

SEQ ID NO: 139156 - DNA, 201 bp, Homo sapiens
taaatgatattatgtttttcttgtattttcagatattgattgttggtacatagaaacatgcttggcttttgtttgttgatcttgtatcatagaaccttgcmgagctgacttagtatttctagaagtctttttgtatattcttgagattttatacattgacaattatgtcacttgaaaatagagacaattcttttatttcct

SEQ ID NO: 139157 - DNA, 201 bp, Homo sapiens
ttttcctaatttgcctctctgggaccaaccttgtgggactagcagattcacggttgagttgatggctggtgatgtctgccatcagcctttcttcttcctcyagtcttccacccctcagtaacatcagactgggaaggtcttcagatatccagaaccctcagttgggggagtccatacatgacccatcaaagatgagttgca

SEQ ID NO: 139158 - DNA, 201 bp, Homo sapiens
tgcctctctgggaccaaccttgtgggactagcagattcacggttgagttgatggctggtgatgtctgccatcagcctttcttcttcctccagtcttccacycctcagtaacatcagactgggaaggtcttcagatatccagaaccctcagttgggggagtccatacatgacccatcaaagatgagttgcaagcaggcctgc

SEQ ID NO: 139159 - DNA, 201 bp, Homo sapiens
caacttaagatgaaggtcctcaattatgtccttatgggtcataagtgtccaaaatgtaaggactcttttaaaaacacatgatcacaatgctattattatgycccacaaatgaatattttttcctgaatataatcaaatcttcaggaatcaaatttgaataaaaaacatgcgtctaatcttcaaagaatttataggttagtg

SEQ ID NO: 139160 - DNA, 201 bp, Homo sapiens
ttatgggtcataagtgtccaaaatgtaaggactcttttaaaaacacatgatcacaatgctattattatgtcccacaaatgaatattttttcctgaatatamtcaaatcttcaggaatcaaatttgaataaaaaacatgcgtctaatcttcaaagaatttataggttagtgcaacagatagacaaagaaagcagtgatgaca

SEQ ID NO: 139161 - DNA, 201 bp, Homo sapiens
ctgatctgggagaggtcgatagagaaaaaggcacatgtaccttgactatgccttcagctccagccacctgactaagaggaaattgttgggcaggtggaggwgggctagtctcggaatgaaactgtaaggtggagtgggtgtgaggaggggaggtgatacttctattatagggtgggggagcagaggatgaggaagaattgg

SEQ ID NO: 139162 - DNA, 201 bp, Homo sapiens
ggcaggtgtcctggcagtgatttagacaccaagggaagactgttcccgagtccatgactggcgccagagttttgagttcatggataaaacgtatctcctcygtctctaccagaaagggaaagaaactgaaattaaggaagggagagattgaagggtggagggatagcaagagaggttggagaagagaataaaaagaggccg

SEQ ID NO: 139163 - DNA, 201 bp, Homo sapiens
gcacccactgtcctgcacccactgtctggcactccctagtgagatgaacccggtacctcagatgaaaatgcagaaatcacccgtcttctgtgtcactcacrctgggagctgtagaccggagctgttcctattcggccatcttggctccaccccccgagttttggcttttaattgaaagtgtattgatgtgggaaggagata

SEQ ID NO: 139164 - DNA, 201 bp, Homo sapiens
caggagctcttttagggcaggcctggtggtgacaaaatctctcagcatttgcttgtctgtaaaggattttatttctccttcacttatgaagcttagtttgkctggatatgagattctgggttgaaaattctttcccttaagaatgttgaatattggtccccactctcttctgccttgtagagtttctgccaagagatcagc

SEQ ID NO: 139165 - DNA, 201 bp, Homo sapiens
ggtcactaaggacttgctttatgaatctgggtgctcctgtattgggtgcatacatatttaggatagttagctcttcttgttgaattgatccctttaccttyatgtaatggccttctttgtctcttttgatctttgttggtttaaagtctgttttatcagagactaggattccaacccctgcctttttttgttgtccatttg

SEQ ID NO: 139166 - DNA, 201 bp, Homo sapiens
ctgcagctcccagcaagattgaggcagaagataggtgacttctgcatttccaactgagtcttagcaacaggcagaccaggagataccctcccgtgcctcgmtcggcaggtgccacacccacggagacttgctcactgctagtgcagcagtctgagatccacctgatatgctgcagcttgatagaggaggggtatcagccat

SEQ ID NO: 139167 - DNA, 201 bp, Homo sapiens
aacaggaaagtttgtttttcagtttcagtgaaaacgctgagcaagtgttgtaatttgctgtgtccaatgtgtagaggggacattttctcagaacttccatrttaagctggaaaactggaaagtgagtccactttgtcattctgtcactcactccttttctcactcaacaacatgcctcagacttatctaaatctgctagac

SEQ ID NO: 139168 - DNA, 201 bp, Homo sapiens
tggatataactgagatgagatagtggttatctatcaaactcagatatttaagcataaaatgaatttgtggttttttttttaaacaaaggcagaatcatatrcaaaatcactagaaaggtgataatttgatgaaattattaaatatttaattttgctgaataaaatgtcatatgtgccacatggactgtgaactttggtcga

SEQ ID NO: 139169 - DNA, 201 bp, Homo sapiens
ttattcctccaccaacaacaaactggtgactctaatacctgtacagtaactcttagcatcatgtagagtgattcttcccacttttatggatgtattttttyagatttgttttagctcttcctggtcctctgcttttccataaaaattcagaatgagtctctcagtgtctataaataaacatgctgttattttaacaagaat

SEQ ID NO: 139170 - DNA, 201 bp, Homo sapiens
tgaatcctctccaaaaaatgctaaatcccctgaaggtatttccatggctctaccccagctcttactccccatgacatcttttgcagctttgggagtcagarcaaaggtgttctgctttacttcttttatttcaaaggctgcaccttatgggtgagtctgagcagggagtggatataactgagatgagatagtggttatcta

SEQ ID NO: 139171 - DNA, 201 bp, Homo sapiens
ttttggaaatgtgggcatattgttaaaaattaattgggcatgtttctttgcatctttcatttgctattctgtcccattgatcactgtgcttattcctccaycaacaacaaactggtgactctaatacctgtacagtaactcttagcatcatgtagagtgattcttcccacttttatggatgtattttttcagatttgtttt

SEQ ID NO: 139172 - DNA, 201 bp, Homo sapiens
cctgctactatcctacagtcacgagtgtttttctctgagagggtctttatcagggaaaactttttttattttgaggaggccaatgtattaatattttttttatggattgtgcttttggtgtcaagtctgaaagttctttgcctagccctccttcctatattgccaatttttctaaaagtcataaagtttaatgctttacta

SEQ ID NO: 139173 - DNA, 201 bp, Homo sapiens
aaatcctattgagcatctgtcatagggcctgtcacttagtagacagtcactaaatatttgttaaatacatgatgcctgtttaacacattttctacaaccawggagacctccacaactgatgtaggacaaaatctttctgctttgaactctagcctttcgggccagtgggatttatgaaaaatgccatctctatagctgagg

SEQ ID NO: 139174 - DNA, 201 bp, Homo sapiens
ggcctcagccaactgcagcagctgttccctgtcagaggggctagaggtttggcaagagcggtggaagaggtgcagtggtgtgttcgttcactagaagcatyagggagaaggttttgcctgtttgtatttcatcttctctcatcaagtcctcagaaaccacagtgctgtctgcagggtgctgtggatctggcatggcccata

SEQ ID NO: 139175 - DNA, 201 bp, Homo sapiens
gtagacagtcactaaatatttgttaaatacatgatgcctgtttaacacattttctacaaccatggagacctccacaactgatgtaggacaaaatctttctrctttgaactctagcctttcgggccagtgggatttatgaaaaatgccatctctatagctgaggatgaagaatggaagagaatacgatcattgctgtctcca

SEQ ID NO: 139176 - DNA, 201 bp, Homo sapiens
aatttttcattctgttttattattaactttaagccaagactttttaatagaaggatatataaatacatctttgtctatacatttctgctgaatttgaagaratgctgaatattcttaaaccattgtgttccctggtgggctgatggactgtgattttataaggtggcctcagccaactgcagcagctgttccctgtcagag

SEQ ID NO: 139177 - DNA, 201 bp, Homo sapiens; identical to SEQ ID NO: 24780

SEQ ID NO: 139178 - DNA, 201 bp, Homo sapiens
tctaaactaggctgagaccattgtggttaccacttttctccaagctttggtggcccagggactcccagcatcacgttctgtccagtgtctgcctattcccytcttctttttttcttcccttgatgcccttttatcacatgcattgtctcagacccttcgaatatgtgctcataaatgcatggcatcatctccttcccacat

SEQ ID NO: 139179 - DNA, 201 bp, Homo sapiens; identical to SEQ ID NO: 24782

SEQ ID NO: 139180 - DNA, 201 bp, Homo sapiens
gttaagctggaaaactggaaagcgagtccactttgtcattctgtcactcactcattttctcactcaacaaacatgcctcacacttatctaaatctgctagrctaaaagaggtccctggtgtctgtaactttctaattctgctagaattctagagtgagctcatgaaataaatgaaaaggatgaagaacaaagagaaaaaag

SEQ ID NO: 139181 - DNA, 201 bp, Homo sapiens
tccacattatttgtggctttaggccagctatgtagctatcctgtatgtgtgctcagacaggagactcagccctgagagaaggcggtcctctggcacacctrggatggggaaggtactcccttggaagtcccaagctggcacttctggatctccatggcaattttcttgcccatcactccatggagatcagaatatcactct

SEQ ID NO: 139182 - DNA, 201 bp, Homo sapiens
attatcttataatttcataatttgccattaaatcattgagttttgttctctatattttctctttatctaagaatgtcttcccccctccattaacaatatcytctcattttattccatttaaaatatcccagtggtgccttgcaagtgacctcatctaactcaagcatttggtcatttggtaaatgtttaaggagtgatatg

SEQ ID NO: 139183 - DNA, 201 bp, Homo sapiens
aacaggaaggttttttttttaagtttcagtgcaaactcggagcaagtgtcataattttctgtctccgatgtgtagaggtgacattttctcagaactttcaygttaagctggaaaactggaaagcgagtccactttgtcattctgtcactcactcattttctcactcaacaaacatgcctcacacttatctaaatctgctag

SEQ ID NO: 139184 - DNA, 201 bp, Homo sapiens
cagtgatcagatacctctgaaatgtgggtgaataaccaggcaggtgtcctggcagtgatttagacaccaagggaagactgttcccgagtccatgactggcrccagagttttgagttcatggataaaacgtatctcctctgtctctaccagaaagggaaagaaactgaaattaaggaagggagagattgaagggtggaggga

SEQ ID NO: 139185 - DNA, 201 bp, Homo sapiens
ggtacttgccacccagggaaggtggtgcttgccacccagggaaggtggtacttgccacccagggaaggtgatacttgtgacccaggggaggtggtacttgygccaaggtgaatgatcaaggcaggcatccccacagtgatcagatacctctgaaatgtgggtgaataaccaggcaggtgtcctggcagtgatttagacacc

SEQ ID NO: 139186 - DNA, 201 bp, Homo sapiens
ttccaaagccatttttggaaatgtgggcatattgttaaaaattaattgggcatgtttctttgcatctttcatttgctattctgtcccattgatcactgtgyttattcctccaccaacaacaaactggtgactctaatacctgtacagtaactcttagcatcatgtagagtgattcttcccacttttatggatgtatttttt

SEQ ID NO: 139187 - DNA, 201 bp, Homo sapiens
ctcaagaggaaggtctgagattttatactttcagaaatagcgtgtaggcatcacccagagcgtggcaaagtttaccctggggctctcttgctaactctcargaacctcaagtttgcctcagttggacagcccaaatgtcaagtagatccagcaatctgatgttcacaacttgatgtgcagactttgtgagcaccataaaga

SEQ ID NO: 139188 - DNA, 201 bp, Homo sapiens
tttgctattggctgcagctatagccctgcctccttctccagcacataaatctttcagcagcttggctgaagactgctgtgcagggcagggaagctccaggyaaacagcccagcaaacagcagcactcagctaaaaggaagactcacagaacacagttgaagaaggaaagtggcgatggacctcatcccaaatttggcggtg

SEQ ID NO: 139189 - DNA, 201 bp, Homo sapiens
ctaactcagctttgccttcatgagccctggagtccagccaaaagatatctgcaggtcaggggggcaagaaggggtaacccaggtgtcactgaagattgtayagatttggggaatgttgcagtatttgaaagtgctcccaccaaagctgctgacaagttctggaaatgtcaggagaataatctttgtggacattggtgatga

SEQ ID NO: 139190 - DNA, 201 bp, Homo sapiens
ccttaatgttacctccttctcttgagcattccagttcctcagtcagtgacttaccagcccccatatctataaagtcacaatccctgagacctgatttctgwttcagtttgtagatatggagcccattcacatggactttttaagaagcttggcattccagggcccacacctctgctttttttgggaactactttgtcctac

SEQ ID NO: 139191 - DNA, 201 bp, Homo sapiens
gccatagggagcagcagccttaatgggttttcctacagagatacttgatgtgcagaggcaataaactgactgctttgtgattgatcaccttgaaaaaagtragcatatctgggtgtattagtcctttcctacatcgctgtaaagaaatacctgaggctgggtaatttataaataaaagagatttaattggctcatggttct

SEQ ID NO: 139192 - DNA, 201 bp, Homo sapiens
catgtaattcatccacttaaaatgtacagtttaatggtttgtagtacatttgaagatatgtacgaccatcaccattgtaaactttaaaacacttctgtcaytctagaaacctcatacatgtttagctatcaaccccctgccagaaatcctgttgtcgtatataaccactagtcaactttctgcatctatagatttgcctat

SEQ ID NO: 139193 - DNA, 201 bp, Homo sapiens
cgccaccttttctaggtcagttctttagtagatgtaccccccaagataaacattcctgggatctttgtttgcacaggtaaaacatcaaccctgaaatgtaraaaacaggaaagtttgtttttcagtttcagtgaaaacgctgagcaagtgttgtaatttgctgtgtccaatgtgtagaggggacattttctcagaacttcc

SEQ ID NO: 139194 - DNA, 201 bp, Homo sapiens
cataatggaatgtcgtaagattgctcaatcagttaagacaggagctggctgtttcatttcttttgcagttttcagttgcctcaggccatctggatgtacaygtgcaggcttgggctcagaggcctgacattcctgtctttttatattaagaaaaataaaacaaaatagtggcaaagtgttggggcagcaaaaatttttggg

SEQ ID NO: 139195 - DNA, 201 bp, Homo sapiens
agatattacatggctggagcagaagcaagagagggtggggaggaggtgccacacacttataagccaccacatctcataaaaactcattgtcacgaggaaayacccaaagggggttggtgtgaaaccaggagaaactgcccctaagatacaatcgccttccatcaggccccaccaccagcattggggattacatttccacat

SEQ ID NO: 139196 - DNA, 201 bp, Homo sapiens
gctgggtaatttataaataaaagagatttaattggctcatggttctacaggccctacaggaagcatagcgacttctgcctctagggagccctcaggaaatkttcaatcatggcagagggtgaaggagaagtaggcagatattacatggctggagcagaagcaagagagggtggggaggaggtgccacacacttataagcca

SEQ ID NO: 139197 - DNA, 201 bp, Homo sapiens
gaaggtgcctgtctttcagctgaaagcacacatgacgcatatggatccatttatatacaccatacttttcagccacattttcctaatttgcctctctgggrccaaccttgtgggactagcagattcacggttgagttgatggctggtgatgtctgccatcagcctttcttcttcctccagtcttccacccctcagtaacat

SEQ ID NO: 139198 - DNA, 201 bp, Homo sapiens
ccttaggccaacacaattacgtgcaatagatgactggcttttctgttagcctcttcattggaaccaaaagtggtattactctaccaaacagaggggagctrgaaagaaactaaacagtttgcccagcacagcctctgccttgacatggaaccatgtgagtctagacactcacctagatctttccttgggggacagtgctgc

SEQ ID NO: 139199 - DNA, 201 bp, Homo sapiens
aacaggttggcatctcatctgcttcaagcctggacacagggacatcaaatgtgtcactgtgtgcgtggtctgccatgttgtggggcggtcactacagactygggcagccaggcagacaatgccttagccttagacaatgctggtgcagcccaggagtcagaaactgtagtgtagaccatgccctccttaggccaacacaat

SEQ ID NO: 139200 - DNA, 201 bp, Homo sapiens
gtctaaagcatgaatgtatatcgctaagacaagactgcgatatacatatttatgtatatctttttatatttaaaaagatatgtctttttaaatatacatgyctgacagtttattttaatacctcctttttgaatatacctgcttagcaggttatcttaaactgtcaggcaggggagtaagcaatactgtgagctagtgatg

SEQ ID NO: 139201 - DNA, 201 bp, Homo sapiens
cattgtctaacattttaaaatgaattgatatggtttaaattcattcatttttaaatcagaattttttggagatggaatatttccagcatgttccttctggrtgatgaaagagggctgttagttcagtatttgtgacaataaatgtgtgtaaaataacatcacctctccagaataatgtcaggaatatgagtctaaagcatg

SEQ ID NO: 139202 - DNA, 201 bp, Homo sapiens
gtcctaattcaattcccaagcccctccaaggtgtcttcttgacctagtccagggctcatttactcctctgctctgttattagttactggaggctattatcwtataatttcataatttgccattaaatcattgagttttgttctctatattttctctttatctaagaatgtcttcccccctccattaacaatatcctctcat

SEQ ID NO: 139203 - DNA, 201 bp, Homo sapiens
cagcctgaaaaggcaggagctgtgaaagccaatttggattttacacattttttcccctttgtgttacagtaaaggaggatgaaccctctcactggtgggaytcctggcatcctagagcaggtggagagaagagttactttccactgtggttagtggaggctccacctgtcccattaacttctacctcaatttgacttttaa

SEQ ID NO: 139204 - DNA, 201 bp, Homo sapiens
gcctagctccaaccaactgggctccttttcaactcaattataactctgctaatcttctttcctttcttctcctcattctgttcttatctttcaagtcctarttcaattcccaagcccctccaaggtgtcttcttgacctagtccagggctcatttactcctctgctctgttattagttactggaggctattatcttataat

SEQ ID NO: 139205 - DNA, 201 bp, Homo sapiens
ctctgtggacctggtggttcctgctcccctaacttccaccccaggatatcatttacataacacaccggggaacaccaagacttcacgggaagctgtccccyggctctttcctctttcctgtgccatgtcccaaaacatcccctccctcctatgactcactcctccaccctgtcatacacagaactatttaccttgcaatga

SEQ ID NO: 139206 - DNA, 201 bp, Homo sapiens
tgaaaaagagcctaaacgctgactgatctgggagaggtcgatagagaaaaaggcacatgtaccttgactatgccttcagctccagccacctgactaagagraaattgttgggcaggtggaggtgggctagtctcggaatgaaactgtaaggtggagtgggtgtgaggaggggaggtgatacttctattatagggtggggga

SEQ ID NO: 139207 - DNA, 201 bp, Homo sapiens
tgaaagtaagactcagaggagacagttgaagaaggcaagtggcgatggacctcatcccaaatttggcggtggaaacctggcttctcctggctgtcagcctkgtgctcctctatctgtcagtaactgtccagattcctctcctctgttaacttggacttggggtgctactcaggcccctgttccctcatctgttttaaagat

SEQ ID NO: 139208 - DNA, 201 bp, Homo sapiens
cttttggcatttgaagcaaggtccatgaggaggttttgaaggagcccctgggagctgtggcttggatgttctgaaggttttgtatgctggagacatggtcktgggttgtcttacactggaggcaagtagctataattcagagatgcattgtcacttggccgcctcttctctattatgatacaccttgaaggtgaggctatt

SEQ ID NO: 139209 - DNA, 201 bp, Homo sapiens
tgggaagaaagtaaatcatgagagagagcttggctgaagtaatgagggctgtcccagaagccttgtggcagtacagcccaggtaagctgctgggactgatrggtgtcagggtcagtttaggtaaaagcaaagagaggctgggatgtgtggtgcaggggaatagtgaaaaaagcatctttaagatcaagaatggaatagtga

SEQ ID NO: 139210 - DNA, 201 bp, Homo sapiens
ccaaaggcaaaagtatccaaccatgcccaggaaggaaaggagttgttttgtagaaggggttggggtttcagagatcagccagacatgatcagcagggagascccatgtgttttcatgaagaattatgctgaggtacgtaacggatggagaagaaatttgagctttggagggggatacccgatatcctttggagagtaaatg

SEQ ID NO: 139211 - DNA, 201 bp, Homo sapiens
cggtcccagtccttgtgtaagaattccagctgcacagccctgcacttcggctgtgtgtaatgaaaagagttgggatgagtcaggaagagctagtatgggarcagcctctagagctgtcttcaaggaatggaaagaggagtgaggaaaggatttaggacttatggggtcagctaggtttccctttgtgagtttatataatgg

SEQ ID NO: 139212 - DNA, 201 bp, Homo sapiens
aaagaaggaaatatggggaaatagagtgaatgtcagatggatcagagagatacagtcatggggataaggtgtggtatcaggaataatgtgggaggccagaytgaagcccaggccaggtacaatggtaattgtgggagactcaacagagagtgggtattgctaaaggagctggggaacagaaagtatatgcatcaggtgtga

SEQ ID NO: 139213 - DNA, 201 bp, Homo sapiens
aagaagggggaatgggaggagagtctgaagaacaaggggaaggtagccaagaatggagtgaaatacagggcaaatgtcttaagggaaatgagaagttctargagggggctagttgcttgtaacctacatggaagaggtcatgaaatgacaacagaatagaatgggcctgtgagactggaaggagatatttttcttggtcta

SEQ ID NO: 139214 - DNA, 201 bp, Homo sapiens
caatagtggaagcagaaagtcctaaccctacaagtagagggattagaggaataactcatttttgtctggttggtgtcatgagggggacaggaagttgttcmgtcccatttgcaaattgaattttttcaatttgggaataagaaatactagtgtacatgtacctgtccaattagcagatagacatatgtacgtggtggagcc

SEQ ID NO: 139215 - DNA, 201 bp, Homo sapiens
gtctgcaaaaaagatgttgaaatcaatgggatgtttattcccaaaggggtggtggtgatgattccaagctatgttcttcatcatgacccaaagtactggasagagcctgagaagttcctccctgaaaggtaggaggcccctgggaagggagccctccctgaaccagcctggttcaagcatattctgcctctctacaggaca

SEQ ID NO: 139216 - DNA, 201 bp, Homo sapiens
tgatgggtgaggtttggttacataaaggggatttatcaaagaagtaaatatattaaggatgatagaagccaggcttctcatctttgaagaacggagtcatkgattcagaaagggagaaaactagcatgaatcctatgaaattagattggaatggatgtattcgtgtatattcatacccttctagatggatagatgggtaga

SEQ ID NO: 139217 - DNA, 201 bp, Homo sapiens
aaagtaagatcagagttcctttccgaggagtagtctgctgaatttgagcttcctaaaaatagtctttttatgtacagaaaacacatcataaaattcattayacaatgtcacttattgttccatgccaggcaaagtcatgtccttctgggacttatgtctgcacatttaactatgggtggtgttgtgttttgtgcttagatg

SEQ ID NO: 139218 - DNA, 201 bp, Homo sapiens
atcacctacataagatcaaatgccagttctcagcctcctccagatccacagaattaaagtttcttcctggaaatttattaggtttctgcaaaaataattgyaatttttgtgattgctttcaatggcaaaaaccgcaattacttttgcagcaacttaatgcatctaacacctaatcaggagccatgctatccaaataagggc

SEQ ID NO: 139219 - DNA, 201 bp, Homo sapiens
actgattaagttgtttatgattccccatagaatatgaactcaaaggaggtaagcaaaggggtgtgtgcgattctttgctactggctgcagctgcagccccrcctccttctccagcacataaacatttcagcagcttgacctaagactgctgtgcagggcagggatgctccaggcagacagcccagcaaacaacagcacaca

SEQ ID NO: 139220 - DNA, 201 bp, Homo sapiens
tgtgagggggataggaggcacccagaggaggaaatggttacatctgtgtgaggaggttggtaaggaaagactttaatagaaggggtctgtctggctgggcktgcaaggatgtgtaggagtcatctagggggcacaagtacactccaggcagagggaattgcatgggtaaagatctgcagttgtggcttgtggggatggatt

SEQ ID NO: 139221 - DNA, 201 bp, Homo sapiens
agaggaaataggacaataggactgtgtgagggggataggaggcacccagaggaggaaatggttacatctgtgtgaggaggttggtaaggaaagactttaayagaaggggtctgtctggctgggcttgcaaggatgtgtaggagtcatctagggggcacaagtacactccaggcagagggaattgcatgggtaaagatctgc

SEQ ID NO: 139222 - DNA, 201 bp, Homo sapiens
acctgatttacctaaaatgtcttttctctcctttcagctctgtctgatctggagctcatggcccaatcaattatctttatttttgctggctatgaaaccamgagcagtgttctctccttcattatatatgaactggccactcaccctgatgtccagcagaaagtgcagaaggaaattgatacagttttacccaataaggtg

SEQ ID NO: 139223 - DNA, 201 bp, Homo sapiens
cagcaaaaagaacaaaactggagaaatcttattacctgacttcaaattatactacaggggtataataaccaaaacagtatggtgtttgtataaaaacagayacattgaccaatgaaatagaatagagcacccagaaacaagtccacacacctggagtgaactcatttttgacaatgttttcaagaacatacactggggaaa

SEQ ID NO: 139224 - DNA, 201 bp, Homo sapiens
aatgtttggaaatgatatttgaaaaagaccctccaaatgataactccaaattattttcaaatgatatttgcaaaaacctaaagactccaccaaggaactaytagaactgataaaatattcagtaaagttgcagttgcaggatacaaaatcaacatacaaaaattagtagcatttctatatgccaatagtgaacaatttggc

SEQ ID NO: 139225 - DNA, 201 bp, Homo sapiens
gcatgaatcctatgaaattagattggaatggatgtattcgtgtatattcatacccttctagatggatagatgggtagataggtgatagataacagatataygatagatatatagatagatgaaatgtatacatgtgtttgtgtgtgtgtacaaaaaaaaccatatatttcctacttctcttcactgataggtctaggtaac

SEQ ID NO: 139226 - DNA, 201 bp, Homo sapiens
gccactgaactccagcctgagtgacagagtgagactgcatctaaaaaataaaattatgcctttttgtagcacatatattttgtaacatacaactgaagccmgtattatattattagttttcatttaatgttttcagcccatctcccctgatatttctgggagacaggaaatatgttttcttacacctcttgcattccatcc

SEQ ID NO: 139227 - DNA, 201 bp, Homo sapiens
gatgagacacagtggctcacacctgtaatcccagcactttgggaggccaaggcaggcagatcatctgaggccaggagttcaagaccagcctgaccaacatrgtgaagccccctttctactaaaaatacaaaaattagctaggtatggtggcacacgcctgtaatctcagctacccaggaggctgaggcaggggaattgctt

SEQ ID NO: 139228 - DNA, 201 bp, Homo sapiens
ttaagttttttaatgtgaacatttagcaaatgacattcatgtatttgcatgtgtgtgtgcttgcacatgtgcacatgcatgtctgtctgcagggaaaatatattcatgccttttgaaaatttttaaataatgtgttatatttatagaaagatttggaaccttttctctgaagaagttaaagaacagatgtcattgattcat

SEQ ID NO: 139229 - DNA, 201 bp, Homo sapiens
gtcactggatttgtacagaatgtttggaacctatactgccttaatggctaccctttaaagaagagaaaacaaggtcttaattcaactatctggaacattttatggttacttatgtggaatactccatcttttgctatcaacaggaaggtacctggccattagaaggtgcctgcctttcagctgaaagcacatatgaggcat

SEQ ID NO: 139230 - DNA, 201 bp, Homo sapiens
cccaggattcagaagctatagtgtagaccatgcccttcttaggcctatacaattacatgcaatagatgatggatttttctgttagcctcttcattgtaacmaaaagcagcattactctaccaaacagaggggagctggaaagaaactaaacagtttgccaagcacagcctctgccttgacgtggaatcatgtgaatctaga

SEQ ID NO: 139231 - DNA, 201 bp, Homo sapiens
tagaggttatgatggatgttttgcagatctataaaggaataaataagcatctcccccattcatctttagtggaaagaagggtttagggacagcattgattraggataatctaatagacaatggtttgtacccagcttaccaaaccagaatttggattttacatttttccctttaagttgcaggagaagagggtgaatcttc

SEQ ID NO: 139232 - DNA, 201 bp, Homo sapiens
gtaacttctagaaagtgtagaagcagagattagtgtcattgatttgccatagctgtgacaataaaagaaggaacaggagtagaaaacccaaggccaccctrgtttcagtagatggtgcacacatttccactaactattctggggcaaggatccaaatgcactatatgctgcctctgctgggatctccaaacacgaccctcc

SEQ ID NO: 139233 - DNA, 201 bp, Homo sapiens
gttactgttattttttattgccttaatgttacctcctttgcctgatcattccagttcctcagtcagtgactcaccagcccctatatctataaagtcacaawccctgagacctgatttttgtttcactttgtagatatggaacccgtacacatggactttttaagaagcttggaattccagggcccacacctctgccttttt

SEQ ID NO: 139234 - DNA, 201 bp, Homo sapiens
gagttacttagtatttatacacaaggataagacattcagtatcgacaacacttaaagaaaattcaagagtgattttaaatttcccatttcaaatacctccyctattttgtttcctttctcttatgacatctctaaataagcttcctctaactgccagcaagtctaatttcattggatttgactgttttcaaccccaattag

SEQ ID NO: 139235 - DNA, 201 bp, Homo sapiens
tgtttttgtttgtatatataacaaaaagagttatgaaccagaagtttggccaataatccttgtcgcacagagaatttgctttttctatctgttttcacttycttggttacagacgtgtaacctcttttttgaatggtgacaatcactttgtcatattttatttgatgctagtggtcatagcctattagtcatgtttgcttc

SEQ ID NO: 139236 - DNA, 201 bp, Homo sapiens
tatctatcatctgtccatcaatcatctatttatctacttactgattatctagctatcatctctctatctatcccaatacaacttgctgtgataaaggaaakagcctactgttttagtgtttcatctagaaatcactagacacatatagctattgagcactgcacatgtggctagtgccactgatgaaaaattttaagttgt

SEQ ID NO: 139237 - DNA, 201 bp, Homo sapiens
tgttcagtttcaagccaccaagatttggcaatcatgtcacaaaattcctgaatatttaatcattggttctagagagcaggagtaggctgactttggcatasagatttaaatatgtccatgtctacatctacttctgtctgtctgtctatctatctatcatctgtccatcaatcatctatttatctacttactgattatcta

SEQ ID NO: 139238 - DNA, 201 bp, Homo sapiens
tatgtgtgagtttcccaattttcgttaccttattgattttagctttatcctatgataggtgacagagatacactgtgttatttctatctgatttcttgaasagcatgattaatttaagcagcaaattatgatttgggttatcctaagagaccctagcccaatacataaaggcaaagagattagggcattgaattttgttcc

SEQ ID NO: 139239 - DNA, 201 bp, Homo sapiens
tcctcaatggtgggattctcacccacaatcctatggggacaattccaaaacaattgggggcacagaacagcatgactccaacattccaaagtcagcacaawgggggatcactcataataacaaaagaaaaaatgcagccaggcgcagtggctcacacctgtaatcccagcactttgggaggctgaggcaggtggatcatga

SEQ ID NO: 139240 - DNA, 201 bp, Homo sapiens
aatgaaaataggattaagttccaaaagtttgcttttaagttagttgcttctaagtcttagacactgtcttgaataaaatttttgtagagatttgatattcyctattaagttttaagggcctttcccactctgacttctactctttcctccctgactaatttgacctgcaaactctcatcttaaaatagtacctctcacata

SEQ ID NO: 139241 - DNA, 201 bp, Homo sapiens
atgacctccctctccaccacccccgatcttgagggccgaaatgaccccgtacgactctcgctgtcccccaaagctgcaaatatctgcacctgcacagctgycgcctcattccctgccctcttcggggacccagttcccaaatccaccagcccactcccttcgacatcgccccagcaggagacgagaaagggacaccaagag

SEQ ID NO: 139242 - DNA, 201 bp, Homo sapiens
gaataagttgaattgtaaaatagttgaattgtaaaataatgtaacaaaccatttttaggccaaatttcttggtctcttaatttgtattggacccaaactgygttgcagtggaaaatgagtctcggcttatacagtatggtcagccacattagctagcattcgctctactctctctgacagggaagcagcggaatacaagag

SEQ ID NO: 139243 - DNA, 201 bp, Homo sapiens
cctttccagaccatccaaggttaagtgcccttccataagactcaagttttaacattattatagtgtttatcactctctgtcttagtctgtttgggctgctrtaccaaaatgttataaactgggtcatctataaacaacagaaatttatttctcacagttcttgaggctgggaagtccaagatcaaggtagcagcagacttg

SEQ ID NO: 139244 - DNA, 201 bp, Homo sapiens
tcacttgaattcaggaggtggaggttgcagtgagccaagatcacattgcactccagcctgagtgactagagtgaaactccatctcaaaaaaaaaaaaaaaaattatctgtgtaatcatagtttagggggtctgggaagctggtgaggagtagaagctatgttagtttcctacggctgctgtaagaaattaccacaaactgg

SEQ ID NO: 139245 - DNA, 201 bp, Homo sapiens
agagtatcctctgagaggggatgctaaaatgacttccctgtgggaatgaaggtaccaagagaagcaaggaaaacagaagcccctttatagagagaaagagsgagtcctctgtgaacatcaagtccctctcatttttccctccccattcattttcctggattatcctactaatccttaattttatttgagatgagaccttta

SEQ ID NO: 139246 - DNA, 201 bp, Homo sapiens
agattggtagttgccagagtttgaggagggggtgagggtaaaagagatgtagctgtggctataaaaggccaacccgagaaatccttgtggtgatagaaatrttctgtatcttgattacatcaatgtcaataccctggttatgatattgtactatagttttgcaaaatattacccttaggggaaactgggtagagcctacag

SEQ ID NO: 139247 - DNA, 201 bp, Homo sapiens
atcacttgaattcaggaggtggaggttgcagtgagccaagatcacattgcactccagcctgagtgactagagtgaaactccatctcaaaaaaaaaaaaaaaaattatctgtgtaatcatagtttagggggtctgggaagctggtgaggagtagaagctatgttagtttcctacggctgctgtaagaaattaccacaaactg

SEQ ID NO: 139248 - DNA, 201 bp, Homo sapiens
gggcatggtggcaggcgcctataatcccagctactcgagaggctgaggcaggagaatcgcctgaacccaggaggcagaggttgcagtgagccaagattgcrccactgcactctagcctgggcaaaagactgagactccgtctcaaaacaagaaacaaaacaaaacaaaagcaaaaaaaaatttagctctgcaaaagagtca

SEQ ID NO: 139249 - DNA, 201 bp, Homo sapiens
gcttgggctcagagtcctgacaggagtgatggtgcgcacctgtagtcccagctactcatgaagctgaggcaccagaatcgcttgaacttgggaggcaaagsttgcagtgagccgagatcatgccactacactccagcctgccagcctgccagcctgggcgagagagcaagactctgtctcaaaaaaaaaacaaaaaaacaa

SEQ ID NO: 139250 - DNA, 201 bp, Homo sapiens
cactccagcctgagtgactagagtgaaactccatctcaaaaaaaaaaaaaaaaattatctgtgtaatcatagtttagggggtctgggaagctggtgaggartagaagctatgttagtttcctacggctgctgtaagaaattaccacaaactgggtggctgaaaacaacagaaatcatttctatcacagttctggaggtcag

SEQ ID NO: 139251 - DNA, 201 bp, Homo sapiens
tttacaggcgctttacaccacagttcttggtgagtataaaatgttcgtaaaaaatccttcttcacacgtagacccttacaggaccccaaattgctaagtaraggacacgagcagccagtcaccactgttttcaataggtttgccatgttgatatgagttcccaattttctgactccccagtttccttgaaggcaaatcact

SEQ ID NO: 139252 - DNA, 201 bp, Homo sapiens
tacaagagactgaactgtatctgcctctgtttccaaaagattcacgttcaactttcactcacacaaagccgggaaaattttactttttttttttttttttwagacagagtctcgctctgtcaccagactggagtgcagtggcttgatctcggctcactgcaacctccgcctcccaggttcaagcgattctcctggctcagt

SEQ ID NO: 139253 - DNA, 201 bp, Homo sapiens
cacttgaattcaggaggtggaggttgcagtgagccaagatcacattgcactccagcctgagtgactagagtgaaactccatctcaaaaaaaaaaaaaaaaattatctgtgtaatcatagtttagggggtctgggaagctggtgaggagtagaagctatgttagtttcctacggctgctgtaagaaattaccacaaactggg

SEQ ID NO: 139254 - DNA, 201 bp, Homo sapiens
acaagagactgaactgtatctgcctctgtttccaaaagattcacgttcaactttcactcacacaaagccgggaaaattttactttttttttttttttttaagacagagtctcgctctgtcaccagactggagtgcagtggcttgatctcggctcactgcaacctccgcctcccaggttcaagcgattctcctggctcagtc

SEQ ID NO: 139255 - DNA, 201 bp, Homo sapiens
aacttaacaaacttctctacaaacttccctgcatcctcttaaaaaccagctacatttctccttgcataaagccaaatcagatatagaaaaaaaaaaaaaaacacatgtattctgattgtccagtcatctctatcagctacctctcacaatgaacataggttcagttttaggggctgatatgagaccccactcctggtgata

SEQ ID NO: 139256 - DNA, 201 bp, Homo sapiens
actcaaagataacatactgtttttcacttttgaaaatcatgaatgttaggcatatgataattttaataacaagcatatgattattttattccgcttacttktacaacataatttgggtgccatttcttcaggagaaaacatttgtcatttggaatgctctgtttcagtccttaagcttctacgtataattacagcatatta

SEQ ID NO: 139257 - DNA, 201 bp, Homo sapiens
catttacaatcactgaagtgagactttacctggttttacaggcgctttacaccacagttcttggtgagtataaaatgttcgtaaaaaatccttcttcacaygtagacccttacaggaccccaaattgctaagtagaggacacgagcagccagtcaccactgttttcaataggtttgccatgttgatatgagttcccaattt

SEQ ID NO: 139258 - DNA, 201 bp, Homo sapiens
acccttacaggaccccaaattgctaagtagaggacacgagcagccagtcaccactgttttcaataggtttgccatgttgatatgagttcccaattttctgrctccccagtttccttgaaggcaaatcactaagaaaaaagaaaataggatgtatatatgccaagaaaaaaactatttgtcttttaaacatgaaaaacattt

SEQ ID NO: 139259 - DNA, 201 bp, Homo sapiens
caatatagaaaatagataaaaaggctagtttctcaggatcatgtctgtaagccaggattcctgatccagagacaatggccccgatgggatggagcccgaakgcgtcatcgagagtaactggaatgagattgttgacagctttgatgacatgaacctctcggagtcccttctccgtgacatctatgcctatggttttgagaa

SEQ ID NO: 139260 - DNA, 201 bp, Homo sapiens
ggccgttaagactactgttttaaaacagcagtatgcatgcatgaccataaatacatttgacatttatatagcccggctctaatttccgtgttctctgcatrtggaacagcaagagccataaatgttattacacattgctccttaatatgcaaaggtgaacctgtatactcagtacatattgcctcagcttgttaatgagca

SEQ ID NO: 139261 - DNA, 201 bp, Homo sapiens
ttgtaatacacctctccacctttttaatggaaattcaacagaatcaaagccacaatatagaaaatagataaaaaggctagtttctcaggatcatgtctgtragccaggattcctgatccagagacaatggccccgatgggatggagcccgaaggcgtcatcgagagtaactggaatgagattgttgacagctttgatgaca

SEQ ID NO: 139262 - DNA, 201 bp, Homo sapiens
attgctccttaatatgcaaaggtgaacctgtatactcagtacatattgcctcagcttgttaatgagcatttcatggactgtgtaactgctgaactacattytgctagaaacattgagttgttccttcaggccttatgtttcagcaagcttgttctcactttgatgtataaattagagcaatacactgaagggacccagggg

SEQ ID NO: 139263 - DNA, 201 bp, Homo sapiens
caattaattataattaggactcaggtgccatgatttaaaaaaaaattgaaaaatggctgaacaaactaatagcaaaattttcttaatcataaactcattaytaggagcctcatgatgaattaaatctataaatggattatcatggtggaataaaagataagtgaataattttaaaatgaatataagtaaacaacacaatga

SEQ ID NO: 139264 - DNA, 201 bp, Homo sapiens
catttatatagcccggctctaatttccgtgttctctgcatatggaacagcaagagccataaatgttattacacattgctccttaatatgcaaaggtgaacytgtatactcagtacatattgcctcagcttgttaatgagcatttcatggactgtgtaactgctgaactacattctgctagaaacattgagttgttccttca

SEQ ID NO: 139265 - DNA, 201 bp, Homo sapiens; identical to SEQ ID NO: 24787

SEQ ID NO: 139266 - DNA, 201 bp, Homo sapiens; identical to SEQ ID NO: 24788

SEQ ID NO: 139267 - DNA, 201 bp, Homo sapiens
aatgtacattattatgaagggaaaaccaaaactgcagtgtttctgaagggcatatggcttcataaaactgttggtggtagatctgtgttgtaggatggaawtctatagcagaagtaatctgtggctcaagaaaaaaggtggctgccaactacctgcatatgaatgaaacatttgtggccgttaagactactgttttaaaac

SEQ ID NO: 139268 - DNA, 201 bp, Homo sapiens
gccaactacctgcatatgaatgaaacatttgtggccgttaagactactgttttaaaacagcagtatgcatgcatgaccataaatacatttgacatttatayagcccggctctaatttccgtgttctctgcatatggaacagcaagagccataaatgttattacacattgctccttaatatgcaaaggtgaacctgtatact

SEQ ID NO: 139269 - DNA, 201 bp, Homo sapiens
gcctttaaatgaaatatttttatgaaacattaagataatgtacattattatgaagggaaaaccaaaactgcagtgtttctgaagggcatatggcttcataraactgttggtggtagatctgtgttgtaggatggaaatctatagcagaagtaatctgtggctcaagaaaaaaggtggctgccaactacctgcatatgaatg

SEQ ID NO: 139270 - DNA, 201 bp, Homo sapiens
gtgtatgtcccaaaaaaggtgaaataaagggttatcaaatttcaaaggaagcagaaaccactcctagctgggcccaccacggaagagtttataaaagtagaggcattttgaggcattgctggaatgggctgtggagaggctagtgtgaagttgggaatggttgcccaccctactgcttaccaattcttctagcctgatgaa

SEQ ID NO: 139271 - DNA, 201 bp, Homo sapiens
cataaaaaatgatctgtatgtttagggtcaaaccccacattagaaggctggcaaactttcggtagagttggtgttaaaaaacaaatagtaaccgccttttygacattaaccctcatattagctcttactgtagctaatgttaaccacatgttaatctaatggcatttctcttccttcttctcctttactagtaaaatatat

SEQ ID NO: 139272 - DNA, 201 bp, Homo sapiens
tgtatgtcccaaaaaaggtgaaataaagggttatcaaatttcaaaggaagcagaaaccactcctagctgggcccaccacggaagagtttataaaagtagaggcattttgaggcattgctggaatgggctgtggagaggctagtgtgaagttgggaatggttgcccaccctactgcttaccaattcttctagcctgatgaac

SEQ ID NO: 139273 - DNA, 201 bp, Homo sapiens
gaggtcgaggctgcagtgagctaggtcaaggctgcagtgagctgtgatcgttccattgcactccagcctgggtgacagagcaagaccctgtctcagaaagaaaaaaaaaaaaaaaaaaggaagaagacacttgaaaagcttcctgccaagaaatacacatctcgttaagttaaaatttatatttgtgtctattgtcaaggg

SEQ ID NO: 139274 - DNA, 201 bp, Homo sapiens
ccttttgtaattaatgcaaaatagggggtgataatttgagaccatgtgtatatcccatttccccatgaattgttacccagtgcttttagcatctattgttkatcctttctcttcttttaaaaattaatgcttcagactcatgtatttctaaaagatttactgttctaattcagtagccattattatcatttttccttttta

SEQ ID NO: 139275 - DNA, 201 bp, Homo sapiens
ttgcaattctaatttgggtatctctccttacacatgtacagtccttacagatattatcaaaggtactatacaaggatattgcttgcagcgttataatagtratagtaagagactgaagacaacctgttgttgatcaggagagaattccttagattattactatcatataatagaattttgtgcaaccgttaacaagaacac

SEQ ID NO: 139276 - DNA, 201 bp, Homo sapiens
aggctgctattttagtgttggataagcctttgtgcgcctttgtgtgcctttgtgtgcctttgtgtcatcgcaataacacatgacaagaatgtgtgatgatrcctacaggcgatgatgtacaggtcgagagtacagaagaagagcaggagtcaggggcaatggagtttgaagatggtgactttgatgagcccatggaagttg

SEQ ID NO: 139277 - DNA, 201 bp, Homo sapiens
aaagctcagaaccccaaacaggataaaataaatttattcccaggtaaagcataataaaattatttaaaacaaaaaattctgaaagccagggaaaaatgacrtatataagaaaaaaagatttaactgatgatatatttctcatcagaaaccctggagccagaggaagtggaacattttggaagtgtttaaacaattatcagt

SEQ ID NO: 139278 - DNA, 201 bp, Homo sapiens
aatcctgtcacccaggtagtgagcatagtacccaagaggtagtttttcagcccttgcttccctccctgctttagtagtcccagaatctgttcccacctttrtgttcatgtgtacccaatgtttagctcccacttataagtgagaacatgtggtatttggttttctgttcctgcattaatctgcttagcatgatggcctcca

SEQ ID NO: 139279 - DNA, 201 bp, Homo sapiens
ggagtgggtaggtacatgatctgtgaatataaaatgaaatttgaaggacaattcccccaaaggacattggaggaaaattctaacatttccattggagcttygtcacaagaaaatttcagctctgaggatttgggaaagaaaactaaatcatatcttcaattcatttcgtccttccagtgggtcatgaagacagagaacttc

SEQ ID NO: 139280 - DNA, 201 bp, Homo sapiens
atactgaatatgctgccaatcccaaagatgcacagaatgaaactttgtaaggtgtgtgtttctttgcttggcaaggagtgggtaggtacatgatctgtgartataaaatgaaatttgaaggacaattcccccaaaggacattggaggaaaattctaacatttccattggagcttcgtcacaagaaaatttcagctctgagg

SEQ ID NO: 139281 - DNA, 201 bp, Homo sapiens
ctataattataatgctaattattaatctagcaagatggagttgcttaatatcaaatagtagcaaatcatttaatgcattaacattgtaaaaaattttaaawttttattgcccctcttgcatgcaaatatttctgagttctgtagtgtccaagatgagtccttttagcattttgacactggttgttttagttccaattgaaa

SEQ ID NO: 139282 - DNA, 201 bp, Homo sapiens
atccaaatgctaaggcagaatgaaatttctggtgctggagaaggcctcagagatcatctagtctagttatgcacttaagaaactgaggctctgaaagatayaatagctctttagtggtagaagcttgggcttctcaccctcagtccactctgctgttctggttccgtggtacttctcaagttgtgttctctcctatggcac

SEQ ID NO: 139283 - DNA, 201 bp, Homo sapiens
gcaatggaaaagatattagttgaatatattttttcaaattaacttttttgtctttgtgtttttattttaaaaagcttattgtattgtcttgtattaaaaaacacataatggaaaatttaccatcttaaccatttttaagtgtgcaggtgcacacaacacaggtgcactacgcaattcactgccagttacagtagagtaaga

SEQ ID NO: 139284 - DNA, 201 bp, Homo sapiens
aatgggaagtataatagactatttttctcctcttgagtttgctgaaatatgttttgcaggtgaaaacaaaaatcatagcattgtctgatgaggttttcaaygtacatagacatagagacaactacagcataaagagagaaatggggtctatatgtgtttttgcattccacttgaagtggtaaaattttaattctaagtgtg

SEQ ID NO: 139285 - DNA, 201 bp, Homo sapiens
tttctatagcaagattactgttttcttctttttatcttcacttttcaaccactgggttcactgttctactttttttttaatagcacaaatggaatttatcytctctccatctcaagtccctcccctccctccactggctttgcttgtgaatgaaagggactcctactatgactaaggacagatggcagctgtatacgttgt

SEQ ID NO: 139286 - DNA, 201 bp, Homo sapiens
tttttttaatctatttttgtccctgcagttttcaatgtctttgctttatacccaatgtaatatcatgttacatacaagccaagtaaaattccaatgttgtrtgacttcaaattctgtttagattaactcttgggaatttgtaacatgttcatcttctccctattagatgtttgagaagctaatactaatatttgaaatttt

SEQ ID NO: 139287 - DNA, 201 bp, Homo sapiens
ctgcagatggtattggctatgtggaagatggccgagagatttttgatgatgaccttgaagatgatgcccttgatgctgatgagaaaggtacctaccttttsttttccagggtgttgttttgagatttaaagaattctctaaaattagagatgacttgatactctgatagtttacctttgagagaaggacctaactaccatt

SEQ ID NO: 139288 - DNA, 201 bp, Homo sapiens
ttcatatattacctggggctgatccagccagtcctgtcctttggttgcatgggatgatctattattgtctctctctctctcttttttttaatctatttttrtccctgcagttttcaatgtctttgctttatacccaatgtaatatcatgttacatacaagccaagtaaaattccaatgttgtatgacttcaaattctgttt

SEQ ID NO: 139289 - DNA, 201 bp, Homo sapiens
caagaagacctgtttatagcacagctgttaccttcaccatccaactgtggcctcgctttagttccagctgtttatattagtcaaaactgtccctaacaccrcagcataggctgtgagaacaagaggctagtgagaagggaagatatccagaggattaagaagcaaccaagccatggcctatgttcttttgactttatcccc

SEQ ID NO: 139290 - DNA, 201 bp, Homo sapiens
tcgggagattcgggaccatggcacctgtgcacggcgacgactgtgagataggggcgagtggtgagggacaattccgcgcgcggggctccgggttgggacastggcatgattgccggtggtgggggttctgagggaggcgcacacccgggtttgtttgggcgcagaccttggtcgtccccggcgggggcccttctggcgtcg

SEQ ID NO: 139291 - DNA, 201 bp, Homo sapiens
ttattagaaggcagggttgaagaatatgccagttaatgacagatgtcttaattatagtagtttttctttttcagtaaatagctattgatctgttgtatctrttctctttcagagctcttgaatcagccagtcagttggtgtaaagttgaggcaatggctttgaaaccagacctggtgaatgtaattaaggatgtcagtcca

SEQ ID NO: 139292 - DNA, 201 bp, Homo sapiens
cttgcatgtagcaggttatccacagatacttgtttactgatccgcttacactaaatgtatagtcatatgtttcattattattttgccagaatactgatttrgcttaatcaaaaatgttcatctttttctccacaaggtatgtaactcaccatcttgaggtatggcatctgtggatccatgatacccaagcaggaagggaat

SEQ ID NO: 139293 - DNA, 201 bp, Homo sapiens
caaatatatttattcaatttggaccatggccagaacaccagtagatgttaacatcaaaagtcctgtgaaaaatgacagtcgttatacacagttatattatkgagaatggagtctaagtgtcttctgtcaacaagtgccccgtaactggtgtgtgaagtatttactgtagactctcctttactgtcagtacctagcaacatt

SEQ ID NO: 139294 - DNA, 201 bp, Homo sapiens
tttctgtaaatatgcactcaacgtttgcacttttatgtacaaagagacttagaggctttctatgataacagatgtgttactcgttctataaaatcatttcscattatgtctttttagtgggcaagttcctttccccttttatagtgacaggtacagcaacacaagggctctgccatgtctaggtgataatgtggttgatgg

SEQ ID NO: 139295 - DNA, 201 bp, Homo sapiens
attcttgctctgtcgtccaggatggagtgcagtggtgcgatttgggctcactgcaacctccgcctcctgggctcaagctatcctcccacctcagtgtcccragtagccaggactacaggcacatcctgccacgctcggctaattttttgtgtttttagtagagacagagtttcgccatgttgcccaggctggtctcaaact

SEQ ID NO: 139296 - DNA, 201 bp, Homo sapiens
ttggaaagatgcagtatagttagtgtagcatatgtgggctcattggattagaaaggaaaccatttggggccaggcgtggtggctcatgcctgtaatcccarcactttgggaagccgaggaaggtggctcacctgaggtcgggagttccaggccaacctggccaacatggtgaaaccccgtctctattaaaaatacaaaaat

SEQ ID NO: 139297 - DNA, 201 bp, Homo sapiens
gcaactagtagggagatgctggggatgctgctaacatcatacagagcacaggacagcccccacaacaaagaattatttggcccaaggtgttaatagctccrtgattgagaaacccagttttagagattgatgctgaaatcttcccagataaaatgatgggtttgggttttgcttcaaaataatctagagagaggaaggaag

SEQ ID NO: 139298 - DNA, 201 bp, Homo sapiens
actatcctttgaacgttcaaaggcctcacaatatttgtatatttggtacaatgtaccagatgtttgcagggatcttttttacatattacctcatattccasccaggtcaaatttgatgagaaagagttcttttttctttttggttagattctagatgatacccacagttcaaactgtaaaagaataagtttgccaatagta

SEQ ID NO: 139299 - DNA, 201 bp, Homo sapiens
ccttcaactgtgtcataaaaaattttctatccatgtatgtatacattcatcaaacatttagcccataccatctcctcattccacatggacttaatttcccmccttaatctgtctactttctgacaattactaatagagttgggctgtgatatcatgtatctccagaagattacataaattccagcctagaaatttctttgt

SEQ ID NO: 139300 - DNA, 201 bp, Homo sapiens
tatttattaaataaattcactttagcaataataaactcattacatgttaacatagaaaccttttatgaaaatagctatatctttcaaaacaaaaaaaaaaatggtgagaagagcagcattgttttaaattttggcaaatctctttattctctggcttaatagaaagccagcctgatttctcatctgcttctgcattcaatc

SEQ ID NO: 139301 - DNA, 201 bp, Homo sapiens
caatgtatattagcatatttaaggctcagaggtgtcctacaatagaaatttgtttaattttgttttaagccagctctctccatatttatgtagatgcaggrcatagtttagaaaacgctagaatagaattttggcaatcattcattctcttttacctttgcttaataaatagttaataaaaattcaagactctactatctc

SEQ ID NO: 139302 - DNA, 201 bp, Homo sapiens
ataagtgatctctttgtcctctaaactcctgtagttcttaagcactgtccctcttacattataattatttgaggacagggatcatgcttgatacattattwtatgtctgatggcaacttgctcatgataggagcctaataaatggtatgttaaattaatgttttctgtaatagagcactttctgactccatcctcttttct

SEQ ID NO: 139303 - DNA, 201 bp, Homo sapiens
tgcagtggcgcaagcactgctcactgcagcttcaatctcctgggctctagcagtcttcctgcctcagcctcctgagtagctgggatcacaggtgtgtactrccacccgcccacccccaccagctaattcttttaaattattttttgtagagactgggtcttgccatgtttcccaggctgacctcaaactcctgggctcaag

SEQ ID NO: 139304 - DNA, 201 bp, Homo sapiens
agctgagacctgaatgacaagagggaggaaattctggaagcagaacgttctacaccaggggaacaaccagaggaaaaagtctgaagctggagcatcttaggacagttaggaggcaggtgtggctggaggacaggcaacgaagggaaagtaacagaagatcaagttggacaaataggcaggggctagatcttgaaagaaggg

SEQ ID NO: 139305 - DNA, 201 bp, Homo sapiens
atataaaaatataacttactagctaacctgtttatggcactgtatatttttcttttctttttctttttttctctttttttttcttttttttttttaagacrgagtctcgctcttttgcctaagctggagtgcaatggtgcgatctcggctcactgcaacctccacctcccgggttcaagcgattctcctgcctcagcctcc

SEQ ID NO: 139306 - DNA, 201 bp, Homo sapiens
ttgagagagggatgaggtggagttcctttattgactccatcctaagagagtatataggcgcctcagcccgtatgatcagctgttgcatggaaccctcagcrctcggcgtttccttatacaagacttgcgggcactgtgggacttaatgggtctgggaaaagctttgttacataacttaaagtatttgaaaatgtcatgaca

SEQ ID NO: 139307 - DNA, 201 bp, Homo sapiens
aagcacaattcatggctcccaacaatacttgaaaaagggtaattttgttaggaatgcacaaaactaaataaataaatctgataaattagagatgaagcagsctcccactctatccctcctgcccacacccatgtaaatcactaacagggcttctcatttccattgtctttcacttctcaacagagctatcttgtgcaggtg

SEQ ID NO: 139308 - DNA, 201 bp, Homo sapiens
tacaatgtgtctctatgtcgttaactctgtccttatctcgtactgctctttccatcattctctctgatctagccatattggcctctttcctagtcctggamctgtcagatttgcacgcagctcaggacttttgaatgtgctatcctgtctgcctggaatgctctttccataaggcttgctccctcacctcttcaagatctt

SEQ ID NO: 139309 - DNA, 201 bp, Homo sapiens
tttgaaatatgtcactggcttttaaaattaaatatgctttttatgcttttaagtattgtctcttttgaacttttgagtgtgagggttgaatttttagtgaraaaagaattttgtttggatttgtttttaattagtattttttaaaaaatatgttaagggcttctggtggtggtggaaaatattaattcctttaaaaatctg

SEQ ID NO: 139310 - DNA, 201 bp, Homo sapiens
catttgaaatatgtcactggcttttaaaattaaatatgctttttatgcttttaagtattgtctcttttgaacttttgagtgtgagggttgaatttttagtragaaaagaattttgtttggatttgtttttaattagtattttttaaaaaatatgttaagggcttctggtggtggtggaaaatattaattcctttaaaaatc

SEQ ID NO: 139311 - DNA, 201 bp, Homo sapiens
gattttcacttattctttcaggtgtggtatttctgtttgggaaagtttggattgaatcagccgagacccatgtgagctgttgtgtcatggtgaaaaatatygagcgaacgctttacttccttccccgtgaaatggtaaacattagtgattagcttttagttctcagtcgttgtatctgccacacattctgtgttttgcagc

SEQ ID NO: 139312 - DNA, 201 bp, Homo sapiens
gaggataggtgatgtgatcaaaatcacacaactggtaaacgaggagaaacagttggtaatattgatcacatgttagatcaagaacaaagaagtgaaaaacygtaaaaaaaagtagtttgactgtatactaattacagtaaattataccaacagtttaccatttgtgcctaattacaatatagcacaataatgattatgatt

SEQ ID NO: 139313 - DNA, 201 bp, Homo sapiens
attacaggcatgagccacggtgcccggccccttttctttcttaaacaaaagataatgttatagaggttttgtactttgcttttttcttgtagcaagatgtyttgaaaattaccccatattagaacatagagagcttgtttttaattatttatttctatgtagctgcatagtattccatgatagggattgcacaatgtttat

SEQ ID NO: 139314 - DNA, 201 bp, Homo sapiens
acaaattcttgctagatactaataaccagtgctggagaaccttccacattagttccaggaagtgcactgtaaagacctgttggttttagttttctcttggwacatttgaaatatgtcactggcttttaaaattaaatatgctttttatgcttttaagtattgtctcttttgaacttttgagtgtgagggttgaatttttag

SEQ ID NO: 139315 - DNA, 201 bp, Homo sapiens
aggatttaggtagttttcaggcttgtagttattatattacttcagtttttccttatgggattttgtgtgtgtgtgtgtgtgtgtgtgtgtgtgtgcgcgcgtgtgtgtgtgtgtgtgttttggagaaaagcattgggatcagtggtatgaatgaattcctagttacatactgaccttattttaaattgtttctgaagccaa

SEQ ID NO: 139316 - DNA, 201 bp, Homo sapiens
gcggaatcgggagattcgggaccatggcacctgtgcacggcgacgactgtgagataggggcgagtggtgagggacaattccgcgcgcggggctccgggttrggacagtggcatgattgccggtggtgggggttctgagggaggcgcacacccgggtttgtttgggcgcagaccttggtcgtccccggcgggggcccttctg

SEQ ID NO: 139317 - DNA, 201 bp, Homo sapiens
gacttaaatccagaccttattcttcaggtatatcttttcactaagaaacatttgagtgacagtctcagcttttacagtttgattatttatgagtaaacagratgctgggcaattgcaggtacttattttaagtttgtggataggtgaccatttaaaaatactagagtgcctcagaatggaagccacctttgtttacaaaga

SEQ ID NO: 139318 - DNA, 201 bp, Homo sapiens
aaagttaagtaaggttttatttttaaaagtcagggactatgatacagtctgatagaatgaaaatctctggttcatgtgctagttatgatacattgtcttgmttttagtgagatattgatgtctttggccataatcgtgggggctatagcctgctcaaaatactggctattaataatgatcgcaggaaggattgagttgctg

SEQ ID NO: 139319 - DNA, 201 bp, Homo sapiens
ccctgcctagtaataaaacatgttttttttccagtgccacttaatggcaagtctcttcaagtttctcaacagtcaactgctgtaaatgtacctgaggtacrttctcattttctagagggggaacaggaaaaattccactgccaccatccacccctgtcatccaaaagcaagtttattagtgaacttcaagtcagcattcta

SEQ ID NO: 139320 - DNA, 201 bp, Homo sapiens
ttcagccatctgaattaatctcgatatcagagagtttagttccctcagtgtaaaattaaaagaatatttcttcatctgctgcaatgcatcagacactatcytagactatagaggctcaaagttgaatgatagcatctcagagctcttgggggctgaggtggtggccttctgtctccctttcttctacctctttccttcttt

SEQ ID NO: 139321 - DNA, 201 bp, Homo sapiens
tgccagcgtcagttgccaaggattagaaccttaagaagcaacaaccttctttctttcttatttgaaaatgagttggttatttctacatttcgtttactggytgatactcttagtaaacagagcattgttttgcagggtaaggatctagagctgcattgtccactgtggtagccaccagccacttgtagctctttacattta

SEQ ID NO: 139322 - DNA, 201 bp, Homo sapiens
tttttaatgttgtccacgttaggggaaaggttaaataatgctgagcttttcttcgtgagcaaacgggaagagtcattttggttgtttggtagaagattgtrttcccatattttcattctttggccagcatagatggtgcactggattgttttggagctttcagacaggacttacatacatctaaaatatttcataaactgc

SEQ ID NO: 139323 - DNA, 201 bp, Homo sapiens
caccacaaatcataaaacggggctcatggtatagcaatatgtattaaacagttttcagaatttgtttaacttcctgctagcatggacagggcccagttaggaagcacatagcacttttcccaattaacagtgcaaattgtcatgagtgcataggaatttgcagtttgacaaaatcaggtttttgacagcaggggtaatcag

SEQ ID NO: 139324 - DNA, 201 bp, Homo sapiens
gaactgagtctgtgtttttctttgccacaaagcctgtaagctcctggagggctgggatcttttatttccagcatccagcagcaatgccttgcacatagtasgtgtttaataaatagttgttgaaataaactgcacagtgactgacagtcctgtagatgcaggtgaaaaatttcagagactagtgttgcatttgctactatt

SEQ ID NO: 139325 - DNA, 201 bp, Homo sapiens
agaggactcttgataagtaattctgtcctcactgtgattaatttgccttgggttggtctcattattgccctttccctaaaggaattgtcaaatattctccmacaatgcatttccctataatttaaatgttaaaaaatgaagatgaagttggggagagtgactgttttttatgttagctgaattttagtgtctagtggaaaa

SEQ ID NO: 139326 - DNA, 201 bp, Homo sapiens
agttagggggtatcatttattaggtggtaacgaggagtcctgagtgctttggtaaatgtgttggtttgtaccatataaaattgctgacattagaccatttytttgtgtacaaaatgtggcaacttcacatggggtccaccctgatactataggtgcagaccagtccagctcatataaattgccttctctatttttgctgtt

SEQ ID NO: 139327 - DNA, 201 bp, Homo sapiens
aggagagtggactttgggaggaaaacaggcatagggcacagaagtggggggctgttctggacaggaagatgaacaaatgccttcctcttctcttcactgcyccccccccaccaacccccacctcagcagagggaagggatgcatctgctatccccactcatcactggactccccaagggccaggtgtgcagttcgttcacc

SEQ ID NO: 139328 - DNA, 201 bp, Homo sapiens
ggactaagagttgagcggagatgggagtggaacaaagatattaggtttcttttatgatttggagtgtcagacatttggctatatttgtttcatgggtttttcatcgctgctgacttaaccacagacgacattttcagccctgtgcaggagggtggtgtgccttctgcaggcagggaggaggagggttggggtgtggtggct

SEQ ID NO: 139329 - DNA, 201 bp, Homo sapiens
agctctaaaggatcaaattagattcaggttcaacttttttagccaaaatgctttataggtgatgcagtgtacttcatattgcatcatatcagaagacacamtgtctggttaagctgctattagttgacaaaggctgggatcagtggaaaaaaataacctgctattagtgagtctgtgtctgattagcagttgaatgaatga

SEQ ID NO: 139330 - DNA, 201 bp, Homo sapiens
cacagtgtatgtcccaaaaaaggtgaaataaagggttatcaaatttcaaaggaagcagaaaccactcctagctgggcccaccacggaagagtttataaaagtagaggcattttgaggcattgctggaatgggctgtggagaggctagtgtgaagttgggaatggttgcccaccctactgcttaccaattcttctagcctga

SEQ ID NO: 139331 - DNA, 201 bp, Homo sapiens
tttgtgaagcagtgtgtgtttttgacaacagtagttccgcattcttttatgcaacataaacatcgatttgtttaaagttaccattcttttatttatccagsgggagcatagatagcatcatagggaaaaagagactctatcctgatttgttttctctttatttcactacagccagcattctggaacccctttcaaacatcc

SEQ ID NO: 139332 - DNA, 201 bp, Homo sapiens
aaggatttaggtagttttcaggcttgtagttattatattacttcagtttttccttatgggattttgtgtgtgtgtgtgtgtgtgtgtgtgtgtgtgcgcgcgtgtgtgtgtgtgtgtgttttggagaaaagcattgggatcagtggtatgaatgaattcctagttacatactgaccttattttaaattgtttctgaagcca

SEQ ID NO: 139333 - DNA, 201 bp, Homo sapiens
aatgaaaggatttaggtagttttcaggcttgtagttattatattacttcagtttttccttatgggattttgtgtgtgtgtgtgtgtgtgtgtgtgtgtgtgcgcgcgtgtgtgtgtgtgtgtgttttggagaaaagcattgggatcagtggtatgaatgaattcctagttacatactgaccttattttaaattgtttctga

SEQ ID NO: 139334 - DNA, 201 bp, Homo sapiens
gaatgaaaggatttaggtagttttcaggcttgtagttattatattacttcagtttttccttatgggattttgtgtgtgtgtgtgtgtgtgtgtgtgtgtgtgcgcgcgtgtgtgtgtgtgtgtgttttggagaaaagcattgggatcagtggtatgaatgaattcctagttacatactgaccttattttaaattgtttctg

SEQ ID NO: 139335 - DNA, 201 bp, Homo sapiens
gctgttttcctaaaattttatattcacctaacagtgaggcttttatttttcttctggtggcagaatcatttaataaggcatgccaaataagaaaataccaragtaaccaagcatatctcttggggctagctttcctgcttatgttcttttactgttgatactatttccaactgtcaagaaattatttttcagatatatcct

SEQ ID NO: 139336 - DNA, 201 bp, Homo sapiens
catttttgagataatttctactctatatagttttgtttctttgtttttaacaagtttcttatttgaactatttagtggtattatatatttatcttgttgcrtatcaattatgagtctaaatcagtagtgtttgaactcaatttttaaaaagaagctaaatgcagttcctgagttttcgaagaagtcttacataaactgtca

SEQ ID NO: 139337 - DNA, 201 bp, Homo sapiens
tattcacttcctctatgtacgtcactatgtgaacagctgttgtgtatggtaaggaacttacagtgtgtaataggggaagctttggtcaattttaccttttsagaaggctgaactgagtttctccgctgtatgttgcttgcggcattggtggtggtgggatttcctttgaggaagactgctaaaatcttccattctggcttc

SEQ ID NO: 139338 - DNA, 201 bp, Homo sapiens
aataatggatctaggaagtgatcaccagtgggtacttatatctctaaggtagagatgagcagacattatgtgcctgtgcctttggatagaagtaatcagcrcctctaaagtattcttgccccagaattgaacctgattttgatcaagcttttagacctaactatgaatttatagacagtatggagacagaaaaacaagtta

SEQ ID NO: 139339 - DNA, 201 bp, Homo sapiens
tgtagtcctcctctcctgcttgtcctcttctctcatcctaccctgtgcctgcaccagcagtatatacacagccatctatattagtaacaaatcttgtagtyctttccttctgcccccttccaggagtttcagcattaatgaagtgtaggcccacaagtccccatcatcatgaagatctgtagaaaacattgaagctcacca

SEQ ID NO: 139340 - DNA, 201 bp, Homo sapiens
tgcttctgacgcgctcctctaatttcgccatatctgtctcatcatcccaaggtttcacatctagtaagatggaagacttggcaacaagtgcaggttttttkgctttctttgattcatattgtgcaagacgttcttcccttagcctctttgcttcttcactttcctcctcatcatcagatccaaagaggtcaatgtcatcat

SEQ ID NO: 139341 - DNA, 201 bp, Homo sapiens
cagtgtatgtcccaaaaaaggtgaaataaagggttatcaaatttcaaaggaagcagaaaccactcctagctgggcccaccacggaagagtttataaaagtagaggcattttgaggcattgctggaatgggctgtggagaggctagtgtgaagttgggaatggttgcccaccctactgcttaccaattcttctagcctgatg

SEQ ID NO: 139342 - DNA, 201 bp, Homo sapiens
taagatagttaattgcatggaggcttgacgacttgcagatgggctaactgtggaagagccgatgtcaagctctgaaatctcttccacctggaattgcttarcgtggcgggtagggttatgtaccagattggagcaggaaaccaagatgtttaagtatcagaaaggaaaacaaatgcttcagaaatcccaacagttttgcta

SEQ ID NO: 139343 - DNA, 201 bp, Homo sapiens
agtgtatgtcccaaaaaaggtgaaataaagggttatcaaatttcaaaggaagcagaaaccactcctagctgggcccaccacggaagagtttataaaagtagaggcattttgaggcattgctggaatgggctgtggagaggctagtgtgaagttgggaatggttgcccaccctactgcttaccaattcttctagcctgatga

SEQ ID NO: 139344 - DNA, 201 bp, Homo sapiens
gaaggcatgaaaagatgagtctgtacacagttaactgttggaagactgggagatttattctgtccagcaagaggatctatgtaaaagaataacaggccatrcaagtggaacagtggtttaggtgcagttgcagaatttgttcttgaccttgtaggcatcggagaggcattgaaaacattcaggagattggtaatgatattc

SEQ ID NO: 139345 - DNA, 201 bp, Homo sapiens
attatggcctctttctcctcacctccttgagactgctgtgctctgtctgggccacctatcctcacaccaatatgcagaatgtgtgtctgtgcagaaatccrgggtgtttatgggtctcactgtatttatttcccttctctcagggatcacagttttggaatacctattgaaaatgtctaaaaacagtcacaataaatttta

SEQ ID NO: 139346 - DNA, 201 bp, Homo sapiens; identical to SEQ ID NO: 24790

SEQ ID NO: 139347 - DNA, 201 bp, Homo sapiens; identical to SEQ ID NO: 24791

SEQ ID NO: 139348 - DNA, 201 bp, Homo sapiens
ccagttgctggtgagcatgaaagtgcaggatgattatgagccaattgatgccatcaggttcatcaacatcaattccctcacgctgagggaatatcatcgtytccagagcaaggtcactgccaaatagacccctgtacaatgaggagttggggtctcctcaatttgcagatcccccaagtacaggcgctaattgttgtgata

SEQ ID NO: 139349 - DNA, 201 bp, Homo sapiens; identical to SEQ ID NO: 24793

SEQ ID NO: 139350 - DNA, 201 bp, Homo sapiens; identical to SEQ ID NO: 24794

SEQ ID NO: 139351 - DNA, 201 bp, Homo sapiens; identical to SEQ ID NO: 24795

SEQ ID NO: 139352 - DNA, 201 bp, Homo sapiens
aagtcatcaggtgtccacccacagtgtagttcaaacgacaaagggcaagtgactgggggtgggggatacaaggaatcagtcaccgctgcttgcaactttaaccaagaatttcacttgaaaggaagaggtccagagtttatatttaatccataacactataaacaaagtgtgtgcctttaaaataaggaaccatgcagtttt

SEQ ID NO: 139353 - DNA, 201 bp, Homo sapiens
attgacttaattataaattaccaaggaaaaaaataaggataactgtatttacaacttagtcatttacaaaaatatgtcttccatcaacctccttttctccytgtcctgaaaacttcaatttgatctttaccatcttaaaatagtatacttctcaatgccttgctagtttattaaaaaaggacaaatagtatgtctgataga

SEQ ID NO: 139354 - DNA, 201 bp, Homo sapiens
acgcccggctaatttatttttgtatttttagtagagatggggtttcaccgtattagcaaggatggtcccgatctcctgacctcgtgatcctcccgcctcarcatcccaaagtgctgggattacaggcgtgagccaccgtgcccggccttccataacattcttaaagttctagattaagtaaggaaagttctggtgttccta

SEQ ID NO: 139355 - DNA, 201 bp, Homo sapiens
ctcacaagagtgttcctacagacttattgaccccttctagaaatttcctactgttgagcaccactaaagatgcctgctggtctgctgaccaagtgaacagraacagggtattagacatgagttgctttttgagaaaaatctgcttttgtgggaaatacagtcgaaaatgattctgattgacttaattataaattaccaagg

SEQ ID NO: 139356 - DNA, 201 bp, Homo sapiens
gagacggagtctcgctctgttgctcaggctggagtgcagtggcgcgatctccactcactgcaaactccgcctccagagttcacgccattctcctgcctcarcctcctgagtagctgggactacaggcacccgccaccacgcccggctaatttatttttgtatttttagtagagatggggtttcaccgtattagcaaggatg

SEQ ID NO: 139357 - DNA, 201 bp, Homo sapiens
aggaaccatgcagttttctccctttgaaagctgcatagagggatttttcattgcttgctataagctatcaaaattcccagtaagagggcccccctggtagktcccttattctttgtgttggtgcttcagagttgtattttccatggtattctgaattctttctgggttggctttgatcctcatctagacttcattgttaag

SEQ ID NO: 139358 - DNA, 201 bp, Homo sapiens
tttttttttttttttttttttttttgagacggagtctcgctctgttgctcaggctggagtgcagtggcgcgatctccactcactgcaaactccgcctccaragttcacgccattctcctgcctcagcctcctgagtagctgggactacaggcacccgccaccacgcccggctaatttatttttgtatttttagtagagatg

SEQ ID NO: 139359 - DNA, 201 bp, Homo sapiens
gcgtgagccaccgtgcccggccttccataacattcttaaagttctagattaagtaaggaaagttctggtgttcctaaggtaggctaagtaaataagcaaawggcaacgtgccttgcaggatatctcgaaatgcttagagaaaggatgtggcaatgcaggaccgcttccagagattccagagctgcccagtattgctgcaga

SEQ ID NO: 139360 - DNA, 201 bp, Homo sapiens
ttctattatttttactcaagattagagacacctctttgctcatctaattttaaaatatgctattgttattgataagcagtttgatgttttaaacctttagycctgaataactatgtggttatactttctatagttttctataaatgctgtatttacataggcaactgccattattagttgcctaagggatcatttctgcta

SEQ ID NO: 139361 - DNA, 201 bp, Homo sapiens
aacggccacaggtgcctaggagcgcagagaggcctcgggttcaaatcaccggcgcgcagggactggactcgcgggtagcgacccccccaaccccccccccsccgccctacacacacaccctcgcgccggctgaaagcatggaggattcagggcatttgaaaaaagaggggctgggcgcggtggctcacgcctgtaatccca

SEQ ID NO: 139362 - DNA, 201 bp, Homo sapiens
aagtaaaattatttttctaaggaaaacattacacatattagaaggatgcattcctcaggggtaaggacaatatttgtctttttttccagcagccagttatktgtcacataattgatcctgaatttagcatatttagtcaggaaatgggatttgacaataaaattagactttctatgcctgtagattttgagacttataaaa

SEQ ID NO: 139363 - DNA, 201 bp, Homo sapiens
gtgtgcctccagggagccattaaaaactgacctctcaaccacagaaatagatgagattttgagaacattgagaagctgccttttgcaaagtaaatttgcartggtccttgacgaaggggggtcgggggcggggagaagtccagccgagagaggagctcattccacgctatatttttgcagttgaaaagctgcctaatcatc

SEQ ID NO: 139364 - DNA, 201 bp, Homo sapiens
ctggtctcactgtccccgccgtcagccaccggttccttatccgtctcattccccattgtggcttggctgagccggtcgccaggcctcgctgtcctcctttrccttcctctctcctcagcggccgtactttgcgccgtacctcacctggcctgcaggtgagcagcagcgcagcacccctgcccggcgagcttaacttgccca

SEQ ID NO: 139365 - DNA, 201 bp, Homo sapiens
ttactcaagattagagacacctctttgctcatctaattttaaaatatgctattgttattgataagcagtttgatgttttaaacctttagtcctgaataacyatgtggttatactttctatagttttctataaatgctgtatttacataggcaactgccattattagttgcctaagggatcatttctgctactatacggtat

SEQ ID NO: 139366 - DNA, 201 bp, Homo sapiens
tttctactatgatttttttttactttgttaatactgctctttcattgccaaaaatgattgcaaatgccccttttaatttgtgtggattgagtgctcacaasagtgttcctacagacttattgaccccttctagaaatttcctactgttgagcaccactaaagatgcctgctggtctgctgaccaagtgaacaggaacaggg

SEQ ID NO: 139367 - DNA, 201 bp, Homo sapiens; identical to SEQ ID NO: 24797

SEQ ID NO: 139368 - DNA, 201 bp, Homo sapiens; identical to SEQ ID NO: 24798

SEQ ID NO: 139369 - DNA, 201 bp, Homo sapiens
ggttataatacatttaaaaagctaatacaaaagataagaatgaaattaaagagaagcgctctccactgctgttctcttcagctcaacatggtggtctaccsggcgattggcagcctcagccacttctctgccttcaggatcctccgctcccaaggttatatacgccgcaattttacagggtcctttgctttgctgaccaga

SEQ ID NO: 139370 - DNA, 201 bp, Homo sapiens; identical to SEQ ID NO: 24800

SEQ ID NO: 139371 - DNA, 201 bp, Homo sapiens
tggttataatacatttaaaaagctaatacaaaagataagaatgaaattaaagagaagcgctctccactgctgttctcttcagctcaacatggtggtctacygggcgattggcagcctcagccacttctctgccttcaggatcctccgctcccaaggttatatacgccgcaattttacagggtcctttgctttgctgaccag

SEQ ID NO: 139372 - DNA, 201 bp, Homo sapiens; identical to SEQ ID NO: 24802

SEQ ID NO: 139373 - DNA, 201 bp, Homo sapiens
aaaaagttaactcaaaatggatcaagatttaaatgcgagagttaaagctataacactcttagaagaaaacgtaggtgtaaatctttgtgaccttagattasgcaatggttttttagatatgacgcaaagaggacaagaaacacaagaaaaaatacataaattggaccacatcaaaatgtaaaacttctgtacttgaaagga

SEQ ID NO: 139374 - DNA, 201 bp, Homo sapiens; identical to SEQ ID NO: 24803

SEQ ID NO: 139375 - DNA, 201 bp, Homo sapiens
agagggagacattggagccgtcttcgggctcagcttcccaccttgtcttggagggcctttctgctttgtggatctgtatgaagcccagaagatagtggacsggctcaagaagtatgaggctgcctatggaaaagagttcaccccaagccagctgctagctgaccacactaacagccctaacaagaagtttcatcagtgagc

SEQ ID NO: 139376 - DNA, 201 bp, Homo sapiens; identical to SEQ ID NO: 24805

SEQ ID NO: 139377 - DNA, 201 bp, Homo sapiens; identical to SEQ ID NO: 24806

SEQ ID NO: 139378 - DNA, 201 bp, Homo sapiens; identical to SEQ ID NO: 24807

SEQ ID NO: 139379 - DNA, 201 bp, Homo sapiens; identical to SEQ ID NO: 24808

SEQ ID NO: 139380 - DNA, 201 bp, Homo sapiens
gtggatgcctgtaatcccagctactctggaggctgaggcaggagaattgcttgaacctcggaggtggaggttgcagtgagccaagatcacaccactgcackccagcctgggcaacagagtgagactccatctcaaaaaaaaaaaaagaaaaaattgaagcccggcatgatgcttgtaatcccagcaatccacttgagttat

SEQ ID NO: 139381 - DNA, 201 bp, Homo sapiens; identical to SEQ ID NO: 24809

SEQ ID NO: 139382 - DNA, 201 bp, Homo sapiens
ttaccttcaacatgagatttggcggggacacagcaaaaccgtatcactggaatgacaggcactccaccatgcctggctaaattttttttttttttttttttaatatggggtcttgctgtgttgctcaggggtctcaaactcctgggctccagtcatcttcccaccttggcgtcccaaagtactgggatttacaggcatgaa

SEQ ID NO: 139383 - DNA, 201 bp, Homo sapiens
catggcccagtggctgagcaccttgcccatccacaacttcagtgccaccgctctcacggcaggtggcacgggcgccaaggtaggggcacagtcccagcagkgctcagcagaacacaggcccacattgttcccattgtacagaggagtgagctgaggcacagagaagtgtgtcacttccccgcaaggccacacagctgctgc

SEQ ID NO: 139384 - DNA, 201 bp, Homo sapiens
agggacccaccttccgtcacccgttctgctttgtttacagggtgtgtccgcagccggccaggtggtatccctgaaggtgtggctgattgacgacattctaraaaagatcaacagccaccttccctctcacattcggattctgggtaagccttgcagtgcaggcggccacacacctggttgtagatggtcttgcagagacac

SEQ ID NO: 139385 - DNA, 201 bp, Homo sapiens
cccttggctttccctgcgcaggttcctgacctggttaagagaatgaccgagaacaaacaccagactctgctcctgatgagggagtggtgggggcaaggctyctgtgccaagcctgtcatgggcccctgtgggcatccaggagcagtggagagagtgcttgcctcttattctccatgtggtcttcttctgcaggtgcccagt

SEQ ID NO: 139386 - DNA, 201 bp, Homo sapiens
cacggcatgcaggtgtggccgcccgggaagcggcaggtcccgcggggtttaggtgcaggtgcggccgccggggaagcggtgggtccggctgggtttaggtkcaggagcggtcgcccaggtagcggcgggtccggcaggatttaggtgcaggcccaagcagctttcactgctcctgctgcacgcgagctcctgctgctttcc

SEQ ID NO: 139387 - DNA, 201 bp, Homo sapiens
gcttgcctcttattctccatgtggtcttcttctgcaggtgcccagtcccctggaaggcagtgaaggggacggagacactgactgaggcgatgggagctgcycaccagagtgcctctgagcagctcacagtgtgtgcccagatgtgccacccctgtgggcagcaagaagctgggatcgctgcagccatgttttcccggccat

SEQ ID NO: 139388 - DNA, 201 bp, Homo sapiens
ggcattacaggcatgagctgctatgcccagcccacagcctgattattttaagattcatccgtgctgttgtgtatgtcagcagtctgttccttctcattgcygcggggtgttctgttctgtgggtgtgccacggattgtttatacagttacctgctgaaggacattggatgatttctagttttgggctgttagaagtaaagc

SEQ ID NO: 139389 - DNA, 201 bp, Homo sapiens
tgctgtggactccactgatgagaggcatatatacttccgaggcacctgcatttgttgagtttccaaatggccccattttattttcccctgtggtcagtgcracctgtgaggatgtgaaggagcccaacaaaggcccctctagtgtccccagcccttggctttccctgcgcaggttcctgacctggttaagagaatgaccga

SEQ ID NO: 139390 - DNA, 201 bp, Homo sapiens
tcatgtgcggagacaagagatcgtagaaaaataaagatacgagacaaagagatagaaggaaagacagctgggtccaggggaccactaccaccaatgggccraacctgatagtggccccaaatgcctggacgcactgctatttattgtatacaaggcaaggggacagggtaaggagcgtgtgtcatctcaagtgattgataa

SEQ ID NO: 139391 - DNA, 201 bp, Homo sapiens
aggggcacagtcccagcagtgctcagcagaacacaggcccacattgttcccattgtacagaggagtgagctgaggcacagagaagtgtgtcacttccccgmaaggccacacagctgctgcaggagcaggggcaggcggtcttgagatgttccttgtctgcatgcctgcgccacccacttgctcccccacggggtgcttttc

SEQ ID NO: 139392 - DNA, 201 bp, Homo sapiens
cctgtgcctgttccccagcctgtggctgccccctccccagagaagccgatgcttgctggagcttggtcggtgctctgggtaaggagacgctggggctcacrccgtgctcaggctgctccctggtcatccaggcacttctcacctgcctttctcctccctgaccacctcccccctaggactgaagcgggtcacgggcgggtt

SEQ ID NO: 139393 - DNA, 201 bp, Homo sapiens
cccctccccagagaagccgatgcttgctggagcttggtcggtgctctgggtaaggagacgctggggctcacgccgtgctcaggctgctccctggtcatccrggcacttctcacctgcctttctcctccctgaccacctcccccctaggactgaagcgggtcacgggcgggtttaactccaagaacagatgtgatgccagga

SEQ ID NO: 139394 - DNA, 201 bp, Homo sapiens
gccacacctggaatcctagcacttcgggaggggaggcgggaggatcgcttgagctcagcagttcgagatctgcctgggcaacatagtgggccggtctcttaaaaaaaaaaaaaaaaaaaaaggccgggcgcgtggctcacgcttgtaatcccagcactttgggaggccgaggaaggcggatcacgaggtcaggatatcgag

SEQ ID NO: 139395 - DNA, 201 bp, Homo sapiens
cagccttcaaggaggagcacatctaccccaccatcatcggcaccgagcgggacgaacgctccatggcccagtggctgagcaccttgcccatccacaacttyagtgccaccgctctcacggcaggtggcacgggcgccaaggtaggggcacagtcccagcagtgctcagcagaacacaggcccacattgttcccattgtaca

SEQ ID NO: 139396 - DNA, 201 bp, Homo sapiens
ccacacctggaatcctagcacttcgggaggggaggcgggaggatcgcttgagctcagcagttcgagatctgcctgggcaacatagtgggccggtctcttaaaaaaaaaaaaaaaaaaaaaggccgggcgcgtggctcacgcttgtaatcccagcactttgggaggccgaggaaggcggatcacgaggtcaggatatcgaga

SEQ ID NO: 139397 - DNA, 201 bp, Homo sapiens
tgtatttatttttatttctgctgttattagagagatggtttcattctaatacgttttctcacttgtatggggaaacctgcagaagtaaatccatgaggccrgcacggtcacacccgagtgccctgcccttcagatgaaaacacagtaacagtttaacatttttgttatttatttattcatttatttttgagacggagtttc

SEQ ID NO: 139398 - DNA, 201 bp, Homo sapiens; identical to SEQ ID NO: 24825

SEQ ID NO: 139399 - DNA, 201 bp, Homo sapiens; identical to SEQ ID NO: 24826

SEQ ID NO: 139400 - DNA, 201 bp, Homo sapiens; identical to SEQ ID NO: 24827

SEQ ID NO: 139401 - DNA, 201 bp, Homo sapiens; identical to SEQ ID NO: 24828

SEQ ID NO: 139402 - DNA, 201 bp, Homo sapiens; identical to SEQ ID NO: 24829

SEQ ID NO: 139403 - DNA, 201 bp, Homo sapiens; identical to SEQ ID NO: 24830

SEQ ID NO: 139404 - DNA, 201 bp, Homo sapiens; identical to SEQ ID NO: 24831

SEQ ID NO: 139405 - DNA, 201 bp, Homo sapiens; identical to SEQ ID NO: 24832

SEQ ID NO: 139406 - DNA, 201 bp, Homo sapiens
gattgacccaaatttgcaatcaactctataaaatagaatctctactacaatgccttaatcaaataggggtgaggcatggtggctcacacctgtaatcccarcactttgggaggccgaggtgggcagattacctgaggtcgggggttcgagaccagcctgaccaacatgaagaaatcccaactctactaaaaatacaaaatt

SEQ ID NO: 139407 - DNA, 201 bp, Homo sapiens; identical to SEQ ID NO: 24833

SEQ ID NO: 139408 - DNA, 201 bp, Homo sapiens; identical to SEQ ID NO: 24834

SEQ ID NO: 139409 - DNA, 201 bp, Homo sapiens; identical to SEQ ID NO: 24835

SEQ ID NO: 139410 - DNA, 201 bp, Homo sapiens
cctcaagaaacttacaatcatagcagaaggggaggcaaacacatccttcttcacctggtggtaggaaggagaagtgcccagcgaagggggaaaagcccctyatagaaccatcagatcttgtgagaactcactcactatcactagaacagcgtgggggtaactgcccccatgatttaattacctcccactgggtccttccac

SEQ ID NO: 139411 - DNA, 201 bp, Homo sapiens; identical to SEQ ID NO: 24836

SEQ ID NO: 139412 - DNA, 201 bp, Homo sapiens; identical to SEQ ID NO: 24837

SEQ ID NO: 139413 - DNA, 201 bp, Homo sapiens; identical to SEQ ID NO: 24838

SEQ ID NO: 139414 - DNA, 201 bp, Homo sapiens; identical to SEQ ID NO: 24839

SEQ ID NO: 139415 - DNA, 201 bp, Homo sapiens; identical to SEQ ID NO: 24840

SEQ ID NO: 139416 - DNA, 201 bp, Homo sapiens; identical to SEQ ID NO: 24841

SEQ ID NO: 139417 - DNA, 201 bp, Homo sapiens; identical to SEQ ID NO: 24842

SEQ ID NO: 139418 - DNA, 201 bp, Homo sapiens; identical to SEQ ID NO: 24843

SEQ ID NO: 139419 - DNA, 201 bp, Homo sapiens; identical to SEQ ID NO: 24844

SEQ ID NO: 139420 - DNA, 201 bp, Homo sapiens; identical to SEQ ID NO: 24845

SEQ ID NO: 139421 - DNA, 201 bp, Homo sapiens; identical to SEQ ID NO: 24846

SEQ ID NO: 139422 - DNA, 201 bp, Homo sapiens; identical to SEQ ID NO: 24847

SEQ ID NO: 139423 - DNA, 201 bp, Homo sapiens; identical to SEQ ID NO: 24848

SEQ ID NO: 139424 - DNA, 201 bp, Homo sapiens; identical to SEQ ID NO: 24849

SEQ ID NO: 139425 - DNA, 201 bp, Homo sapiens
tattgctggcagttcttacattcaacagcagcaaaactaggtcagccttgatgagagggaatgtatgcttctgggcacaggcatggcttccttctctgacyccatgactatctatttctgagtgcatggtggccgacattcagctgcctgcccatcctatccacttggttattattgcctcttccacaagaagtggtttct

SEQ ID NO: 139426 - DNA, 201 bp, Homo sapiens
agcccgactgctcccatccccctccctgtgcaggtagagcagatcctggcagagttccagctgcaggaggaggacctgaagaaggtgatgagacggatgcmgaaggagatggaccgcggcctgaggctggagacccatgaagaggccagtgtgaagatgctgcccacctacgtgcgctccaccccagaaggctcaggtacc

SEQ ID NO: 139427 - DNA, 201 bp, Homo sapiens
atccccctccctgtgcaggtagagcagatcctggcagagttccagctgcaggaggaggacctgaagaaggtgatgagacggatgcagaaggagatggaccrcggcctgaggctggagacccatgaagaggccagtgtgaagatgctgcccacctacgtgcgctccaccccagaaggctcaggtaccacatggtaaccggct

SEQ ID NO: 139428 - DNA, 201 bp, Homo sapiens
tggtcagcttagactgccataagagaataccatccactgatggcttagaaacaacagaaatctatttctcactattctagaggctggacgtccaagatcasatgccagcatggtcaggttgcagggagggctctcttcctgacttgcagaccgccaccttcttgctgtgtcctcacatcgtggagagagagtgaaaacaag

SEQ ID NO: 139429 - DNA, 201 bp, Homo sapiens
ccccctccctgtgcaggtagagcagatcctggcagagttccagctgcaggaggaggacctgaagaaggtgatgagacggatgcagaaggagatggaccgcrgcctgaggctggagacccatgaagaggccagtgtgaagatgctgcccacctacgtgcgctccaccccagaaggctcaggtaccacatggtaaccggctcc

SEQ ID NO: 139430 - DNA, 201 bp, Homo sapiens
cggtggccacgatgatctcctgctactacgaagaccatcagtgcgaggtcggcatgatcgtgggtaagggctccttgcacccctgccccttccagactgcygaggctccctgtgtacaacaggcttcaagggccctgtggggtgaggaccaaactacttaacaaccggtgatgtcagagcagagcctggtgctacagcctg

SEQ ID NO: 139431 - DNA, 201 bp, Homo sapiens
aaacacatgtaaaaatatactggaatgaattaaggttgcaattattgatatcaggcagtgagtacatcagggtttattatactatctcctttacttacttygaagttctctattaccaaaaaattaaaaactataaaagaaagaaaaaggaaatgaggctagattcaacacagattactcttaccaaacccttcgtagtcc

SEQ ID NO: 139432 - DNA, 201 bp, Homo sapiens
gctgaggcatgagaatcacttgaacccgggaggcagaggttgcagcgagccaagatcacaccactgcactccagcctggataacaaacggagattccattwaaaaaaattaacatataatatacatacagtaacattcactttttaagtgtacagtttgatgagttttatcaaatgtatatggttatataaccaccatcac

SEQ ID NO: 139433 - DNA, 201 bp, Homo sapiens
ctctgtctttgtcttttgacaatttgactataatgtgtttcagtgtgaatttcttagagtttatcccacttggatttcattgagcttcttggatgtgtacrtttgtctttcaccaaatctgggaaattatttcaccatttctcaaatatctttttcttcccctttccatctctcttcttctggagctcccgtatacttagt

SEQ ID NO: 139434 - DNA, 201 bp, Homo sapiens
ctgcaatgcctgctacatggaggagatgcagaatgtggagctggtggagggggacgagggccgcatgtgcgtcaataccgagtggggcgccttcggggacyccggcgagctggacgagttcctgctggagtatgaccgcctggtggacgagagctctgcaaaccccggtcagcagctgtaaggatgcccccctcccccaca

SEQ ID NO: 139435 - DNA, 201 bp, Homo sapiens; identical to SEQ ID NO: 24891

SEQ ID NO: 139436 - DNA, 201 bp, Homo sapiens
accctcgaccaccgactgcgacatcgtgcgccgcgcctgcgagagcgtgtctacgcgcgctgcgcacatgtgctcggcggggctggcgggcgtcatcaacygcatgcgcgagagccgcagcgaggacgtaatgcgcatcactgtgggcgtggatggctccgtgtacaagctgcaccccaggtgagcccgccccgctctctc

SEQ ID NO: 139437 - DNA, 201 bp, Homo sapiens
cttccagactcacgggatcctctgctcatcagaacaggagtgtgggagaccctgagacactgccccaggatctgaacaggtggcaaaggcttaacaggctrgcggtcactgtagtgacaaggcgattgagtggtcaccatggtgatggggatggaggctctttgccaccagtcccagttttatgcatggcagctctaatga

SEQ ID NO: 139438 - DNA, 201 bp, Homo sapiens
agcgacactcagcgaccgccctacctcctcccgccccgcagcgacacgggcgaccgcaagcagatctacaacatcctgagcacgctggggctgcgaccctmgaccaccgactgcgacatcgtgcgccgcgcctgcgagagcgtgtctacgcgcgctgcgcacatgtgctcggcggggctggcgggcgtcatcaaccgcatg

SEQ ID NO: 139439 - DNA, 201 bp, Homo sapiens; identical to SEQ ID NO: 24980

SEQ ID NO: 139440 - DNA, 201 bp, Homo sapiens
ctacctcctcccgccccgcagcgacacgggcgaccgcaagcagatctacaacatcctgagcacgctggggctgcgaccctcgaccaccgactgcgacatcrtgcgccgcgcctgcgagagcgtgtctacgcgcgctgcgcacatgtgctcggcggggctggcgggcgtcatcaaccgcatgcgcgagagccgcagcgagga

SEQ ID NO: 139441 - DNA, 201 bp, Homo sapiens
agagcagatcctggcagagttccagctgcaggaggaggacctgaagaaggtgatgagacggatgcagaaggagatggaccgcggcctgaggctggagaccyatgaagaggccagtgtgaagatgctgcccacctacgtgcgctccaccccagaaggctcaggtaccacatggtaaccggctcctcatccagaagcagctgt

SEQ ID NO: 139442 - DNA, 201 bp, Homo sapiens
gagcagatcctggcagagttccagctgcaggaggaggacctgaagaaggtgatgagacggatgcagaaggagatggaccgcggcctgaggctggagacccrtgaagaggccagtgtgaagatgctgcccacctacgtgcgctccaccccagaaggctcaggtaccacatggtaaccggctcctcatccagaagcagctgtg

SEQ ID NO: 139443 - DNA, 201 bp, Homo sapiens
acagtggcatgtgagtgaaccaccttcttaggctgggcatccagtctcagactctggggctgcccatgccccatcctttatctgctccacgtgtgaggggktgctggtcctgaccagggccagctgtgaaccccagaatcctgggaagtcactgacattcttgtcagggccaagagtggagcaaggcaatgcctcgggcac

SEQ ID NO: 139444 - DNA, 201 bp, Homo sapiens
tgcagtggctcacccctgtaacttcaacactttgggaggccaaagcaggcggatctcttgaggccaggagtttgagaccagcctgcccaacatggtgaaaycccgtctctactaaaaatacaaaaattatccaggcatggtggcacattcctgtagttccagctactcgggaggctgaggcataagaattgcttgaacccg

SEQ ID NO: 139445 - DNA, 201 bp, Homo sapiens
cttttctccacccagtctacccctcttctagtgcctggatcgcagggtgccaaggcctggatgagggaagcgtggagctgcaatggccactcctgtctgcytgttctggctgcacagaggactcagtccttgtcttgggggaacctatcttggttttagggtcatcctaaggatctgatgttttccaagtgagctggctgt

SEQ ID NO: 139446 - DNA, 201 bp, Homo sapiens
ctcagctgagccaggcctttggaggcagcccaggcatgtcccctgtgtgctcctatccctgtgttgggacacctggcccagcccctccttctgcctttctyttcccttcccttctcaggagtggacacttcctcctttagccccctcacagctgtgtgaacttctctgtatctctctctttctgtctctttctccccctct

SEQ ID NO: 139447 - DNA, 201 bp, Homo sapiens
gaagtcggggacttcctctccctggacctgggtggcactaacttcagggtgatgctggtgaaggtgggagaaggtgaggaggggcagtggagcgtgaagamcaaacaccagatgtactccatccccgaggacgccatgaccggcactgctgagatggtgagcagcgcaggggccggggcagggggccaaggccatgcagga

SEQ ID NO: 139448 - DNA, 201 bp, Homo sapiens
cccaagccagtgtttgaccttggagcaatgagcaatgccctccttccactttcaaagttgtccccaagacgtcagctgtggttgtctctgtgcagacaccsaggaggaactgtcttctttctccttttggttgctttggaggaaagtaaagtgttgctggtttccctctttctacttctttgattgagagcagccgtcttg

SEQ ID NO: 139449 - DNA, 201 bp, Homo sapiens
ggcagttcttacattcaacagcagcaaaactaggtcagccttgatgagagggaatgtatgcttctgggcacaggcatggcttccttctctgactccatgaytatctatttctgagtgcatggtggccgacattcagctgcctgcccatcctatccacttggttattattgcctcttccacaagaagtggtttctggctgtc

SEQ ID NO: 139450 - DNA, 201 bp, Homo sapiens
agtgggagggtgctctcaggatgagatggggtagaaataggcaaaggtacagattcagcagcagttgagcctcagtctgacccagcagggagctctcaaaygtgaatgacatcacagagttgtccctctgaggcaggggccagcctttgtgctcctacatgagtcagtcactggctggaggcccctggggaaaggctaggg

SEQ ID NO: 139451 - DNA, 201 bp, Homo sapiens
ctcatctaaacctaattatctcccaaaggtctcatctccagataccatcacactggggttagggctttgacatatgaatctggggggacacaattcaatcygtaacaccaggagggcatgccgggaggaactgaccttcctccctccagctgccctggacacctttgccccattgaaggagcaggctcagaagtggaatga

SEQ ID NO: 139452 - DNA, 201 bp, Homo sapiens
ggccagcgcacccccccatgccagatggtcaccatggcgtgcatcttccagctcttcgactacatctctgagtgcatctccgacttcctggacaagcatcmgatgaaacacaagaagctgcccctgggcttcaccttctcctttcctgtgaggcacgaagacatcgataaggtgggccgggtggaggggcagaaggcagat

SEQ ID NO: 139453 - DNA, 201 bp, Homo sapiens
ttcatggttattcatttataaatggtctgtaatgcaatgcagatttcccctttggcccaaatgccatttacagcagcacttttctctttctgagcagacaraatattttggtttcccctctgttgtttatttctcgtctgcctcgcctcatttgctaggtgttcccttggtgtgccttaagtatgagccactcaaatattt

SEQ ID NO: 139454 - DNA, 201 bp, Homo sapiens
aaggacatgcatgtggttcaccctcccaggaaatccagaagggcagcattggcctgagtggcctgagtttggctggttgggctggtaatgctggacaaagrcaatgggtggaatggtttgcttccctcagtcctttcagacacagcccagcccaccacgtcaagccagtgggtgcatctgcaaccaatccccatgagaact

SEQ ID NO: 139455 - DNA, 201 bp, Homo sapiens
cccaagcaggtgtgctgggaggaggggcccgtgtgggaggagcaggcagcgccaaggcctagcggagcagtgacaggtccctgacttcagggaatgggcasgctgtgggcaggcagctggtgtgggggtgagggctggggctgcatctgtgggaccagggctgggccatccatcatatgccgtgtcacaaccccagtgccc

SEQ ID NO: 139456 - DNA, 201 bp, Homo sapiens
ggccctagcaccctgcctccagtatatgttagcagccacgaggcctatctctccccacagggcatccttctcaactggaccaagggcttcaaggcctcagragcagaagggaacaatgtcgtggggcttctgcgagacgctatcaaacggagaggggtgagggggcacctgtacctgccgggggggctgccctgggccacc

SEQ ID NO: 139457 - DNA, 201 bp, Homo sapiens
cccaggcacgggctgcaatgcctgctacatggaggagatgcagaatgtggagctggtggagggggacgagggccgcatgtgcgtcaataccgagtggggcrccttcggggactccggcgagctggacgagttcctgctggagtatgaccgcctggtggacgagagctctgcaaaccccggtcagcagctgtaaggatgccc

SEQ ID NO: 139458 - DNA, 201 bp, Homo sapiens
ccctagcaccctgcctccagtatatgttagcagccacgaggcctatctctccccacagggcatccttctcaactggaccaagggcttcaaggcctcaggakcagaagggaacaatgtcgtggggcttctgcgagacgctatcaaacggagaggggtgagggggcacctgtacctgccgggggggctgccctgggccaccca

SEQ ID NO: 139459 - DNA, 201 bp, Homo sapiens
caccctgcctccagtatatgttagcagccacgaggcctatctctccccacagggcatccttctcaactggaccaagggcttcaaggcctcaggagcagaasggaacaatgtcgtggggcttctgcgagacgctatcaaacggagaggggtgagggggcacctgtacctgccgggggggctgccctgggccacccaccccag

SEQ ID NO: 139460 - DNA, 201 bp, Homo sapiens
gtgtaacctcgtctctactaaaaatacaaaaattagctgggtgtgatggcgcatgcctgtaatcccaggtactcaggagactgaggcaggagaattgcttraaccctggaggcagaggttgcagtgagccaagatcacgccactgcactccagcctgggtgatggagtgagtgagactctgtctccaaataaataaataaa

SEQ ID NO: 139461 - DNA, 201 bp, Homo sapiens
tggaggcagaggttgcagtgagccaagatcacgccactgcactccagcctgggtgatggagtgagtgagactctgtctccaaataaataaataaataaataaaaactggaagtctaagcatcactgagccctgattcctatgtggcagctcgactgaccagcatttgagttgctgtccctgacagctttgggggtgtgcag

SEQ ID NO: 139462 - DNA, 201 bp, Homo sapiens
gatgcagaaggagatggaccgcggcctgaggctggagacccatgaagaggccagtgtgaagatgctgcccacctacgtgcgctccaccccagaaggctcargtaccacatggtaaccggctcctcatccagaagcagctgtgggctcagccctagctgggagaagcaccccaggcactcccagactcacagccagcccgag

SEQ ID NO: 139463 - DNA, 201 bp, Homo sapiens
accttgcctcagtttaaattttacatgtggggcctcattaagagacatggttcttaactaaagatctgtatccattaggaatgctttgggctgcaggaagmcaaacacctgactcactgtggcataagtggtttgcgtctgctcccataagctgcacgtggagggtggatctggcattactctctcttccctacatttgca

SEQ ID NO: 139464 - DNA, 201 bp, Homo sapiens
gactgctcccatccccctccctgtgcaggtagagcagatcctggcagagttccagctgcaggaggaggacctgaagaaggtgatgagacggatgcagaagragatggaccgcggcctgaggctggagacccatgaagaggccagtgtgaagatgctgcccacctacgtgcgctccaccccagaaggctcaggtaccacatg

SEQ ID NO: 139465 - DNA, 201 bp, Homo sapiens
cccagccctgccaaagtctccagagcagctgtccagctggggagctgcggggccccttcacagagcgcatgggaagaagttccatcctacacattacatcragagggacgtgcctgagaaggggagctggagcccgtgcagccccctgcttgcgtgcagaacatagtgtaccctgagcatgccatgaaaaacacaaacgca

SEQ ID NO: 139466 - DNA, 201 bp, Homo sapiens
tacccaggcagcaaggacccctgaccatggggaggactggggtgcagggaacatagaagcagaatgaggcctagggggagttgggcaaggccagagccctrgctgcagccaagcacatggccaaggccagctcctggaagggcagggctccgaagcaggaggcaggaggctgcccgtggctacccgtcctcacacccctgc

SEQ ID NO: 139467 - DNA, 201 bp, Homo sapiens
gctgcgcacatgtgctcggcggggctggcgggcgtcatcaaccgcatgcgcgagagccgcagcgaggacgtaatgcgcatcactgtgggcgtggatggctycgtgtacaagctgcaccccaggtgagcccgccccgctctctccctggtaaagtggggcccaaaaagcgcgcgctccaaggttccttgcggttcccaagct

SEQ ID NO: 139468 - DNA, 201 bp, Homo sapiens
gcctgcacagtaggaagggaaaacatgatttgtatctgttttaggtcaggttcccaagaagtagagcctgagattggaattcttggaaaatggtgtttgcrggagcgctgtcagcagaagctataaggaagttggggggacagaaaacgagaggtaagaagccagtcaaaaaggcaggtccagcttaagtccgcctcagtc

SEQ ID NO: 139469 - DNA, 201 bp, Homo sapiens
cctgagtggcctgagtttggctggttgggctggtaatgctggacaaagacaatgggtggaatggtttgcttccctcagtcctttcagacacagcccagccmaccacgtcaagccagtgggtgcatctgcaaccaatccccatgagaactgcagcctctcagaggtgggcaagttggcccgggtgggtcaggaggatcagat

SEQ ID NO: 139470 - DNA, 201 bp, Homo sapiens
acaaagtgaataagcaggtgcaccctccaaaactctactaagaggatttcttctccccagtgtctttcagggccaccttgagtggggctgaagtacagcakaagtccatttccagcttgcatcaacattccaaactaacctatccatgatcaatgcatagatgggtttttccctcctccagcagctagacaaaagacaccc

SEQ ID NO: 139471 - DNA, 201 bp, Homo sapiens
ccagggctccaagctgcagttcaggaggggcactggcacggcctctgctcaactcccccttgagtgacatcaggtgaagtgccgacaacacagaaggcagyaaatgctgccagtcaggtctgcttcccaggacagccagttgctaacccttctccagcacagcactggattttggtcacctggctgggagctccacctccc

SEQ ID NO: 139472 - DNA, 201 bp, Homo sapiens
gagaggcacaggggccaatattcgtgcaacagtggtagatggcaggtgggtctgggccacctgtccctgcagcttatctgtgccatctggacctgctcaarcctgattccagatataccatttccatcttatgatggatggcttatgacctagtgggtctgacagcaccaaactcataatgggcagttatggccacatggt

SEQ ID NO: 139473 - DNA, 201 bp, Homo sapiens
tgctatgaaatcactatcaaaagatctgagtgttacccttactcagtgtggtcgaatataaatagccataggttcctgttatacacacttgctgtggtgcyacagagtctttcctcatgggaacccagtccctctttcagtcaatgggttctggttcgagaactggctgaggtttggaaactgtgcctttccatcataact

SEQ ID NO: 139474 - DNA, 201 bp, Homo sapiens
aaaagagttgtctcccatcaactctggtctacaaaggacagccctactgagcctcagccatgtgcccgacaccagcagattctttacagcctgggaagcaragtgtcttccctgcctttccagggaacatagccagcttacaggctttttgatcttatagagtaggtcagttatattttgccccatttcttttatcctttt

SEQ ID NO: 139475 - DNA, 201 bp, Homo sapiens
tatatttggagagttttgtgatattggggggattagatggagttttcagatgggcatcatacggtttttcatttaaaaccctagagtattgtaatcctagrgagtgatcctgcgattagtaaattagctctccaatagattttcaatgtggttgcaaaggacatgcatgtggttcaccctcccaggaaatccagaagggca

SEQ ID NO: 139476 - DNA, 201 bp, Homo sapiens
taacccttctccagcacagcactggattttggtcacctggctgggagctccacctccccagctgctgcctcacctgcttttccaaaccccaccctgtaaayggtaactacattttgtgcccactacgcctcgtttccatctctttggagcacctctcacgtggagctgaacagaacgacctgttaagcccaccgtgtctgt

SEQ ID NO: 139477 - DNA, 201 bp, Homo sapiens
ttttctttgttgggaggttttttagtactaattccatttccttacttgttattagtctaatgagattttctgtttcttcttgagctagttgtagtagctcrtgtgtggaatttttctatttcatctaagttatccaagtttacctaagttaaagttccattttatctaacttgggtaagccaacaaacaatactaaattgt

SEQ ID NO: 139478 - DNA, 201 bp, Homo sapiens
gaaaccacagggtcttttctggcttaggctccaaagtcatactccaccatttctgcattatcatattagttacacaggctagacctattctgcatggaagrgactataccatggggtgaataccagaagcagggctaattgaaggccagcttcaagggcggctacacattccctttcaacagtatgtcatgaacatctttc

SEQ ID NO: 139479 - DNA, 201 bp, Homo sapiens
gtaggactagcatcaaagagtctatgccacctagtctgtctccttaaaacacagaaataatcagtatgcattggggtaggagtttggcattagatctgccrtaaatcaagagctggggacagcccatgtcttaaactctgacccaagggctaaaatatcctttggtagcaacaacagctacaaactattgaacaacttgta

SEQ ID NO: 139480 - DNA, 201 bp, Homo sapiens
tgacagtccccccgacctccaccccaggcacgggctgcaatgcctgctacatggaggagatgcagaatgtggagctggtggagggggacgagggccgcatrtgcgtcaataccgagtggggcgccttcggggactccggcgagctggacgagttcctgctggagtatgaccgcctggtggacgagagctctgcaaaccccg

SEQ ID NO: 139481 - DNA, 201 bp, Homo sapiens
caatgcctgctacatggaggagatgcagaatgtggagctggtggagggggacgagggccgcatgtgcgtcaataccgagtggggcgccttcggggactccrgcgagctggacgagttcctgctggagtatgaccgcctggtggacgagagctctgcaaaccccggtcagcagctgtaaggatgcccccctcccccacaacc

SEQ ID NO: 139482 - DNA, 201 bp, Homo sapiens
atgaggggccctccctcgtgcctgctgatgtaatggacctgccctatgtccaggtatgagaagctcataggtggcaagtacatgggcgagctggtgcggcytgtgctgctcaggctcgtggacgaaaacctgctcttccacggggaggcctccgagcagctgcgcacacgcggagccttcgagacgcgcttcgtgtcgcag

SEQ ID NO: 139483 - DNA, 201 bp, Homo sapiens
ggaggcgagggcggggcagggacgggtccaagggcaggaggctgggacaggacggggatgcaaagggaggggcggggcccgagacggggaggagggggagsgcccaaggggaggaggcggggtccggacggggatgccaagagcagggatgggagcgagcctgcgtccgggcactggtccccatccgtgagtcccctcggt

SEQ ID NO: 139484 - DNA, 201 bp, Homo sapiens; identical to SEQ ID NO: 24922

SEQ ID NO: 139485 - DNA, 201 bp, Homo sapiens
agggacggcagccctgcttctcttctgcccagcttcaaggagcggttccatgccagcgtgcgcaggctgacgcccagctgcgagatcaccttcatcgagtsggaggagggcagtggccggggcgcggccctggtctcggcggtggcctgtaagaaggcctgtatgctgggccagtgagagcagtggccgcaagcgcaggga

SEQ ID NO: 139486 - DNA, 201 bp, Homo sapiens
aatatccgggctcagtcacctggggcccacccagcccaaggccagcctgtgggtgtccctgaggctgacacacttctctctgtgcctttagaagtcggggrcttcctctccctggacctgggtggcactaacttcagggtgatgctggtgaaggtgggagaaggtgaggaggggcagtggagcgtgaagaccaaacaccag

SEQ ID NO: 139487 - DNA, 201 bp, Homo sapiens
gtgatgctggtgaaggtgggagaaggtgaggaggggcagtggagcgtgaagaccaaacaccagatgtactccatccccgaggacgccatgaccggcactgmtgagatggtgagcagcgcaggggccggggcagggggccaaggccatgcaggatctcagggcccagctagtcctgacgggaggtgccacctgtctaccagg

SEQ ID NO: 139488 - DNA, 201 bp, Homo sapiens
gcagtgtccctgaggaatagcttggcttgaggccgtggggagggctgccggccagcgcacccccccatgccagatggtcaccatggcgtgcatcttccagstcttcgactacatctctgagtgcatctccgacttcctggacaagcatcagatgaaacacaagaagctgcccctgggcttcaccttctcctttcctgtgag

SEQ ID NO: 139489 - DNA, 201 bp, Homo sapiens
cgactacatctctgagtgcatctccgacttcctggacaagcatcagatgaaacacaagaagctgcccctgggcttcaccttctcctttcctgtgaggcacraagacatcgataaggtgggccgggtggaggggcagaaggcagatgaggggaggcacaggcaccccagaggaactctgccttcaaatgtagcccccatacc

SEQ ID NO: 139490 - DNA, 201 bp, Homo sapiens
tacatctctgagtgcatctccgacttcctggacaagcatcagatgaaacacaagaagctgcccctgggcttcaccttctcctttcctgtgaggcacgaagmcatcgataaggtgggccgggtggaggggcagaaggcagatgaggggaggcacaggcaccccagaggaactctgccttcaaatgtagcccccataccatgt

SEQ ID NO: 139491 - DNA, 201 bp, Homo sapiens
tacttttatggccctgtgcaggaggtagtgacaggccctagcaccctgcctccagtatatgttagcagccacgaggcctatctctccccacagggcatccytctcaactggaccaagggcttcaaggcctcaggagcagaagggaacaatgtcgtggggcttctgcgagacgctatcaaacggagaggggtgagggggcac

SEQ ID NO: 139492 - DNA, 201 bp, Homo sapiens
ccctgtgcaggaggtagtgacaggccctagcaccctgcctccagtatatgttagcagccacgaggcctatctctccccacagggcatccttctcaactggmccaagggcttcaaggcctcaggagcagaagggaacaatgtcgtggggcttctgcgagacgctatcaaacggagaggggtgagggggcacctgtacctgcc

SEQ ID NO: 139493 - DNA, 201 bp, Homo sapiens
cgaggcctatctctccccacagggcatccttctcaactggaccaagggcttcaaggcctcaggagcagaagggaacaatgtcgtggggcttctgcgagacrctatcaaacggagaggggtgagggggcacctgtacctgccgggggggctgccctgggccacccaccccagcactgcctgcctttctccttggcttccagc

SEQ ID NO: 139494 - DNA, 201 bp, Homo sapiens
ctctccccacagggcatccttctcaactggaccaagggcttcaaggcctcaggagcagaagggaacaatgtcgtggggcttctgcgagacgctatcaaacrgagaggggtgagggggcacctgtacctgccgggggggctgccctgggccacccaccccagcactgcctgcctttctccttggcttccagcactgcagctt

SEQ ID NO: 139495 - DNA, 201 bp, Homo sapiens
tctctccccacagggcatccttctcaactggaccaagggcttcaaggcctcaggagcagaagggaacaatgtcgtggggcttctgcgagacgctatcaaayggagaggggtgagggggcacctgtacctgccgggggggctgccctgggccacccaccccagcactgcctgcctttctccttggcttccagcactgcagct

SEQ ID NO: 139496 - DNA, 201 bp, Homo sapiens
tagcctgaaggctgaaagaccggactgctggtcccagatgaaacccatgatccagagtgagaacttccattcctgtttgcctgccctctaaataatccctkttaaccaatcgaatgttgccttttccaatactacctatggcctgcccctcccccattctgagcccataaaagccctggaatcagccacattgggggcact

SEQ ID NO: 139497 - DNA, 201 bp, Homo sapiens
tcgtgcctgctgatgtaatggacctgccctatgtccaggtatgagaagctcataggtggcaagtacatgggcgagctggtgcggcttgtgctgctcaggcycgtggacgaaaacctgctcttccacggggaggcctccgagcagctgcgcacacgcggagccttcgagacgcgcttcgtgtcgcaggtggagaggtgtgcg

SEQ ID NO: 139498 - DNA, 201 bp, Homo sapiens
cagcgtatcctcatttttcttgggtgtggtacaagaactcgggaaccagtgcacaagccagacttggtctgggcagcacgggttagtgggccatctcccayagcaggtagcatggccaagtgaggcctgggcagggcatcaccaaggtccctggcttgcaaagtgaccaaggaaaaaatcctgtgtcactttccttttctc

SEQ ID NO: 139499 - DNA, 201 bp, Homo sapiens
catctcccacagcaggtagcatggccaagtgaggcctgggcagggcatcaccaaggtccctggcttgcaaagtgaccaaggaaaaaatcctgtgtcacttwccttttctcatattttttagttattttcctaatgattgccttgaggatggcaattaacatcttacacttataagaagctagtttgaataatagttccaat

SEQ ID NO: 139500 - DNA, 201 bp, Homo sapiens
gtctttcaccaaatctgggaaattatttcaccatttctcaaatatctttttcttcccctttccatctctcttcttctggagctcccgtatacttagttggyatgactgatggtatcctactggtccctcaggttctgttcatttttcttctttctttttttctgctctgcagactggataacttcaatcgccttttcttca

SEQ ID NO: 139501 - DNA, 201 bp, Homo sapiens
atatttaagacagttgacttaatgtctttgactagtaattccaatgtctaaaattccttatggatagcttcttttaaattatttttgtcctgttagagagycatatcttcctctttatttgctttgtaatactttgttgaaaacttaacattttgagtagtaaaatgtggtaattctgaagccagattctccccctccttt

SEQ ID NO: 139502 - DNA, 201 bp, Homo sapiens
cctccccagcccgactgctcccatccccctccctgtgcaggtagagcagatcctggcagagttccagctgcaggaggaggacctgaagaaggtgatgagayggatgcagaaggagatggaccgcggcctgaggctggagacccatgaagaggccagtgtgaagatgctgcccacctacgtgcgctccaccccagaaggctc

SEQ ID NO: 139503 - DNA, 201 bp, Homo sapiens
gattgtaagactgtcactgatactcaccatcatgccccatccccaccatccattctagtgtccccttccccttggctaacactgctggtctaggtgacttscctagagcaggagccaaacccttatccctgaggcatctgaatcctggattcctttatcaggctattgttgttgtaagttgtccattcccaattacaactg

SEQ ID NO: 139504 - DNA, 201 bp, Homo sapiens; identical to SEQ ID NO: 24939

SEQ ID NO: 139505 - DNA, 201 bp, Homo sapiens
gagccctagatgtgggggttagggacatgaggtcttgtggacaaagcccactacctgattttgagacaacactcactagacatggtgacaagtcaaagatgccttgcctcctaccaggaatcacttcgcagggagcccgagggctgctgtggcctgctgaggagtgcagggcagttactttttccaaaaacaaagagaaat

SEQ ID NO: 139506 - DNA, 201 bp, Homo sapiens
aaagacctcactgctccccatgggcacttagggaactctcccagcccagttctgcagctgggccattgcactagatcctcagttggtccctgggctctcgktgactgtccagggcaggagtttcccattgacttttccctggttgacctttgaccccttccacagttgacactggtgtccccaggtgtctggtggcccctt

SEQ ID NO: 139507 - DNA, 201 bp, Homo sapiens
ctggagacaggggactttgctgtgaaacactggggggaatgtgcctgcatcaccccagctgggggcccaggcagagtgggggagaaggggtaagtgggcaragccagtcactttgggcatgcttccctctcgcctctgtgtgaaatgaccaggtcagcataaaccccgggctggctgtgcttctggcagagctaatgatgt

SEQ ID NO: 139508 - DNA, 201 bp, Homo sapiens
ctgggccattgcactagatcctcagttggtccctgggctctcggtgactgtccagggcaggagtttcccattgacttttccctggttgacctttgaccccytccacagttgacactggtgtccccaggtgtctggtggccccttgtccagctcccttagtcccttgtgccttccctcctcctctttgtaatatccgggctc

SEQ ID NO: 139509 - DNA, 201 bp, Homo sapiens
cgggctgaggaagagttagtggcaagaggaaccccagccagtcacaccttgtccagtttaccagaggaaaaaccaatgtgtaagaacagaaatgtgacccrgcagccagtgcactgcccccctctccaaaggccacccctcaccctccaccagcatgcacagaaagtggggtgacagcaatcacaatgtctacccaggcag
